United States Patent Application Publication US 2012/0023611 A1 - sequence listing, part 5

SEQ ID NO: 16361 - DNA, 157 bp, Zea mays
  Coding DNA Sequence Number=SeqID_1958
caaaggccgcgagataaaaggttgaggccgccgctcgtgaatggaaagccaagtacccgacatcgaagaccgacgaatgcgcggtggtctgcctatacctggacggcaagatggaccaggaacgcgactcgacgggggccatggaccacatcagcct

SEQ ID NO: 16362 - DNA, 267 bp, Zea mays
  Coding DNA Sequence Number=SeqID_1959
atgagccaagccgaattcgaaccgatcgtctacctcagcgtgtcgtcgcaggaggagctggtgccgctgtcgcaagcccgtgtcccggtgctcgaccgcgggttcatcttcggcgatggcgtgtatgaagtcgtccccgtttatgcgcacgacggcgcgcacgtgccgttccggatcgaacagcatctcgaccggctcgcgcgcagcctgaagaagatcggcatcgacaacccgcacgacgcggccggctggcgtgcgctgatcgag

SEQ ID NO: 16363 - DNA, 127 bp, Zea mays
  Coding DNA Sequence Number=SeqID_1960
gccgagatcatcgtaagcgccgctgccgaagttacccttgatagattgctcgtccttcttcgttctatggatggcctacacgtcatatagcgtcactttattttgactcgaacgaacgagtacacaa

SEQ ID NO: 16364 - DNA, 320 bp, Zea mays
  Coding DNA Sequence Number=SeqID_1961
gcctacgttgtctgtggagctctgtacggtctgcactacgacattcacgctgcgcaatctggcactgctggaacccccgaaggcgcacgcatggagcgtacgtacgctcacgctacgaagtattcagacgaagttgaacattcgtactctttcgttcaggttctcactgcctgcactgcctctttcgctcacggagccaacgatatcggcaactctgttggcccctgggccgttatctactccgcctggtcgactggcaacgccgcagcagccaaggcccccgtgcccgtctggcagctcgcagttctcgctctcgtcat

SEQ ID NO: 16365 - DNA, 480 bp, Zea mays
  Coding DNA Sequence Number=SeqID_1962
atctcacgggcggtcaactacatgctcaactacgtcccgacctacgcaactaaaaacctgcatctgccgggctcggtggcctttaccgccacgttgctggccggagtgattctgacggtggtgacgccgctgatgggatggtgggcggagcgcattggccgcctgccgctaatgtggggatcgctcatactgctgatggtcaccatctatccggcctttcggctggtggtcaatcacaccacgccggccacgctgattgtgctggtatgctggatggcgctgctgaaatcgatctatttttctaccgtaccctcggtgatggcggatctgttcccgattggtacgcgcgccagcggcatggccatcagctataacattgcggtcacggtgtttggcggttttgcgccgctgatttgcacgctgctgatcagcgctaccggcaccagtctggcgccgggctactacctgatggcgatgtcg

SEQ ID NO: 16366 - DNA, 466 bp, Zea mays
  Coding DNA Sequence Number=SeqID_1963
gctgctgtcgacagccgcacgtgaaccaccgcaacctggtgcagctgctgagcttctgcaagcagcctgggtaccttcccggactggatggtgacgtcacaggacaacggcagctcgctggtgctgaaccctcctccagctctaacctgaccgagttcttgcagttcagcctggggcaagtgagcctgatgcagtggtcagaggactctgcagcggcgaacacgaacagcagtggctgggtggctcgctggaccttcccctcggattgcaaatccaatggcttcttctgcggtagctttggtgcttgcaggagcaatggagaatgcagctgtgtcggcaaggaggtgcacttcttctacgacggcgacggtgaagaggagacgcacccgcaggccggcgacatccgccgcgtcctgagggacgtggagacgaggatgccggagcagcttgggtacaatgtcagcga

SEQ ID NO: 16367 - DNA, 191 bp, Zea mays
  Coding DNA Sequence Number=SeqID_1964
cacatcatctcctacaccaacggcatcatctcacgcatggtgttcggagggatcggctactacaacggtcccgacggcggcggcgagaagctcgcgaagttgttcgccgactttgaggggctcctggggacgtcaaccggtggcgggaaggttcgctgcctctggtctggctctgggtatcacagcgcatc

SEQ ID NO: 16368 - DNA, 169 bp, Zea mays
  Coding DNA Sequence Number=SeqID_1965
gggacccgggacaggcagccagcaagcaagcacgctcggcaaaagccggcaccctacaacggcgagacagggaaaacccaggggacacccaacggaagagagttgcaacacagcccccgcccgccagcaggcgacagagggaagaggacggcaccgagcgcccgaccga

SEQ ID NO: 16369 - DNA, 315 bp, Zea mays
  Coding DNA Sequence Number=SeqID_1966
atgctcgtgcgcatcgtcaacggcacgctgcgtccgaaggacaagatcaagatgatggcgaccggcgcgcagtatccggtcgagcatatcggcgtgttcacgccgaagtcgcgcaatctcgaatcgctgtcggccgggcaggtgggcttcatcatcgccggcatcaaggaactgacggccgcgaaggtcggcgacaccgtcacgcatgcggcgaaggccgcgaccgagccgctgccgggcttcaaggaagtgaagccgcaggtgttcgccggcctctatccggtcgaggcgaaccagtacgacgcgctgcgcgaa

SEQ ID NO: 16370 - DNA, 333 bp, Zea mays
  Coding DNA Sequence Number=SeqID_1967
tgcgcgggttcaagtggcacgacctgcggccggaccgcgcatatctcgacgacatcgagaacaaggagcgggtcaaggacaaggcccaggtcgacgcatcgatgaaaaagctctacctcgagctgatgccggccatggataaggtcaagggcaagatccgcatcacgggcacgccgctggccgagaattgcatgatcacgcgcctgcgcgagaacgcggactggaccagccgacgctacccgatctgcaacggcgatattgacgacccggacacgaaggcaacctggccggagcgctacccgatggagtggattcgccgccaacgcaacgagg

SEQ ID NO: 16371 - DNA, 186 bp, Zea mays
  Coding DNA Sequence Number=SeqID_1968
atgcagggcgcacttccccacggcgctgctttcggtctacgatgcgcgcgcggtctcccgttcgacgagatgcccaacccgggcctcgtctcccgcgccgccataacgtgcgcagcccaggtgctcgccgtgttcggggacatgctcgcggacggcgtcctcctcgacaacgaggccgttgttcta

SEQ ID NO: 16372 - DNA, 321 bp, Zea mays
  Coding DNA Sequence Number=SeqID_1969
aggaacagagctggaacggagccaagccaccacacccaagaggagagggatgccgaaccaacaagcgaacaaggcagggaggggaacgtagtgggaaacaaagcccaacgcgcccaacggagggaggaccaacgaagcccgcccgcccaaaaaaaaaccaaggaaggaccgacggacggcaaccaagaaggaagggataagacgaacacggacggacagccgagagagggaggcacaaacaaaccaagagagggagcagccgcaaaaaacgacgggcgagcgaggaatgagtgcccacgcggcggacatgaaccaaccaaa

SEQ ID NO: 16373 - DNA, 191 bp, Zea mays
  Coding DNA Sequence Number=SeqID_1970
ccccaaacgcgtccggcagagcgccagaacacgacctctgcccccccccagaagaggtaccatttatctcagtatttgcattcgcttgattttgcagaattacacaattttgtgctgtagttgttttgaacagtatattccttttgaaactatgcaagggaatttagccgccagcaagagttagtaaaaaa

SEQ ID NO: 16374 - DNA, 327 bp, Zea mays
  Coding DNA Sequence Number=SeqID_1971
tccatggttctccagcagttgggattgtttttaattcttttctgatgccctatgttcctttcagatttggtcaacttggagtgcttgaacttggactcatgtaagattggtgatgagggtctatttcacctaaaaggcctcatacagctaaaaaacctggagctttcagacactgaagttggaagcaatggacttcgtcatctttctggttgatttaaaacgccttctggttgatttaaaacgcctgcagaaatgctagtattattggcaattgtttttttcttgttaatccattctggtagaccaattcaaatcgtctagtagttt

SEQ ID NO: 16375 - DNA, 445 bp, Zea mays
  Coding DNA Sequence Number=SeqID_1972
gtgtgggcccctatggaatttaataaattagtctaatgattttaaacaaaaacattggagtgtattagtgtccgtggggcttctcaggccgaagaatctagctttatttaaacgaaaggaggcgctcaggctactatctagccttttgtttatacacgaggagctttcaacgatttatcgatatagttagttgaaatctgtattgttaagaaatatacacgcgtcaaccttcgatctatattgtatgaggatagttgaggtttatttacactatgaaagctctctgcccgtctttagggacctcaggggagtgtagtacggccatggaccgtcgccgtgacacgtgacatggcttagtgaggtcatggctccactcggcctagacgtcgcagtcggcgctcattttgtggcagaccattattagctagagcttcaaccatcagtc

SEQ ID NO: 16376 - DNA, 323 bp, Zea mays
  Coding DNA Sequence Number=SeqID_1973
gcaaaaataaccacgtggccgcacgtgacgatactgtcgacgcccgggatggggcacctgataccgctgtcgtagctgacccagcggctggcatcgcgacacggcgccacgtccacgataatcacgttcgcgtccacggcgttgcccacgcagcgcgcgttcctgacctcgctaccgacctgagtgtcctcgctgtccctgccgccggtcgacctgtatgacctgccccgagccgccgccataaatacgcgcatgtcgcaggagtgcgcgcgctcggtaccggcgcagacggccgtcctcgcacacctcagacggagcacggc

SEQ ID NO: 16377 - DNA, 382 bp, Zea mays
  Coding DNA Sequence Number=SeqID_1974
tgcagcgcgctgaacgcatcggcagcgtgctggatttcgatccttccgataacgctgaagtggcgcaggtggttgagcgcgtgacgcagacgctgatcgatctggagagcgagctgaatgcgctggacgccaaagtcggcgatggcgataccggctcgacctttgccgccggcgcgaagaaaatccagcgcggcctgcgtgaacagcagctaccgctggatgagctgcctacgctgctggcgctggtaggcgaacagctggcgacggtgatgggcggatcgagcggcgtgctgatgtcgattctgtttacttcggccggacagcagctggaggagggcagcacgctgccgcaggcgctgatgcacgggctggaacgaatgaa

SEQ ID NO: 16378 - DNA, 226 bp, Zea mays
  Coding DNA Sequence Number=SeqID_1975
tttgtgagaatcgtgtcgccgggacagcgggtggtgagactagcctcagcgacgcacggcggcgacggcgacattgccggcctcatctactccaactacgtgccaaccgacgccaacaaggagaatgacacaggagcgcgggctcatgctacagccgcgccacgccgagacgacacccagagcaacgacggctgcgttccgcgccacggccagtcgctcacatgga

SEQ ID NO: 16379 - DNA, 433 bp, Zea mays
  Coding DNA Sequence Number=SeqID_1976
tgatctctagcgacctctagtctgatcaaaagcctaaaggcgagcacggaacatcaaaaagcggagggctgagatcagaaattaggccttagcgtgctcccgttcaaggtaccatttatctcagtatttgcattcgcttgattttgcagaattacacaattttgtgctgtagttgttttgaacagtatattccttttgaaactatgcaagggaatttcgccgcccttaaaacatattacagaaaaaaagctcctttgcggagagggggacaaaattttttttctttacaccttccaccacgtagtgctagcaaagcactggtgcctacatctacccttgcccctccaacatccgttcagccctcttactgcagttacactctggtgcattatgttgacaaacaacatctacgctcaacaacagactaccagct

SEQ ID NO: 16380 - DNA, 256 bp, Zea mays
  Coding DNA Sequence Number=SeqID_1977
ttcaggttggttccgtctttggccgtttgtttgatcggttgggcgctcgtttttgagttgtgtttcactgcccttgctatggcgggtttcttccgccatgttcttgagcctgtcgtgcttttttttatggctgctctctttcgttttgttcgtgcaggttctgtggtttccgcctttttaggcggtgtgccctccgctgtgggttctccccctccccttcgttcagctatgggttctttgcttggcaaaactactt

SEQ ID NO: 16381 - DNA, 581 bp, Zea mays
  Coding DNA Sequence Number=SeqID_1978
ttctccaagatgtttttaaagccagaatttaaggtgggcatgaaatgtggggaatgcataacatatgtgaaacaagaagctacagattcttgaagttactatgttgaaatttggccgcgcaagttctgatctgcttgcatatggtgcggcagatggtagcttgacggtctgctaggtttctgagccaccatctgttcttcaaaacatattgggcattctaaaaatagcatagctccaacgccctcgccctcgccctcctgcaactgtcacctccacctcgagctcgcacgccccatgcctgcggcctccgtgtggttcgacagcgccgcgcgcgtggcgcccagtggcctcctggtgctcaccaacgtcacagtggccatgacggaccatgcgctgcacctgattccgctcccattctccacgagctagccttcttcatcttgcgcacccggagcctctccaccacgatgtcgatccagtacctaggcctcctcaacatcaccgatggcgccgaggcgaccagcaaccacatcttggtggtggggttcgacacagtgctcaactatgagttcggcgacatc

SEQ ID NO: 16382 - DNA, 159 bp, Zea mays
  Coding DNA Sequence Number=SeqID_1979
gtatggagcgtcagtccctgtcgacctgcccagctcacgaggagagcggccgcaggcaagagaagagagcagatgcagagaaagaagaaagacggtccctcgttaggcctttcctcttcttggagtcggcgtcccttggcgacagtccccgcagcagcg

SEQ ID NO: 16383 - DNA, 183 bp, Zea mays
  Coding DNA Sequence Number=SeqID_1980
tccctcgtctgcaagtgagtttccccgccctcgcctctttccttctccccacgcgcgcgcgttgatcgatgaaatgcccccgtgctgtgcctccctttgtctcgggtgtctcggtgcggctgtaacggttcatcctgtgtgttaacctgtgtggtaacctgactgatcacctgaccaaatcca

SEQ ID NO: 16384 - DNA, 270 bp, Zea mays
  Coding DNA Sequence Number=SeqID_1981
gctcgcgtgcggtagctcgttgtgagcctcgagccctttccgtcggaatccggggcctgaggctcgccggcgaccgtcgtctgccgcggcatatacacgctgttgctcggcctcgggcaaacacctcccggcggggctatgttctcaccgcgtggtctctttcgatctatcagagcgacgactaggctaccgccgccctacgccagatgccctggtcttaggcgggcccttccccggcaacgagcacctaacagcaggtttgctcgctct

SEQ ID NO: 16385 - DNA, 524 bp, Zea mays
  Coding DNA Sequence Number=SeqID_1982
tgcgacacccagaagtccgtccgatccggagcaagcgggtggtgacctcgattccatcgctactgcgcagttcctgatcattcacgccttcaagctgctccaccatgcggcgtcggccgtcatggtggtgtgggcgtacgacgccgcgtgcgaccgcgtcggcgtggaggaggtgaagcacgcgtgcgaggtcggatgcagcggtggcgagatgtgccttttcacggacctcctcggcgacttgctctgccgcattcaccgctcgccggactccctcatgttggtcgtggagacaacaatcggcaccaacagcacggagatcgccggaatcgttcgcggctgcgccaagaccgccatctctgttggcaccacccagcaggccaatgacgaccccatctacaccaaggttggctccatccttggcctccgcgtctcgcccagccactggaggaagggcatggggaagaagctagcggatcgggaggaggacgaggttgtccaagcctcatacacgtacaacatct

SEQ ID NO: 16386 - DNA, 187 bp, Zea mays
  Coding DNA Sequence Number=SeqID_1983
tactgtgcgtgctgagcacgagcgctgttaactgtgtaatccgggaatgctgttctgttcacacggtcgtcacttatcgactgaattgtcagccatgatgtaattatttatctaaaaaaaaaaaaaaaaaaaaaatatatactagtccagagcgcgcgccctgcgcgcgtttataaacaattaggta

SEQ ID NO: 16387 - DNA, 206 bp, Zea mays
  Coding DNA Sequence Number=SeqID_1984
ggaacatttggggatgcctttctgggttaaataaaaaaggaccggaatatccctttatgggaaaaaattttggttctggaggttttttttttgccgggatttggtgggttccctggggctcttttccaatggaaaaattcatgtccggtccaagttcactaaaggaaaggtgggccataaatttgaagagtttgcttttccacggg

SEQ ID NO: 16388 - DNA, 286 bp, Zea mays
  Coding DNA Sequence Number=SeqID_1985
aggtgccggcactgctcctgaggcatctcttcggcgcgtcccggcgggacgaggccaatcagctccagcggaccccggcacaggtgggaaggcgccgggtgtttgtacaaaaggagaccgactgcgtgctcggcatggacctggaccgcggggacaacgcgcacaccgtcaagcgccggctgcagctcgcgctcaacatgcccaccggcgggacctcgctcaccttcggcgatcgcctcctggagaacgacctcatcaaccggaactgctccaccccaagcctcag

SEQ ID NO: 16389 - DNA, 390 bp, Zea mays
  Coding DNA Sequence Number=SeqID_1986
aggacaaactgtggatcctcgcgcacctgctgctgccacgccgggcgcaggttgcgcagcagccagaagacgcggcaatggtgctgtttacctccggctcggaaggcaatcccaaaggcgtggtgcactcgcacaaaagcctgctggcgaacgtggagcagattcgcaccgtggcggatttcaccccgcgcgaccgctttatgtcggcgctgccgctgttccacgccttcggtctcaccgtcgggctgttcacgccgctgctgaccggcgcgcaggtgttcctctatcccagcccgctgcactatcgcatcgtgccggagctggtatacgaccgtaactgcaccgtgctgtttggcacctccaccttcctcggcaactatgcgcgctttg

SEQ ID NO: 16390 - DNA, 577 bp, Zea mays
  misc_feature (282)..(282): n is a, c, g, or t
  Coding DNA Sequence Number=SeqID_1987
atcgggatctgccacaaaacactatccaggctctggatatcgctttgagagaattcccaacttctgagtatacaccgatctcaaaatcgtttttctcacgaaaggaatttggagatggtcagtctctaggaaatggtgtggaatgctggaggggttactaccagagcctacgccctacacagatgggcttgtcacttaatatagatgtttcggcaacgtcattttacaaggctcaacctgttattgacttcgtagtggaatatctgaaccttcgtgatactntaaaacgtatttctgatcaggatcgcataaaactgaagaaagcacttaagatggtctgggttgcaaccaaccatatgcaagataaatgcattcactacaggattacagggctaacctcaactccattaaaggatttgacgtttgatcaagaaggcacaagggtgtcagttgtgcattactttaaacaacgatataactactacttacaatacactcactggccatgccttcaagctggccgtgttgacaagcagatctatttacctatagaggtttgcagcatagttcagggaca

SEQ ID NO: 16391 - DNA, 421 bp, Zea mays
  Coding DNA Sequence Number=SeqID_1988
atgggcgtggtgtttatttatatacgcaactcctggggtccgatacgcggtgatgccgacgtatatatcggggctgatctgttgtggagtcccacctgtccaaacaaatcccatctggaatgcgaggcggtcgccgctctcgagaacgtcacctccgttttcgaatcgtggcgtctccgaatcgaatccacggtggagagcgtcaaggactccatcccatcgacgccgttcgtgcagagctatccaaggtctccaagttactggagcgaggcgcgctcgaggaccgttggcaccagatcagcatcctctcggctgttgcatggaacgccgacggcccaatggggcaccaccttccacctcatccacgcccccagcaccacctcctggcctgaatttggcttcatgcgtatagagcatcgtc

SEQ ID NO: 16392 - DNA, 281 bp, Zea mays
  Coding DNA Sequence Number=SeqID_1989
tgaacggcggcaagacgttggtgcaggacgaggagaagcagcagcttctcctagagaagcacaccgagaagcacttcaccgccggcgaggtggtccgggacatcatcatcggcgtctccgacggcctcaccgtgcccttcgcgctcgccgcggggctgtccggcgccaacgcctcctccgcgctcgtgctcaccgcggggctcgccgaggtcgccgccggcgccatctccatggggctcggaggttcactggtgccgcggtgcggtcagcaacccgacatg

SEQ ID NO: 16393 - DNA, 493 bp, Zea mays
  Coding DNA Sequence Number=SeqID_1990
tgacaatgaaaaccggcgcacgcgttctggccctttccgcccttacggccgtactgttttcggcttcggccgtggccaaaattgaagaaggtaaactggtcatctggatcaacggtgataagggctataacggcctcgccgaggtaggcaaaaaattcgagcaggacaccggtatcagcgtgacggtcgaacacccggacaaaatggaagagaaatatccgcaggtctcctcgtcagaggatcgtccggacatcatattctgggcgcacgatcgctatcacggttatgcccagtcaatatttttgtcctaagtcacaccgagatcaaaacttccatacaacaactgtttcggtttacctgggatgcagtgagcttcaacggcgagctgattggctatccggtttctgtgtactcgcctccactaatttacaacaaagatctcctgcccaccccacagaaaaaaatggaacagatggcggctctcataatcaat

SEQ ID NO: 16394 - DNA, 264 bp, Zea mays
  Coding DNA Sequence Number=SeqID_1991
gccaccttgcgtcatgttaaggctatcttcagaggtgcataagtgggcatataatacacgcaaaagtgggcttgtttggccaattccgcatgcacaatgataagagccacgggttcatctctcaggtggattgaattagccaaaagtcgtccgttcatgcgatcctgttcaagtctcagtgcactcacgcgcatatacacgccaggttttttagcccatagatcagagagaaccaatcaagatgttcggatatccgcacacaag

SEQ ID NO: 16395 - DNA, 373 bp, Zea mays
  Coding DNA Sequence Number=SeqID_1992
aacaatcccatggtgttgggttatgtgcggcaattcgcgcagctaaagaagattcatgcacgacaacctcctgtagccaaacaagggtggttggaaggattcctctatttttggtgtgagatcaatggtagctcggacatcataggacatgatttgcgacgttcacaacttccttggcttgtgacggtggtgtagtgtgatattcgatatagttgatgggataatgtaaaaagttagttctctatattcggcgttcatgtgcttggatgatatgagcgaaactattgatttctatgcaatctctattgggtttcaatatttggttaactgagtgtctatgcatgttatgagttgggaatatcacactagtatg

SEQ ID NO: 16396 - DNA, 240 bp, Zea mays
  Coding DNA Sequence Number=SeqID_1993
atgaccagccgacacccggatacgtcgcgcgccgactactacgcacgaatcgccgaacagcgtctcgcgccgttgtgggaatcgctgcacaacctcgtgccgaaaacgccgcagccggccgcgcaacccgcgatctggaagtacgcgcaggtgcgcgacctggtgatgcaggccggcaacgtgatcagcgcggaagaagccgtgcggcgcgtgctggtgctggagaaccccgggctgccc

SEQ ID NO: 16397 - DNA, 560 bp, Zea mays
  misc_feature (48)..(48): n is a, c, g, or t
  Coding DNA Sequence Number=SeqID_1994
tctctgacttggtcgatctcctgcatctcggtggagggcgacgactcngcgatgccattgcaactgcacttctccttgatgacgtccatgtcgtcagtgaccgtaaactaggtggggaggcaaaaagggcgatcgccagcgtgagagagctgaagggaggaagggagcggctggtgctgcacagcaaccgcgcgcagtgccggctcgcccggcgcgaggctgacgcggcggtgagcgacgcgacacgcgcgctggcgctggcgcggccggcgaacgcgcatgccaggagcctgtggcgccgcgcgcaggcgtacgacatgaagggcatggccagggagagcctcctggactgtctggccttcgccggagcatggctcgacggccggaggcaccctcggcgggcggcgcgcggtgcgaaccccaagctgccgtactgcgtcgctcggatgatcaacaagcagatgagcgtgacgggtctgttcgccggcgtgaagatgaaggacaacaaggttgggagtgatgattgcatgccatggtgcagcgaaaacgacagggacaat

SEQ ID NO: 16398 - DNA, 174 bp, Zea mays
  Coding DNA Sequence Number=SeqID_1995
aaactccgccaaagttggtctctctttattttcataccaaagtctagttaatcagtaattctaattttaaatgcatagttgttcgtaacatagataaaaattcttattaaaaataccttgattcaagggtgattgcatggccacacccacactatgcttatacttttgagtgaa

SEQ ID NO: 16399 - DNA, 284 bp, Zea mays
  Coding DNA Sequence Number=SeqID_1996
gaatgttcttatttatgctaaccaaatcagggtcacacttgctgatcagtcagtgtatgaagcacaagttgttggatttgaccaggacaaggatgttgctgttttgcgtatcgaagcaccaaaggataaactaagacctatacctgttggtgtgtcagcagacctactggttggtcagaaagtatatgccattggaaacccagtgagtgcttacaacacctttctttttattgttgtatttgggaaagatatatcaagagcgggcgcacttacaggagtcttca

SEQ ID NO: 16400 - DNA, 209 bp, Zea mays
  Coding DNA Sequence Number=SeqID_1997
attccaccaactcttcttcaccggtttttttctttttttttctgacaagagaaacatgttgtgatgcttggtctggatgcagctggtataacaacaatactgtacaggcttcacatgggagaggttctttcaacagtccctacagtcggtaggtctggattgactctgctgcaatcctcatttctctatccaatagctacctctggtaa

SEQ ID NO: 16401 - DNA, 200 bp, Zea mays
  Coding DNA Sequence Number=SeqID_1998
accgcagcacgggactacgggagcagccgaggcccgaccgcccgagaaattcaagataaaagattttgaagcattttcaagtcttaagaactcggaagataaatttaccttgacatcatcttctcatgaacgagaagcatgcagtcgtgtaagtcctgcgatccgagcgggtgggcgccgtgggccatgttgctgctgct

SEQ ID NO: 16402 - DNA, 388 bp, Zea mays
  Coding DNA Sequence Number=SeqID_1999
gcgcgtccgccgtgcgtgcaatgcatgcaggtggtcggcgatcgcgacgcacctcccgaaacgcaccgacaacgagatcaagaactactggaacacgcacctcaagaagcggctggccaagatgggcatcgacccggtcacgcacaagccgcgctccgacgcgctggggacgggcggcgggggaggcgccgcgggcgcgcagcacgccaaggccgcggcgcacctcagccacacggcgcagtgggagagcgccaggctcgaggccgaggcgcgcctggcgcgcgaggccaggctgcgcgcgctcgcggcctccgcctcggcgccgccgcagatgcccgccgccgccgcgcaccggctcgactcgcccacgtccacgttgagcttctcc

SEQ ID NO: 16403 - DNA, 347 bp, Zea mays
  Coding DNA Sequence Number=SeqID_2000
atgcgtatcgtgtacccgaactacgacgacactcgctccgacggggtcatcccgctatactacgctctggcccggccgctggcagccatcaaggacgccatggtcgctagctccatgctgtactacaccgtcgcgttcatcgccgcggcggtcgcagtctactgcgccatgccgtacctgctcgcaaccaacgaaatagacatcaccggcacgctccacaaccatagtcctggctcctgcacccctacgatgtacgagctgtactgcgccgtcacccactcgggctcgagggaaaggaagaactgggggctattcaacttgatcgccgtgcctgactacaacctgga

SEQ ID NO: 16404 - DNA, 292 bp, Zea mays
  Coding DNA Sequence Number=SeqID_2001
aattatgctgcggtgtacgggcggcgagctcgacacggcctgacgggcaattttcaagtcgcggctgaggacgggcgctgtcacgtgagggacacgctgatgggaaaggtggcctctgataaatgtcacaaatgggtcttcaaggaaccttctgaatgcgagcccaacatctccaactactggcagagctctttcgacgcacttcctccggaatggactgatcagttcgcatcaggcatccaggcaagggagttgtttgattcaccagccgaattttcatttgtctttataa

SEQ ID NO: 16405 - DNA, 507 bp, Zea mays
  Coding DNA Sequence Number=SeqID_2002
ggaccgtcctccggcacgggcctctccgacgcggcgctcgccacgccgggcttccgcctgttcgtgagccggctggccaatacggcgcggcgctcgctcgcggaccggagcccatggacggagctgctggaccgatcggcgttctcccgccccgactccctctccgaggccacctcccgcctgcgccgcaacctcgcttacttccgcgtcaactacgccggcgtggtcgccttcgcgctgggggcctcgctcctggcgcaccccttctcgctcctcatcctcctgggcctcctcaccgcttggtgcttcctctacctcttctgtccctccgaccagcctgtcgtcctcttcggccgaaccttctccgaccgcgaggcgctgctggggctcggggatgaggtgcagggaggagcggagcgcgcggcggcggctccccacggcggcagctccccacggcggcggctccccacggcggcgctccccacggcgtcgtatcaggggggaaag

SEQ ID NO: 16406 - DNA, 482 bp, Zea mays
  Coding DNA Sequence Number=SeqID_2003
tggagaccccagctaagggtgcattagcatacttttgtgctgagtggtgggaggttcatttacgcatgtttgctgcgacttcttgtcctaacatttgtcttgagcatgtcagcaagtaagtatgttttcgcgcttgcctctcttgaggatcacttctcaagcattgagtctggaccctcggttactgtgaagtggcttggcaaaccggtcttcataaggcgcaggctagatgatgatatcgagttggccgacagtgttgaagtggcatccttccgccttcgagagcaggatacatagtgtgtcaagaacctcgaatgtctggtcgtcattggggtctgcactcacctgggctgcatcccgctcccaaatgcaggagtctttggtatttggatgtggtgagtattaacttgtataactactacatttctggtaggatcagcaagggcccggcacccttcaacctggaagtgcctacacacagt

SEQ ID NO: 16407 - DNA, 285 bp, Zea mays
  Coding DNA Sequence Number=SeqID_2004
agccacacccgaccaccgtagaaggcgccggcccgcgtcacacggcgtcccacccgaacggcgcccatggctacgcggccaacgaaccggacagtaccgccgacgtctgggcactgaacaatgttaacggccaggtcgagcgcgtgcagagcctcgataccacgccgccgggcctcagcgacacgcgccgggcagcggatatccataccaccccggacggccgctacctgcaagcctgcgaccgcaccagcagcacgctgaccgcgttcagcaccagggaggacg

SEQ ID NO: 16408 - DNA, 186 bp, Zea mays
  Coding DNA Sequence Number=SeqID_2005
aggggtggggatgcccggcggcgcgccggtggcgggagagactagcgctgtgggcccgggaaaacccggtggcgcgccggccgtgggcgccagagcggcgcgggaggagagaggaagaggaggaaaggcctcaccgacgttggggaagagggtagggggcggcggccggcccgctatggaggatgg

SEQ ID NO: 16409 - DNA, 65 bp, Zea mays
  Coding DNA Sequence Number=SeqID_2006
tacgatcttcttgaggtcagcacgcactcactcagcagtgaatctcacagcggtggtggctgaga

SEQ ID NO: 16410 - DNA, 451 bp, Zea mays
  Coding DNA Sequence Number=SeqID_2007
ggattactgatgagtccttcgtccttgagtccctaatcctcccccagggcatccctgcgctctgcgacgatccagggctgaggacggcgatcttggccacgctgctgaccctcgacaagagcggagtggcggtttgccagaccggcggccgggacccccaccgcaggatccgaatctccgatgcgccagctggaggcccccagactaccagcgcggctcccagcgcccctgccatggctcctagcgcccctgtcgcggccccccgccccttggacaagggcaagggggctgcaggcagtttctccgcctcaggtggcaccggagggtcggaggaagagaggcggtgccaacttcgctgtgccgatgggtcgttcgtctcggaccccctagaagcgtcagaggactgctggtggggccgaggaggccggctcccaagcccagggcgcgtaga

SEQ ID NO: 16411 - DNA, 537 bp, Zea mays
  Coding DNA Sequence Number=SeqID_2008
gtgctaaatccgtgccgcagctggaccgccggatgcgcgacggacactgggataaagcgcagcataaatcgctggagctggaaggacgcacgctcggcctggtcggtctgggtgccatcggcagccgcgtggcgcgcattggccaggccttcggtatgcaggtgctggcctacgatccctatgcgcaaaccttgccggctggctgtgaagcggttgaatcactggatgaactgtacagccgtgccgatgtggtgtcgctgcactgtccgctgacggacagcaatcaccagatgatcaacgcggccgccctcgcccgttttaagcctggcgcgattctggtcaacaccgcgcgcggcggactgattgacgatcaggcggtggcgaccgcgctgcaaaacggcacactgcgtgccgccggactggacagcttcaccagcgagccgctgaatgcaccgcatttgtggcagtcgcttaacaacgtgattattacgccgcacattggcggcgtgagcgacaatgcttacgtgcgcatgggca

SEQ ID NO: 16412 - DNA, 203 bp, Zea mays
  Coding DNA Sequence Number=SeqID_2009
tcgagttcgactgcaagtagttcatcattgaagcctgaaaaactggaagctactagacatgtgctcatcgagtatggtgacatgtcaagtgcatgcgtgctattcatcttggactcaaactgacgaagaaatcaatagaatatggacttggcacaatccggtgaaggccttgactggggtgtgctctgtggtttcagccctga

SEQ ID NO: 16413 - DNA, 95 bp, Zea mays
  Coding DNA Sequence Number=SeqID_2010
aacgacctgatgagcccggacggcagcccgtggaggaggaggtggcggccgctgcgcagctgctaatgaattcgatgcggctcgcgctttcgcga

SEQ ID NO: 16414 - DNA, 389 bp, Zea mays
  Coding DNA Sequence Number=SeqID_2011
gctgatctggcactcggtgctgaacctgatctcgaaggccgtcacgtcgccgttcacgctgctcgcgtacgcgttcggcggcagcgacggcgaggacctcggctacgtcgagttcgcgcccggctcgtaccagctgaccgacgcgcagcagaagaagctcgataccgtcgtgaagatgctgaccgagaagccgtcgatccggctcgacctgatcggccgcgtcgacccggcaaaggacacgccggggctgcgcgacgcgtacgtcgaccggctggttcgccagcagaagctgaagtacgtcgtcggccagggcgagagcgtcgatccgatgtcggtgaaggtcgagccggccgagtacggcaagtacctgacgcgtgcgtacaaggcgt

SEQ ID NO: 16415 - DNA, 411 bp, Zea mays
  Coding DNA Sequence Number=SeqID_2012
aggccaccatcctactcggcgagtggtggaacgtcagcgtcgtcgacgtcgagaggcaggcactcctcatgggagcaggacccaacaactcagtcgcgctaactatcaacggcctcattggtgccggcggtggtgctggctgcgagaacagctcctcctcctcccagtatgaactcgtcgtgcagcgcggcaggacgtacctgctccgcatcatcaatgccgctctcaactacgagctcttcttcaaggtcgccaaccactccttcaccgtcgtcgccgccgacgcctgctacaccgacccctaccacacggacgtcatcgtcatcgcgccgggacagacggtggatgctctcatgcgcgccgacgccgacccgggccgccgctactacatggccgcacaggtgtaccaga

SEQ ID NO: 16416 - DNA, 523 bp, Zea mays
  Coding DNA Sequence Number=SeqID_2013
cacacgacaagtctggctccacggacactagccgtctcagatcagagtactacggtacggaccaaagcgctcagaaggctgtcgacaagatcacctcgctgccggggcagccggacggcgtcgacttcgaccagtacgccgggtacgtgaccgtcgacgagacgaatggccgggcgctcttctactacttcgtggaggcgccacaggacgcctcgacaaagccgctcctcctgtggcttaacggaagccctgaatgactcgtcggtaggctatagagcaatgatagaaatcggcccgttccgcataaccagcgacaacaaagccttgagcagaaacgagaacgcctggaacagcgaggccaacgtgctgttcctggagtcaccagccggtgttggattctcatactccaacacgtcttcagactatggcaagagcggtgaccaaaggacagcggacgatgcattcgttttcctcatcaattggctcgagaggttccctgagtacaaagcacgcgccttttaca

SEQ ID NO: 16417 - DNA, 282 bp, Zea mays
  Coding DNA Sequence Number=SeqID_2014
atctctctcacagtcgcgcccgctgcttgctccccatggtcgagcatccccgccctctcggctccctgttccttctctcttgtgccgccgtccctgcctcccttcccatggacaccggcagtagaagatgcttctccccagtgctcaccatggttgtcgcctccaagcttctccctgctgcgcgcgtggccgtgaccctatgctcgccacggcgcgtcgagctccctcgccgagtcctttttctgctcgccccctactatctacgcatcccagccatggtcg

SEQ ID NO: 16418 - DNA, 528 bp, Zea mays
  Coding DNA Sequence Number=SeqID_2015
aggtcctcgtgctcggcacggcggagggcctggagtcccggctcgtcccgatgcgggggtacgagctcctcacgatcccgcgcctgccgttcccgcgtcggctgaacggcgccgccctgcgcttcccgcagcggttcgccgccgccgtgaagcgcaccgaacagatcatccgcgagcacgaggtcgaggtggtcctcggtgtcggtgggtacgccgccgccccggcctacatcgccgcccggcgcacggggacccccatcgtcgtgcacgagcagaacgcgaagcccgggctggcgaaccgcctggccgcgttcctcaccgaccacgtcggcgtcacgttctcgaacacccggctgcggcacggccgcgtggtcggcatgccgctccggcgcgagatcgagtcgctcgaccgccgtgcgagccgtgccgagggcctcgccgagttcggcctcgacccgacgcgccccgtgctgctcgtgaccggcgggtcctccggcgcgcggagcatcaaccgcaccgtgaaccggt

SEQ ID NO: 16419 - DNA, 378 bp, Zea mays
  Coding DNA Sequence Number=SeqID_2016
acggcgaacctggtcgcgatcaaggggacggtcggcgcgttcggcacggactcgacgacgtccgcgccggtcgacgtcgccgcgaacctcgcgggcaacgggccgatctcgatcaagggcacggtgaacccgctgatcgacaagccggcgctggacctgacggcgaccgcgcacgacatcgagctgaccaacctgacgccttattcggcgaaatacgcgggctacccgatcacgaagggcaagctcaacgtcgatctgcactaccagctcgcgaacgaccagctgtcggcgaacaaccacatcttcatcgaccagctcacgttcggcgatcacgtcgagaacgacacggcgacgaagctgccggtgaagctcgcgatt

SEQ ID NO: 16420 - DNA, 137 bp, Zea mays
  Coding DNA Sequence Number=SeqID_2017
acgaggcgggactgtggaaccacttccaggcgaccgcgtttgacttcagcaacacgctctctacccattcgatctttggcacgctgctggaaggcattctgggttatcagaaagcgccgagcgtcagcgaagtcgcg

SEQ ID NO: 16421 - DNA, 175 bp, Zea mays
  Coding DNA Sequence Number=SeqID_2018
atcagggattgcctcgcttcgctcggtaatcagtatcaaggctccagcgctcctccaacggccacgacatcacgcgaactgggtgcctataacctctccggctgccacgatggcatggccctattacagagggttggccgcgcggggaaggacgggacggcgctcgcgcaaggcc

SEQ ID NO: 16422 - DNA, 555 bp, Zea mays
  Coding DNA Sequence Number=SeqID_2019
caactcctgacgacgatgaagcggtcttcgatgcatggcttattttcgacgaggagcccaacgaccacatcatcgacgacgtcgacgtcttctcgccctggtacgaggtgtcgtgctgcggcaacggatccgtgcagagactacagctggagcggctctgcctggcggggagcgcatccgacctagatgtcctcgctgggcccccggacctacgcgcactcaacctctccaacaacgcgttctctggcacgttctccaacatgtccgcgcttcccgtgctcaaccatgggctccgacctagccatcgtcacggccggggcgcgccaaattctgagcgagcccaggttggatctgctccagcggaacaaggagcagtttcacaagcgcgtgtcgccgctgtcggagcaattccccgacgcgctgctgctcaccgtgttgaaccccgtcgacggactcacccacgtcgcctagaagcggtcgggcttcctcgccacacaattcttcagctctggcaccgacctcgactcatcgggaaccggctaaccgtcatcatct

SEQ ID NO: 16423 - DNA, 461 bp, Zea mays
  Coding DNA Sequence Number=SeqID_2020
gtgcggtcacgctgatcgatccggccgcgcccggcgacagcaccgcgaaatggagctgcgggcagatggcggtcagcgaggtcatcccgctgtcgaagcccggcattctgatgaaggtgccgcgctggctgatggatcagaaaggcccgctcgcgctgcggcccggcgccctgcccggcatcctgccgtggtttttccggttcgtcgcgtcggcccgccacgcgaagatcgtgtcgatcgcgcaggcgatggccacgctcacgcacgacgtctattccgactacgcgccgctgctcgatgcgtgcggcgaccgcgcgctgctgggccagcggcccgtgctggaagtgttcgacgatccggccggcatcgcgcacgaggagccgcatctcgcgctgcggcagtcgctcggcttcgcgtcgcagcggctgagcgccgctgacatcggcgatctcgaaccggcg

SEQ ID NO: 16424 - DNA, 538 bp, Zea mays
  Coding DNA Sequence Number=SeqID_2021
agctgctcgggtcgttgctggcgggggactggctggtggtcgacgccgccgacgaacgcacccgctcccgggcctccggcgtggtcgcggcgtacgcccagtggcactctggaacgatcactccggtccctgccgcacgtcgaccggtcggagcacccgctgccggtgccgctgacccacgacggacccgaggcaacggcacgcgccgtcgcctccaccccggcaccgaccgtgcccgaccccgatcccgctgccgaaggaacccgcaccgcatgagcccccgccgccacgacgacgccgagccgttccgcccgatcgactggaccggcgagacgcccccggcgatcccggcccggttcgtgccgcagcacgtggcgatcgtcatggacggcaacggccggtgggcgaacggccgcggactcacccgcatcgaggggcacaaggcgggcgaggcatcgctgctcgacgtcgtcgcaggcgggatccagatcggcgtccagcacatctcggcgtacgcgttctcgacggagaactggaa

SEQ ID NO: 16425 - DNA, 595 bp, Zea mays
  Coding DNA Sequence Number=SeqID_2022
aaagggttcacactgcagcatatagaatgaagcaagaatgaacaggccaacatgctagcaaaagcaccagcgaaaggcgacctcataccctcagatgtgttcttccacacaattggcacactagccatgagatcccaaaggtctacaaatcacagatgatcccgaaggccaaagaattgaaaacctaataatgaccaaagactggagagcacccataaccttgtaccttcagggccactatcactccaccgaccaggctgaggccaagaggttgaagcaccgaagttgtgacttcatagtaatagaaggtcagctatagaaaaaggaatgagtcaacctatgctcaagtacatcacagtggtcgaaggcatcaaactcctccgagaagtccatagtggcatatgtggttcacactcgggacctagagccctagccgccaaggtcatgcgccaggtattgtactggccagtcatcgcatgtgcagcaaactgtgtagtccgctcgtgcgaagcatgctagaaattttcacctcaagcgggggcaccttcatagttcacaaagttgatcacccacacctggcccgttacaatgatgg

SEQ ID NO: 16426 - DNA, 269 bp, Zea mays
  Coding DNA Sequence Number=SeqID_2023
tctcgacgctgctggagcggtcgccagagtgagggatctctgcagcattctgccttctactacgacgtcactatcggactgtgatcgagcccatgacgtgcggcctgccaacgatcgagacctgccatggaggccctgctgatatcatcgaggacggggtatctcgtcctgcacattgacccttaccacagcgacaaggccgcgaatatcctgtgcaacttctttgacaaatgcaaggcagatcccagctacatgtgacacagatctca

SEQ ID NO: 16427 - DNA, 577 bp, Zea mays
  Coding DNA Sequence Number=SeqID_2024
atgaggagtgtcagtccccatggtaacaccgaggagcttctgcaactgcttcttccaatccttgagaataatggcctcgatttctacatcaatgggcatgacccctgcctggaacccataagcagcagagacagtccaattcaatacttcccaagcggaggcggttccagagcatggagaggattcttccagccaaatgaagacaagctcaagttcttttatgatgggcaagggttcatgtccctccagctataccaggaccaagctgaattccccttctacgaaggctgatgggaatatattgtaccagtattcccagtggagcttgagagaaacatatctacgccccagctatgtcgcaaaagaatgaggcagtcccaatcccccttggagagttagattggttcggccctctgtatcaaattcgaatgagccattgtggtaagtggcatcagaaagttaaaaaaaaaatgcaaggatgtaatgtggtgtatggtttaactgccaaagaaacatggagcgactacaagagttgtaatgtgtatgcgctgatgtaaaagcaggtccaaccaccggg

SEQ ID NO: 16428 - DNA, 237 bp, Zea mays
  Coding DNA Sequence Number=SeqID_2025
atcaaaatgcgatggacaaggctttggattaccttaatggctttgacattccagtcgtcattacacttcatggacgattctcagaaggctggttctattgttatcaatcgaaggagtatctggaaacaggtgagttttctgctcagttggttggaaatgcaccgtttataattgataaagataatggagaaattcactcttttggtactgcttatccgttagataaatacttactgg

SEQ ID NO: 16429 - DNA, 234 bp, Zea mays
  Coding DNA Sequence Number=SeqID_2026
atggacaccgggaagcgtaactgccggattgatgaaacgcagcggagacccagccttcaactcccggtcccgggaatgatgattcatgatgagcctcgcctgcgcccagccaccacccgtggtggcaaaagcctgctcccagctacgtcgcaccggcaccaccaccctcgccgcatcatcatggggacgatcgaccatcctgtgctctctgccgcggccataattgtgctggca

SEQ ID NO: 16430 - DNA, 584 bp, Zea mays
  Coding DNA Sequence Number=SeqID_2027
actatctgtgcgacgaatccgcgggctggttcccggatctggatgatatccgcagcaaaatcacgccgcgtacccgcgggatcgtgatcatcaaccccaacaacccgaccggtgcggtgtacagcaaagagctgctgctggagattgtggagatcgcccgccagcataacctgatcatcttcgccgacgagatctacgacaagattctgtatgacgaagcccagcatcattcgattgccgcgctggcaccggatctgctgaccgtgaccttcaacgggctgtccaaaacctaccgcgtggcgggtttccgccagggctggatggtactgaacggaccgaagaagcacgccaaaggctatatcgaaggtctggagatgctggcttcaatgcgtctgtgcgctaacgtgccggcacagcatgccattcagactgcgctgggcggctatcaaagcatcagcgagtttatcgcgccgggtggacggctgttcgagcagcgccagcgcgcctgggaactgattaatgatattcccggcgtcagctgcgtgaagccgcagggcgcgctgtatatgttcccgcgaatcgat

SEQ ID NO: 16431 - DNA, 332 bp, Zea mays
  Coding DNA Sequence Number=SeqID_2028
cagccggatctcctcatccaggaatcatgagtcgtcctagtcgctgagctggcaatgtacacggtgttttcgtgctgcatataccccagggagtatcctccgaccatgggctgcaaaaagggaagcgcaggttcaacgctagcaacgtcggcaagcgtggagcgctcaagcccatcgcctccggtatgtttgcgagttgtattggcatagcctccaagttttgaccaaatatcatggatgcgcacctgtgtctccgagtgagcgtccgtctgggccagcgcaccgatactcacgaacagggcgatcgatatagttcgtatgcggccggtggc

SEQ ID NO: 16432 - DNA, 271 bp, Zea mays
  Coding DNA Sequence Number=SeqID_2029
gctgcgtttgcaggtacgcctgccggccagtgtggaactcgacgatttaattcaggccggctcgctgggttttttatctgccattgacagcttcgatccgaaaaaaggcgtggccataagcgcctatattattcagcgcgtgcgctgggcgctgatggatgaattacgcgagcgtgactgggtaccgcgtcgcgtacgcacccatgccacagaaatggctgcggtcattcagcggctgggtcaacagactttgtcagcgtcgggcgtaaaa

SEQ ID NO: 16433 - DNA, 285 bp, Zea mays
  Coding DNA Sequence Number=SeqID_2030
gagcacggtcatggaactgattattcaggcgggagaagcgcgctcctgctcgatggaagcgctgcgcgcggcgcggcgcaaagagtggccacgcgccgatgcgttgctgagcgaagccagcgaggcggccagacccgcgcaccgtatccagaccgaattgatcggtgccgacgaaggctgcggcaaaattccggtcaatctgatcatggtgcatgcacaggatcacctgatgaacgccatgctgtgtcgtgaactggcggaagagatcatccagctgcggcgcga

SEQ ID NO: 16434 - DNA, 190 bp, Zea mays
  Coding DNA Sequence Number=SeqID_2031
ggtggcggccgatatctaattacaggctgtgatacacaaacttgcaaagtttgggattatcaaacaaagaactgtgttcaaacacttgaaggacatgcacataatgtctctgctgtatgtttccatcctgagcttccaataataatgacaggttcagaggatggaactgtttgcctatggcactccacta

SEQ ID NO: 16435 - DNA, 518 bp, Zea mays
  Coding DNA Sequence Number=SeqID_2032
gccgtcagtgcagcttgtagcacaagctaaagcccttgtacatgatcctgaaatatgctaagcacagctcaattttttccctggatgctctcccttgtacataaggccgtctggttatggtggaggatgttttttcccctggtggattggatgattctacaccttaacaatttaggtagtcttatatagacctaggaaggttgaaatttgccccttctagctacaggttatgcagttcttaccgttctgacttcagaactgtgtcggatgcattctctatccgtacaattagagttgcaagcagtacttcatatccaggtgttaaattcttcatgcgcggtttcagttatttgtcaactctggtaattctcgttgtgcaggtgatttaagcggtcccaaggagataaatgaaagcatgcaatggtggtttgaatttggattcatttgatctttttgtttgatgtaggttgtgtctaacttgtctactgtctttggtttgatcggtccaacttgtattg

SEQ ID NO: 16436 - DNA, 494 bp, Zea mays
  Coding DNA Sequence Number=SeqID_2033
cgtaccgagtttacctcatgtcctaataaactgttctctcccctgcaacctgcaggcttgtttgttcatatttgaagccgtgtaactttgccttgccattctgtaccctcttcacaagcatttatgtgatgattcattttactgttgtagcaatggcagaaatatcgataacaagattgatgcagaaatcatcctggctgacataaggtcttcggcccaattattaaagccagcaatggtcgcaaaaaaccagatctagcttcagttggagatagtacagcacagttgagactgtcagcagtttcctttcctgtatcttcaaattttgttcgctaggatttggtgtttagttgctagaaacttggctgtgaagatctgatctgtatgttaataaccgttgtccatctgtctgaaatattgttgcttacttgatttgtaggatgttgtatatttgaaaagtgtccataaaaaggtcttgcgttgtatgatgaggt

SEQ ID NO: 16437 - DNA, 373 bp, Zea mays
  Coding DNA Sequence Number=SeqID_2034
aattaagcgttacggatagcgtcacgcatcaggatctggatgaaatgcgcctcggcctgaacgccttcaacagccgctttattgacatcaatgagatgaaagccatcggtgtgttcattaaagacggcgccgggaaaaagctagcgggtctgacgggctcaacctatggcaactggttacgtattgatatgctgtgggtcagcgatgggttacgcgggcagggcgccggcagccagctgattcaggctgccgaacaggaagcccgcgcacgcggctgccgttacgcgcaggtagataccgccagctttcaggcgcggccgttttatgaaaagcttggctatacgctacgttttagccttgatcactatccacg

SEQ ID NO: 16438 - DNA, 416 bp, Zea mays
  Coding DNA Sequence Number=SeqID_2035
atggtggcgaagatgacgccctttatcgataacctcaacacgctgaacggcgtcagcgcgcgcgtggtgtgggatgccgctggtcgtgatatcgcccgcgccgagatcaaatttgatgaagcggtgacgggctggccgaccggcgagctggtgcaggcgctgaaaaacggcgacatcgccatctatttccgcggctataaagccaacgaaggcattatcgaagcggatgtgcgcagcggccgtctgtgcctcaacgtgctggccggttcaaagcagaatgcgcaggcgatctggcaggcggcagaagggcatgtgctggtcggcgttttgtcgaaaaactacgcctcgaatgaggccgcgattgccgatatgcgcgagtacgcggcgctgattgataatgcgctgtcggtcgggct

SEQ ID NO: 16439 - DNA, 300 bp, Zea mays
  Coding DNA Sequence Number=SeqID_2036
agctgcgggtgatcccaaccaagtacccttccggcggcgccaaacagctgaccaaaattctcaccgggcgggaagtgccgcacggcggacgctcaccgacattggcgtgctgatgcagatacgtcggcactgcctgggcggtgaagcgcgccattgtcgatggcgaaccgattacggaacgcgtggtgacgctgaccggcgaggccattgcccggccacgtaatgtctggggccgtctcggtaccccggtaagccatctgttgcaacaggtcggtttcacgcccgggtgcgcgccagatg

SEQ ID NO: 16440 - DNA, 574 bp, Zea mays
  Coding DNA Sequence Number=SeqID_2037
gacgcggtcgggacacggaagggcggcgcagctggcggcgggggcacgcctaccacgcagacgcaacagcagcagcagcagcagccgcccccgccgcccgagccgggggtgaggtgcccgcgctgcgactccccgaacaccaagttctgctactacaacaactacagcctgtcgcagccgcgccacttctgcaagacgtgccgcaggtactggaccaagggcggcgcgctccgcaacgtgcccgtcggcgggggctgccgcaagaacaagcgctcgcgctctgcggcggccgcgcgcctctcgctcaacctaccaccggaggccggcgccgaccagcaggaggcgagtccgggcttccttggcggtggcggccccgcggccgactaccaccagcaacaggcgaacgccgccgtcgtcgggatgatgatgaccctgccgcggctccacgtcgcccccgccgtcggccagtacgtgccgttcggggagtggccgtcgggggcggccggggacgtttcttccggcggcggccacgcggcgaacggtggcgcggcgatgacggtgagcagcggcgtcg

SEQ ID NO: 16441 - DNA, 352 bp, Zea mays
  Coding DNA Sequence Number=SeqID_2038
tgacgtatcaacaggctggccgcatcgccatcctcaagcgagtggctggctgggtgatttttattccggcgctgttatccacccttatctccatcttaggctttatgtttaaacacagcgaaaagcagcccggcattgacgccgtgatgctcgacttcgtgcatgtgatggtggatatgattaagttcaacacgccgtttctcaatgtgttctggaacaattcgccggtgccggaattcaacggcggggccaatattggcttctggctgatctatatccttatatttgtgggcatcgctttgcaggcctcgggcgcacgcatgtggcgtcaggcgcgccatattaaagtagg

SEQ ID NO: 16442 - DNA, 267 bp, Zea mays
  Coding DNA Sequence Number=SeqID_2039
gctacgctccatcgaatcctggaagatcaatctgatatccgtctggtttggctgcttttttaccggcctggccattagtcagatcattcctttcctgccgctttacgtggaagagctgggtatccgtggcggcaacgcgctcagtatctggtcaggcctgaccttcagtgtcacctttattttttctgccgccgtggcgccgctgtggggcagccttgccgatcgcaaagggcgcaagctgatgctactgcgcgcttcgtttggcat

SEQ ID NO: 16443 - DNA, 236 bp, Zea mays
  Coding DNA Sequence Number=SeqID_2040
gacgacctgtcgatggaagcggcacgcgaaggcggcacgctcacgcaggcggccgatgcggcgctcgccgccggctgcgacatggtgctcgtgtgcaaccagccggacgcggccgaggtcgtgctgaacgaactgaacgcgcaggcgtcggccgagtcggtgcggcgcatcaagcggatgcgggcgcgcggcaaggcgctcaagtgggacaagctgatcgcgcagcccgagtatgt

SEQ ID NO: 16444 - DNA, 560 bp, Zea mays
  Coding DNA Sequence Number=SeqID_2041
taggcagggaataaacagagcatttatctgtaggggagaaatatcgtaataacacgtcagtacgggcccctgacatttattttattccatctcgacggggaagggacccccaatcaaacatgcaaaacaacagcaagagctagcttattgggggctgcctgcctgcttataacaaggcggacggacggaggagcatggaaggatccttcggttgggccgctggggatgagtctaggggatcttgcacccccagttttcggggaggaagtcgcggcacctgtacttgggggggcccttgtccggggacacggggacccattttttgcagggggcggcccacttggggaggaggtcgtcgaaggtccacacccccgaccaggtggggcactcgccgaaccaacactgtttttttgtcgtcggccctgcaggtcctttggccacggccgcaaaaaccaaaagggcctggaaaactaggatcgccaacagagggctgctcttaattttctcgacctctcgctttaccggttgttgccgacctctactacaaaaacgcaagcgtt

SEQ ID NO: 16445 - DNA, 112 bp, Zea mays
  Coding DNA Sequence Number=SeqID_2042
actgagactgacactgttgtgtgtcgacaacgatggcaggtggagcagcggtaccagcagtaccacgggcagatgcaggcggtgtcggcgtcgttcgatgcggcggcgggcg

SEQ ID NO: 16446 - DNA, 380 bp, Zea mays
  Coding DNA Sequence Number=SeqID_2043
cggccggaacatcccctttcagaagggtggcgtaagccccttatgagttatctttttttgtttttagtccaagaggcaaaagagtgaactgatttgattaaaagtttcacggcgacacatagacctgacaaaatatgagccatgaatgctcaaccaaccactgggatacacccaacatagtttcagacattccgatggaaaaaaatttattcaccggatgcacttttttccgatactctttggaagacttttttatgataaactagaccttgagttcttcatcttagttggtgctgatcatgtggcggatcaggttggtccaacttttcatccccgcggattgctagttgtaaatgccacagagtattacgttatgatct

SEQ ID NO: 16447 - DNA, 272 bp, Zea mays
  Coding DNA Sequence Number=SeqID_2044
atcggcaagagtttcatgaatcaagagcacatatatacatataaaaaaatgttaggggaagcatatctctaccaatatattacaagccgacaatggctcatacatctaacaacacttatgttgcctgtgatggggcaatgtaccgacaatgataacacatttaaggaatagcatgtacaggcagagcagtgaagttaagaactgcctgatagactagagtcactagcaaacgtgctttccattaaagtaatggaattagcaggagggatact

SEQ ID NO: 16448 - DNA, 295 bp, Zea mays
  Coding DNA Sequence Number=SeqID_2045
gaatataacattccgatagtagtcgactttttcttgatctaaccgtttttctacttattcacaagaaaatcaagattatgataccaaattatgaattttgcttcataggtcaaggaacctgaagactcgtgttattggttgcccaaagactatcgatggagatctgaaatgtaaggaggtaccaacaagctttggatttgatactgcttgcaagatatactccgaaatgattggcaatgttatgactgatgcaagatccacaggaaaatactaccactgtaacagcgacgctggc

SEQ ID NO: 16449 - DNA, 274 bp, Zea mays
  Coding DNA Sequence Number=SeqID_2046
atgagcatgagcttcctgccgatgggcgctgactttgacctgaccaaatacgtctctacccacaacgtgggcggcgcggtgatgggcgacaacccgaaaacctcggcgctgaacaagtacctgcaaagctgggatgtgcacaacgtgtttgtgccgggcggtaacgccttcccgcagaacttccaggcgaacccgaccgacaccatcggcgcgattaccctgatggcggcgcaggctattaaagagcactatttgcagaatcccggcccactgg

SEQ ID NO: 16450 - DNA, 410 bp, Zea mays
  Coding DNA Sequence Number=SeqID_2047
tgatcattggcgagcacaccgctgaggtccctgagctggatcacgcgctcgtggcggccatcgcagaggacctgtaggaactgctggtggtccccgttcctcgtgactactggttagtggaccccgatgccctggtgcacacggagtggatcgtgacccatcgcagggaccgcgtgggcatgctgctgaacggccggacactgcttcaccgctggcccgacacgtgagctgtccagcgagggcacaacaaggggcgcaattgaggtgccgcccaacggtttaccggtgatcctcggacctgaccatccggtcaccggtggttacccggtgatcggcgtcgtcgccgaccacgacatcgacaaggtggggcagatccggcccggacagcacgtgcggatgcactggtccag

SEQ ID NO: 16451 - DNA, 423 bp, Zea mays
  Coding DNA Sequence Number=SeqID_2048
tgaatggtttcttgtccgtttaaagtatacttttctatttgtataggtaaacctctttatcaacaatcttggagaagtaccagaccaactctggaaagataccgtgggatgagaaacgcaaggtaatattggagaagatatctcgtgcttcagctcccaatagtaaaacggctctggctctttgatgactctcggtgaggagcctttttttagaccgtttggtacagcttcacgaagagccgaaaaaagagccaccgagagtcctgacaaagggggccttagttgtcagtttaattctgaatctgaaactagaaagctcgcctaagccactatttctcttcattatctgcagcaccagcaggatatcgcactgagcggcagcatgggagatcttgagctgggctaccatactgaccgcgactt

SEQ ID NO: 16452 - DNA, 579 bp, Zea mays
  Coding DNA Sequence Number=SeqID_2049
ctgcgcttgcgtccgagctacatggggatggggttttagtgcagttgtcgatttatttgagcttgctcgacgacatggtgtacaagagattactgaaccaatacatgctatatggcaacaacaagcttcagcccattgttatgaagagtggcaagtacactctcggctacaagaccgtcctcaggactctcaggaactctaagtcgaagctagtgatcatcgctaacaactgtcctcccctccgtaagtctgaaattgagtactatgctatgcttgctaaggtcactgtccaccacttccatggaaacaatgttgacctgggaacagcctgtggaaaatacttccgtgtctgctgcctcagtattattgatcctggtgattctgatatcattaagactacaccgggtgagcagtaaggaagccacaccagtagagcgctcttgtgcaatagtgctgtagcggatcttcttgctggacttgtcttttgttttgttcctatagaatttacctgacagtaaacagagttcgtgggaacattattctctttgattgaaaattttgtacctggcaattgagtaa

SEQ ID NO: 16453 - DNA, 213 bp, Zea mays
  Coding DNA Sequence Number=SeqID_2050
gcatgcctgcagtaatatgctgaagccatcatactttcggatggacccactacctggacgaaacgcgcttttaccatcccagccaggggagaaaattgtacagtatcctattcgtccagtagatactacaacagattttgaaggaacaacaagccttcaaccaactcaaccggtaacacacctcttcctaacaccttattttccatacctggt

SEQ ID NO: 16454 - DNA, 191 bp, Zea mays
  Coding DNA Sequence Number=SeqID_2051
ccagtcgcgagatagtcgatccgctcgcgcgaccctgcttaacagcagcctcgcaggtacaccaggccacccgaggctcagacacagtggcagggacctttgttgccgcaattagtacggtacgtaaactgcccatctcggtgggtaagctaatcgaccacagcactagtgctgcggttatttttacaggg

SEQ ID NO: 16455 - DNA, 297 bp, Zea mays
  Coding DNA Sequence Number=SeqID_2052
aatgttagcgggtattggaatcggcgtagcagcagcgttgggcgtggccgccgtcgccagcatggatgtgtttgatcgtggcccgcagtatgctcaggtcctttcggcaacgccaatcaaagagagcattaagcaaccgcgtcaggagtgccgcaacgttaccctcacgcaccgtcgtccggtgcaggatgagaaccgcatcgccggttccgtactgggtgccgtggccggtggggtgattggtcaccagttcggcggtggccgcggccgggatatcgcgaccgtagccggtgcgct

SEQ ID NO: 16456 - DNA, 137 bp, Zea mays
  Coding DNA Sequence Number=SeqID_2053
accattatattgctagagtatgccaagacacgagcaagaagtcgccaatggaactgatcaacgaggtacctccgatcaaggttgatggtcgcattgctgtctgtgaagggggtaggcgtgttggacttggccaccca

SEQ ID NO: 16457 - DNA, 498 bp, Zea mays
  Coding DNA Sequence Number=SeqID_2054
gtcgacctgcagtgaagctaggaaaagaaatccactaccgttctatgaggatgagaggctgcggagatgtcattgttgaatccgcactcgtggacctgtacgcaaaatgtggtgcagtagactatgcctacagagtattcaaaatgagcagtgtccgcaacatgattacttggaatgccatgatttgtggttgtgctcagaatggccatggtgagcgaaccatcagcctgttcaatgagatggttagaggaggggtcaagccagactacatgagtttcattggtgttcttttttgcttgtagccatactgggatggttgaagagggaaggaactacttcaactcaatgagcaaggactatggtattccccctagtattgaacattacaattgcatctgatgacctcctcagtggagtggaacgctagctccgatcaacaacgctattactcgatctgatgcaagaaaacacacaaaattgtggagtgcttcggcgttc

SEQ ID NO: 16458 - DNA, 578 bp, Zea mays
  Coding DNA Sequence Number=SeqID_2055
tgcctatttcaaaagccagcgcgtcaccggcctgttcgataaggcggaccgcaaactgccgctgccaccgggcaccggcagcggcacggttgacgtccacggcggctggtatgacgccaccggcgattacggtgtgcacctgtcgcaccagaatctgacctcttatttcaatccgcagcaggcgccgctggtggcgtggagtttattgcgcggttatcaaaatctcggggcgcgtgataacccgaactttgacgagtatcgccggcgcatgctcgacgaagggctgtacggtgccgatttcctggtgcgcatgaagcggccgggtgaatccttcttccaggcgatctcgtcgccgggcaaagagaagctggctcaggaccgggtgatcgccaatcccaactggcgcacgcagatcaaagagaaggagtcagattccaccattgttgaagaggaggcggtcggcccgctggcgtggcaggccagcttccgctccggtgccggcatgtcaattgccgcgctggcgctggccagcaccatggagaatgacggcaacttcacgcggcagcagtatctgcaaa

SEQ ID NO: 16459 - DNA, 219 bp, Zea mays
  Coding DNA Sequence Number=SeqID_2056
cgtgggcggcttggcttgccttttttgtccccacctcttggtcgccggggtgcccttctcggggggcggcgccgggtttcgtcacttcttcttcgctgtcgtcgtatcggtccccttggttgatgccactgtgggcagctttgcctccgcgttccccaactctaacgttgggtgccttgtgggccatcttgcgggttgctctcgcaagtggtgcgtgtc

SEQ ID NO: 16460 - DNA, 381 bp, Zea mays
  Coding DNA Sequence Number=SeqID_2057
atcaggcccgacgaaggagacagcacagatggacacccaacgcgcagcggtcgtcacgtaccgcggcaatgcgatcgagaacacgcacatcgccgatgtggcggtcgtggatgccggcggcaagctgctgttccggctcggcgatccgttccggacgaccctcgcgcgctcggcggcgaagccggcgcaggcgctgtccgtgatcgagacgggcgcgccggagcggttcggtttcgacgacgcggacatcgcgctgatgtgcgcatcgcacagcagcgaggaacggcacatcgcgcgcacgcgggcgatgctcgcgaaggtcgacgcgcaggagtcggatctgcgttgcggcggccatgcgccgttgtcggatgcggtgta

SEQ ID NO: 16461 - DNA, 177 bp, Zea mays
  misc_feature (91)..(91): n is a, c, g, or t
  Coding DNA Sequence Number=SeqID_2058
aaacatggacggctaccggctgacgcagcgtctgcgccagctgggccatgctttcccggtgattggagtgaccgctaacgcactgtcgganaacaaaccagcgctgtatggatgccggcatggataactgcctgtcaaaaccggtgacgctcgatgtactgaaacaccacggctggc

SEQ ID NO: 16462 - DNA, 208 bp, Zea mays
  Coding DNA Sequence Number=SeqID_2059
ccccaagttgtggacattgtcccgtcggccgaaaacttcgggttgaattacggcttaaaattttcttgcggccccgccggcaagggttcttacaattactacaacaaggcccgtgccggattggccggttcaaccccttccggcaacccgaaaaattccttgtggtggaacggattcattttaacgaaagccgcttacggttcattgg

SEQ ID NO: 16463 - DNA, 183 bp, Zea mays
  Coding DNA Sequence Number=SeqID_2060
ggacaacaccatattatgagaggattaacaaagctcatgtttgcagtttctttgttcgtggcgaatatacaagaggagctgagtgcccttatcgtcaggagatgcctggaactgggcagttacctcagcataacattaaaaatcgctgctatggactggattttccattgagacctacaggct

SEQ ID NO: 16464 - DNA, 228 bp, Zea mays
  Coding DNA Sequence Number=SeqID_2061
ggaaatttatcgatatcgcgccgacgtggcgctgctgtcaccggtcggcatcgatgcccgaaacggcgccagcagcttccatccgcatgaagctgccatcgcgcacgccatggtacagcaggccagccgcaccctgctgctggcggatcacagcaaactcggcgtgatcagccgtactcagtacgcccctgtcggcgatatcgatctgttgatttgcgacggcggcgc

SEQ ID NO: 16465 - DNA, 377 bp, Zea mays
  Coding DNA Sequence Number=SeqID_2062
caaaaccatggatatgccttgcatagcagccataataaggggtactatcagtatggtagatggacacatggtagcaaaattacatagctaaaagataaaaaaaggaaacgggcggggggggggggcgctacatctcatctccccgcgtactctgcgttgaaccactcttcccgcgaactctgcgttgttaccactgcttcccgcgtactctgggttgttaccactgcttcccgcgtcctgtgcgttgttaccactgcttcccgcgtcctctgcgtggttcccactgtttcccgcgtcctctgcgttgttcccactgcttcccgcggactctgcgtcgggccccctgcctcccgcgtcctctgcggtgggcccactgc

SEQ ID NO: 16466 - DNA, 513 bp, Zea mays
  Coding DNA Sequence Number=SeqID_2063
tgccgtacccggattacgccaaaatcagcgatgaagacctgcacgcgctgtacgtctacttcatgcagggcgtgaagccggatagcgcgcagccgccggaaacaaagctgagcttcccgttcagccagcgctggggcatgcgtttctggaactgggcgtttaccttagataagccgttccagccgattggcggcgcgtcagcgcaggttaatcgcggtgcatacatcgtggaaagccttggccactgcggcagctgccacacgccgcgcggcctcggcatgaacgagaaggcgctggacagcagcgacgatcgcttcctcgccggcggcagcctgaataactgggaggtgccgtcgctgcgcggcgtgccacgctggagcgagcaggagattgtcgattatctgcaaaccggacgtaacgataaagccgcggtgggcggcgagatgacgtcagtggtggagcactccagctcgcacatgacggatgccgatctgcaagcaattgccgcttacc

SEQ ID NO: 16467 - DNA, 569 bp, Zea mays
  Coding DNA Sequence Number=SeqID_2064
ctgctgtcacggagagctctggtgaacggcgacacgaggctggagccgttcaggcagcaggccgaggacttcttctgcaggatcctgcgcgactccccttcctccacgacgcagtacacgccgggcggcctgatgcacaagtcggggtacgccaacctgcagtacgtcacctcggccagcttcctgctcaccacctacgccaagtacatggccgccaccaagcacaccttctcctgccagggcctccccgtcaccgccacctccctcagggctctcgccaagcagcaggtggactacatcttgggcgccaacccccagggcatgtcctacatggtggacttcggcgtgcggtggccgcagaggatccaccaccgggcgtcgtcgctgccgtcggtggccagccacccggcgcacatcgggtgccaggagggcttccagagctacttctattccagcggcgccaacccgaacgtgcacacgggcgccgtcgtcggcgggcccgacgagcacgacgagttcccggacgaccgcgccgactacgcgcggtcggagccgacgacgtacaccaa

SEQ ID NO: 16468 - DNA, 576 bp, Zea mays
  Coding DNA Sequence Number=SeqID_2065
tgtggccgccgatatggaccgcataaattactattcgcgcggttttctgattgataattacatgaccgacggcattccgaccgcgtttgcccagcgctggaacctcggtgacgcgcagaccgataccgcgctgtacgagcgcgtcgaagtggtgcgcggcgcaacgggcctgctgaccggaccgggcaatccttccgctgccatcaacatggtgcgtaaacatgccgacagcaaagagtttaccggtagccttgaagctggctatggcagctggaataagcagcgttacgtcgccgatctttctgcaccgctgtcaccggaaggcaacgtgcgcggtcgcctggtggccggctatgaagacaaaaacagcttcattgaacgctacggtgccgataagaagtttatctacggcgtggtcgacgctgatgtgacggacgccaccagactgtctgttggttatgaattcagccaggtaaataccgattcaccgatgtggggcggcgcgccgcgttggtacaccgatggcacgcagatccactcgcgtcgcggctataacaccgcgccagaatgggctta

SEQ ID NO: 16469 - DNA, 417 bp, Zea mays
  Coding DNA Sequence Number=SeqID_2066
tcttcgctcagccacctggtgaaaacgctggagcataacctcggcgtgcagctgtttcagcgcaccacacgcagcgtgtcgctgaccgacgccggtgagcagctattacagcgcctcgcgccgctgctcaatcagatggatgaggtgctgcacgacgtcagcctgagccgccagcagcagtacggtacgctgcgcatcagcgccagcgatgtggtgattggcctgctactggatcaggtggtgcccgagttcagcgcgcgctatcctggtattcagcttgatttatccgcccagggcgcgctggtagatatcaccgccgccgggtttgatgccggcatccgtctgattgaagatgtgccgcaggatatggtggatattgcgctcggcggcccgctgaccttcgttacggtagcctcg

SEQ ID NO: 16470 - DNA, 391 bp, Zea mays
  Coding DNA Sequence Number=SeqID_2067
gttcgctgtgagatcgtcgcctttccgcagcatggtatgctgcattcgcaggtcgatggtctgatgcgcgaggcgatgcagctcggcgtgcagtatgtcggtgggctggatcccactaacgtggacggcgccatgcaggcttcacttgatgcgatgttccgcatcgcgctcgattacgatcgcggcgtggacattcatctgcatgagaccagcgccgccggcgtggcagccattcagtacatgatcgccaccatcgcccgtaatccacagctgaaaggcaaagtgacgctgagccacggtttcgcgctcgccacgctggaaggtaaggcgctggatgagattatcgccggcatggccgaacagcagatgagcgtggcgtcaacgattccga

SEQ ID NO: 16471 - DNA, 552 bp, Zea mays
  Coding DNA Sequence Number=SeqID_2068
tggctgccgcgatcaaagaaggcctgcgcgcgctgggctattacgagccgcagatcgactttgaatcacgcccggcaccgccgcagggtggccgtccggtgctgattgcccgcgtcaccgccggtgagccggtgaagattggcggcagcaccatcgtggtggaaggtgccgcaaaagacgatcctgattatcaggcgtgggtgaagcagggcaggccgaaagtcggcagccagcttaatcacggcgactacgataaattcaaaaacggcttctccagcctggcgctgcgtaatggttacttcgacggtgactttaagcagagccagcttggtgtctcggtcgaacggcgcttagcgttctgggatatcgactacgacagcggcccgcgctatcgcttcggcgatgtcagctttgaaggctcgcaaatcaatgaagcctatctgcgcaacctggtgccgttcaaaaagggcgatccctacagctcacgcgatctggccgaactcaatcgtcgcctctccgccaccggctggtttaattctgtcgtcgtggcac

SEQ ID NO: 16472 - DNA, 188 bp, Zea mays
  Coding DNA Sequence Number=SeqID_2069
cggctgcggccataggaaaacgcgacgcgggtcggtcaggcttggcccagaaagttggcatggcgtcggcgtcgccccgatccgccactgttgcggctggtagctaccgatgtgacaacaacacggcgtcgttgcctgcctggtgggcgcagggaggaccagagcactgccttgtggctgcatgcgtc

SEQ ID NO: 16473 - DNA, 223 bp, Zea mays
  Coding DNA Sequence Number=SeqID_2070
tccgacagcggcattggggcaatagggcggagatccgcctgccgcgtagccgcacgcccgcactagccactggctcatcaccttcgacaccaccgagggggccgcgcacgcctatgacggcgccggcgttccgcctccatggggaccctgctaggctcaacttccttaagcctaggcgcggcgggcagcacctcggcctgccgtaccacaccgcgattgatgc

SEQ ID NO: 16474 - DNA, 370 bp, Zea mays
  Coding DNA Sequence Number=SeqID_2071
gtgtcagatgaagcggtagcaaaccgcgtcctctgagcagtggcaccacattgtggtaggatccaatcatccacggacaatgtggatgcgcgtgaatcggcagcatcacagccgtgacgcctggctggcgttattatcccagcagaatcaaaatgcgttgtagtggtgacgcgccggatgcgctgagtcttcaagctccggctccggtcagtcagctgccaggctttcagcagggctgggtaacggtgcaggatctctctgctcagcgttgcgccctgctgctggcgccggaaatcggcgaaaccattctcgacctgtgcgctgcgcccggcggcaaaaccacccatattctcgaaattgcgccgcaggc

SEQ ID NO: 16475 - DNA, 337 bp, Zea mays
  Coding DNA Sequence Number=SeqID_2072
agcgatgtgcagaaatgtcacgcaaactaaaatttttcagtgatcagatcaacagggcaggtttaagatcttctgttcgacctgcacttgaaccggatattgatctggaggagctagaggcaagattgggtgaacatgagcatgaactgcttgagatgaatacaaatagtgacaagctaaaacagacatacaatgagcttcttgaattcaagctggtcttgtcaaaggttgtatctcattcgtgtgacttgattgtattactgatccattatttttctcttctttccattaaatgttttatcaaacaacatcttgcaggcaggtcacatccttgctt

SEQ ID NO: 16476 - DNA, 541 bp, Zea mays
  Coding DNA Sequence Number=SeqID_2073
catattccgggtgcccagctgagtacgctgaaggagcccgtcggggtctgcgcgctgctcaccccatggaacttccccagcgccatgatcacccgcaaggcggctgcggcattggcggccggctgcacggtggtggtcaagccggcccacgaaacaccgttctcggcgctggccctggcccagctggcagaggacgccggcttcccgccgggggtattcaacgtggtgatcggcgagccgcaaatggccatggaaaccctggtgcgcgacagccgcgtgcgggcggtcagcttcaccggctcgacccgggtgggcaagctggtgctgcaagccgcggctcaggatgtgaagaaagtggcgctggagctgggcggcaatgcgccgttcatcgtctgcgccgatgccgacctggagctggccgtgcgggtggccgtggcagccaagttccagacgtctggccaggactgctgcgcggccaaccggatcatggtgcagcggccgttgtacgaagcattcctggcgcgttttgcccaagcggtgc

SEQ ID NO: 16477 - DNA, 299 bp, Zea mays
  Coding DNA Sequence Number=SeqID_2074
gttgggtgatctggctgtccttccttgttgcgcttatcctgcaaatcatgccgtggccggatcagatttacatgttccggccattcttggctattgctgatcctgatctactgggtgctggcgctcccggcaccgggttcaaatgttggccacgggttttttcttgggccccataatgattttgttcccgggttcaaccttggggttggttcgttggcttaaccatattgcctattttgttgccctttaaatttaagttattccccattttggcgttttgccaccagccattaatggtt

SEQ ID NO: 16478 - DNA, 332 bp, Zea mays
  Coding DNA Sequence Number=SeqID_2075
gtggttaaccgcacggcagaacgcgcgcaacagctggctgagcttttccagcacagtggggcgatccaggcgatgagttttgatcaactggccggcgatcgttttgatctgatcatcaatgccacctccagcggcgtagcgggcgacgtgccgccgctgccggttacgctgattgatgcgcaggtgcgctgttacgacatgttttatcagcaggggctgacgccatttctggcgtggtgccagcagcacggcacacagcagctggcggatggactcggcatgctggtgggtcaggcggcgcatgcgtttcagctgtggcatggcgttatgcc

SEQ ID NO: 16479 - DNA, 445 bp, Zea mays
  Coding DNA Sequence Number=SeqID_2076
tttgcagcataaccgtctctgctgatgttatacgaccactaagatataaacaaaacagtcaacattgattgaacttgatcagcctacttattcacaactgatctgaagagtaaaggagaaccagggactgtaatggctactcaaagaagcacttataaactgacaacacagctacacacacaaatatttataagattcaatcttttaaatggtctggtaactgctcaagtggtctggtaacgaagaatctgcaaactttgaaagatttattgctggtgcttttgctggggttacaacaacgatcatgtgcatacctatggatacaatcatgacaaagatggatgctcctggtggtgaagctatacgtggggtcattggtgttgcccgccacatgatccaaactgaaggattcttctcgctagataacggattgatgccttctctt

SEQ ID NO: 16480 - DNA, 430 bp, Zea mays
  Coding DNA Sequence Number=SeqID_2077
cccgtatcgagggtctggacgtcaaacacagcagcaaagaacagaccgaaacggacgctggcagacgggctgaataagaggtcagggcaaccgcaccataccggaagatgacctgggtggcgggaccttcgataaggcgatcatggagatcaacgaagagaaccgcgagaaaaccttggaagaactggcgaccgacggtgatacccagccgcgtggtgaagacgtcaacagccgactcagcaactgcctgtgtgacgcaagcaagaaacatccggcgcatcgtccagacaacaatgcgctggcgatgcaccgcctcgtaagaaggccgaccagaaagcaaagaatgagcctgtgtctgcccagcagacagacgtgaacctgccgtacatcgcgggggaagccactgggactaagcaccagaccatcaaag

SEQ ID NO: 16481 - DNA, 192 bp, Zea mays
  Coding DNA Sequence Number=SeqID_2078
cttaaacaacaccacggcaactaatttaggctgtcgaactggagtagggcaagggaaaatgttaagcagaggtatatgtggtggtggtggacatggtggaaaaggcggggatggtttttataagggaaaccttgctgagggtggagctatctatggcaatgctgatctaccttgtgaacttggcagtggcag

SEQ ID NO: 16482 - DNA, 395 bp, Zea mays
  Coding DNA Sequence Number=SeqID_2079
acagcggctgcgactgctgcacaaacccggcacgcgcgagaataacgcgctgcaaatggcgcgcgggctgaaacgcgaacatccgatcaaagccaaagtgctgccaaccgaatggctgggcgaacacagcgccgagcaggtcgccaatgcggaggattcgaaactggaagaagaggcacgagaccagggccacgaaaaccgcctcgggaataaccgcgcggaacagcgcctgatagagcgactgaaaaacgacccggagatggctgaacgcgccgagaccaacaaacactggccgaaagaggacgagtcgtctaacccgtatatcggcgagctgcggcaggaccagcgccgcaggctgaaaagcgaccccaacggagacaatacgcgcgagcagg

SEQ ID NO: 16483 - DNA, 217 bp, Zea mays
  Coding DNA Sequence Number=SeqID_2080
tgggcacggtgaaagcggcggaaattgccgccgggctgatcgaacacggccgcgcgccgtcaacgccagtggcggtgattggtcgcggcacgcgccaggatcaacaggtgctgaccggcaccttagcacaactcgaggcgctggctgctgccgcgccaacgccagcgctattagtgattggcgaagtggtgaatctgcacgggcaacttgcctggtt

SEQ ID NO: 16484 - DNA, 442 bp, Zea mays
  misc_feature (131)..(131): n is a, c, g, or t
  Coding DNA Sequence Number=SeqID_2081
atgccgctgatggtggagccgctggtgatggcccccgccggccagggcgcggcgtacggctcgctcggtgacgtcagacaaatcgtgccgctggtgcggctggcgcgggagctgggcgccgacatcattanagccgaccccacggataacgtagaggatttccatcgtgtggtggaggcggcgcgctgtccgacgctggtgcgcggcggcggcaaaggggaactgggcgcggtgctggcgaaaagcgccgcgctgatggcgcagggtgccagcggcatggtatatggccgcaacgtttatcaacatgataatccgtcacgcgtggtcagcgcgctgatggcgattatccatcagggtgtcagcggcgcggatgcgctggacatctaccagcaggcggagtgcgccggcgaaacgcatcagccgcaggaaggctttgctgagc

SEQ ID NO: 16485 - DNA, 474 bp, Zea mays
  Coding DNA Sequence Number=SeqID_2082
atccatccgtggtctacccctgcgggctcgcccagctccaaagccccctcctgctcgcgggcacacggccaggccctgggtcgtcgtctccagcatccggctcaagggcgcgcgtggaagaagggcccgacacgggggaagggcggcccgcagaacgcggcgtgcgccagaggacgtgggcaagtgggtggccgagatccgagagcccaacaagcgcacccgcctctggctcggctccttcgccaccaccgagcaggccgcgctcgcctacgacgaggccgcgcgcaggctctacgaccccgacgctttcctcaacttgtcgcacctccgcgccttcacccctaccctccacacgactgcaacctctctgccatcctcatccaagagccgccaaccacctccccacgtcctgcagcggaagagtcaggatgtacgggaccagatcacccgctcctgcgagctcgtggcggactg

SEQ ID NO: 16486 - DNA, 309 bp, Zea mays
  Coding DNA Sequence Number=SeqID_2083
gcagtatctcttaacttcatccaaagataagacagtgcgcttatggaaacccggctgtgatggttgtcttgcagttttcaaacacaaagactatggtaagcagaatatcaaactgataacagtaacatgtgttcagttcaaccctattgatgagaaatacttcatcagcggttcagtagatggtaaagtgcgcatttgggacgtgttggacaagcgagtaactgactgggccgatacgcgaaatatcataactgatttgagttaccaaccggatggaaaggtgtgaatcagatacaattgtcgttgcat

SEQ ID NO: 16487 - DNA, 458 bp, Zea mays
  Coding DNA Sequence Number=SeqID_2084
acatccgaccacttgtgtctcgaggccgaccgatggatcgtgctgccgaacattctccagccggcccccgagatctttgcggggcgtgcacgtgtcacttgactaaccggactgacttgatttgtacctgacgacccggcctcatctatggatacacctccgacgagaccccctatctgatgcctctgaaccgcgtgctggccaccattgtctgaccgcgccttaccgaagatcgcatggacagtacctgcgcctgaatcatgcccgacggactgaccgcatgtacagtgtgctacttagaacgaaggcatcgccatggagcctatacacgtgcccaccgagctaatatattaccagcacgactagaccgtctccaacgactagatcggggcccaccttttagtggacttcctcaaccccggcatcccggatagggacctgtacgataagaccgtctt

SEQ ID NO: 16488 - DNA, 195 bp, Zea mays
  Coding DNA Sequence Number=SeqID_2085
tgccggcgggccgatgaatcagcatcgccacctccttagccctcgcgttcgccgcgatctccgcctccgttggggccacgacctccaccaccgcgtcctgcgacgccactggccccacgatgagtagcgaagcactaccggcgggcagatgaatcagcatcaccacctccttagccctcgcgttcgccgcgatct

SEQ ID NO: 16489 - DNA, 433 bp, Zea mays
  Coding DNA Sequence Number=SeqID_2086
gacacggccgcgaccgtcgtcaagggcatcgcgcacggctgcgagctgtcgggctgcgcgctgatcggcggtgaaacggccgaaatgccgggcatgtatccggacggcgaatacgacctggccggcttcgcggtcggcgcggtcgagaagagcaagatcatcgacggcagcacgatcgccgagggcgacgtcgtgctgggcctcgcatcgagcggcatccactcgaacggcttctcgctcgtgcgcaagatcatcgagcgcgcgaatcccgacctgtcggccgatttccacggccgttcgctggccgacacgctgatggcgccgacgcgcatctacgtgaagccgctgctcgcactgatgcagaagctgacggtgaagggcatggcgcacatcaccggcggcggcctcgtcgagaacattccgcgcgtgctgc

SEQ ID NO: 16490 - DNA, 432 bp, Zea mays
  Coding DNA Sequence Number=SeqID_2087
tacaacttttgcactggccgagctagccaccagagtgcgcgctggctattttgccctctactgggggcagaacatcaatgaggggatgctggcgtagactacgccactagaaactacaagttcgtcaacgtggccttcctccccacatttggcgagggtcaaacgccggcaccgaacctggccgacctctacgacctggcgagcgacggctgcacaggcatgggcacagacatctaggcgtgccagcacatgggcatcaaggtcctgctctccatcggtggaggcgttggcagctatgggttgtcgtccctagccgacgcgaggagagcttcacgacgtacctcaggaaccactaccttgatggctagtctattttcatttccaggcccctcggcgacacggtcctcgatgacgtcgacttcaacatagaaa

SEQ ID NO: 16491 - DNA, 315 bp, Zea mays
  Coding DNA Sequence Number=SeqID_2088
atggctcatttcactgatatccgcgcgctggcgttcgatctcgatggcacgctggtgcacagcgcgccaggcctggcacaggcgatcgatctggcgctggccgatttgcagctgccgcccgcgggcgttgagcgcgtctcaacctggattggcaacggtgcggacatcatgatggcgcgggcgcttagctgggcgctgggccgtgagccgcaggccgacgagcagcgcgacgcgcgtgcgctgttcgacaaacattacgccgcaacggtggaagccggcagtacgctgtttccacaggtgcaggagacgctggct

SEQ ID NO: 16492 - DNA, 377 bp, Zea mays
  misc_feature (320)..(320): n is a, c, g, or t
  Coding DNA Sequence Number=SeqID_2089
tcttccccggcaggtgtggcgtgtcgtctgcccgctcgccccgtcgccacgcctgtcggccggtgcgttggcgttcaagcccgcttctcgccggcggccccccgtctgccgcgcaggagctccggccgcggcccgctgcggcgtgcccgagaagcccccccgccagcccgtccgcccgatggcgagttggcgcccggctctgtcctgggcgctgcctgcgccaggacgcggcggagagggctccgagcgctccgctgctgcttgccgcgcgcgcgcgtcagaattcaggtccaccaaggcgccgttatggatcatggatntttacataaggacaaaggagcagctagtggtattcctggtgcccgatacatcgctga

SEQ ID NO: 16493 - DNA, 431 bp, Zea mays
  Coding DNA Sequence Number=SeqID_2090
ccacatcgtatcatcgtggtgttcgtctccctgggcggcctgctgctgctggcatgcctggctgccgcgctcctctgctggcacaagaagaagaagaggagggggaggaaggcagaggaggaggaggccaaggccgacgtgctcaacttcagcgaccacgttcacgttcacaagcagaccgtgcccggaccggccgggggcgcgagcgccgtcaggctgacggtggacgaggacgtcaggctccaagaggcggtcaggaagcaggacgccatcggcgagtcctcgagcaccgccccttggacctggcacaagaaacaccagagcggagaggagaggaagacggctgtcatcaacgtcaccaagcacaagcacgtagacgagatgatcgtgcctgggccacatggcgatagggtcgatgtcctttcggagga

SEQ ID NO: 16494 - DNA, 246 bp, Zea mays
  Coding DNA Sequence Number=SeqID_2091
gataaatatctgctgctcgggctgtggctgctgtgccacagtctgctggccgcaccgcgcgtcattaccctgtcgccgcatctcactgaactggcgtttgccgccggcatcaccccggtggcggtgagcgcgtggtcagactatcccgctgctgctcgccagctggagcaggtggcgaactggcagggcattcgcgttgaacgcattgtgcagctcaggccggatgtggtgctggcctggcgcggt

SEQ ID NO: 16495 - DNA, 104 bp, Zea mays
  Coding DNA Sequence Number=SeqID_2092
aaacctgactcaaggtgggcgctatttcgatcaaaatcagacacagtggcgatccaagcacgtccaccccctggacgagacgatggcgcggcttcggaagtcgg

SEQ ID NO: 16496 - DNA, 459 bp, Zea mays
  Coding DNA Sequence Number=SeqID_2093
atcgctgctgccgtatctggagaaccacggcgtgctcacgcgcgactcgctcgatccgtcgctgaagctgatgccgttcaaggattcggccgactacaaggagtcgctgacgagctattactaccggctgtgcgagatcgacgacctggtctgctacccgtggatcgcgcaggcgttcgccgggctgtcgctcgccgacctgaagcgccacatcgacgcgatgctcgccgacggcaagccggtgccgatccgttactggcagggcgacaaggtcgtcgacggcaccgcgaacccgccgcgtttcttccgcgggatgcagcagctgtacaacgcgctgcgcgagaacgggatcgaggtctacgtgatgacggccgcgcacgaggagctcgcgcggctcgtgctggccgatccgaagtacggctacaacgtgaagccgcagaacgtgatcggcgtgacgac

SEQ ID NO: 16497 - DNA, 520 bp, Zea mays
  Coding DNA Sequence Number=SeqID_2094
aagccagcaatgtgcgctgccgcagcggggaaatcgacctgattatgcgcgacgcggattgctgggtgtttgttgaagtgcgctatcggcgcgatgcacgttttggcggcgcggctgccagcgtgacgcgccagaaacaacaaaagctgctgcgtaccgctgcgctgtggttgctggcacgcggcggcagttttgatacggtgaattgccgttttgacatcatcgccatcaccgggcgcgaactgacgcaaatcgccgcagccgaagcgctgccagatgcgatttcccgcgccgcgatgacgctggtgcagtcactgctgaacggcaacaaaatcctcagctgcggtaacggcgcctcggcggctaacgcccagcattttgccgccagcatgattaaccgttttgagactgagcgtcccagcctgccggcgctggcgctgagtgcggacaatgtgatgctgacggcaatcggtaatgaccgtctgcacgacgaaatttatgccaagcaggttcgtgcgct

SEQ ID NO: 16498 - DNA, 77 bp, Zea mays
  Coding DNA Sequence Number=SeqID_2095
ctgccgctgctgcacttcataagcacgataaatgatgaagaaggattcaacaagcgtgacgcgaaagcaaatgccaa

SEQ ID NO: 16499 - DNA, 327 bp, Zea mays
  Coding DNA Sequence Number=SeqID_2096
ttcaacgcccttccagagagtgtggatcacaatcttgacggtttaggatcatgcccgccgtatgcacgatcgggtgccgccaggcccggccggggtgccgatcatcgtcagcaagctctgcctggtgtcataaaagccggtggttcggtgggttcatggccttctcaaggacatgaacaccaagatcctatgcctccgcttcggggccgtgcacgtcgtggtagtcgcctgcccggagatagcccgcgaggttttcaggacgaacgacgccgccctggcgtctcgtccggagacggacgcctgcgagctgttcagcctcgggtacaa

SEQ ID NO: 16500 - DNA, 541 bp, Zea mays
  Coding DNA Sequence Number=SeqID_2097
atatggacagcctgttccagcacgatcctgccacgctgagcggcaagctgcgcgtcgatatgtcggtggcgatggcgaccggttttatcctgccgcgcctgccggagtttttgcagcactatccgggcgtggagattgagctgagcagcagcgatcgccaggttgatgtgattcgcgagggctttgactgcgtgttgcgcgttggcgaactgaaagattccggcctgattgcgcgaaaaattggctcgcacgccttgatcaattgcgccagccctggctacctttcccgcttcggcatgccggtgcggctggacgatctcggccagcacgccatggtgcactatacccaacagttggggcagccctcgccgggctttgagtactttgatggcaaacagtgccactacgtgcagaccggcggcgtggtgacggtaaacagcaccgaaacctatcgcgccgcctgtatcgccgggctgggcattattcaggtaccggcgattggcgtgcagccgctgctggaatccggccagctggtcgaagt

SEQ ID NO: 16501 - DNA, 389 bp, Zea mays
  Coding DNA Sequence Number=SeqID_2098
atgggccgctttaagctgggctcgacggtgatcaacctgtttgcgccgaaccgcgttaagctggctgaaagccttgaagccgaaagcaaaacccgcctggcccggcgacagcgctccgctcatcgactaattccgggaaacaccgccgtgcgcgcctctctttttctgctgctgagcctggtgctcagcagcaccgtctttgccgccaccgttccacccgccagccagttaaaacaggatctggaaacggcgaaatccgcgaaaagctcgcccagccaggccgaacaggtgcaggcgctggaagcagcaattaacttcctgtccgaacgcgacgactcgctggaacgggcgaaacagtatcagcaggtaatcgatgatttcccgcggct

SEQ ID NO: 16502 - DNA, 449 bp, Zea mays
  Coding DNA Sequence Number=SeqID_2099
gacgaggtcaccctgtgccccaagcctcgtttcctggtcatcccatggccagccactagccacatgattcctatcgtggacatcggctgcctcctcgccgcggacggcgccccggtcaccatcatcaccacgccctccagctcgcagctcgtccagagccgcgtggacgaccgcgctgggcaagcgggctcggcggacaccacggtcaccgcgctcccgttcccggccatggaagccggcctgccggacggctgcgagccctgggccgtacctgagggggtgccagggtcacccgaccgttggcggctttgtgacaaactgtgggtggggctcgacgctggagagcgttgctgcgggcgtgccgatggccacctggcgttctccgccgagcagttcctgaacgagaagctggccgttggcgtgctgggcatcagagtgtctgtcggcgt

SEQ ID NO: 16503 - DNA, 119 bp, Zea mays
  Coding DNA Sequence Number=SeqID_2100
aaattcagaatttgagagatccctttgtatggttatttgggaaggtgagaccgctgctgaggtaatggagcgcatccagagaaaacttagagttcatgatgatgaattgtccaagctcc

SEQ ID NO: 16504 - DNA, 245 bp, Zea mays
  Coding DNA Sequence Number=SeqID_2101
gtggatgaagcaaagccagtgaagaagacgacgataagagtgagggagtttgacgtggagagggacccccgggctgtggaggagctggagcgactgtgccaggtcggcctgtctggcgaccaaggctctgaccaccctgtcgccgaccatgatagaggtgcagagaagacgacgaggagcagcaagaagaagaagaagaaaggcatgtctctctacgtcgagcagatcggtgacccgtttgcccg

SEQ ID NO: 16505 - DNA, 476 bp, Zea mays
  Coding DNA Sequence Number=SeqID_2102
aaatctggtcccgtggccgatcggcagcgtctttcggcggcgcgtcgtccccgccactctgcgggtaagcgagcgggctgtcagcgctagggacggcgaccgcggccgcggcgcgtgcgcgctcgcgctcgcgccgcctctcccgccgttcccgtcgctcccgccgccggtcccgccggtcccgcgaccgcatgagccttttcatgttggtcagaatgtcggccacctcctgctccaccgcatccacctccaccaccgacgccggcgccgcatcctccttgtccttgggcgcgtgatcatccaccttcgacgccgcctcctccatgtacgcgtgctgcatggtatggacgaagccgctgctgctgcggcggtgcgatatgaagaagagttccatctgcggcggccgtggtggcaatggcgtcatctccgggagcccatcggccacagcgacggcgaggtgccgtgccacgctgccg

SEQ ID NO: 16506 - DNA, 176 bp, Zea mays
  Coding DNA Sequence Number=SeqID_2103
ggtgtatatatgtgatggcagtagctgccacaaatctagaagccaagcaaatgatgcaaaagcagaagtaatcaagttttttgggtccgggcaatatgaggaagcattatctaagtatgaaatggcattgcaaactgctgctgagctggaatcatctgaggatatacgtgcagcat

SEQ ID NO: 16507 - DNA, 314 bp, Zea mays
  Coding DNA Sequence Number=SeqID_2104
tcctcccggtgttgtcgttctcggtctctgtctccttcggctggggggagtctgttcttgcgtgggtggtgtcgccccccgtctcccggtcccggggcctttttttgggtcggctgcacctgcccttggtggtggtgctgccgcagcgtctggcggtgctgctgttcctgtcgtgggtcgtctgcttcgccgggttggtctttggcttggtcgcccggtgggtgtcgtcagggtcttggggctctgtttgcggggtctccagatccagctggtggtcgtgttgtgtgcgtcgtacaggtccttggtggctgcgc

SEQ ID NO: 16508 - DNA, 260 bp, Zea mays
  Coding DNA Sequence Number=SeqID_2105
ggtaactgggagttccgcgccaacgccggcagcggctggaccgacgaattcaagctggatatcgatctcgcaccggcagcgaaaacggaaatcacccacgcttacgatgactttggcccgttcaccggcatgctcggcaacggcgcgattaccaatgcccgcacgccaaaacatgcccgcccggccccgattttaccagcttgggtgcctgccggcgccaatgccccttggaagtataagactgcccttctttctccggg

SEQ ID NO: 16509 - DNA, 313 bp, Zea mays
  Coding DNA Sequence Number=SeqID_2106
atcatctgttttaatgtgagcttctttcttatcatttactttacgggatgattcatatctgggagagctatatcagtactattggagttgattttaaaatccgcaccgttgagcaagatgggaagacaataaagctacagatttgggatactgctggcaaacaagagcgtcaggaccagcacaagcagctactaccgtggggctcatggcatattggtcatgtatgacgtaactgaccaggagatcaagtagtggctgaatgaatgatcaagtagtggctgaatgaaattgacagatatgctagtgaaaatgt

SEQ ID NO: 16510 - DNA, 224 bp, Zea mays
  Coding DNA Sequence Number=SeqID_2107
atgcctgccttcttcaacaggatcgagggaaagctcaacatgggggggaaccacaaaagggaggatgactaccaaaggatggccgaggtgcaccacaggaggggggagggggagctccacaaaatggacggggggaagcatatggaaggcgtcctgaagaaaatcagggacaagatcaccgtcgagctcggaaacaagtccggcgtccccatggatatgatggc

SEQ ID NO: 16511 - DNA, 344 bp, Zea mays
  Coding DNA Sequence Number=SeqID_2108
tgaaaactgcatccaggcgcgttatcgcgctactgctggcgggcgcgacgctgggcttcagccagctggctctggcacatgcccacctgaaagccccggtgccggcggataacgccgtggtggagcacgcgccgcagcaactcaccctgacattcaccgaagatattgaaccggcattcagcggcgtggaaatgaccaacgcgcagcagcagccggtggcgctggataaagcccagctgaatccgcagcagcacgatcagctgattgtgccgatcgcccagccgctggcgtcgggccagtatcaggtcaactggcacgtgctgtcagtggacggccacaaaacg

SEQ ID NO: 16512 - DNA, 350 bp, Zea mays
  Coding DNA Sequence Number=SeqID_2109
gaagccgatccggagctgaagccgcgcgatatcatcgtcatggtggcagacatcgacagctacgcgcctttcattcaggcggcttttgccagtgcgccgcctgagcgctatctgccgttcgccatttctgaccggcgcgccagtcaggcgcatccggccatcctcgcgctgctcagcctgctggcactgccggacagtcgctttgcctcagaagaggtgctggcgctgctggaggtgccggcgctggcacagcgtttctccgtcgaggagagcggcctgcgcctgctgcgccgctgggtgatggaatccggcatccgctggggactggatgacgccagcgtggaagcgct

SEQ ID NO: 16513 - DNA, 285 bp, Zea mays
  Coding DNA Sequence Number=SeqID_2110
cgaagtgtgagtgcagcaaggctccccagttgggtattagttgtgccggtggatacatggcaggtgtcttctgtgctagtgtttctcacccggcagaaaaccttgtgtctttcttgaccaatgccaagcatgttactgttggccatcctgttaagaagcttggtctctggggtcattttcactagagggctgcctcttcgtatggtcaagaatggtaccgtgcatggtgctcagtggggaatttaggacgctttcaaagtcatggttggaatcacaacaacggga

SEQ ID NO: 16514 - DNA, 202 bp, Zea mays
  Coding DNA Sequence Number=SeqID_2111
gctctgcccgtgatgcactcggcgaacctgaagacgtggacgacccggtcggcctatccggacgagccgccgtacaactcgctgcccggctacttcaagcgctacaacgacgcgatgcctgtcgggtacgcggcgaagtgggcgccgtcgagctcccgtgcgagcgggcgctcgcacgtcgggttctgggagccctcggtgg

SEQ ID NO: 16515 - DNA, 484 bp, Zea mays
  Coding DNA Sequence Number=SeqID_2112
agaaggaagacaacccccggatgcttgccaacgcgacccaccgcgccagtggcctcttcggcgccggagaaccgcggcggccggtccgtgaagtcgtcactcggcgcctagatgtatctgctgctcatctcctgagattgagccgtagcccaactggtcgccgcgtccctcgcccctcccctcgcgcgcagcagcagagcaccacagcgagcaatggaggcggtgggcgtcgacctggcgctgggcggcatcgccgcgtccctccccgctccccccgcgcgcagcagcagagcaccacagcgagcattggaggcggagggcgtcttgctagcgctgggcggcctacaagtgcccaccgggagaaagaactgtacttccctgccttctgcactgttcttcattcgttccagcacacgctcaaacgctggtttcccagtagtctctccaagagcagctataagatcagccctccttgggtcaagca

SEQ ID NO: 16516 - DNA, 184 bp, Zea mays
  Coding DNA Sequence Number=SeqID_2113
gtctggaggacgattaatagccgaggggtgcgtatgcagcacctgtgcaagagggtgccggaaatccgggggccccgaaggtattttcacatatgggtggtcacattctctacgcactagatggaggcgcgcgcgcacgacatgggggctctatccatcaagggccgaggcaaacatcttaatt

SEQ ID NO: 16517 - DNA, 438 bp, Zea mays
  Coding DNA Sequence Number=SeqID_2114
cgtcgacgagatgcgaaacgcactcaacgacatggagaaattggcaccgggcctggtctctgccctcgacggcctgaccatcaccccgagcgccggcgccagcggattcggcggaaccccgaccggagaaaccacgcccgatcaccccgatcagccggcggcacccgccgcgccgatcgctccgggcggccccgcgatcgccgcgccgccagccgcggcgccgatcgacaacaagcaggcggacaatcccgcccgtgacttggcgtcgatgctgcgcaacgccgcccccaacggcggcatgggtatgccgatgccgcagatgccgcagattcccaacctgggcagcatgatcccgcaatccctgcccggcgccaagcccgccggcctggacaacaaggaactgcccgacgacctcaaggctaagctggccgaccggct

SEQ ID NO: 16518 - DNA, 274 bp, Zea mays
  Coding DNA Sequence Number=SeqID_2115
acccctgttaagcatggcaagatatttgcaacgagatatacatcctgagccggttgcgacatccaaacgtgatatcgactcttggtgcatgcattacacctccacacttgtcaatggttactgaatatatggaaatgggatcactgtatcatctcatccatatgagtggtcagaaaaagaaacttagatggcgcatgaggttgagaattattcgtgatatatgcaggtatgatcctttctcattgcacaataactatccctctagatttttctt

SEQ ID NO: 16519 - DNA, 410 bp, Zea mays
  Coding DNA Sequence Number=SeqID_2116
ccatgtttcgtctgggtgtgttgttcttttcgcagtgccccaggtatatctgtattcccatgttagcgtgtggtgctgtgttcccgcagttcttgttcttgggctccggctccttcatggcgttctggcccgcggtcatagcattggtgcaggccgtcgcggctgtctccagtgcgcttcgctttttccttggtgccctggtcatggcagccctgtcctcagctgtcggcgtccgtgcctcgctctggtgcgtgacgttcgtcatggtgttcttcactggccttggcgcgctcgggtttttctcgcacacgctgctggcctccttgtcagctagccatggcctggctgcgccctccaccgctgtgcttgtgtgcgtgcggcaggctggtctcccgtttgggatggtccct

SEQ ID NO: 16520 - DNA, 553 bp, Zea mays
  Coding DNA Sequence Number=SeqID_2117
tcgtgacctcgatgcgtgggatgaccggcgccaccctcaccgtgaccggtcccgctcgcgacgtgcacagcggcgcggtctccggccccgcgccgaacccggtgcacgcgctcgtcaccgtcctcgcggcgatgcacgacgaggacgggcggatcacgttgcccggcttgtacgacgacgtcgaggagctcaccgaccgacggcggcgggagctgcgggacctgccgttcgacaccgacgtctggatcgagcgcaccgagacccgcaccgtcaccggcgaggccggctacaccgtcgaggagcgtctgtgggcgcggccgtcgatcgaagtactgacgctgctcgccggcgaccccaccggcatccgcacggtccccgggcagcgcgtcgagtcggtcgccgaccagctccgtcggttcgtcgccgtcacgatgccggacggcgtcgagtacgaactcgacatccccgaggagaccggacaggacccgtacgtcaccccggacggccctgcgctcgacgcgctggtccgtgccatggaactcgggcccggaac

SEQ ID NO: 16521 - DNA, 296 bp, Zea mays
  Coding DNA Sequence Number=SeqID_2118
atgggagccggcaaccagaacgccgtgttcctcggcgtgggcgacgacgggcaggccatggcgatcaccgagcgcggggaaatcaagccgctcagcgaagttgccaaatgggacggaccccatcaagggttcttcgccctgcccgacgacggcgcaccagtggcgcaggtccacgaggcctccgctcagcagcccgctgcgggaaccccggccgctccggcgacgcccgcagcggcgccggcacctagcatccaggacaccaacgctgggattctgcctggccagacgaccggcaa

SEQ ID NO: 16522 - DNA, 177 bp, Zea mays
  Coding DNA Sequence Number=SeqID_2119
acgatcagtcaagggaatgagctatgatagacccagtacctggattatatatgatcctatgtgtcgtgacaagtcggtactactaagaatgatttcgtcagtcagcagcagatcctgtccatgtccggcttccttgtgagattgttctccttcaatggagatcagggctcatttgta

SEQ ID NO: 16523 - DNA, 355 bp, Zea mays
  Coding DNA Sequence Number=SeqID_2120
gcgagttcccggctcggctcatagccgaggcggccatcgagctggaggaggcggctggcgcggacgtggcctcggacccaccggacatgccgccggtgctggcacctgctgctactgaagccgctgctgtcccagtcgggagcgacctgttgctgccgacgctgagatggccgaggcgtcggctcggcgcctcggaggagggggcgtccaaacacaacgcggcccgccgagcggcaacctagccccagcgcgggggagctccgagggccgcccccagctggtccgggttcggacccgtgagagcctagagccctgaatcgaggcttgacgaagagcggcaggagcagccaagaga

SEQ ID NO: 16524 - DNA, 298 bp, Zea mays
  Coding DNA Sequence Number=SeqID_2121
atgcagtattcggaagaccacgaccgtatcaggcagtgggtgccgctgatgatggaaggccgcgatcgttcgcaaaaggtcgccgccacgtggacgccgatcggcaccgacgtgaacttcggcgagatcacgcgccagttcgtcggctacctgaaggcgcagccgaacttcacgctgtcgctgtcgagcgaagtgcgcgagatcgcgcgcaacgcggacggcacgtggcacgtgtcgtgggtcaagctgcattccgatgaaccgccgcaggccgtcgacgcgaagttcgtgttcatcg

SEQ ID NO: 16525 - DNA, 575 bp, Zea mays
  Coding DNA Sequence Number=SeqID_2122
gcggatctttacgtctggccgtgacgccgactttcacgacctatcttgtctgaccgctggtcgaggcgtttcactcccgatatccggggatcagcttaaacgtgcgggagatatcgcaggagaatattgaggagcagctcctggcgggtgaactggatgtggggatcgcattcggcgaggtgagcggtcaggaaatcgacgcgatcccgttgctggacgagacttttgcgctggttgtcagcaccctgcatccacttgcgcaggaaaactccgtcgggttacaggccctgagcacggaatctctcgttctgctcagcagggaatttgcgacccgcgaacagattgaccgctattgccttaaacacggcatacatccgaaagtactgatggaggcggacgccctgggtgcggtaatcgaaattgtgcgcaggacgcgactgtcaacgctgctgcccacaaaaactgcccaggctcagaacaacctggtggcgatcgctcttgaaccggagcacctcacccgcacagcggttctcatgcggcgcagagatgcatatcaaagttttgcggcccgggct

SEQ ID NO: 16526 - DNA, 369 bp, Zea mays
  Coding DNA Sequence Number=SeqID_2123
aaccctttggtcatcctgatgcccattttttggaggcaaattttagggccaaccattccagtttttagtccgtgcatgcaaaatttccctatccaatcgtctaacttgaaggaaacaaaaaaatcaatgatgctagggttacgtgccctggactaatcgagtacgtttttaggctatttcaggtagggtttttagtacgggcaacccccggaggctgcagagtttccccccccacacattggtaacatcatgatctgtcaccttctgtgggttaccatttgttaattgttgtttatgacctatccaatgagccctgtaactgtcatgcggtagatgccttgaccccccgagcgctatgcaaagcttgag

SEQ ID NO: 16527 - DNA, 187 bp, Zea mays
  Coding DNA Sequence Number=SeqID_2124
ggtgctaaacctggaagccgaagcatgggacgtggccaagatgatggaggtcgacgcagtggtggccgctgaaggggcggagttgcagccaaaggtggtaacaaaggtggaggccgctgccgtggctaaatctgtcggacacatgggagaatgccgctttttaaggcctgcaaaaaaccagaatggt

SEQ ID NO: 16528 - DNA, 212 bp, Zea mays
  Coding DNA Sequence Number=SeqID_2125
catagcaccgcgtcggtggagagcattgaagcgcagctgatgctgatcctttccgggcgttacattggctttttacccgagcattacgcgcgcagccgcgagcagcagggccagctgctgcgcctgctgccccaccattttcactttcgtgcgccgttttcgtttgccttccggcgcggccgcgcgcgcgagccgctgatccgcgcgatgcg

SEQ ID NO: 16529 - DNA, 316 bp, Zea mays
  Coding DNA Sequence Number=SeqID_2126
acagccgacctgcagaacttaaaagctagatatgaattgaatgaaatatatacttatactggaaatattctgattgcaataaatccattccaaagactacctcatatttatggtgcgcacatgatgcaacaatacaagggagctccatttggggaattaagccctcacgtgtttgcagttgctgatgttgcatatagggcgatgattaacgaaaaaaaaagcaattcaattctagtcagtggggaaagtggagctggtaaaactgaaactacaaaaatgcttatgcaataccttgctttcttaggtggcagggctg

SEQ ID NO: 16530 - DNA, 380 bp, Zea mays
  Coding DNA Sequence Number=SeqID_2127
accatgctgactgcggctgcggtcatgcccacctgacgagcgcgcaacagctggccggtgcggtgagcggcaaaacccatgcgctggtggtgctgtcgatggggctgcggccctgttctggtgccatcatgatgctgctgtttgccaaagagattggcgtatatggctggagcgtggcctcggcgctgaccatggcgctgggcaccgcgctcaccgtgtcgttgctgggtttgctggtgcagcgctcgcgcgtgctggcggtgcgcctgggcaggctcagtaacagagggactgcgcagtggttgttgccggccgtgatgctggctggcagcctgctgttgctggtggccggctttattttatggcacagggctactccc

SEQ ID NO: 16531 - DNA, 260 bp, Zea mays
  Coding DNA Sequence Number=SeqID_2128
ggatcctcttgagtccacttgagatcgacctgcagtcactcatattgcacaataacaatctgactgggagtatcctagagtcattcatttaaaggatgcaagaacctcacaaagctgaacttgctaggtaaccgtcttaatggtgagataccagattacttggctgagctaccgcatagatagtaaaactggaattgtcccaaaacattttcacgggaatgcagcctgacaagttgtgggagtcatcaaccattttggag

SEQ ID NO: 16532 - DNA, 332 bp, Zea mays
  Coding DNA Sequence Number=SeqID_2129
gcccgcacagggtggacgccaaacgagggcagcgggaagggggccagagccacaacgaggaggggggaggaccaaaagccccccgggaggcaaacgacgaaaggcgaggcaaccggaccaagagaagggggagggcaacacgacgggcgcccgaagggaggcacaagaaaccaaaaccgggaagaccgcaaaaaaatagggacgagagggccaggagagaacacgcggggggccagagctaccaaagaagaggaagacgtgcaccaagaacccaccatgcgcgggagagaccggggcggctttagaggcgacccgggtgacaaggcacaagc

SEQ ID NO: 16533 - DNA, 253 bp, Zea mays
  Coding DNA Sequence Number=SeqID_2130
agacgccgacggtctccgagtccaatccagcgtatcctttgcttgcatacatgacggtcacgttgagttgctggccaaaccaatctaccgtggccgtgcaaatgcctggcacgcccacttctttgggcgtcgtcaacaagaatcggtccttgtccttgtccctagctccctcaacagccagaaacattcccacgatcctcgccgcagggctgacgacgtccgtctcccacgcgtcgcgctgtgcctttgggtt

SEQ ID NO: 16534 - DNA, 107 bp, Zea mays
  Coding DNA Sequence Number=SeqID_2131
gccgggcaacccaggtacgtagtagtaagtagctgatccgatcccgcccgcttaattactagctatacactgcctgctgggcctgataatcacgccgactgggctga

SEQ ID NO: 16535 - DNA, 304 bp, Zea mays
  Coding DNA Sequence Number=SeqID_2132
ttcgcctttccccagggctgggcgtcctccccgtcctggttggccgttctctgtgtcgcccaaccccagggcttgcactcgtcctcggcctcggtctacggtcttcgcctcgcccgtctcccgggcccggactcggcgccgtcttcgcgcttgtctcggcctcgcccttccccgggctcggcctgaccacgccgtcggggggggccgtcctttctctacccttagccgctgtggtcttggtgagcaagtccggcgccccctgcggctcgccccggtctcctgtgtattgttggccccccgtgtg

SEQ ID NO: 16536 - DNA, 246 bp, Zea mays
  Coding DNA Sequence Number=SeqID_2133
gcaggtctttcgcaaagatgactacgcggtgaaatatgcggtggaaccgctgctgctgggcgacggcccgctgggcgagctctcggtacgcctgaagcttatctacggcctgggggtgatcaatcgccacgaatacgaagactgcgagctgctgctggcgctgcgtgaggagctgaatcacgacaccagcgactaccgctttaccgacgatgaaatactcggcccgttcggcgaactgcactgcgt

SEQ ID NO: 16537 - DNA, 493 bp, Zea mays
  Coding DNA Sequence Number=SeqID_2134
acggctcgtcggtcaacgccgtgcgcggactgctggacatcgtcgccaagctcgtcacgctgtaccgaccgacgcagatcgtcgcgtgctgggatgacgcctggcgcccgcagtggcgcgtcgaccgcatcccgagctacaaggcgcaccggctgatctcatcggacgcgggcgagatcgaggacgtcccggaggccctcgtccagcaggtgccgctgatccgccaggcgctgacggccgtcggcattccgatcgtgggagtcgccgaccacgaggccgatgacgtgatcggaacgctgtccacccgctcggccatccccgtcgacatcgtgaccggcgaccgggacctcttccagctcgtcgatgacgcccgcgacgtgcgcgtggtctacacggcgaagggcatgagcaatcttgagatcgtgacggatgccgtggtcgtcgccaagtacggcatcctcccctcccagtacgccgacttcgcgaccatgcg

SEQ ID NO: 16538 - DNA, 572 bp, Zea mays
  Coding DNA Sequence Number=SeqID_2135
gctcggagtcccacggcctaggcgacttcacgagcggcggcgaggcgacgacgacgccggagatgcagaccttcttcaagccccaggccgcggcggcgctcccggaggccctcgacgcctccatgccagccaagccggaggcggcggcggccacggcgctcccggccacgacggccgccgcgacaacggccggtacggcgccgtcagccacgccgcgcaggtccgtgtccgtggccgccggcgtggcctgcggcgtggcggccgtggccgtggccggcatcgctgccgccgtggcgtacgtggtgcgcggcatgcggcgcgggacggaggtgcagctcggctcctccccgtgagccccgtccgggcccgcgtgataggccatcgtcgtcgttaggatctggttaagcgcgttgtttagcttttgcgattttgtgttttagtcgatctggagactggttgcttttgggtcagcggttgtattctttcgtacgtgtgggggggtgagacggtgaggacgcctgaactctgttccttggtgactggagccagagcctaccatgaacgtccttgac

SEQ ID NO: 16539 - DNA, 242 bp, Zea mays
  Coding DNA Sequence Number=SeqID_2136
tacgacgtgcacttcagcgatcaggattacgctgattatcaggccgtcaacaaaccgctgtgggtcgattaccagaacggcaccatttcagcgttacagcttcagacgcgccgcttcacgctgtggggcgaaaaactgcgcgtggcaccggaagtgcttaacagcgactttcttaatgcgatggccgagatctgcctgccgcttgatggcgcagcccgcctgctggatacgctcaagggcaa

SEQ ID NO: 16540 - DNA, 76 bp, Zea mays
  Coding DNA Sequence Number=SeqID_2137
acttatcagtgaaggtgggtgaactgtttgcttttgctttcacaaaacagcagcaagctattacgatgagataatt

SEQ ID NO: 16541 - DNA, 176 bp, Zea mays
  Coding DNA Sequence Number=SeqID_2138
cggatggcgacagactggagatctatggccagcaaagccacaagatactgcgtcggacatcaaggcctaggtctagggctcgatcaagccctcctggagaagacctacatggagaagaacataaggcctgtctacatatgagttaggctatcaagataccttaggccgctactagg

SEQ ID NO: 16542 - DNA, 362 bp, Zea mays
  Coding DNA Sequence Number=SeqID_2139
gatactacaacttgaaaacagggttcggttccattatggccacccagatatttttgatagactcttccatatcaccagaggaggcataagtaaagcttcaaagactataaatctgagtgaagatatattttcaggttttaattcaaccatgagaggaggaaatgttacacatcacgaatacatgcaagttggtaaggggcgtgatgtggggatgaatcagatttctagcttcgaagctaaggtggccaacggtaacggtgaacaaacattaagtcgtgacatttatcggcttggacatagatttgacttctacagaatgttatctttctattttactacagttgggttctattttagtagca

SEQ ID NO: 16543 - DNA, 350 bp, Zea mays
  Coding DNA Sequence Number=SeqID_2140
gcgaccgtcgccaacggtggcgtcagcatggccccttacctggtcgacgacctcaagggacccgacctttccaacatcgcgggcacctgaccgcaccaacagcggcgggccatctcatcccaggtcgcggctacacttacggatctgatggtcggcgccgagcaggtgacgcagcagaagggagccatagccggcgtgcagatcgcatccaagacgggcacggccgaacacggcaccgatccacgtaacaccccaccacatgcgtggtacatcgcttttgccccggcgaaatccccgaaggtcgccgtcgccgtcctagtggagaatggtggagaccgtttgtccgcgac

SEQ ID NO: 16544 - DNA, 224 bp, Zea mays
  Coding DNA Sequence Number=SeqID_2141
atggcggcggaagtgattcacgatcgtctgtgtcagcagcagaaaaaacacttctccttcacccggctggatgcgctggcccagcgcgcgctgaaagaaggctggattgacgagagtgaagcgaaggtgctgacgcgggccgaagccagccggctgaaggccatcaacgtggatgattttgcgcccgaggcgctggcggtggccaaaccggacagcaaacccaa

SEQ ID NO: 16545 - DNA, 124 bp, Zea mays
  Coding DNA Sequence Number=SeqID_2142
tgcagacctttccacacttgattgtgtgaaacagcaggcatatgcatcgttcacgtcactttgagttatattgacacctttggtagtctccatccagcttattggcgaacagggcatctgtacg

SEQ ID NO: 16546 - DNA, 441 bp, Zea mays
  Coding DNA Sequence Number=SeqID_2143
tggcgctcgatcatccggagaaagtcagctgctgcgtgtttgtcgatatcgcaccgactgccaccatgtacgcgctgaccgatcaggcgttcgccacgcgctacttttggtggttctttctgattcatctgacccgctgccggagaccatgattggtcacgatccggcgttctttctgcgtaaacacatagatggccagctgaaaacgccgggcgcgaccgaagcggcgatattcgaagattatctgcgctgctatcgggatccggcgatgatccacgcagtatgtgaagattatcgcgccgccgccagcatcgatttgcaacacgatgccgctgacagcgaccggcgcattgcctgtccgctgtttctgctgtggggcgaaaagggcacggtcggtcagctgtatgatgtggtgcacacctggcaggacaaggcgttgca

SEQ ID NO: 16547 - DNA, 324 bp, Zea mays
  Coding DNA Sequence Number=SeqID_2144
tcgccgaggtcgttctgctacttctgctctcctatcaggggtgttactcttaatatgtcattaagaactttgctggaaatgaagcagagactactgataaactagtcgatctaataataaagctgaagagagccaactctcctcctggcgctgcctctcggcgccatcgttccctcctctgcacccccatcctcggacctcctcgtctgcagcagaccatcttatggtgcgcgtgcgccgccggcgagatgtcgaagcctgtccggcctctgatgtgcaatgctcttcacaatcttggatctgggatgcagaaaatcgtggtga

SEQ ID NO: 16548 - DNA, 216 bp, Zea mays
  Coding DNA Sequence Number=SeqID_2145
atgggtattctttcatggattatttttggtctgattgccgggattatcgctaaatggatcatgccaggtaaagatggcggcggatttattttgaccgtggtactcgggattgtcggtgcggtggtgggcggctggatcagtaccctgttcggctttggccgggttgacggcttcaactttggcagctttgtggtcgcggtgatcggtgccattgtg

SEQ ID NO: 16549 - DNA, 176 bp, Zea mays
  Coding DNA Sequence Number=SeqID_2146
tgcctgcaggatcaactctcgaagatagcagagtaccgagtaacgatgtcttggccgttgaaatacaacgtcccgactggtaaaaccgtgctgttacccagcttaatctccttgcaccacatgcgcctttcatgcagcttgggcgttatacattaacaggccctcaccgacttgct

SEQ ID NO: 16550 - DNA, 176 bp, Zea mays
  Coding DNA Sequence Number=SeqID_2147
gtttcgggctggaggcggaccgtctgcggcggatgcaggcgcatggcgtgctgtatgaccgcgatgccggcggtgaattctggcacgcctacctgccgcatttccaggggcggtttttcttcgagctggtagagcgccagggttatgaaggctatggcgccagtaatgcgccgatc

SEQ ID NO: 16551 - DNA, 384 bp, Zea mays
  Coding DNA Sequence Number=SeqID_2148
ggactgggcttacggccggatcgccgccgccattcaccctcccgctctctttccccctgtctttgcgacgactgggctaccgacgccgacgccctcgcaggtgcgcaggtcttcttcgagtccttcgccggcgacgagcaccctctaaaggttgatatcgaggcgtagtgatggtcgttgtcgttgggtccttccatttggtgctaatctgtctgggcaggtggaacccctggacattgttatcgagctcaagtttaaccctatcaatttcaggtttctggtacctactcattctgaatggcggaccttacagacatcggttgctgctgttgctttagctttttaaggaagcccagtgtacctgtatgtgaacatcaggatggt

SEQ ID NO: 16552 - DNA, 286 bp, Zea mays
  Coding DNA Sequence Number=SeqID_2149
gacgaggtcgggtccgcctatccgtcggggcgacgcggcgccgtgcggcgacgcgactcccgcagcccggcgagtacaccagagcaggtgtgggtgaccgtacacaagtccagaatgggcgtcggctgttcccgccaagcccggggcgacagccgcggaggcttccggtatgcacgctcagcgcggttcagctcgccatcatttttgagagaatcgtcctcaattggagccaccatcggtcagcgcatcgggaactgtcggcatccagatacggtgacggcagtca

SEQ ID NO: 16553 - DNA, 302 bp, Zea mays
  Coding DNA Sequence Number=SeqID_2150
gtgggttcggccgcgtcaccagcttcctgctgggcctgtcgccggagctcggccgctccctccgactcgacgtgctctaccccgacggcggcttcacgcgctgcctcgactccgacaatgggttcagaattcatcgatccatcaaggtgggtcggagaccagacgctgctgtacagacaagccacgaaggcagaatcgcaaagatcgctagacccaccgacactgccaaacggaggatcttcatcaaggcctgggaacatcactgaacctgtggcaagatttggacaccctggatccaatgg

SEQ ID NO: 16554 - DNA, 174 bp, Zea mays
  Coding DNA Sequence Number=SeqID_2151
tgcaccggcacacaaaacgcggcggaagaggtggtgacccccagcgaggcggatacacttgccaacccccaaacgcccgcgcctagcactttcacacgatccattatcgccacgctaggagctgatccccgagaagctgtaaatcggggcctcactggagggagccgaggcagt

SEQ ID NO: 16555 - DNA, 476 bp, Zea mays
  Coding DNA Sequence Number=SeqID_2152
tctgtatttctccatctctgcaaaagggcctgcttgccagcggtgggggactatgaaccctgtgattgctatggcctactccatgacttttttatcagaaccttttccagggtggatgatgaatgaacccttgtgcagacacagagcacactggcggtttacctgcggagcctatcttcacaacgatggcttctccatgcgatcacccgcgccctcaagggaatgacgatgattctagcataggtgaaggtcatccaataacttcccctaccccacagaaaggccagagctctgatatcccccctgaatgaacgcccccctgataaaacatttcttgcctcagtggtcccaccccattgctgggagcattatcggggcgttcctcccccaattagatttgtccagctgtggcggttgtgctgtgcccatgttcgctcgggtatgcccccccccccatccataaatgtttgtgctaa

SEQ ID NO: 16556 - DNA, 243 bp, Zea mays
  misc_feature (82)..(82): n is a, c, g, or t
  Coding DNA Sequence Number=SeqID_2153
gcagcaggtgctgtgggatttcctcccggatccgaacttcgtcgccgatctgggccgcgggtcgaaccacagcgcggaccgngctcgacctgacgctcgtcggcgcgaacggcgagccgctcgacatgggcaccggcttcgacgagatggtggccgcgtcgggtcactttcacgccgggctccccgagcacgtgcaacgcaaccggctgctgctgctcggcgtgatgcatgcggccggcttcg

SEQ ID NO: 16557 - DNA, 450 bp, Zea mays
  Coding DNA Sequence Number=SeqID_2154
ttttgagcatgtgcaaccctctttaacgagtatagggcgggtggaaacatcgccaacctcgtgaaagtagaagacttcacgcgacacagtgcagataatcgaaccagcgcgttccagctggaggtgaaaacctggctggaacgccatccggaaacgcagtatgtcgatattctgttaaacgatctcaacggggtatttcgcggtaaacgcattcccgtctccgcgttagctaagctggaaaaagggtgttactttccggcctcggttttcgccatggacattctcggcaacaccgtcgagaaagccggcctcggacaggcgctcgtcgaacctgataacctctgcataccggtccctgggaccttgattccttccgcctctgacccgcaacgcatcgcccagctgctgctgaccatgtgcgaccaagatggcactccctttgacgttgaa

SEQ ID NO: 16558 - DNA, 451 bp, Zea mays
  misc_feature (168)..(168): n is a, c, g, or t
  Coding DNA Sequence Number=SeqID_2155
atctgaaagctgctcatccccgtgcacgctgagtcagcccaccaggcgtagtaggactaggcgcgtagccagaaacccgagccctgcccaacctagcgggccgaaagccccccaccgcacaccggtgcgcggagcagcagtcctacacgcgcgcgccgatcgctcttntcaagttctgatcccctcctccctctcgtggtctggactcgtcgccgacggacgaccgacgcgcacccgtgacatgctctccagccgaagatgcttcgcggcggaagcgaaccggatcaggccgctcgccagggccttctgcgacgcgccggcctcgcgcgcggatgcgggggccctccggtacgcccagcccgcaggtactcacccccgaacactctgcctcccgttgccgtgtagggatcacgccgagaagggtgctgccctgaaggatccgcccgatgtg

SEQ ID NO: 16559 - DNA, 198 bp, Zea mays
  Coding DNA Sequence Number=SeqID_2156
gagcgaaactttgactcaggctgttgcccgtgaaatccgtgcgccgcgcggtaatgaactgcactgcgccaactggctgattgaagcggcataccgcatgattcagaacaacctcgatcctgacgtggccgaacgcccggaggatctggtggtgtatggcggaatcgaaaaagccgagcgtaactgggcgtgctttga

SEQ ID NO: 16560 - DNA, 234 bp, Zea mays
  Coding DNA Sequence Number=SeqID_2157
ctttcatttagcgtccccatctgttcacagcgatggagaaacgttcatatcagcagatgatctgcgaataaacctttggaatttagaaattagcaatcagagctttaacattgttgatgtgaaacctgcacacatgtaggatctaactggtaaactttcttcagtctgataactaattgcggtgtgcagtgagcttcctgtttcctgtaaacattaatcctaccaactctgtac

SEQ ID NO: 16561 - DNA, 534 bp, Zea mays
  Coding DNA Sequence Number=SeqID_2158
aaaagtcagagctcttgacattataaaaaaaactttgacagaatacatggcatatcattctctctccccaccctttcatatacagggacgtaaacacaccacgaaagctataatatcaggacattgcgtatgtaccattcatcgagagggttcagatattctattccaacctaaagaactatgatttcccaagagggcggacccaaccttcagaagttcattgaggaagtggagtgaacaagatcgatgcatatacgcagactaaactggacccagattttttacttgagcagacaaagaagcggcttgggattgcttaaagcttgtgaccaaggatgaatctctcgccagaagtacaagcatagtagattgagactagtttagtcgtttgtgtgcttgaataatgatgaatatcacagttatggttttcagtgaggcatggtcttctatattggttgtgcttctgaaataaattagttgtcactatataaaaggatcatttggtaatgtgttgatgtcactggttgtgcttct

SEQ ID NO: 16562 - DNA, 598 bp, Zea mays
  Coding DNA Sequence Number=SeqID_2159
taaacagttcggtccgcgcggcgtcattaaagccagcgcggatggcaaggttgaagataccgggccactgaacgtgaaacgtatgggcacggtggatgaagagttcctcgccgccaacaacgatttcatggagcgtcaggtcaaagcgggcaaaccgttttttacctggttcaacaccacgcgcatgcacaacaaaacgcacattaaaccgcaggatcagggcgtgaccggcctcggcgactacgcagacggcatggttgagcacgataaaatgatcggcgaggtgctgaagaaaatcaaagatctgggtatcgaagataacaccatagtgatttacaccaccgacaacggtccgatgatcgccacctggcctgattccggcatgacgccattccgtggcgagaaaaataccggctgggagggcgggttccgcgtacccgcgatgatcaaatggccggggcatattaagcctggcacgatgatcaacgatattttcggcagcaacgactggttcccgacgctggttgccgcagcgggagtgccggatatcaaacagcagctgctgaaaggctataagaccagcgccatgaccgacaaa

SEQ ID NO: 16563 - DNA, 313 bp, Zea mays
  Coding DNA Sequence Number=SeqID_2160
acatgtctcgcgtcgaaaaactctaccatcgcctgattgtctggctgctgctgatcgtgctcgccgcaccgctgctggcgacgctgctgtacggcatctccagcgagtggagcgataccattctgccgcagggctttaccctgaagtggctgacgcagctgtggagcgatccgcgcttcctcactgcgctcggtcattcgctgctgatctgcttgggtgcgctgctgttctccctgctgctggtgctgcctgcgatgtttgtaatcgcttactactatccaaaactggacgcggtgatgaacgtgctgattct

SEQ ID NO: 16564 - DNA, 206 bp, Zea mays
  Coding DNA Sequence Number=SeqID_2161
atgtctggatggctggcgacctggcctcctgggtgtgataggggcagcgctgacttgagcgtgggacaggggcagcgcggcactgccgtgctgactgctggagcggccagcgcccgagcggtggagcagcttgagctggagctggaccgcctggggcctggacgcctggagctggagtgctggacgcctggagtcctggaccgcca

SEQ ID NO: 16565 - DNA, 497 bp, Zea mays
  Coding DNA Sequence Number=SeqID_2162
actgtgctctcgttcacgttagatcggctggcagattcatattctgggctaactgtctatgatcccaatgggaatatgacagacctgaatagtgtgaagatcactagtgaagcacaaattactgacatcaagaaggcgcggctattgatcatgtcagggacacatacaaaccctaaacatccacctggatggattgtcgctgataggctcgaagagattgctggcaagcttcatgatgctcggtagctcatccaccgtgtatgtgaggagtgccccaagaaccaagatgcttggcttgatgcatgccgtgcggccagtccatatgaggcaaatgcttgaattggccgtggcgtgatgtcaatttcaaatattgtgacactatggtttcaggcactgcaactgtaaagtcgtgatctgaataaaaatacggatccgaagaaagggctagagcacattgatgattcattcctgctatggacggctgtagatgaacttgc

SEQ ID NO: 16566 - DNA, 195 bp, Zea mays
  Coding DNA Sequence Number=SeqID_2163
gtcctgcgcatcagtggcgggcctcccgtccctttccccgtctgcctttttccgcctcaccgtggtgggctctggctcgggcctggcgctcttgccctcgctgcttcccgctggttgagggcttccaacatgctcgcccttgtgcccctgctcgggttgtgtacgtgctctatgtcctgccctgtcctgcttgcg

SEQ ID NO: 16567 - DNA, 532 bp, Zea mays
  Coding DNA Sequence Number=SeqID_2164
aaaatttgcgacctatcactaccttccggtattttttaataatgacgaatggcgatttattttatccgcaacggacctgctgattcctgaagacgaattcggccccggtgcggtgagtgaaggcgtgcccgtttacatcgataagcaaatggaattgccttatggctatggttacctgtggtatatgagcccgccatttcaggaatcgattcctgagatgggataccagactaatctggtgccacgggaaatttaccgccggggaattatcaacctgaacaaatactgccgtgaaaatttccagaataacttcgcagatttaagcaaagaaaatcaggaagcgattttacacgatctggagtcgggaaaaatcgtgcttgatactatttccggcaagttatttttctctcagttactacagaacactaaagaaggttatttagccgatccggtgcatggcggtaatcaaaccatggcatcctggaaattaattggtttcccgggcgcgcgcgcggactttattcaggttatg

SEQ ID NO: 16568 - DNA, 381 bp, Zea mays
  Coding DNA Sequence Number=SeqID_2165
aagcactatggttcttacttccgaggaagttgatactgcctttctatccttttacattatttcgggtgattgttccattaagcatgtttgatcactatgccgaaatgactgtgtggatcatttgttatgtgcgcatttgcatgtccttcttgaatattgtgccatccccaggatcattgccgttcattggaccatacgctgtgtccaagaacaccatgtcaggtaccaaatgcaacgcaatgatgcacgtgctgttcaaacttggcagctactactaatggaccggcaccaagacgtctcgccgagcatctgacttgtatctattgacatcggacgaatcgaataggaagtgcaccgcactcgctgagctgcagaatcaat

SEQ ID NO: 16569 - DNA, 210 bp, Zea mays
  Coding DNA Sequence Number=SeqID_2166
acatgccggagtgctcatcatgaaggagcagaagcccgaatccggcggcaaccatatagccgccaccagccagaggggcgaccctatgcatctgaacccgagcggcggcggcgacaacgacctgaaccgcgggacagaaatattctgcctgggcccgcaaaaccgccactgcgggggaggcaaagctcctgtcgtagacgacctgaacca

SEQ ID NO: 16570 - DNA, 325 bp, Zea mays
  Coding DNA Sequence Number=SeqID_2167
taccggctccctgtaggtggaaccgctacctagtgggaggtaggcggcggagacgcctaaacggtgtttattgacggcggcgcgccatccggggacctggcgggcaacctggtcctggggctgaaccttctatggctgccgcttaagctggcggccgtgttccgcgggtttaaccttcgggaccgctttacctcccggttcttgaaggttgttttggggctttttggcaccggccgccccgactttccctaattgttcgttacgtccgtggtggttgttcctcggtttgttggcaaatggggcgaccttgttctcacccctaagg

SEQ ID NO: 16571 - DNA, 348 bp, Zea mays
  Coding DNA Sequence Number=SeqID_2168
gatgtagttattgttggctttggctgggctggttcgttgatggcgatggaattagcctcaaccggattaaaaattgttgcgcttgaacggggagaacagcgagatacttaccctgactttgcctatccccgtatcattgatgagctgacatatggtgtcaggctaaaactttttcagaacatatccaaagagagcgtgacggtaaggcataccactaaagataccgctttaccttatcgccgcatgggttcttttttacccggcgacggcgtgggcggcgctggcgtacactggaatggtctactgtggcggccactggaagcggatctccgacagaaaaccgtggtg

SEQ ID NO: 16572 - DNA, 350 bp, Zea mays
  Coding DNA Sequence Number=SeqID_2169
aagacgggctgtggcctctgccccgccctcagcttcaaggatcttcatcatccttgctggggtggggggcgagctgagccggagctctacctcccgtacgggccggcgggccacctcttccttcagcattcaggggagagggcactcaccggcctagcggagcgggcggacttcaacaacgcggggccgatcggccgcaagcgtcgtcggtgcctgcccgtccacgaggacttgagtggggatctgccggtgcaggttggggcggccgccattcgttggcgtagcgccagcgcgcaggtggccgctgtcgttggtgctgaggtggtggtcgctagaggaggtttctccgc

SEQ ID NO: 16573 - DNA, 184 bp, Zea mays
  Coding DNA Sequence Number=SeqID_2170
ctcggtaccctgaccgttcaatcttctttcgactatgttctattctactttctatgcaggatttagagtttatggaaaagaaacttgaggaccttgataagtcaatgaagaggagcaatgataagcagctcaaaattgagcatgaattatgtgagagggtcatagcccatctagaggaaaggaa

SEQ ID NO: 16574 - DNA, 283 bp, Zea mays
  Coding DNA Sequence Number=SeqID_2171
aacccaggtacaccgcaggcactgagcgaagcgcagattgaacaaaccatcgcggatttcgcgcgctgcgcccggctggcgcagcaggccggttacgacggtgtcgaaatcatgggttccgaaggctacctgattaatcagttcctggtcgcccataccaatcagcgcgacgaccgctggggcggtgatctggcgcggcggcagcgctttgcactggaagtgacgcaggcggtgcgcgccgccgtcggtgatgcctttattattatttttcgcctgtcgatgc

SEQ ID NO: 16575 - DNA, 557 bp, Zea mays
  Coding DNA Sequence Number=SeqID_2172
gtgcagctaacttccttgaagccaaatgcattgcaaaacctcagatgttatgaagtaaaaaacatttatttagttaccctaatatatttttaaaattttattgttgtgcttgatccaagctacttgtgttatgctgaagagatctataaaattttaagttctgttggcttgcttttagttagttggggctatcattctgagtttctgagcttcaaaatttacgagatgttaatattaagaacaattggatttgatgttgccattttgtttccatcttgttgagccagcattctgcatagatgcttggatgtatgctgatacttatattcttgatttgttacaattatatcacatgcttgcagattgaggttgcctattttttggaatctgtgctgcttaaaggtactctgaataaggcatgctcatttgaagttagcctatcgtgtcactatggagtttccccctgatgtctccaatgccatgatgttgtcctcagtaccaagatgtgttgatagtcttccaaccttgttcagactgaagttcaagttctctaatca

SEQ ID NO: 16576 - DNA, 379 bp, Zea mays
  Coding DNA Sequence Number=SeqID_2173
tcatctcgtattcgctgtacagcatcctgccgacgctggtggaagtcggcctcgtcatcacgtatttcttcgtgaagtacgacgtgtggttcgcgctcatcacgttttgcgcgctggtcagctacatcgtgtttacggtgacggtgacgaactggcgcacgcacttccgccgcaagatgaacgagctggattcgcgcgccaaccagaaggcgatcgattcgctgctgaactttgaaacggtcaagtacttcggcaacgaagactacgaagcacgtcgctacgacgagaacctgaagcactaccgcgccgcagccatccgctcgcagaattctttgtcggtgctgaacttcggccagcagctcattgtggccacggcgct

SEQ ID NO: 16577 - DNA, 499 bp, Zea mays
  Coding DNA Sequence Number=SeqID_2174
ctcggcgcacgtaagttcgtcatcgccggcgtcggcctcatcgggtgcatcccttacgagctcgcaaggatgaacgacgacgacagcaggccgtctgggcctaacaataaccaatccgctgctagccaagaagacattgctatatccattggcataggtggcggaggtggaggaggcggtgtcggcgtcggtggaggaggcggcggcggcgacgactggagatcaccgtccatgccaccgccatacgcagacggtggcagtggcaatggcagtggcaacggcaacgcagacggtggcaatggcaacggaaacagtagtggcagccgcaccggcaccggcaccacgaacccagcgcctgccggcggcgggtcatgcaacgagacgatcaacagcgcgatcgacatctacaacaggggccttctggccatggtgaagcgcctcaacaaccgcggcggcctgcgcggggccaagctcgtcttcctggacaccgtgcagagcg

SEQ ID NO: 16578 - DNA, 408 bp, Zea mays
  Coding DNA Sequence Number=SeqID_2175
atgagggcgtgcaacgctttagcgtggctggagacggttcaccagaacagtggctcatggcaacgatcccgctggccgggctgcaactgcaaaccgctcatgcggcggaaccgcataccgcctgctggcctggcgtaacggtgagctgcacctggtcttttatgcaggcgcgtctttacccgagatcaatcatgactgggttgcgcaggcttttcgccaggcacctgtgaatgcggcggaccggcatgctctgctggcgggacaatcggcacaacgtgccgtggctggccggacgatctgtagctgctttggcgttggggaaaacaccatcttacaggcgattaaacagggctgtcacagcactcaggcactgggtaacgcactcaactgtggtaccaactgcggctc

SEQ ID NO: 16579 - DNA, 437 bp, Zea mays
  Coding DNA Sequence Number=SeqID_2176
tggctgctgattacccttacctccaccaccccgtgggggtgggttttaacaaaatatccctgacccctggggaaacaaaaaaaaattcccttgagggaaacccctaacctccgccacggaaaaaacccacccggtattgggaagcttcaacgaacttgctagggttgtaataacaaaatacctctctttgggagccatctcccttgtgggcccttgtgcggaaaaaatctccccgccccccggaaacaaaatatatcccccttcccgaacaaacgattttcgaagcgccgcccctcttcttcccttatctgtgacaccaacaccccccaaatttttggcccccagcgggaagcgccgctccttcttgcgcaggcgacctcacccccatctccccatcaaaatctctgtccgcagaagccgccagcattccggcggat

SEQ ID NO: 16580 - DNA, 321 bp, Zea mays
  Coding DNA Sequence Number=SeqID_2177
accttcagcatgttgccgccgaggacctgccggagaatgaattggaaacgacgtcattgtacagtaccttcggacttacgtcaaaaccacagtgtgaagaagcacaaagaatacgaaggatggcgcagagccgaagctatgcgcaggggagcttcggcatcccggcatctcggctccatggttgtcctcgtccctcgctccagcctcctatgcacatttgccttccccctcgcaacccgcctccgtgcgtcataggtgtggcggtgacccgcgtcatgccgacccgcctccgcccctaccacaatagcgtcctgtggtcgt

SEQ ID NO: 16581 - DNA, 155 bp, Zea mays
  Coding DNA Sequence Number=SeqID_2178
accgagctcaccatgtgcattactgccaaattaggtgcacaatgggttgtcatgtatagctcttcagttcaggctgcccggccggttggtgacgccagtaaatgtgggtgcctctgcctcctagctgctggccaggcagatgtgagccctgagct

SEQ ID NO: 16582 - DNA, 325 bp, Zea mays
  Coding DNA Sequence Number=SeqID_2179
gaggtcaatctgttcgtggcgcgtatcgcctgcgccagctttatggcctatgcgctggggcagatccttgatgtgcacgtgtttaaccgcctgcgtaaactgccgcaatggtggattgcgcctgcctgtgccatgttcctcggcaatatcagcgatacgctggccttcttctttatcgccttttataagagtccggacccgttcatggccagccactgggtggagatcgcgctggtggattacagcttcaaagtgctgatctgcatggttttcttcctgcctgcttacggtgttctgctcaatgcggcacttaagcgtctggcgg

SEQ ID NO: 16583 - DNA, 205 bp, Zea mays
  Coding DNA Sequence Number=SeqID_2180
tgcagtgggtttttactctatacgtagcactatccacatagcgtattgtttaaagctaggggagttggtttcttgaggtacttccaagtgaagcagctgccgaactttctcttggcttcaccagtgctttctctcgcggtttattctattgtccattacgcaaaactgcttccacagctgtacctttggacagggagctctatgg

SEQ ID NO: 16584 - DNA, 107 bp, Zea mays
  Coding DNA Sequence Number=SeqID_2181
tatactctgatatacgtgcttgtcgtgagtgccaaatacatggatgggcaggggaggccggtgcgggtgatggtggcgctgtacagcagagtgaagcgcatcttggg

SEQ ID NO: 16585 - DNA, 168 bp, Zea mays
  Coding DNA Sequence Number=SeqID_2182
catttggaaggctaaagtggaaccgaagtgccgtttttttgcttggacactaatacataagagaattctggctgccgataaccttcataaaagaggttggccatgtaacctaatatgttgtctctgcaactcagccccagaaacaattctccacatatgcaaggattg

SEQ ID NO: 16586 - DNA, 480 bp, Zea mays
  Coding DNA Sequence Number=SeqID_2183
agctgacctcgcaacaggtggtggagctgcacagcagcgcggattacgtggtctatttcattggctttcagccgggtttcccttatctcggtgggcttgatgagcggctgcacacgccgcgtcgcgccgagccccggctggtagtgcctggcggttcggtgggcattggcggcagccagaccggcatctatccgctggccgcgcccggtggctggcagctgattggccacacgccgcttagcctgttcgatccacaacagcagccgccgacgctgctgcgtcccggcgacagcgtccgcttcgtgccacaacgggagggcgatcgcggccgccacggctggcggcaatacggtatcagcctaagcggcgcactggatgagccttcaatgcgcacggccaatatgctggtcggcaacgcggaaaacagcgcggtgctggaaattgtgctcggccagttcaaagcggagtttcgtcgccacg

SEQ ID NO: 16587 - DNA, 311 bp, Zea mays
  Coding DNA Sequence Number=SeqID_2184
aagcgttaacttatcatggcccacatcgggtgcgtgttgaaactgttcctgacccgattttagagcatccggccgacattattttacgtgtcaccgcggcggcaatttgcggctccgacttacatctttatcgcgggaaaattcccggtaccgatcacggtgatatatttggtctcgaatttatgggtgaagtggtcgaagcgggaagtgaagttaccaacgtaaaaattggcgatcgcgctgtggtgccctttgttattgcctgtggcgacagaataaaaagtcgtgtgcatcagtattcgtgcctgtga

SEQ ID NO: 16588 - DNA, 581 bp, Zea mays
  Coding DNA Sequence Number=SeqID_2185
gtgttcagtttgtgagcgatgctctggcatctatagatctaatctgtaaacaagagaagtttggtcattctctcaagggatgtaaggatccttcaattgcaaatgccatttattctacaagtgaaaatgtagctattgaaggaaaaactacaaaagaaagttgtgtccctttggatagaggggacaagcctgaagaaaaaaaacaacacaatgagggatgtcataatgaagctgtacctgaaataagccacatggagaaaggtggcagaagtacagatgtctctaacaagaggcgcacaaatcaaatgatacttcccaaaagaaaaaaaaagcaactagttatatctgtcagtattagtatcatcgatatgcaacaaaaagaatgcaggtactaaatagatattagtatcatcaacaagcaacaaaaagattttgtgatcagcaacaataaagggtacaaactacagaactcgacttacactagatgttctgtcggatattccatcaacatcaaagaacaaagcaccagggatatgggccacctagaaacaagattgaatcattagaacatccgcattata

SEQ ID NO: 16589 - DNA, 306 bp, Zea mays
  Coding DNA Sequence Number=SeqID_2186
atggcgaaccacacggtcgcgcttgacgatacaggcatcaccgaggtgatcggcgcatcgttttatccgctcacgtggtactccatcttttgtgagcaggcgcagaagcggctgttcatgggctcaatcaaggattgtggcacccatccgtgcggagtcttggtcaagcaggagatgttagtgcctgcatggagcgcgtcgcggcccggtgcccttcgcgcacaaattgctcctctgcggcggggggacgacaggtcatgtagcctaggcgggggagaggcgctaatgggcgtgcttgtcggccta

SEQ ID NO: 16590 - DNA, 525 bp, Zea mays
  Coding DNA Sequence Number=SeqID_2187
tcgagttcggtcaggcgccgcgacaggcgcgatttcgagataccgagcacgcgttccgcagccgataagccccaccgaaggcggcggcttcgtggtacaccgaccgtttccgacccggctgctgatggatttcgatccggttcctgctgctcgacgaaaatgggccccgtcgactatgcgcccggcgaagccaagggtgcgccggaccatccgcatcgcggtttcgagaccgtcacctatgtgctcgacggacgctttcgccatcgcgactccgccggccatgccggcacgctcggccccggcgacgtccaatggatgacggccggctcgggcgtcgtgcacaacgagatgccggatcccgagttcgcgcagtccggcggacgctcgcacggcttccagctgtgggtcaacctgccccgccgcgacaaactgatcgcaccgcgctaccaggaggttgcggccgatcgtattccgagcgccacgtcgcccgacggccgcgcgcacgtccgcgtgatcgccggtgaa

SEQ ID NO: 16591 - DNA, 493 bp, Zea mays
  Coding DNA Sequence Number=SeqID_2188
agcttgtcgccgtcggcaccaaaatgcccgactgggttcagaccggtttcatggagtacctgcgtcgctttcccaaagatatgccgtttgagctgactgaagtgccggccggtaaacgcggcaaaaacgccgacatcaaacgcattctggaaaaagagggtgaagcgatgctggcggcggtgggcaaaggcaaccgcattgtgacgctggatattcccggacagccatgggaaacgccgcagctggcgcagcagttagagcgctggaagctggacgggcgtgatgtcagcctgctgattggtgggccggaaggcctggcaccggcgtgtaaagcggcagccgagcagagctggtcactgtccgcgttaacgctgccgcatccgctggtgcgtgtgctggtggcggaaagcctgtatcgtgcctggacggatgaaattacagagcaacgcttttcgcgattacactgccgaacagaaactgtttgtccgccgcg

SEQ ID NO: 16592 - DNA, 510 bp, Zea mays
  Coding DNA Sequence Number=SeqID_2189
gagcacacaccaggtcagctgatgttgcctgcgcccctctctcccccgacgcccctccttcccgcgcccctccctcccccgccacctcttcctccacctggcttgcaggggctctcgggtacatttcgagacgggtcgttacggctgagcacatcccacgcacgcatagcccagaagccggcgtgcagagattctcaatctccctggacaaatctgcaaaagagcaaggcaggggaaaaccggtggaatagagaagcgggtcggcctggtacgtggaaacctgaagagcatggttgggctgtgaaagcggataacctagggaaggggctgccaaggagtctcggctcgggctccatctccaggggtggattacagcccagaaggccggcaacaagacgaacgaggtagggtttccacctgatcttattggtgctcgttccccaaaacagttgtacgcccttcttgcttcgctgtgggcgctgcctacccacaagcgggagagcttctctg

SEQ ID NO: 16593 - DNA, 419 bp, Zea mays
  Coding DNA Sequence Number=SeqID_2190
tttgccgagcggctgaacaagctgtgccagatcaccgtaaaagaggcggaagacggcgagcgtattttgcccggccacgcctatatcgcgccgggcgcgatgcacatggagctggcgcgcagcggtgccaactacgtggtgaaactgaacgacggaccgccggtgaaccgccataaaccgtcggtggacgtcctgttccgctcggttgcggtcaacgccgggcgaaatgcagtgggggtcattctgaccggcatgggcaacgacggtgcggccgggatgctggaaatgcaccgcgccggcgcgtggaccatcgcccaggatgaagccagctgtgtggtatttggtatgccgcgcgaagcgatagcgatgggcggcaccagtgaagtggtcgatctgggtcacatcagccagcatatgct

SEQ ID NO: 16594 - DNA, 226 bp, Zea mays
  Coding DNA Sequence Number=SeqID_2191
gtgcgctcttggaaccgagcactataaaaacggagacccatgcacgctttggagttaacggtgccacggcgagcggaggcgacaacaaggccaaggtggtgctggtgatgggcgccacggccaccggcaagtccaagctggccatcgacctcgcgctgcgcttcggcggagaggtcgtcaattcggacaagatccaggtgcacgacggcctcgacgtggtcaccaa

SEQ ID NO: 16595 - DNA, 279 bp, Zea mays
  Coding DNA Sequence Number=SeqID_2192
agaaatggcaggacccgcatgcgatgcgcttcttccatgacggcagcgtcagtttcccgtatctgtccgatggcatgtggttcctcacccagcttaagcgctggggaatgctgaccgaggatccggactatctgggcgtcgcaaagcagatcaaccgaattgatatctacaaacaggcagcgatcgccgtcggcaacatcacgttgcccggcagtgagatgcgcagcagcaccctgatcgacggcaaggtgtgggatggcacgaatcctgccgtttacg

SEQ ID NO: 16596 - DNA, 278 bp, Zea mays
  Coding DNA Sequence Number=SeqID_2193
tgatgaaaagccagactcgctccctgacgcagcctgagacgctggccacccgggccacggtggtgccccttcaggtcacgccaaaaaagatgcgctcgcctgcgcgcctgcgtgcgtttttgcagcgtgccattcccgcgctgtgcggtgtgatgcttctgcttctgatctggcagatcgcggccctttccagcaaaggctttgccggcccgtacgccacctgggaagcggcgaaaatcctgttcgccgatccgttctataacaacggccctaacgat

SEQ ID NO: 16597 - DNA, 575 bp, Zea mays
  Coding DNA Sequence Number=SeqID_2194
tggccattctgctgtggagcacgattgtaggattaataaaaagcgtcagtgaaagttttggtccggtaaccggtgccgcgctgatttacagcgccagcgccctgctgttgctgctcaccgtgggttttcctgacctgcgccagtttccccgccgctatttgctgatcggcagcctgctgtttgtctgctatgagctctgcctgtcgctgtcgctgggttttactcatagcggccatcaggcgattgaagtcggcatggttaattacctgtggccggcgatgaccatcgttttaacggtgatggttaaccggcaaaagaccagcccgttgattattcccggcctcctgctggccgtcgccggtatttgtcgggtactcagcggcgatcggggattttcactgggcgaaatgatcgacaacgtgatggatattccgctcagttatggtctggcatttggcggtgcgatgatttgggcggtttattgtgtcgtgacaaaaaaaagcgcgaaaggcagtaacggcattacgctgtttttcatgttaactgcgctgacgctgtggctgaaatcgctgcta

SEQ ID NO: 16598 - DNA, 180 bp, Zea mays
  Coding DNA Sequence Number=SeqID_2195
aattttaaactttgtgcgctgcccaacgggaaaaacccctcccaaaattttaccacccccggacattttgggcccttggtgggaataaatcgggaaaacccccatggggggcccttaaaaggaaaatgttttttcccccggggcccgagtggcgatagagcgcgccaaaaaagattaaaa

SEQ ID NO: 16599 - DNA, 452 bp, Zea mays
  Coding DNA Sequence Number=SeqID_2196
tcagaagcggtctgtcgatgggcctgcccgcgcgtgccgacctgatgctgccgttcctgaagtcgatcagctatccgctgggcgtctggggcttcatcgtgctgacctatttcgtgatcgtcggcgcgagcaacgcggtgaacctgaccgacgggctcgacggcctcgtgatcatgccggtcgtgctggtcggcgcgtcgctcggcgtgttcgcatacgtgatgggcagctcggtctattcgaaatacctgctgttcccgcatattccgggcgcgggcgaactgctgatcttctgctccgcgatgggcggggcagggctcgcgttcctctggtacaacacgcaccccgcgcaggtgttcatgggtgacgtcggcgcgctggcgctcggcggcgcgctcggcacggtcgcggtgatcgtgcgccaggaaatcgtgctgttcatcatgggcggc

SEQ ID NO: 16600 - DNA, 182 bp, Zea mays
  Coding DNA Sequence Number=SeqID_2197
tgagtatggcaagcccgattccagcccactttgcaccgcaaaatatattgctgattaagctgcgtcatcatggcgatatgctgctgaccacgcccgccatcaatgcgttgcgccagcgctatccgcaggccaacattgatgtgctgctgtataaagagacgcggccgatgctggaagcgcat

SEQ ID NO: 16601 - DNA, 187 bp, Zea mays
  Coding DNA Sequence Number=SeqID_2198
gttttaacatcaccaagctgaccctcctcaaaacgctgaggccttgttcgggtacctccccattgccgactgtccggaaagcattaagacgtgtgcccactggcagacgggttcagagaccatcacaagcgcatccctggtgggcgtgggggactctctcataaactatgaggagctgggatgcaac

SEQ ID NO: 16602 - DNA, 386 bp, Zea mays
  Coding DNA Sequence Number=SeqID_2199
ttgaacgacaatacgctggccttgtatgcaccaaatcggtttgtactcgactgggttcgggataaatatctcaatagtatcaatgggctgctgaatgaattctgcggtgcgaacgtgccgctgctgcgttttgaggtcggcacgcgcccggttgcgccggtcgctgctacgcaacccgctatggccagcagcgtcagcgcgcccgcgccggctgagaatcgtccggcaccagcacagccgctgcgcccgagctgggattcggttccggcaccggctgatgtgacctaccgctcgaacgtgaataaccgccacaacttctacaacttcgttgagggtaaatccaaccagctggcgcgcgcggcggcacgtcaggtggcggataattc

SEQ ID NO: 16603 - DNA, 478 bp, Zea mays
  Coding DNA Sequence Number=SeqID_2200
atcgcgacaacggagtgggagcaacgaatggcaatcgaatcggtagggatcgtcggcgcgggcacgatgggcaacggcatcgcgcaggcggtcgccgtcgcgggcctgaaggccgtgatgatcgacgtgagcgacgatgcactgaagcggggcgtcgcgacgcttgcgcacagcatggagcgcctcgtgtcgaagggcaaactcgccaccgcggtgcgcgacgcggcgctcgcccgcattgacacgtcgaccgactaccaacgtcttgcgagcgtcgatctcgtgatcgaggcggcgaccgagaatgcggaactgaagacgcgcatcctgaagcagatcgacgccgtcgcgcacgccggcgcgatcgtcgcgtcgaatacgtcgtcgatctcgatcaccgcgcttgcgacgatgctccaggacccgacgcgcttcatcggcatgcacttcttcaacccggtgccgatgatgccgctcg

SEQ ID NO: 16604 - DNA, 253 bp, Zea mays
  Coding DNA Sequence Number=SeqID_2201
gcagcagctgcaaatcatgaaataccatcagaagtggcaagaccatacaagaaaaggcggatttttagaaaagattctagaagaaggaaggatatggcccatgtcagtattctattaagccatcatttggatgatgatgttgtcaagcgtcagaagaagatcttggcacgcttacgaggttctgaagcattttcaatggccgatgcaacacactttgttgcagatagattctgccgcacaaagaacatgctag

SEQ ID NO: 16605 - DNA, 361 bp, Zea mays
  Coding DNA Sequence Number=SeqID_2202
aagcgcctggcgaaaagcggtcagctgctgtccaccatccagcatgcgctgcatattcttgccgacagcgatgacaccaacctgcaaagcctgctctacagcgcgcgtaatatgctgagtgagctggtctcactggacgataaagtcagcggcgtatttaacctgctggaagaagccgcgattcaactgagtgaagccagcgatgagctgcgccactactgtgaacggctcgacctcgatcctaatcgcctgtacgagctggagcagcgtctgtcgcggcagattgcgctggcgcgtaagcatcatgtttcaccggaagcgctgccggtgctgtatcagcagctgctggatgaagcggaac

SEQ ID NO: 16606 - DNA, 206 bp, Zea mays
  Coding DNA Sequence Number=SeqID_2203
gaggcaggacggaagccccaataatcccgtgaccgtgaggatcatcgagacggtgtacgtggaggccggcaccgccgccgacttcaagtccgtcgtccagaggctcaccggcaaggacgccaccgctgagctgccggaggaaagcagcagcaggccacagtctgcgcagagcagcagggtgatgggccaagcaggttctcttggcg

SEQ ID NO: 16607 - DNA, 276 bp, Zea mays
  Coding DNA Sequence Number=SeqID_2204
gcaagttgctccatatatagtataagcaaactagtgctctcagcatttttgttttcgttcgtgctgcagactgagaatgagtaccaccatatccaacgtgcttgtacaaaggaaggagaatattatgtgcaatgggccgcaaaaatggcagtgtcactggatatgtcagttccatggtatcatgtgcaagcagacagatgctcctgatccagtgattaatgcatgcaatggaaggccctgtggtgatacctttcaggccccaacataccttacaag

SEQ ID NO: 16608 - DNA, 335 bp, Zea mays
  Coding DNA Sequence Number=SeqID_2205
gcagaagacgaaaaacgccgtttgccgaattatacgagccccgggaagcacacacagcggccgcaggggccgaggggaccggccccacgcgcgcaccagaaaggagcggacacccacggcggcacacggagccaggcaaagccacacacggccgcggaccagaggacaacgacagccgaacgacacgggggccggcccacggcgggcgcacgcacgggccaaccaaaccggggaggcaaccaccccaacgggcccaagaagacaccagcgccgaagggagagcccacaacgccaggcacgccaggggaagtagaaaccacgcgggagcgagcgca

SEQ ID NO: 16609 - DNA, 357 bp, Zea mays
  Coding DNA Sequence Number=SeqID_2206
gcaacttggccaatcaaaagccaacaatggcaagtggcatggacccccttgttgttaatggtatgtattaacaagggggtgggccccaacattgtcgtgcccaaggtaacaaccggaggggcaagaagggcccgcctgcctgttccggaacagaaaactaaaatccttgctttgcccgaaccgaatggttcaatgcaaactgtggggggggatcctttcggggggtccttggccgccaaccgccgtctatgtccaaatggaaaattggaaaaaaagccaccagttttggccccagaaccaattattgggcaacaataccagaaagaccggatgccagggccattcaaccttaacaag

SEQ ID NO: 16610 - DNA, 244 bp, Zea mays
  Coding DNA Sequence Number=SeqID_2207
gatttcaatgcggaggtgcttagcatgtccatctcggattgttggtttctttgctggtgattggagtgaaatggacaagctactattttgcggggatgctgagcaaggcaaaacagccggtgctgatacagaaggtaaagtgagtaatggttatgatatcatcctgatggctgagactgtctacgcgctatcttctcttccaaacctctacaggcttatcaagaagtgtgctaaccctggtggg

SEQ ID NO: 16611 - DNA, 202 bp, Zea mays
  Coding DNA Sequence Number=SeqID_2208
gatgtccagatggtaaaatcttcataacatatgagtggttcttaaaccagtggacccctacatgtttttccctgatccactatacacaaaaaccatacatttagagcattgcagcgagctgtgaagaacttccaaatgatgatagaggctgagaaacaggtacaacatactgtggtagactacatctcttgcttttaaatta

SEQ ID NO: 16612 - DNA, 486 bp, Zea mays
  Coding DNA Sequence Number=SeqID_2209
tgtctctttcctacttgcgggtggactccctgctgcactctgctctactctagcatgcgcagcttcccttgccgcctcgggatcgcggacgacgacgggggtagcgacccagctgggcgcctgccaggggacggaactagcaaggaggcacccgaatcttcagaaccatgcgcacaagtactcgtcccacgagctgacacgcgcatacactctttaaagctcacaaaagaccggcaacagaccctgcaggagctacagaagaggaacatcacggaggaactcgcggaacgcgagcgcacgcactacgtcttccaaggataaggactatgctgaacaaagagaccgggagaaaagctcaagccagctactcctaaaacgttcaaagagagaggcgaaggataagatagctgcacgagaaatccatgcatgagactcccatgtgcagcctaacggtgacgatgagagcgactaacatggagacgacga

SEQ ID NO: 16613 - DNA, 498 bp, Zea mays
  Coding DNA Sequence Number=SeqID_2210
acctaactcacaatggccatgctagagaactatatatgtatgatgataaacttattgatagattgttatattatgccagcaagaaacatgaaagaagagggcacgtggccaatctcaataatcttgctactccgtccagacgtctaccacggagccggcggtccacggctgctgcccttgccgctaggcgccttgggcgagccggggtcccggacgagcggactgccaaagccgtcgtcgccacagggagccgccggtatgctactcgtcctttctacaggtaagtctacaatcagctaatggcagtaaaccttgttacgaccgctaagcaagcacacgtggaggatgctgtttaagctggtcaagatatggcaaatggaatgcagtatttggtgtatcatatgtacttatattttattgtcatattggaccaagtggaagttttatatgatcatggtttgactttttgttttgagtgctgtgcaaataccggtaaca

SEQ ID NO: 16614 - DNA, 311 bp, Zea mays
  Coding DNA Sequence Number=SeqID_2211
agccccgggttcttgcagataagtttctgaaatgcaatgaaactgaaacaacaacgtttactgattgtgttaaatgccttatcacattcacaagtagtaaattcagcagtgatgccagtcttaatgccattgcatttcttcggttttgtgctgtcaaactcgctgaggaaggatttattagtcatgagaaggatactgaacagcaaccaagtaaaatagattcatcagatgggaacagcatggtgcataaggacgatcatgtttacttctgggttcctttgcttgctggtctagctagattgacaacggac

SEQ ID NO: 16615 - DNA, 358 bp, Zea mays
  Coding DNA Sequence Number=SeqID_2212
gagcatgggtgttcgtgtccgaacacgtgccgtcgcgccacatcggctacgcgtgcggcacgctgaccgcgggcctcacggccggcatcctgctcggctcgctggtggccgccggcatcaacagccgttactcgggcgccgaagtcaccgcgttcgcgtggcgcatcccgttcctgctcggcggcgtattcgggctgttctccgtgtacctgcgccgctggctgcatgaaacgccggtgttcgccgagatgaaggcgaagaaggcgctcgcggcggagattccgctgaaggccgtgctgcgcgaccacggccgcgcggtgatcgtgtcgatgctgctcacgtggatgctgtcggcggc

SEQ ID NO: 16616 - DNA, 325 bp, Zea mays
  Coding DNA Sequence Number=SeqID_2213
ttgcgctcgggtgcagtctgatctacatgggcagactcatctatggcttcaacgtgtcggtcgacggatacatcgccgacgcgcagggcagcatcgactggtccgaaccgagcgaagaactgcaccagtactggaatgacttcgagcgggagacggccctggcgttctacggccggcgactctacgagctgatgtccgcgtactggcccaccgccgacgcggcccctgacgccgagccgatgatcgtcgacttcgcccgcatctggcggaacatgccgaaggtcgtgttctcgcgcaccctggattccgtcgactggaactcccg

SEQ ID NO: 16617 - DNA, 391 bp, Zea mays
  Coding DNA Sequence Number=SeqID_2214
atgctcaacgttaagcgcgtgcgctacaccgatcgggtgctgtatcgctactacatgcacgatgcgtcgatcagcaaccgcaagcgcaccggccagcacaatgtcgactatcagcgtcactacctgaaaatcgcgcgcatgctggaagagatcaatacgcgctatcgtcacaaggtgaagatttacccgagcttccacgcgcagattacccgcgaagcgctgagcgtgtgccacgctatccggcgcgaaccggacgccgcagcgcgccaggcaatgatcgccgatctgtttagcagccagacgcacaaacgcatgctgcgcaatgcgcgcggcgcgcgtcagtggtatcagctgctgctttggctgagccgcatttatcgctggcgcaata

SEQ ID NO: 16618 - DNA, 555 bp, Zea mays
  Coding DNA Sequence Number=SeqID_2215
atgctgttcatctcgatcccgctcggcggcatcctcgcgttcatgatggtgcgcaccgacctgcccggccgccgctggctcgagccgctgctgctcacgcccgtgttcgtgtcgccgatggtgctcgcgttcggctacgtggtcgcggccggcccggtcggcttctactccgtgtggttcaaggaattatgcggggtgcagaacgtaccctggaacgtgtattcgatcttcgcgatcacggtgatcgtcggcctcacgcatgtgccgcacgtgtacctgtactcgtcggccgcgctgcgcaacctcggctccgacgtcgaggaagccgctcgcgtgacgggcgcccgtccgttccgcgtcgcgctcgacgtgagcctgccgatgacgatgcccgcgctgctgttcgccggcgtgctcgtgttcttcctcggcttcgaggtgttcgggctgccgctcgtgctcggcgatccggaaggccacctcgtgctcgcgacctacctgtacaagctgaccaacaagctcggtgtgccgtcgtaccacctgatggcggcggtc

SEQ ID NO: 16619 - DNA, 279 bp, Zea mays
  Coding DNA Sequence Number=SeqID_2216
agttatgcggccacggcaaaccgccacggcggaggggggacgctcgcagccgcccccaaggagacggaagaggagcacgcgcacccacggaacagcgccgacgcgacaaggagcgcggcgcaacagcggccgcagagggggagccagaagcgcaccagctccgagtcatcagagcgacacgcacggccgcagaacaaggatgcacacatcacgagaacgccgccgcccgcacggagagaacaacacggcgagcaagggctacaagacccacgcagccga

SEQ ID NO: 16620 - DNA, 330 bp, Zea mays
  Coding DNA Sequence Number=SeqID_2217
gcggcgatctgttccccgatatcggcccgttcgagaccggctatctgcccctctccgaggggcatgtgatgtattgggagcaggtcggcaacccgaatggcaagccggttttgtttctgcatggcggtcccggcgccggggccggggcggtgcatcggcggtttttcgatcccagcatctggcgggtgatcattttcgaccagcgcggcgccgggcgttcgcgcccgctgggggggctggagaacaacaataccccgcagctgatccgcgatatcgaaacgctgcgaaatttcctgaatatcgagcgaatggtgctgtttggcggctcct

SEQ ID NO: 16621 - DNA, 338 bp, Zea mays
  Coding DNA Sequence Number=SeqID_2218
agaaggagccgtgccactgaccgatccatgggcatttcttcgtttcagcgctgttggtgcatggctcttgtaagtgcgtaccgctactatgatgggccagaagtaaacacatctctggcccattctgaagcctaaatacttcacgagaagatccataagaaggcttacagtgacgaggagatagatcatcaggattctccggttttctgataatcttttcttgctgcacacttctaacaggatctgaaacctgacccccaaggatgagttccttgcaacactgatgagaaaagtcaaactggacgctctgaatgttctgagttcaaccaagcttgcca

SEQ ID NO: 16622 - DNA, 404 bp, Zea mays
  Coding DNA Sequence Number=SeqID_2219
gaataattagctcgtcacagcagcagtcgctactcagcacccataaagtgctgcgcaatacttatttcttacttggcctgacgctggcgttttccgccgtcaccgccacgctcagcaccgtttacgctatgccctcgccgggactgattctgatgctggtgggcttttacggattgatgtttctgacctatcgcctggcgaacagtccggcgggtattctggccgcgtttgcctttaccggcttccttggttactgcctcggcccgattctcagctcgttcctcaccgccggtatgggtgatgttatcgccatggcgctgggcggcaccgcgctggtgtcttctgctgttccgcctatgtcctgaccacgcgtcgcgacatgtctttccttggcggcatgatga

SEQ ID NO: 16623 - DNA, 500 bp, Zea mays
  Coding DNA Sequence Number=SeqID_2220
gatgcggtgttcctgcccgccttcacctacaccgccaccgccgaggtgccgctgctgctgggggcaacgccggtgttcgtggatgtcgatccccgcactttccagatggatctggccagcctggaggcgcgcatcgccactgtgaagaaggcgggagcgttgcggccgcgggcgatcatcggggttgatctgttcggccagccggcggactgggccgggattgcaaccattgcggcgcgcgaggggctgttcacgctcgatgattgcgcccagagtttcggcgccgcgcaaggcggcgtgcggctgggcaaggcggcggatgccaccgccaccagctttttcccttccaagccgctcggcgcctatggcgatggcggggcgctgttcacgcaatccgccgagcgcgcggcgctctatcgctcactgcgcacccatggcgagggcacgacccgctatgaggtgctgcgcaccggcatgaatggccggctggatacgatgca

SEQ ID NO: 16624 - DNA, 407 bp, Zea mays
  Coding DNA Sequence Number=SeqID_2221
tcttcacgcggttctaccgcgcgtacctcgcgcgggcggagctccggctgggcgtccaggtgcggaacttctatccctgggcgcagcagtcgccggtcgttctccggcagatcacgtcgtgcctgtggagggagaaactgctcccggaggttcttgacacggaagaaaacgccgtgccggcgccgcggccgggcggcgccagaaccacggccgttctggtcacctctctccggtcgtggtactacgagcgcatcaaggggatgtactgggatcaggcgacggcgaccggcgaggacctgagcgtgcaccagccgagccacgagggtcagcagcagtacggcaaaagatcgcactcacgaccgggcatggtcggagatgtaccagctgagcctgtgcaacgtgctggt

SEQ ID NO: 16625 - DNA, 317 bp, Zea mays
  Coding DNA Sequence Number=SeqID_2222
gtgcatgccgctcgacttttgaggatccccctgcctgatcttccccgtgttccttatcccccttgctcaccttccggttacctcttggagttcagcagcgctggagccatgcggtgcgtcttcagtaccggcgacctccgggtaacccaatcccaatcgacctcacaagctggtcggcttacatctgatcataaacaggctcacaaggtcggccgttacagcgccgaagaacgcagggagaagatcgagcgctaccggacgaagcgtaaccagaggaacttccacaagaagatcaattatgagtgcaggaagacgct

SEQ ID NO: 16626 - DNA, 245 bp, Zea mays
  Coding DNA Sequence Number=SeqID_2223
gaaagttgaacttggtgacagaccattttagattattcatctgtttgatgacaaggccctttgatgaatttagctctaaatccccttccatcagagaaaagcagggaaaacttgtttaccagggttgtttttattttgttgtgattgccctgttgtaaaccaccgttgtgtgatttgctgtgaagcatgggtttgccccccaataatgcaaccagccccttatgctacggattcgagtattaaca

SEQ ID NO: 16627 - DNA, 353 bp, Zea mays
  Coding DNA Sequence Number=SeqID_2224
aaatggttgcaaatcacactctcagacagacccattttgcaatgtttaaaggaacaggaagcagctagagcgagcagccgggcagcatacaaggaaaatacgaaacaaacgcaggaccccaatcaggcgggcaagctacggggcatgcacaaaaataaacatgtgaccgacaggatatctctggatgagggggaacctacaagagacatagcgaaacgctatagaacaggaccgataacatatggatccatgtcatcagaagcacacactgcccaggctatggccaagaacaaactccgaagaaaatctaaaacaggtcaaaataaactacaaaaaacatgggcccatgtcct

SEQ ID NO: 16628 - DNA, 270 bp, Zea mays
  Coding DNA Sequence Number=SeqID_2225
cagccctttgacttactggcaaaagtcggcggacgttttcgcctgacgccgttttacgacatcctttccatttatcccgtgattggcggtgcgggattacacattcgtgatgcaaagctggcaatgggactgaacgggagcaaaggccggaaagccgccatcgaacacatttttccccgccattttatagaaaccgcaaaaacgacaaaatttgccctgacggcgatggcacatatcctcgatgagttcagagccaggacgccagaagtg

SEQ ID NO: 16629 - DNA, 461 bp, Zea mays
  Coding DNA Sequence Number=SeqID_2226
aaggcaagccttgtcgtgcaagcgaccttggccaaatcgccttacaagccgaccgtcgaagtgaccgtagtcacttcgccctttcactgaccgatctgacaagaaaacagcgccgcccgccccgctccagctgctgtgccaaccacccgggtgaaaccgacaacagccaagtccagcctcgagcgcaacaggaagctccgcctcgcccgaccttgggcctcggcctcaggaggaggtctccgcctcgcccgaccctagggctcggccctcgcctcggcctcagaaggtggtctccgcctcgcccgacccgagggctcggtctcaacctcggcctcggaagctggtctccgcctcgcccgaccccaggactcagcctcaacctcgacctcggaaggtggtctccgcctcgcccgaccccagggctcggcctcaacctcgagctcgggaggaatcgtgtcctc

SEQ ID NO: 16630 - DNA, 321 bp, Zea mays
  Coding DNA Sequence Number=SeqID_2227
agcatgagcggctgtcgctgcacacgctggcgagccagccgctgtgcctggccgagcccacacgctatttccggcgttaccttgacggacagctgcgtgaaaccggcgtgctgccgcgggtgattgtagaaagcgcctcggtgatgcagctgattcagagtgcgcaggttggcctgggcgtcatggtgtcgccctgcggccatctactaccggaaatgctgcaccatctggcgcgccggccgattgatatcgcgccgatgggacgtcaggcggcgctggtgattgctgagccgggcagggcgtcgccgctgtcacagcact

SEQ ID NO: 16631 - DNA, 281 bp, Zea mays
  Coding DNA Sequence Number=SeqID_2228
gtatgcatgacgcaggccaggcctagtggtcggggagcatcgccatcgttgcgctcaagaacttcctcaacgcacagtattttgggcagatcggggtcgtctgcccgccgcagaacttcaccgtcgtcttcgacaccgggagcgccaacctctgggtcccttctgccaagtgctttttctcgctcgcgtgtttattccatcccaagtatgactcccgccagtccagcacttacaaaccgaatggaacaccggcttctattcactacggtacgggagggatt

SEQ ID NO: 16632 - DNA, 547 bp, Zea mays
  Coding DNA Sequence Number=SeqID_2229
tacatggagatcgtctaccacgtcttcagcatgtttgcactcatcagcctgcacgtcttcctgtacgggtgcaacctcctggcgtggaagagcagcaggatcagccacaacttcatattcgacttctcccccagcaccgccctgacgcaccgcgacgccttcctcgtgtcggcgtccatcatgtgcaccgtcgtcgcgcggctggtctccgtcctcttgaaactgacggatgaacgcggagctccaactcgttgagcaggaatttaaattccaggaatggatacactgtccctgcaagaactggtgtttaagtggtaataaaacgaatcggagagcataactgcacaagaccgagacgctgcagattttaggatggaataagctcaggcgggtgcgccagggtacaacattaggcgttctggtcaggaaagatgatgtgcatttaactagctactggtcgattgagaaagaattgttgcatgtcaatcgactaacaagatcttaattttttccatgcaaaattttttcagtcaccaattcccagata

SEQ ID NO: 16633 - DNA, 314 bp, Zea mays
  Coding DNA Sequence Number=SeqID_2230
actactgatgtgcagcgccattgcgccggtgcacgcggtcactatccatgaaagctatgcctttgcgaagctgggcgaaccgaaatacgcggtcaacttcagccattatgattacgtcaatccggctgcgccaaaaggcggcaagatcaccctcgccgtggtgggcacttacgacaacttcaaccgctatgcgtcgcgcggcaatcccggtatcggcactgacacgctgtacgacggcctgtttaccacctcagacgatgagcccggtagctactatccgctgatcgccgaatcagcacgctatcccagcgatt

SEQ ID NO: 16634 - DNA, 191 bp, Zea mays
  Coding DNA Sequence Number=SeqID_2231
atcctcatgatgcaacgcatgctctcccccttgatcataatgtgaaacgccggcttacatctccaataagggcacatgcacgtaatgaaaagctgtcgatgcccctgcttaccttgatcaagttcatctcgacaacgattgacatgtcgacgctgcccttggcattatggatacaggtgccctaaagagac

SEQ ID NO: 16635 - DNA, 202 bp, Zea mays
  Coding DNA Sequence Number=SeqID_2232
tcaaccaggccacgctgaaccaggtgctggccaaccgtacccgccgtttcgacaagcagggcgagcagttctacgatcagatctcggcactgcacaaatccgtgcgctcctccaaccccaatgccgccgtgtactggctggcgcgcatgctcgacggcggctgcgacccgctgtacctggcccggcgcatgacccgcatggc

SEQ ID NO: 16636 - DNA, 567 bp, Zea mays
  Coding DNA Sequence Number=SeqID_2233
agttttatcgctgcggcacaggataaattaaccgtcggggttgatacggcttttgttccttttgaatttaagcaaggtgataaatacgtcggctttgacattgatttatgggatgccatcgcgaagaaaatgcatgtcagctatgaattacacccaatggactttggtggcctgattccggggctgcaatcacggaatctggatgtcgcgatggcaggtattaccattaccgatgcgcgtaagcaggtggtggatttcagcaacggttattatgacgccgacttattaatggctgtcaaaagcgatgataacagcattaagaaattcagcgatttaaccggcaagaaagtgggactgaaacagggcacggccgcagccagctttatgaaaagtaaatacaaggcaaattatgttgagtttcctaatatcgacaacgcctatctggatttgcaggccggcaaccttgatgcggtggtccatgactcgcccaatgtgctgtactacgtgaaaacggcgggcgatggcaaagtcaaagccagcggtgaaaacgacacgattctgccgcag

SEQ ID NO: 16637 - DNA, 174 bp, Zea mays
  Coding DNA Sequence Number=SeqID_2234
gaaaagccgggatatgccgcatgaatataagtctcgtcgccctagccagttttgtatccctcattaccagactgatttccactggattccatgctctaactccagtgtggccaagtagcgcgtccatgcgcgtgcgtacggcccgccgcatgcaccactagcacctgtcatgtg

SEQ ID NO: 16638 - DNA, 271 bp, Zea mays
  Coding DNA Sequence Number=SeqID_2235
atcgcgccgtcgctaatcagggcgatgacggcctcagcgcatggctggcgagccattttccgcacagcgcggcgcactggacgcgctacccctgcgaaacctcgctcaccgttggcgtcacgcactccgatcacgagcgatcgttcctcagcaatctcggtcacattgtgcggctcagcgcgcaggacgtgctgagccagctcccggcgcaagccagcagcggcgatatcgtgctgttgtgcggcacgtttctctgcctgcaactgtatga

SEQ ID NO: 16639 - DNA, 344 bp, Zea mays
  Coding DNA Sequence Number=SeqID_2236
agctgatcaatccaattgcgcggtggccattttatgccttcttgggaggagccatgatctgcctcctggccagcagcacttggccaccttctctcctgccattctcgccggcatagcatacattatgtttcggcttgattacgcaggcatggcagctgtaatcggccacatccttctaccctccagtatgctaatctttcatgtgctaccccatatgtttgcagacctgtaccacaggtttcataaccagtcctagggagtggcaaattatcgcagttctcttgtacttccgagtcttcctgaaatccggaagttcagaagccatgcagaagcatagcctcttg

SEQ ID NO: 16640 - DNA, 276 bp, Zea mays
  Coding DNA Sequence Number=SeqID_2237
attcttcgttgttcttatgctggtcaccgtcctggtgattaaccagttcatcgcgccgcagcttagccagaacgaaagccggctggtgcgctatgaggtggatggtctcgccggacgtatcgtcgagcagatgaaccgcgtgcaggcgcagcagcgtgccattaccgaagcggcgggcgtgatggacagcgccgccattgacacgctgctgccggcgctggttaaccagtatcaggacagcaacgtgttcggcggaggtatctggccgttacccaa

SEQ ID NO: 16641 - DNA, 320 bp, Zea mays
  Coding DNA Sequence Number=SeqID_2238
cagtcactttatttatgtttaccaatcaaacccatttcttaaattaaactaaggcctactctggcctgttgactattagtagttcatgaactatcttccttttgcaggcctgaagaatccgattaccttgatgagccatgttacaccagtgatggccatcgccactatgatactatctctattactggatccttggagtgaatttcaaaagaattcatattttgatagcccttggcatgtcatgcgcagttgcttacttatgcttatcggaggatccttagcttttttcatggtaatgagtttaacatgatatgcggcat

SEQ ID NO: 16642 - DNA, 328 bp, Zea mays
  Coding DNA Sequence Number=SeqID_2239
agcaaacgtcgctgtcgatcgtcggcgagctgaccattcctatcgaacactgcgtgctggtcagcggtaataccgatttgcagcagattgaaaccgtgtatagccatccgcagccgttccagcagtgcagccagttcatcatccgcttcccgcagtggaaaatcgaatataccgagagcacggcggcggcgatggagaaagtagccgcgatgaactcgccgcacgtggccgcgctgggcagtgaagccggcggtgagctgtatggtctgcaagtgctggagcgcaacctggcgaatcagcagcagacccatacccgtttcattgtgct

SEQ ID NO: 16643 - DNA, 590 bp, Zea mays
  Coding DNA Sequence Number=SeqID_2240
gccacatgtcgatggattccctgtatgagtacggctcgcgtgccggtttctggcgcatccatcaggagtttcagcagcgcggcctgccgctgaccatctttggcgtcgcgatggcgctggcgcggcatccgcagattgtcgaggccatcaaagccgccgattacgatgtggtcagccacggctggcgctggattcactatcaggggatggatgccaaaaccgagcgtcagcacatgcaacaggcagtggacgtgctcaccgagctatttggtaaagcgcccaccggctggtataccgggcgcgacagccccaatacgcggcggctggtggtcgagcagggcggcttcagctacgacagcgattactacggtgacgatctgcccttctggacgcaggtcacctgtcaggacggcacggtgaagccgcatctgatcattccctatacgctggagtgcaacgacatgcgcttcgccacgccgcagggattcaacaccgccgagcagttctatacctatctgcgcgatacctttgatgtactgtatgaagagggcgcgacggcgccgaagatgatgtcgattggcatgcactgc

SEQ ID NO: 16644 - DNA, 435 bp, Zea mays
  misc_feature (26)..(26): n is a, c, g, or t
  Coding DNA Sequence Number=SeqID_2241
atgtgcaggcgctggatatcgacttntacgccttttccgcgcacaagctgtacggcccgatgggcactggcgtgctgtacggtaaagcggagctgctgtacgcgatccccgtggcaggcggcggccaaatgcttacgcaggtcgaattcaacgggttcaccccgcagccgggtccgtggcggttttaagcaggcaccccggaacttgcgggtgttgtccggcttaattcggcccttggattggttaccccggtccaatccggaaaaaccggaagcttgaagccacaagtggccaaccctgccgaaaaagcaattagccctaattctgggcttccccaggtttccggttccggccaggcgccacgcttgtgtggcggtttgaaaatccgccgggtaattccaccccaacgcgaatattcggtgacggctgcttggc

SEQ ID NO: 16645 - DNA, 247 bp, Zea mays
  Coding DNA Sequence Number=SeqID_2242
ctagcgtgtgttgggtgtagtccgtcggctgcctcgtgtgtgctgtgctctctttgctcttttcagtcctcgctgttgtttctttctgcatttcttgcacctgttggtcctgtttctccttgccttggcgcacgggctgtgtacggtcctggtgcgtttgtggcggtggccggtgttgatcctgtcggagttttttggtcgcccgccggcgtccgtgctgggctgggtgtcgtggtttgttgcttgc

SEQ ID NO: 16646 - DNA, 48 bp, Zea mays
  Coding DNA Sequence Number=SeqID_2243
gggagaggccgtatgcggaacgagcgccagggtgcttttaaccataaa

SEQ ID NO: 16647 - DNA, 208 bp, Zea mays
  Coding DNA Sequence Number=SeqID_2244
cgacctgcaggtatgtaatatgactggtaaactaacccagaaaagtgacgtatatagctttggaataattcttttggagcttttgacaggtagaaagccaatagaccatacaatgcctatagaccagcacaacctgagagcttgggtgtgtccacttgttgctcctcaaaagtgacttcagcacaatagtagttattccaaaggagtt

SEQ ID NO: 16648 - DNA, 148 bp, Zea mays
  Coding DNA Sequence Number=SeqID_2245
gatgtgaagcatcccactcccgagcgagacgagctcgatgatctgcgatttgagtttgacgagcaccacgcaagaaaaattgtacagtctgaccatgatgacccgccacagagaatcggaaaggctactttcgtagtgactgaggaaa

SEQ ID NO: 16649 - DNA, 191 bp, Zea mays
  Coding DNA Sequence Number=SeqID_2246
tgcagtcccagtggcgatgccacagagattactcaaattttatgaaattgaagagagctgcactaacatatcagtgtgcttggcgaagaagtgttgctaggaaggagctgaggaagctcaaaatggctgcaagagatacacaagctctaaaggtggccaaagagaaacttgaggaatatgtggaagagcta

SEQ ID NO: 16650 - DNA, 362 bp, Zea mays
  Coding DNA Sequence Number=SeqID_2247
cagaaagtcagcttcccggtagagtggggcacctatcgtcttgaagtgcatgccgttgacaacgtcgtcagcagcgtgcgtttccaggcaggctactggtggcaggacaacaccaacggcaccggcgcgctgcgtccagatcaggtcaaactgaagatcgacaaagccgcctatcaacccggcgacaccgcacgtgtcacggtggaatccccggcggccggcaaaggctatctgctggtggagtcgagcagcggcaccttgtggtggcaaccgctggatgtaccggcgggcggcgcaaccattaatgtgccagtcagtgcggagtggaagcgccacgatctgtatctcagcgcgattgtggt

SEQ ID NO: 16651 - DNA, 122 bp, Zea mays
  Coding DNA Sequence Number=SeqID_2248
gggtcaggtccacttgtattccaaatggttgttttccttgttaaccaacccattaccttttcctaacaaaaccagtcaaataatgatgacttggaaggcaatcctgaaacaaatggaaatgg

SEQ ID NO: 16652 - DNA, 404 bp, Zea mays
  Coding DNA Sequence Number=SeqID_2249
gcaggccaccaacggccgaaaggaacgccgggacccggcccacaccgcagccgctagcgttgtggcaggggtcgcggctgaagtcgagcacgagcaggacatgccagccgagcacccaggagcggaggagacggcgggggcaagaggagccacccgcaacggggcggagacgccaacctcaaaggcgagcgatcgacgcgggctgccgaaggaaaccgccacagcgaaggccataatggatacacgagaggggacgaaccgggacgcgggcgccgaagcgcaaccgacaaccagggacacgcccaaggagcgggccgcctacggagaaggcacactggcccggaaggagagaaaggagggcgggaagcagaaaccggagcgccagcaggtcgacacgagaggac

SEQ ID NO: 16653 - DNA, 446 bp, Zea mays
  Coding DNA Sequence Number=SeqID_2250
gatccacgacaatcgctgggcggccggcgaggcgctgccgtcggaacgcgtgctgtccgaagcgctcggcgtgtcgcgcatcaccgcacgcaaggcgatcgcgctgctcgtcgagcaagggctgatccgccgcacgcaaggcgccggcaacttcatccagccgcgctacgaggatccgctgtcgcggctgtcgagcttcagcgaaatgctcgagcggcgcggcttcaagccgagttcgcaatggctcgagcgcgagatccagccggcgaatcgcgacgaagtgatccaggctcggcctgtcgccggccgcatcggttacacggctgaaacgcctgcgcctcgcggacggcatcgtgatggccgtcgagaactcgacgttccccgcgacgctgattcccgatccgcaggcgatcggcggttcgctgtacagctatctcgaaggcgcg

SEQ ID NO: 16654 - DNA, 176 bp, Zea mays
  Coding DNA Sequence Number=SeqID_2251
aaacgtttcaaatgccaggaactgaatgataaagatgtctttatggagtcacttatttgtagactggatgataactgtgaaaaactgttgatatgcaaactagacttggaatgcaagaaaacattgcattttgactctgaaatcagcatgtctcaactaatacgtccaataaaagg

SEQ ID NO: 16655 - DNA, 192 bp, Zea mays
  Coding DNA Sequence Number=SeqID_2252
aaccccacctactccggcatgaacggcgccgcgccccccacaccagagcccaccgcacgcgctgcacgcgcacaaccacccgacaacacgcccaccagcgcaagccgccccgacaccccccaacacccgagggcgcgcccggaggagcctagcgggaacccggacccccacacaggccagccgagaccctcg

SEQ ID NO: 16656 - DNA, 591 bp, Zea mays
  Coding DNA Sequence Number=SeqID_2253
atccttttggagttagtcatggtcatatttagtggtatttctcaacagttcttaatttgaaatacttcaaaggaagtaaaggtcagggcttagctgaatgaaatgctccagaacttgaagtgtagaaaacatcagtacagtaacatattcatgtgtataaagtgacaattacagcataattggaacatttgcattaatcaacaaactcacattgagacaaaactgaatcttacagctttcttgattaaagccaagtgttccatgttgctgtgaagaatagtctctcaaacactttgaaaagtagttacttcaaaacttgtgaaggtatcacatttttgtatttaaatacttacagagatctccaatttcttgaatctgagcttgtgggtagaattctaaatttgtatcataatcttgtcttttgtgaaagattttgaaaatagtatatatatatataatattatatatgcaaattgtgttttgtcacttgtaaagggaaaaggcttatttttctttatacttctgataccttgttttgcatatgaccagcactgactgaaaggcatgtgtacctgcaaacactgttgcttt

SEQ ID NO: 16657 - DNA, 256 bp, Zea mays
  Coding DNA Sequence Number=SeqID_2254
atgcctggcagtaggcgtcgtgtctcctcaagcacgacggagagcggcccgatgggcctgttccatctgcctctggtgttggctcgtcggtcgtcgacggcggtggtgctgacgtcggcagctcgctccccgtccaggcacagcacgcgccgggccgtgaccggggtctctctccacaagcatggtggtcgtgctggtgcctggacggtggtgggtgcttgcctgctgcatagatgtccaaaacggatcacccggc

SEQ ID NO: 16658 - DNA, 389 bp, Zea mays
  Coding DNA Sequence Number=SeqID_2255
tcaccgggctgtttatggttgccgaggtcatcgcaggactggtgtccggttcgctggcgctgatggccgatgccggacatatgctcaccgacgccgacgagctgctgatggcgctgatggccgtgcagaacgcccggcgtagaccgaacgcgcgtgacacctttggcttactgcgccttaccacgctggcaacgtttgtgaacacgaacgcgctgctggagattaccgctcagatcgcctgggaagcactgagccgtatttaccaggctcggcccgttgaaggagaactgatgctcggcatcgccattgccggactgctggcgaatatgctgtcattctggctggagccttggggtagcgagaaagaggaatctgatcgtgcgtgccgc

SEQ ID NO: 16659 - DNA, 166 bp, Zea mays
  Coding DNA Sequence Number=SeqID_2256
tggactgtgccgagctctcccttgagctctccctctccctcgagatctccattggtgcgtagtagcttattcatggtggcttggtgctgctttatccagctatcctcgcgattcgtggacaccgtcgccacctgcacggccagaggtttctcctcccaaatgctct

SEQ ID NO: 16660 - DNA, 220 bp, Zea mays
  Coding DNA Sequence Number=SeqID_2257
ctgcagccggattattatgattttgtctttttcatgccacttgaaacattgcatcctgaaacctgctattgttacccacagagattctacgaacacggtggtgagtcccaagttgcagcagatgcacctctgcaaccatctatggatatattttctcttgggtatgcacattcatgttaattttcacttttgttcatgaccttagaaaccaggcaccact

SEQ ID NO: 16661 - DNA, 395 bp, Zea mays
  Coding DNA Sequence Number=SeqID_2258
tttctgccccggaaagcgctcgctgggccggggatcgcactgacgcctacgtgcactgcgcccgggtgaggcgcgcgggcagccggcagccggcccaagcggtcgccgtcgcctgcgctttcttgcaggacctgggcctctccgacgtgcaggtcgaggtgctcacggggtccatgaacctgttcatgctcgtgtccatcctcggcgccggatgggcggccgaccttctgggccgccgtggcacgctcgtgctcgccaatgcattcctcatggccggagcgctcgccatgtcggctggcggcagctacgccgcgctcgtggccgcgcgcttcgtcaccagcgtcggggtcgggttcgcccgcgtcgtcgcgccggtgtacaacgccgagatctcg

SEQ ID NO: 16662 - DNA, 558 bp, Zea mays
  Coding DNA Sequence Number=SeqID_2259
agaacctgcggagtcgagtactgttgcattggccactgtcaacagtgatggccgatggacttaccatccttgataaggacaaaggactatgctatcacctgtagccggggaccggggacccaaatcaagatatgtggcatgtaccttataccttttacctaagggaagagggttttgcactaacactttcatttgcattgagggatacggattcagatccataccctctctccctttggaggaggtggatattcgaactgcttctgcttatacaaaaactgtccaggtcacggtcacggagtccaaagggatagggataacttgtacaggcgccctctacctttatgggcaagtactccaaaaccgagattgtgcttatacgattacaattacgcgtgatctgagtatgtacgccgacgccgtggtcttgcctataccgatgatgacgaaaactcacacccacatacactcttgcgatagagagaccgcttttgttcctgtgccgaatctatctctcaagcccaacccggaactgtgaaatgcatgggctttactcga

SEQ ID NO: 16663 - DNA, 420 bp, Zea mays
  Coding DNA Sequence Number=SeqID_2260
gtaaagctcacaatcgattgcatgggaggcgaccacggcccgtccgtgaccgttcccgcggcagtcaagttcgtccgcgcgcatcccgatgcgcacctgatgctcgtcggcatcgaaagcgcgatccgcgctcagctgaagaagctgaaagccctcgacgatcctgcgctgaccatcgtgcccgccaccgaagtcgtggcgatggacgaccctgtcgaagtcgcgctgcgcaagaagaaggattcttcgatgcgcgtcgcgctcaaccacgtgaaggaaggcgcggcgcaggcctgcatctccgccggcaacaccggcgcgctgatggccgtttcccgttacgtgctcaagacgctgcccggcatcgagcggcccgcgatcgcgttcgcgctgccgaacccgaccggctacaaaatgatg

SEQ ID NO: 16664 - DNA, 422 bp, Zea mays
  Coding DNA Sequence Number=SeqID_2261
gtaaatacgtgttttgaccaatatggattcttggtaaatacattctttttgctggatttgtttctcgtggttttactctgctggtttagcctgacgaattttcagtaagttttgtactgattccctttttgttttttacaatgctgtggcaggaacttgatcatgtagttgaagagcttgaaaattttgcggtcgttcatctgctccagcgtagatcgatcatctcgctgatagggaatgtacaaagatcatcactgattcttgaaaaggcattcaatgttctacgacggaatggagttaatgtccagatgatctcgcaaggggcgtccaaggtgaacatttccttggttgtcaatgatagcgaggcaaaacagtgtgtacaagccctccattcggccttctttgagaacggcctcttgttg

SEQ ID NO: 16665 - DNA, 276 bp, Zea mays
  Coding DNA Sequence Number=SeqID_2262
gaccggcggtatcgatctcagtaatttcgaagagattgtgcggattgctctggaggccggggtcagtaaagtcatcccgcacgtttacagctcaattattgatagcgccagcggcgacacgcgcattgacgatcgtttagctcaactcttcgcggcgctgcaaagcgaaacgctgccacaggatgagctggcgcggcgtttttccgtttcaacgcgcacggtgcgcaccgacatcaccgcgctcaatgcgctgctggaacagcacggcgctcagtt

SEQ ID NO: 16666 - DNA, 234 bp, Zea mays
  Coding DNA Sequence Number=SeqID_2263
attgcaaccacccttctgaagccggcgaaatcatgaaaaaaatcaattctttgctggcggcattcgccctcacggcggccagccacgcgctggcggatagccaggtaacggtacaccctgcgcacgatcagcgcagtttccagatcgatcatgccagcacgcttagcgaactggtaacgaacccggcgctgcacagctggtggccgggcacggtgattgccgaacgcggtgcga

SEQ ID NO: 16667 - DNA, 280 bp, Zea mays
  Coding DNA Sequence Number=SeqID_2264
gatttcagcggcttcacgccgcagccggtacagtggcgctttgaaccaggcacgcccaacgtggcgggtgtggtcggccttagtcaggcgctggactggctgacacagtgcgatacggaaaaagccgaacgctggagccagcagctggccagccttgccgaagagcaactcagcgctattactggcttccgcagtttccgatgcggcagcagccaagcctataggcgtttgatatgtccggtattcaccacagcgatatcgtatcgctgctggtggaaca

SEQ ID NO: 16668 - DNA, 313 bp, Zea mays
  Coding DNA Sequence Number=SeqID_2265
gcgtgctccaaagcggagctgctcgccgcgctcctagccgtcgcaggagcgctctcctccgctgcggtgtgggaggactacgaccaccacatgtaccacaggtgctacaggtcctgcatgaggaagtgcgacgacgacgatgccgatgatgccttgaagaatagcatcagccccgttgccacctccgtgtccgatgatcacgatcacgaccacaaccatgacgaccaccacgatgatcatgaccacgaccacgaccatgacgaccaccacgatgatcacgaccacgaccacgactatgacgaccaccacgacc

SEQ ID NO: 16669 - DNA, 201 bp, Zea mays
  Coding DNA Sequence Number=SeqID_2266
ctggagcagcgcatcaagcgcagcagatgtggaggtcacgcgcagcagtgaccgacacactagccagcgcccaagcagacgctactagaccatacaacccttccaagatagccacaatcgcagggaatccccgacaagctcaaaaacagaggctgcataaacggatacgaccaaatgctatacacgaactcgaccccaaaa

SEQ ID NO: 16670 - DNA, 456 bp, Zea mays
  Coding DNA Sequence Number=SeqID_2267
acgcgtcgatcattctagccagtttttctctctgttcagcctcggatccatctctccaggcagtcaggcacggttctgtataagcaatgcactatacgtgctacttcctcggccaggactagctacaccaggcacgttgtatttggaattattgaacagcgtatttcttatgcaattcaacttatgagtttcttaacatcaatcacacggttcaactatagcttggctagacaaattatgaagaaaagtacgtagctgatctgtgtgatttatctgtcctgccaaatacagctactgtctagctatatatgcatgtttaccattgtttgcatctaacatatacagaggtcttgttaacaggccactttataagttagatagatggaaacggtactaaacttatgtccagatttgtaggataaataaatcaagcaaacctactatacttatcctcat

SEQ ID NO: 16671 - DNA, 185 bp, Zea mays
  Coding DNA Sequence Number=SeqID_2268
tgactggctccctggtgtgcgtccctcaagattcctgtcctccagtatttgtagtcagtgtgcgtgctggctcgtcctcaccggcttctttgcgatttgctgggagtcgcatggccctcccatccctttcagtagcctgttgggctcctcgtgctggccgcctggtggcccttctgtcctcgtgg

SEQ ID NO: 16672 - DNA, 544 bp, Zea mays
  Coding DNA Sequence Number=SeqID_2269
taccattgaagagcgtccgggcggcgcggccaacgtgtcgatgaatatcgctgcactcggtgcgaactcgcgccttatcggcctgaccggtgcagatgacgctgcgcgcgtgctgcgcgaaacgctggcgcaggtaaaggttgagtgcgatttcgtcgccctcgatacccatccgaccatcaccaatctgcgcgtgctgtcgcgcaaccagcagctgattcgcctcgactttgaagagggctttgagcaggttgatccgcagccgattcacgatcgcctgcgtcagtcgctggcacaggcgggcgcgctggtgctgtctgattatgccaaaggcgcgctgagcagcgtgcaggccatgattcagctggcgcgtgcggcgcaggtgccggtactgatcgacccgaaaggccccgattttgaacgctatcgcggcgttacgctgctgacgcccaatctgtccgagttgtaagcggtggtcggcaagtgcaaaagcgaagaggaaattgtcagccgcggtaaacagctgaaaggtgattgcgctctc

SEQ ID NO: 16673 - DNA, 491 bp, Zea mays
  Coding DNA Sequence Number=SeqID_2270
agaggatgccgttgtgccgattgaccccattggtcccggacgttcctctgttgataggcctataggaatatgtggaacttcaaagaggatgaatgaatcccaggccgtgcacaccatccttatgcatgcatcccacatggttggtgcatccggcgtatacggaggttgcctattcagagatacgcatggtcccttggaaacctatggtctgatcaagaaagccggtaaaaatgcgtacgctcatgagggctactaattagatcacagacaaagaaacttatcacacggaggctgttgacggctttattgaaacattaattataccacaaagctagcctcaacacctgttgaaacatacacttgttcttggccggttggcctgtcttaaggatctggtatactgctttaggaattacctcattcagcattgaaccgaactggaagcactgtcaaccaatcaggaaatgatagaccatgacgcgcgatcaata

SEQ ID NO: 16674 - DNA, 187 bp, Zea mays
  Coding DNA Sequence Number=SeqID_2271
tggcaagctcaccttgcctgcgtttctttgacagcctggtcctcgagatggaaatacaatggtccagcgttttataaagaggaataagtcaaaatccacttaccatctctacctgtgccttagcaatgctgtgagcatgtccattgtgaatttggtgccattgcttaaacgacaccgtataaccaca

SEQ ID NO: 16675 - DNA, 329 bp, Zea mays
  Coding DNA Sequence Number=SeqID_2272
agcagcagggccagacggtcaccacgccggtccaggttcagcgctataccggtcagatgctgaatgacatcagcaccggtctggataagatcgataccgccagccaggatgcggctgccggacgtgccagcggacagattgatgtccagagcggcgcggacgacaccggtctgccactgctggtgctgcgctcaccgtttaacgtcacctggcagcgtctgccggcggcgctgaagcgtatgggcatggaagttaccgatgacaaccgctcgcagggcagtctgaaagtgacctacaagcagccgggcagcagcgcgtttgacgccatc

SEQ ID NO: 16676 - DNA, 248 bp, Zea mays
  Coding DNA Sequence Number=SeqID_2273
gagagggcccggacttctcgtccggttcgcgtgggccaccagaactgccgcttgatctgtagctccaagggtttcaaggacggtggctggtgtgacgaaagcgtggagcacaaagtgtgctgctgctccctttagaaatataaatataatagcgtgtgttatgttcatgcatatatatatgcatcgtccatctacctctgtggtgcgggattctgaataaaacctggctttttcctgattgattaaaa

SEQ ID NO: 16677 - DNA, 283 bp, Zea mays
  Coding DNA Sequence Number=SeqID_2274
ttcgatgctcacaacagactggctgctggcgccacagggtcggggtctagacagatggtcgtgatgtcagtggtggagacgacacatgcaaagtctgcgctggaggtttcactggacccgtgggcgcaattctgcgctgctgtggacgggagcggagggatcgccaatgcctctacggctggcggcgtggcggcatctattgcacggcaactgcaggctgctgccttcaccgatcaggtggcgtttggggcgctggtggacatagcgacctcgcagctgcgct

SEQ ID NO: 16678 - DNA, 298 bp, Zea mays
  Coding DNA Sequence Number=SeqID_2275
cgatgcagaatgacaagggtgccgcggttgaggtggcgccgggagatggtcatcgcgtctggatcagcgtgccggagggggtcgatctggcctatgcgctgctgctgcgcaattttaccgacggtaacagcacttacgatccgcacggtaaaaatcgcatcatcagggaagcgataatgcaaaataaacccctcactttgctgattttgaatggaaaaggcgcaggcaatgaagagttgcgtgccgccgtgaataccctgcgcgacgaaggctttaacctggcggtgcgtgtgacctg

SEQ ID NO: 16679 - DNA, 490 bp, Zea mays
  Coding DNA Sequence Number=SeqID_2276
ggcctccactatcagaccagattaataccgctgagcacagtattccagctgtgttaaatgaattggaaggaccagggattgaaggaacaccatccaagctaaatgcccctaatgtaattgtcttgaaagaaggtaccccttttatttccatccatggttctgatgccctggaaccagttcaaaccccaaggaagctaccaaacactgctgggaagtcagatatcgtattggatgattctcaaaatcaaacgcaatttgtgattcagcttattaagccattcacgcgcgacaagaaatcggtggacattagaggcaggtcagagggatctcctaaaagaagaaaaacacggaagaaggatggacttgtcaatagccctgagaccttgacagcatctgacaaggagtgcagtgaaactggtgggtcaactgaggcaccaatggaaaattctgcactaaaagatgcccttggtggtcgtcacattgagtctgt

SEQ ID NO: 16680 - DNA, 277 bp, Zea mays
  Coding DNA Sequence Number=SeqID_2277
aattaaagcgcgagcgttggctagggaaccggaccaagctggagaaacgcgtggccatggataggggcttcagcaggtcgcgcgaggaagaagtcaagggcaaggccaagcagaggaagccggccatggagatgggcgcgggcgagctctgggacagggaggaagagcgcgcgaccagaggggcggctggaagaaatgggaggccactgcgtgtagggagaaatcgtggaggagcagggaggattgccgacgaacagaagctggaagaagcgccgcg

SEQ ID NO: 16681 - DNA, 211 bp, Zea mays
  Coding DNA Sequence Number=SeqID_2278
gccgcgacaggaccaacaccaagatcgggcacaacaacaacgaatggcgcaggcagccgggcaacaaggggagcgcgagcacgcactacgggacgcccgagggcacgcggcggaacatgcccagcgggagcggccggcggaagaacaagcgcaccgacacgggcagcgagcgcgggaggaacggcgccacatggagcagggcggactcgac

SEQ ID NO: 16682 - DNA, 198 bp, Zea mays
  Coding DNA Sequence Number=SeqID_2279
caaaagaacaacagagcaggagggagggcgtccagcaagcagaggagggcgtccagcaagcagcagcagcaaacagaggagggcggcgctcagagcagcagcaaggggagggtggcggcgctcagagcagcagcaaggggagggcggcggcgctcacagcagcagcaaccagcagagggcggcgacgctcagagcagc

SEQ ID NO: 16683 - DNA, 436 bp, Zea mays
  Coding DNA Sequence Number=SeqID_2280
agtggcactccatggtgagcacgccggccctgcgccggtagacggccgccgcctcctggatctggcagaagcggggcaacacatggaccagtggctccacgtcatcagggaagctgccggccaggtaccgctgggcgaactcgaccgcgtagctcatctccggcaccaccagcgccggccggccggtccgccggacccaggtgacaatgccgcggcgcagcacctcgaggtcaccgtcgcggtagcccgcactgtaggcggccttgcgcaggtcgtcgaccttcggctcgtaaccgcggatctcgtggtacggcgtgtaacgcaaccggggaacggcacagaggaactggccctcgacgaggccgtactcctccagcaccgaggcaccgtcggcatcgtcgtagaagtcgcacagcacggtcgcatccgggccgaa

SEQ ID NO: 16684 - DNA, 216 bp, Zea mays
  Coding DNA Sequence Number=SeqID_2281
aactaacgcccacgtccgcagaagggtaacagcggctcatgccctatacaccccaacagtagacacagtgccgcagagtgtagagagatcatcgacctcgcaaaacacgtcagtgttcggcgagagcagtcttccggtgatggctcccacctcgtcgcagacctggtaaggaaagggtcgaccacgaagaggagctattatagcacaaggacgagg

SEQ ID NO: 16685 - DNA, 320 bp, Zea mays
  Coding DNA Sequence Number=SeqID_2282
atggctctcggaaccgacggcgcagcaaacttgtgcggccctcaccattccctgttttcgctgctcaagaaggactgtccgaatctgcatctcgtcaagtgcatttgccatggcctggacaagtgctccagcaaggccagcgctgcactacccggtaccctcgaggcgctgctcagggactcgagaaattggtttcggaacagtgcatgccgaaagtatgagtaccaacaagagtatcaagctcttactcagtatggcgctgacccccctaaactagtcaaaataggggacacgcggtggctatcgtggcacagcgcggt

SEQ ID NO: 16686 - DNA, 312 bp, Zea mays
  Coding DNA Sequence Number=SeqID_2283
cttgtagagtcgtgctccatccggcgccgcacactttgtgcacgcacgcgacgccgccacactccagaccaccggccgccacgcactcccgtctgtcgtgccccgtcctcccgtggctcatcctcacgtccgccgcaccaccaggccagggcccaggctgccgccgctctaggtccaggtcgtcctcccgtccgcctgcccatcggcccgtccccccgtcctccaggccgccgctgcaccgccgctctagcagtccagcatccgccacgttgggtcactggtgctctggaggacggccagcagtgtctgcat

SEQ ID NO: 16687 - DNA, 478 bp, Zea mays
  Coding DNA Sequence Number=SeqID_2284
agctcggcgccagtctctgggagatccacgacgtggcgcgggaggtacgccggagcaggcgacggggtgggagggccatcgccgccggtcgggagcacggcggcggcggagaactggaccagccacagagttcaggtggcattcgtaggcatgttgcagactcgtcgatgaaacatcataagttcgatcaagaaagaagccatagaatacaacctttttctcctgcaagttatacaagctcagttggggattccaatgtgaatctaactagaagtccgactcgttctttgggcatcatgggtagatctatgggggaaggctatagccttaaaacatcaacagaactattgaaggttctaaatcgaatttggagtcttgaagaacagcacactgctaacttgtcagtggttaatggattgaaactggagttacagcaggctcagacacatattcaagaactcctgcaagagagacggca

SEQ ID NO: 16688 - DNA, 335 bp, Zea mays
  Coding DNA Sequence Number=SeqID_2285
gcagttgcaggaggaacaacatatttgttattccatgctgttggatatatctggcagacctcaaactgttttctgacagcatcatattcgcttacattgcgtcatgtaatggatggtgctaagcaagccaccaagcctaggaatttgaatgagctttcgatggtattgctgaataatgtttttttttcgctgccatcgggaattattcttgtgcttggtttgaatgaagtggagtaccttttggagacgtaagctattaattcaaccttcacaatttttttttctatcataaacctgtgagactcgtcatttattcttatctgcccttcctggtt

SEQ ID NO: 16689 - DNA, 317 bp, Zea mays
  Coding DNA Sequence Number=SeqID_2286
gcagaatgcaaccacacatcagaactgatctggcaaatcttgcagcataagaaaagagtatagaattcttcaacagcactgaacagatgaactgctgctgtgcactttgcacggcagcacactcccgcgcaaacgtctagggcatctagggactagggttgcgctaggggcgctgtctgcagccagggaactgctgcaccaccctcctagctctacggcctcaccggaggccatgaagcagtggcgtgacgatgtcgaccgcctactcggcatggcacactctggctcaatcaggcctagacgtcggtcatcccggc

SEQ ID NO: 16690 - DNA, 114 bp, Zea mays
  Coding DNA Sequence Number=SeqID_2287
ctatttctgttcctgctcgcgatgtaaatctcctgcgcgcttctcttcttcctctggctgcgcgcacttcctcccctgcgcgcccttccctgtgctcgatctccttctgctctg

SEQ ID NO: 16691 - DNA, 180 bp, Zea mays
  Coding DNA Sequence Number=SeqID_2288
acgcgccctgtgacagctcatctaacacaccgggtgtggtggttacacgcaacgtgacccatacactggccaacaccctaacacccgctactttctatgacctacattcctttatagacacggctgccagctatgccgctgaagctctaaatggctagctcccttgatgcccaacgacaa

SEQ ID NO: 16692 - DNA, 266 bp, Zea mays
  Coding DNA Sequence Number=SeqID_2289
gaacgggccgcgaccaggcaaccaaacacgccggcgaacagggacccagcaccacacgcaagaccgccgaaaagccaaaggcggacgcaaacggcaagacaaaggtacggagacgagaggggcccgaaccagggcccgcagaaccgaaggcccgcgagctacccgaccggcgagcagcccggcgactaccggcgggacaccggggcacacggggccgaccaccaaacacccaacgagacccggcagcagaacgcaaggcactgcca

SEQ ID NO: 16693 - DNA, 575 bp, Zea mays
  Coding DNA Sequence Number=SeqID_2290
ggactacgcgattcatcatcactggccgcagctggagcaggaggccgatcgctacctgttgtggtttaccgatatcgtcaaacgcaccgccagcctgattgcccagtggcagagcgtcggcttcgcgcatggcgtgatgaacaccgataatatgtcgatcctcggcctgacgctcgattacgggccttacggtttccttgatgactacgatgcggatttcatctgtaatcacagcgattatcaggggcgctacgccttcagcaaccagccgatgatcggcttgtggaatctcaaccgcctggcgcatgcgctgtccggtttgctgagcactgagcagttgaaacaggcgctcagccattacgagaacgagctgatgcgggtgtggggcgaaaaaatgcgcgcgaagctcgggttgctgaccgccgatgcgggggataacgccatcctcactgacctgctggcgctgatgaccgcagagcacagcgattacaccctgacgttccgcctgctgagcgagacgcagcaggcagagacgcgttcaccgctgcgcgatgagtttatcgaccgtgacgcct

SEQ ID NO: 16694 - DNA, 353 bp, Zea mays
  Coding DNA Sequence Number=SeqID_2291
tggtcgccaggacaccgccggactcttaccctctctgtatatttgttatggtcctttatttagttaaaagctctaggtatctttactactgtccccgtccccatggagaggagcgagaggagcaggagggcgaggcaggacaacaagtggcgctctcgacggggacgaagtcggcatgtacacgcaggagctgctggacacggacgacgctgatgacgccccggactcagcggctcaacgggatagacttcctagagcggctgcacggcaagcggatgctgctcatgggcgactcgatgaactggaaccagtttgagtccatgctctgtgcgaggctttaccgaacaaggcca

SEQ ID NO: 16695 - DNA, 337 bp, Zea mays
  Coding DNA Sequence Number=SeqID_2292
tggatacgctgatgggctgcctgattgccttggcgggcatgatctggctatggccgcataggcagagcgggctgctgcgcaataacgcgcacgacgcgctgtaggcgtatcaggaggcgctgcgcctgctgctcggtccggagcaggcgccggagaagctggcgtatcagcgcgtcaaggttaaccaggcgctcaacgcgctgtttaactcgctcaaccaggcgtctaccgaaccgggctttaacttccagtatctgcaacatatgcgcctgtgggtgactcacagccagtctattgtccagcacatgatcgccatgaccattctggcgcgcgagca

SEQ ID NO: 16696 - DNA, 527 bp, Zea mays
  Coding DNA Sequence Number=SeqID_2293
gtatgcgacgctggcggcaatccgcgcgcgcgcgcccatcctgttcctgtccgcgaccgcgaggcgcgagccctgaccatgacgctgcccacgcccgcgcacgtgggagctgggacccgcacgagggagggccaaacagtgtctgggaaggaaggaaggaacggggacacggaccacggttgcgatagacgtgtacgtgtccctcccatagggagaagaatagatcgatgtcgcctttgcctttgccctttgcccatcatattcatcagcgactgcatgctttgggcttgggcttgggcttcgcgggttggtgaaacggaacaaataaaaggaaggcatggcctggagggcagcacaacaagcgataaaaaggacgtacggtggcacacacgtcaccacgtcatgatggcaaaagcacggtgcggtggcgcgctgcctggtgtggagtacggcgaggatgctccgggccgggcgaccgatcgatcgatctatcgagaagaagagatggaaactgcatctgtgcatgc

SEQ ID NO: 16697 - DNA, 355 bp, Zea mays
  Coding DNA Sequence Number=SeqID_2294
aggcgttctggctgactaaccttggcctcaaccagcaggcgctcaacgcctgtgagccaatcacgcacgtgtttattgagccgttctggcagtttttcatcgttattggcggctccggttccaccatggggctggtgctgctctacctgcgcagccgctcggcgcatctgcgctcgattggcaagctgagcattgtgcccagcatgttcaacatcaacgagccggtcatcttcggttcgccggtggtgatgaatccgattctgttcattccgtttatctgcgcgccgttagtcaacgccacgctcgcctggacagccaccaaaacccacctgattaaccacgtggtgtcgctggc

SEQ ID NO: 16698 - DNA, 228 bp, Zea mays
  Coding DNA Sequence Number=SeqID_2295
aagaacttgtctcattctgcctgcatgctgaatgccaaatgcgatttgaaaatcgaggactttgggttcgcaaggaccacgactcaaactgacttcatgatagactaagtcgtgttgtacagagcacatcaattcgagctcaactcctcagagtatacccaggctattgatatgtgatcggtaggctgcatctttggtgaaatggtcataagagagccctccttttct

SEQ ID NO: 16699 - DNA, 225 bp, Zea mays
  Coding DNA Sequence Number=SeqID_2296
atcaatacagcgcccttgcatcaactcccacaaaaagctctgctcggcgcgcgtacggcggcgctgtcgattgtgccatactccagcggcacggctaaagcgctcgtccgggtgattccggaactggaaggccgattaaccggttattcgctgcgcgtgccggtcccggtggtctaaaaagtggatctgacggtgacactgaaacgccacgtgacggccgaagag

SEQ ID NO: 16700 - DNA, 521 bp, Zea mays
  Coding DNA Sequence Number=SeqID_2297
aagattgattgagccacttcctgacagaacacaatggcctgaagtggacttgccatttgttgttggagcaccactggacaaaaggcttgctggtagacagagaaaacttaggatcaaaagttgtttggagggtggaggtggtggaaaacccaaaaaagatgcaaaggtggctgctgtagaagctgaatgggggacaaagaaacaaatgatccgaggaaaaagaaagtgcaaaagatgtggagagctagggcacggagaaacaagctacaagtgttcgctaaatggaacaaaaaagaggaagaggaaaccacgaaagaataccactaagtatggagagaatgccaaactaccaacaaaaaggagaggccaaaatgtggaagagacaaatgctgctgtagaccaaactgcgcaagagacagctaatgcataccaagatgtgcaagagacaaatgctatcatatcaagtcctatcagaccaaatagagaaacaatattacaggatagccctgttagattgacta

SEQ ID NO: 16701 - DNA, 288 bp, Zea mays
  Coding DNA Sequence Number=SeqID_2298
gggagggacaccaagagcccattcccaaacagaaacacacgagaaatctagagcaacacggaagtggtaggaaccgcgttgggactatggacaccagcccagccccaataccagaaaacacagaaacacaggcatataatacactgatatggaaacccactaaaaaggattaaaagatctggcccaccagactagaatatcgattgagagccccgcttggaccctgtggagatatgagacagacatacacaagcacgaagccccacacagatggaggaccattctctt

SEQ ID NO: 16702 - DNA, 380 bp, Zea mays
  Coding DNA Sequence Number=SeqID_2299
tgggcggttttatcgtgcagcacatgtcctggcgctggattttctacattaacctgccgctcggcctgctggcgctgctgatcattaatgcagtgtttaaagcggatagccgacgcaaaccccatgaaatcgattatccgggggcggtgtttctcagcctggcactggtgggcgtgacgctgtttaccagtgaaggcggcacgctgcgcgaatggtcagatccccagctatggtgcattctggccatggggctggttggcgtgttggggtttgtctatgaggagcgacgcgcgtgggaaccgatcattccgctcgatctgttccgtaatcgcagtttttcccttgccagtctgatggcatttattatcggcatggcgctg

SEQ ID NO: 16703 - DNA, 255 bp, Zea mays
  Coding DNA Sequence Number=SeqID_2300
agaacctgttgctcgatgttgctggaaacctcaagatttcagatttcgggttaagcgctttgtcggaccaagtgaagaatgatggattgctgcatactacatgtggaacacctaactatgttgctccagaggtcattgatgacaaaggctacgatggtgcccttgctgatctttggtcttgtggtgtgatccttttcgtgatgctcgcaggatgtctgcctttcgaggatgacaacatggcttccctttacaaaa

SEQ ID NO: 16704 - DNA, 532 bp, Zea mays
  Coding DNA Sequence Number=SeqID_2301
gcttgaaaggccgttcccaccaacggggggcccgcttccgcaaccagaccggcggcttcggggggggccctaaaaaccgggacccggaccttggcaagggccacccagcccacctttttgaccctattttgggtggaaaccttttgaaccttaaggggtttcctgacccggcccggcaaaacggtggtggcctggacaagggccagaactccaaaaaaattccgaagaaccttaacattaaaaatggattcattccttgggggggaaaagaaaacccgaaggaaaacccaggggcccttcaagaaggggggggcggatccaatggagcccaaagttccggggggccaccaccaaggccaccttaaggtggcccaaagggtggaaggattttgggaagcaatttggttggcaatggcttggggtaaaactaagggggcaaagggccggtttttacctattaccctggaaggcctttggttggtggccttaaaaggttaagcccctttggctttatacccaatcaatccctggg

SEQ ID NO: 16705 - DNA, 463 bp, Zea mays
  Coding DNA Sequence Number=SeqID_2302
atttcgccgcgcagtttcatatcaatatctccaccagcgcactggcggcacgactcgatcccaatgtgattatgaatatggccaccacgctgctggcgcagttctccggtgccatgaccaatgtggtgctgttgattctgaccgtggtgttcatgctgtttgaggtgcaccatctgccgtacaaattgcgcaatgcgatgatgaatccgcagatccgcatcgccggattgcacaaagcgctgaagggcgtcacgcactacctggcactgaaaacgctggtcagcctgattaccgggctggcggtgtggctggtgctgatgctgctggacgtcaaatttgcgctgttctggggcgttgtcgcctttatcctcaattttatccccaatatcggtccgattatcgccggtagtgccgccgtttattcaggcactggtgctgaatgatgtgtatgacgccgtgctgg

SEQ ID NO: 16706 - DNA, 438 bp, Zea mays
  Coding DNA Sequence Number=SeqID_2303
acactactgattacacaattctgcaatttatgtaaccaaattgctgtttaacaatctattttgtttttgctcctgaggtagcaatattatcaaagcatagtaaatgcatgaatctcaatcatattctgcaactttgactttgatagacaaaaaagcaaaaagataataaccaacaatcatgaaatccgtagaatgtagagtagaaatggaaactgcacgcagtgttagttggcattagtagagatgaagacaaaatggagtacttctatttgctttatgaaataaaatcaagttatgtgtacatatgtaccttactgaaagaaaattgtggaagacagcagttggcaaaaacccactgcgttcacatcaggccaacggaaacgaacttacgttctcaagggctgatgtgtgtgattgtatctgtgaatttaatctctc

SEQ ID NO: 16707 - DNA, 310 bp, Zea mays
  Coding DNA Sequence Number=SeqID_2304
ttcctgcgatgggtcggatcggactgttggtgtcggggagtcagcgtccgaccgatggatccgcgccgcgtgcgcgggctacataggaggttcgccagtgcctccgccctctcgaggagtcgagggcgaccacttcccagttcccacttccgttccaccaccaccacggacgtacgacgcgctgcagcccgcccggcccagcgttgcagcgacgacgacgccctgctgcggcctgcggtcccggccatccgtccgtcggtatgcgccagcgccacacgcacctaagcacagcaacgtcgtcagtccgatc

SEQ ID NO: 16708 - DNA, 346 bp, Zea mays
  Coding DNA Sequence Number=SeqID_2305
gcgccgacgaatttatcccgctgctctccgatccgcagggccgtaccgggctggatgcgcacgtcggcgagcgcggcgtcaaactctctggcggccagcgccagcgtattgccatcgcccgcgtgctgctgaaagatgcgccggttctgatcatggatgaagccacatcggcactggactcggaagtggaagcggcgattcaggagagcctggagacgctgatgcagggcaaaacggtgatcgccatcgcccatcgcctgtcgaccatcgcgaaaatggaccggctggtggtgctggaaaatggcggcattgttgagatgggtaaccatcgcgaactgctggcgca

SEQ ID NO: 16709 - DNA, 533 bp, Zea mays
  Coding DNA Sequence Number=SeqID_2306
cgcaccgcggtgacgaactggatcaccgcggccgcccgtgtccagcagttgctggcccgcagggccgccctggtcggggcggccctgaccaggcgggtggcggccggggagatcgtctcggtgtccaccggtgacgtcgagaagatcggctggctggtcgagtccgtgtcccggttcaccgcggcggcggtgaccgtcgtcgcggtgtgcgtggccctcctcgtctaccagccggcgctcggggtgatcgtcgcgctcggcgtgcccgtgctggcgctcgccgtgctgccgctgctgccgcgcgccacccggcgcgccgacgttcagcgcgagaaggcgggtcgcgccaccgagctggcctccgacaccgtcgccgggttgcgggtgctgcgcggcatcggcggtgaggcgctcttcctggaccgctaccgcaaggcctcccaggaagtgcgcagggcggcggtccacaacgcccgcatgtggtcgctgatctccgccattcaggtgctgctgcccggtctgctgctcatcgg

SEQ ID NO: 16710 - DNA, 289 bp, Zea mays
  Coding DNA Sequence Number=SeqID_2307
gtgaagggcttgaacggcggcgtcgtggccgacggcgcgtccggtgggttgacgcagaacggcgagttgatgtcgctcgcggcttcctcatcgccggcggtcggaatgcggcgcgctggctccaccgtccggatgaagttgagcttgtacagcgcgttgagcagcgggctgctgctgctcagtcgcctcgccgtcgccgccatggccctcgcttcgcaccgagtggcgcaaagcaggagcagcaggagcgacgccaccgcgagcccggcactgacgagaggcgctctgt

SEQ ID NO: 16711 - DNA, 239 bp, Zea mays
  Coding DNA Sequence Number=SeqID_2308
ctgcgcgaacgcatggagtgctaagcagggctatcctcatgagtaaacctgccggcatccagacaatgaactgaccggagttctacaacgtctcgactaggaaaaccctgacgttacccaactcaatcaacttgcagacatcacactttcatcagctggtgaaagagcgcttatgctcataccgatcgtacttactgacccctgctcatactgaatggccaatggctcatgaagcgata

SEQ ID NO: 16712 - DNA, 359 bp, Zea mays
  Coding DNA Sequence Number=SeqID_2309
aagctggaggagcacagatccgatcgagctggaagaggggatcctggctggaggagcgcagacctgggtgcagatccggcgcaggctcccagagctggagcaggtgcagcactggagagggcgcgaccaggctggaagagcgcagatccggcgcgggggcacagacaccatggtggcggcccgacatcgtggacggtgcaggaggtccgcagcggcccgacggcgcgcggcccaacggcgcggaagatccgcggtggcccgacggtgcgttggcgcaggagaagagggctacgacggcggcagggaagagagccgcgagggcggacggcacgacggtggcaaggaaaggccgcgacgac

SEQ ID NO: 16713 - DNA, 312 bp, Zea mays
  Coding DNA Sequence Number=SeqID_2310
gcgtaacttagtgaaatatgcgggcatcggcctgctggtgttaggcctggcggcgtgtgatcagaagaaagacgacacggcggcaaacagcaacggcaccagcgccagtcagtcagcacagacagtaaacctgatggacggtaagctgagtttcagcctgccagcaggcatgtcggataagagcggcaagctgggttcggaatccaccaatatgcacgtgtatgccgatgaaaccggccagcgcgcaattatcgtgattgcgggcgatccgaccagtgaaggactggatgcgctggctcagcgtctggagca

SEQ ID NO: 16714 - DNA, 568 bp, Zea mays
  misc_feature (159)..(159): n is a, c, g, or t
  Coding DNA Sequence Number=SeqID_2311
ggcggctcgctggtcgacgcggtgggccggaacgggggccgcctggaggagcccgccgtgcgggcgtacgcggcggacgtggcccgggggatcgcctacctccacggggaggagggcgtggtgcacggcgacgtcaaggcgaggaacgtggtgatcggngccgacggccgcgccatgctcgcggacttcgggtgcgcgaggagggcggggtccgggggcccgatcggcggcaccccggcgttcatggcgcccgaggtggcgcgcggggaggaccagggccccgccgccgacgtctgggcgctggggtgcaccgtcatcgagatggccaccgggcgcgccccgtggacgcacgtggacgacgtgcccgccgcggtgcgcctgatcgggtacacggacgtcgtgtcggaggcgccggagtggctgtcggccgagaccaaggagagccgccgccacaggaacgagggagagccgccgccacagccgagaaggcgctgccctaaccataaatcgtgccaggctggcccgagcacggcccatgatggcgtgccgggctacttgggccgtcggg

SEQ ID NO: 16715 - DNA, 481 bp, Zea mays
  Coding DNA Sequence Number=SeqID_2312
aagcacgtcgggatgctggccggcgcgcgggcgatcggcgccgcgatcgccgactaccatctgccggatcatccgatgcaggtgcgcgtgaagcacgtggtcgccgatgcctgcgggctgcgcgacgacgaagtcgactgggcgatcgacggctgcaacctgccgacgccggcgttctcgctggatcgcctcgcgcgcctgtatgcctcgctcgccgacggcgcggatgcggtcgacgcccgcggcgccgacacggcgagcgcgcgcgtgcgcgcgctggcgcgcatccatcacgcgatgacggcccatccggagctggtcgccggagaaggccgctactgcacggtgctgatggacgcgttcgacgggcaggtcgtcggcaagctcggcgcggatgcgtgctacgggatcggcgtgcgcacgtccgcgcgcacgcgcgcactcggcgccgacggcgcgctcggcatctcggtgaagatcg

SEQ ID NO: 16716 - DNA, 503 bp, Zea mays
  Coding DNA Sequence Number=SeqID_2313
gacgctgaacgtgctcgaaggatatgacctgcgcaagatgggctaccagtccgcgtcggtggtccattacatgaccgaggagatgcgccacgcgtacgaagaccgcaacacgctgctcggcgacccgaacttcatcgacaacccggtcgtgaagctgacgagcaagcaatatgcggccgagatccgcaagcagatcagcggcgacacggcgacggcatcggtccacgtgcagccgggcgtcggcgtgcacgaaaagccggagacgacgcactattcgatcgtcgaccgcgacggcaacgcggtgtcgacgacctacacggtcaacggccgcttcggcgccgtggtgatcgcaccgggcacgggcttcttcctgaacgacgagatggacgacttcaccgtgaaggtcggcgcgcagaacctgttcggtctcgtgcagggcacgcgcaactcgatcgcgccggacaagcgtccactgtcgtcgatggcgccgacgatcgtgaaga

SEQ ID NO: 16717 - DNA, 526 bp, Zea mays
  Coding DNA Sequence Number=SeqID_2314
caccccatcccctaatggaggaattccccgcggggattcggggatcggggccccattgccatctctaatcccttgtgttcacgcgttgcaggcgttgaacgagagccgcgccagctgcacctgcccggcgagcaagcagcagcagcggttctccggctgaagcaccggccgggccggcagtccccatcggtccccggcggctgggtagcacgctcccctacacagctagtgcagcaaagatggaccccccccaaggcctggacatggacctgactgagaccgagatagagaggaacaccgccatcgtctgcagtgcatgcgcgcgagcagcatgtacagcgccggagcgatcgagggaggctcgctggactgctggatcgagcagtgtggcatcatcaagtattcaagcgactggaggaaggaaggaagaatcgagtcatggggccgaggaggaagaacgaatgaattggacagggctgtttcccttctttttttcttttttttttgcgggaacacttttgctaca

SEQ ID NO: 16718 - DNA, 556 bp, Zea mays
  Coding DNA Sequence Number=SeqID_2315
agaagcagcgcctgtgcgaaagccgctggcaaatcactgaacagatcgtctcgctgatccacgccagcagcaatccgccgcgcctgttgatttccggctcggccaccggcttttatggtgataccggcgatgtggtggtgaccgaggacgatccgggccacgaggagtttacccacaccctgtgcgcccgctgggagcagctggcgctgaaggcgcaaagcgagcgcacccgcgtgtgcctgctgcgcaccggcgtggtgctggcgcgcgaaggtggcgcgctgagcaaaatgaagctgccgttcaaacttggcgtcggcggaccgattggcagcggcaaacagtacctgccgtggatccacgtggacgatctggtcaacgccatcctgtggttgatcgataacgatcagttgcagggcccgtttaacatggtggcgccttacgcggtgcgcaacgagcagttcgccgccacgctgggccaggtgatgcaccgtccggcctttatgcgcaccccggccagcgccatcaaactgatgatgggagaatccgccgtgct

SEQ ID NO: 16719 - DNA, 231 bp, Zea mays
  Coding DNA Sequence Number=SeqID_2316
cccagtaacgcccacaagaggagcaagaacaaggcgcaagaaacaaggagggacgcacaaaggcccacccgaaagaggaaccaagcaaggaagagcacaggcacaccgtgagacatgagaaccagcccaaaaccgaccggagcaaagaaaggctaaggcccacacaaacgagcaacccgaggcagacaaagggagcgggcgggcgatacgccaaccggaggccactaaaag

SEQ ID NO: 16720 - DNA, 300 bp, Zea mays
  Coding DNA Sequence Number=SeqID_2317
atggtgatcgttacacacgagatcggttttgcgcgcgaggtggccgataacattgtgttttatgaaggcgggcggattgtggcggcggggccgacgcagcaggtgctcgacgatccggaaaacggacggggcgatcgactgaccatcgaaccgtttcacggcgatcccgatcccagcccgctgctgcaaaacttacacaatgtcctgcatcacccggcgcgcgtggcgcaaccgatggtgcgccgtggctggctggaaaacgggcccggcgcgaatccacgtcgcggtaatgacgactat

SEQ ID NO: 16721 - DNA, 195 bp, Zea mays
  Coding DNA Sequence Number=SeqID_2318
ggcgcgcagggctttacaacttggtgaccgacgttacctcctccgcggcggcgaggtcgccagagacgaggcagatgcgaccaccggggagtctaaggtcgtcggggagggctagaacgggtcaagagggtctggcgaactcactggcagactaccggctgcaagaacgggaccagaaacgggagaatgatgaag

SEQ ID NO: 16722 - DNA, 199 bp, Zea mays
  Coding DNA Sequence Number=SeqID_2319
acaccttctagtcccgcatttgactcctcggtgtgtgcgtttacacacatattgagccatacactagccagcctgctactgtccacttctttcacttgtttaactttctttctgatcacgttcgccggttttccccatcaagctctaaatcgcgggctatctttacggttccgatgtagtgctttacggaccctctact

SEQ ID NO: 16723 - DNA, 409 bp, Zea mays
  Coding DNA Sequence Number=SeqID_2320
tgccattacgcccttgaggtgaacggcgcgactcaccccatcagcagctaccgcgatacctcgctgctgctggtgctgcgtaatcacctccagcttaacggccccaaatatggctgcggcctgggcgaatgcggcgcctgcaccgtgctgatcgatggcgttgccgcgcgcgcctgcgtgatcccggcgtatggcgtgcgtcagcgcgctatcaccacgctggaagggctgggcaaccgcgaagcactgcacccggtgcagcaggcgtttatcgaggcgcaggccgcacaatgcggttactgccttaacggcatgatcatgaccaccgccgcgctgctgcgcgctcagccctgccctgatgaccggcagatacgtgcggcgctgagcggtaacctgtgccgctgtggca

SEQ ID NO: 16724 - DNA, 192 bp, Zea mays
  Coding DNA Sequence Number=SeqID_2321
gcctttcgaactaatggtaatgggtgccggtgagttgcggcagtttggtttgtgggatgcaacgccatcttctgtttagccatctgcggcttcaacatcaaaacgccaggccgcgaagcagaaaccagccgcgttgagcagcaggtcagccgcgccggcgtgggcaaatccggctacaacacgccagcgatt

SEQ ID NO: 16725 - DNA, 256 bp, Zea mays
  Coding DNA Sequence Number=SeqID_2322
ggcaaagtacatcccaacaatccagtgataactgttgtgttcccagaaataaagacgggtaataattttaactggacttgcagcaatgagcatcctgccagacacaacatgatattgagggacatgatcccaatgcttagtgccgctacaacgaagccatttgatattgaggaagccattagctttgccatagaccatgcgaagaagctcaagatctgcaagtcaggggatttagtcgtcgctttgcatcatattg

SEQ ID NO: 16726 - DNA, 461 bp, Zea mays
  Coding DNA Sequence Number=SeqID_2323
tgggaaaggcatttgcccggccaaaaaaacatcccggggggggggcccacaataggatggacaaaaggccccccggcgggaaatggccaacctttttttaacaaaaaaggcccttacccccggggtaaaacccccaaaaatcatgggggcattttgcttcaaaggcttaccggaaaaaaagggacccctttttttttttggcacccaaaaattaattcttggatttcaggggccctttcccaaaaccaattggggggaattggtttgcaaatccccctacctcagggggaagctttgcaatcccaactggggggctttcaaatggcaaaggggcaacaaagcccttcagctttggccccccgggcggggcacccttaattttcaaggccaaattcactggtgcatcgaaaaagccaccacctttagcgaaatttttttcaacaaatcctctcgacggaggg

SEQ ID NO: 16727 - DNA, 118 bp, Zea mays
  Coding DNA Sequence Number=SeqID_2324
atgacgatgaggattctgcgagcagtgatactcacgtcgtctacatctgttacccttccccacgtcctctacatctgttacccttccccggagcgggattacaacctgccccagagcg

SEQ ID NO: 16728 - DNA, 340 bp, Zea mays
  Coding DNA Sequence Number=SeqID_2325
taacataaaaggtctgcaagagaagagagtccatcaacaggtaatcataaagttcacaggtctgcaaacgcaacaggggaatggtacgcgctgtcagccggcgggagcttcacgcctcacgtcatcatcgtgggtactggggaggtaagacatgcactccatctccatctcattgcagcgtctgatgtggcggcgcgcgtcatgtcgttttcgcagaaaggtccacgctcggtctgcatgctctccgccaacgggacaatctctaacgtgacgctgaggcagccgggctcatctggtagcaccttcacctacgaggtacatactgtcaaattgtcgatga

SEQ ID NO: 16729 - DNA, 323 bp, Zea mays
  Coding DNA Sequence Number=SeqID_2326
cccctgatcaaatcgatgctgaaagcatgattgaaataaggcatggctcatggtttgaacctctggaagatttgaaaggaaaacttatgggtgtgattagtaaccctccgtaccataccaaccgacgacctacctgggctgcaacctggagttggttggcatgaaccaaaattggcgcttgacgggggcaaggatggccttgaacatctgcttcatttcttggaaaggttattcttaaatcttaaacctggaggcttttttgttttgaggtaatttccaaatccttttacatactggtgcaatttgatggataagccgctttt

SEQ ID NO: 16730 - DNA, 504 bp, Zea mays
  Coding DNA Sequence Number=SeqID_2327
accagcaataccgtggagctcggcagcaaaaaacgcctcggcaacggtctgctgaccgttgcgctgtttcagaccgataccaaaaacgagatcgtgtcagacagcagttacgaaggccgcaccagctacaaaaacgccggtgagacgcgccgccgaggcctggaactcggactcgatcagcagtttggctatgactggcacctgaaagccgcgtggacgctgctcgacgtgcgctaccgcagtaacgcctgcggcagcgacagctgtgacggcaagcgcatccccggtattgcacgcaatatggtttacgccggactggcctacgcgccggagcaaggctggtatgccggcggcgacctgcgctacctgagcgacattgcggccaacgaccagaatgatgtcaaagcgccggcgtatacggtggtgggactgaacagcggctataaatggctggtgcagaactggacgctggatctgtttggccgtgtggataatctgctcgac

SEQ ID NO: 16731 - DNA, 593 bp, Zea mays
  Coding DNA Sequence Number=SeqID_2328
accgcggtgctccacggcaaatccgccagcgtcaaagccaattccgccgccgccgatcccaccggcagccaacaacagctcatcagcctggggcaacgtgttcgacgtgagggcgttcggggcgtcgggcagcggctcaggcaacgacacgcgcgcgttccgcgcggcgtggaaggcggcgtgctcgtccaactccaccacgcccacgctgctggtgccgtcggacggcgtgttcaccatcagctccaccatcttcgccgggccgtgcaagtccgctgtcaccttccaaatcgatggcgtcctgatgccgccggacggcccggcgagctggccggcgacggacagccggaaacagtggatagtcttctacaaggccgatcgcttgacgctggcgggggaaggcaccatcgaaggcaacggtgaggagtggtgggatctgccgtgcaagcctcacaggggtccaaacggatcgacgctgcgcggaccatgtgacagccccgcggtaaagctcgctcgccggcaaacttggatctctccccatcatcatgttgtgtgtgtgttttttttttggtcgaaatccttgacggtctcac

SEQ ID NO: 16732 - DNA, 475 bp, Zea mays
  Coding DNA Sequence Number=SeqID_2329
atatcgtgccgctggcgtggaaaaccggcaccagctacggctatcgcgatgcctggagcgtcggtatcacgccgcgctatctgattggcgtctgggtaggcaggccggatgccacgccggttgccggccagttcggttacgcgtcggcggtgccggtgatgcagcaggttaatcacctgctggcgggacacctgccggcgcgcggcgtgcccggcgatccgcgcccggcgacggtcagccccgtcagtatctgctggcccggcggccagccgttgcccgccggcgacgagaactgccggcagcggcgttacagctgggtgctgaatcagaccgtgccgccaacgctgctggcgccggggcaggagggcgtcaatggcttacgccagcgcttctggcaaaacagcaaagggctgcgcgtggcggcggattgtccggatgcgcaaagccgggaacgcgtgatgtggccgctgccgct

SEQ ID NO: 16733 - DNA, 481 bp, Zea mays
  Coding DNA Sequence Number=SeqID_2330
aggtccagaagctgacgggccgtttcacagctttgaacatgttcattttgaagtcagtcaaacgttgtctaccatttctaaaggtgctacgagggggcaggggctttgcttgggcccagagcaaggaactgcattcgaagacatcaaatcatactcgacagacctcgccaccttgtctagcccaaccctaggagccaacctattgctctatttagtggcctcccgtcacacgatgagcgcagtcctcatacaagaaaagctagccgaaggtagactaatctagtccttgatgtatttcatctacgaagtcctcaccgagtctaaaaggccacatgcccgaaattgagaaaatcacatatgtcgtggtaatggtatcaaggaacctaaggcactacttcgaagctcacaaaatcaaggtgctaacagagcaaagtctatcagacatatacaacaaccctgaggcctccgttcggataggaaa

SEQ ID NO: 16734 - DNA, 305 bp, Zea mays
  Coding DNA Sequence Number=SeqID_2331
gacagtcagcggctcgtgtaccagctcgtgcggcagagcgcggcgctgatcgaggacggctatttcgtgcacagcaccgcgcagcactggatattgttcggtcatccgaaccgtcactacgtcgaggcgcagcccgaatggctgatcgcgttcgacgaatgcggcaatatcgtcgccgcgaaccggcacgcgcgcgacgcgctgcccgcgctgcgcgagccgcgccatatcgacgaaatcttcgatgcgaccgagatgccgctgcgcgatgccgcgcggctcgatgcgatcgtcgcgctgcggct

SEQ ID NO: 16735 - DNA, 364 bp, Zea mays
  Coding DNA Sequence Number=SeqID_2332
gcttccagccgttgccgtaatggcacaaagcgttccgcgaccacggtatccagcagtgactcgcgcgactgaaaatagtaattcagcaattcgcctgctgatgggcgcgctgatgctggtgatgctgctgtccgcgcttgatcagaccatcgtctcaaccgcgctgccgactatcgtcggcgaactgggcgggctggatcgcctgtcgtggattgtcaccgcttacatgctggcctcaaccctggttgtgccgctgtacggcaaatttggcgatctgtttggccgccgaacggtgctgcaaatctcggtggtgctgtttttactgggctcggcgctgtgcgggctggcgcaaaacatgccgcag

SEQ ID NO: 16736 - DNA, 280 bp, Zea mays
  Coding DNA Sequence Number=SeqID_2333
ggacttttccctcttagttgatggccaagatccggtctcgtcttctggagctttgcttgaagcttttgatactattgctaagcagttacgtctcttagatgatattcctcttaaaatatctaccgtgcaacccctagactcagcttttaggcacacttctgtgtttcctcctgaacctcatccactggcatacggaaggaattctcagaggctaccgaaattcgcaacaacttgcataagatctttagaagttatgattcagctagagggatctggtaac

SEQ ID NO: 16737 - DNA, 469 bp, Zea mays
  Coding DNA Sequence Number=SeqID_2334
ctgttacagcgcgaagtggccgatggcggcatgctgttgaccatcacccacgacatcgccctggcacgccagctgggcggcgacgtgctggtgatacataaaggcagcgtgattgaacagggcccggcgcagcaggtgttgcagtcaccgcagcagccttacacgcgcgcgctgctggctgccgatccggccgtctggcccgcccgacagcaaacggtgatcggtgccaggccggtgatcagcacccaggacattgtgctggcgcgcgggggcaaaaggctgggtgtgccacgcgatttcacgctgcacgccggtgaaatcgttggcctgcacggtgccagcggcagcggcaaaagcagcttcggcgacgtgctgttggggttgctcgcgccgcagcagggccgcgtaacgcaccacgctgatgcggatgcgctgaaatatcagaaaatctatcaggatccttccgcgc

SEQ ID NO: 16738 - DNA, 278 bp, Zea mays
  misc_feature (56)..(56): n is a, c, g, or t
  misc_feature (117)..(117): n is a, c, g, or t
  misc_feature (120)..(120): n is a, c, g, or t
  misc_feature (188)..(188): n is a, c, g, or t
  misc_feature (216)..(216): n is a, c, g, or t
  misc_feature (228)..(228): n is a, c, g, or t
  misc_feature (252)..(253): n is a, c, g, or t
  Coding DNA Sequence Number=SeqID_2335
gccaccgagacacagaacgacgggccacagcaccgacgcaacgcgaaaagcaccgnaccccaacggacccccggaaacaccgcagccgagggagccagagagaggggcggaaacccnggnggcaaccccaggacgccagaaggacccgccggagagggccagagacccaccgcaaacgacaaagaaancagcgcccgacgaacccgaccggaggcnagacacggggcnagagccacagacaccgaaaacggnngagggcacggacacgccccaacgcg

SEQ ID NO: 16739 - DNA, 283 bp, Zea mays
  Coding DNA Sequence Number=SeqID_2336
tggtgtcgcaggctcccatggcaggggcgggcgcgggcgcgggcgccaacctcaccgcggcgctgtgcaggaagagcaaccgcgtcgcgcgggtgctcgcgtacgcgctgctcgagtgggtcctcatcgcgctgcttctcgccgacggcgtcttctcctacctcatatcccggttcgccgccttcttcgggctcgcgccgccgtgcgcgctctgctcccgcctcggcgtcgacagcctcttcgagacccacccccgccatcgaggcgtcggcgccgagcccct

SEQ ID NO: 16740 - DNA, 185 bp, Zea mays
  Coding DNA Sequence Number=SeqID_2337
ctggcgtcgcggcttcggcgctggtcgcccttggggctccggcgcctgcttcggtgctcgtgcgcctccgccgccgggcgctggtgccgcgccgtgtgccctggagctgtgcgtccgccggggcccgctctggcgtcgcccttcgcgcctgtgctcgttcgtgggcctccttggcagggccccaa

SEQ ID NO: 16741 - DNA, 545 bp, Zea mays
  Coding DNA Sequence Number=SeqID_2338
accgtgggctttggcgtgatgctttatctgctgtttttcctgttgaaagacggcgcctggctggtcgggctgattctcgaagcgctgccgctctccacctatgttaagcaccatctgctgatgaaattcgccgccgtatcgcgcgcgacggtcaagggcacggtggtggtggccgtggttcagggggtgcttggtggcttcgccttctggatcaccgacatcgacggcaccctgctgtggggcgcgctgatggcgttcctgtcgctgattccggcagtcggctcggccatcgtctgggtgccagcggccatcttcttcttcgccaccggtgcgctgtggaaaggcctgttcctggtgggcttcttcgttatcgtggtcgggctggtggacaacatcctgcgtccgctgctggttggcaaagataccaaaatgccggattacctgatcctgattgccacgctgggcggcatggaagtgtacggcatcaacggcttcgtgattggtcccttgatcgctgccctgttcatcgcctgctggaatctgct

SEQ ID NO: 16742 - DNA, 305 bp, Zea mays
  Coding DNA Sequence Number=SeqID_2339
gcctcgccggaagcgcagaggtacagcttcaggttcgtgcggcacacgcgggacgcgccgctggtgtcctactacaactacatcgtggtgggcggcggcacggcgggctgcccgctggccgcgacgctgtcggagcgctcgcgcgtgctcctgctggagcgcggcggccagccctacggcagccgcaacgtgtcgagcgagtaccacttggcggacgaaaaccgctgtcccccgcgcaacggtttgtctccgaggacggcgttgtgaacgcccggggggggggtctttgcggctggcagggtacg

SEQ ID NO: 16743 - DNA, 502 bp, Zea mays
  Coding DNA Sequence Number=SeqID_2340
tactactgggaacagctctgtgcgtggttaacagcgaacttcaccagcgcttatcagcagtggcgtggaggctcacctccatgcagtgaggcaggaatccggggaaactcacagagctttcatctcccgcttcactaaggtacggcggactatacctcgtatctctgatgcttccatctgcaccgctttccgacagggggtacgtgatgagaagatgctatagaagttggccacacatgacgtggaaactgtcaccacactcttcactctggctgacaagtgtgccagagctgccaagggccgtgcatggcactcggcgccacaaatcggagtcgaccagacgggaggcaccggagccgtctcccaggatggcaaaaagaagaagaagaagaaccgcggccatgagaagccgcagtctgtcgctccgattgtcgcagccgcaactgggggccagggcgagcgcaataagtccccgaccatagggagtcaacagcggctcatg

SEQ ID NO: 16744 - DNA, 296 bp, Zea mays
  Coding DNA Sequence Number=SeqID_2341
taatttaaaggcttgcacacttgcacctgggaattatgcaatttctggtggtgtaaaaggtattgaagtagttgaagccaaagcaaagttcttcaaggccagaatgacggttcggctagctcttgctggtgctttgcatactagcttcatgcaaccagctgtttcaagactggaacctgcgttagctgctactgaaattagaacacctagaatcccggtcatctccaacgttgatgcgcagccccattcagatcctgacaccatcaaaaaaaaaacagattttagcgcagcaaata

SEQ ID NO: 16745 - DNA, 595 bp, Zea mays
  Coding DNA Sequence Number=SeqID_2342
atgatctatggtatttcctcttggagggagtacatttgtgtcacacccgggcttttagggacaaagtcgggtgcatctcatacatgcgccaaagaagacaacatatataataacagagtgtatagagataaatgtcacaataatcagagtatttgttacatagcggaagtcttacaaaataaaagataaatataaaaggatctaaaatccatcgttggcgccagaaagtcaactgggagacgccacctagatcgaatcgaactcctcgatgtgtggctcctcttgaaccacctgttcttctcctagcacttgagattccagttaccagggtgatcttcagatcctcgtgacctcacgaattcgtggtgcagatgcactgaccgcgcggcacaacggcccgcggcggtgcccaaaccaacaacgaggaattaggggtgattccgtccatccctagctcctgtgactccgcgccaaggatcaccacagccccgtgaacgaccatagccccactccggccacagaccggcagcacgggcagcagacatcggcggcggccacaactttctctctctttcatgcgacgaggctttctgct

SEQ ID NO: 16746 - DNA, 494 bp, Zea mays
  Coding DNA Sequence Number=SeqID_2343
aagcggtgcgagtccttgataatcaggttcggttcgacggccacgaaagtctgttccggtatgaatggggcgccagcggcatccatatccctgccagcattattggagtcagcggcgtactcacagtgatcgatcagggcggggatgtctccaccatcacggtctctatgggtcgattgttcctgccagtcaagggggcggcaacctgttaagccactacattccccactgctgatccataagcggcaccgcattcagtattcgcctcttcaagaggatcaggtacttcttttccaggtacagatcgtaaagcctttgcgctttattcatccgcgtcaatccaagtccccctccatgcacccgatgcatgagtacgtcgtcatacaggtcaagctgtataaaaattttgttcgtttcggtcatctggccaccgcttaagcctatccggtggtcgtttgcgatcgtcacgtgatgtaactgtatccgtttcccca

SEQ ID NO: 16747 - DNA, 550 bp, Zea mays
  Coding DNA Sequence Number=SeqID_2344
aaacgccgaagaacgtcgcgctcaaggaccccaaggactggaagatcatcggccgcgccaccaagcgtctcgacagcagcgaaaaaaccgacggcaccgccaagttcggccaggatgtgcagttcgacggcctgctgaccgccgtcgtcgctcgctcgccggtattcggcggcaaactcaagtcgttcgacgccagcgctgccaagcaggtgcctggcgtgcgccaggtggtcgaagtgccgaccggcgtcgccgtggtcgccgacaatttctgggcggcaaagaaaggccgcgacgtgctcaaggccgaatgggatctcggtcccaatgctgggatgagcacccaggccctggtcgaggaataccgccaggccgcgggcagcgagggcgctgtggcggcgcaagcaggcaacgtacagcaggcgctgggccaggccgcaaaaaccgtggaagccgaatacgtgctgccctacctcgcacatgcgccgatggagccgctcaactgcacggtcaagatcggcgacaatggctgcgacatctggaccggcac

SEQ ID NO: 16748 - DNA, 363 bp, Zea mays
  Coding DNA Sequence Number=SeqID_2345
gccggtatccaccagaatcacgcgtccctgaccgcgaatcagataacaaaacacatggatgtcgcccggctgtgctatgcctgcctgacgttgcagatcgaccgcatcgtcgtggtgaccagtgtcatttttgacagagttgagacccggattgtcatggacataaaaattttgcgcgcctttgccactgtcgcggcgctggagcatattggtcaggctgcggaacggttacatatttcgccgtctccgcttagccggcaaattcagcagctggaaagcgaactgggcatggtgctgtttcaccgtgaaaagaaacgtctgcgcctgacggacgagggtaagcgctttctcaccgaggtaacg

SEQ ID NO: 16749 - DNA, 416 bp, Zea mays
  Coding DNA Sequence Number=SeqID_2346
gaacatggccttaaccggctcaagggcatggatttaaaaaggagtcccccttatttttatctctggattaaaatggaatggggctagaaaaccccctttatatctagtggccactgttgccattttccggttatgcaatatgggcctcctctccaaggtcccacaggtggtttgctttgcgttccatgacagcaaactgttgatggaaacatgcccgggggcccagaacctttggaagatcgtgacccttttttacttgggttagctccttcgccaggggtctattttcccttttttttgttcggggggtaggctaatgttggggggataaaaaaccaactgggcggtttagttagtttccaaaaaaactggatagggggggggatgaccctcccttggaggagaaagtccttttg

SEQ ID NO: 16750 - DNA, 391 bp, Zea mays
  Coding DNA Sequence Number=SeqID_2347
aatttaaatctttctgcccacgagctttatcaagctctaactaattttcttcaatgatatctgtagcctttggtacctgtagtaaatgccaaagatggtaaatggttaatcagcaaatcacttttccctgttggtaaacctggtggtcatggtgctatttggaaacttgcatatgatagaggtgtactccaatggttacaaaattgtggcaggaaaggtgcaactgtacgccaagtcagcaatgtggttgctgcaactgatttgaccatgatggcattggcaggaataggccttcgaagacctgcggctactgaaggagtgaatgtccttattgagaaacaaaatcttgatgggctatggtcatatggcatcacttgtatcgagtacactg

SEQ ID NO: 16751 - DNA, 503 bp, Zea mays
  Coding DNA Sequence Number=SeqID_2348
gccagggccccaaaaaccacaacagaaccttccacctccaccaaaaagcggccaaccaacccaaaggggcgggcgacgcggcgacaacaaccggcacccaacaaccaaacccatgaaccagccaacagcccaacaccgacaggagcagcccccaaccagcacgccgcccacagagcccacccccaacgcgaaccaccccaaccacgagcaccaggccgagaacaggcgcagcccccaccaacaggacccaccgacaccaccaggacagcccaagcaccaccaaaagccaccccggaaggccgcaaacccgggcaaccagacaacaccaccaaagccagcccatacagccagaacacccgcccagcccagccagggcacaaccacaagccccgacccggagcagcacccgcggcagccaaagaaacgccaacaaacacccacccgctacgaaaaacaggtgccaaaaacaaccgctacggcggcaaccacgaaccagcggacag

SEQ ID NO: 16752 - DNA, 242 bp, Zea mays
  Coding DNA Sequence Number=SeqID_2349
gatttgaagttctggttgcgcgagtgccggctatgggagcgaccacggcgacgtggcggcgaacgcgacggctggaccttctactcgccggagccatcaccgatctgcggctgcttggaacgtggctgcgatgccatagcgacggcgagaatttggctctgggaaccaggaatgactggcttcgggcacgccaacctggacatcaagaaccgcacacacgcatactacacgtggcactacaa

SEQ ID NO: 16753 - DNA, 448 bp, Zea mays
  Coding DNA Sequence Number=SeqID_2350
tcataccaaggatcccgccaaaggtccccctggaggtgacccctccggcggtgcccgtggtccccggagcatcccgaaaaataactgtgaccctaccggcgaggtccgtgaccggcccctacagtttgggtgagattcccatgaaaggtggccccggtccccttgtcagaatcccagttgtagttatgggattcaagtaggtaaaagccgcctgtgccttttcttagggagtaaaggataggaaaagcgagttgtgcctctgtaatttgaggtcttgagctgcaaaggaacgttgtataattttttcataggttgtaaaaaataaaagttggcccaatcctgtaagtgttatgcatgccccccccaggttgtaaaaaatatttgggggccctaaatcctctgacatggggactaaaggccctcttgtatggtagtccacccctgtttt

SEQ ID NO: 16754 - DNA, 234 bp, Zea mays
  Coding DNA Sequence Number=SeqID_2351
agaagagtaggcgttctctccacgccttcagggccaccgtgcctgcccctaggccttgcacttctcggcactgatacatcgttttacaccggagagaccttgaaaaccctgacttaatccaacttactcgccttgctcctattcccactttcgtcagttgccatagtttcgaaaacgcccccacttacagcccttgcccacacttgctcagcctgaatgcctaatgccgcctta

SEQ ID NO: 16755 - DNA, 365 bp, Zea mays
  Coding DNA Sequence Number=SeqID_2352
taaggcggcattaggcattcaggctgagcaagtgtgggcaagggctgtaagtgggggcgttttcgaaactatggcaactgacgaaagtgggaataggagcaaggcgatgccgagaagtgcaaggctcgacatacggaaggccttctacgagatgctcccccaccaggagcgaagtgccgacctaggcgtccagctcagcgctcagagtgaccagggagggtggggggttgatgaccagttcagggcccaccaggatgtccatcaggtcctaggggcaggcacggtggccctgaaggcgtggagagaacgcctactcttcttcgaggctgtggtcctgataaccgaaaaggctgcggacgtgccgt

SEQ ID NO: 16756 - DNA, 574 bp, Zea mays
  misc_feature (546)..(546): n is a, c, g, or t
  Coding DNA Sequence Number=SeqID_2353
aagaaacttgccgattgagtatattagagcatctccaataattatataaatttagcaccctaaattatagatttaaaaagttgctaaatcactttaaggagtacaaaaatgataattatggaaatttagcgctctaaattatagatttaagaagtctgctaaatcacctttaaagatagtagaaaaatgtgtgtgctccaacagttctttatttattggttgctgacttttaaaattatctacgtcaacaaaaaaagtgtgcatgctctctattttcaattgagctagcacatcaacaaccctccatattactttggaaggtcgaacttatcgatggaagttgccttggcaacgggcacatttttacccacgtgcccgcgggtaaaacccctatccactgccggtttccggtgtgaagtttgtacctgtgggtacgagtacgggttttgattctcaaccccgacgggttttttctcgtgggtatgaaaatgttgtacccgtgcccgcaacccacatacccgcatatgtgtctgtgtagaactgtanactgtagagcacatgcatctcaatttag

SEQ ID NO: 16757 - DNA, 175 bp, Zea mays
  Coding DNA Sequence Number=SeqID_2354
ggtcgctgcgcaacaaactgctggccacgctggtgctgctgcatctggcgatgatcggcggtgtcacctggtatttctaccactgctatggcgacatgatgggcaccatgaaggacgaccagctcgccaaaattgccgatgcctggtcaagcagccagcgcatgccggcactgat

SEQ ID NO: 16758 - DNA, 482 bp, Zea mays
  Coding DNA Sequence Number=SeqID_2355
atcatcgtactgcaccagatgggcagccacggtccggcttactttaagcgctattcggccgcgttccagcgctttacgcccacctgcgatagcaatcagatacaggattgcgatcaccaggcgctggttaacacctacgataactcgctgctgtataccgacgatatgctgagtcgcaccatcgataagctgaaaggcatgagcgatcgctttaacgtggcgctggtgtacctgtccgaccatggcgaatcgctgggcgaacacggcatgtacctgcacggtgcgccgtacctgtttgcgccgtcgcagcagacgcacatcccgctgctgctgtggatgtcgccgggctacgccgcggcgtatcacattgatcaggcctgtctgcgccagcaggcggcagagacagcggtgtcgcaggataatctgttccacacggtgctcggcctgttcaatatccagacgcagcagtatcagccgcagct

SEQ ID NO: 16759 - DNA, 134 bp, Zea mays
  Coding DNA Sequence Number=SeqID_2356
atatgggttctgaaaatgtttagagggacagtagggtattttgaccaggagtggatgagaggggttttgattatgatcaaggtggaggtctatagattaggtatggtggtactggagattgtgtccgggaagag

SEQ ID NO: 16760 - DNA, 487 bp, Zea mays
  Coding DNA Sequence Number=SeqID_2357
taccggccaagccttgttgtggagcgcccccccagcagggtgatttgtttcggccgatgcgctgcttatgcagctggagtcgccgctggacagcgtgctggccgcggcccgcatcgcgcgcgccagtcacactcaggtgatcctcaatccggcgccggcgacccagctctctgatgagctgctggcgctgatcgacattattacgccgaatgagaccgaagcggaaatcctcaccggcatcgccgtcaacgacgacgacgacgcggcgcgggcagctcaggcgctgcacgccaaaggcatcgataccgtattgattacgctgggccggcgcggcgtatggctcagcgagcagggtcagggacagcgtattcccggcttcagcgtgcaggcggtggataccatcgctgccggtgataccttcaacggggccttcattaccgcgcggctggaaggcgtggcgatgcaggatgcggtccgttttgcccat

SEQ ID NO: 16761 - DNA, 570 bp, Zea mays
  Coding DNA Sequence Number=SeqID_2358
atgccggtgttcttcatccaggacgcgatcaagttgcccgacttcgtgcacgcggtgaagcccgaggcgccgaacgagatgccgaccggcgcagtgcgcgcacgacacgttctgggacttcgtgtcgctcgtgccggagaccacccacaccgagctgtggctgatgtccgaccgtgcgctgcccgcgagctaccgcgcgatggacagtttgggcgtgcacacctaccgattcgtcaacgcggccggcgccgagcatttcgtcagttccactggcggcccgagagcggagcctattcgctgctgtgggacgaagcgcaatgcatagcccgccacgatcccgactttgaccagctcgatttgtggatggcgatcgagcgcggcggctatcaggagttagaacacggcgagcagctgatcgatccgtccgacgcgagcaagttcgacttcgacatgctcgacccgtccaagctcgtgccgccagaactcgtgccggtgtaaccgatcgggcgcatgatgttatgccgcaaccccggcatcttgtttgcgcaaaccgagcaggtcgcgtttcat

SEQ ID NO: 16762 - DNA, 189 bp, Zea mays
  Coding DNA Sequence Number=SeqID_2359
gtgacgtgcccgtgtgagcacacgatcgccgggtacgactcagcctatcgcacatcggtgactagcagggggttcggtagcaggctagactcgctggacggggacaaccgcacggcactactcgtgaagacctcttgcttcgacaagagctatgagaggctgacactatggccctactggatcgacacg

SEQ ID NO: 16763 - DNA, 173 bp, Zea mays
  Coding DNA Sequence Number=SeqID_2360
gctcgccacgcgtgcatggttgccgcactggctggccgtgccgccgtgttggcaggccgctggctagctgcgggccgccgcgccggtgctggggaggggcgctcggccgatggcctcgatgctggtctgcaggccgcgcgagttcgcgtcgtgagaggccaagcgagcaccag

SEQ ID NO: 16764 - DNA, 333 bp, Zea mays
  Coding DNA Sequence Number=SeqID_2361
actcaaaccctttatttgcaagaggttctggcgcgtattcgagccatcaccggacgccgccacggtgcggcggactccctgctgggcaacggcgacgtgcagctcgatatgatgacgcgtgaagtgctgtacaaaggccagcgcgagcagctaaccgcacgtgaatacgccctgctctatgcgctgctggaacgcccgggggcgatcctgtcgcgtgagcagttagaaaaccgcatctacggctggggcgaagaggtcaccagcaacgccgtggacgtgctgattcacggcatgcggcgcaaactcgataacgaagtgattcgcaacgtacgc

SEQ ID NO: 16765 - DNA, 254 bp, Zea mays
  Coding DNA Sequence Number=SeqID_2362
atgcaggcagatgaacaaagcggtcagggttgcatcacagttccgtcagtcgagcatagagcactccgcgccctccaggtccaaggttgcagcaagtgtccgaacccgtccgccagcgggcagacgcccagatgctttccggggagccggcaatggccaggtccccgggcaaggctctgagcgttctcagcattgttagccttagtatcccacaagtgcttgatggaggagaaacggcaccaggctgctggagc

SEQ ID NO: 16766 - DNA, 431 bp, Zea mays
  Coding DNA Sequence Number=SeqID_2363
taacacgggaataaggtggtcgattctttaggtccccaacgacgggagagaaaaatcggactggttgggggggcaggaataagtaaaacaggacttctcaaggaattaatccaaaaccatggtaaaggttaaggaaggggaaccggaattggcggaataagggaacggaattgttaaagaaaagatttttaaaaggaaaataaggaattcggaggtaataaataaaaaaataattaggaatccaaagtaagtttaatttaaggcccaaataaataacccccgggaagttggaataaaagtgggttaactgccccaactaaggcaaaaaaatttccaaaaggttattaaccaaaaggggctttaattcatgaaaaaaatctttggtttggtccaaccaggatggaaggaaccgccctaataagccagaaggc

SEQ ID NO: 16767 - DNA, 424 bp, Zea mays
  Coding DNA Sequence Number=SeqID_2364
accctagagatccttctgctgcaagcatttcatacttggagcgaggaagggagatacatgcttatgcacttcgtttaggatttttttggaagatagttatgcaatccaatgcgctagtggacatgtatgttaaatgtggagcgccactggtagctcgagattcgtttgaccggctgactaacaagaccctcatattatggaccattatgatcgctggctatggcatgcatggttttgggaaacatgccatctccctctttgagcaaatgagaggccgtgctatctgagccagaagccgcctctctcagtgccatattgaatgctagatgccattcaggccttgctgctgagggacaaaaattcttcaatgctatgcaaaaggtatacaaaatagtgcccatgctgtagtcctacacctgcattg

SEQ ID NO: 16768 - DNA, 220 bp, Zea mays
  Coding DNA Sequence Number=SeqID_2365
tgaatctgtccatgctcgtggctttctttacatttgttcttaaggtgagccacaagattcaggaatatcattgtagattgtttttgaattaggccacctatcctaatttttcgagtttgcatgggcctgcgatgcattacggaggcatttggaggaaaggttattcgtgcaccttctggaatgacgcatgagaaaatctctccagttcattatgatgagg

SEQ ID NO: 16769 - DNA, 169 bp, Zea mays
  Coding DNA Sequence Number=SeqID_2366
ctgctcgcccataatgaccaactgtcccctgtacgccagcaggtccgtcagcatcgctccttggccatggatacataattagtgcgcacccgcacgtactatccgcagcttggcctgatccagctattcgatgacaagcaactggttctgatcgatccgttaaccatca

SEQ ID NO: 16770 - DNA, 334 bp, Zea mays
  Coding DNA Sequence Number=SeqID_2367
atgccggaaatcagcatcggcctgtacccggacgtgggcgccagctggttccttgcccgcctgccgggcaagctggggttgttcctcggcctgacaggcgcgccgatcaatgcccacgacgccttggacctgggcctggccgaccgctttctgggtgagtaccagcaagaggcgctgatcgaggaactgctgcaactgaactggcaggaacagaccgccctgcaactgaacagcctgctaaaggccgaacagcaccgcgcctgcgccgagttgcccgaggcccagtggctgccacggcgacagatgatcgatcagttgctcgacgtggccgacg

SEQ ID NO: 16771 - DNA, 182 bp, Zea mays
  Coding DNA Sequence Number=SeqID_2368
gccgtcgcggtcgttgttcctgctgctcatgctggcgctggcgccgctcgcgtcgctgaccgcgcaggcgccggcgccggtggcgaggacagccggggtgcaggcggagatcgacgcgctgctcgcgttccgccgcggcctgcgcgacccctacggcgccatgtccgggtgggacgcggcct

SEQ ID NO: 16772 - DNA, 255 bp, Zea mays
  Coding DNA Sequence Number=SeqID_2369
gcgcggcaccggtaatctttgtcagtggtatgtcgatcaggccgaaaacgccacgctgcgtgatgttgagggcaatagctggattgatttcgctggcggcatcgcggtgctcaacaccggccaccgtcatccgcgcatcgtgcaggccattgccgatcagttagcaaaattcacccataccgcgttccaggtcacgccgtatgagagctatgtggcgctggcggaacgcatcaatcagcgggtgccaattgccgg

SEQ ID NO: 16773 - DNA, 336 bp, Zea mays
  Coding DNA Sequence Number=SeqID_2370
gtaatatagttaccgtgtacgcttaaggttttatccgcatcgtcgatcgatagaaagacatgactctggtgtccgactttaacgtgtatcctatagtaatcaaagatgtgctgatgcagcacgccaaggtgcccttataggatactattagcgtgccgaacgatctgtccgcttaatcggtgaaagtgtgcatcatgaagaaagctctatcgctgtcgaaatagcaattgctgtatcattgtcgccgtcagctctccgactatatagtactgatgattatccagtttcgtaatgaactgctgtagtccaacgtcggtataattttacgtcgcgtat

SEQ ID NO: 16774 - DNA, 389 bp, Zea mays
  Coding DNA Sequence Number=SeqID_2371
gggctaccagctggcactggataagcacgagcagcccgatgcgcacgcccggccgctggcggagaggcagcagcgcggctatctcaccacgctcgaacaggagacgcgcgccggcgagaaacaggcgcaggtgaagccggcactgcgctggctcgacgatctggtgaggaacgaactggaagcgcaggcgctcaccggcagcgagctgcgcagcagaggcacgcaggcgtcaccggcggcgtacgctgcggcggcacgcaggctgctggcgcagggcgagcgccagcgcgagggaacccatgcaccggaaggcgcctggggccagcagtcagcgggcgacggcccgtggcagaccgcctggcgctcaacggcagaggagaaagtcggca

SEQ ID NO: 16775 - DNA, 255 bp, Zea mays
  Coding DNA Sequence Number=SeqID_2372
ggttgcgtgtgtcgacgcggctcgcggcgttttgtgccccgcaacggtgtgcggcgcgttggcgttccagccctcgcgccggttgtcgtgggagatggctgggtcgcccttcgtgattgcgctaccgggcgggctggggttgtgccccgcggtggttatggtcgttcggggccgtgtcttctgagctatcagtgttgtctgggttcgcccagtccgctgctttgtttgggggcaactgcggatggcgcgtgtcga

SEQ ID NO: 16776 - DNA, 375 bp, Zea mays
  Coding DNA Sequence Number=SeqID_2373
ggtgcaggagcacgcacacccagctccctccctcccttgttcccaatcatatggttttgtcatgccatcgtggtttgttgtccacgagcttcccatgagcgctggtgagccgcaagatgagactggggttctcaaggctatgcaagatgtgcacgccatgatacagggaagtagccgatggtatctatccaccctgataacatatttgtttgtggattcagtcaaagaggtgctctgacattagctagtgttttgctttatccgaagaagttaggtggaggagcagtgttcagcaggtgggtgcctttcggttcatcagtgagaggatttcacctgaagcgaggaaggtatatataattatagtacacgcagtgg

SEQ ID NO: 16777 - DNA, 379 bp, Zea mays
  Coding DNA Sequence Number=SeqID_2374
gcttgtgccagaccgaccgccatcaccacgggggcagtggcagcagcaggggtagcagcagcagcaacgacaacgtgtgcctcgcttccaaggccactggaaggttcatggtcccaagttttaatccaccctttgcctgtcagggcctcctcttcttcggcatccatggacgttccttccccaccggccgcaatgcccgccggggggtctggttcccatcggcatacgcctactggggacgtcgccgacgatccatcagcggctaccatggatgctccttcctcgtcggccgccatgcccgccggcgggtctggttcccatcagcatacatctgctgggaatgtcgctggcgatccgtcaatggctaccgcaaccccat

SEQ ID NO: 16778 - DNA, 557 bp, Zea mays
  Coding DNA Sequence Number=SeqID_2375
ctagcgaggctaccctttgccaatgccaccttagcctccgcttgcgcagcctgcgctacagcgacggcctggttagcctccctcctctcctccgccagccggcgtcggaggtcagtcttcttggcctccagggcggccaccttctccgccagcctgcggttcttgctctccacagccgacttatcccggacagcatccgcgtgctgtgcccgaagattctcgacttcggtggcgacgtccgcagtcaggatgcccgacgcaacacggtcggcgaagtcgaccgcttgcttcagctgctgcgtcagctgctgcgacaactgctgagacacttccctcaaccgctgggacatggtgcccgccacgtccctagcggcagcggccgtcagaatctcgccgctcatgcagaaggcgacccacgggtcctgcgtggccccaagataatcctcgacattgatattcgtgccaaagtcagcaacacgtctccccggcgaaggcagctcctgccctttcgtaggttcgcccaggggaggcctgcctccgcaagaggcgacagcctt

SEQ ID NO: 16779 - DNA, 211 bp, Zea mays
  Coding DNA Sequence Number=SeqID_2376
ctgcagttccaagtaacccttgataaaaattaaagaaggttgctgcctttctttcatgggcagtccagatttgcccatcctctgagtgtattgctgcaatgaaattataatggcaattggaacatgtgctctttgctacaataacgtgcatgtctttagaggagttgtgaagatgagacgtggcctcagattcataatcgttaatcttact

SEQ ID NO: 16780 - DNA, 590 bp, Zea mays
  Coding DNA Sequence Number=SeqID_2377
agggctatgtgcatcgctggctgtcggtcgtcacacaactcgctccgcacaccaagccagccctcctcccaatgctgcgcacatcggcagaagccgccgtccggcagtgcaccggcggcgagacggggcggagatgcggattttactggacagaaggcgtctatgtggatgtcgcggtggacaagaccagtggcgcgggggagcagatgaacgtgctggcggctgtgtcgagcctgctgatcgaggaagcggatcccccggcgacgatgctcgatggcggcatcagcaagggtgatgtcaacgccggagagcgcggtggcttcatctccgatcccctgccgcccatcacggcggccgaccgggccggggcgggtatcttgacgttcatcactctggcgggcgggtcggcgttgtggtatgtgatgaacacgggtctgtaggagggaaggtcagcgagcatggggcagcatttttgcattggcgatgttacaaaacaatgggctggtgttcgaggcgtcgtgatatcgggcggggtgaattttgtcgatcattttacaggtacctaggatacctttcctattcgtagtcta

SEQ ID NO: 16781 - DNA, 414 bp, Zea mays
  Coding DNA Sequence Number=SeqID_2378
ggtgacgacccttggcaagaaaaagggagcacggtgtcctgcaaaaaaatcctctcggggcacaaggtgcaacagatggggaaacacggcctggagctcctgagctcggcccccgcgcggagggttggtagcaactgtgccgtctccgtcagcaggcaggagttgagaagccttagccccggggtcggggccgtcggttcgagtgggggggggattagccgcaagatagggcgcccgcagcagcggcagcagcaggctaggggtcttcagccccagggtaggtagggggctgaagggtcggttttcgccctgatgacccccgagatcctcgttgggcgcttcgttcgcctccattcgatggatagaagttcagggccgaaccaagccttagctttgcgagctatgaaacaaaaa

SEQ ID NO: 16782 - DNA, 521 bp, Zea mays
  Coding DNA Sequence Number=SeqID_2379
tgtaccgccaccatggaaccgaggagagagaatttggtgctgcctctagcaatctacgcttgtgcggtggctcgagggttagggaggagtcctagggatgcgtccggggttgtaactcgcacacgtggtggatttcggggcacgggagcttggggccatggtggattgctcaccgaagtccctatggcgccgtgaatccactggtcgttgtgggccagcttccctagagctttattccgcggaagagggatccgatcctccggaactcttagctccggaagaagggcaggaacccgacccctccgagattaaccttttgtgccaggaaagcttcgacgaagagagaatctgactgtaagaaaaatccaagaatcatggaaattacatgtgaagaaagatgaagtcactactacagtaaacctctgtacaggcggtccggttagcctctacataggcggttccaggaaccgcttgtggtgcaccgactatgatgtaaaacaacatcactggcggtcaatcaa

SEQ ID NO: 16783 - DNA, 339 bp, Zea mays
  Coding DNA Sequence Number=SeqID_2380
gatctcgtccatgggcaactcgtcgacccctgccggtgttcagggcacatcgcgggatgccaccacgcgtatgtaccccggtcggcgtttctcgtcgacgatggggctgcggcgtcccgtgtgtgtgctgccgccattgtagggccgtgcccatcactcctcatcctcgacgccgtacccggggatttttctcgacgcctcggggagactcctcgacctcaccgtatgagtgccgcgtccaccgcccccatgctttgtgtcgcagggaagatgagggtgcgccgcggtccgcgctcgccgtaggcaaggaagacaccaattcctgtgaggtcacgtgtc

SEQ ID NO: 16784 - DNA, 261 bp, Zea mays
  Coding DNA Sequence Number=SeqID_2381
gtcagggccgagatcgtcaggcacagctgccgtccggcggccgcggcggtggccacggtgctcccctcgtcgcacgcctcccatctcctcgcggcctcggccgccgccagccgcgggctgcacgctggcagcaccaagtcggtaggggcaagagcggcaactttggcggcggccgctgccgtggggcctgcggcctcctcgtcgtcgtcatcggcggtgtacgccgccgccgcgtcgagctcaacggactatagctccgtc

SEQ ID NO: 16785 - DNA, 207 bp, Zea mays
  Coding DNA Sequence Number=SeqID_2382
atgcagaccgaggcgcaggagctccccgcgcccaagcgaaagacgcccatcccatacttgtttatctaccaacccaccaacaataccaagtgccgctccggcaagctagccctcacggccaacggccctcccctgctgccacggaagacaaccgcgctcgcaccggcgccggagcgggcgccatccaaagccagccaatcgaccgaa

SEQ ID NO: 16786 - DNA, 470 bp, Zea mays
  Coding DNA Sequence Number=SeqID_2383
atgacgtcccaactgcacaaaaagggcgaggcctggtcggcccgcttctcggaaccgatgtcggagctggtcaagcgctacacgtcgtcggtgtttttcgacaagcgcctcgcgctcgtcgacatcgccggctcgctcgcgcacgcgagcatgctcgcggcgcagcagatcatcagcgccgacgacctcgccgcgatcgagcgcgggatgacgcagatcaagggcgagatcgagcgcggcgaattcgaatggcagctggatctcgaggacgtccacctgaacatcgaggcgcgcctgaccgcgctgatcggcgacgccggcaagcgcctgcacacgggccgctcgcgcaacgaccaggtcgcgaccgacatccgcctgtggctgcgcggcgaaatcgaccgcatcggcgggctgctgaacgacctgcgcggcgcgctgatcgacctcgctgaacagaacgcggacacgat

SEQ ID NO: 16787 - DNA, 403 bp, Zea mays
  Coding DNA Sequence Number=SeqID_2384
agcgattacaagtcgttactcgagcgcgagccgaccccttccacggaggacttcagcgattctgagtacttggaggaggaattctccttcgagtccgaggggtcgccggttcacgcctctccccggcgtcgtccgatgattcggacgattcccaggggatcgctgccgagatgtggacatacatccgggccgtcgagcgctctgggctcgagggctcggatgagtcggaggtctcctcggacgaggagaactcctctgactcgtccgaggaggggagcggcggtggcgatgacgacgagggcgacggcgatggtgacggcgacggtggcaagggcgacggcaagggcgatggcggcaagggcgatggcaagggtggcagcaaggccaattcatataatggatg

SEQ ID NO: 16788 - DNA, 269 bp, Zea mays
  Coding DNA Sequence Number=SeqID_2385
gtgctccgaggggaactggctcaaacggggccgaggccccacccggcgcgggccacaggaatcttggcccggcccgggcggccacacggacaataggccctgggaggcagcataccaccccatggggtgggaaaacgggaacctggcacggaaaaggcggatttggccaacaatgcaccgagggggcagagacagcaccccaaccgcggaggagaagctgctaccgccagacatgaggcacgtggggaccacggacacgttaactgaag

SEQ ID NO: 16789 - DNA, 204 bp, Zea mays
  Coding DNA Sequence Number=SeqID_2386
tggagctcggagtcaacattgttggtgatgcatgcagcagcggactcggacttgcggtgtcgacgtatatccttgttcgctgcggcttgctgcggctgcaatccggctgcggctgcggcttctacagcatctgtcgtatgggtccacacagcgtgcacgacgtgtcagcacgcgtgccggtgcacatatcactggtagggccag

SEQ ID NO: 16790 - DNA, 441 bp, Zea mays
  Coding DNA Sequence Number=SeqID_2387
gaagtatgcaacaactcaccgtggcagtggcagttgcaggacaggaggacgaggagcagaagaagaagggacgccaagccatggactggccgcagaggcagagccatgacaagcttgcgagctctgggtgggcctctggctcccagcgaagcagcagccggcaccgtgacacgaacaaacggaatcacaagtctggccgccggggaataacaggaaacttggccgggcaggcaggcaggcaggctgcctggtcagcacacattgagatatcaaaggagtccacacattgcctcacgggccgtgaaggccggtttggccatctatacataggagcaaggctcccgacacggcgacacccgttccatctggaagtttggaacagaggtatcccagaatgcccacaaccacaaggtgccatagagatctgtttccgcgcgaggc

SEQ ID NO: 16791 - DNA, 509 bp, Zea mays
  Coding DNA Sequence Number=SeqID_2388
aagtcgacaggtaggatcgctccgacaaatgaagctactaaacccatttgttatatatttgatccgaacaaccctggcacacatgccggccacgtgaggccggcgcgcggtggacgtcgtacccatcccaaccccgccgcccgccgcggcatgccggcgtcgacgcgtcgtcgaagcggccagggcccttggatcgtgccgagatgctgtgcagtgccaacacccaaggtcaccaacgatattggcctttcaccacgggctcagcccgacagagagtcgcctaggaacctacggtgggagccagaagaaggcggtgctgggcaggagggcgattcagagagggcgtctgaggtgttcctggaagcatcaccaagacaggatccaccggtcccgagcccgactgcacacaaggaacaaccacacttcaagagaatgaacagcagcttgaagcatgagatcaagacatcatggaactacatcggtagagctcgtttacctagcaatgtcgg

SEQ ID NO: 16792 - DNA, 237 bp, Zea mays
  Coding DNA Sequence Number=SeqID_2389
tcacggcaggctggtgatggctcccggcagccacagcgtgatgttggatggcgaaccgctcagcctgaaaagccgtgagctggcgctgctggagctgttcctgcgcaatcccggtcgcgtgctgacgcgcgcccagctggaggagaagctgtacagctgggatgacgacgtctccagtaacgcggtcgaggtgcatattcatcatctgcgtaaaaaactcggcagccagttcatccg

SEQ ID NO: 16793 - DNA, 555 bp, Zea mays
  Coding DNA Sequence Number=SeqID_2390
agcagagttttcatcctgtcagctgggttcccgattccctgcctggctacgctggcagaaccaagttaacgtccttgacatttcgtactcgaaccttaccggtacgattccagaatggttttgggctgtgtttgctaacgcatcaagcttggacctctcttacaataagattactggtgagctgccccgtgatttggagttcatgtcagtgggaatccttcagctcaggtcaaaccagctcactggctcggtaccacggctgccaagaagcattgtgacgtttgacatctcaaggaactctttgaatggaccactgtcactgaattttgaagccccactactacagctggtggttctctactccaaccgaattactgggcttattcctaatcagatttgtcagtggaagcagctgcgagttcttgatctatcagacaatctacttgcaggggagcttcctgattgtggcaccaaagttgcaaaacaaggcaattcttctagcacctccatgcctcattctagtcccgcgagtcctccaagcttgaatatccgtac

SEQ ID NO: 16794 - DNA, 372 bp, Zea mays
  Coding DNA Sequence Number=SeqID_2391
ggacgctgataaggccgtcggccttgattcccggcacgaggcaaacgctcgggatcgtgaatcggccgggcatccgtatgtcaccgatcttggtgacgggcatcgcgttgccatacaccgcctccaccctcgcccctccggcgcgtcacggaggtcggagaggaggctggggtggggtcacgcaccacgtggacaccggcgcctgaatccaactggagctttagccacggcggcggtcgcggcgaagagcttccaccgtcaccgggtgctggcggctgtgctgatgcggatgcagttgccggcgttcctcttccacccaccagcgccggattcggcggcggcggcggctagggcgcgggacggattcagagc

SEQ ID NO: 16795 - DNA, 569 bp, Zea mays
  Coding DNA Sequence Number=SeqID_2392
gcatgcatggcatgtccatggccatgggctgcttgctgctgacagctgccgcgcgtgtcgccaggaggtgatcaggcagggggcgacgacggtggtggtgcccgggatcccgccgatgggatgctcgccgccgaacctagccatgttcgcaagcgccgacccggcggactacgaccccaggaccggctgcctcaagggcctgaacgtcctggccgtctaccacaattcgctgctgcaggaggccgtcagggacgtggggacgaagcacaggaacgtcagagtcatctacgccgacttctttactccggtcatcgacatcgttgagtccccggcaaagctaggtcgtgcttgttgtgttgtggaaggagatgaatacaacttgcagaattattctaagaggaaggtattgattataattgttgcagggtttaccagggatatcctgaggtgttgctgcggcggcggtggcaagtacaacttcaacctcagcgccggctgtggcatgccgggctccacggtgtgccaggatccgacggcctatctgtactgggatggccacttcacggaag

SEQ ID NO: 16796 - DNA, 193 bp, Zea mays
  Coding DNA Sequence Number=SeqID_2393
tgcctgcagttcatcttcagcagctggcagtacaccaccaggggcgggctggcgaccaccacgaccaccaccaaccccaccaacgtgtaccggagcaaggagttcattcccaccatgcgcaccatcgagtcgcaggcgtgcagcccggaggcggtcatcttcgggctgtaccggtgccatctagaggacgtgg

SEQ ID NO: 16797 - DNA, 430 bp, Zea mays
  Coding DNA Sequence Number=SeqID_2394
caaaaaaacttcttgcgcagcccttcccccaaatccgagagatcaccaaccttttttcctaaaaaagggagtaaaagggaaccctcgcgtagcaaatcctttggcaaaagtcgtccttcaagggaaagcccctctcataccccccagttcgttctccaggtctgtgtccagggagcgctcagctggatctgcgaggtgtggtcgtcctaggtgggttataagatatgccctgtatttgcctctatcagaacttgtgttcttcgtttatttcgaacttgtagaaccgtatggatgtgtgccttgtcccccattatgttcattctgtgctatctttctgatgctatcttgctattgtgggtttgaacttggtaatttagtttacaaaatcattcgaaaaaaaaaaaaataatggtccacaacgtcgtatggg

SEQ ID NO: 16798 - DNA, 262 bp, Zea mays
  Coding DNA Sequence Number=SeqID_2395
ttgagcgccagttaggtggcaacttctcagctccacacaatctcttagagactctcagagaacgaatgtttaaaccttctttgtcaaccattatcatagagaacacaaaagtagcaactgtttccctttcagatcctgtttgtgtagcaacccgaaaaatgcgcggcttacgtgttaattcagtaattattatggctggaaattcgcttcatgggatctttacctccaaggatgtgcttaagcgtggtgtgggcccaaatcc

SEQ ID NO: 16799 - DNA, 350 bp, Zea mays
  Coding DNA Sequence Number=SeqID_2396
catgagtatatacgtcggtggcatagcaacaaccaacatgggcgtgctagtacagaggacagacgccgccaactggggacgacggtcgccggccgagagggatagggagcggaggagatcgctcagagcgatcgaggcagctaatatggcagacgtacgtacgtacgtaccggtctctcggcggaggctcgtagtgcgcgcggctgatgccgagccaggccctcttcgccggcacggcagctcggtccatgcagttgcacatctttctcgacgtactgctgctgcctaatatctagccggcggctggaagatctcctcgcacgcgtgggtcggctccttggcagcactca

SEQ ID NO: 16800 - DNA, 392 bp, Zea mays
  Coding DNA Sequence Number=SeqID_2397
ggacgaatgtccttaaaaatatgtgaatgaaataacatcaattgagataataatgagtaatgaaatgtggaactcatctcatacgtcttagcataatccattttatcctctatcatattacaagaatttacaaacataccttcggcttcttgacacaagatagctcgaaagtacttcgaaggctaagcaagattaagcttgggcccttcaaaaggtgaatttatgcagggcactgtttacctatttataggggagaagtacaagtttgtataaaattacaagcatgccctcaaagtttacacacatgatttacaatgatataagggtattgttgtcctttctttttcttccttattgcgtaagtctcagacctcatttgcttcgtcacttct

SEQ ID NO: 16801 - DNA, 171 bp, Zea mays
  Coding DNA Sequence Number=SeqID_2398
ctgcttcttgtcagacaacttaaacttatatgttcagtcacgttcttatcgatctcctgaggtcatcctgggtttgccatatgatcagaaaattgacatttggtctcttggctgcatcttagctgaactgtacactggggaagtaagtttcaagctagagacggtgtcctg

SEQ ID NO: 16802 - DNA, 518 bp, Zea mays
  Coding DNA Sequence Number=SeqID_2399
cccctcggtggacggcttcaatgtcaggggcaagatcgtgctctgtttttgtgacgatttctgcgggagggttgacagaggtgccgtcgtgaaacgagcaggaggcttcggcatggtattggccaaccaattctgtaacggatacagcacattcgccgacgcccacgtcctcccggcttcgcacgtcagctacgtcgccggagtcgcgatcaagaagtacatcagctccgctgcgaacccgacggcgcagatctcctttcggggcacggttctgggcacgtcgccggccccggccatcacttccttctcctcgcgcggtccgagccagcgcaatccgggcatcttgaaacccgacgttacgggccccggcgtgagcgtgctcgcggcgtggccgacccaggtcggcccttcatcctcgtcggtgagtaccgggccgacctttaacttcgaattcggcacgtccatgtcggcaccacacctcgccggcgtcgcggcactgatgaagagccagcacccgt

SEQ ID NO: 16803 - DNA, 192 bp, Zea mays
  Coding DNA Sequence Number=SeqID_2400
gagacaactgaatacagtcctcactgagccaaagaatgccctgagaaagcaactcaagaaatcgtttaacactgaagatgctaagctgcactatacagatggtgcactcagaataatagcccaaaaggcgatggcaaaaaatacaggggcacggcgtttaagaaccatcgccgagaataacctcatggatca

SEQ ID NO: 16804 - DNA, 102 bp, Zea mays
  Coding DNA Sequence Number=SeqID_2401
tccgtgtctttggacatgataatgcatgggtgatggatggaggtttgaccctatggcgcgctgctgggtatgatgctggatcaagtgcctctaacgatgcca

SEQ ID NO: 16805 - DNA, 384 bp, Zea mays
  Coding DNA Sequence Number=SeqID_2402
agaagtctgcacacccggcgctgggttattacctgcgacaggtgcgctccggacttcaggacgcggccaatcgatccatggggccccaggacgcagcggagcttgccaagctcaacggccaatacaacagcctaaaggtgctccagcaggctgtcaccaaacgtgccgcaggcgcgggcggagatgtcgcgccgtccaatctctggtctctggtgaatgggcggcatggctcgacgtctgacatgcgcgacttggccaaactagggcagacggttctgaaagaccccatccccgattcggggaccgctcagcggctcatttcctacggcgcgctgacaggcggagcggcgatgcctcacacggcattggctctcgcagttgcag

SEQ ID NO: 16806 - DNA, 430 bp, Zea mays
  Coding DNA Sequence Number=SeqID_2403
gaggaggccatataaatcattcgattttttggcaaaatttaagcccaaatggtggtgagccaagtgctgaattgttacattgcattgaacgctgttttggttctcttgaaaatttgcaaacacaattatctggagctgcagtcgctgttcaaggttctgggtgggcatggcttggctataacaaagaccgcaaacatcttcaaatcgcggcatgtgctaatcaagacccccttcaagcaacaacaagattaattccattgcttggtattgacgtatgggagcatgcttactatctgcagtacaaaaatgtgcgcccagattatgtaaagcaaatttggaatgttgttaactggaaagatgttagtgaacgttttaacaatgctaaaaactaaaccttaatttagtgtttacttatttcttacactaatca

SEQ ID NO: 16807 - DNA, 548 bp, Zea mays
  Coding DNA Sequence Number=SeqID_2404
gatcccacgctgtttgagcgcgagccgcaggcgattctgcgcatgttttacgtgatggtgcgtaacgaaaccatcaccggcatctattccaccacgctacgccagctgcgctacgcccgccgtcatctgcaacagccgctgtgtcagatccccgaagcgcgccgcacctttatggcgattctgcgccatccaggcgcggtaaagcgcgcgctgctgccgatgcatcgccacagcgtactgtgggcctatacgccgctgtggggcaacattgtcggccagatgcagttcgacctgtttcacgcctacaccgtggatgagcacaccatccgcgtgttgcagaagctggaaagttttgccgacgaagccacgcgcccgatgcacccgctgtgcgtcgagctgtggccgcgtatgccgcagccggagctgctgctgatggccgcgctgctgcacgatatcgccacagggcgcggtggtgaccactcgattctcggcgcgcaggacgcgctggactttgctgagctgcacggcctcaattcacgcgaaatgca

SEQ ID NO: 16808 - DNA, 544 bp, Zea mays
  Coding DNA Sequence Number=SeqID_2405
ctgttcgtcatctacttgtacgaggagatgtgggagttcttcgtcttcctgctctccaactggttcatggtgtccctgctctacaactacatctccaagccacggtggctgaggcacaactccttccggggcaccatgttctcggtgggtttcagcgtcatcatgtggctgaggagcaagatgacccagccgagcctaaccctcaagcagttcaccgtcctcaacgtccgtttgccgctcaagctgccgttcttccccgcgttcaccggcctggcggtggagaaaaagccagtgccgaacagtgtgatgagatccgtcatcgactacctggcgaaacgtggacatggtgccccgaactacgactacgacctcgaccgtggcaggtctgcgctgcggatgaacggcgtcttctacaagctgtcgtgggcgtgcgagagcgacagcgtcgccgagaccatcctcacgtggcacatcgacaccagcatcatggaggtgaaatgccgcccgctgacgacggcggtcagcagcgccacggatgaaacaa

SEQ ID NO: 16809 - DNA, 454 bp, Zea mays
  Coding DNA Sequence Number=SeqID_2406
acacgctgccgctgactgaggtgcaggatctggtgaacacgcgcgtggcgctgaagctgtcgcaaatcaacggcgtggggatggtgaccctggcgggcggtaatcagccggcgattcgcgtgcagatggatccaaaagcgctggcggcgcacaagctgtcgctggaagacgtcaatacgctgatcgccaacagcaacgtcaacggttcgaaaggcggcttcgacggcaaatatcactcggtgaccatcgacgccaacgaccagctgcgcactgcggccgaatacggcaatctgattctcacctggcagaatggtgcggcgctgcggctgaaagatatcgcccatatcgagcaagggccggaaaatcgctttcagtcggcgtgggccaataaccgtccggcgattgtcatcagcgtgcagcgccagcccggcgccaacgtcattcaggtggtgga

SEQ ID NO: 16810 - DNA, 261 bp, Zea mays
  Coding DNA Sequence Number=SeqID_2407
atggcaaggatgacgactccgcccgcgatcgtgattctcggcgcgggcgcgctcgacaccgcacgccgcatccaggcgcgctatccgggtgccgtcgtgcacgggctcgcatcacgcgtggacgccgacgtgccgttcgacgaactcggcacgcacctgcgcgaactctatgcgcgcgggctgccgatcgtcgcgctgtgcgcggccggcatcgtgatccgttgcgtcgcgcccgcactcgccgacaagggtgtcgagccg

SEQ ID NO: 16811 - DNA, 229 bp, Zea mays
  Coding DNA Sequence Number=SeqID_2408
tttggtgtgtgcgcgcgcttgccgcttgctggttggtggttgctgctctccgaccccgagctccgaaggccgcagcatcaggcgcgccccccctcgcgtgtgaccgagatggcgctgccgaatcaggggaccgttgattaccccagcttcaagctcgtcatcgtcggcgatggtggacctggtgaaacgacggatgcgaagaagtatatcccttgagagtttgagaaga

SEQ ID NO: 16812 - DNA, 422 bp, Zea mays
  Coding DNA Sequence Number=SeqID_2409
gacgtcgcacggagcgagcccaaacgagggcagagtgatgagttctcaccggaggcacgccatgatgagttctcaccgccgctcgttttgcccggctagtcgatccctgcgcgcgcgctcggctcggctcgggcgcgtcaccgttacgttgcatgacgcgcacatggcttcctcagggcgcgtgccatgcaaatgcagcggcaacctgaacccgattcgatcgatgcgtgcgtggcttcctccgtgtctccgtccgccaggcgtacgaaacgcaatcacgaaggcgcggggaggagaaggacgcgctatctggggggcgtggggtgtgcaaggaacgggactgctccacttgtcggcccctcgctcgccggcccggggcgagcggagcgggcggcacagcagcatgatcgtgtcgtcgacga

SEQ ID NO: 16813 - DNA, 180 bp, Zea mays
  Coding DNA Sequence Number=SeqID_2410
tgcagctaaacacgcccttctatctacaagggacacttggtcacggtcttcttttgcactcgtcgacgacctctgatctgtttgtatcacatatgctgattgggttggttgtctagacactagcaagtctacttcaggctatgttgtcttccttcgtgacaacttagtctcttggtcctc

SEQ ID NO: 16814 - DNA, 356 bp, Zea mays
  Coding DNA Sequence Number=SeqID_2411
gttccccctgtgtttgggctcggcggttggcattgcattccggttcgcgtccgtctccttcgtcttgatcgcagggccccctggggttgtccttcccggtcgcttttgggtccttcggccggttcccgcctttgtggcccctttaggcgcctctgccgctccccttgccctggcttttgtgcccctttggccttccgctgtcagccgctcgccgtgtgcgcctttgcttctttctttgctgccggatggcgtccttgcgtcgctcttcctggcggtggggtgttctccttgttccgccgggccgcggcgtcggcgcttggtttcctctccggcggtgggtggcgtgccgtgcggtc

SEQ ID NO: 16815 - DNA, 172 bp, Zea mays
  Coding DNA Sequence Number=SeqID_2412
aggcgctggcctgggcccggcagaagaacggcaagcaggtgccgacgcgatggctggtgcaggtgccggggcatggcgtggatgtacaggtcgaggctgtggaatcgcaagcctggatggaaacgcggttcccgtattgggaggggccggtacgcttgaccgggagtgcggg

SEQ ID NO: 16816 - DNA, 405 bp, Zea mays
  Coding DNA Sequence Number=SeqID_2413
gcggcgtgaagccaaacctgcacaaaacgctgtttgcgacctgcattggtaatgcgctggagtggttcgacattgcggtatatggcttcttcgccagctatatcgcccacgccttctttcccaccagcgatgcgtcggtctcgctgctgctgacctttggcagcttcggcgtctcgttcctgattcgcccgctgggtgcggtggtgctgggcaactatgccgatcgccacgggcgtaaaaaagcgctgctgctctccatcaacctgatgatgcttggcggagccatcatcacgtttatgccgggctacgacagcatcggcctgctcgcgccgctgctgatcctgctggcgcgcctgatacagggcttttctgccggtggcgagtttggcagctccacggcgtttc

SEQ ID NO: 16817 - DNA, 279 bp, Zea mays
  Coding DNA Sequence Number=SeqID_2414
tcatgtcgggtcttggcgtgcgctctccgtgaggggtggtcctgtgtcgtgtcctgcgtggtgccttgccccgggcgtctgtgctcgctccggggccgtgcggtggcgctgccgccgccggtcttgtgccccgccgtgtgtgtcatggcctctcggctgctggtggcttggtgccgttggccgtgctgcctgtccgtgcgccttgttcgtgtggcgggcctccgggttccgtgtgggtctcgtgcccgtgcggtgtctttgtgtggtgcgcggtgcccg

SEQ ID NO: 16818 - DNA, 340 bp, Zea mays
  Coding DNA Sequence Number=SeqID_2415
agtgcagcggatattcgaggtggtcggtatcgaggaaatgggcaaggcctagcccactactcctcgtgctcctctcctgccggagcaacatcccactcgaccgtccaacccggtggcagggtggtaggccaagtcacaccatcaaccatttcctgaatggtaccttgttgcaggagaagatcccaaaatccttctacccaaccatcaattagatagctccatcctcttgatgagaagacactggagtagactcctctttagcaaccacttcatcttgaatcttcactctttattttgggagctctgacagtccaagtctcggtgggtacatgaaactgct

SEQ ID NO: 16819 - DNA, 458 bp, Zea mays
  Coding DNA Sequence Number=SeqID_2416
atggccatgtacctccgtcttaggttcgttctgatcggcctcggcattgtctactggttcatcggccagtgggtgatggtccgcaccaaggacgaccaggcctcagtcgaggagctattatcacagcgtttttgcccatgtcagcgattccatcagcaaagtgtcggtgctgcacagctacaaccgcatctaggatgaaaagaagatgctgaaatctttcacttaaaagctgctgagcgcgcaagatccggtgctcgacagctgggccttctccagtgcgatgaacaggacggcttccaccgtttcgatgatgattatcgctcgtcatcggcactgtgctcgtcaagaacggcgaattgcgagtagaagatgtcatcgccttcatcggtttcgccaatctcctgatcggctgtatggaccagatgcgccaattcgtgacgcaaagtttcgaagcccgc

SEQ ID NO: 16820 - DNA, 419 bp, Zea mays
  Coding DNA Sequence Number=SeqID_2417
gaaggcacagcgaccagactttttttagagcgacaccgagggagggcggggcgcagcaggaaagcccgcccccgaacagaaccgacagagaggggccacgacaggccacagaccgggcccggagggacacaacaagaccacacgggggcacgcccagacgcacgccacgccaaggaggcgcccaagcaggcaacggaaagggccacaagcctgcacgcgcccagaaacgacgcacccaggagaatcaaagagacaccggccagcggcgagtagaggcaagacccccaccccgacgacgaaggacaggacacagacacccgacgggaagggccgcaaccagacggaggcgcaaagaaaagaccaagcagccagaccacaccaagagacagccggaacacagctggccagacctaagactg

SEQ ID NO: 16821 - DNA, 190 bp, Zea mays
  Coding DNA Sequence Number=SeqID_2418
atgcctgcagtgctgtagccccagcttcacaggtccaggaaaggccggtggagcgaaggcctgagctgggcgcccagccattcccctcatgggcatggcaagcgcagggctcccctcacgtgccgttgcaccactctgcagcatcatcaggattctctaccgccggcgccgttcccgactacagacccgt

SEQ ID NO: 16822 - DNA, 507 bp, Zea mays
  Coding DNA Sequence Number=SeqID_2419
gaaagggaaacaggcaccaccaacaaaaccaggacgagggaacccaagccggggatgcaaagggcccgaccagcacaaaaaaggggcccccacggaaggaaagcaccaacaaggagacggaaaagacggaacgcgagcaggagccaacgaaaggcgaaccgaaaactgcgaagaccgagggcgcaacaaccctcgaaaggacacccacaggggggacgcacacagaaaaacgcacaccctcaaacgggacaggcaaggctcccggaagagaggagagccgcgagacagcagaaatgaaaaaagaaccacgggagcccagtggggcagcaaacggacctgcggggcagaaagacgaagccaaaagggcggagaagacggaaatcgaaacagctccagggcacaaagcacaaacagcccgctcagaaccgggggcaaaacacccaggagacccagcgggcaaagcccgggcagggggagccgggagaacgaacccgcaggcaagcaagg

SEQ ID NO: 16823 - DNA, 495 bp, Zea mays
  Coding DNA Sequence Number=SeqID_2420
atgctgccggaattgcgcaaagccaacctggtcgaggcaaaccctggcatgcctcaagcgccatggcttccagggcgcgtcgatccgcaagatttcggccgaggccggggtttcggtcgggttgatcagccatcactatgcaggcaaggatgagctggtggccgaagcctacatggcggtcaccggccgagtgatgggcctgctgcgcgaggccatggcccaggctgcgcccaatgcccgcgaacggttgtcggcgttcttccgcgcctcgttctgcgccgagctgctcgacccgcaattgctcgacgcctggctggcgttctggggcgcggtgaagaccgccgatgcgatcaaccaggtgcatgaccattcctatggcgaataccgcaatgaactgagcgggctgctggccacgctggccggggaggagggctggcagggcttcgatgccgacctggcggccatcagcctgagcgccttgctcgatggcctgtg

SEQ ID NO: 16824 - DNA, 596 bp, Zea mays
  Coding DNA Sequence Number=SeqID_2421
catgagctaggaggtaaggaacaaccatacgagggcgagcagagcagagagcacacggcgcgccgagctagcagcattgcccaatctcgcggcggggagagattcgtgagcgcggaggcgcgaatcttcgacgcagcgacggcagccatgccggagtcctggagacccgccgaggcgaatgcctcgtcgcagccggcggcaggcacgtccggcccctcggctcagagccctggcaatgacgccaagggacgcgcggcgggggaaacccccggcgcggcggaggcggcggcgacgcgagtgccgttccacaagctgttcgcgttcgccgactccaccgacgtggcgctcatgctcctgggcgcgctcggggccgtggccaacggcgccgcgatgcccttcatgaccgtgctcttcggcaacctcatcgacgccttcggcggcgcgctcagcatccacgacgtcgtcaaccgggtgtccatggtctctctcgatttcgtctacctcgccatcgcctccgccgtcgcttccttcgtccgtaagtccaccttcagtggtaacataacactcccactagagtcagacaccgagcacacgca

SEQ ID NO: 16825 - DNA, 263 bp, Zea mays
  Coding DNA Sequence Number=SeqID_2422
ggcgccaagacatgtgtcaggctgcccgaagctcaggtgggtgaaggcaaaggacccaaagccaggcggggaccacaagccaagaactaaacccgaccgcagggccatagccgcggcggctcaagttgagaacacccagcgagagcacaaacaacatgacaggggagaaacaggaggtaacaggattgacaacacaaggacaggagccagtgcaacaaaggaacggaaggggtggccgagcaacgagcccacctactggaaca

SEQ ID NO: 16826 - DNA, 439 bp, Zea mays
  Coding DNA Sequence Number=SeqID_2423
gatacttgtttgcaaccgatccgaaatttcgatccgcgttttccgggcagcgaacgagcttgggatcaaaaccgttgcgatttgggcggaagaggacaagctgtctttgcaccgcatcaagacggatgaatcctatcaggtcggcaggggtccgcatctcgccaagcatatgggaccgatccacagtgatctttcgatctagtagattatccgagtggcctagctctccggagcggatgcgatccatatcggttatggtcttctgtcgccaagccctgagttagtggaggcctgcaacaaggccggcatcaccatcatcaggctgacaccggtcacgatgctccagatcggcaacaaggtcgccgcccgcaatctgtcgatttcggttgatgtccccgttgttgccgccaccaatcctctgccagacgatatctcggaa

SEQ ID NO: 16827 - DNA, 187 bp, Zea mays
  Coding DNA Sequence Number=SeqID_2424
gcgacaagagcctgaacggccgctacaagctttgtgatagcgccgacaccgaaattaccgccactgcccagttggtcggggggatctcagctgatcatcggcgattccaagggcggccttgcccagtggttcatggcccgtgacccggatggctaatcgcgcttcaaagctgatccggaccttccag

SEQ ID NO: 16828 - DNA, 293 bp, Zea mays
  Coding DNA Sequence Number=SeqID_2425
gagacctggcatgagacgctgcatagcggctttggccaatatttcagcgtagacaatctgctataccgcgataaaaccgcgcatcaggatctggtgatctttgagaacgccgcgtttggccgcgtgatggcgctggacggcgtggtgcaaaccaccgagcgcgatgagtttatctatcacgaaatgatgacgcacgtgccgattctggcgcacggcaatgcccggcgcgtattgattatcggcggcggtgacggcgcgatgctgcgcgaggtcgcccggcatcaaagcgttga

SEQ ID NO: 16829 - DNA, 554 bp, Zea mays
  Coding DNA Sequence Number=SeqID_2426
cgcatctacttgaggcccgccgtgaccgcgtaccggttcactcactcatccccgctgatctacctcggcctgtccgtcggtgaggcgaacgtgacccgcgccgacaccgacttcaaggagccgtcgcccgggtcgacgctcgtcctcttccccggcgacatcatcgacctgcccgacggtgccgaacccggcgcgtggctcgcgcccgtgcccgccgagaagcccgcgaaggaaccccagccggacccggcgaccaccaccgaccctgcgaccgagacggccgcccaggacgccgcgcccgcggctgacaccaagactgagatgaccaaccccaccttcggagcgtcgaacctccagtggctcggtgtcgcccgcgaagacacctacggcaccgcggctgccgccccgaccctgttcgttcccgtcgactcgccggcctggacgcacccgacggagaatctcctcgattcgaacctgcgtggttccatggcgacggacttccagcagcagaagggtctgcgctacgaccaggtgtcgttcaccacgtacgcgta

SEQ ID NO: 16830 - DNA, 207 bp, Zea mays
  Coding DNA Sequence Number=SeqID_2427
atgggtcagagcatctccctccggtaccaaagcacggcgcgccagaggggcccaaagcccatcagcatccgcatccccgtccatgatgtttcagttccggtggaagtcaacgataatggcggggtatgtggagtagttgttgtgatgcccgcagtccgcaaaaaagaagtcccgtcccagcatccccactgtcccaacggtgcaggt

SEQ ID NO: 16831 - DNA, 305 bp, Zea mays
  Coding DNA Sequence Number=SeqID_2428
tgcagtgggctcaagctatcgatagtttggaagtaggacaaccaggttcagacaaaagttttggaatgcagcaacgacctgatggtgatgttgagattgatgagaagttctgggagcaagattttgaaattcctagctgccatcaatgtggtggagtgctaaagcctgatgttgtgatgtttggtgataatgttcctcaagagagagctgaaagcgctaaggaggctgcaagaacatgcgatgcacttctagtggtcggttcagcactaatgacaatgtccgcttttcggctggcaaggctggca

SEQ ID NO: 16832 - DNA, 547 bp, Zea mays
  Coding DNA Sequence Number=SeqID_2429
agttgcgaccgcattgcatcgtgccgccggctgcagcagcgaagacgaagctctggtacatggcgagcagcgcggaggagcgcttcctgaggcagctgagcgcgagcaacggcggcgacgaaggggtctgcggcggccagcagctgggccacaaggagtactgcgcggagaggaggggctcccggcggtggtccaggaagcgggccgccgccgcgaggggctactgcggcgggtacgacgactacgacgtgaagcagcaggcggaggccgcctctgccgccgcgaggaagcgggtgatagtggtggtggacgacacctcgggctccaagcacgccatgatgtgggcgctcacccacgtcgccagcaagggggacttcctgacgctgctccacgtcctgctgccgcactccgcctccggcggcggctgtagcaggggcgaggaggcctcctccctcgccaactcgctcggcacgctctgcaaggcgtccaggcccagaggtggaggttgaagccctggggatccaaagcccaaactgggcaccgtgct

SEQ ID NO: 16833 - DNA, 173 bp, Zea mays
  Coding DNA Sequence Number=SeqID_2430
ggcacgcagctagcgagaccatcgacctcctgcgtgaccctgatcgagtcaagcaaagtggggcggtgcagtatgcggatggggacaacggctcgtcgtcgtcgtcggtcggctacggctggcccgccgcccactactactcctcccctgaccggagtgcaccgcccagcatg

SEQ ID NO: 16834 - DNA, 303 bp, Zea mays
  Coding DNA Sequence Number=SeqID_2431
gccattgctgtcatcaacctacagttcggatggtgtatggtcctcgtgacgctgttcgtgctcgggctttacgtccacgtgtgcaaaaagtatccagctggggatggggaggtaatatacgggcggctgccggaagcggaagctgcagacgaggacgacgaccaccacaacatgatgaagacgtgcaactgtaactgtaagcaggcggtgcacgacgtgcatgagttcacgtccatggagatcgaggagggacaaacctccaagccgaatcggaaggatactcctccagacggcacaaacata

SEQ ID NO: 16835 - DNA, 405 bp, Zea mays
  Coding DNA Sequence Number=SeqID_2432
ggtccatgggctagactttgtgccttgtacgtgggcagcggattaacacacatcttgtggcttttgtacaccagactcaccgccatccaatcgatggtggtgttagttagagtcaagttcctgcccgtgtaccaggcaacgaaagaagaacggttcgtagtacgagagtcccagggttcaggagctcccacatgttccgccagagtagagaggtaccgtcacaaggacagtacaacacgcacaggccgtctcaagaggtgttgggtgtgtagtcttattcgtcaggcggaagacaatcatggagcggtgctcagcgtcgccagagttgcgtccatcgtagtaggcggttggctgtggccgcacgccgttgttcggactccgccaacgagcatctacgcgcatgag

SEQ ID NO: 16836 - DNA, 245 bp, Zea mays
  Coding DNA Sequence Number=SeqID_2433
gtgtcatgcaggtgggttatgtcttggtagtggtcccgtttaggcgggtgtagtcatgggaacgcgacctcagatacctgggttcttttgattggggatgttatcttgcattattgcaccctgtaggatttgttgaagctcatattttccaggggttttggatcttttgtgctagtcttgtgtctttgtgtatgcagaggctgagctaggattatggtatgtaagggagccaactaattcatcaa

SEQ ID NO: 16837 - DNA, 118 bp, Zea mays
  Coding DNA Sequence Number=SeqID_2434
ggccgagaaaggtatgctttgtacagccggcctccgtctccttatgtagcgagcgcgcgcctccgcgctgctttggctgggcgaggtgggactatctacctagtgtacatatataaca

SEQ ID NO: 16838 - DNA, 450 bp, Zea mays
  Coding DNA Sequence Number=SeqID_2435
aggccgagagccagcaggtgttcctgtaccagctggccaacctcaaggctgacgtgatcgacgtggtcgagctgcacaaggctggcctgatcgacagcaaggccaagaaggtgaaggtggtgctgaagggcgagatcggtcgtgcggtgaagctgtcgggtctgctggccacggccggtgccaaggctgccatcgaggcggccggcggcagcgccaacggcaacgcactcggcaagctcggcaaactgaccgagctccgtcagcgcatcttcttcgtgatcggtgcgctggtggtgttccgtctcggttcgttcatcccggtgccgggcgtgaatcccgacgcgatgaccaacctggtcaacggcaacggcctgatggacatgttcaacatgttctcgggcggtgcgctggcgcgcttctcggtgttcgcgctgggcgtgatcccgtaca

SEQ ID NO: 16839 - DNA, 182 bp, Zea mays
  Coding DNA Sequence Number=SeqID_2436
cggcgcacgtgcaacatctcctgtacaccgcaatggctacttctatcagtgaccgaaaaactccctcagagcgtggttgatctactgaaagctcttgttatcaatatccaccattatctgctgttgtttagcttgatggggttctcagttctgttcgacggcatccaaacacctggctttgg

SEQ ID NO: 16840 - DNA, 166 bp, Zea mays
  Coding DNA Sequence Number=SeqID_2437
gtggctcttgtctgtggccgtttgtttggtcctccggttgcttgtgtgtgggttggttttgctgccctttctgtggccgtgtgtttccggggtgttggttggcctggcgtgcttttgttcttcggtggggtctttcgttttgttcgtgcgggattgtacgctcccc

SEQ ID NO: 16841 - DNA, 163 bp, Zea mays
  misc_feature (42)..(42): n is a, c, g, or t
  Coding DNA Sequence Number=SeqID_2438
tcccaaaccgagtggccgatactggagaccaactgttttganaggctaaaatgatccaaatcctgctgtatcagctatagaggaaagcaatgctcttgccttggctattgttccaacagacaactggtaaacactagcatcttcacgacacggggtttgatcc

SEQ ID NO: 16842 - DNA, 282 bp, Zea mays
  Coding DNA Sequence Number=SeqID_2439
tgtggcacccatggtcctcgttgctgctttcacccacacaatcaaggttgttgttccatctgtcctccttgatctcattgtagcgcaactttccctcgctaggcctgatgagacgtcgcttgttcatgagctcgaagggacgggcacactcggcgaggcctacatctggcaaccgatcgggagtgggatgaagcgcggggaggagggcgtcgatgaagaaccgaaggcgttagagccgtcagagaagaaacccttgcgccgtgaaaacctgggtcgctggaa

SEQ ID NO: 16843 - DNA, 350 bp, Zea mays
  Coding DNA Sequence Number=SeqID_2440
actgcagcatctgtgaaaaagacgtgggccgcgaacttggcgtccatggcgctgtactgcgttgccgacgtgtggctgagctgggccatgctcgggctaccagatgaccttatgtcagaagctgttccctttctggggcaaggccggccactcgctcggtcagggcttcctccttagccacgcggcgcacccggcgacgggccagatcactcccctgtatcccacggctatcatggtatacttccagtgcgtgtaccccgccatcaccctcattctgctcgacggctccctgatcttccgtatgaactttaaggcggcgatgccttttctcccgcttgggttcaccttat

SEQ ID NO: 16844 - DNA, 358 bp, Zea mays
  misc_feature (97)..(97): n is a, c, g, or t
  Coding DNA Sequence Number=SeqID_2441
ttcacgcgtacgcagctcgggctcaggattcagctcgagggcagcgaatgttcttgggaaatcaggaatgttttaccttagtcccatgttctaacantgacagaagctgcacaacgagcccttgattgggctgtcaatgagaaattgaaatcaggtgaggatggagaagtaaccgccaatcatttgctactggacgtgggtatggtcagataaagagtcggctggtcataaaatcctgtattcgcttgagctttgacgatgagatagccagtttactggccaaaacggctgaatattgttatattatccatggaaaaggcgtgtactgcacaacggatcatttcgtggtttctcaaat

SEQ ID NO: 16845 - DNA, 228 bp, Zea mays
  Coding DNA Sequence Number=SeqID_2442
ttccgcgcccggttaatcttgatttggtggttctgggttaagttagccacaggattccggttaaaccttaagggacggccaggttcccttctttccaccggtgggcccccaccttaagttccttcaccaaggccccattggttccacccgcgcacaccgggtggtgacggttcttgcaaaccaaagggcaatgttgaagaccatcataagggcttgcgtaggcttggc

SEQ ID NO: 16846 - DNA, 549 bp, Zea mays
  Coding DNA Sequence Number=SeqID_2443
gtgtttatcccgattctgctgatgggtagtattgttggccgcctgttccgggaatttgcggtgacgctgacggtctcgctgctgatctccatgtttgtctcgctcagcctgaccccgatgctgtgcgcccgactgctgcggccgaagccgcaggtcacccggcggccgcatccgctctatcagctaatcgaaaatgcgctcaacgcgctgctggccgcctacgcgcgtggcctggcgtgggtgatggcgcaccagaagattaccctgctgagtttgctgctcaccgtgctgctcaatctgtttctgtttagcgtggtgcaaaagggctttttccccaatcaggacaccggcctgctgatgggcgccctgcgcgctgaccagaacatctctttccaggcgatgaagccaaagatgctggcgttcaccaaaatcattgaggccgatccggcggtagacagcgtgatgtcgtcaatgggcagcggcatgtttggctcgcgcaatagcgccaacttttttgtccgggtgaaagattttgaccagcgcagcgcc

SEQ ID NO: 16847 - DNA, 555 bp, Zea mays
  Coding DNA Sequence Number=SeqID_2444
tgcaggagggcttcacgtcgccggccgccgcggcgatcgcgccggccgacctcgagctcagctgggtcctcttcgacccggccaccggccgcgcgctcaacgcgtccagccgccgcgccgtggccgtcgaccgcaagtggctcacgggggacaccgtggcgcgcttcgccgtcgtgctcggcggcggcgtcgcgctcgacgccgccgtcacgtgcgacgagcgccgcggccacgtccgggaggtcagcctgcgcgtcgaggacgccgacggcgccggcgtcagcggcagggacgggctggccgccgtcgccgccgccatggccgcgcccaggcgggggtgccgcggcgcggcggaggacgtggccagggtcaggtacgaggacttccacagggagaggagggtgcgcaaggagtggaaagccaagcgcgagggcatcctcgacctctgctgctccggcgtctgggccgctgccttcctcggcttccagctcatagctcacgtcccaggtgatgagacagtgtcctctgctgagcctgtggccttagtcggtcgaa

SEQ ID NO: 16848 - DNA, 427 bp, Zea mays
  Coding DNA Sequence Number=SeqID_2445
gccgagtgctccgtggacctgaagctgggcgggatgggcgagtgcgagcccggcgcggcccgcagggagagggaggccgcggcgggggcggcgaagcggccgcgccccgccgggcccggcgggcagcagcagcagcagcagtgcccgtcgtgcgcggtggacgggtgcagggcggacctgggcaagtgccgcgactaccaccggcggcacaaggtgtgcgaggcgcactccaagacccccgtcgtcgtcgtcgccggccgcgagatgcgcttctgccagcagtgcagcagtctgggctctggagacggggcggatccacggacacgtgagctcctgcccttgcttttccgcgagcggattctttctttcacggccttcggcgacgggatgtcccccggcccctactctgccagtgccattttttctt

SEQ ID NO: 16849 - DNA, 139 bp, Zea mays
  Coding DNA Sequence Number=SeqID_2446
ggtagcactgcaacctccagtgggcacccggttccaggcgggtgtccccttggccgacgtaggctgcgccgctctcgtggatcatctccccgcggcgtcctggccacctaagtttcggtcgcacctgttggaaaagtac

SEQ ID NO: 16850 - DNA, 209 bp, Zea mays
  Coding DNA Sequence Number=SeqID_2447
gtgccagcatgtcccagctgcagaacgtgtggagctctcccgaagcggcatgctgccgctgtcggccgtcctcagccgcccaccaggaaagggggaggagcccctcctccctcccccctcttccctccacccacagggcagtgcgccgccgcaagtgtggctgcccagtgctccagccgccgccgctccattgcttcagcccattgctc

SEQ ID NO: 16851 - DNA, 372 bp, Zea mays
  Coding DNA Sequence Number=SeqID_2448
gcagtatcgcttcgattcgcagcaaacctttacccgcgcgtttaaaaagcagttcaatcagacacctgcgtggtatcgccgctcatcagagtggaactcgtacggcattcgcccgccgattcgcctcgatgattacccgatgccgcaggcgcagtttgtcacgctgccggaaacggtgctggtggggcaaacgcaaagctatacctgtacgctggagcagatctccagctaccgcgacgagatgcgcatccacttctggaagcagttcctgctggagaccgataccgtgccgccggtgctgtacggcctgcatcaggtacgcgccagccatgagaaggatgatgagcaggagattctgtacaccacggcggt

SEQ ID NO: 16852 - DNA, 262 bp, Zea mays
  Coding DNA Sequence Number=SeqID_2449
caaaggagaacggaggcgcgaacacaccgcgggagaccagcggaggacggacccgaggcaccggaccgaccgcgaaacgaacgggcccagcccagacggaggcgcgggaggaaccacgagacggccaagcccagaacaaccaagcacaaggggcgccccccggcgcggggcccacgcgcgacaagggcgggacagagcgggacagggcccgtccagacgccgcaaaaccgggacccgcacccaaggcggacagggacccacg

SEQ ID NO: 16853 - DNA, 189 bp, Zea mays
  Coding DNA Sequence Number=SeqID_2450
gcttcttgatggttcacctgtcatgcaattacctatggctgcatacctcggagagcttgttctaagcaatgatgctaacgtacttgtggcacaaaaggctggctcctcactagtcaatatcattgaaaaaatggaatagagaggccagttaagctgctctggtggcattgaacctaattcttcttttgg

SEQ ID NO: 16854 - DNA, 542 bp, Zea mays
  Coding DNA Sequence Number=SeqID_2451
gcttcggcatcaagaggctgtctcttgctcttggaaatgacgtagaagcatgccagctgcgtataacacaggtgtggcctctcgaaagcggctgggagatgccgaacgaagctgcttctaggtccagccaggacggcttaatttacctgaagtacaccttcagatacaaatatcaattcgatgagctgaacgatgactggctagactgcattgaggcaactagtgacgagttgctttgtgcttacacgagggccgaggatgatgccccgacagttttgacacaccggtctaggaacattgatatggcaaaaatgtcgaagcttgttgaaggaccttcttctgccgctgaaccagatcaccctgctaccactgaaaccatggtgaaatcagccgaagagccaatcttgaaggtagcagcagagaagccgaaagccgagatagccgatgtgccgaagtgtcctgctgaagctagggcaaaaacggccgaagagacagaattgaggaaatcagcaaagcaaccgaagactttgagccaaccacaa

SEQ ID NO: 16855 - DNA, 420 bp, Zea mays
  Coding DNA Sequence Number=SeqID_2452
cagaaggcgacacaccaccagggcgccgcgcgcgcagggggggcaccaacggggcggagccagaagaggccccacgacccgaggacaagaccggtgacgctgacacagaaccacgaacaggaagggccaacgaccccagctacaaccgaggacgcgacaacgaggacgaccacccaaacagacccacgagcctgccagaggcggaggaggaagcaacaagacgaaagaagggaggaccgactgcactaacagctacggacaaaggtgccgtcaaaggatggacggaccgaccagcagggccagcaacgaaggacaaacaaacaagggacctaggacagcctgccaggacgacggacgcgagaagcaaaggaacacccgacgacaaggaagaagccgaagtaccaacgagagacctgccaa

SEQ ID NO: 16856 - DNA, 414 bp, Zea mays
  Coding DNA Sequence Number=SeqID_2453
tgcgcggccgctttgttgctggtatgggcggcgcgcagtttgctgaaaatccggccatcgaccggctgcgccagctcggcagcgcgcaggccacgcacccgccggtggcgctggcggtgctggatcccgccaatccctttggcgtgcagctggcgtggccgctcagcgtcggtggcgtgcggcctacccgccgcagcggcgcactggtggtgattggcaatgggcgcgttatgttgtggctgccgccgggtggtaaagagctgttaacttttggcgacatctctgaggaccaacgtcaggccgccatcgtggcgctgggccaggccttacgccgggagaaaacccacagcttcattctcgaacgggtggacgatcagccggccagccagtcatcgctgctaccggccctgaaag

SEQ ID NO: 16857 - DNA, 310 bp, Zea mays
  Coding DNA Sequence Number=SeqID_2454
ttaggttggtggacccacgccaggaagtgaagctagcgcgacccagcgtgaagtccgccgctttaggcatcgggatgcatccgcccgctgcacctgctactgggcgaagacccccctcgccaccatgcgttgctgagacggctgtgtcgggggccagtggagtctccgcggagttgtccgtggacgactatctggtgggcggggtcgctatgttcgacgcccacatagggcggggcacttgctggagcaaagtccgggcaactggctgttgtcccggcgccggtggcggctggcccggtggtcgtgccaa

SEQ ID NO: 16858 - DNA, 164 bp, Zea mays
  Coding DNA Sequence Number=SeqID_2455
tcccctctttaccatatactagcggccctccctccatggcgccctccctctccaatggtggtgctcgcccctccctccctccttctccgttgctgcagctccccttcgtgatggctgtccctccccctacaggagcccctcctctgctctccttggacgccggc

SEQ ID NO: 16859 - DNA, 519 bp, Zea mays
  Coding DNA Sequence Number=SeqID_2456
aggcgctgcgcaatcagctcaacaaccagcgtcagcgcgaagccgaactggcgctggagcgcaccgaacagctggcggaaaacagcggcgatctgccggcctccatcagcgatcagttccgcgttaaccgcgagctctccgccgatctgaatcagcaggcgcagcgtatggatctggtggcctcgcagcagcgtctcgccaccaatcagacattgcaggtgcgccaggcgctgagcacgctgcgcgagcagtcacagtggctgggcgtgtcgaatcttctgggtgaagcgctgcgcgcgcaggtggcgcgcctgccggagatgcccaaatcccagcagatcgacagtgaaatgggccagctgcgcgtgcagcggctgcattatgaagacctgctggagcgccagcaggcgctgcgtaaagagaaacaggcggacggcacgccgttcaccagtgaacagacacgcattctggatgcccagctgaaaacccagcgtgaactgctgaactcactgatttccg

SEQ ID NO: 16860 - DNA, 312 bp, Zea mays
  Coding DNA Sequence Number=SeqID_2457
ctgtcatcttcgaggctggcggctcggggtgtgcacatgggccacggcgtggtgcgacacgcgctggcgggactcaagagcgccagggtggccggcctcggcgccgtgttcttcgccaccgcggaggccctcgaggtcagcgagaacgtcggcactgtgagcgaccactcgtcgtcgctgatgaggaggctgttcctggtactccctctggcggtcctcaacgcagtgttcgtgtactggatcttcagctcgctgtcgaagacgctaaacaagctcaaggcaaaacgaatgacgacaaagctggagatgtac

SEQ ID NO: 16861 - DNA, 349 bp, Zea mays
  Coding DNA Sequence Number=SeqID_2458
ttcgctgatcaggtggcgtccggaacgctggtggatgttgcgacctcacaactgcgctccgagaaaaagcgactggaggacaagattgagcgtcttcggacgcaaaatatagaggccatcatggacaaatctactgctgaaaacaagagtcgaaaccttccagagaaggtcgacacttttgagaaagaaaatgaggggctcagccgtcagttgagcgaactaaaacataccgttgttcagtcacagtcggaggcccaatctgtccgggcagaggcccaagccggtggaggctaccacgcggaccggacacatgcgctctttgtagatgtgtatcatgacctaggtgcgg

SEQ ID NO: 16862 - DNA, 441 bp, Zea mays
  Coding DNA Sequence Number=SeqID_2459
tgggccctcccactggtgacaacagtggcgttggtgacatcaccgggagaagccccgcccccacagggaagccgactgccagcatctggacccgtcccaaactcggtgggtgcggcaacagtgacaccaccacctccggctacatcctctctcgcccccccctggtgaagaggagcagggcggatatgcagggccccagcgaatctggccctgctgagaagaagacgaacccagggcctggcgtgggcgctctgctggcacccgatttgttagcggctaagcaacgggccatccaggccctagcaacgctgcgggcggcatgtgctgaagagcaggcgcgtcaacatgcatgggtcgtggagaagctgaagaagatggaggcctccgtccgcgagcgagaggaggaagcaatgagcgcccgcgtccatgcggagaagatga

SEQ ID NO: 16863 - DNA, 260 bp, Zea mays
  Coding DNA Sequence Number=SeqID_2460
gcatgcctgcagtaggttcacagatgtgtcaggcaaatgcatgccatagtggaggcatggagacgatggacagaagaaaaatcgaggctgacctttttggggggaaacttcatggagtcgctgctactaatgctcttgagctaggaattgatgttggacatattgatgcaacattgcatcttggatttcctggtagtattgccaggtcggtgaagaatgacacattcaatgaagctcaatgtttatcttgtcaccctgct

SEQ ID NO: 16864 - DNA, 347 bp, Zea mays
  Coding DNA Sequence Number=SeqID_2461
ttgatcgtggattgcgtgcagcgcagcctcgccagccatcatccgcaaccgtcgttattgcatggtgatttgtggccggccaactgcgccggcagcgccagcggcccgtggctgttcgatcccgcctgctactggggcgatcgcgaatgcgacctggcgatgctcagctactacgccgatctgccgcgccagatttacgaagggtatcatgcggtgtggccgctgccggaaggcttctcgcagcgtcagccggtgtaccagctctactatctgcttaaccgcgccaacgtttttggcggcaactgggccggcgaagcgcagttcgctattggccagttgctggagga

SEQ ID NO: 16865 - DNA, 171 bp, Zea mays
  Coding DNA Sequence Number=SeqID_2462
cctgggcagataagaatccggcggcggcaaaactgtttgctgaaatgaagctgccgattggcgacatcaatgccgataacgccgcgatgcatgccggtcacgcctcagaagcggacatcaacggccacgttgacggctggatcaaagctcatcaggcggaatttgataaat

SEQ ID NO: 16866 - DNA, 195 bp, Zea mays
  Coding DNA Sequence Number=SeqID_2463
gcagcgcatgttcaaagagcacaccggctatccgctgggtgagtacatccgggccaagaagctgaaaaaatcggccgaccgcctgaccaccaccaacgaaccgatcctcaacgtggcgatttcgctgggcttcgattcacagcagtcgtttaaccgcagcttcaagcgccagtatggcgtggcaccgggcgcatg

SEQ ID NO: 16867 - DNA, 591 bp, Zea mays
  Coding DNA Sequence Number=SeqID_2464
ggcgttcagttcgatgactatttctacaccgaaaccgcggcatcgccgctcaatgacagcgccaccttccgccagtacggcgcgggctttgccagcaaagccgactggcggcggcacaatacccagctgctgatcgaacaggtttcccgcacgattaaacagctcaagcctggcgttgagttcggcgtcagcccggcgggtgtatggcgtaatctgtcgcacgatgcggtcggctccgatacgcgcggtgcggcggcttatgatgaagcctatgccgacacgcgccgctgggtgcagcttgggctgctggattacatcgcgccgcagctctactggccgtttgcccgccaggctgcgcgctatgacgtcctggcgcgctggtgggccaatgtggtacagccaacgcacacccggctttacatcggcgtggcgctgtataaggtgggtgaagcttcaaaaagtgagccggactggacggttcagggcggcgttcccgaactgaaaaaacagctcgatctgaatgaatcactgccgcacattgacggcaccattctgtttcgcgaagattatcttaatcagccgcagacgcag

SEQ ID NO: 16868 - DNA, 428 bp, Zea mays
  Coding DNA Sequence Number=SeqID_2465
agaacagcgacacgaagccgggactgatcgccatcatcaacacctcgggtgccgacgccattcgcctcgcgctcggttcgctgccgatgctgatcctttcgctgtcggtggtgggcatcctgaagagtgccggcgccattgagctgctgacgcagctgctggcaccgctgttacacaaactgcatatcgccgaggtgtatgtgctgcccgcgctgaccaaatgcctggccggcggcaccgcctattacggcgtggttgccggtctggtcgaacaggggcagtacagtgcgcacaacatcaacgcctcggcaggcctgctgattcagaccttcgacctgcccggcatcgggattttcctagggctctccagccgttttccgcgcctgttccgcttcgccgtgcccggcattttgctcggcattgcgctg

SEQ ID NO: 16869 - DNA, 471 bp, Zea mays
  Coding DNA Sequence Number=SeqID_2466
tgcagggatgctcaccgtagcaactggaggagcctgcacgcgctggagacaaggagcagcacgaggatccgcccacgcccgccggctgtcagatcctgcgcgcgccggagacagggaggaggagcccgcgccggagacagggaggagccatcagagcccgcccgcgcgtgccggggacagggggtgagccagagggcgcgccggagaagtaggtggccacgctcgccggagatccgcccgcgccgccgcacgccagagataggcacgcgcgcgccgcacgcctgggaccccccctccacgccgcgcacgccggagacaggcacgcgccgcgcatgcctggaagccgctcgagctacgcacgctgggtcccccgcgtcgccgcacgtcggagacaggcatggtgtagggcgagccgccgccaagcgccagagcacgggagcgtgcgtgctctgtccggttcgatttgggaag

SEQ ID NO: 16870 - DNA, 452 bp, Zea mays
  Coding DNA Sequence Number=SeqID_2467
tattcgcggcgaagccgaagggcaactatttcctgctcggcggtgcgccgaccgacaacaacgcgaagatgctgcgcgaaggccagctgaaggtactcaagccggcgatcgatcgcggcgacatcaaggtcgtcggccagcagtgggtgcccgaatggagcgcgtcgaccgcgctgcgcatcgtcgaggatgcgctgaccgcgaacaacaacaagatcgacgcgatcgtcgcgtcgaacgacggcaccgcaggcggcgcgatccaggcgctcgccgcgcagcatctggccggcaaggtgccggtgtccgggcaggatgcggacctcgcggccgtgaagcgcgtgatcgccggcacgcagacgatgaccgtctacaagccgctgaagctgatcgcgagcgaagccgcgaagctcgcggtcgatctcgcgaagggcacgaagcccgcgttcaac

SEQ ID NO: 16871 - DNA, 560 bp, Zea mays
  Coding DNA Sequence Number=SeqID_2468
agtccggcaacgctgcgtcgttttgcccacaaccagccggccagcctggcgaatctgctggcgacgcgtgcggaagtcggcacgctggtggtgaccgagggcgtattcagcatggatggcgacagtgcgccgctggctgaacttgccgccgaaacccggcgcgcgggcggctggctgctggtggacgatgcgcacggcattggcgtcaccggtgagcaagggcgcgtcatctgctgtcagcagcaggtcaaaccggaactgctggtggtgacctttggtaaaggctttggcgtcagcggcgccgcgctgctgtgtcatgacgccaccgcagattacgtcgagcaattctcgcgccatttaatctattcctccgccataccgccggcgcagttctgtgcgctgctggcggcgctggcgcagatccagcagggcgacgcgctgcgcgcgcggttgcagcaaaatattgcccgctttcgcgcgggcgcgtcgcagttaccgtggcagctgatggcctctgacagcgccattcagccgctgatcgtcgacgaaatctgcaccgc

SEQ ID NO: 16872 - DNA, 173 bp, Zea mays
  misc_feature (52)..(52): n is a, c, g, or t
  Coding DNA Sequence Number=SeqID_2469
gccatagcttatgtgagattttcaaatgcttcccagcagtacggtgactccntgcggcgtcagaacgcactcatttctgagtggttgtcccagcatccggattatgagctcgatgacacaacctaccaggatatgggtctcagtgcttacagcggtatgaacgccacccgcgg

SEQ ID NO: 16873 - DNA, 181 bp, Zea mays
  Coding DNA Sequence Number=SeqID_2470
ttggcatcagtttaagataaagctgatacattacatgctttctatttcctccacccatggacttgaaggaagatttcctttgggaagttgagcaaagtaagctaaaaggccaggatttaaaatccaaggaggttagggtcaacacacggcttctttaccagcaaactaaattcaacctctt

SEQ ID NO: 16874 - DNA, 161 bp, Zea mays
  Coding DNA Sequence Number=SeqID_2471
atgaacagtgcccaatttctttatttgaaggtgtcacctattagaggagtcagaaggttcagagtcaagggcaagttagcaccttaatatatcagaccatattagattgtggcgaggcgtggagaagtggcatatcatctcaacttacgagaagatctatt

SEQ ID NO: 16875 - DNA, 142 bp, Zea mays
  Coding DNA Sequence Number=SeqID_2472
cgccggcaagcttacgtcgcaggtgctccccctcatcaggagatcgcgcaagtacggcggcgtcatgctctgggccaagttctacgacgaccgcacgggctacagcgacgccatcaagagacacttccttggccgggaccca

SEQ ID NO: 16876 - DNA, 189 bp, Zea mays
  Coding DNA Sequence Number=SeqID_2473
tagctcagaatcagaatccaactgaatactaagggttctgacatgtaccggtcctttcacccggaggccaccatcctaagcgacctcacgaatgcaccactgcttagccctgaggcactggtggtgaacgccttggacaagccaagggccatgctggataacatgatgaggaactgtaaaggactgtgc

SEQ ID NO: 16877 - DNA, 349 bp, Zea mays
  Coding DNA Sequence Number=SeqID_2474
cgtgtccgtaccctgccagtgggacccgtgctccagtgctcagtcgctcacctgcgtccgctccttcctccactgcctgtcggcctgggatggcagggtatcttctctttcccctagctctgccctttcttccgcgcgccgcacctgccacgaccgcgtcaagctccgacaatcgcacgggcaccacgaccacatcccctgctgcggccgcacgaaccccttgcccttattaccaggtgtgggtttgactcggcgtcacccccacactcacccaatgcaatttcttcccaacggtttcgctgcagcggccgccgaagctcgggccgagatcctcgcgttgggcgcgcct

SEQ ID NO: 16878 - DNA, 197 bp, Zea mays
  Coding DNA Sequence Number=SeqID_2475
gtggtccctctgtgatagagatccatagtgttggctcatcagtctcgacaccaaagtggctggtcggctggtagtagcaaataggtatgaatgggaggagaacccttacgagtagagcgcggtgagctccctcagagacggtgtctacgttctaggagcgcagaagtccacgatggccccaatgagaagacaccacg

SEQ ID NO: 16879 - DNA, 67 bp, Zea mays
  Coding DNA Sequence Number=SeqID_2476
accctgctttgtgctgtgactttgattaggagactgggtatttcattttgcagccactactttgaca

SEQ ID NO: 16880 - DNA, 228 bp, Zea mays
  Coding DNA Sequence Number=SeqID_2477
ctgctcctgcacaacggccagataacgagcagcgcggcggcagcggcgccgacggcgctatctctggccgggccgcccccgccgctgcatcacgagaaggacgggagcctggactccgtgctgatgatgcagcgccgggtccattattggtacatggccggcggcgggacggcgaagacgaagagcatcgccgtttcatcacctcgctagctggtgatgcagacccag

SEQ ID NO: 16881 - DNA, 139 bp, Zea mays
  Coding DNA Sequence Number=SeqID_2478
cttcaagagaactcaatctctaggaagatggttgcattaatgaccccttaatctagaatcatatgtgctccattaacccgattatggctacgtgttttctaaacacgctgggtggaagctttcaatcatcgagaggatg

SEQ ID NO: 16882 - DNA, 487 bp, Zea mays
  Coding DNA Sequence Number=SeqID_2479
tgagcgacatgatcgcgcgcggcaaagcgctgtattggggcacgtccgaatggagcgccgacgagattcgcgccgcgtacggaatcgccgagcggcatcacctgcacaaaccggtcgtcgaacagccgcagtacaacttgttccaccgtacgagggtcgagcaggaatatgcacggctctatgacgactacggcctcggcctgacgacctggagcccgctggcatcggggctgctcaccggcaagtaccgtaacggcgtcccgcccggcagccgcgccgagctgcacggctacgactggcttcgcgaccggctgacggatccggccagcaacgatgtcgtcgagcggctcggcgcgatcgcggccgaactcggctgcaacacggctcagttggcgatcgcatgggtgctcgcgaatccgcacgtgagctcggtcattacgggcgcgtcgcgaatcgagcagattggcgacaacatgcgcgcgatcga

SEQ ID NO: 16883 - DNA, 287 bp, Zea mays
  Coding DNA Sequence Number=SeqID_2480
caccgcaatcggcaaggacctgaacgccgagggtgctcacgtcattgatgccacaaatatgattgccatgccggggatggtcgattctcatcgtcacgcttgggaaggtcagctgcgccgcatcaaccccaacgccacctgtctggacgactacagcaatgccacgcatttctcgttcgcgaaatattaccggcctgccgatatctatgttggcaacctgctgacggcgctgggcgcgattgatgcgggtatcactaccatgatcgataactcgcacaacagccgta

SEQ ID NO: 16884 - DNA, 149 bp, Zea mays
  Coding DNA Sequence Number=SeqID_2481
aatgcctaggaaagtcgttgtacggtttataggctctgctttggttgggaagtcagagactgaagatgcctgtcaccacggcctagttgagccaactataaacactaaggaggctttggatgccattaatagcatgtttatggagccac

SEQ ID NO: 16885 - DNA, 521 bp, Zea mays
  Coding DNA Sequence Number=SeqID_2482
cgaataatcagctgcgccagttgctgctgagcccgactggtaatctccttgcccgtttcgacggcaaaaacgaggagcagtttgcgatttattgctgctccggccattacgaccgggaaggggaaattacgctgctgcttaattatcaggacatgacgctggcctcgctgtcattctctattattcaggagcagcagcagcgcacgctattaattgggggcttgcaggggccgcggaaacatatttccagtgacgttattcgcgatgccaccaaagccgcgcacggcgtatttcctaagcgtctgctgatggaagcggtatttattctggcggcacagtgcggcgtacaggccattaccgccgtcggcgataccacccatgttttccgcagcctgcgctaccgtcacagcaaaggtgataagttctttgccagctatagcgagttctggctgtcactgggcggggaaatgcggggtgatgagctgtttacgctgccgctgagcatggcacgtaaagatctg

SEQ ID NO: 16886 - DNA, 282 bp, Zea mays
  Coding DNA Sequence Number=SeqID_2483
cctgtgctccatgtctcataaattttcgtcaattttgttactgcggctcgcgtttcaaagtcttggggtagtgtttggggacttaggtacatcaccattgtatgttttctacaatatctttccacatggtgttgacgaagacgaggatgtaattggagctctatccttgatcatttacacactcaccctcatccctctgatgaagtatgtttttgtcgtcttgcgagctaacgacaatggtcaaggtgagatagagcattcttgtattttagcctagtctgt

SEQ ID NO: 16887 - DNA, 359 bp, Zea mays
  Coding DNA Sequence Number=SeqID_2484
acgctgtcgctgctgacgctgaacggcctgtgcgcggcccacggcgtcgtgatcccgatgcagtgcgaatacttcgcgctggaagggttgtcggacctcgtcaacacgatcaagcaggttcacgcgaacatgaaccgcgacctgaagatcatcggcttgctgcgcgtgatgttcgatccgcgcatcacgttgcagcagcaagtctccgatcaattgaaagcgcacttcggcgacaaggtgttcgacgcggtgattccgcgcaacgtgcgcctcgcggaagcgccgagttacggattgccgggcgtcgtgttcgaccgcaattcgcgcggtgcgcaggcctatctccaattcggtgccga

SEQ ID NO: 16888 - DNA, 105 bp, Zea mays
  Coding DNA Sequence Number=SeqID_2485
accgaagcgccgataggacgcccaacgcggcggagatccagcagatttctgaagctcctggccaactacggccgcatcgatggcaataacgtgttctactggttc

SEQ ID NO: 16889 - DNA, 311 bp, Zea mays
  Coding DNA Sequence Number=SeqID_2486
agtgcacaggaacctgcttcagactctatggggattctgcatgacctccagtgagaggctactggtctatccatacatgtcaaatgggagtgtcgcattgcgcctgaaagggaagacaccactggactggatcaccagattaccagaaagaggatagcacttggggcagcacgaggtctaccgtacctgcacgagcagtgtgatcccaagatcatccatagagacgttaaggcagcaaacatactgctagatgactgctgcaacggtgtgggatttggctccgagctctgaccccggaatacatgtcacca

SEQ ID NO: 16890 - DNA, 295 bp, Zea mays
  Coding DNA Sequence Number=SeqID_2487
atggcaaagccgaagccgaagaggcccgcgcccccgccccggcgttgggcagcatgcggtctctggcgacgacccgccttcgcgtcgggcggcctgccgctggccgccgccgcgtacgtgggcgtcgactacatgcagcacctgtcccccgtctggcacgggcggctgcggccggcgctctgggcggcgctggcgctcgccaccgccgcgcgcgcgccgttctaccggcgctggggcgccgaggtccgcgccgccccgcggttcttcgccgccatggcgttcatgctcgccgcgc

SEQ ID NO: 16891 - DNA, 245 bp, Zea mays
  Coding DNA Sequence Number=SeqID_2488
gaatgtattcgtcgagcgttgtcctcccaatctttccttttctccttgttcacgttcgagaaatcagcttcgcccggctcctcgccgttgcgcgagaaatccgtcatcggctcatcgctcgtccggctcctcgccgccgcattgcgaggcaccggcgcgggaatggagctccccgacctactggcgctggcagccaacccaacctttgtatcggggctggtggcatgtgcagtggcgcgggccgc

SEQ ID NO: 16892 - DNA, 209 bp, Zea mays
  Coding DNA Sequence Number=SeqID_2489
gggaagtagcgatattccgattccttcgtggggaatcaacgaagggtccagtggaattggtggttcagggaacaagcagatcctggacgcacgccactctgagctgttcctggagaaggcatactgggacgagaccttggagtacgagagcctcggcgagcactttcaggacgaggaggtggccgccgccttatgtgccgttgtcaaca

SEQ ID NO: 16893 - DNA, 585 bp, Zea mays
  Coding DNA Sequence Number=SeqID_2490
ggatcccgagaccatccagttctgggtcgggccgcacgggcatctgctgcactatccgatcggcgacaacggcgaccagaacttcctgctggtcgagcggcatccgtcgccgtggccgttgcgcgactgggtgatgccggcgcaggagggcgagcagctgcggctgttcggcgactggcatccggcagtggtggagatgatcaccgcggtgccgatcagccagcgctgggggctgttccaccggccgccgctcggccgctggagccgcggccgcgtgacgctgatcggcgacgccgcgcatgcgctggtgccgcatcacgggcagggcgcgaaccagtcgatcgaggatgcgatggtgctggccgcgcaactcgcgaaggccgggccggggaactggcgcgaagcgcaggaagcgtacgagcggctgcggcgcgggcgcacgcgcaaggtgcagtacgcatcgatctccgcggccgacgtgctgcatctgccggacggaccggccgcgcatgcgcgcaatgcgcgtcttgccgcacgcgacagcgtgctgcatcacctcgactggattcacgatttcgacgcgct

SEQ ID NO: 16894 - DNA, 548 bp, Zea mays
  Coding DNA Sequence Number=SeqID_2491
gagtcggccatcacggaagagcacatcatcggacagctcgacggcatgtcggtgcagcaggcgctgcagatcgtgcagaacctgattgcgcagaaggtcaatgcgattggcatcagcgtgctggatgcctccagtattgcgccggtgatggcgcaggcgcaggcgagtaatgtgcatctgttcaccagcgacagcgatgcgcccgacagcgggcggccggtctatgtggcgcaggccaccgatgagggactgggcgatacggtgatcgatgagatgatcaaacgcgtcggcgagcgcggcaaaattggcatcgtctccggcgaagccaccgtgtccaacctcaacagctggattggctttatgcagcagcgggtgaaaagcaaatacccgcacattacgctactcaaaccccagtacgccggcggctccgccagccgcgcggcgcaaatcaccaccgatttgatgtccgctaaccccgatctgaaaggggtgattgccatggcctctacaacctgtccgggcgtggcgcaggccatcgaaaccgctgg

SEQ ID NO: 16895 - DNA, 179 bp, Zea mays
  Coding DNA Sequence Number=SeqID_2492
aaaaccttacgtgtgaagatccgcaaaaaattacgaaagagtttggcatgattgtttatcagcagctcttcattttacccaagatgatgggggcgtaaactcactaccaaatatatgatggagagggtgctccatctgatgtggatgtaacaatgtataatgcacaagcagaaactggt

SEQ ID NO: 16896 - DNA, 217 bp, Zea mays
  Coding DNA Sequence Number=SeqID_2493
aactgtgtctgctaaaaagtcctgtgcactgaattcaagttggacaagctctgggcctatccactgactgttctagccatcctgtgtcccgccaggagggttgtacgtactggacgggccagagccacagagcgttctggttggaccccgcgtagtcattgcgcacactgctaccgagcatgtcacggcgccgagaacgttcgcgatagccggctcg

SEQ ID NO: 16897 - DNA, 566 bp, Zea mays
  Coding DNA Sequence Number=SeqID_2494
aatgtgcgggcggtcacgcagaaccgcgccatggccgactgctgcggcgtgccgaccgggcgcatcgatatgctggcgtttggcctgggttccggcattgccggactcggcggcgtcgcgctgtcgcagctgggcaacgtcgggccggaactgggacagggctacatcatcgactcattcctcgtggtggtgctcggtggcgtcggtcagctggccggcaccgtggtggcggcttttggtctcggcatccttaacaaagtgctggagccgcagattggcgcagtgctcggcaaaatcctgatactcgtgctgattgtgctgtttatccagaaacgtccccaggcgccgcgcctcagcctgattctcggcgtcatcgtgaccgcgctgctgctggtgctgccgttctgcgccctgctgcccgccagccatccgctggcgatctccacctatacgctgacgctggtgggcaaaatcctctgctatgcgattgtcgcggtggcgctggatctggtgtggggctacgccgggctgctgtcgctcggccacggactgttttttgccctcgg

SEQ ID NO: 16898 - DNA, 279 bp, Zea mays
  Coding DNA Sequence Number=SeqID_2495
actggcgcgctttttatcccggcgggcgctttcatcgcttgaccctcccgcaggggaaaggtttacgctgtgcccctattcacgataaggatatgaatatgcaacgtcgtcattttctcaagctgaccgccgccctcagtgcagccggcgcgctgcccttctggagccgctcgctgatggccgctacgcgcccgctgttgcccatcccgtcgctgctggagcccgatgcacacggccagtacacgctgaccgccatgaccggcagcagccagtggaacg

SEQ ID NO: 16899 - DNA, 510 bp, Zea mays
  Coding DNA Sequence Number=SeqID_2496
acatctccgtgcacggctgggagctggaccccgccgtgctggccgtcgcgcgcgacttcttcggcctctcggacctggagaggcgccacgcgccgcgcctgtccgtgcacgtcggcgacacgctggaggcccgcgcgccgcccggcggtttcggcggcaccgcggtagacctgttcgccctcggcagcgtgttgcaggcgctccaggaaccgggcacgtgtcggcggctgggcgcggtcgtggcgcccgggggcagggtgatggtgacctgcgccggcgcgggcgtggaggcccaggacgaggggcgggacggcgcggcggtcaagaacgccacgctgcgggccatggccgcggcgttcggggagggcacggtgtcggtgctgcacgtggacggcagctgggtggcgatgacggggccgccggagacggcgccggaggcggcggccgcgtgcagggctcggctgcctccggagctgcggcatttcgttgacgaaatggagaccgtacggc

SEQ ID NO: 16900 - DNA, 491 bp, Zea mays
  Coding DNA Sequence Number=SeqID_2497
gacgcccggtgccccgcaaaaagatcccccccgagccggagggcaaacagatccggaagcacccccctggagctccccagcgcggcccccgcgcggaggctcggtaacaactgtgccgaccccgcccgcaggcaggagtcgagaagcctcagccccggggtcgcggccgtctgttcgggcggggtgggattacccgcaagatagcgcccccgcagcatcagcagcagcaggttacgcgtcctcagccccagggtaggtacggggctgaagggtctttttcccccttcatgacccccgagctcctcgttgcgcgcttcgttcgcctccatgcgatgcccacgcgtccggcgcagaccaagccttagctctgcgagctctgtaccatctaataattctggccgtgtcgtaccatggcaactcctaagtagaagaattgaagaaactaccaaccggccctggcttgtattcacccttgaaccatttttttcttg

SEQ ID NO: 16901 - DNA, 340 bp, Zea mays
  Coding DNA Sequence Number=SeqID_2498
atgtcagaaagtcgcaccgccgagcgcgccgctcgcggagccagaaagatcaagctcgcgctgctgggaccggccttcatcgcggccattggttatatcgatcccggcaactttgccaccaacatccaggcgggggccgcgtacggctacaaactgctgtgggtggtggtgtgggccaacatcatggcgatgctgatccagctgatgtccgccaagctgggcattgccaccggtaaaaacctcgccgagcatattcgcgatcgcttcccgcgcccggcggtgtggttctactgggtacaggcggagatcatcgccatggccaccgatcaggcggaattca

SEQ ID NO: 16902 - DNA, 201 bp, Zea mays
  Coding DNA Sequence Number=SeqID_2499
ctatgcgttccctgggtcgagcggcgctccctcctcctccgtggccccccgcctgtctttgtgccggtcgcccggctcgaacgcgtcggctgtggcccagctggatgcgtgctgccgttttgtgccggtcttctgcgtggggtgggccttggtgtcctccgtgcgttggtttaggcgggtccggtgggtctgccttgcgcg

SEQ ID NO: 16903 - DNA, 596 bp, Zea mays
  Coding DNA Sequence Number=SeqID_2500
actgtcggccagttcgtgtacgtaatccgcaagcgcatcaagctgtcgcccgaaaaggcgatcttcatctttgtcgatgaggtgcttccgccgaccgcggcgttgatgagtagtatttacgaagagcataaggatgaggacggtttcttatacattacatactccggcgagaacacattcggtgactgctaaagaagagaccatgacgataattctacgacatgctgaatgacgcgacgtgaatcttactcgtactggaatggaactgctttgcttagaagtgttgcaatatgtcttacctttgggcagtctgatgcgtcttcggttactcgagaactcgacttgttctcgaaatgagaatgacatcggatcgtgggtttcgtgttggcgttttacggatcacatatttgctagtctgatacgaatgttattgcttgcttgtacggacactattcatatcgctgctttgagttgtcttcttgatgcgcttttgaggtagaaagcaggcttgtgtctatgagcagtcggccgcaatgcccggtaggacaagacattcacgaataagcggttcactcctatgtctacttgcgatacgt

SEQ ID NO: 16904 - DNA, 291 bp, Zea mays
  Coding DNA Sequence Number=SeqID_2501
tgcgctgaatgccattcgcgcgttcgaagccgccgcccgtcacgagaatttctcccgcgccgccgacgagctgtacgtcacgcacggcgcggtcagccaccaggtgcgcgcgctcgaggaggagctcggcgtgcagctgttcgcgcgcaacggcaagcggctctgcctgaccgacgccggcatgcgctacgcgcagcagatccgtaccgcgctgatggtgatcgccgacgcgacgcgcgaggtgcgcgcgagcgatcgcggacggcggctggtggtgtcgatgctgtcgtc

SEQ ID NO: 16905 - DNA, 417 bp, Zea mays
  Coding DNA Sequence Number=SeqID_2502
ggtaccttcgatcccattcattacggccatctgcgtccggtcaccgcgctggcgcagcaggttggcctgcaaaaagtgacgctgctgccaaacaacgtgccgccgcaccggccacagccggaagcagcgcacaacagcgcgtggcgatgctgcgctgcgccattgccgatcgttcgctgtttgatatcgacacgcgcgagctgacgcgcaccacgccgtcatggacggtggacacgctggaaaccctgcgcgccgagcgcggggcacaacagcccctcgggtttatcatcggtcaggattctctgctaacgttaggaaaatggcatcgctggcaggaactgctgtcgctgtgtcacctgctggtttgtcagcgtgcaggctacgccgcgcagatggctacgccagagatgcagcagt

SEQ ID NO: 16906 - DNA, 380 bp, Zea mays
  Coding DNA Sequence Number=SeqID_2503
atgctctaccaaggcgataccctttcagtgcactggcttgacgatggcatcgccgagctggtttttgatgcgcccggttcggtgaataaacttgataccaaaactgtcgccgccttaggcgaggcgctgagcgtactggagcagcaaagcacgctgcgcggcctgctgctctcttccgccaaaccggcgtttattgtcggggcggatatcacagaattcctgtcgctgtttgatgcgcccgctgagcagctcagccaggggctgacatttgccaacagcatctttaatcgtttggaagatttgccggtgcccaaccatcgccgccattgacggttacccactgggccggaggcttgcaattgtgtgctggcaaccgactt

SEQ ID NO: 16907 - DNA, 183 bp, Zea mays
  Coding DNA Sequence Number=SeqID_2504
gttcgtcgcgggatgttccgtttcacgtaggatctttgctgggctgggcgcttgcccttcgttggttttttgttgcatcccatcagcgtcccggtctccttctggctttcccattatgttgcgggttcgtcctttctgcccagggcagtgggggtgccctgctcgggcgtggcgcttgtccta

SEQ ID NO: 16908 - DNA, 579 bp, Zea mays
  Coding DNA Sequence Number=SeqID_2505
gcgagaatcatctggtggcaccctgcgacgtcggcgatgcggatcaggttaaacagctggcagagcaggtgcagcgccagtatgggcgcgtggatgtgctggtgaataacgctggcagcatcgtgcagggcaaaattcacgaagtgtcgatagcggactggaagtcgctgatgagcactgacctcgacggtgtattttactgcacccacttctttatgcccgcgctgctcaacagtaaaggcaacgtggtgaatacctcgtcggtatccggactgggtggcgactggggcatgagtgtctataacgccgccaagggcgcggtgaccaattttacccgcgcgctggcgatggattatggcacggacggcgtgcgcgttaacgccgtttgccccggctttaccttcaccgatctcaccgaagagatgaaaaatgatgaggcgctgctcgcacgcttctatgatcgtattccgctgggccgcgccggtgaaccggaaaatattggcagcgcgattgctttcatcgccagcgacgacgcgcgttatatcaccggggttaacctgccggtcgatggcggtctga

SEQ ID NO: 16909 - DNA, 237 bp, Zea mays
  Coding DNA Sequence Number=SeqID_2506
gattcagagctatcaataccgcgttggcatcggcgacgtactgaacgtcaccgtatgggatcaccctgagctgaccacgccggccggtcagtaccgtagcgccagcgacaccggtaactgggtgcaggcagacggtaccatcttctatccgtacatcggtaaagtacgcgttgcaggccgcaccgtgacggaaatccgcagtgaaatcgcgcgtcgtctggcgcagttcattgaaag

SEQ ID NO: 16910 - DNA, 394 bp, Zea mays
  Coding DNA Sequence Number=SeqID_2507
tcgcgcgcgtgatgcgcacgtacatggcgcgctggcatgcgaaccgcgtcgcgctggtcggctactcgttcggcgcggacgtgatgccgttcgcgtacaaccggctgccggccgacctgcgcgacaaggtctcggtgatgtcgctgctcggcttcgcgccggcggcggatttccagatccgcgtgaccggctggctcgggatgccggcgagcgacaacgcgctgaaggtcgcgcctgaaatcgcgaaggtgccgccgcagctcgtgcagtgcttctacggcgcggaggagaaggaaacgatgtgtccggcgctcgcgaataccggcgccgacgtgatcaagaccggaggcgatcaccacttcggccacgactacatcgcgctcgagaagaagat

SEQ ID NO: 16911 - DNA, 575 bp, Zea mays
  Coding DNA Sequence Number=SeqID_2508
caggtgtacggcttctacgatgagtgccagcagaagtacggcaacgccaacgcctggaaatattgcacacaagtcttcgactacctcaccctggccgctctcgttgacggcaaggttctctgtgtccacggaggcctctcgcctgacatccgcaccatcgatcagatccgaaccatccccagaaaccaggagattcctcatgagggcgccttctgcgatttgatgtggtcggatcccgaggaaattgagacttggcagatcagcccgcgaggagccggttggctcttcggctccaaggtcacagaggagttcacgcgagtcaacggcctggagctcatttgccgagctcaccagctcgtgcaggagggctacaagtacatgttccccaagaagaacctcgtcaccgtgtggtctgcccccaactactgctaccgctgcggaaacgtcgcctccatcctcgagctcgacgagaatctcaaccgcgacttcaagattttcaacgccgtccccgataacgagcgcatggtgcccgcccgcaccaccatgtcctactttgtgtaaatcgcagcctcagc

SEQ ID NO: 16912 - DNA, 531 bp, Zea mays
  Coding DNA Sequence Number=SeqID_2509
aaagaccaccttgcgtaactgctgagcgccggacaggaccaagcggaaaccgcgctgccgctttatcacatgtttgccctgacggtgaactgtgtgctgatcgtcgacctgagcggcaccaacctgctgattaccaaaccgcgtgatattgccggcttcgttaaagagctaaataaatttccctttaccgccatcaccggaggtaatacgttggtcaacgccctgctgaacgatgccaattttcaccagctggacttttacacgctgcgtatgtatgacggtggcggcatggccgtgcaaaaagcagagtccgatcgctgagagaaactcaccgggcactatctgctggagggctacagactcaccaaatgctcaccgttggagacggataatccttatgatattacctgccacacctgcaagataggtttgccggttacagccacgcgacgtgcgtattgacgatgaggaagatcgcgaagtaccgccgggagaacccgtagaactgtgcatacgaaggccgcatgtcat

SEQ ID NO: 16913 - DNA, 408 bp, Zea mays
  Coding DNA Sequence Number=SeqID_2510
gtgcgacagcggaagctcaaagcccgcaacagcccgcgaacaaaaagaagaagcgcaaaggtgcgctgatcctgctggctatcgtgtttatcgtgattggtgtgggttatctggcttactggtatctggtgctgcgccacttccaggaaaccgatgacgcctacgtggcaggcaaccaggtgcaggtgatggcccaggtttccggcagcgtgaataaagtgtggttcgaggatacggatcgggtaaaaaaaggcgacattctggtgtcgctggataaaaccgatgcgcagcaggcattcgagaaagcgcagaccgcgctggccaccagcgtgcgccagacgcaccagctgatgatcaatggcaaacagtatcaggccaccatcaagctgcaacagaccgcgctggatc

SEQ ID NO: 16914 - DNA, 196 bp, Zea mays
  Coding DNA Sequence Number=SeqID_2511
tacttcaggctgcaaatggaaaccaagctctacgagtgcaacgtctaaagtccccacgcttagcaagctgcttcaggggtggcaaaagggccaagcatgtagcaccattttttttttccttttgtttggattaaaacgcatcggcccccttgttgtgtacgtatatcaaaagtgcatggcatatgcccatttaagt

SEQ ID NO: 16915 - DNA, 466 bp, Zea mays
  Coding DNA Sequence Number=SeqID_2512
tgcggaattcgcacgaggctcccgttccagagctcactgcttcgctccacccacccttaagcaggagtggtatctggtggttttgtttttcaaaagaagacagaaatgtcttccttgaggcctgcccagtcttctagttcatccagcaggactcggcagagctcccaggcacgggtattagcacaagcaacccttgatgctgaactcaatgcggagtatgaagaagctggggaggcctttggattactccaagttggttgaagcacaacggggcactccacctgagcagcgcgggcgagcggggagagggcatagcctacttgcggctcattcaggagaggaagagctaagccaacccattcggttgcttggtggcccttgacgagaagagcttcagggtcattgcgttcaaggagaatgcacctgaaatgcttacaacggacagccatgctgagcctaacggtga

SEQ ID NO: 16916 - DNA, 252 bp, Zea mays
  Coding DNA Sequence Number=SeqID_2513
agaatatgaaggagaagcaggttgaggaggagaagattgagatgaacatggaggagaagaagcagaatctggttgaggatgaaggtagtcaacaggaggaaagtgaagaggaggacggtgaagatggggaaattggagaggaggaaggtgaagatggggcaattggagatgctaaagtggggggagatggagacaaggaaagtgctaaaaggggggggataaagaacatcaacaacgatgagattctcaaac

SEQ ID NO: 16917 - DNA, 203 bp, Zea mays
  Coding DNA Sequence Number=SeqID_2514
gtttcaccgactttgtaaggctggttccagtgcaccatcctcctctcacccctgccacaattatggaccaatcagaagccgccacctcactgtcgcccctcgctctcgcccgcgaagacgccatcgccaacgcgtcacccacctcccgcctgcctatcgcctccctctcgcccggggcgcgctccagtgcaggcgagagcggg

SEQ ID NO: 16918 - DNA, 370 bp, Zea mays
  Coding DNA Sequence Number=SeqID_2515
tctggataccgcactcttatggattcgctgacaacgcgtcgactcaaccgtcaggactacaaaaccctggcgctggctgccctgggcggggcgctggaattctacgattttatcctcttcgtcttcttcgctgcggtgattggcgagctgttctttccgccagacatcccggaatggctgcgtcaggtgcagacctttgccatcttcgccgccggttatctggcgcgcccgctaggcggcatcatcatggcgcactttggcgacaaagtcgggcgcaagaagatgttcagcctgagtattctgctgatggcgctgccgacgctggcgatgggcgcgctgcccacctacgccagcattggtattgccgcac

SEQ ID NO: 16919 - DNA, 263 bp, Zea mays
  Coding DNA Sequence Number=SeqID_2516
catgcctgcagaagtgggcctgattaaactgaaagaggcgtgggcctgctgccaacctcactggatatcactgagaatccaaagaacctgaagattgttgagctggaaagcgccacagcctgcacgttcacctggacgaacaacaaattgccgctggcggtgatcaacaccacttacgccaaccaaaatggccctgccccggggaaaggccggattttttggcgaaaaataaaaactggccgaccgtgaaccttgatccggta

SEQ ID NO: 16920 - DNA, 361 bp, Zea mays
  Coding DNA Sequence Number=SeqID_2517
tgttcgggcaccctcccaaggagcgggacccgaacgcgccggcgccggcgcccaagtcgccgacgtccacggggcgcggccgagggcgcccgcccaaggccaagagcccgctggaagccgacgtgaagcacgccaccgtggggatgcccaagcccagcggtcgaccgcccaaaaaggccaaaaccgacagcgccgcgttgtcgtccctgttgcgtgacactgccggtgctggcgacgggaccacccacggcaagcgcggccgcgacaggccccccaaggtacgcccttgccagcccagcgagacggaagcagctaggcgcccttctggggacatagaaattccaacaggacggatgggagg

SEQ ID NO: 16921 - DNA, 413 bp, Zea mays
  Coding DNA Sequence Number=SeqID_2518
atctctgctttgtgttttctctttcgtaacggagtccgaatttgggttaagcagcaggtgggtggcatggcgccgcacattctgatttcccgagaaacgcgtcggttggctggtgtggtatcgttccttctccaaaggtacgcgatgactggagtgttgacgcacaagagcgacgtgtatagcttcggagtgaactgatactgctggagctgctaaccggcaggaagcccgtggaccacaccatgctcaagggacagcagagcctggtgacttgggccacgccgaggttgagcgaggacaaggtcagccaatgcgtggactccaagctaggcggcgacgactatcctccaaaagccgtagcaaagagtttctgtgttccagcctccagatggcagtacgagtccgatttccgg

SEQ ID NO: 16922 - DNA, 415 bp, Zea mays
  misc_feature (378)..(378): n is a, c, g, or t
  Coding DNA Sequence Number=SeqID_2519
acgacgcggccctggtgtcgacgacgcgccagctgtcgggttttcagcgttccgcgtgagattgtgcgcgccgcccgtggattgcgcggacggccgtccgccgtgtcgccgaccgtgtcgacgaccagaggggcttcgtagcgggcgttccgcgcgtcgagtgtctggaaggtcacgcacaccccggtgcgccccgctgcccgcttggtgctgccgaacggatacgcgtctcgggccggcccggccatggccgcttccgcattgaacgacggatcggcgatgcccgtgcgcttcagcgattcggccagccgttcgattgcgtgcaggtccagcacgtcgaggcgctcccgcatcgcgtgcacgaacgccgcatgccgnggcgcgtgcgcgtgcttcccgagccattccttgaaat

SEQ ID NO: 16923 - DNA, 152 bp, Zea mays
  Coding DNA Sequence Number=SeqID_2520
cgcgtccagcgcaagctccgaaagtcggagtcttctcgtacggcgtcatgctgttgaagctgctcaccggccgccgacccggcgaccgctcctcctacggccaggacggcctcgtcgactgggtacgtaacacacacgcgaggcaggccctg

SEQ ID NO: 16924 - DNA, 257 bp, Zea mays
  Coding DNA Sequence Number=SeqID_2521
tcgctctcccgcggcctgcaggctgccgcacccatgcgcgcccgccccgctggggcccggcgcgggcgcccgtcctgcggctttcgcgcctgcgggtcccctgcggtccccgccgcccgcccagagccggcctgccggcgggccgcggcgctgcctcgccagcccgctgccgcctgccgggcagacccccaccgctcacctggctggtgcccctccctccccgctgggctgctgtggctgccctcatgtcgtctcct

SEQ ID NO: 16925 - DNA, 163 bp, Zea mays
  Coding DNA Sequence Number=SeqID_2522
aaagaagtggacagagcaaccatctggccctccagtttctcattcttctcaagcacagtatcatacttatccttcagtagcagcagcagctctttcagctccccattcacctgtgccgcattctcatacttctcctccaaggacagcacctccttttccagct

SEQ ID NO: 16926 - DNA, 314 bp, Zea mays
  Coding DNA Sequence Number=SeqID_2523
tgcagcagcatgattggatcgcctccgccttcgaccgatgcatatacggcaggatgcaacgacgacgcaatcagccgccagccaacctcaccatctacatagtcgcctcctcgggaaccagagaggcgcgcgttttttttaatcatgcaacggtaatgtctcagcggccggccgccggctctgccggccggatcacgtcgtgtttgcacgcctgccgctgcggccgccgccgccggagcattgagcagacagaggggccgaggaaacaggcgcacgtgcctccacgctcgctcttgtcatttgggcatggcggc

SEQ ID NO: 16927 - DNA, 390 bp, Zea mays
  Coding DNA Sequence Number=SeqID_2524
gcgccatgcgtacactggtgtatatcgcggtttttgacgaccggggaggcgcgcggaaaagtcagctcgcgtattggtctttcgtctccggcttttttatataacgcgcagaccaacctggaaagtgaaatagcggaacagcacgcgaagcagacggttcactgtgtactggtggatgacagccagtttccctcatcgtgagggggtgaaagccctgtcggacgtggtagataatctggatattccggtgctgtgttatggtctgcgtaccgactttcgcggggaggtatttaccggcagtcaggatttactggcctgtcccgataagctggtggaattgataaccgcgtgtcactgtggacgctaagccagcatggtgccacggctgga

SEQ ID NO: 16928 - DNA, 401 bp, Zea mays
  Coding DNA Sequence Number=SeqID_2525
gacctgcaggtgagcgatcagcaactggatcaggcgattcagaacatcgccgcgcagatccgtttgagcgttgatcagctgcgcagccgtctggcctatgacgggatgaactacaacgattatcgcgcgcagatccgcatagagatgctgatctctgaagtgcggaacaatgaagtgctgtcgcgcatgaccattctgccgcacgaaggggatacactggctaatcatattggctcgcagaatacccactgcaccgatcttaacatcagccacattctgctgccgctgccggaaaatccatctcttcagcctgttgacgaccaggaagcgctggcgcgtcagctggtgggtgaactgaaaggcggtgccgatttctgtaaactggtcgtgacctactctgt

SEQ ID NO: 16929 - DNA, 214 bp, Zea mays
  Coding DNA Sequence Number=SeqID_2526
ctcatccagcagtttatcaacgacttcgtcgatgatagaattagcgacgctcattacatccagcgcttctttcatgacaggatcgacctgggggtcgtatggctcgggcaacggaaacttgcgcgctccccgcgagatggcgacaaagcgccgaggggtttggtgctgctgctggctgccgttgcctcggaggctcagagcacgcacgggcacg

SEQ ID NO: 16930 - DNA, 383 bp, Zea mays
  Coding DNA Sequence Number=SeqID_2527
atgaaggaccaagcagggcgcactgctgcctgctggagagccttgttggcctcagtgttcagatctgcgcatccattcaggcaagcgagttcggcgacgcgctccgggacgccaacctcacagtggatttgctcatgcacaagcttagcaggatacttgccgtgtacaagtcaccagacaccgagtacccaggtatacggcgggggacagttgagctgatcatctggatgctgcggagcagcagacgctgcgttgagttcttccttgagcgccgagtggacagggcggtgaaagaagtcgcggaaacagaagagcggcttgagatgttcaagacgttctgctgcggcatcggcctcgctaagcaaggagagcccgtctcttct

SEQ ID NO: 16931 - DNA, 233 bp, Zea mays
  Coding DNA Sequence Number=SeqID_2528
gtagcagccgcatgcgcagtgaccggaaggaggagggatcaagcgaggcggaccaggagcccaactccgccccgctgggcgaggaccagggcgggactgctccgcggacaggcgatggtgcagcccaggccaaggggccgaacatgcataggaccgaacgcgccagcggacgcggtggcaacgccgctgatacatggaacgctcgtacgagcgctatctaccgtgccacgctg

SEQ ID NO: 16932 - DNA, 481 bp, Zea mays
  Coding DNA Sequence Number=SeqID_2529
gtacgacgccgggagcaatctgtccttcctcgtgtactgctacgccgtctcattcctacggcggggcctagccgacgtagttctggtgcaccccacactgaacccactggtcaccgtgcgccatatgactcgggtcgacttagaggaccgttgggtgatttacgacggggactccgacgaccacaacacggccggagacacgccgctggtgtccgtccttcgtctgcacataggcgcgtactgcacgacggtggcgctcgcgcaccccggacgcgggtccaccgtaggaacaaccgacccaccaccatacgtggtggaggcctcctacggtcgacccgcctgcgcggcgcgcgacccccacggtgtcgccgtactcgcctatgtgcagaggaaggacgcccaccaccaccacgtgccccgccttgttgtggccgtgccactcctcggcgcgccagtgtccatggtgcttttaatcgaactg

SEQ ID NO: 16933 - DNA, 446 bp, Zea mays
  Coding DNA Sequence Number=SeqID_2530
attcgagtcgaactagtgcaccgtggggcttcgcagtcatcacgaatctagtattgttttcccaaatcaaggcgtctgggctgccctctagcaggtagcctgtacacagggagctatctactatttagcaatatagaaagttgaactgtgtattgatagatattatacacgggtcagccttcgacctacagcctatgtctataccagagggctagcaagatcatacaaagtagttcccattctttatgctctacagggggggatatatccgccatggccctatccgtttccatgaacgggatttagtgacatcactcgtcatatctgatgaaatttgtgtctcagcagcacattctatcaatagtgattatgagcatacaatcctctagaatttcctaagatccgcggcagacattagatttgtttttggtgtatacccactcggt

SEQ ID NO: 16934 - DNA, 382 bp, Zea mays
  Coding DNA Sequence Number=SeqID_2531
tggtggcagacatgttgcccctcatgggaggcttcatcgtcttggagttcttcccgttcctggcccgcttcttcgttctgttcaaggcgggccgcgccaagtccgagatgttgaggaagaagtgggacgagctcctggacgggctgatcgacggccatgcggcgccggcgagtgatctcaaggacaaggacgaggacgaggacttcatacatatcctgctctctgttcgacaggagtacggcctcaccagagaggccatgaaagctatcctgcttgacgtatttttcggcggcatagacacatcagcttcactactcgaatacaccatgattgagctcataccagaggccacacgtgatgaagaaactacaggccgaggtga

SEQ ID NO: 16935 - DNA, 407 bp, Zea mays
  Coding DNA Sequence Number=SeqID_2532
gatttttttccaaagcatatttaatttgggaaaccccaaggttttttccccttccccccgtttttaaaaaccggcgcccatgtatttttttttcccccccttttaggggaaattgggcctttttaataaaagttcaacggccccccattttttgggattttttaaaaatttccccttttaaagggccccccggggggggatttttttttttttttttttttttttttttttttttttttttttttttttttttttttttttttttttttttttttttttttttttttttttttttttttttttttttttttttgattcgcccttttgatttgttcgttcgggcatggttttttttgcataaaccccgggccaaaaatgttttcacctcagggtcggtttcttcagcg

SEQ ID NO: 16936 - DNA, 503 bp, Zea mays
  Coding DNA Sequence Number=SeqID_2533
gatccatcgaccgatctgtctgatcccgtgggccgtcgatccgaccgcgcaggtgatccacgactgcgtgcatttcgatggctcgccggtcgagatctcgccgcgctacgtgctgcgccgcgtgctcgacctgtaccacgcgaagggttggaagccggtggtcgcgcccgagctcgagttctatctggtcgacatgaatgccgatcccgacctgccgttgcgtccgcccgtcgggcgcacgggccgcgcggagaccggccgccagtcgtattcgatcgaggcagtcaacgagttcgatccgctgttcgaggacatctacgaatattgcgagatgcaggggctcgacatcgagacgctgatcctcgaggtcggcgccgcgcagatggagatcaacttcgtgcacggcgacgcgctgtcgctcgccgaccaggtgttcctgttcaagcgcacagtgcgcgaggccgcgttgcgccacaacatgtacgcgactttcatggccaagc

SEQ ID NO: 16937 - DNA, 151 bp, Zea mays
  misc_feature (48)..(48): n is a, c, g, or t
  Coding DNA Sequence Number=SeqID_2534
gagccctaggatcttgtccattggcctaagagccccaaacttaaccgnagatgggcatggcgtcccggcgcgcgaggcaaggggtacaaggcttttgtcagataggtcctcttcgggacatatatgttatgttttccaggtaatgccacaa

SEQ ID NO: 16938 - DNA, 157 bp, Zea mays
  Coding DNA Sequence Number=SeqID_2535
aagatagggagcttccaagttccaacgcaggagctagactggatgttcatgttgcaagtgtactgtctactgcatgagcatggtatccacctacaacctgaagttgatgccaccacagtactgggtacaaactataattcatatttggtgtcttgtg

SEQ ID NO: 16939 - DNA, 259 bp, Zea mays
  Coding DNA Sequence Number=SeqID_2536
gcatgcagctcgactcttgagatccccctggcgagcgcgagagggaggacgcgacgcaaatggttgttacccaggttttcgactgctggttcgagagtgggtcaatgccatatgcctacattcactatccatttgagaatcgggaactatttgaaaagaactttcctggcaattttgtggcagagggtttagatcaaacccgtggatggttcgttactctctttcagaacaatatggagtggtataaaaagggttcatt

SEQ ID NO: 16940 - DNA, 478 bp, Zea mays
  misc_feature (49)..(49): n is a, c, g, or t
  misc_feature (91)..(91): n is a, c, g, or t
  misc_feature (94)..(94): n is a, c, g, or t
  Coding DNA Sequence Number=SeqID_2537
atccccaaatatttggccttttcagcagaattcccgcctttagaacaanccttcttttttattttctatcttttttttttttttttttttnatntttttttttttttttttattttttttttttttttttttttttttttttttttttacttaactacacacgcaagcaattagttcatgcgcttattaggttgtgccactggccaccactacactatattacactagcacaagcaagcagctacacatacttgtccatatcacataaacgaaacagcatatataagaagatgtcccaacatctttgcaccacgcgcgagatcaggggccctgcaggccgaactcttcagggcgcggccacgttctccttggcgagcggcgcgatctcctcgccttcgacccctggctcgccgccggcgaccccgaggctgagcagcacgttctcccagttcttggcagggcccttcgaggagatggt

SEQ ID NO: 16941 - DNA, 505 bp, Zea mays
  Coding DNA Sequence Number=SeqID_2538
gggtccaggttaaagcagcagcagccgcaccaccaccacttgctcgacatgctcaaggccgagctggccaagctcatccagctcaccaagacgacgtggaaggagctcctcgctgccctgcttgcatccaagaggtcgcacgacacccagcgcttcgcgtccaggggcgacgttgagctcgacctcttcaaaccgcggcggatggacgagtacgtggagcaggcccaagcgttcgaggaggaccccagcaggccgccaccgtcggtggaggacgaagttaggccggccccggagccggagccggagccggagccggagccgaggccgacgtggatggcctggtcaggttcgcgtgattatgatgagcgcaggagctccgggttttgggcgtgggcggcggtcctcgtgtgcacggcgctggccaccgccgtgctcctggccggcgctgcggtgctcgccgtctatctcctctgccgccccaggatgccgtacctagcggtcaccg

SEQ ID NO: 16942 - DNA, 315 bp, Zea mays
  Coding DNA Sequence Number=SeqID_2539
tgaaatcgaatatggcgtgcagggtgaaggcctgcgccacgcgggcagcgtgctggtcgatgccgacggcaaatggagctttacctcgccgtatctgcatcagcctggcgtgtgggaatatcaggcgcgtgcctcaaccggcgagatgaagagcaactggagcagcaaattcgtgctcgacgtcagcccggacgccgcgttcgatcagcaggcgcaggatgaagcccagccggatgcgctgacgctgcaccagctgctgagcgaaggtggcaaaggcctgttcgttgaggatgacagcacccagcttctggttaa

SEQ ID NO: 16943 - DNA, 257 bp, Zea mays
  Coding DNA Sequence Number=SeqID_2540
gcaacacgcgactcatgctgttggggctgctgccgaaacaaagctgcagttgtataagcgcaaggtgcgctgcctccctcggacgccagtgatagtgcaggcgctgatccctgcggcactcatcatcgaaggtgcagcgatgtacaggcgtgctcgcaagcgctgcgcgaggcagcgtcggtcctctgcatcgctcacgatggcgctcatcaagtgccagcaagctctgggagctacaatgggtgccgagagccgca

SEQ ID NO: 16944 - DNA, 182 bp, Zea mays
  Coding DNA Sequence Number=SeqID_2541
atggctgccacgattcccttgttgaaggccacgccagggaagccgcgtgctgctggttacgccgcgctctcgggccctagtggtgtcgcgccgtgcctgaaagtggctgcgctgttggccctcgttcacggacgcgccccacgggagggggtgctccaccatggctgcgacctcgggcacga

SEQ ID NO: 16945 - DNA, 161 bp, Zea mays
  Coding DNA Sequence Number=SeqID_2542
acacactatcatgtgcagctgccaatgatgggtcgtgctgttcacggcaccacgtatgtgctcagagctgcctccagcgcgaacgtccagcgagtggtggaggcgtcgcccatgtctgccgtcgacatcagccccatagactggcctagctggtacccggt

SEQ ID NO: 16946 - DNA, 538 bp, Zea mays
  Coding DNA Sequence Number=SeqID_2543
catgatctcttgttaaccagtgtgaactctcgaccattggactgccgatgggtaccgagacaacattgctcagtgccaaaagtagttcaacaggttggttttactaacttgtaactgccctatggaacaaaggttgagtttagagatcgttttatcgagttgtctaaactcacttttgttcaacccctcctaaggaagtgcttgccaaaaaatcaagttaagccgactggtaaccacctagtcatcgctctagccatgcctcgatcgcctcacgtgtgcttttccagcatgtgtgaataaatcgagccgtgctaagtatttgatgaaataggttggtcgtgaagtcaacatcaacggatctcttcattgattttttgagtatctatcatttttcttgaacttggattttctggctaacacgagttaactgtgatgttgttcgacatccacacccgtctcgtgtgctatgaactaaccgtgaccacttgttggtaaacctctttctatgagttttacccaagaggttgcatctgattct

SEQ ID NO: 16947 - DNA, 184 bp, Zea mays
  Coding DNA Sequence Number=SeqID_2544
tggagaaaaaccttgcaccctgaaaagaccagtgtgggaagatggcttctggatgaggacaaacgcctcatggtcactgttaaactaattggacctggcaggtggagtttgattgctccgtttattcctggccgaacacaaacacaaatctttgagaggtggtgcaatattcttgatccagatc

SEQ ID NO: 16948 - DNA, 130 bp, Zea mays
  Coding DNA Sequence Number=SeqID_2545
gaacctgctcatctcgactgctatcaaagcagatccatctagagtcatggactatgtcaacagacttgataacttcgatgggcctgctgttggagaagttgctattgatagcatgttgcctttatattgc

SEQ ID NO: 16949 - DNA, 522 bp, Zea mays
  Coding DNA Sequence Number=SeqID_2546
aatgctctgattgacacttatgctaaatgtggaagtttagatgatgccaacaagctctttgaaataatgggcaccggccgcgatgtgttctcttggagcagcttgattgttggctatgcccaatttggttatgcaaaggaagcacttgatttatttgccaggatgagaaaccttggagtcaagccaaatcatgtaacctttgtcggtgtcctcatagcatgcagtcgtgtaggacttgttgatgaaggctgctattactacagtattatggaacctgaatatggcattgtcccaacgaaagagcattgctcatgtgtcattgatttgttggcacgtgctgggagactaagtgaggcagcaaaatttgttgaccaaatgccatttgaacctgatattataatgtggaatactctgctagccgctagcagaacacataatgatgttgagatggggaagagggcagcagaaggtgttttaaatattgatccttctcattcagcagcctatgtccttttgtgcaac

SEQ ID NO: 16950 - DNA, 445 bp, Zea mays
  Coding DNA Sequence Number=SeqID_2547
atacgtgccgcagagtacagccagctcttcaagcaggccatggccagcattggcctcaagatgccgccctccggcatcggctccacgctgaagtagtgcctcaccatcgctaaggacatgcagggagttcccgctcattgtttgtatagcattcactataggtggcacggtgtacggcatagccttcgacaggtagatgtgtacaatcatatgcagggtcgtcagtacgtgtagcacaatcagcaggtgctcgtgaatagttactgctaggctgaattgagtccgagttcaaggtcatgcgcgataagaccagtgaagtgttcatcatttgttccatctaatacattgataccatgtgtgtagaccgggcgaactccatccccgtcgcgcctgttcatacactcacggtgtaggagtatcaaagagttactctctcctcagttgc

SEQ ID NO: 16951 - DNA, 531 bp, Zea mays
  Coding DNA Sequence Number=SeqID_2548
gaatgagaccggtgggtgcctttcatcaaatatctactagacaaagtccttcatgaatacaaaacattagccctttaagtacaacagaagtccaaggcttacgtaatgccaatgatgaattatcgaaaaagttctttgagaatcttgatgagacgcatccccattaaagaaggaagggaactactcaatgaaatccattcaagcatatgtggaaacagtactcattgtggaatctcacatacttttataaatagatatctatttagcttgtgtttattggactaacttttagcaaagattaattggctcataattactatttgactaaagtaaggtttataatcaagttgtgacctagaatatatcagttacttctgtttagtatatttctcacgtgggttataataacatgggagtcccatttacaatttaatcacctgctatttttggaagatcacatcttattcattataattctgattttagtgattctcgaacatacgatctcgtagcagcgtgtagagtattcct

SEQ ID NO: 16952 - DNA, 407 bp, Zea mays
  Coding DNA Sequence Number=SeqID_2549
aacagctgagcagtggtaccaccagcagcagcagcagctccaatactcgcaatactaccagcagcagcaccctggatccaacccttacatgcagcaacatcaacaatatgaccaataccagcaggcgtatcagcaatacatgcaacctccaatgcaagtaccatcccaaaatgcggtgcaaggatctgcacaacctgcttcttatgttcagcctcaagttcagtcctcccaggtgatgatgcaagcccaaagtcagccccaggtccatccattgacgagtcagccacagcttcaacagcatccagttcaaccccgaccccaaagtcaccctcatatttcccatgttcaagcaccttcaggtcagtcgcagcttcatcaaccaattcagtcagcccaagttccacagg

SEQ ID NO: 16953 - DNA, 70 bp, Zea mays
  Coding DNA Sequence Number=SeqID_2550
gctgccagtaccatggtacttcccttgacaacaatgggacaggcaaccacgaccttgagctgctgaggga

SEQ ID NO: 16954 - DNA, 429 bp, Zea mays
  Coding DNA Sequence Number=SeqID_2551
gaacgtcgccaagtttagcgtggcggccgcggccgccacgttctggaaccacaaggccggaaacacatcatatggtgacgactgcggcagcgacgaggaagaagaaagcggcatgctccgcgctggcgacccgctgaaggtggcggtggcgaccctcgccgtggccatctgcgaggcggcgaggttcgtccccgtctccacggtcatcggcaaaggttggggcgagcaacgggtgagcgtcacggccaaggaggtaagctacatcatggactggggtgacctgtcccgcgcactgctcaagtggaagagtggcggttataaggacgacaagcctttccagccattcaagggtatcgggataaataacggggaggaagccttggctgtggtggcccttctgaagctcatgtcgggaagccagagcctgtt

SEQ ID NO: 16955 - DNA, 229 bp, Zea mays
  Coding DNA Sequence Number=SeqID_2552
ccttttagggctttggctagtgtagcggaaactttgtgtgtatcctcctctttctccgcgttaatgaaaaaaaacagggtgtgatcgtccttctgtggcaggttcttttttttttttttttttttttcctaggcacacaacaattttatttactagcagtaagtcgcatgtcccttaggatacaatcatttcaatccagcatccagttgtttaccttgtgcgggatagg

SEQ ID NO: 16956 - DNA, 294 bp, Zea mays
  misc_feature (81)..(81): n is a, c, g, or t
  Coding DNA Sequence Number=SeqID_2553
cgcattcattgtcgaccaactctaatgactccctagggatctccctaggcgagcgagccattattagggtcatggaatacnctggcctcactggctcagatgagttggacgagagaaaggaggagggcttggaggagttggaggatgacgaggaggaaggcgacggcaagggcgatagaagcggcaagggtggcatcagtggcatcagtagcagcagcgagggcagcaatagcggcggcgacggtggcaacaagggtagcatcagcgatggcgaccacaagagcggcaacagtg

SEQ ID NO: 16957 - DNA, 358 bp, Zea mays
  Coding DNA Sequence Number=SeqID_2554
atgggaggctcctacccattaggctgcaaccagcgctcttgggagtgcagcaagccagtcttccctgttgagatcagcagggaccgcgttcaagatgttgttcaagagattctctttggtgtaaattgcggccccgttcccattgacggtcgtgaaattagagtaggggattgtgctctttttcgggctgtcggtgctcctccgttcattggattgatacgttggattgagaaaaaggaagaagcacatcccaaattacgtgttagttggctttatagacctaccgacgtgaagcttaacaaggatatacaactcagcgctgccccgtgcgagatcttataataattccaccaggacg

SEQ ID NO: 16958 - DNA, 235 bp, Zea mays
  Coding DNA Sequence Number=SeqID_2555
tatctcccatttttcagaatgaatttttatttggattaggttcacaccatttgaattttagaaaccaacttattttgacagatttctgttccccacaatgagattggataaattgataagggggtatgggtaaaatggcccttattgaaggtggccccaaggtctggttggattccatccaaatttttggtgggaggtttggggggcccaccttggattaggacccattcttcct

SEQ ID NO: 16959 - DNA, 431 bp, Zea mays
  Coding DNA Sequence Number=SeqID_2556
gatgccgatgtcgatgcaggcgcccggctcgatctacaaccccggctacgcgggccggccgctgttcgaggatcagcggccgcgcaacatcggcgacatcctgacgatcgtgatcgcggagaacatcaacgcgaccaagtcgtcgggcgcgaacacgaaccggcagggcaacaccgacttcaacgtgccgacggccggcttcctcggcgggctgttcgcgaaggcgaacctgtcggcggccggcaccaacaagttcgcggcgacgggcggtgcgagcgccgcgaacacgttcaacggcacgatcacggtgaccgtcaccaacgtgctgccgaacggcaacctcgtcgtcagcggcgagaagcagatgctgatcaaccagggcaacgaattcgtgcgcttctcgggggtcgtcaacccgaacacgatctcgg

SEQ ID NO: 16960 - DNA, 241 bp, Zea mays
  Coding DNA Sequence Number=SeqID_2557
gctgtgtgtatgctgatcatcgctgcctctggtgtgacggcggatcgattgcaggctgttgacatcccactgaagctcgttacagccattggtattgctgcggatcaccgccgaaagaccaaatgccttgacggactgctggccaatgcccacaggctgaagacatactaggccctgctggctatcttacctaggcctgcacacaaggtaaaagttgctgactctcctccacaagagctag

SEQ ID NO: 16961 - DNA, 195 bp, Zea mays
  Coding DNA Sequence Number=SeqID_2558
ccgtgacaggtcaggtcagggtcctcgcatgtgcccggctcggcatgcgcacctgctccgtacgcccccaacccaaagagcaaacctgctgccggtgggcggtggggctgtgcgctgcctgggcgaggaccgtgtacactgttaccgccgtacgtacgcggcgcgtaactgccacggcgagctggctacgcgcca

SEQ ID NO: 16962 - DNA, 437 bp, Zea mays
  Coding DNA Sequence Number=SeqID_2559
tccctggtcactgccgccgtggatcctccccactctgacgctccctccctccccctctccttcgtgctggctcctggccacctaggcgccacgaccatgggcgcaagcgcggacgccgggctaggtgcggccaccgccaacctggacgcgctcgtcaccgtggccctgggcgcgcacaccacagcggcccggcgcgccgccactcctctgcccacaaccacctccccaggctctcttcccggcctccgccgctctctagtcaccacggccctgggcgcagacgtcgccgccagggtgggcgtggacaccgaaataggcgcgtgggccgccgcgggcagcgcgtgtccaggcacagccgccaccaccatgggcgcggatcaggccgccagcgccctagacctcgccgtcgccgccatggccgtggatctggccaccgg

SEQ ID NO: 16963 - DNA, 559 bp, Zea mays
  Coding DNA Sequence Number=SeqID_2560
agaagcagtgcctgcaggcccaggagaagaagctcatcaacgagatcaagaaggtggccaagcagggtcagatgggagctgtaaaaattatggcaaaggatcttatccgcacaagacaccaaatcacaaatatctatgccctcaagtcccagctacaaggtgtatctcttcgtattcagactctgaaatcaacacaggccatgggtgaagccatgaagtgtgtgacgaaagccatgtggcagatgactagacagatgaatcttcttgccttgtagaaaataatgcgagagtttgagatccaaaacgagaagatggagatggttggtgaactgatgaacgatgccttcgatgatcccttggagggtgccgaggaggaaaagatggaatagaactcaaattttgatgcccgcataagtgtggagccttgaattcatatatatttagttaggctcaatattaacgcacacagtcgatgatcaagtttttcaattagtattttagtctggatttaaagtacacttatgtatgagttatttgacaacgcccatttattataaat

SEQ ID NO: 16964 - DNA, 340 bp, Zea mays
  Coding DNA Sequence Number=SeqID_2561
atgaccattatgtgcgtggcgatcgcgctggtgtgtgcgctcagtacgctgtttctgccgctgccggcgcgcgtcagctggaaatatgcgctgctttcggcgctgctgcacgtcggctataacctgtgcctggtgcgcagctaccagagcggcgatctcggccagacctatccgattgcgcgcggatcgtcgccgctgctggtgacctgcgccgccgcgctgtttgccggcgagcacatcgccttcgctacgctgtgcggcatcgtgctgtcgctgaagctgcgcggcggcaaactggcgctgccgggcctgcgctacacgctggcgaccggtgccttta

SEQ ID NO: 16965 - DNA, 364 bp, Zea mays
  Coding DNA Sequence Number=SeqID_2562
agcaacccgggcagctgacggaaaacgaccaacaccacagggcacaacgccgggagcacaaggaccgccaagccagtgccggaggcgcggaaggcgccgcagcccatctcaagaccaaaacacggagcacaagccggaagagcggaggcggaacagagacgccacaaaccgggaccaaaaagaaggggaaccgaccgcggtcaaacagcagcagagcacggcgcacgcagggaccgggcgagcccgaaaccgagcccccgaaagccgacacggaagccgaggacacggccagggggaggacgaaagggacgcagccggagacaatcagagggcgagcggggaacaaagcacaccgagaacgagc

SEQ ID NO: 16966 - DNA, 346 bp, Zea mays
  Coding DNA Sequence Number=SeqID_2563
atggctgagcatttgatcgagtgcgacgatccggacaccgcgcaaagcatcgtgctggaagggctgaagcgtcagtatgacgatcggctggtgctgctgatgccgcgcatcaaaagcggtgacccgcaggcgctggagaaagcgctgcgtcagcagattaagcagcaccggcgccacgcccgctgttgcacagcacgctcggccagctgctgatgcgtcacggtgaatggcagcaggccgcagaagccttccagcaggcgctggcacagcgtccggatggctttgactacgcctggctggcggacgtttacgatcgcctgcatcgcccggaagacgcggctaaaat

SEQ ID NO: 16967 - DNA, 387 bp, Zea mays
  Coding DNA Sequence Number=SeqID_2564
gcatgcctgcaacaagagtgccaaaacaagaacgcagagggagaaattggacctgatttgggctggccgcgacgagcttggttcacggcggcggagagttgatttggggaaaaacccgaattgcggggctacgacggctggccggcgacggatgaggctcggggagctcgggatcgcgctggcgagcataccacgcggcggattccggggacagcgcggtggtcgccgtttaaccggagcctgccacctcggtaactctttgacacgtcgccgggagcttttaccgtggccgccgacgaccaaaccgggccacagcggcagtttccatctcaagatcaccttttttttttgcgattctctcaagaagtcaagagcacactatgcgag

SEQ ID NO: 16968 - DNA, 262 bp, Zea mays
  Coding DNA Sequence Number=SeqID_2565
atggacccgcgcagtgaagtgttgctccgccaggcagagctgttccagggcccgctgctgctcgccggcgcccccgccgacggcctgctcggccagttgccccaggcccggggctggaaatagcatgcgggcgatcatgccatgctcgaaagccgcttcgccgggcgcagccactatggggtcgagccaccggaagtggctttcgacaacgccgtgctgttcctgcccaagtcccgcgaactggctgcctacctgctcaacg

SEQ ID NO: 16969 - DNA, 316 bp, Zea mays
  Coding DNA Sequence Number=SeqID_2566
atgcatcccatgtcgggacgttcgccgccgagagagagaaagagagagccgccatggatctccaccgtcgctcatgagcacggcaccaattggagcattgtgtgtggtcaggaggttccgcccgaggacccagatcgcgtgggcggtggcaaggaaaaagagcgattagggagccaccaattcgtcgccatcgccgcgaatccacgatgcgcctttcgtttagcactcaatgtacctaggggccatgcactgtggggcggtgcgggtcttctggccatggcacaccgccgcggcgcccctgctatgtcgccagagt

SEQ ID NO: 16970 - DNA, 245 bp, Zea mays
  Coding DNA Sequence Number=SeqID_2567
gcgcgcgggtcggagtcacactttccggccgctatcgacttcagcgactcatcgccacaggcggcatgggtcaggtctgggaaggcgtcgacagcaggctcggccgacaggtcgccatcaaggtactcaaggccgaatactcgaccgaccccgaattcgtcgagcggttccgcgccgaggcgcgcacggtcgcgatgctgaaccaccccggcatcgccagcgtctacgactacggcgagaccgaa

SEQ ID NO: 16971 - DNA, 189 bp, Zea mays
  Coding DNA Sequence Number=SeqID_2568
gcacacgaggctgcgccacaagagggccagcggcgacaagccctggaaacgcacgccaccgaccgcgcacaaaagaaccaaaggaaccccacgctacagcgcaggaaccaccccgccagcaacccggtggacgctgaacaggacgacgagcggccgaagaaacgcgccaagaggaaccgccaccacaag

SEQ ID NO: 16972 - DNA, 274 bp, Zea mays
  Coding DNA Sequence Number=SeqID_2569
cacggggccctacagcagcacaggagagcgcgggctgcccacctagctagggctaccaggcggcccggcccgccccgcccggccagcatttactgcgttcatgcctccctcgcgtcgtccaacggcgcggcactaccacgccgccgccgccggccggcagcccgacccggcgcccaccaccgccggacccgtcccgaccgttcggcggtgacagtacggatcaccgccgccgccgcctccgtgcagagctccgtccgtacgtcacggtcacggt

SEQ ID NO: 16973 - DNA, 277 bp, Zea mays
  Coding DNA Sequence Number=SeqID_2570
tacgttatacgagccaaaaaccactctttcgctccaaggtaccacgctggactggaatggactggatcaagagagccaacaaatcaacgtgaatacacaattcaaaggatacgactatctggattgttacggtgatcctgaatttattggcaagatcggcaccgacattgaagattacaagtgctcatggctagttgtgcaagcccttgatcgtgctgattagagccaaaagcacattctatttgtaggtcatctccagacctctttgaaatgatta

SEQ ID NO: 16974 - DNA, 346 bp, Zea mays
  Coding DNA Sequence Number=SeqID_2571
cgctcagaccgggcgcatatgtatatccttgccaccctcaccttgtgaagaaggggtggaagagtcagtggttttacctctgcaacgacgatgtgcgattgtcggcgttcacgcactgcgtcgttctcgaagaaaataagcgatggaggtggggcctacctcgggagctccagacccacatgaagccgttgttggacgtcctacggagatgctgggaccgcggccttaccgtggccggggtcatcgcagtgttccaccggcggagggttctgccgctgaccgaccatcggctctgcctcgacgagatgacgcccaaggcctccttggaaagttcccagatggcttc

SEQ ID NO: 16975 - DNA, 139 bp, Zea mays
  Coding DNA Sequence Number=SeqID_2572
tgcaggttaaccccttcgaaagcttccaaagaagtgtgatttccatgaacacctcccaagataaaacaccccgaaggtcttgaatccatcttgaatctgtcaaggcttccagaatttgcttcaactgttccttggactg

SEQ ID NO: 16976 - DNA, 421 bp, Zea mays
  Coding DNA Sequence Number=SeqID_2573
gtacgcccttgatcggtctgttcaagctgctgaccttgttctgcacccgcccgaatgagctggcctcacagtggattattgtcatcttttgatcatgccagtttgcgccgtggttatgaagtgtacaagcaggtgtgtgctgcatgtcacagcatgcagtatgtacgctacagagagttgattggtgtcacacacactgaagaggaggccaaggctgaagccgccgaaattatggtggaggatggacctgatgacactggtagcatgttcaaaaggcctggcaaaatagcggactcattcccaagtccatatcccaatgagaatgcggctcgtgctgctaacaatggagcttacccacctgatctatcctatattacttctgcccgtcacggcggtgaggattacgtgttttccctgttga

SEQ ID NO: 16977 - DNA, 165 bp, Zea mays
  Coding DNA Sequence Number=SeqID_2574
gagtacgagcgcaagcaccacaagagccacaaggaggaggcgaagccgaggaggaacgagcgcgcgcgcgacaacaccgagcagggcggcgggagcaacgcagacagccgcggagagccgaggaccccgaaggacgggcaccgcgacgccggcaaccaggaggag

SEQ ID NO: 16978 - DNA, 133 bp, Zea mays
  Coding DNA Sequence Number=SeqID_2575
agccttcaggcgtgcagccctgctggagaagtcgcccagctctccttcgctggttcccttggccttgagcctggcagcgcgctcagcagagaggtaaacagagtggtttttccggagggggtattgccacata

SEQ ID NO: 16979 - DNA, 435 bp, Zea mays
  Coding DNA Sequence Number=SeqID_2576
gaccagcagcagtacccgatcatatacccaagcgcaccgccgaccccgggcaacatggagacgggcctcgtcgccacgggcctgcctgtgcggcggcagcagctcggcggggccgcgccggacagggacggcggctgggcgggcaacgaccacagcacgctgatcgtggtggccacgctgatcacggcgctcagcttcctgctcggcctcagcatgcccggcggctactggcagaacgaccagaagttcgtgagcaacggcggggtggtgtaccaccgcgccggagaccccatcatgcgcgacctgcaccggccgaggtactgggtgttcaggggggccagctgggtcggggtgacgagctcgatggtgatgacgctcagcctgctcgtgcggatggccgtggactcgcgccacgtgctctggtccttctcggtg

SEQ ID NO: 16980 - DNA, 491 bp, Zea mays
  Coding DNA Sequence Number=SeqID_2577
tgacctggtggttcgtcaggaccaggatcgacaccgagcgtcttttgacgtttttgttgctctccgtgcccaaggagctgtcgacgccggcggccctcgtgagccggctcgtggcggcgtccaggtcggtcggtgacttcgcggggctgctgcatggcgctggtacctgtgccagcagcagcgacgacgcagttgcagagcaggcgcggtcgtggaggaggtacgccatcgaggcgcacctgtggcgagcgatgctgctcgttggcaccggcggcggcgacgccggtagtagcttccacgggatcatgaagccacgcgacgcgctcgatgccctgatgcatgtcccacgctcggggctctcggcgttctgccgggcggcctacctggtcgtcgcgtcgtcggaagccgaggcggtcgcgtgccggaacctgtaccacaaggccttcgtgacccgcggcgggcacccgaggacgccgctttacccgtgcgtt

SEQ ID NO: 16981 - DNA, 179 bp, Zea mays
  Coding DNA Sequence Number=SeqID_2578
gaagaagaagtctctcttcccaaaactccacggagcagaagatgatgttgggaataatgatgcctcgccgagacgtctcccgacagagcagcactgcatcgaccccgccgcaggtcgtcatcattggcttgaaggagtccctagaacggtggtcagtggcagcagtggcttccccgtca

SEQ ID NO: 16982 - DNA, 191 bp, Zea mays
  Coding DNA Sequence Number=SeqID_2579
ttctgggcgggtcagaagctttcccatggctccaaatgtcttgtcccatgggagattgtgcttgggtgcaagttcgtcggtggtctggaggcatgtggtgggagcagtacggcgactcagcaccttcgctgcaacgcgccgccgtcagaatacaccagacaagtgtacagcacgttgacgttcccgagggc

SEQ ID NO: 16983 - DNA, 199 bp, Zea mays
  Coding DNA Sequence Number=SeqID_2580
cggaggccacgcgatgaacacttaccggcaaacgccaagctccacccgacagcgcagatagactattgggtgacacagagcaggcgaaccaagctgatcacgggcggaaacaccaccagcggcgcgcgcgggagccgcgagggcagaactgagcagaccgacacaaggaccggcaggccgcacggcatgcagggcagag

SEQ ID NO: 16984 - DNA, 178 bp, Zea mays
  Coding DNA Sequence Number=SeqID_2581
aatattaactatcttgccatcttcttagtgtatgagtttcacatagacaagctctgttcactggtgaagaagtggcaaactcttattgaggatcatgtcgatgtcgagaccattgataactacatgttgcagttgttttgcattggcttcaccaagaggtaggccaaccaagtgaaga

SEQ ID NO: 16985 - DNA, 493 bp, Zea mays
  misc_feature (60)..(60): n is a, c, g, or t
  misc_feature (104)..(104): n is a, c, g, or t
  misc_feature (110)..(110): n is a, c, g, or t
  misc_feature (112)..(112): n is a, c, g, or t
  misc_feature (188)..(188): n is a, c, g, or t
  Coding DNA Sequence Number=SeqID_2582
gacaggaggaccaaccagacacgaccccacatacgaccattctaccacacccagcccgcncccggggacccagaggaaaacatcggaaacgcaccccatccacnaaaccnancggaagaggggaccgcgacaaacacgaacaccgccagggcgggaaacccagacggacacaaagccacacccgctcnacgcagggaggagcgacaaaccccccccgcagaggcaaaaacacgacaaagccccccccaccggacccaagcagaaagggacaagcggaacaacgacggccgcaccgcaaagggatgcacgatcaaaccaaaactgggagaacccgcaaaaaaagaccgcacagccacagaggaaagccgacacagcggaccaagagcgaccaaggatgacgaaaccgtaaacccacaacccactaagcgcaggaaacaccacatccactttgggcccgaaacagaaaacaaagcacaagcccaaactgcgcaaa

SEQ ID NO: 16986 - DNA, 430 bp, Zea mays
  Coding DNA Sequence Number=SeqID_2583
gacgcaacgcagctggacgatgttttcctcgtgattgccgccaccgacgataacgccctcaacgcgcaggtatttgatgccgccaatgcgcgccacaagctggtgaatgtggtcgacgaccagccaaaatgcagctttatcttcccgtcgattgttgaccgctcaccgctggtggtggcgatctcctccagcggcaccgcgccggtgctggcgcgtctgctgcgtgaaaaaatcgaagcgctgctgcccgccaatcttgggcagatggccgaagtggccggtcagtggcgcgacaaagtcaaacagcgctaccacaaaatgtccgaccgtcgtcgcttctgggagcgtgccttcaatggcctgtttgccagccagatggcggcgggtaacgtcaacgaggcgtgccgcacgctcgatcgcgaactggaaa

SEQ ID NO: 16987 - DNA, 547 bp, Zea mays
  Coding DNA Sequence Number=SeqID_2584
gggcaaaattgtccgcctgacgcaggacggcaaggtgccggcggataatccgtttaaccatcgtcagggcgcacgcgcggagatctggtcttacggcgtgcgcaacccgcaggggctggcgctcaatccatggacgcagcagatgtgggagagtgaacacggcccgcgcggcggcgatgaggtgaacctggcggcgaagggcaaaaattatggctggccgctggcgacatacggcattgattacagcgggcagaaagtgccggaagcgcagggcagcgccgttgccggcactgagcaaccgctgttttactggcagcaatcgccggccatcagcggcatggcgttttacaatagcgcgcgctttccccagtggaaaaactcgctgtttatcggtgcgctgaaagataaaagtctgatccgtctgcgcgttaacggcgagaaagtcgaagaggcgcagcggctgctgggcgaccgtggcgaacgcatccgcgatgttcgtcagggaccggatggttatctgtatgtgctgaccgatgaggccaatggc

SEQ ID NO: 16988 - DNA, 297 bp, Zea mays
  misc_feature (243)..(243): n is a, c, g, or t
  Coding DNA Sequence Number=SeqID_2585
gcgccttttgcctgtccgggccgcgcttcccgttgttgttgttccggtccttgccttccccccggtttggccctgccccttggtccgcccgttcccccggttgccctgccccccgtgctggccgggcccggggtccccgtgccccatttgacggtgccgcccatgccggtggctccctccgtcaccgtgttgctgccgcccgtgccctccgtcccgtccgtgttgccttggttttcgctgccntcctcgccgggtgtcgttccttctgttgtgcgctgggaagtggccttaacgcct

SEQ ID NO: 16989 - DNA, 344 bp, Zea mays
  Coding DNA Sequence Number=SeqID_2586
aagagcagaagcaccccaggagagagagccggggccggcacgggcggcgagggaggacacccaccaagacggaaaagcgacgggcaacaaacggaaacgagacagagcggtcacacaagcgacgcacggagcgaagcgcaacacccgcacaacggcacgcagccaatcaacaacaaccaagggggcagcagagggagggaacacagggggacgaaccgacaagaaagcaacaagcgaggcacgaggcaccagaggcaaaagaggcagaagaggaggcggaagcagcaggagcatagcgaccaaaggacgaccaaaggcggggacgaccagagacagcaacaaga

SEQ ID NO: 16990 - DNA, 523 bp, Zea mays
  Coding DNA Sequence Number=SeqID_2587
tcaccgaggcgcagattgtggcgcagcagctgcaaccggtgacgctggatgccagcggcgagggctcgctggaactgccggtaccggccttcaacggcgagctgcggctgatggcgcaggtgtggagcgaagacagtttcggcgcggcagatcgtaaaatggtggtcgccgcaccgctggtaagcgaactggcgacgccgcgctttcttgccagcggcgatcaatcaacactggcgctggatttgaccaaccttaccgatcaacctcaaacgttgaacgtcgcggtcaacgcaagtggcttgattgcactcaacggccaaatcccggccagggtgcagctggcgaagggggcgcgaaccacgctggcgattccggttaaagcgcaggacggttttggtgagggcgacgtgcaggtgaccgtttcggggctgagcctgccgaacgagacgctggcaccgagcgtgcgccgctggaagattggcgtgcgtccggcttatccggcgcaaaccctgagtttcgataa

SEQ ID NO: 16991 - DNA, 465 bp, Zea mays
  Coding DNA Sequence Number=SeqID_2588
gacgatcccggcgcggtacgtgaagccggaggctgagcggccggcgtcggcggcgggcgaggaggagggcggcggcgggatccccgtggtggacctgtcgtcgccggcgacggcgcgcgcggtgtcggaggcgtgccgcgactggggcttcttccaggccgtgaaccacggcgtgcccggtgagctgctgcggcgcgcgcgcggcgcgtggcgcggcttcttccggcagcccatggaggtgaagcagcggtacgccaactcgccggccacgtacgaggggtacggcagccggctgggcgtggaggctggcgccctcctcgactggggcgactactacttcctccacgtccgcccgccccacctctgcgacccgcgcaagtggccccacctgccccccggcctcaggtacattaactactacttggttatttattttttattattatactccatctgaggaggatc

SEQ ID NO: 16992 - DNA, 339 bp, Zea mays
  Coding DNA Sequence Number=SeqID_2589
gagccgaagtgaaaccgtatggatcgtcgacgatgatcgctccatccgctgggtcctggaaaaagccctgcaacaggaaggcatgaccacccagagcttcgatagcgccgatggcgtgatgggccgcctggcacgtcagcaaccggacgtgatcatttccgacatccgcatgccgggcaccagcggcctcgacctgctggcacagatccgtgagcagcacccacgcctgccggtcatcatcatgaccgcccactccgacctggacagcgccgttgcgtcgtaccagggcggtgccttcgagtacctgcccaaaccattcgatgtggacgaggcggtctc

SEQ ID NO: 16993 - DNA, 236 bp, Zea mays
  Coding DNA Sequence Number=SeqID_2590
atgatgtactaccacctgagcacgcacgcccagatcaacgcgaacaaggacgccggcatggcactgcactgcacggatgcaaccgtggaccaccggtggctctgccacgataatgacaacacttcaacgtgtgaactcgctgccagtgtgctcggagctctcaactttgatcatgacgagactcgtgaggcgcacgagcctgtgcacgaccaggtcgtaacggaccatgggcagcc

SEQ ID NO: 16994 - DNA, 380 bp, Zea mays
  Coding DNA Sequence Number=SeqID_2591
gggtctcggaggatcgcttcaactaccaggagaaggcgctgccgctgatgcagcccgatccgaccgctgggctgtactccgaaaccgccacatcgaaattgtccctgttgaaccgcaccatgaacgacgtgaagaacgcgatcctggtgggtcgccagccggtgtcggactggaaggcggccgttgacacatggcgctcgggaggcggcgacaccatccgcaaggagtacgaagaggcctttgccgaagccaaggcagctggcctgctgagcaccgcgacccttcatccctcgcgagcattcgcggcactcccactcctgcatccaccggacgacttccttgccacgctccgaccgagccacccattcctgatggttgac

SEQ ID NO: 16995 - DNA, 271 bp, Zea mays
  Coding DNA Sequence Number=SeqID_2592
gactggagcatcattacccagcgcttccattgcgaacgcgcgctgtatatcgcccagcatctcggcattcaggcacagtgctacgccgagccgacgcccaagaatatgctgtcggtgcggttccgcgaggtgggtgcgcgcctcggtgcgctggcggatctctatctgatgaagcgcgagccgcgtttccttggcccgctggtgccgattccggcggtgcatgaagtgccggaagatgcgcagagctacccggcggtcacaccggaacagt

SEQ ID NO: 16996 - DNA, 527 bp, Zea mays
  Coding DNA Sequence Number=SeqID_2593
gaactgttcgaagcagccaaggccagtggcgtgcgctttgttcaggcgcaggtcgatggcggacgcctgcacggcggcggggtcagcctggccagcgaccagggctcgctcgatgcccgccaggtactgatcagttgtggcgcgcattctgcgcggttgaccgccgcgctgaccggcaagcaggtgccactggacaccgagcgcggctaccacctgatgttgcctggcgagcatcagcgtttgccgtttgcagtcacatcgctggagcgcaagttcatcatgacgcccatggccgagggcttgcgcctggccggcacggtggaattcgccgggctggacgcgccgccgagcatgcaacgggcgtggcagttgcacaggttgagcaaggggttgttccagcgggacttgagtgtggagggagcaacgccgtggatgggcttgcggccttcgttgccggattcgttgccggtgatcgaccgggtgtgtgatgggcgagtgctgttggcattcgggcatcagcacctggg

SEQ ID NO: 16997 - DNA, 407 bp, Zea mays
  Coding DNA Sequence Number=SeqID_2594
gtaaagcctgttggcaattacagcatgtggttctttcgtcaatcatattgtagacacactaccgcgagatgctatattgaccggacaattgcattaaaaaaaaaaaaaaaaaaaaaaaaaaaaaaaaaaaaaaaaaaaaaaaaaaaaaaaaataactaatcattctcttaaacaaatggggagaaaaagcaagcgtagcatgtcaggtcgtcatacggttttacaaattttagtcctcgtcgctgtcatcaaacacgacagcctttctacgatgcgaaacagccggctgcttccttggcggagaatcgtcgtggtcctcgtcgtcctcctcagacaccagctcctctacgagcctgccgatccttccgaagccgttgattccgatcttaatcttgcccatggcgact

SEQ ID NO: 16998 - DNA, 116 bp, Zea mays
  Coding DNA Sequence Number=SeqID_2595
atctcattttgagagccacggctactagggccggcaatgttcagcaggagcacctcccccagcaagcacccccttggaggcgacgggtcggtggacaactgcctggccgcgtgcga

SEQ ID NO: 16999 - DNA, 193 bp, Zea mays
  Coding DNA Sequence Number=SeqID_2596
atgggaaacgccctcgggtgcgcggggctcggcgagcggctggcggccggcgccagggacggcgacgcggcggaggtgcggcggctgctggacgccaacccggggctcgcccgctgcgccgccttcggcagcctgagctcgccgctccacctcgccgccgccaaaggccaccacgaggtacgcaaaaaaatct

SEQ ID NO: 17000 - DNA, 257 bp, Zea mays
  Coding DNA Sequence Number=SeqID_2597
ttttctcggaagcttctgaatttagcgcatcgagcagcctactttccagagtgcaccctattgatggatagcacaattgacatccttggtcaacagattgaagacagaattaccacatgcacaaatgacgatcaaagtgtttctcagagtgatcttgctccaccaaatgacacattgagtaatgtacaattgaagaaaaaagaggttcgcataaaaacttcaaagagaaaaaagcttggctgggaagaaaaacacaa

SEQ ID NO: 17001 - DNA, 94 bp, Zea mays
  Coding DNA Sequence Number=SeqID_2598
ctatcgtcgacgtcagcaagctgtggcccgcagacgaggcagacaagctccgctaggcggtacagacctggaggcttcatctggctaccaacca

SEQ ID NO: 17002 - DNA, 184 bp, Zea mays
  Coding DNA Sequence Number=SeqID_2599
gccatggtctatacttttcaaagtacatggcactatgttatcagtatctgaagatgggtcctcacatctttgtgagatatcacgtgtgtgccattaacgcgggcgttgttggtgacctctctagagcactctagacaaacttttacccttctgtaatggcattttgacctaactcctgaaggac

SEQ ID NO: 17003 - DNA, 591 bp, Zea mays
  misc_feature (143)..(143): n is a, c, g, or t
  Coding DNA Sequence Number=SeqID_2600
gactctggccagaggagccgacaacgtggaacagaggaggcacgacacatccacccgagaaggccgcgctagatccagccaggaagacggcaaatccgaccgtgaaggtcgcgacagcgttggatccggttgtgacggcgacnaagaggatgggagggcggctgggcggttcaggaaagcagggggctgcgccggatctagccaggcgaaggagcgacgtcgacgacaggtgaagcttgaaggggctgggcaaggggtggcggtcgtgcctgtacgtgtggctggcctacggcgacgcccgcacgctcgcaaggctagcccgcaacagcggcggcgtttgcacggcgcccgtgctctctgtcgcggctagggaaacgtgtgtgcatgaggcaccacgacaggggcaaggaggcaggggcgccagatctggggcagggaggcgagggacaatgacgagggcctcgagggccatggccgacgacgactctgccaccaacgatgggttaggggaggcagggctggagcgatgggttaggggaggcggagttggaggcagagggatgggggtcgccccaggagtgagggacaaac

SEQ ID NO: 17004 - DNA, 318 bp, Zea mays
  Coding DNA Sequence Number=SeqID_2601
ttggcctctctgtgaccaccgtgagccgcgcgctgaatgggtttgatgatgtcgccgctgctacccgcaaacgcatcgaagaggaagccgaccggcgcggttatcgcccgaatgccgccgcgcgccgcctgaagaccggccgtgccaatgcggtcgggctggtctttccggtcagcaatgcctcactcaacgacagctactacagtgaaatgctgctgacgctcgatcagcgccttgccctgcacgagatcgatctgctgttgctccccgacaaaccgcaggatcagcagcgcaatttgctgcgcatgctgcgcagcg

SEQ ID NO: 17005 - DNA, 191 bp, Zea mays
  Coding DNA Sequence Number=SeqID_2602
gggcggcaagctggcagccagaggggaccccccgacacctggactgggatacgaccaaccaagcggggcccgacgggcggggggcgccatctagggacagtgccctccacggaacacagtcccctggttgagggggcacccaacggccaagcaccagcgggccgcggcatgccggtcgctccacaggcggg

SEQ ID NO: 17006 - DNA, 103 bp, Zea mays
  Coding DNA Sequence Number=SeqID_2603
tgggaattactcaacctcaatggcccagaattactcaaccggacatccaaaagtacatgaaagtctttggggatgttgatagggacagagatggcaaaataac

SEQ ID NO: 17007 - DNA, 243 bp, Zea mays
  Coding DNA Sequence Number=SeqID_2604
atgacctatcgtcgccctgtgctggccgctatttttgatatggatggcttactgatcgattctgaaccgctatgggatcgcgccgagctggaggtgtttgccagcctgaatgtggatattagccgccgccacgagctgccggatacgctcggcctgcgcatcgatcaaaccgtacgcatgtggtacgaagcgctgccgtggaacgggccggatcaggctgaagtcactcagcgcattattgcc

SEQ ID NO: 17008 - DNA, 191 bp, Zea mays
  Coding DNA Sequence Number=SeqID_2605
gtatccgcatccgtatccgtggcaaagcagcagcagcaggaggaggaggaggcgcgggcgcgacggggccccgcggcagcctcaggctcgccgggtcgtggagagcgcagcagcaggccccggccacggcgacgacaacgcagcagcctgacaacgtctccagtgctaaagtcatatacacggctcgctag

SEQ ID NO: 17009 - DNA, 517 bp, Zea mays
  Coding DNA Sequence Number=SeqID_2606
ccaagtgctacatcctcgacatgttcccctaccccagtggggctgggttgcatgttgggcacccccttggatacacggcaactgacattctgtcaagattcaagcgcatgaaaggcttcaacgttttgcatccaatgggatgggatgcatttggtcttcctgctgagcagtatgctattcagacgggaacccaccctaagattaccactgaaagaaacattgagcgctttcgcacacagcttaaatcgttgggtttttcatatgattgggatcgtgaaatctccacgacagagccgggttattataaatggacacaatggattttcctgcaactgttaaagagaggacttgcttatcaggctgaggtacctgtcaattggtgccctgctcttggaactgtcctggcgaatgaagaagtagtagatggtgtgagcgaacgtggtggctatcctgttatacgaaagccaatgcgccagtggatgctaaggataacatcttatgctgatcgtcttcttga

SEQ ID NO: 17010 - DNA, 599 bp, Zea mays
  Coding DNA Sequence Number=SeqID_2607
ttccaccgtctgtcgttgcgcgcatcgcgtgcgctcggtgcgctggccgccgcgttggtgctggccgcgggcgcgttcggcgcggcgcccgcgcacgcggagcgcctgaaggacctcgcgcagatccagggcgtgcgcgacaacccgctgatcggctatggcctcgtcgtcggcctcgacggcacgggcgaccagacgatgcagacgccgttcacgacgcagacgctcgcgaacatgctcgcgaacctcggcatctcgatcaacaacggttcggcgaacggcggcacgtcgtcgctgaacaacatgcagctgaagaacgtcgcggccgtgatggtgaccgccacgctgccgccgttcgcgcggccgggcgaggcgctcgacgtgaccgtgtcgtcgctcggcaatgcgaagagcctgcgcggcggcacgctgctgctcacgccgctgaagggcgcggacgggcaggtgtatgcgctcgcgcagggcaacatggccgtcggcggcgcgggcgcgagcgcgaacggcagccgcgtgcaggtgaaccagctcgcggccggccggatcgtcggcggcgcgatcgtcgagcgttcggtgccgaa

SEQ ID NO: 17011 - DNA, 400 bp, Zea mays
  Coding DNA Sequence Number=SeqID_2608
ggaacacgtggagtgacggcaacacgtcctgcagggcctgcccgcccggctcaacgcccaactacggcgtgcagatagtgcgctggatagagctgcccacctacatgagcgccgcctgcctagagcctgacgggtcgacgtgccagagcggcgcgggctggcaggtggcggggacgtacatacacacgacgcgccaccactcccccgccgcctacctgctgctctcgctcaccgtgtccggattccgctccaaggggggcgtgtccgccggccaccgcctcgaggtgggccgcgtcgagttctccttcgagctggactgcgccgcggagtgcgagttcgtcttcctgcagaccagcgactccaagggcatgacgttgatcgagagctggtcgcagcgcca

SEQ ID NO: 17012 - DNA, 322 bp, Zea mays
  Coding DNA Sequence Number=SeqID_2609
gcaatttgccaattctcaagtgcgcacgttgcatcatgaatagagtacaccaaacctaaagtgaaggacgccagtgttacatagttctggagtacaccaaccaaaaacatcagaactaaccattagttgcatcgttggaatgtctctaaataattctagcagctaactattagctctaccacatttaaacagggcatcaacaagtgaatgatttacaaggtgaatgttttactgcactgcagtaaccgggtatcttaccttgaaaacatctggaaaggtagttttcccctggcacacacactgcgcaccgacttagaagaaa

SEQ ID NO: 17013 - DNA, 473 bp, Zea mays
  Coding DNA Sequence Number=SeqID_2610
cagtccgtcgggatgagcgatgcgccgcccagcagttccccggtgtcggcgtcgaacaggatcagcgagcggacctcgggcggcaggacgtgcgggttggcgaggacgagggactgcgacgaggtgtcggccgggatgtcccccaccacgaccggtgagccgtcgtcggcccagaaaccccgcttcgcaccgatcacgggcttcgaggacagcaccacgcggagcgtgcgcggcggcgtgccgggggtcgcgacttcgaggtcgtcgaaggtgatcaccaggccgatgtcggggatgtcctcgatccggaccgtccccccggcgtaccggttgatcgggagcagcgtgccggagacgggcgggacccgctgccaccacggagcgatcggtgacccgtcggtgtccgactgcgacccggagtccggctcggggacgggcgcgccgagggtgttcgagggagtcgcgagtccacc

SEQ ID NO: 17014 - DNA, 198 bp, Zea mays
  Coding DNA Sequence Number=SeqID_2611
gctacatacatacattatcccacaaccacctccaagatgaacattttacacttgagtttggttgttaaaatcactaactccctcaagaaggctggtcgtcagttcgccaccgtcaagagagtagaagatgccaaggccaacacatctccggacgggacgggcacaagacaaccatcggagtcggaggcacccgcaccg

SEQ ID NO: 17015 - DNA, 508 bp, Zea mays
  Coding DNA Sequence Number=SeqID_2612
accaaggttgccgtaggtgtgattgtggcgctcggcgtaatctggactggcgcagcgtggtttaccggtaaacagctggaaagccacatggatgagatgctgcaaaatgccaacagccagatcaacgcgtacgcgccgaatagccgtctgacgctcagctatcaggattaccagcgtggcgtattcagcagcaaaaccaaactggtgattcaggccagttcgcagaccgaagacaatccgctgctgaagccgggtcaaagcatcgtgctcaacgaaaccatcgaccacggtcctttcccgtttgctcagctgaagcgcggcaacctgatccccagcatggcctcggtgcacaccgaactggaaaacaccgatgcggtgaagaaactgtttgaactgactcagggcaaatcgctggttaatgccgatacccgcgtcgggtacagcggcgcgaccgataccgcgctgcacctgctgccggtggattacagcaatgcgcagaccggtgatc

SEQ ID NO: 17016 - DNA, 594 bp, Zea mays
  Coding DNA Sequence Number=SeqID_2613
gaaccgtatgatgagcagctggcgcgtgacggtcgggtgatggaaattctcagcgagcatcaatgtcagggctggctggagggctatctcctcaccggacgacacgggctgttcaactgctatgaagcctttattcatatcatcgattcgatgttcaatcagcacgccaaatggctgaaggtgacgcgcaaactgggctggcgccagccgatttcgtcgctcaactatctgttgtcttcacacgtctggcgccaggatcacaacggatacagccatcaggatcccggttttatcgatcacgtggcgaataaaaaggcggatatcgtgcgcatctatctgccaccggacgcgaataccctgctgtgggtgggcgatcactgtctgcgcacctgggatcgcatcaacgtgattgtcgccggcaagcagccgtcaccgcagtggctggacatcgacagcgccattgcccactgcgaggcgggtatgggcgaatggcgttgggcgagcgatgacggcgagccggatgtggtgatggcctgcgccggcgatgtgcccaccatgaaaacgctggcggcggtggatctgctgcgaaactac

SEQ ID NO: 17017 - DNA, 375 bp, Zea mays
  Coding DNA Sequence Number=SeqID_2614
ttcctcgagcgggttgccgtcgatcggcgagtccgacctgtacgaccagatctgcgaccgactcggcgcgagcgacgacggcgaacgagccggagcgatcgagctggcgctcgaggggctctacctggcacgacgcatcagcaaggagtccggcgggggcgaagccgtctatggctaggcagaaccgacggctcagccgcgatgcccgctacggcaggtacgaggacggtccggacccgctcgctcccccggtcgacctcgccgaggcgctcgacgccatcggcgaggacgtgatgggcgggacctcgcccgagcgcgccatccgcgagttcctgcgtcgtggcggacgcgatcaggcgcggtctcgacgacctg

SEQ ID NO: 17018 - DNA, 64 bp, Zea mays
  Coding DNA Sequence Number=SeqID_2615
ctctttttactcctgaagctaatcctctggaaagtacggtagtagcgtccaaatgtgcaaatgt

SEQ ID NO: 17019 - DNA, 113 bp, Zea mays
  Coding DNA Sequence Number=SeqID_2616
gaaaacgatagatctttccctgatatcaccggtttcgtgcgtgcattgcagtacaaggaggtcgtgggatcaggggccttcaagacagtgtacctcccttccgctacaaaggt

SEQ ID NO: 17020 - DNA, 502 bp, Zea mays
  Coding DNA Sequence Number=SeqID_2617
atgtcggcaacgctggataatcagcagctacgcacgctgctgcccgacgcgccgtttattgcgtcacaggggcgcagctttccggtgattcgacgttacgcctcgctcaatccgcagcagcggtttgaagaggcagtggcgcgcgaggtggcacagttgctgcgggatgagcccggttcgctgctgctgtttctgcccggcgtggcggagattgaacgggtgaagcgtgaactggcgtcgcgcgtcagtgatgaggtggatttatctcctttatatggtgcgctgtcgctggaggcacagcggcgggccatcctgccggccgcgccgggccggcgtaaagtggtgctcgccaccaatatcgccgagaccagcctgacgattgaaggcatccgtctggtgatggacagcgcgctggagcgcgcggcgcagtttgacgtgcgcagcggcgtgacgcgtttgctgacccagcgcatcagccaggcatcgatgacgcagcgcgctg

SEQ ID NO: 17021 - DNA, 566 bp, Zea mays
  Coding DNA Sequence Number=SeqID_2618
gacaacaagccgcagtccggcaagggcttcgaggccgccgtggcgtacgccgtcgcgaaggagatgggctacgcgaagtccgacgtggtctggaagcggagcaccttcgacagcgcgatcgccccggggccgaaggactgggacctcaacatccagcagttctcgatcgacgccaagcgcaagaaggccgtcgacatgtccacgccctactacacgaccacacaggcggtcgtcacgacgacgtcctcgaaggccgtcgaccgcaccacgatcgccgagctcaagcaggacgcgatcggcgtcgccaccggctcgacctcgatcgacagcgtgaagcgcgtcctcggggtcaccccgcaggtcttcaactcgaacgacgacgccgtgctcgcgctcaagtccgggcagatcgacgccatcgtgaccgacctgccgacagccttctacatggcgtccgcgcagctcgacgacggcaccgtgtccgcgcagttcccggccgacggcaagggtgaccagttcgggttcgggctgccgaaggactcggagctgacgagcaaggtcgacaa

SEQ ID NO: 17022 - DNA, 315 bp, Zea mays
  Coding DNA Sequence Number=SeqID_2619
tggtcggtttgctcgaatccatgatgacggcgagcgtcgtcgacgaatggaccgtgaccacgagttccaaatcccgcgaatgttcaggtctcggcctcgcgaacctcgccgccggtcttttcggtggcatcgcaggctgcggcatgatcggccagacggtgggcaatctgcgctatggcgggcgcgggcggctctccaccctcacctccggcctcttcctgcttttgctcatcgtggcgctgcacccctgggtcgcccgcattccggtcgcggccctggtcgccatcatgatcatggtctcgatcagcaccttct

SEQ ID NO: 17023 - DNA, 286 bp, Zea mays
  Coding DNA Sequence Number=SeqID_2620
ggacaaactgactatcgctatcgtgggcggcggcccggcaggcctcacggcggccgtgattcttcagcgccacggttttaacgtaacggtgtttgaggatgagccggcggatgctgcacggagtcagggcggctcgcttgatttgcatgctgacagcggccaggcggcgctgcgcagagcgggcctgctcgaacagttcatcaacatcgccaggcacgaggatcaggaaagccggatgctgaattaccttaccggagacattgaggtcgacagattcacaccggaa

SEQ ID NO: 17024 - DNA, 213 bp, Zea mays
  Coding DNA Sequence Number=SeqID_2621
cgcgcgctttgagctccaagaggtatccttccttctggaaggacaacaatgtgcaggttgcgatccgtatccggccgctgagcggcagtgaggtgtcgatgcaggggcagaagcggtgcgtcaggcaggatagtagccagagccttacctggatcggacaccccgagtccaggttcactttcgatcttgtcgctgacgaacatgtcacgcagg

SEQ ID NO: 17025 - DNA, 533 bp, Zea mays
  Coding DNA Sequence Number=SeqID_2622
aacctgctcgcggaagacgtgagcctgccggccgccgtgctgtacgcggaccgcatcgaacacaatctgaactggatgcaggcattcgtccagcagtatggcgcgcagttcgcgccgcacggcaagacgacgatggcgccgcaactgttccgccgccagctcgccgcgggcgcgtggggcatcacgctcgcgaccgcgcaccagacgcaggccgcgtatcacggcggcgtgcggcgcgtgctgctcgcgaaccagctggtcggccgccagaacatgacgatcatcgccgggctgctgtccgatcccgacttcgaattcttctgcctcgtcgattcggcggacagcgtcgaccagctcggccgcttcttcggcgacgcgaagaagacgctgaacgtgctgatcgaactgggcgtgccgggcggccgtgcgggcgtgcgcgatgcagtgcagcgccaggccgtgctcgatgccatcgcgcgctatccggacacgctgaagatggccggcatagaactctacgaaggcgtgctgaa

SEQ ID NO: 17026 - DNA, 385 bp, Zea mays
  Coding DNA Sequence Number=SeqID_2623
gcccgagaatcgttgagttctatgccaaaattattccccgcgctgctgcttggtctcagcgtcctgagtgcctctgcgctcgccgcgcccgcggactctatccgccacagcggctttgtctattgcgtaaacggcacggttaacaccttcaacccgcagatggtcagcagcgggctggtggtcgatacgctggcggcacagttgtatgaccgcctgctcgacgtcgacccttatacctatcgcctgatccccgatctggcgcagagctgggaagtgcgcgataacggcgcgacttaccgctttcatttacgcaaagatgtttcgttccagcacaccaactggtttacgccgacgcgcaaaatgaacgccgacgatgtggtcttca

SEQ ID NO: 17027 - DNA, 119 bp, Zea mays
  Coding DNA Sequence Number=SeqID_2624
actcaccacgcgcagagtcacaggtctgcccccccacccccaccctctctggctctctgcccccagtgcagcgcagccgggcgtggccccagaaacttgaaatgcaggtccggttgatg

SEQ ID NO: 17028 - DNA, 475 bp, Zea mays
  Coding DNA Sequence Number=SeqID_2625
gtcgcatcccgttttgatgacaatgtctttgtcactgttgttgcatctgtccaatatcgcgctcttgctgataaggcaactgacgccttctacaagctgagcaacaccagggaacaaatccagtcatacgtatttgatgctctagccgctactctgctcttcccccagcgtggctgttttgcacttttgcggtcgtcagtgcgggagtggacaaagctaaagacttgggggctggttcagacggggatcgacatgtgtctagggttaaggtttgagagcagtcacggacgggcggtggggggagctatgtctgaaccgaatagggccatgagaaggcggaggatctcctctgcaaacacgcacgacggtgggatgggcaggaacttacctcacgcggcggcggacggtgagaaagcatcgcggcgcgcgcgcagcaagggaggagctcggcggcaccttggttcgggcgagacat

SEQ ID NO: 17029 - DNA, 498 bp, Zea mays
  Coding DNA Sequence Number=SeqID_2626
ggcagtgctgcgagctgacgtatctcgatctcagcaggaacaacctgtctggggtgatccccgaggcgatcgcgagcatccgggtgctgaactacctgaacctgtcgcggaacgcgctggaggacgcggtcccggcggcgatcggggccatgagcagccttacggcggcggacttgtcgtacaacgacctgtcggggcagctcccggacacggggcagctggggtacctgaacgcgacggcgttcgcgggcaacccgaggctgtgcggcgcggtggtgggccgtccgtgcaactacaccggcgggggcctgggcgtgacggcccggcgcggtgttggggccggggagctgaagctggtgctggcgctggggctcctcgcctgctccgtggggttcgcggcggcggccgtgctccgcgcgcggtcgttccgccgcgtggacgggagcggcggcggcggcggcaggtggcggttcgcggcgttccacaaggtggacttcg

SEQ ID NO: 17030 - DNA, 490 bp, Zea mays
  Coding DNA Sequence Number=SeqID_2627
agcacgacttctacaccgcgaagggcggcaaggacgtcgccgcgccgggcaacccgaacggccgcgtgcgcgcgatgctgtcgccgaagaacggcggccccgggccgctgaacggcgcgccggcgaagctgtcgccgtcgaccacgatccagggagcgccaggccaatgaacgcgctcccgaaccgccagccggccggcacgacgagctcgctcgtcgtccgcaacctgaagaagcgctacggctcgcgcacggtcgtcaaggacgtgtcgctcgacgtgaagagcggcgaagtcgtcggcctgctcggcccgaacggcgccggcaagacgacgtcgttctacatgatcgtcggcctcgtgccgctcgatgcgggcgagatctcgctgaacggcagctcgatcagcctgctgccgatccacaagcgcgcgtcgctcggcctgtcgtacctgccgcaggaagcgtcggtgttccgcaagctgaccgtcgag

SEQ ID NO: 17031 - DNA, 265 bp, Zea mays
  Coding DNA Sequence Number=SeqID_2628
aattggattcaactgctggcgctgtcctagcctatctttcgcctcgaactggcgatggtgggccggctgtttgcgcaggacccgcagctgtacgccgacatcatcatgtcgtcggaaagtaatctcgcgctaattaagcgctactatcagcgttttggtgaagccatcacgctgtcaagcagggcgataaacaggcgttcacaaccgcctttgagcgtgtggaacagtccatttacgaatacttcatacgcttccttgtcgagat

SEQ ID NO: 17032 - DNA, 131 bp, Zea mays
  Coding DNA Sequence Number=SeqID_2629
gacatcacctatgtcgtctagaaggcgtgccttcatatgcacgccccgtgggagccacatctcatcgctatgaagtggatcctgtggtacctccggggcactatcgacttcgtcgtcaggtaatttatggg

SEQ ID NO: 17033 - DNA, 264 bp, Zea mays
  Coding DNA Sequence Number=SeqID_2630
tgcagggacaactttactaccttgtatctcatcatgcagtacttatggttgtccctttggtgagggctgccattttgtccattacttccctggtgactaccgggccgtttcagaaatgaccaacctgggtggcgcaacaatcgcacctcctggaggaatgatgatggatgggccacctacacccatcgtgaagactcgcttgtgcaacaagtacaacactgcagtgagcttgaacatctcgcagcgattgcacaaaaatagtta

SEQ ID NO: 17034 - DNA, 511 bp, Zea mays
  Coding DNA Sequence Number=SeqID_2631
ttgtttaccagcctgacgcagtcggcggaaaccgccatctgttacaactgcccgcccgagtggcccgactggggcactcagctcaaagcgattgccagagacaccggcattcaggtgccgcaggacaacaatcactccggccaggcgctggcgcagctggtggcgcagcagggcaatccggtggcccatgtggtctattacggcgtcagcttcggcattcaggcgcacagcgccggcgtggtcgccagttaccaaccggcgcactgggatgacattcctgccggcatgaaagccagcatcggcaaatgggtggcgctgcactcgggcaccatgggctttatggtcaatgtcgatgcgctgggcggcgcgccggtgccgcaatcctgggacgacctgctgaagccggaatacaaaggcatgattggctatctccacccggccagagcctttgtcggttacgtgacgccggtggcggtcaaccagaaaaagggcggcaacatgcaggacttca

SEQ ID NO: 17035 - DNA, 202 bp, Zea mays
  Coding DNA Sequence Number=SeqID_2632
caggagagacggacacgcccacacggcgacctgctgcgcctgggctgtgctgcgcggcgcggcgtgcgctccggcgccgtctaacgacgcggttacgttacattacattacattaataggacgcgccggctggctcgccttgtcgccgtccggccaggtcgaccggcgggcgggcgctcgctcgcccataggcaggcaggca

SEQ ID NO: 17036 - DNA, 321 bp, Zea mays
  Coding DNA Sequence Number=SeqID_2633
aagtggcgccgcacggcatcgtgctgcactcggtttcggtcggtgaaacgctcgccgccgtgccgctggtgcgcgcgttgcgtcatcgctatccgacgctgcccattaccgtgaccaccatgacgcccaccggctccgagcgtgctcagtcggcgtttggcaaagacgtgcaccacgtctatctgccgtacgatttgcccggctcaattaaccgtttcctcgataccgtcgacccgcggctggtgattatcatggaaaccgagctgtggccgaacattattcgcattctgcatcagcgccagattccgctggtgattgcca

SEQ ID NO: 17037 - DNA, 178 bp, Zea mays
  Coding DNA Sequence Number=SeqID_2634
atgacggttgttacggtgattcggttcgtaacgaacccgggaaagaaccttctggcgaggcggccccacggatcagtgaagcagagtcacggtgcaagcgagttcaagcagatgacgaagggtttcgtcgagcttgtgcacgagatcgaggctgaaccggtggaagacgcatccgaca

SEQ ID NO: 17038 - DNA, 284 bp, Zea mays
  Coding DNA Sequence Number=SeqID_2635
ccagtggattgagaacccggaatgattcctagctggattggccagaccaaggtgaagcggtactggccgagaaagccgcctgagtgagccgacgaagccgatgaggacatcgatcttaggacggcgcaggtctccctcgacaaggcgttccccaaggacgaagacggtgacgtccccgcgaaggatgaccgccggctccgtcgcctcgcggaaactcgtgcgaagaataaggaagagctgagggcagatcaccgccgcatacggcaggcagagattgtgtcgac

SEQ ID NO: 17039 - DNA, 349 bp, Zea mays
  Coding DNA Sequence Number=SeqID_2636
gaggctggcgtcaccatggctatctcttacagcacgctttgggacaatccatcggctggaacgagggacgtaattagctatgatcgtattaccatgcgaaataccgacgacaaacccaatctggcgaactccgacatcccatgattccgtgcataccgcatgctgtacctgcacccgctgtgcgacttacctgcaatctacataaacaaccatttcccggtcaactacggatgagacaccgtccgtctgtcagcggacccggacactttgcacagaatccacgagctgaaggcgatgcactgccggtgggccatactcggcgcgctcgagtgcttgttcactgagctga

SEQ ID NO: 17040 - DNA, 464 bp, Zea mays
  Coding DNA Sequence Number=SeqID_2637
tgagctacagcgacgttaatcccgtgacgctggaagaggatgaaatcagcaccagcccggcacagcgcatcgattatccgttactcaatcgcgggctggctggcttacaggatcgcgccgcacgcgtggtggtggaaggtacgggcggctggcgcagcctgatgaacgacttacggccgctgtcgcagtgggtacagcaggcgcaactgccggtggtgctggtggtgggcattaaagagggttgcattagccacgctttactgaccgccgaagcgattgccgccgatggcctgacgctggcgggctgggtcgccaatcgtatcaatcccgggctggcgcactatgctgaaatcattgatgttctgcgcgataagctgaacgcgccgctgttgggtgaactgccttatttgccgcgcgccgaacagcgtgatttgagtggttatctggatattacgttactcggg

SEQ ID NO: 17041 - DNA, 448 bp, Zea mays
  Coding DNA Sequence Number=SeqID_2638
tgccaagtcaagagctcgttctattgtccggttgatggatgtaaaccaatggcctggcggttcgtagccgccggccacttggccaaataatggtagtctgtgctgtgtctcgtctcgtgagccgacaagagttgccaagctgccccatatgatgcccgagcatgcatagagggtctagagcatgtggtctcctgtgtcggtgtttgaagtaggcgttgctagggaggcccggctccctttcgatctgaagtggcggccaatgtcatggtatcctgcttcttttctgcagttatgttgaagaaaaacggctttaattagccggtaagtagctgttgctgccggttgtcttcttttcctttctcaggtttcctctttgcttctcttctgagctggcagctccggtctgagctggcagtaaacctgaagcatcccatgcaggtctgcgcgc

SEQ ID NO: 17042 - DNA, 160 bp, Zea mays
  Coding DNA Sequence Number=SeqID_2639
cactgggtctcgtggctgaccaggtggacgtgtcgctgctgccggaaagcgtgtagggcgtgcgggtgaagggtgtcgtgtaccggcggctgccggagcccacggcgacgtcgccgatcatcatgagccgccggctgcacggcgaaagcgcggcgacgac

SEQ ID NO: 17043 - DNA, 181 bp, Zea mays
  Coding DNA Sequence Number=SeqID_2640
atcgatcaaggccacttcttcaaaaattgttccacaacacaaatatttaccaatctatacatccatacatcattcaggtctgtggataagactcatatgaatgaacagtcgtacagaggtcattttgtatttacattaaagatatccgaatctaatgagaaaacaggccaacctggcaaaa

SEQ ID NO: 17044 - DNA, 408 bp, Zea mays
  Coding DNA Sequence Number=SeqID_2641
gctgaaacgcatgccgtggtcggaaacgctggtgatggtgctgtccgtcgccgtcacggtgtggaccggtaaccttgcgcttggcgtgctggtgggcgtgatgctggccatgatgctgtttgcgcgccgcatcgctcacgtgatccatgccgagcgccagctgagtgacgatggcgagcatgtgcactacacggtacgtggcccgctgtttttcgccagcagcaacgatctgtttgagcattttgactacggccacgatccgcagcgcgtgaccatcgatttgacccacgcgcagatttgggatgcctccagcgtggcggcgctcgacgccattgagtaccgctaccagcggcacggcgccagcgtcaccttcaccggcctggataaccgcagcagcgatttccgcga

SEQ ID NO: 17045 - DNA, 548 bp, Zea mays
  Coding DNA Sequence Number=SeqID_2642
gatgatcgattacgagccgccgaagcagccgccgacggtgcagctcagtatcgacaaatttgaccagtttacgctgtacagcaagctgcgcgacggcgtgctgctcaacaaggcagactcgggcgcggcggtgctggtgaagatcgacaccggcgagatcctcgctatggcgtcttatccatcgttcaaccccaacaattatgacaacgccacgccggcgcaaatgcgcaataccgccatcaacgacagctacgagcccggttcgacggtgaagccgctggtggtgatggaagggctgcagcgtcatctggtgcgccccgattcggtgatcgacaccacgccctacagcgtcaacggccacctgatccgtgatgtcggccactggccgcggctgaccatgaccggcattttgcagaaatccagcgacatcggcgtgtcgcacatcgcgctggcgatgccggcggaagcgctggtgaacacctatcaggcgtttggactcggcaagccgaccgggctggggctgaccggtgagagcgtgggctacttcc

SEQ ID NO: 17046 - DNA, 408 bp, Zea mays
  Coding DNA Sequence Number=SeqID_2643
tgaagctgcccgcaataaagtgctggatcgcctggcgcagtatcaggtgtggccggcgcataccgtcgccgaaatcaaacaggagccggtatggctgccgccgcgccagctgccgcagctggcaccgctgctggcgcgccggctgctgtcgctgtcgcccgacagcaaaattacctccacgctggatgtgtcgctgcaacgcgaactggagaacctcgctgcgtcgctgcaaacccggctgccgccgcgcacctcgctggcactgctggttgtcgaccacagcagcatgaaggtgcgcggctacgtcggctcggtgtctttcaatgacgacagccgctttggccatgtggatatgattgccagcgtgcgttcgccgggatcgctgctcaagccgtttgtctacggcat

SEQ ID NO: 17047 - DNA, 412 bp, Zea mays
  Coding DNA Sequence Number=SeqID_2644
acagtttgctgtcgtacgttggcgtggaggacaagaccagcggcaaacgctgggggcgtgtcaccaaaaacggcggcaacgccatgctgagcttcgataacggcgacgcgggtttctacgtcggcggcggcgcttacagctatctgggcgagaacgtggcgagcaacaacagcgtgcaggccacggcgggcgcttacgtgcggccttaccactccgacgaccgcgagctgaaggtcggcatgagcctgtcgtggatggatttctccaaaaacctgagttacttcagctacggtcagggcggctatttcagtccgcagaattatgccgcggtatcgttccctgtcgacttcagccgcaagtttgatgacctgaaagtcaacgttggcggttcggtcggctatcagtcatacag

SEQ ID NO: 17048 - DNA, 479 bp, Zea mays
  Coding DNA Sequence Number=SeqID_2645
ggctcgaggaacgaacaccagattaccttggacgatagcacgggagatgatcatgtgagggcatagggctctaacttgggcataattactaagcccaggggggggcgtgcccaaacggggctgagcactggctaggaacttgttgctatctcaactggtgaggaaccatatcaggctttaactgaactgaatggcacaatgatggtctggaaagccatcggatgttgcatatgcacagctcaaataagatagaggagcgaggctgcaagcacagttttatcagaggcgccctgctgtaccaatgacacctactctagccccacgccttgcaatgtactctccgatggctcctaagcaactattctatggacaagcgccaccagctatgaggccactgcagccaggatttgctgttcagcaacagcttgctccaggcatgaggcctgggggtcctcatatgccaactggttatgttccgg

SEQ ID NO: 17049 - DNA, 350 bp, Zea mays
  Coding DNA Sequence Number=SeqID_2646
tgttcgccagcgtggtggaaaaccagggctattcgcgtgcgcagcaggcgctgaacatgaccacgccggccatcagcgcctacatgagtgaactggaaggccagctgggctttattctgtgccagcgcgggcgcgcagggtttgcgctgaccagcaaaggcgaacagttctacgcctatacccgggaaatgctggcgaccctgagcggctggcagtcgcaggtggagacactgaaaagcgcgcagggcggcacgtttgcgctcggcgtggtcgacgccaccgtcaccgacagcactctggatctgccggcggttatcgcccgttttaaccagcgctttccggcggtgttt

SEQ ID NO: 17050 - DNA, 124 bp, Zea mays
  Coding DNA Sequence Number=SeqID_2647
tgcagcgagcgcttggcccgcagcagccttcacatggcttcggcctcggcctccaccaccagcggcttggtgacgcttcttctcctggcggcatggaacccgacgcggtgatgatgccgcctct

SEQ ID NO: 17051 - DNA, 511 bp, Zea mays
  Coding DNA Sequence Number=SeqID_2648
gagcctcggtacctcctgcggcctgcgccccgcacgcgctgcgccctggttggccccacccgccagtcggccccctccccaaaaccacctttttcctctacccccccccccctggggcaggttctctcctccttttcccccgcccggttcgcccgtcgccgcccggagtcgaaccgccatccgccgcttcgtccttgcccgcggtgagacctctccctcctctcccccacccccttctccttccttggcccggcgcggctccctccctctcccgacgcagtggccccggcacggcctcgcccctgccccgcgcggcgacgctcggtccggcacgcggcccgtgacctcggcatcccgcccccgccccgacgcacccccctccctccacctagtgtctgccccggcgcgccctccggctatggcgtgcccgtctcggcgcgcgcggcccaccacgtcctggcacgcgcggccccgcctgttccagcgcgctgcctcacctctgatcctgctt

SEQ ID NO: 17052 - DNA, 354 bp, Zea mays
  Coding DNA Sequence Number=SeqID_2649
tgaaaacagtttccctgcatcatcgtccgaccgcggacggcccaatctgcacccgcgcagcggtcgcgcgtcgcgcgtgctctttctgctgctgctgctggccgggctggtgttcaccggtatcaatctgttcaacgacgtggaagagaccggcgcggtcgtcaccagctatacgccgtttctgctgcttggcgtggcgctgctgattgcgctcggcttcgagtttgttaacggctttcacgataccgccaatgccgtcgccacggtgatctacacccactcgctgtcgccgggcgtggcggtggtgtggtccggcttgtgtaatttccttggtgtactgctctccagcggcgt

SEQ ID NO: 17053 - DNA, 397 bp, Zea mays
  Coding DNA Sequence Number=SeqID_2650
aatccagtgggcagaagttcattgcccgcaatcgcgcgcctcgcgttcagattgaatatgacgtggaaatttatggcgcggaacgcaaaattcagctgccgtttgtgatgggcgtcatggcggacctggtcggtaaaccactcgagccgcaggcgagccttgatgagcgtaaattcctggaaattgatatcgataacttcgatgagcgcatgaaagcgctgaagccgcgcgcggcgtttcaggtggataacacgctcaacggcgaaggcaaacttaacgtcgaactgacctttgagagcatggacgatttctcaccggatgcgattgcccgcaaagttgaaccgctgagcaacctgctggaagcgcgtacccagctttcgaatctgctgacctacat

SEQ ID NO: 17054 - DNA, 131 bp, Zea mays
  Coding DNA Sequence Number=SeqID_2651
ggtggccggagagcggaacgacgacgagaggcagcctcacacggagatggtgggctcgcaactcatcaacgccgggtaccacgtggtcgcgaagcatgcgctcagtgtcagggtcaatcgcgtcgtcttct

SEQ ID NO: 17055 - DNA, 358 bp, Zea mays
  Coding DNA Sequence Number=SeqID_2652
tttgtgacgcgttatatcgccattgactggggctccaccaacctgcgcgcctggtattaccgcgccggtgaatgcgtcgatgagcgccgttcggaagcgggcgtgacgcgcctcggcgaccgcacgcctgctcaggtgtttgccaccattaccgacggctggccggtggccgaagtcccggtgatcatggccggcatggtgggcagcaacgctggctggctggcagtgccttatctcgcctgcccggtggcgctcaatacattaagcgatcgcctgacctgcgtggaaggaaaagcatggattgtgccgggactgagcgtcgaacgtgacgacaactacaacgtaatgcgcggtgaag

SEQ ID NO: 17056 - DNA, 409 bp, Zea mays
  Coding DNA Sequence Number=SeqID_2653
acggtccatgcgttcgagttctcgccgcagatcgacggcctcgtgatcaccgtcgtgcagcgcgcgctgcagacgctcgtcaaaaccgccgcaccgggcgcgctgtcgatcatgcaacgcgccgcggtgattccggtcaagggtccggacgcgagcgtgtcgatgctgatgccgctgttcgcgctgctcgaacaggaattccgcagcccatcacgcgggcgcggcgcggccgggatggcgttgctggtggcgttgatcgtgcatgtcgcgcgcctgagcgatctcgcggcagcgccgtcgcaggcgggcaccgatcggcgcggcatcctgctgcggcgttttctcgaacatgatcgacgcgcattttcgcgagcatcggccggtggaattctatgtggagcggctcggc

SEQ ID NO: 17057 - DNA, 574 bp, Zea mays
  Coding DNA Sequence Number=SeqID_2654
gcgtgcggcaacgtcggtggcggcggcggaggctccgactcgtcgtcctcgtctaccaccaccaccaccacgaccacggccacggcggccggcgacgcgcggaggttcgagtgccagtactgctgccgcgagttcgccaactcgcaggcgctgggcggccaccagaacgcgcacaagaaggagcggcagcagctcaagcgcgcgcagctacaggccgcgggggtggacgccggccgggtcgccgcgggcggggcgctctacccgcgcgccaacccgatggtgtccgccttcgtgccgccgccgcacctcttcggcggagacgcggcgcccacgagctgggtctacttctccccgcgcgccgccgccgccgcggccgggggcccgcagggccagcagttccacgtctcccacaactgcgtgttcccgtcgcgcgccgccacgccagccaccgtgacggccgcctcgccggccgtgttctcgtacgccgcggcgtcctccgccggcggcggcgccgcggcgccctacgggaacgggaccgacgaccagtacagcgggcggaggctccacgtgagcc

SEQ ID NO: 17058 - DNA, 191 bp, Zea mays
  Coding DNA Sequence Number=SeqID_2655
gagtggatcgcggagctggctaatccacttggagggtggaggctggtgtcgtaatctcaaatcatgtgcctcacgtcagagatcaatgttgggctcatcccgttacatggaaggccaggttgagtttacagggatcttgagcgatgacaaatctcagaatcccggtattgaagtttcccatctctctaatg

SEQ ID NO: 17059 - DNA, 243 bp, Zea mays
  Coding DNA Sequence Number=SeqID_2656
acctacaatacttgtctctttgttgttgctgtcttgtagtgccagcagcgatgcctccttgttcgtgctcggcaagtcggccggtgtgagcaaaatccgtacgtcatcgactccagtggtgccattctccgtggctctgcacacggtcggggactcggcggccttgctggatcatttgtgccgccaaacgagtttgacacaggatcacgcaaagaaagacattgggctcaagcccagcccaaa

SEQ ID NO: 17060 - DNA, 194 bp, Zea mays
  Coding DNA Sequence Number=SeqID_2657
acatcaagatcataggcacagttaaacgagctggcgtaggggtgggtcaaacatggacggcggcaccaagcagctcatcaggcccttagtaaacgaggccatcctccgatgcggcgccacgccgttcaccgcgtggcgcatcgcatatttcgtgccggggatcatgcacatctccgtgggaatccccgagccaa

SEQ ID NO: 17061 - DNA, 193 bp, Zea mays
  Coding DNA Sequence Number=SeqID_2658
gcacgttttgattgttaaaacctcgtcgatgggtgatgtgctgcacacgttgccggcgctgaccgacgcgatgcaggcgattcccggcattcgcttcgactgggtggtgcaagagaattttgcgcagatccccggctggcatccggccgttgacaaagtcctgccggtggcgatttgtcgctggcgcaaacac

SEQ ID NO: 17062 - DNA, 534 bp, Zea mays
  Coding DNA Sequence Number=SeqID_2659
gccgatcaagctgatggcggcgatcgaggcgaatccgacgctgcgctttatcattcagcagatccgcatcgattcgacgctgagggggctgcgcatcgagatcgtcgatacgcagaagcggccgatgttcgcgatgtcgagcgaccacgtggagccgtacatgcgcgacatcctgcgcgagatcggcaagacgctgaacgacgtgccgaaccggatcatcgtccagggccataccgacgcggtgccgtacgcgggcggcgagggcggctacagcaactgggagctgtcggccgaccgcgcgaacgcgtcgcgccgcgagctgatcacgggcggcatggacgaggcgaaggtgctgcgcgtgctcggcctcgcgtcgacccagaacctgaacaaggccgatccgctcgatccggaaaaccgccggatcagcgtgatcgtgctgaaccgcaaatccgaagacgcgctgatgcgcgacgacgcgacgaccacgacgctgtcggccgacgccgcgggttcgaagcagctcgcgcagca

SEQ ID NO: 17063 - DNA, 159 bp, Zea mays
  Coding DNA Sequence Number=SeqID_2660
tctgtcttcgtgtaaatctctctctctctcttcccagcctttcgatcatctctagtttattcgtgaccaagagcttcaaccgcgagtgccaggtcctgaagcgcatccggcaccggaacctcatgcgcatcgtcacggcgtgcagcctgccggacttca

SEQ ID NO: 17064 - DNA, 271 bp, Zea mays
  Coding DNA Sequence Number=SeqID_2661
agctgagacagtggacgctgcgccaatgggccgtcgcgagagaaggccaaatgtccgctatgccggcccagagtggcggctgtaataggcaccaccgatcgccgagcctggagggtgtgcctcactacactcgccgcgcacggatggcgggagcaacagatccgagtatcgccacggcgctggaggaccaagcccgagcgctcaagatgcaagcgaagacgctcgactctactcagaagctcctccagcggatctgcgagcgcttcgacga

SEQ ID NO: 17065 - DNA, 260 bp, Zea mays
  Coding DNA Sequence Number=SeqID_2662
gtactggaaggcagcgcaccggccacaccggttgccgccagccctgccgcaccggctgcggctgcggctgcggcagcgagtccggctccggccagccataacgccagcgcccatgccggcagcggttttgtggtacaggttggcgccctgaatgatgccgctcgcgcccggcagatggcggacagccttggccagcgctttggtgtacccggcgcggtggaagccaatggcaacgtctaccgcgtgcagcttggcggttt

SEQ ID NO: 17066 - DNA, 230 bp, Zea mays
  Coding DNA Sequence Number=SeqID_2663
atgaccgagactacactggcgcgccacggcctggccctgagcttgctgctgatggttgcagcgccgggtgtggcgctggccgagcctgcggatgtcgagcgcctgggcaaggacctgacctgcgtcggcgccgaccccagcggcaatgccgacggcagcatcccgccattctccggcaagtggctgggcgtgccgccgcacgttgcgttcaagggtaccggccagcatcc

SEQ ID NO: 17067 - DNA, 457 bp, Zea mays
  Coding DNA Sequence Number=SeqID_2664
ggcctcgacggcttatatattctttatcggcgaggcgatccatcatctcaccattgccgctccgcttcctctcctccgctcgcttgtctccccgtgcaccggcgcaccatcgcttgtctccgtgcagttcgcgcgtcaccatggccataaccatagaccgggtccacctcgccgtggcacacgtagctctcccggcgctgctcccgacgccgtgcgtggccgcagtcgtcctcccgaagccgcttgccaagcccagccgcgccgactccgacgagaggtgggacgcgcgcaagacggccatgaccaagccggccagcacacatcatcaatgctcggcctcgtcaagccctcgtcaagccgacagcagcagcgcccgacgcaagaacgggacagcgccgcccaagcccggccgagccgactccgctgggccatgggtcgcgcacaacaagacgaccat

SEQ ID NO: 17068 - DNA, 262 bp, Zea mays
  Coding DNA Sequence Number=SeqID_2665
tcactacgcgatgacccggacaaggtcgcgctggttcagcgcctggccggcgagctggcgatggctgacaccgtggaaacagctttgaccatgcggcgcatgctgaccaccggagaatccgagccaaacgccgctgagcaacccgaggcgcttgctgaaggcgaccgccgcattgatgcgcttgaccgcgagctcagcgccctgcgtaacgagatggagttgcgcaaatccataagcaacaacagcctgctgaccacgctgg

SEQ ID NO: 17069 - DNA, 271 bp, Zea mays
  Coding DNA Sequence Number=SeqID_2666
atgcccgtcccctggtgttcgttcttggcgtccttgctcactgcccgggctgttatccccctcccggtctcctggttccccgcgctcctgacgtgggccatttcggcctgtccctgctgagcctcgttctcggccaccgcttcgccgggcctctcgccgcgctcctcgtgcgtcccccgctcctccgtcgggggtgtgcgcctcggtgctgcgtactcgcaacccccgcctccttgccagcgcgcggggctcgcacgctctggcgttctgc

SEQ ID NO: 17070 - DNA, 492 bp, Zea mays
  Coding DNA Sequence Number=SeqID_2667
acgtggcgagacctagcacctgcaagctcggaagcgtcgcgggaggcgacatcttccgcgacgtcaggcactacccgcacgcgaggagcgtccccaacgtcctcgttttgcagctgggatctccgatatatttcgtcaatgcaggttacttgcgagaaaggatcttaagatgggcggaagaggaggagaacggcagcaagattgacgggcaagatctgcagtacgtggtccttgatctcgctggtgtgacttccatcgacaacacggggattgggatgctagtcgaggttcacaagagccttgatcaatgggcagtcaagaaaccagatgagctcttcgggttccttggaaccgtggcagctgaccagaacggtaacctcacaaggccagctgaggtgcgcatcggtgcactgttcacgtttggttcggttatcggaatggcggtgagatctgctatcgagctcgccgttgcggatgtcaatgctgacccta

SEQ ID NO: 17071 - DNA, 346 bp, Zea mays
  Coding DNA Sequence Number=SeqID_2668
gcctgcagcgcgtcgagtaccggatcgaagcggcggctccggcgcccgagcggcgcgagcagctgcggatggacggcgtcgagccgtgtctggttttacatcggcgcacctggtcgcagggcgtcgtcgcctcggtggcgaatctgtggcatcccggcagcctcgtcttgaaccatccgaaacacatcgatccccgtctcgatccgacgcgcacgatccgcgcgccgcgcggcagcgagaaggtctgcaagacctggctggccgaagcggcctaccggatgatccagaacaacctggatccggaagtcgccgagcatccgcacgcgctcgtcgtgtacggcggcat

SEQ ID NO: 17072 - DNA, 330 bp, Zea mays
  Coding DNA Sequence Number=SeqID_2669
ggtatccccgcgctgcccattaaggtttggtggaactgggaggcaacaagacccaagacccctggacctggtgctcagtttgctctcagggtttttgctcgttttgggatgaaaattggacgcattgaggatgttaccccggttccccctgacagccctcccaaaaagggtggtaggagggaaaggagcctgtaggggtgtatccttgctatttgccatccctttgccctggcctttgggtagcgttgctgtttattagcttgccaaaaggagttttaattttgcccattttgctctatgtgaagggtcattttctgttagccgaatcta

SEQ ID NO: 17073 - DNA, 423 bp, Zea mays
  Coding DNA Sequence Number=SeqID_2670
gaatatcccaccctggctagggaatctgatgaatctcttgtaccttgacctatcaaacaattccttcagtggggtgcttcccatgagcttcacatggatgaggattttggttccaaccaatggcttgaatgagcagtcaccaacagagggcctcccgttatcttcaagaagaattcaactagcaaagttttgcagtacaatcaaagtcagcagcttcccaccttctttgttgggccaatcttgtcaagctttggccatcctgtcaaccttcatgtgctggacttgagctggaacaacatatcagggccaattccttatgagttgtcaaacatggcaagcttcgaaacgctgatctcaatgggagcattccatcatcactaacaaagctgaatttcctctccagtttgccgtgtcgtacagcaa

SEQ ID NO: 17074 - DNA, 197 bp, Zea mays
  Coding DNA Sequence Number=SeqID_2671
gtggcaatgggctcgctgatcgcctcagtgatttttgtgccgctcggtctgacctttgccgcgcccggtatctggcagtgggaaattctgccgctggcgttgctcatcgccctgctctccagcgccattccgtactcgctggaaatgatggcgctgacgcgtctgccggcgcgcattttcggcacgctcatgagtct

SEQ ID NO: 17075 - DNA, 355 bp, Zea mays
  Coding DNA Sequence Number=SeqID_2672
gctccgagagcagcaccacgaaagggacaccaacgcccatccggagcatgagcaacgacacggcagcagccgccgccgccggcacgccgacaaacggcagctgccacgccaaggccgcgagcggacaccacaacccgcgccagggccacgacaggggagctcacgcaccgggccacgacacaccgacagccgccccgaacgacggggccactgggaacgcggccctgacaccggggaaggccggcgaccgtagacagcgcaccactcccaccaacccctgcatcaacaacagcgaggccggaacaccggctggacacccatgcacccagaacctagaccagcacgcaacggaaag

SEQ ID NO: 17076 - DNA, 422 bp, Zea mays
  Coding DNA Sequence Number=SeqID_2673
agagaactcacccaaactagcaaggcaggctctcatgcaaatttaggacagataaagaacgccacaaagatattcctcgagaagagcaactccaagacacataattgtccgattcaccaaagttgaaaagaaggaaaaaatgctaagggcagccaaagagaaaggtcaggttacccacaaaggggagcccatcagaccaacagctgatctgttgggagaaactctacaagccagaagagagtgggggccaatattcaacattctttaaagacaagcattgacaacccagaatttcaaatccagacaaactaagcttcataagtgaaggagaaataaaattctttagagacaaacaaatgctgagagattatggcaccaccaggcctgccccaaaagaactcctgaaggaagcactacacatg

SEQ ID NO: 17077 - DNA, 367 bp, Zea mays
  Coding DNA Sequence Number=SeqID_2674
gacgacagcgccgactggccggtttccgcgcgcgctgccgggttgcactcgctgcatcgcctctccagtcaggagctggcgctgcgcccgagcacgccggcgctggcgcatttcccgctggcgcagtggcgtcgcgcgctcaatcaaaccgcgcagcaggcacagctgctgggctacggcgatccgctgggtgagctggcgctgcgtgaggcgctggcgcagcatctggcgctggcgcgcggcgtgcgctgtgcgccgcagcagattgtgattaccgaaggcgcgcagcaggcgctgacgctgtgcgtcgcgctgctcaccaatcgtggtgacaccggctgggtggaggagccaggctatcgcggcg

SEQ ID NO: 17078 - DNA, 584 bp, Zea mays
  Coding DNA Sequence Number=SeqID_2675
accggtggactgctcatcagtggcagcagaagtgcttcactgcagctgcccccgccgacgctcgcgcaagaaggcgttcgtggcgcgcttttgcacggcctcgtcgaagtgatcaccgagaatgcgaggccgccacggagaccagcacgaaggagacgtacgtgctgatggaacccggcatggacgaggcgttcgtgtccagagaggagctagaggagagcctcacaagaactggcccgtggacaccctatccctggacctcgccaggttcggcatggtcgacgaggccgtctcgtacctcgtcaggtccgtgtgtgtgctcgagatcgatggagacgttgggtccgtggagtggtaccaggtccagttggactagttgccaccctagcttggatgtatgtcagtgagaaacccattaagagcctttttcacgctccccagcttctcgcctatggacggccgggcaacgcgcccaactgcagcagtcgtctgtgctcttcccctcatttgtggtcttaccagtggcgagtttctaggtaaatgagaagttgtggatacctgtcactgccaaactcattgtctga

SEQ ID NO: 17079 - DNA, 435 bp, Zea mays
  Coding DNA Sequence Number=SeqID_2676
agcacgaggatcatgttcgctattatcgagcgaaccagcagcactaagcgggggaacgaggggccgcggaggggcaagccggcgataaagccgcccgcagggggatccgacaaggcgcgaagaagaaccgcccgggggccgggacgacagaagcaggaaccagacaagagaactcaagacgcccacgacgaatgcagaagagccacaagcgcagggcgagggggcgagcggccggcggcgcgcagcgagcaacagaccggacatcaaaaaaggcgcgaaagaccccgcagggcaaacaaacggaaccacgacacggtgaaacacatgcaggcgcagccagagcaccgcgagcacaacgcagcacccgctaggccacggcgaagaaaccaaaaccaaagcaaaggcagcacaacgcccaggcgcaagcaaaaacaa

SEQ ID NO: 17080 - DNA, 449 bp, Zea mays
  Coding DNA Sequence Number=SeqID_2677
caacgtggcgcactgccggtactgcttacacgacgaggacaagaaggagttcttcctggtcatggaccaggtcatgaccaatgatctggccacccacgtcaaggaggcgaacagcggcaagcgacgggtacccttcccgctcgttgtcgtcgtcgacgtgatgctgcagatcgcgcgcggcatggagtacctgcactcgaggaacatctaccacggcgatctgaccccgtccaacgtgctcgtcaggacgcggtatgccgacgcgcacctgcacgtcaaggtggccgggttcgggcagcacgcggcccctagggcgtcagcgaaagcatcaaacgccaccagcgccccttgcatctggtacgcgccggaggtgctggagcagcaggaggcggccaagcgcacggagaaggcggacgtgtacagcttccggatggtctgcttcgagctgc

SEQ ID NO: 17081 - DNA, 176 bp, Zea mays
  Coding DNA Sequence Number=SeqID_2678
tctttccctttctctgccatggattcattacgattgtaccagcatcgctggttggtgtattcttttttttctcctattctaaataatctgattgttgtatccattactgtacttttgagcttaagaaagaaatacttctcggctcaacgtgttctctaatttattcgctgtcatgt

SEQ ID NO: 17082 - DNA, 409 bp, Zea mays
  Coding DNA Sequence Number=SeqID_2679
cgctactagcggctttgaggacgtagagtccgtggtgcaggtcgccgtgacttgttgttcggctagatcctgcccaatctgtaggtgaagttcgagcaccccgactcgggacgaacggtgcccaatacacaccgggggagatctgagtgcgtagccagatcgcgatgcacggctactactggtagacggaggagacggactgcaccatcgacgcggcgtggtggctgcacacagccgacggggggtacattgactaccacttgagacgtgctcatcgtggaccgcatgaaggagctcataaggttcaagggcttccaggtcgcccctgccgagctgaaggccattctgatgtctaaccctgccgtagaggacgccgacgtcttttagtatcgagcgagcgtaccgcgac

SEQ ID NO: 17083 - DNA, 161 bp, Zea mays
  Coding DNA Sequence Number=SeqID_2680
cagattggccgtcatatagaaccatacctgccgaggaggacggccaacgagatcaataactactggaagacgaggctacataagcacaccaaacatgtaaactgccatgtcagcaacaagcgctataaggacgacatgcgctacctgtgtgatgcctacct

SEQ ID NO: 17084 - DNA, 202 bp, Zea mays
  Coding DNA Sequence Number=SeqID_2681
gtgtcaccacgtccacaagcaaggacggtccaccgtggcgcccggtgacaatagcggcagacgcagcgaaggtggcggacaggggcaggggacatttcgctgggtggtggcacaacgagacagggagccgacagacagtaggttagcagcgcacgacgagccaacagcgccaggatggccatctctcatctgtgttcgaggc

SEQ ID NO: 17085 - DNA, 313 bp, Zea mays
  Coding DNA Sequence Number=SeqID_2682
tggatgcgccattggcttccccgggggcacgacccagcttcgcggagtgggtgaaacagcacaacgtgccgtatctgctcggaccgattacaaagaaagaagtcgacgtcgtggtgtgcggcctcggctggtccggctcgctgatgagcatcgagctggcattggctggactggacgtgtgcgcccttgagctcggcggcgagcgcgactacctggatttcgcttacccgaaaccggccgatgaggacgcctatgacgtgcgcaatagagtgttcgccacgccgaaagaagtggcggtcaccgcgcctcacga

SEQ ID NO: 17086 - DNA, 357 bp, Zea mays
  Coding DNA Sequence Number=SeqID_2683
gatcaacctgattggcaacgccattaaattcaccgagcgcggtcacattgatttgcgcgtcgaactgcgtcatttcagcatcacgcgggcggaactggagattcaggtgcacgataccggcatcggtatcttttaacaacaacagttgcaactgtttcaggcattttgtcaggcggacgccaatattttgcgccgtcacggcgggaccggttttggcctggttaatacgcaaaaacttgtgcacgaaattggcggttagattgcctttcacaaccggcaaaatcaagggtccccctttttgggccaaggacatttggatttccatcctaaagccccggcgaatccaagcaagcttga

SEQ ID NO: 17087 - DNA, 211 bp, Zea mays
  Coding DNA Sequence Number=SeqID_2684
atgagtttactgtttagcgcgacgcagcttggcgagttgtcgctggaaaatcgcattgtgattgcaccaatgtgccaatactcagcggaagaaggtcaggcaacggcctggcaccgcattcatctcggccagctggcgctctctggcgcgggactgctgattatcgaggcgacggcagtggaagccattggccgtatcacgccgggcgacc

SEQ ID NO: 17088 - DNA, 334 bp, Zea mays
  Coding DNA Sequence Number=SeqID_2685
acataacaccatccattacaatcacatctcactcaccgaacctgcatgcgcatcgacaaccatgttctctccaagcatataaatgcacgaaaaacaaagctccgataatacagcataacaggtagggaaactagcagcacacaagcattctataattcaagaaactgtcaaaccatctgtgaattgagaaatcaagttcgaaagcaactttttgcatacatcaccatagagccgtttggttttttttcatcacatgctcatcgcacctccagatgcaccaggaccaacacacacactcgtgttcttgtcgtgcatctgatgtgtgagtgtgttt

SEQ ID NO: 17089 - DNA, 205 bp, Zea mays
  misc_feature (53)..(53): n is a, c, g, or t
  Coding DNA Sequence Number=SeqID_2686
ttaagagtaggagtagcatgatgattattgatcccccgccctcccagatctcnaccaaagtttccctgggatatactattgtttctgatccctacaactcaactaaacactgggagttggcgttatattacaacgatcggaaacaacaacaacaacaaagagagacaaggagaattcttatgcattactactgcacccgcgtggt

SEQ ID NO: 17090 - DNA, 173 bp, Zea mays
  Coding DNA Sequence Number=SeqID_2687
catagcatcaacacttacttcactaaagaagcatcatgaaaaatcagcattttcaggaaagtctatactctatcttaatcgccaccaaactgaggaatggaaagggtggatgcaggttagtgattttgcttcacttatttatttttcttgatgttcccaaccgaataaggtgt

SEQ ID NO: 17091 - DNA, 567 bp, Zea mays
  Coding DNA Sequence Number=SeqID_2688
gacacagacgactccgtgctaacatccatgtctgggtgcaccaaactcgctgagctgcacctgaggggcatcaacttcagaggacgcattccagatgctctgttcgacgtcgggctcgagacgctcaacgtgtcgtcgcacgcgctttcgggcgtacttcccttgggctccaccaggctggcggagatgctacaatccgtccaccagctcacttgtggcatcctcaccgagatgtcgctcttcttcaagctgcgcgtggatctgtattgcgccatacctgccgacctctgcgagtctgttacccaaggggacattccagtaggagaagatgatccgccagacaaccccacgagattcatcctccccaccgatgcgcccaacgcaccggcccgcaccaactccggagtcgtggacgactctgtgttcgtgatcgccgaactcaccggctacgatgagtccaagctacacgccacctccgtcctcgcggtgatgtacggcgcgcacacagcctcttgcaccatgcccgacccgacgctcgacgctcactttgccaacaagcggcggatg

SEQ ID NO: 17092 - DNA, 269 bp, Zea mays
  Coding DNA Sequence Number=SeqID_2689
ccggctcaggcaggacgggtgggcaggtgatgccatgctttatgtgaacgtggagctagtgggcgtggacacgcgaccgcacatcgaaagggcactttcgtttggtgagaagccgaggacgagcatggtgccgcctcagctgccgacgacgcgagatggccggaagagcttggaggcagcgacataccatgatgtccttgacctgaagcaggtggggctgcggtgtacagagtataggaacgcagactatagacgaataaatctcaatt

SEQ ID NO: 17093 - DNA, 214 bp, Zea mays
  Coding DNA Sequence Number=SeqID_2690
gagaccatgggcgtgcagaagaccagattatagggaattgctcgcggtatcatgcctccgtcgtgatgcctctgtgcgctgtggccgggtctccttgccatcttcactcgatgtcttccaggggggacggagctcgggagttgtgggcgggccaggccatggtcgcctccgcaagactgctgggtcggcacaagatggccatcggagttggaag

SEQ ID NO: 17094 - DNA, 377 bp, Zea mays
  Coding DNA Sequence Number=SeqID_2691
agcggaactggtacagcagctgcgtgaagacggtttactcacgctgggcgtagtggccaccgatgacgaaggccaggtgctgggttatgccgccttcagtccggtgacgttgcagggcgaggatcgtaactgggtggcgctggcgccgctggcggttgatgcctcggtgcgcagtcagggcattgctaaacagctggtgtatgaagggctcgattcgctcaatgagttcagctacagcgccgtggtggtgctgggcgatccgcagttctacaatccgctcggctttgaaccggcggcgcgtcacggcctgcactgccgctggcccggcagcgaagcggcgtttcaggtgtataaactggcggacgatgcgttcgatc

SEQ ID NO: 17095 - DNA, 471 bp, Zea mays
  Coding DNA Sequence Number=SeqID_2692
ttcgaaaatcaggaagcccgggtgtgccttatgtttccctggttcggcaaagtgctggtgggctcccccgatatccgcgttgatgaccctgagggcggggtgtgcgaagccgaagaccagatttacattcttgagtcgctgcgctttgtatttcctgacatcgtggttccagcatccgcagtggtttacaccttttggggcgtgcgcccgctgccggccagcgaggccaaagtgaatggtcagatttcgcgtaacctttcgctggtgctgctgccgcctgaccacgcgcgtgcctggagcacgctgtgtctggtcgtcggtaaatggaccaccttccgccgcttcggggaagaggccgccgaccgcgtgttgcgcctgctgggaaaaaagcgtcgcgtctccagcagcgacctgccgattggcgccgcccgggattttccggcgccgtccgcccagccaaaaggcacagtg

SEQ ID NO: 17096 - DNA, 215 bp, Zea mays
  Coding DNA Sequence Number=SeqID_2693
cgactctatggatccatctgaatgccttcttttcactcgaactgttctttttatctttttctttctttttgcttttgcttagctgatgaactagaaacagcactcatggaaatggttaagcaagacaatagacgccaattaagtgcaaaggttgagcagtttgaacaagaaatatctgaattcagagaggctttgtcagataagcaggagcagga

SEQ ID NO: 17097 - DNA, 463 bp, Zea mays
  Coding DNA Sequence Number=SeqID_2694
tccagcagcagatcggctacgagatcatccgcggacccggcggtaccgcgtggctgcgcctcggcgtgttcgcgctgacctgtgcggtgatctccgcgctggtgatcaaccggcggctgccgactgccagtcgtgacatcgccgcaccggcggcggagatcttcgagctcatcgccgaccccgcgcagcagccgcgctgggacggcaacgacaacctggcggaggcgcccgccggtcaacgcgtgcacgccgtgggtgatgtgttcgtcatgggcctgacggtcggcgccacgcgggagaaccacgtcgtcgaattcgtcgagggccggcgcatcgcgtggaagccgtcagagcccgggctgccgcagccggggcacctgtggcgctgggagctcgagcccatcgacgacgggcacacccacgtcacccacacctacgactggacggcactgaccgacgagaa

SEQ ID NO: 17098 - DNA, 286 bp, Zea mays
  Coding DNA Sequence Number=SeqID_2695
ggagcgactcggcttcctcaatgtctccgggagaagaccggaatctccgagcccaggcacgccccgtccccgaaccgaactctcccgtatcggttggattccttcgatcttaaactcgtgctgtggtgcagagctggcaggcgccagccgccaggcgatcgcgcgcgagcctgctgcgccgcgcaggaggcactgaggcaggacagcggacagccggacagaacaagcgatcagcgatgtgggcatgtggccgccgggctgggcagaacagcggacgaacggcgat

SEQ ID NO: 17099 - DNA, 540 bp, Zea mays
  Coding DNA Sequence Number=SeqID_2696
gggctatcagccgtttatcgatctgctgcgcgccaatatgcgcgattgcggggcgctgcgcatcgatcacgttatggcgctactgcgtttgtggtggattccctatggcgaaggtgccgacaaaggcgcgtatgttgcctatccggtgcacgacctgctggcgatccttgcgctggagagtcagcgtcagcgctgtatggtgatcggtgaagatctcggcaccgtgccgcaggaaatcgtcagcctgctgcgcgaccgcggcattttttcgtggaaggtgctgatgttcgagtgcggggaggaggggcagttccggctaccggcagcctatccgcgccagtcgattgccagcgccagtacccatgatttgcccacgctgagcggattctggcatgccgccgatctgcaattgcgcaatcagctgggattgttcgccagacgcagcatgctgaacgcggccatcgccgaacgcgatgggcagagaaaagcgctgctgaaggcgatgagcgaggcgcaggcgattgacgcacgcagcaaaaa

SEQ ID NO: 17100 - DNA, 461 bp, Zea mays
  Coding DNA Sequence Number=SeqID_2697
gcccttgtctgtgtacttacggttacggatgcagcctagagataacagtgtgattcttcttcttcgtggagatatgcagatgtatatattttagttttatgattttctacacatcttaatatgtagcatatatttttctccctactagaccgctgcgctgaagcgaaactaccgagcgctgcactaaagaatgtacctcatacgacatttctcctgacccatgcttgtttcctgttctatcatatggcatcaaatatgacacttcgtagattgcgccactctacagctcatttaccacagtctatttgctggttatttgaagctgcatggattttagcactgtcatacttcatagcgtacctggagaccctagccattgcaaatgtatgttgtagcttatatttaacttccactttgtatagtaatgtgaaatgttgcatatcccttgtttagttcattgg

SEQ ID NO: 17101 - DNA, 292 bp, Zea mays
  Coding DNA Sequence Number=SeqID_2698
gacgcgtgggtcaattgtagaatctagttaaaaattgggacggtacaaaatctcttgtgcatggcaggtcataccaaaggaagcttggtgtcctaaagggtggagcaccctccaacagtggataaaccaaatcgacgatcaccagcatttacaggaagaagttctggacttgataaatctcatcgttcaagaaacatgtccactagcccacatcgtccacgtgttcgtgggaaggcttccagccctcaaatatggtaacttctgcctttgagaacacgagccattccaggaa

SEQ ID NO: 17102 - DNA, 182 bp, Zea mays
  Coding DNA Sequence Number=SeqID_2699
ttttcaaaagaactattattgccatatagttctttaccataactcttttgttctatctgactattcttagtttcttgctataaaatggagcacctaacaatgcatcttcactgaccaagaactacaaggtcaccccttccattctagggtgactgagggatcataccattcaatacattttt

SEQ ID NO: 17103 - DNA, 270 bp, Zea mays
  Coding DNA Sequence Number=SeqID_2700
gtacgtacacgcgatcgccactgttctcgctccactgttggtacgacgctggggacggcgggcgttttatccgctcgcgctggcgcccgcgggctcgctgatctggctggcgtcgaactggcccggaaccggcgagcagacgctgcacatcgactgggtaccgcagctgtccatggacatcacgctgcggctggattcgctgtcggcgatcatgtcggtgctggtgctgggcgtcggcaccctcgtgctggtctactgcgccgagtactt

SEQ ID NO: 17104 - DNA, 557 bp, Zea mays
  Coding DNA Sequence Number=SeqID_2701
acgccgccctttattcatggtatttctctcaatacgccggcgtgggcgcagcagacacaggcgcaacgtaacgcggcagcgaagcagctgctggcggaagctggcttcaatgcccagcatccgctgcgttttaccctgctgtataacacttcagaacagaacaagcgtcaggcgattgcggctgcctcgatgtggcaaaagaatctcggtgcgcaggtcacgctgcaaaatcaggagtggaaaacgctactggagacccgtcatcaggcacagtttgatgtggtgcgcgccacctggtgtgcggattacaacgagccatccagctttctcaatctgctgctgagtggctcctccatcaacaccgcgttttatcacagcgccgcatttgatgcgctgatgacgcaaacgctcaacaccgcggatgacgcgcagcgcgcgcaactctatcagcaggcggaacagcagctggatcgggattcaccgatcatcccggtttactaccgcgttagcgtgcggctggtgaagccgtgggtgggcggtttcagcggcaaagatcc

SEQ ID NO: 17105 - DNA, 183 bp, Zea mays
  Coding DNA Sequence Number=SeqID_2702
gggaaccattttatgcaagacgcgcattcgcgacatgtctgtatccatgagcatttagcaacgaggatactactggtcacagtagtgtagtttggaattccaaatgcgaagaacaaaaaagaacagcgccatgtatgtgctgcatacattggtaggtaacgactactatgcaattagtcctta

SEQ ID NO: 17106 - DNA, 308 bp, Zea mays
  Coding DNA Sequence Number=SeqID_2703
acgggctggctcaccagactcagtaggcgcaggtgcagccaagcagccttcaccggtttccgggggcagtgccgggtcgaccttagcctcgggcagcaccgggttgacctctgcctcgggccacgcgccattcagatgcccaaagtcttcaacttcctcggcacacaccatatgctccctcgcccggtcagaccgctccctaaccgcctctcgaccataaggaccccggacagtgtccggtgcgccaggctggcgtctgtcaactggctgctctcgggaattcaacggcggtgtacggctataaatca

SEQ ID NO: 17107 - DNA, 336 bp, Zea mays
  Coding DNA Sequence Number=SeqID_2704
atgattaccctgctggtgtttgtcgcgggttacctgttctgcctcagccagtttcccggctttgcctcaacacgggtgatttgcaacatcctcactgataatgcgtttctcggcatcatcgccgtcggcatgacgtttgtgattttgtccggcggcatcgatctgtccgttggcgcggtgatcgccttcaccggcgtgttcctggcgcgcatcatcggcgactaccatgtcgatccgctgctggcctttgcgctgattctggcggcaggcgcactgtttggtgccatgatgggctggctgattgatgcgttaaaaatcccggcctttatcatcacg

SEQ ID NO: 17108 - DNA, 589 bp, Zea mays
  Coding DNA Sequence Number=SeqID_2705
cgattgagggccattccatgacggtggtggaggccgacggccactacgtgaggcccgtcgtcgtggacagcctctacatctactccggcgagtcctactccgtgctgctcacggccgaccaggacccgtcccggaactactgggccgcgtcccacgtcgtggcccgggagcgcaacacgacgagcgccatggccatcctcagctacgccggcaacgacccgcgggcgccgccgcccacgccgcggccggagggacccgcatgggacgacgcgaggccccggctggagcagagcaggtccctcgccgtcgcgcacccggaccacgtggtgcctgtgccgcccaggcccgaccgcgcgctcctcctcctcaacacgcagaaccggatcgggggtcacatcaggtgggccatcaacggcgtctccctcgcgttcccggcgacgccgtacctcgtgtccatcaagagaggcctgcggggcgcgtacgacgaccagcgtcccccgccggacacgtacgactacaggagctacgacatcgcgtcgccgccgacggcgaacgggacggtggccagcaaggtgtaccgcctggcgct

SEQ ID NO: 17109 - DNA, 432 bp, Zea mays
  Coding DNA Sequence Number=SeqID_2706
tctgcggagagctgcgtgacctatgttggcgtggagctgaggcagaggagtgtctccgggggcgggagggtggtggaagcgtccgcggatgatgggaccagcagctacggagacggtgtgcctctctccatggacaccgcagctgtgctcgacgccttctccgccgcgccgcgccaccagctccgcccgacagcctggtgcaaatccacacgcttcacgtcccaggcgtgccgcgccaccgccccattcgcccgcgccgactggcaggccacctgcaccatccttgccagcaacagcacgggcggcggcggccacaatgccagcagcaacacgcagccagcgccgcgggtcaatggccagaagcccccgccagccctggaggcgacgccgacgccgacgctggacgagatggatctagtgcccatgtccaat

SEQ ID NO: 17110 - DNA, 191 bp, Zea mays
  Coding DNA Sequence Number=SeqID_2707
atgctgcaccgaaccgtgcacctggcgcagtggaacgggcggcatcaacggttggtgagggggaaggagctgttcgagacaaggaccactgtgctcatgtccctcttcttgctgaccatggttgctcaccaggatggacatgagggacgcctgcctaacgcccttgatcaacgttctgagcgccggacggg

SEQ ID NO: 17111 - DNA, 215 bp, Zea mays
  Coding DNA Sequence Number=SeqID_2708
tcttggtgattcttaagtttttctgtttgcaaactcaaaacgtaagaggtatttccatttttttccgaagccttcaaaggtaaactggaccgcaatgggcagaaagccaacccaaaaaggacattgctcatcaagctgctaagaagaggagacgggctgccaaaaatccttacttttgggccaatggtggtgccaccctgggagtgatcccgggt

SEQ ID NO: 17112 - DNA, 275 bp, Zea mays
  Coding DNA Sequence Number=SeqID_2709
ccggtctcgcggtgatcctcgtcggcgcgaacccggcgagcgaagtctacgtgcgcaacaagatcaaggcgtgcgaggacaacggtttcttctcgcagaaggacgcgtacccggacacgctgtcggaagccgacctgctcgcgcgcatcgacgaactgaaccgcgacccgaagatccacggcatcctcgtgcagctgccgctgcccgcgcacatcgacagccacaaggtgatcgaggcgatcgcgcccgagaaggacgtcgacggcttccacgtc

SEQ ID NO: 17113 - DNA, 145 bp, Zea mays
  Coding DNA Sequence Number=SeqID_2710
ttggcataggatattacacacgacaacatgtccaagtagtccttaacttgattgatttagctggtagtgagcgtcttgctaaatgtggctccacaggtgaacttagaaagagtgaaccaatgatttgtcatagactacaatcatt

SEQ ID NO: 17114 - DNA, 268 bp, Zea mays
  Coding DNA Sequence Number=SeqID_2711
gcccctgccaaatctgaaaaatttaatttaggtcctttgtcagttaaaagttgattgtttctcgaattgttgtttactgtactgtaagagtttgaaatctgttaaatttaaattaggtcctttgtcagttgaaagtttggtcgcgacttgcattattgttcactgtactgtttaaagagtttgaatagagaatatctactcataatagcttaacaatcttgactagtggcccctagggcctttgacaccgatattcatttcggctgtg

SEQ ID NO: 17115 - DNA, 548 bp, Zea mays
  Coding DNA Sequence Number=SeqID_2712
attgtgctttgtgggaacgaggttcacctgaagaatagacaggtgaaagcaaaacaagtgacgttccacaagaaaaaaagcctgtggtactatgactcagcaactacaactttgagaagcctttcttgtaccttgcccagaagcttgttggtgattccaattgtctctttgttgaaactcgtgctctcgctcctcttgatgtcacaattgacattgctacccagcaacagcatgaagccgaactggcaactgcgacaacccaaccattaccaggatggtgcgactctgcgtaggaatttatttattgatcctttgacatacaaggggaacacattgttttagcgttacacataaaaaatatatacaagagtaccttgatcgtattatggaaacaattatatgaaatagattatgtttattttatatttattgatttttgaaattttgtcattaaatctttttgttaaattttatataatacactattaggtgagtgcgtttcaggcttgggtttttctttgatgtcattccggcataatcgtataata

SEQ ID NO: 17116 - DNA, 533 bp, Zea mays
  Coding DNA Sequence Number=SeqID_2713
tcctgtggctgctcatcgacggagagcgccggaggatggacgatgacggcaacggcgagaagaagagcatgactgtcgtgatgctctctttgcagaggttgaagttggagcagtacacagatatcatggtcatggcgctctgctgggacttgtttggcgccggaacagagatcacatcgatcacgacagaatgggccacgtcgcttctgctgaaccacccggaggccctgaagaaggcacagacagagatcaacgcggtggtgggcagctcccacctgatcaccgccgatgacatgcgctgcctcggctacctgcactgcatcatcaacgagaccctgcgcatgtactcgaccgctatgctgttcctaccgcacgagtcggtggtggactgcaaggtcgacggctacgacggtaccctctcggcctctccatggacgatggcctggtcgatggactcagaaaatgtgagaaatggaagtggcaggacatatttgcatcgaaagaaacaaaaacaagttcatggttccacggat

SEQ ID NO: 17117 - DNA, 240 bp, Zea mays
  Coding DNA Sequence Number=SeqID_2714
gggagcagcttacggagtcgaggagggagagcgcctcgcgggtggcctggtgctcgcggccgccgtcgcaagtgatgaagaagcctgcacgccggggcgcagtcgctgctgttaggtctagggacgcacgcacgggtgacggcgcgccggtctgctcgctcgccggcctgctcgcccgcgccggtctgctcgcccgcgccggcctcggccctctcaagcaccgccgcctagtcgtccgtg

SEQ ID NO: 17118 - DNA, 374 bp, Zea mays
  Coding DNA Sequence Number=SeqID_2715
ggtcggactccgtgtaggtataaatgacccggcgccccttcttcctcagcactcgaggttctcaaaccaacactataagcgccattatcggaagaagacgggatgggaggtctcggacgagcgctttgctacccgaaaactcgcatcgcgctctggtgggggctgctctgcgtctccgaaatccaccacacgccagccccagcgcgcgtcaacgaacaagcagagacctcgctccaccggatctcgcaggcaaccattccctccggcgagcttcatcaaggtcaaagaatctatacttgaatacaacgtactccctgtgcgagtgttcgtcttgggcctcggccggccgtctgatgctggcgtggcacctaaac

SEQ ID NO: 17119 - DNA, 320 bp, Zea mays
  Coding DNA Sequence Number=SeqID_2716
gaccggctttggagaagctgaatccgacatgggtgcgggcctgtataaacggcagacgttgcggcgggccgaccggccgtgggtggcagccacgccgcggacttttggagcgatcccatcatcgcccgccctttttggggccgccacgacccagcccactaccgcacgctcgcgtggagcggtcagcaccagaggcgaccgggtcagcccatgcgtcttcgccgtccgtccgtccgtccgtcacaagggccgctgtgcgagcatcggaatcttgcaaccaccgtgttgcagctgggaggatttgccgatccacagaacga

SEQ ID NO: 17120 - DNA, 251 bp, Zea mays
  Coding DNA Sequence Number=SeqID_2717
atgctggcgaaaaacccatatgttgtcgcgcgcgccagcgggagggcgaggcggcggccttggggcaggagcagcaactacaagacgaagttgtgcgagatcttcgtgaagggtgcttgtacttccggcgaccggtgccacttcgcccatggcgagaatgagcaacggagaagttaccagggcagattacttgagtgatcaattttagaactgacggagtcctcgatagagcagcagcgtgggccgatctc

SEQ ID NO: 17121 - DNA, 252 bp, Zea mays
  Coding DNA Sequence Number=SeqID_2718
gtgaatctactcaatttccctctttcttagtcctttttttgttgcatttatgtgacagaccttgtgttggcggcttccaaatatctggggtctatgaaagtaatatctgaggcaagccttgcccctgcattttgtagagaggatgcgtcaaacccaggacctttgacctttggctcggtggaaaagcttccgaccactacgccaggcctgtccttcgcatttatgacgtgccaatccaatagaattccttat

SEQ ID NO: 17122 - DNA, 508 bp, Zea mays
  Coding DNA Sequence Number=SeqID_2719
atgaacataccgtcgttccaggcgggcacccgcacctcgccgagggaggggggcaacctcaaccggagcttccctggccggcccgatggcagcgtgacggaaaagatcgccgactatttccgccgcaccctgctgccgttggccgatatcgtcctggacatccactccggtggtcgcaccctcgacttcctgccgttcgctgcatgccatgtgctgcccgacaaggcccagcaggcccgttgtgaagctggcatgcaggccttcgccgcgccctacagcatgcgcatgctcgagctggatgcgcaggcgatgtacgacaccgcggcagaagagcagggcaaggtgttcatcaccaccgaactgggcggtggtggcacctccacggcgaaaagcgtggccctggcggagcgcggcgtgcgcaatgtgctgattcacgccggcatcctcgccggcgaactggagcagggcgagacaaccctgctggacatgcccgatggcgattgcttca

SEQ ID NO: 17123 - DNA, 246 bp, Zea mays
  Coding DNA Sequence Number=SeqID_2720
tcgctggaccgcgtgctcttcgacctcgagggcgacgcgctcggcttcgacgcgctgtccggcatcgtggccggcacggcgcgcggggtgcggtacctgcacgaggagtgccagcaccggatcatccactacgacatcaagcccggcaacgtgctgctctgaagctcccacaccccgctcaacctgacatcaagccagtgaactctgcaaaatttttgcaccaaagtcacgtggaacagaaagtag

SEQ ID NO: 17124 - DNA, 227 bp, Zea mays
  misc_feature (102)..(102): n is a, c, g, or t
  Coding DNA Sequence Number=SeqID_2721
gcatgtgggatcgagcagggagggagcacgcgtgccatgaggagctcggcgctgcaaaaattcgagcagagggcagggcggctaggcatacggcggccatgnctgtgatgtgcagagtgcaggggggcgtcgagcaggaaatcgtggcgccggaggagcagggatggtcgactgacgagctggagcaggagcatcgccggcgagcttgccatgggagggagaatcaa

SEQ ID NO: 17125 - DNA, 306 bp, Zea mays
  Coding DNA Sequence Number=SeqID_2722
gtgccaactccggagtcgcggatgactccgtgttcaagaccatcgaacccgccggttacgacgaatccaagctgcacgccacagccgtcctcgacgtgctgccccgtgtgcacacgttgggcaaggcacaatgcgcctcctatgccgaccgcctctatgcctccggcacctgcaccgctcccgaccatgcaacgttttggagaggaagcgttccggtcctagtcgacgccatgaagctacaagagcgggacctcgacgcgtacgccaggaagcgctggttcaccatgggcttcctccataaggccg

SEQ ID NO: 17126 - DNA, 158 bp, Zea mays
  Coding DNA Sequence Number=SeqID_2723
aagaggaccgacaaagatggccgcagcgaagcgtggtgcttgacatcgagggcacgacgagctccatctcgttcgtgacggacgtgctcttccctacgcccgcgacaacgtgcgcacgcacctggacgccacctacttcacccgcgagaccaggacga

SEQ ID NO: 17127 - DNA, 243 bp, Zea mays
  Coding DNA Sequence Number=SeqID_2724
ttggcgaccttcttgaaccgggccggccagaatgggccatggaccaagggcaccggtttgccgagggcttccttcggtggtgtgaacttcggggcaagggacggcccgaacttggcaccggtggggttcccgaggttaaacggctgggcgcgcttggggaagacaagatggacttctgtgccaacattaacgggcggggggggatggacaagttcttcttcggctttcacagggaacccctgt

SEQ ID NO: 17128 - DNA, 276 bp, Zea mays
  Coding DNA Sequence Number=SeqID_2725
atgagtgtgcttccggtatttgtcgtattcgggctgtcttttccgcccatcttcattgaactactggtttcgctggcgctgttctggctggtgaaacgcgtgctgacgcccagcgggatttacgatctggtgtggcacccggcactttttaacacagcgctaaaaatcgcgcgttacgccattacgctcctgctggttatcatcgctgttattatcatcttccgcgcctgggtgttctataccgaagtcgcgtggacgcgtgaacgccaattcttc

SEQ ID NO: 17129 - DNA, 221 bp, Zea mays
  Coding DNA Sequence Number=SeqID_2726
tgcacgacgacggtgaaacaggcgtcgaaacgtatgacgacaccacgaggccgaagaatgagatccggctcagcctgtctcttgggacgaagcttcggaaatgggggagacccctgaagaaagaacgcatcgagaacaacgcaactcccaccgccacgatcatcgccaagctcaggaacgcgagcgggagtaggcagaacaagacactcttgtcacacccg

SEQ ID NO: 17130 - DNA, 199 bp, Zea mays
  Coding DNA Sequence Number=SeqID_2727
atctcattgtctgatttctgcattccattttgtgttgttattggttggatgatgggacaaaggatggacttgaattttcagctatttgagacagcaactctcttcataacagtgcttgtggtagcatttatgctacaggtaggttcttaaggtggatattaataaaaacttttataaaatgtgtctgttgttgcctgtt

SEQ ID NO: 17131 - DNA, 176 bp, Zea mays
  Coding DNA Sequence Number=SeqID_2728
cgaaccgggacctggcagtggcactggcacggtggcaccgaccgcggcgctgactgcaagaaggcccatctgcttgtggcccagagaagcccacagtgctcagcgcgacagcggcctccccacccccgggggccgtagcctccgctccacctgcgtgcgccgtcatcgccagggct

SEQ ID NO: 17132 - DNA, 333 bp, Zea mays
  Coding DNA Sequence Number=SeqID_2729
atcctccaagacgacagattctgcaccaagatctgcaactatgggctgtcgtatatcatctggagggacgagacccagttggtgacgaggatacgaggcacccgtgtgaacctgactcccgtgtggctgacgtcacagatcaccaagaaggcccacgagtacagcttcagggtggccgcaatggaggacgatagcaggtggaagcacctcaactatgtccagacagatgacggtgttcatctcatacaagttctgcctgagaaagcaagggacgggcagatggtagatctggtccaggctaatggcaaccacatgctgggtcttcataaggaa

SEQ ID NO: 17133 - DNA, 240 bp, Zea mays
  Coding DNA Sequence Number=SeqID_2730
accagcactttatgcaactcaaaagctagtagaaatgtggaatcaaggcacactgcacgcatgctagcttgacactggacgcacgcatacaacgtagggactggaaaaaccgtgacgttacccaacatagttgatttgctacacatccatattctaccagctgaagtaataccaaacaagctctgaccgatcagacttcccaacaattgcgcaacctgaatggcaaatggtgcctgatgc

SEQ ID NO: 17134 - DNA, 187 bp, Zea mays
  Coding DNA Sequence Number=SeqID_2731
atcctcgggccgtgtgacgtcgcgcgggtgggccgccccttcggtgccccgggcgcccgaagtgggagcggcgctgaagccggcagtggggccaacctcgatggtaccttcggggatcgaggctcgagagacctccccacaggcacgattgatcatggcccgtacaaacggaggcatggctcgaccg

SEQ ID NO: 17135 - DNA, 419 bp, Zea mays
  Coding DNA Sequence Number=SeqID_2732
tagctgtttcatcgaagcgcgcaacatcggcaaacgcttcggcgcgttaacggcgcttagccaggtcaatctgtcgatccatcgcggtgaagtgctggcgctgctgggtgacaacggcgcgggcaaatcgacctttaccaaagtgttatccggcgcgtacagcgccagcgacggtgagctgtgggtagacggcagggcggtgaaattcacctcgccacgccaggccgccgagcacggtattgccaccatctatcaggagctggcgctggcagagaatctgtcgattgccgagaacgtgtttcttggccgcgagctgaagcgccgcgtgctcggcattccgtttctgcgtcgccgcgcgatgcgcgaaacggtggatcgactgctgaccgagctcgatgcgcacatttccgatgccgaag

SEQ ID NO: 17136 - DNA, 206 bp, Zea mays
  Coding DNA Sequence Number=SeqID_2733
aatggaagaaggtcgcaattgctatgcagatgagcattatctgccgaccctattccacatgatggaccctgctggcattgcaaactggtcagtcacctacgttgactggtctgaaggaaagtggcatcccagatcttttcgtgctaaggatgtcacttatgaacgcctgaagaatatgactgtatgtttacctttattttgtcatt

SEQ ID NO: 17137 - DNA, 206 bp, Zea mays
  Coding DNA Sequence Number=SeqID_2734
gtgtatttttggtggccagaaaggaaggagcaatgacaccagttcggcgtggccggtgacgaaccccgtcatgacctgcggtattgcgacgaaggcggggtacccgagcaactttgtcgccgacccgttcctctacgtcgaggtgaggcagaggcactgctgctgcttgttctgccgctcctccccggggtggaactctgcttcgc

SEQ ID NO: 17138 - DNA, 393 bp, Zea mays
  Coding DNA Sequence Number=SeqID_2735
gaacataattcttcggtgctgccgacgatgaccgcctcactggtgagatacatgtgacaatcatttgcacaggatcttcacagacctttcagaaatacctttcggcggatccaaagggagcacgtatagtgaaatccatagagactgcagctaccctcgcccataaagcagcagcagctgcagttcaaccggtccctgcttctagttggtctcgaaaactcttctcctgacaagctcatttggtgaaccgtgactcctagtgcattagatgtgcatttagcgaggtgagggcagtccctaaggtgatctactgatatctcgagatttatagcctgcgctagggttcggtagtgggacaataagtttcatgtgcatgtatcgtggctttgcttt

SEQ ID NO: 17139 - DNA, 310 bp, Zea mays
  Coding DNA Sequence Number=SeqID_2736
tttcttaaccccaacaccattggaggtggttcttttaatcttcctctggggttggttttggaagggcccctaaaaaaaggttaacggtaccagcaaaaaggctccaacagtggggggggcttggccattattgggccacctcccatggttgatgggttctaagtcacctaataaagccttgggtgctttggctgaaaagcatggaccctggttcaccatcaagctcggtgccaagaaggctttggtagttagcgactgggaaatggctagggaatgcttcacaacgaacgacgttgcagtttccgttcgc

SEQ ID NO: 17140 - DNA, 513 bp, Zea mays
  Coding DNA Sequence Number=SeqID_2737
agcggcagctcaaagcagtttgtcaaggtggcatgccttcttggcctcagggtgtccccctcccacagcgcgctgacaggcccttcgacgatcgtgtccgcgtgcaggcgcctcggggtcgcgacggagctggtccggcgtgccgaggcgtggtgcgcggcgcgcggcgcggcgtacgccaccatggccaccaccgagtccaacgcggcgtcgctggcgctcttcaccggccgcttcgcgtacgcgccgttccggcggccggcgttcctcggccgccccgtgcaccgccaccgggtgcgcgtcccgcgcgcgcaccgcgtgctgcgcctgcccccgccgctcgcctcggccgcctacgccgcgctgctcccgccctcggccgccgagttcctccccgccgacctcccggctctgctcaaccacaagctcaccctcggcacgtacctcgccatccagcgcggcggccccgaggagccggcgcgggcgccgtcgttcgcgatgctcagcgtctgg

SEQ ID NO: 17141 - DNA, 175 bp, Zea mays
  Coding DNA Sequence Number=SeqID_2738
ctgcatacatgtttgctcttctgatcctatagtgaaattttcgggaacagcatcagtggaccaatcccatcagagttcggtagcctggcgaacctaatcagcctggacctgtccaaaacagcatctcaggagctatacccgcagccctcgagaacgccaagcgtttggatcacaa

SEQ ID NO: 17142 - DNA, 446 bp, Zea mays
  Coding DNA Sequence Number=SeqID_2739
agggccagttggttttgattgtgctgagcggcgtgctgttttttgccttccgccagattcagtacgcgcaggcgacgctgttcatcaccctgctggtgctgctgtgcttcaatctgctgggtgaaggctttgatgtcgccctgccgcgcgtggtggataccttgctcggctgtggcctcgcctggctggcggtggcgtttgtctggcctgactggcgtttccgtcagctgacgacggttgccgatcgcacgctgaatgccaactgtcgttatcttgatgccatcctggaacagtatcatcagggtaaagataaccgtctcgcctaccgtgtggcgcgccgtgacgcgcataacgccgatgcggaactggcgtccgtggtgtctaatatcagcggtgaactgaagcaacagccgccgctgcgcgagaatgcgttccgtctgatgtgc

SEQ ID NO: 17143 - DNA, 576 bp, Zea mays
  Coding DNA Sequence Number=SeqID_2740
gggtggaggcgtcatgcaacgccaccgtctcctgcgccgacatcctcgcgctcgctgcccgggacgctgtcaaccttctaggcgggccgtcgtggacggtgtacctcggccgccgcgacgcgcggacggcgagccagagcgacgcgaacgccaacctcccggggcccgggtccagcctcgccaccctcgtcaccatgttcggcaacaagggtctgtcggcgcgcgacatgacggcgctgtcgggcgcgcacaccgtcgggcaggcccggtgcgccacgttccgcaaccgcatctacaacgacggcaacatcaacgccaccttcgcgtcgctccggcagcagacctgcccgctggccggcggcgacgccgcgctggcccccatcgacgtccagacccccgaggcgttcgacaacgcctactacaagaacctgatggccaggcaagggctgttccactcggaccaggagtctttcaacggcggctcgcaggacgcgctggtgaagaagtacagcggcaaagctgcccatgtttcaccgccgactttgccaaaggcgattgttaaggattggcgccaat

SEQ ID NO: 17144 - DNA, 294 bp, Zea mays
  Coding DNA Sequence Number=SeqID_2741
aagttctcccgccatggaacacaggtacaaataggacaccgcctctaccatgactccgtagcctccagagatgagagggacacccgcgccgttctgcttatggacgccatttttactctcgcggcgggaccccgggcgcgagtcctgcagcgcgcagcggctcgcatccccggctgcctgtacatctgcctttgggcgccgatgatcgccggccagcagctcccttccaggcatttgttttgcgtggacgcgtggatctccaacggcagcgtcgctcgcgcaacggcggtgttt

SEQ ID NO: 17145 - DNA, 562 bp, Zea mays
  Coding DNA Sequence Number=SeqID_2742
tgagcagcggcagctgtgtactgctgcgctgggacgaaaacagtaacggacgctgggaaggcgtcggtcacagtgaaagcgattattacggctatcgtctgcgcaacggacagctggagatgcagcgcggcgtggacgagtgcaacagcaacggctgggagcgcatcaccgatccggcattcctcaccctcagcaccttccgggttgagcctggccgccacggcgggccgccagcaggcagagctgacgatgatggcggaggggctgaatctgtgaagcagcgcggcaacagcacgctaggcatggtcgtgatgttactgctgatgggcgggctcacgctgcacgccgcgcgcacgcaactggcgcagggcatggcgctggtcgccgacgagcagcagcatcagcaggatttctggcaggcgcaggccgctttaacgtggggccggcagcaaaactggccgcaggccgcgggctggcagtgtcagaccgctctgaccgacgcgtggcaaagctgtctgctgcggcaggaggagaatcatggcttattattggcgcgcggcac

SEQ ID NO: 17146 - DNA, 223 bp, Zea mays
  Coding DNA Sequence Number=SeqID_2743
cgattacactcacagccagctgggacagctggccgaagtgattcgtcaggcaatggcgaaagagaagcactggattcagggcaacaccgtgaccgtgacggacagcctcggcctggcgcgcggcggtgcggccaacgaacgtgaatggccgggggtaatcaaccggctggtgtcggcggccgataaacacctttacgttgccaagcgcaacggccgcaatcag

SEQ ID NO: 17147 - DNA, 317 bp, Zea mays
  Coding DNA Sequence Number=SeqID_2744
agctggaggataaaaccgtccggcgggtcaatctgggctcgttgcgtcgctggaagcagagcgatgtgatcgccggcgatcaggtcacgctgtcgctggccggtctgggtattccgcggctggaacgggtgatctggcgcgtggcgcagcgcgactatccgtcgccgccgcaggaagatgcattcaatccgctgagctgcctgcacttcagcgcagggtgtcgcgcgcagtttctgtcgcgcctcagttggctgagtcacaagtcagtgctggatattgctggcatgcagatcagtagctggcagcgtctgctggac

SEQ ID NO: 17148 - DNA, 392 bp, Zea mays
  Coding DNA Sequence Number=SeqID_2745
gtacccctggagatagtgaccgccttgatgcgctgctggatcgtcttgaaaaaggtgagacgctgtcatctgaggatcagggctggctcgacgtctccctggatcgcattgacgaactgatggaacagcttggcattgagatggacgaagaagaggacaaggaggcggaagaagatatgtaccgcctgcttaaaggagtaagcatgtcagcaatgcagcttgagtgggacccggcgttaattgaaaagtataactatgccgggccgcgctacacgtcttatcccaccgcattagcgttcagcgataactttaccgccgatgacttcagacgtgcgactgagcgctatccacaacgttcgttatcgctgtatatccacatcccgttcagtcat

SEQ ID NO: 17149 - DNA, 503 bp, Zea mays
  Coding DNA Sequence Number=SeqID_2746
tcagcccctgtaccttaccgattattccttttatatttgccagcgtacgcggccgtcgcggacagttgctggcgctgctgagcggcatggtcctgatgttcacgctggtggcgctgctggtatcgcttaccagccactgggtcagtcaggtcacccgcattggtcgcgacctggcgctgctgttcctggcgatagccgcactgacgttaatctccacacgcatcgcccaacgcgttacccggccgtttgtcgcgctgggtaatcgcctcaacgatgccagccagcgacgtagcggggtgctcgctgcgctgctggcgggcctggcaaccggtctgctgtggtcgccctgtgccggaccggtgctgggcgcgatcctcagcctggccgtcgtgggcgatcatccactgtcggttggcgtgttgctgctggcgtatggcagcggtgccgcgctgatgctggcgctgctctatttcgccggacgctcgctggtagcgcgactgcgt

SEQ ID NO: 17150 - DNA, 124 bp, Zea mays
  Coding DNA Sequence Number=SeqID_2747
agcatctccggccacctgttcgcggggttgcaaggcctgctcaaggagcttgcctgcatcgacaccaacttgaccaggacctacaaggcctcggatgaagacggtgacgttgcggagctgtaca

SEQ ID NO: 17151 - DNA, 327 bp, Zea mays
  misc_feature (149)..(149): n is a, c, g, or t
  misc_feature (187)..(187): n is a, c, g, or t
  Coding DNA Sequence Number=SeqID_2748
acgggggactccatcaaggcatcaggattcgggctatgggtggcagagtcgctgcggaggctcggatggcccgacgacaccgtcgtgttcgcgctcgcgacgctgccggtgatcgagctgcggggggcgatcccgttgggtattggtcngacagatccatggctccacagatccagcaccatccagncacgtgaatcatgtttcttgtactatggcccgagatcgcgtgaatcatggagctggatgaggttgctgttaccaccggagaggaagacgatacagtgcttctggacatgtgagtcatctacaaccgctttgattctctcc

SEQ ID NO: 17152 - DNA, 204 bp, Zea mays
  Coding DNA Sequence Number=SeqID_2749
acaacaaccgccagaattgggccagccgggccggggcccgttacatgccaaaactccgggtttcccggcgcggaatgccccccccgcgaatgcggggaacaaccaccctgcacccccgtttggtccaccccgtcaacctcttcggcggccacaaccgggcaacgcccaagtcggtgctgaagctgatggacgtaaaggatctga

SEQ ID NO: 17153 - DNA, 241 bp, Zea mays
  Coding DNA Sequence Number=SeqID_2750
gcgcagcaggccacagtgtgcacctccctcgccttcccagacggataatgagcgtcgatctccttcgtgctgccgttggtgaagccgctcttgtttatggcactggacgcgcgacggccaccgtagcacctagcctgttttcttacaaatccttcctcgcatgccagtgccacacttacaaatacgcgccctccaaaccgccatgattcactccgattgcgcgccagatcaagccgcgagt

SEQ ID NO: 17154 - DNA, 518 bp, Zea mays
  Coding DNA Sequence Number=SeqID_2751
ttgaccgtgcgctgttctggctgaccgccttgctgaaatcggtgccgcattttgcactcggcatgttgctgatcctgctgttcgcgctgcaactcgactggctgccgagcgccggtcacggcgagctgcgccatttcctgttgccggcactgacgctggcattgtcgctgacggctgtcggcgtgcgcgtggtgcgcgaagccacctggcaggtggtgtcgtccggctactatcgctggggagcgcaaaagggactgtcacccgcgcgcctgctgctgcgtcacggcctgcgtaatctgagcgcgccggtgctgacgtggtttggcatgcagtttgtctggctggtggaaggcgtggtggtggtggaaaccctgtttgcgtggccggggatcgggcacgctctggtgcacgccatttttgcgcgtgacgtgccggtaattcaggccagtgccatgacgctcggcctgctgtttgtcctgctgaacatgctggtggatgccggttgtcatctgctcgat

SEQ ID NO: 17155 - DNA, 273 bp, Zea mays
  Coding DNA Sequence Number=SeqID_2752
ggcgctcggcgagaaggacgcggacgacggcggcggcgtcccggcggcggccgggatgatggccggcaagggggagaccacgcccaggctgcgggtcatcgaccagtgcctgcggcagcaccgggcgtaccagaccggcgtcgtcctcgagagccagccgtggagaccgcagcgcggcctgccggagcgcgccgtctccatcctccgggcgtggatgttcgagcacttcttgcacccgctaggaagtaacattttaccccgtgctctgttata

SEQ ID NO: 17156 - DNA, 387 bp, Zea mays
  Coding DNA Sequence Number=SeqID_2753
aaggatgatgtcaaccacgactccacgattcaacccaggtcgcccctgagcagacagagcctgaccttcgacgccatccccacataccacgctggagctttctacgagatcgaccacgataaattgccccctaaatccccaatccatctgaaatccatacgggtggttaaggtgagcgagtgcacgaacctggacatcacagtgaaattcccgtcccttcaggcgctgcgcagcttcttctcctcctacccggcacccggcaccggaccggaactagacgagcgcttcgtcatgagcagcaaccacgccgcgcgcatcttgcgccgccgagtgaccgaggaggagctcgagggcgaggtgcagcaggacagcttctggctcatcaag

SEQ ID NO: 17157 - DNA, 188 bp, Zea mays
  Coding DNA Sequence Number=SeqID_2754
tgccacgacggcatggaccccccggggtcgaaacgccgacatcgggcgtcgacctcacgtttgagacaaagacgagcgtcgtttccctacgacatgccaaccccaagcagacggacgacgccagcacgctcgcaaaggacatgctgggcgttagcctcgtacctgagacaacggtgcagtccatccct

SEQ ID NO: 17158 - DNA, 264 bp, Zea mays
  Coding DNA Sequence Number=SeqID_2755
tctgctggccggtcacctgacgggacagcagctggtttcgctgataaactacctcgtacaggcgggcgaaactgacgacgccgaagcctttgtacgcaacctggcgcagagagtgccgcagcatgaggacgaactgatgacgattgcacagcagctggagcagaaggggcgggagaaagggcgcatggaaggaaaaatggaggtcgcccgtaatctgcttgcaaaaggtattccgcttgaatccgtgagggagcttaccgggct

SEQ ID NO: 17159 - DNA, 359 bp, Zea mays
  Coding DNA Sequence Number=SeqID_2756
aactggagtggcaatcactgtcagttgatctgttgcctcatcctgatatgttcgccgatgcaagatttaactcttctagtagtcaagacgacaaaagagatgatgatggtgcaaaacgaatgttttttggtggtgaaagatttttggaaggaatatctggagaggctaacatcacggtccagcggacagaacagaataatccacttgggcttgaggttcagctacatattacagaagctgtctgtcctgccttaagtgaacctggcttacgggcctttcttcgatttatgactggggtatctgtgtgcctaaacaggggagatatagatccaaaagctcaacaggtttacttctgtgtg

SEQ ID NO: 17160 - DNA, 549 bp, Zea mays
  Coding DNA Sequence Number=SeqID_2757
agcgccgcctgtaaatccttgatctgtctaacaacaacctgtcaggaagcatcgtccccagctggatctttacagatggatcagcgttagcttacctgaacatcgcgagaaactcgctcgccgggccactgggttcgatgtggcagcacgcatcggtgctcctccgagtcatcaacatgtccgcgaactgtttcgacggacatccgccaggcaatatcagctcagtgttcccgcgtctagtcgttttagacgcttctcataacctcatcagcggaagcataccaccgtcactgtgtgacatcgctgggatggaacttgtagacctgtcgagcaacaagctttcaggagaggtgccgagttgcctgttcacgaagaactctgccccgcgggtactgaaactgtccagcaatggtctcgggggcgccgtgttcggcggggccagcaatctgtctgtggcgagggcagtgtaccttgacggcaaccgttttgaaggaaccctccctggcaatctgtcggcgggtggcctggacgtgattgacctgcatgaca

SEQ ID NO: 17161 - DNA, 588 bp, Zea mays
  Coding DNA Sequence Number=SeqID_2758
acgcgcggcatctgatcaatcatgacctcagcaaaccgctggtgctggtgagcccgcaggccacgcgcggcggcaccgagatcttcatctggagcccggatcgcccttacctgtttgccgccgtagccggagaactcgatcgccgtaatctgagcgtgcacgatgcgcagatctttaccagccgcgacggcatggccatggacacctttattgtgctggagccggacggcagtccgctggcagcggatcgccatccgctgattattcaggcgctggagcaggcgatcacgcaaacgcagtgggtgccaccgcgtacgcgccggccgtcgtcacgtctgaaacacttcagcgtcgataccgaagtcaactttttgcccacccataccgaccgccgcagctatctggagctggtggcgctggaccagccaggtttgctggcgcgcgtcggcgaagtgtttgctgacctcggtgtttcgctgcacggcgcccgcatcagtaccatcggcgaacgggtggaggatttgttcatccttgccaacagcgaacgacgtgcgctggatgccgaaatgcgctccgtgctgcaacaac

SEQ ID NO: 17162 - DNA, 208 bp, Zea mays
  Coding DNA Sequence Number=SeqID_2759
ccagggaaggcgtattggaacttctgttggtcagcgccgagggcctcaagcatgctcatcaccacccgcgacgatcaaagaggcattacgtgaccatcgagtgcggggacaagattgcgacgagcaaaatcacacaaggcaggggtaaaaagatctggtggaacgagaagttcaggttcgcgctgtcggacgccgagcgcagggagct

SEQ ID NO: 17163 - DNA, 292 bp, Zea mays
  Coding DNA Sequence Number=SeqID_2760
gctgcgcgagctgatcgtccagcatccgttcggcagcctcgtcacgcacggaaagagcgggctcgacgcgaaccacatcccgttcgagctgctgccgggcgacggcggcctcggcgagctgcatgcgcacgtggcccgtgcgaatccggtgtggcaggaggtcgcgaacggcgacgaggtgctcgtgatcttccgcggcggcgacgcgtacatttcgccgaactggtatccgagcaagcacgtcgcgcaccggcaggtgccgacgtggaattacgtggtcgtgcatgcgcac

SEQ ID NO: 17164 - DNA, 519 bp, Zea mays
  Coding DNA Sequence Number=SeqID_2761
gacccttttcacagccccgacgcaaccgcttcgccgtcctgcccggctgcccgcctccctccctccctctatatcctcccctccgccaccgccccccctctctctcctcagctcaccagacgccgccgccgcgaacgacgaatcctcagcctcccagtcccagcccagatgttcctcgccgacaagtacaggtcgctgctgccctcctcccaccagcagccccactccaagcccagccgccgccgccagcagcagcagcagctgctgcagcaggagggggaggcggaccggttcggcgcggcgcgcctcgggagcctgcttcctttgccggtctcgccgctcgcggagctagcgagggcgaccaatagtccacacgaaacgacgggtatgtgctacacggcttacccgggggtcccaccatgaaggagtccacctcggcgttgcggaggcccagcgcggggcggaacacgccgtcgacggcgtcagagaggtggtgcagcagcgggacgacctcctcgg

SEQ ID NO: 17165 - DNA, 171 bp, Zea mays
  Coding DNA Sequence Number=SeqID_2762
tgcctgcagatttcgaattgcatggcatgcttgttcaatccccatctggtcgtttcacttcaattctctctataggaattggagggtcagctttgggccctcaatttgttgctgaggcacttgcacctgataaccctccactgaaggtatgcccctaagtcagaatcctag

SEQ ID NO: 17166 - DNA, 195 bp, Zea mays
  Coding DNA Sequence Number=SeqID_2763
agcggcctgcagaaccttggccattcttgcagttcgagtacacagtgatagctctgatcgtgctaccggagctatcgttgtgctctcgtgtacgggacctgccgcacattatcccggaccggctgcagcaggatgaccgggggacacgtggcgccaaggtatggaacgcgactgctctcgtgtccgaggttcggg

SEQ ID NO: 17167 - DNA, 173 bp, Zea mays
  Coding DNA Sequence Number=SeqID_2764
gtatggtagtttgtttggtactgataatgtgtttctgagtttttctttcttttggctgtgttagctttattgtgagaaagacagccttacggaggaccaatttgagcaactaaaggcgtttattgatattggtgatatattaggtgcaagtggatccattaaaaagacagaga

SEQ ID NO: 17168 - DNA, 532 bp, Zea mays
  Coding DNA Sequence Number=SeqID_2765
atggactggacctaccggctgcgattgcggcacctgcaagtgctgctgagcctggcgagcacgggcaacctgagccagtcggcggcggcgctcgcgaccacgcagcccgcgctgtcgaaatggctgaaggaactggaggaggacgtcggcctgccgctgttcgagccggcacgcgcgcggattgcggccgaccgcgtacggcgacgcgctgatcgagcatgcgcgccgcgtggaggcgcagctcgacgtcgcgcgcgacgacatggccgcgctgcgcgaaggcggcagcggcctggtgacgatcggcacgtcgggcgtcgcggcccgccgatacggtgccgctcgcggtgtcgcaattgctgaagcggatgccgcgtgcgcaggtgcggctcaccgaaagcacgatgaatcaattgatgccgcaactcgcacgcggcgagctggacatcgtcgtcgggcgctcagggtcggcgtccgtcgatccgcacctgcacgccgaggcgctttatgtcgatccggtggtgttcgtcgc

SEQ ID NO: 17169 - DNA, 168 bp, Zea mays
  Coding DNA Sequence Number=SeqID_2766
ctgagtgatatccatagggccacacaacagtgtgagagctgccttcatcattggttccccaaactgcttgagatttggcaagaactcggtgacgggagagaagtggtcgtgcttgatcatgttgccgagcatgacgaacatggagagggtgaggaagcccgccaccac

SEQ ID NO: 17170 - DNA, 535 bp, Zea mays
  Coding DNA Sequence Number=SeqID_2767
aagcaccttagccaatctgctgatgggctactatccggtgacgcgcggcagcattgagctggatggccgcccgctgcgccagctgacgcacgatgcgctgcgcggcagcgtggcgatggtgcaacaggatccggtggtactggccgatacgctgctggccaacgtgcgcctgggacgcgatatcagcgaagaggatgtgtggcgcgcgctggagaaggtgcagctggcaccgctggcccgcgcgatgcgcgacggtattcatacccggctcggtgagcaggggaacacgctgtcggtcgggcagaagcagctgctggcgctggcacgcgtgctggtgtcgctgccgcagattctgatcctcgatgaggccactgccaatatcgactcaggcaccgagcaggcgattcagcaggcgctgcgcacgctgcgccagcacagcacgctggtggtgattgctcaccgtctttccaccatcaccgaagcggatcagattctggtgctgcaccgtggtcaggtagtagaacgcggcacacac

SEQ ID NO: 17171 - DNA, 486 bp, Zea mays
  Coding DNA Sequence Number=SeqID_2768
accacacgtcgtcgtgagttcgtgacgcgctgtccctccactgctccacaggaccacaggccatggctcgtcggctccttcggtccctcccagccggccagcctccacagtctagctccaccacatgccgccgtcctccactgctgctcggctgctccacaggccacagctccctctgtccctcgcggtcgcagcaccagcacgacattcttgagatgcctccggttggaaataatcctcgctcaggctcagccatcagattggtccctctagttactgcgacttggaaaggtgtttgccagcatccagttgaggacagagctcgacgataccggcgcactgcgttttcgaagtctcatggctcttaggagcttgttatgtagacagcagcccttagtttgggttcaggaaagcaaatctggaacttcagcgttgcagctcgcaggctgctgagctcggctagcagcgactagacacagggccagg

SEQ ID NO: 17172 - DNA, 136 bp, Zea mays
  Coding DNA Sequence Number=SeqID_2769
aagaaccctgacatcctggtgctggacgaggccaccagccgcgctggacttcgagtcggagaagcttgagcaggaggcactggccgtttcatgatcaggcgcaccaccttggcgatcgcgcacatgtgtccaacat

SEQ ID NO: 17173 - DNA, 234 bp, Zea mays
  Coding DNA Sequence Number=SeqID_2770
gcgttttgaatcaggtagccatccacctgaaagcacaggcagctcaggtgctcgtacaaatatctttgtcacagtgggatcctactattcttcagaagcggatagatgacctaaaggctgctaacgatgctatgactcgatggtgctttgatgccgaggagaggtgcgcccgaaaccaagaagagcttaatcaagttaacagattccttgatggtgcccgcaccatgaactcct

SEQ ID NO: 17174 - DNA, 587 bp, Zea mays
  Coding DNA Sequence Number=SeqID_2771
gaaaactatcgtccgctgatcagctcacgacgcggcggacccggttattcgctggacgatctgccggataacagcacctggtttggttatcttgacggctatcgtcagctggtgctgaaaaagccgctgccgccgtccagcctcaatgtggtgtggtcgctgtcgaccgatgtgctgatggatcagctcaagctgatgctgattaacgcgctgctgctcaatattctcagcgcgctgattctgtttaccctggcatgggtgttcgaacgccgcatgttcctgccggcggaagacaacgcccaccggctggaggagcacgagcagttcaaccgcaagattgtcgcgtcagcgccggttggcatctgtattttgcgtaccagcgatggcaccaacatcctcagtaatgaactggcgcataactatctgacgctgctgacgcaggaagatcgcctgcggctgaatgaaatcatcggcggccagcaggttaattttgtcgatatgctgaccggcagtaacactaacctgcaaatcagctttgtgcattcgcgctaccgcaacgagaacgtagcgatttgcgtgctggtcga

SEQ ID NO: 17175 - DNA, 176 bp, Zea mays
  Coding DNA Sequence Number=SeqID_2772
tgcagattcgcaaagtggcattatcgcttctgctgttgggcgcagcagcgggcgcggcccaggcggaagatctcaccggcaccctgaaaaaaatcaatgatagtggcgtgattgtcgtggggcaccgtgagtcatccgttcccttttcttactacgacaaccagcagaaagtggtg

SEQ ID NO: 17176 - DNA, 580 bp, Zea mays
  Coding DNA Sequence Number=SeqID_2773
tggtttacctgcaggtgctcctgtggcaggccggccggcttctgcgccagctgtggtggcagccccgacggctggagcgggcgctgcgcgcacagggcatccgcggcacgccgtaccgcttccccgccggcgacctcagggaatacagccggctggccaacaaggaggcatggtcgaagcccctgccgccgcgctgccacgacatcgcacaccgggtcacgccgttcctgcaccggcttgtcctggagcacgggaagacgagcatgtcctggttcggctccacccccagggtgaccatcgtcgaccctgcactggccaaggacgtgctgtccagcaagttcggccacttggagaagctcaacttcccggcgctggccaaggtgatgggcgacggcctggcgagccacgagggtgcgagatgggccaagcacaggaggatcctcggccctgcgttccagcttgagaagctcaagcgcatgctgccagcgttctctgcgtgctgccaagagctggtgagtaggtgggcggagtgcctcggcccggacggttcatgcgagctggatgtatggcccgagctgca

SEQ ID NO: 17177 - DNA, 478 bp, Zea mays
  Coding DNA Sequence Number=SeqID_2774
tcccaagtactgatttcttttctgatggatggatgaatggataatggttcatggtaatccaaagttgacgatatgcaaggctcggtttctgtagatatcgattcccgggtgaaagtccacattatatcggacaaaaaaatgggagaggattttaactacggcgtcgagtttatgctgctggtgtctttcttgaagactgcgtctagagaggcaacggaggacgcattagcgtctcttgacaagttgatcagccaatgcagcgcttctattgtgcaggcaacatgtggctgctgtttggatcgtccggataacgagtacagtcatgctgcagtaatccgtttcccatcatgatagcgaggagtacaaggatatgtgggcgtccaagttccgcccgatcgtggagagatccctgcacctgcacttcaccgttgaccccgtggggaaccagctgatgtagaccgaccgagtggtcatccct

SEQ ID NO: 17178 - DNA, 434 bp, Zea mays
  Coding DNA Sequence Number=SeqID_2775
tcacgcgtgcggtggaataagccagatggaggcatttggttggtctcactatcccacgagaatccggggaaaaatcaaatcattttcgacagatgggggggtcggaccaaagctagttaagccaatggtcaagaatatgcaatattagatcacagctgcaaagaaagcattggagaatgctggaatcactgaagaagtcatgaatgagttcgaaaaatcaagatgtggagtcctcattgggtctgctatgggtggcatgaacgttcacagcgatgcaaatgaagctatgagggttgcatacaagaagatgaacccattctgagtacctctggcaactacaaacatgggtgcagagattcttgctatggatctgggcaggatgggatcaaattactctatctctactgctagagctactagcaacttttgcattc

SEQ ID NO: 17179 - DNA, 472 bp, Zea mays
  Coding DNA Sequence Number=SeqID_2776
agcatcgtgcgcttacgccgcttgagccgtttcgcgttgacgtctgcgccagtctgcaattcaccgccattccgattctcagcaatgcgccaccgtattcgccgtatcgcgatcgtccgctgccgggacataacgtggcgctgtttatcgaaaacaccgccagcgggcagacgctgctgtatgcgccgggcctcggcgaaccggatgcggtgattatgccgtggctgcaaaaagccgactgcctgctgatcgacggcaccgtgtggcaggatgatgagctgctgaccaccggcgtcggcaaaaataccggcaaagctatgggccatctggcgctggcggaagagcaggggctgatggcgctgctggccgcgctgccggccagacgcaaaattctgattcacattaacaacaccaatccgattctcaacgagcattcgccgcagcgccagttcctgacgcagcagggcattga

SEQ ID NO: 17180 - DNA, 338 bp, Zea mays
  Coding DNA Sequence Number=SeqID_2777
catgcctgcagaacagcggtttgatccgccatcgcggcaagctggaagccatcatcaataatgccaaagcactgctggcgctggaggccaccggcgaagacttttcccgctttatctggtcatttgtcgataaccagccgattttgcaccattacgcggattataagctggcgcccaccacctccgaaccggccattgcgctgtctaaagcgcttaagaagcgtggttttaaattccgtgtactggcgctggccttgttaatgagcggcagcgtggcgctgtcgggttgtaccaccaatccttataccggcgaatcgcaggccgggaaatcgggcatc

SEQ ID NO: 17181 - DNA, 306 bp, Zea mays
  Coding DNA Sequence Number=SeqID_2778
gcttcctgcggttcttactttctgtccgcagcgttcctccagctgggagcggtagcagctagctagctagctagcaactggccatcggggctgctagcagcgtacgtacatggagcgatggctcctacagctgaccatacgctacgacccctggtgcagccccgccctgttgtcaccgtccaacatgggatctcattgacgaaccgacgacagtagatgctacgctgccggggctgcaatacacgcacaccaaggccgacgggacgctcgccatcctcagcgtcggagactggagccggcgtggac

SEQ ID NO: 17182 - DNA, 395 bp, Zea mays
  Coding DNA Sequence Number=SeqID_2779
aaaatcgccaccattggccgtgaacacccggacgatgcgctgattgaccacgtttttgtaccggtacgccagcgtctcgggctggatcaaaataccgcccgcaccatgtgcagtctgctggacggcgcactgattgattatgtcgcgttctgtctggcaggcgcgcgtaaaaaagccggtaaagatgccttaatgattggctggggcgtagaagatcgcacccgcatctggctggaagcctggcgcttagcgcagcagggctggcgcattgatgtgctggcggaaccgctggatatgccgcgtccggagctgtttcccggccagcatctgtttatctggaccggtaaaaagccgacgcgccgccagctggagcagttcgaacactggcaggctca

SEQ ID NO: 17183 - DNA, 208 bp, Zea mays
  Coding DNA Sequence Number=SeqID_2780
acctgcagctgagcggtgcgtcaaaggaagcgagcctgaacgcctgggcgaagaaacagaatttgagcggttatcacgtgtataaaaccacgcgtaacggccagccgtggtacgtgctggtgagcggcgcttatgccacaccggccgaagccaaacgtgcggtagcttcactgccggcggaagtgcgtgcggcgaacccgtgggttaa

SEQ ID NO: 17184 - DNA, 552 bp, Zea mays
  Coding DNA Sequence Number=SeqID_2781
cacagggatggtaacagtgatcaacagactagggagacttattatgctggagaagctaataatggagatggtttaagggcttctctgctttctcaggcagcaaatgttgaagtaaatgatacaaatacctcttttacttctgaagggagctcttcatatttaagaaggcatggaacatcagtgcttgcacaagagtttatggcgtctatacatgattatgacattgaagaagaagaagaagaaatccataggtttgcattgcctcaccagtctgcacctcgtgatatggaaagcaccgggagacatccattcagacatcaaatagtccggttatctgaaacagctgatataaagtttaaatggtgggtgcttcttcaaccaggaattaggcatgccttatgttatggcatgttaattcaagcccttcagcaagtacgattatgtgttattgtagattatgtattcagttcagcatggatacaacaatccacggttggtcgctaaatataccatattagcaacggacggtcggtcgctaaaaagatgtcggtc

SEQ ID NO: 17185 - DNA, 230 bp, Zea mays
  Coding DNA Sequence Number=SeqID_2782
ttctggagtcgctgctaactaagggtacgctggttgatttgtatgcgctatgctggacagcgccagatcagttgtaatccgttcagtatggaagcagtctctgtctgcaacgttttggtggattcggtgacacccgcaacaagcgatgttaatgttttgggcaccaccggtgttggggcagcagtatgcttcggtcaagtgtccccaattttttcttggcactggctgct

SEQ ID NO: 17186 - DNA, 178 bp, Zea mays
  Coding DNA Sequence Number=SeqID_2783
tcctctggatctggcagaggacgctaggagcacactattgcctcctgctctagctcctcacgtcaccatcgccgtctcagctcaactgtacgactccgtatatattataaccatcggttgtcatcaaaaaaaaaaaaaagaaaccagagaagaacgaaacgagcggacgcctgggaag

SEQ ID NO: 17187 - DNA, 123 bp, Zea mays
  Coding DNA Sequence Number=SeqID_2784
cggctagctccagcgaggtcagagtacggtgagcgtgagcgaggaagagagcgcgaggagggagggagagagctcgggcaggggagagaagggctcgaaccagttccatttatagagagaaga

SEQ ID NO: 17188 - DNA, 299 bp, Zea mays
  Coding DNA Sequence Number=SeqID_2785
tgcgcgagctggaaagccggctggacgggcagaagctggatcttgtgctgttctttcatgtttctccaatatgagcggggtggccctggccgaccagatccgggcgatggacctggccgagttggcgctggatttttcccggcaatggctgaagccgggtggcgcgttcctgatcaagctgttccagggcgccggcttcgacgattacctgcgcagcttgcgcgccgagttctcgcgcgtgaccatgcgtaaacccaaggcctcgcgcgcgcgttcgcgggaggtatatgcgcttgcca

SEQ ID NO: 17189 - DNA, 336 bp, Zea mays
  Coding DNA Sequence Number=SeqID_2786
agctcgtctgcgtgaggatccccgtggcgtgtcgtccatggggtcattcctggaggagttcttcccggacgtgtaccgccggatgaagggcgacgtgcgcgtgagcaactactgcaagttcgacagccagcccctgacgctcttcacgtcgtcgctctacatcgccggcctgctcaccgcgatgctcctctcgtcgtggttcacggcgaggcgcgggcgccgcccgtccatggtcatcggcggggccgcgttcctcgccggtgctgcggtcagcggcggcgccgtcaacgtgtacatggccatgacgtgcgctgaccactgctctgacgtggttca

SEQ ID NO: 17190 - DNA, 209 bp, Zea mays
  Coding DNA Sequence Number=SeqID_2787
gggcagattgctatcgagcggttttcaacgtcgcgggcaggctgggcagcgccgccaggcgtgtctatgtctagagggcagtgtatgacgctcggctgctggccgtcttgtgcaccacccacctcgccctttgtggcctaactgagaactatggggccttcagggatccatcataagctcgtgctccggtgtgcactgcacagaccttc

SEQ ID NO: 17191 - DNA, 543 bp, Zea mays
  Coding DNA Sequence Number=SeqID_2788
ggttaggcaggatactactcacagaggatactatagccatgacaaatgacaatcagctacgataattattatacaaaatactattcagaaacataatatacatgaatgacattaacaatataatatcattcttattcttattatcgaaggtcttattcccacacccctcattgaattcttcaaattcgacacccgctcctttgcctctggcacactcgacataatcgttagcctccgtatacgtggctcctccctcgctgtccgcgaccgcatcctcgtctccagcatcggtgtcaccaacagtggcactatcttctcccgtgttgtcgacagcactttccacagctctggcatcttcttttgttgtcttaattgctccagtcttcctggccgcagctttgccagcggcgtatctactattggctccgcctctggcctcttctttggctttacatttggtttctttggcttctccttacatagtcttcacacgggtcttctgcgcatgggcaagggccggcaccacaattgtcgcttcaaggt

SEQ ID NO: 17192 - DNA, 234 bp, Zea mays
  Coding DNA Sequence Number=SeqID_2789
taacagggccaggagccagcacaaaggctagacgtacagcgatcttttacaggcacgcctccacggaccagaatcacatatgacgacgatcacgccagaggtgacgcaacccggcaggcctatacagataccagcgcattttccgctgcaagcgaccaactgcgctactctgttgcgacagtgtcgcttaccccagtcatgtacacctttatgcgttcggaaagcgggcgctta

SEQ ID NO: 17193 - DNA, 310 bp, Zea mays
  Coding DNA Sequence Number=SeqID_2790
tgacgctttggcgatcgggcggacgcaggtcggtgaactcgctgggctcgccgtcggcgccaccgtcctgctcaacgtcctcttcgccggccgccggatttttcttttatttggcgcggcgcacaggcccatcacaggagcgtcgacgaactcggcgcggtcggaccttgggcccggcgatcgtggcaggccggtacacgagcatatggttgggccggtgtgcgggacggtggcgggcgcgtgggtctacaacttggtccgcttcaccgacaagtcgccgctgcgcgagatcaccaagagagcggctcgt

SEQ ID NO: 17194 - DNA, 513 bp, Zea mays
  Coding DNA Sequence Number=SeqID_2791
atgcctgcagcgagcaacaatttcgaactggccattgccgtggccatcgccaccttcggccttgcctcgccggtcgcgtttgccaccgtcatcgggcccttggtggaagtgccggtactgatctccctggtgggcgtggccttgtggctcaagcgccgctggttcgatcagccatctggcgccttgactcaggaccgcctgctgacggaagaagcggcacgcctgctggagcacttcggtgccgagacgcggatcttcaatccgaccgggctgccactggcggatgacgtgcccgatgaccaccccatagtcaaggagctgcgcgacctggtgctgtggtcggaaggcatggtctggtgctcgccagagcgccacggcgcgatgactggcgtgttcaagtcgcagatcgactggattccactgagcatgggcgccgtgcgccccactcaaggcaaaaccctcgcggtgatgcaggtctgcggcggctcgcagtctttcaacgtggtcaaccag

SEQ ID NO: 17195 - DNA, 164 bp, Zea mays
  Coding DNA Sequence Number=SeqID_2792
ctgcgcgacgcgaaggtggtagtggaagatatcgacgacaacccgggcttcttccgcgtcaggctgtacgccatcccacacttccaggtagagggcatggacgtcaacctgtcactggtttcccagatgccgaaggcgaaatcgggcgttatggtctctcccca

SEQ ID NO: 17196 - DNA, 286 bp, Zea mays
  Coding DNA Sequence Number=SeqID_2793
tggaaatgtttttactgccccctctgctctatgtgattgggatgacatggatatttttgggggcggactagagcccatccttcaacagacagagcaagactttcaagtggaccctcctctaacaattgaagattacggttatgcccgtccatggttaaagcaggactgccagttaaaagcgcaacaaaattgcaaaaatccccaatatgctgatgtcataactgaagcatgagcggtggtacaaaagaattttgtccaataacgtaagtggataaaggtgctttgc

SEQ ID NO: 17197 - DNA, 341 bp, Zea mays
  Coding DNA Sequence Number=SeqID_2794
tggccaccagtaatattcgacacccaatgctctctgatgcatttgagcagcaggtgaaatccctgattatggaagggacgctccagccgggtaaaaagctgcttcccgagcgtgaactggccaaacagtttgatgtctcacgtccatcggtgcgagaagcgatccagagtctgaaagccaaaggcctgctgctgcgccgtcagggtggcggcaccttcgtacagcagaatctctggcaaagcttgagcgacccgctggtcggcctgcttgctgaacatcctgaatcccagtttgacctgctggaaacccgccaaacgatggaaggcgttgcggcctactac

SEQ ID NO: 17198 - DNA, 207 bp, Zea mays
  Coding DNA Sequence Number=SeqID_2795
gaggtgatcaaatccgtggcgcatcgcgtggccgtcatcgacgccggggagattgtcgagcagggcccggtgtggcaggtgttcgcccatccgcaatccgcgctgacgcgcacgctgctgccgcagctgccggaaaatctcgcagcgcggctcagcgaacagcgtgaaggtgaggcgatctatagcgttcactttgctggcgtggcg

SEQ ID NO: 17199 - DNA, 353 bp, Zea mays
  Coding DNA Sequence Number=SeqID_2796
agagatcagtgagttttccggtgaagaagatgaggaacttacccagatcgaacaagacggcattacctatgcctcattccccctcaatcaaaacgattacgatcagtactactgccagttttctaacacggtgatctggcccgcgttccactatcgtcttgatctggtgcagtatcagcgtgaagcctgggaaggctactgccgcgtgaataccctgctggcgcagcggctgaaaccgctgatcaagccggacgatatcctgtggatccacgattaccacctgctgccgtttgccgctgaactgcgtaaacagggcatcaataaccgaatcggattctttctgcatatcccgt

SEQ ID NO: 17200 - DNA, 177 bp, Zea mays
  Coding DNA Sequence Number=SeqID_2797
cacatccgtggctcaacaagactggattctcgacgtgtgctgagactgttcttgttcttgtcgacagcgtccaccgcggcgccggcctccaggagtgtctgcgtgcactggagttcgccgtgtcctccttcagggggcgttcggttctctcggaacggtttggaattcaacgtggca

SEQ ID NO: 17201 - DNA, 574 bp, Zea mays
  misc_feature (487)..(487): n is a, c, g, or t
  misc_feature (542)..(542): n is a, c, g, or t
  Coding DNA Sequence Number=SeqID_2798
cgtagtgggttctcgagtcgcagcgggggccccttctggggtgcctggtgatagccgctcggcgctgcagtttcccgtggtgagtttttgtgtgtgatagatggatggggcctcatccgtttgcttggcagtgttttttttgggttgagcggtgttttcttgttgtgttcgccaggtcgcgggccgccattggcgttttggcggtgcaggcgtgcgacgtcgctgcccggttcacacggcggcggcggggcgcgctcgctgggctgtgggtctcggtcagggggcagccggtccggcgcatgcttggcatgtcggtgcgcgggaagctgggcgtgtgcgccttcgtgttcctcctggaggtgtgctcccgcgcggagctgtgcctccggcacagcgtgggcggcggcggggatcgtcgcgcgacgcagtggctgggctaggccgtgcgtgtgtgtgatggtttgtgcctttggcttcgtcagcgacncggcgtgggggttgtttgtggttgctttttcgttgtgcccccgggggccctggcntttcttccccgtggccgtgaatatgcatggat

SEQ ID NO: 17202 - DNA, 190 bp, Zea mays
  Coding DNA Sequence Number=SeqID_2799
gggtcgattactactcggcatctaccgcgccgacgatggagacctcaagaaagcctaccgaaagctcgccatacggtgctaccccaacaagaacgcaaccaacaaggaggcagaagccaagttctaggatatctctgttgcatatgaggttacccgcccctccctctcactctctatttacaagcagtat

SEQ ID NO: 17203 - DNA, 485 bp, Zea mays
  misc_feature (400)..(400): n is a, c, g, or t
  misc_feature (425)..(425): n is a, c, g, or t
  misc_feature (439)..(439): n is a, c, g, or t
  misc_feature (458)..(458): n is a, c, g, or t
  Coding DNA Sequence Number=SeqID_2800
aacgagctcgtcgacaacatgacggagttcgatcgcttcgtgcggactcccaaggtctacgagtcctacctcttctacgagaaaacgttgaagtcgctggatgacgtggcagagttcctcgtttgatgcagacccatgcacgaatgcagccgtagaagtggtgccagtcaaactgatttaaagtttgacaaaatttacaataatgatatcgatattctctatctctaacaaatttactatatacactgtaattagtttgatggtacttcttttatgtcataaatattaatatttttatgaattctttgaataaaaaaaaaaaaaaaacctgcagtagtttctcgactcctgtagcaagaaagaaaccatgttcggggtatggtgttcgaaggacggatcntttcggcgtgcggacagtgacccgncgaataaatgtacncgagaacgccgccgccgtngcgtcgcgatgctcttatatatccgga

SEQ ID NO: 17204 - DNA, 533 bp, Zea mays
  misc_feature (427)..(427): n is a, c, g, or t
  Coding DNA Sequence Number=SeqID_2801
tgcagaactacttccggctctacgacaagctctccggcatgaccggtacggcgatgaccgaggctgccgagttcgacaagatctacaagctgggcgtcgtgccgatcccgaccaaccgaccgatggctcgacaggaccaggccgacctcgtctaccggaccgaggaggccaagttcaacgcggtcgtcgaggacatcgccgagcgacacgccaccggccagccggtgctcgtcggcaccacgtcggtcgagaagtccgagctgctctcgggcctgctcaagcgcaagggtgtcccgcacaccgtgctcaatgccaagcagcacgccgacgaggccaaggtcgtcgcgctcgccggccacaagggcgccgtcaccgtcgcgaccaacatggccggccgcggcaccgacatcatgctgggcggctcggnggagttcctcgccgaccaggagctgcgcaagcgcggcctcgacccggtcgagaacgccgaggagtacgacgccgcgtggccgggccaccgtcgagaagatccaggc

SEQ ID NO: 17205 - DNA, 242 bp, Zea mays
  Coding DNA Sequence Number=SeqID_2802
tgcgccggcgtaccacgtcgggagcgggaacgtcgccgccgccgccgcgccggggcatggcgcgccgagcaagacgcggatccggtggacgcaggacctccacgagcgcttcgtcgactccgtgaaccaactcggcggtgccgacaaggcgactcccaaggggatcctcaagctgatgaactccgatggcctcacaatctaccacatcaagagccaccttcagatctatgggcttactaata

SEQ ID NO: 17206 - DNA, 203 bp, Zea mays
  Coding DNA Sequence Number=SeqID_2803
tgccggacgacgtggcgccgtactacacgaacctgacgtgcccgttcatcgacgacctccagaactgcatcaagttcggcaagccgagcctcgagttcctgcgctggcggtggcagcccgacgggtgcgacctcccccgcttcgacgcggcgcggttcttggaggccatgaggggcaagtctatggcattcgtcggggactcc

SEQ ID NO: 17207 - DNA, 333 bp, Zea mays
  Coding DNA Sequence Number=SeqID_2804
ttattcagatctgcattccttcggcgtattccgacctttacacgtctcattattgaaaatcttcttctatgctttctccaatccacgttatatcagacatcaaagtacttaacagggtctttaggcctgcgcttcaagaaaatcttgacagatcttgtccatgctgattattttgagaacatggtgtactacaagatctcacatgttgatcatcggatcacaaacccagagcaaaggattgcaagtgacataccaaagttctgctcagaattaagtgaccttgtacaggatgatctggctgcaattgtagaagggttaatatacatctggcgc

SEQ ID NO: 17208 - DNA, 318 bp, Zea mays
  Coding DNA Sequence Number=SeqID_2805
tgcagatccgccagctggagaagctggccgacggcatcaatgatgcggcggtgatgatcgtgcgcgaacagatgcgccccggcgatcggcaatcggaagaggtgctgctgcgtaatcgcgagaaaatcgcgcgcggcctcgacgcgctggaaaccgctgccgcgcaaggtgaattgctcaacagcggcacgctcaacctcgccgatatcgccaccggctgcaccctgggctatctcaattttcgccgcgtgctgcccaactggtgcgtcaatcgcccggcgctggttaaactggcagaaacgctgttcgagcgggaaa

SEQ ID NO: 17209 - DNA, 171 bp, Zea mays
  Coding DNA Sequence Number=SeqID_2806
atgaacgacagcgacaaccatgctcggcacgacgacaccgacccccagccggacaaagcatgtgccagaccaccagcaccacacaaggagaaccgaacgaccgaagaacacggccatgagcgacagcaagcaacgaagatgagaacaaaaccgacagactggaggcgccag

SEQ ID NO: 17210 - DNA, 595 bp, Zea mays
  Coding DNA Sequence Number=SeqID_2807
aggtgcgcatccaaatcatagcggaggtttgctccgcgctgatcttcctccacaagcacaagcctcacccggttgtacacggagacctcaagccgggcaacatcctcctggatgcgaacttggtgagcaagctcagcgacttcggaatctcccgcctcttgctggagtccagtgccaccggcagcgaggcacacttcaccactcagccgatgggcacgccggcatacatggacccggagttcttcggcacgggggagctgacaccgcagtctgacacgtactcctttggcattacgatcctgcgactcctgaccggaagggcgcctctacgcctcgcgagggtggtgcaacaggcggtgagtgacaacgaccttcgctcggtgttggatcactcggcaggtgagtggccgctggcgcaggcagagcagcttgcgcggattgggctgcgctgctcggagctcagcagggagaaacgccctgatcttgagctcgacgtgtggagggtggttcagcctatgaaaaaggaagctccttcgccgttgtcgcaatcttttcggtccatctccgatggaagcagtagagctgctgccacacc

SEQ ID NO: 17211 - DNA, 382 bp, Zea mays
  Coding DNA Sequence Number=SeqID_2808
ccccagagatcgtgttgaccaatggggatgaccacataccacgtgcaagagcgggcgacccagccccagagactgcggaacggaacgcgagcaccagcccaggagcaggcccagcaggggcacgggagagcgcccagagggcgacgcaaacaagaaggcccagcaaaaggggcgcgggacaaaacacaagcacacggaaaagccctggtcgcaagaccaaaaaccacacccgcccacctgcaagccgccgaaagcgaagcgaacgaccaacccagccccggacagcacggagagcccgccccccagcgccgggaaccccaaagctctcacacaccgctcggcagacagaaaccacccggctgcctgggagacaacacaagaa

SEQ ID NO: 17212 - DNA, 363 bp, Zea mays
  Coding DNA Sequence Number=SeqID_2809
ttctgcatgaacacgtagctttttaaccaaattaacgtcatctatctttctaaagtgaatcttttttttcagtctacattgagattagagcagcttgacaagattgcagaaagattagcgcaccatgttatgggtcatcatgaagaaatggtgaaggggatgcagttagtgatggaattagaacatgacttaaaggttgcaaatgtaatctgcatgaatggatgaaggcatattacctcttcgaagaattaggtgtcgagggatctggttgtcaatgtaaaatcaaaaaagaaacaagctttgctgggatgtcttcctatccttacagagcttcgtcatgctctagacatgcagatggaactt

SEQ ID NO: 17213 - DNA, 543 bp, Zea mays
  Coding DNA Sequence Number=SeqID_2810
ctggcaggcgcggaagagatctttatgattgaccacaacgcttatcgactggaatttgcccgccagcgttatggggttacgccgatcaattttgatgaaatcgacgatcctgctggctggatcattgatcatacccagggccaccggggcgttgatgcggtaatcgatgcggtaggttttgaagccaagggcagcctgacggaaacggtgatgagtaatctgaagctggagggcagcagcgggaaggcgctgcggcagtgtattgcggcagtgcgccgtggcggtgtggtcagcgtgccgggcgtgtatgccggctttatccacggcttcctgtttggcgatgcattccataaaggactgacctttaaaatgggccagacgcatgtgcaggcctatttaccgcgtctgctgtcgctgattgagcaagggctgctgaccccggaagagattgtgacgcaccatatgccgctgaaagaggccgcgcgcgcctatgaaatctttgaaaaacgtaaagaggattgccgcaaagtgattctggtgccc

SEQ ID NO: 17214 - DNA, 349 bp, Zea mays
  Coding DNA Sequence Number=SeqID_2811
gtgggatcacaaactgcattacgttgactatggccagcaaaaagcgcacgggctggtattcagaaacggcaggcgctacgaagccgatatcgtgattggtgctgacggtgcctggtcgcgggtccgccgttatctgacaccggtacgtccggtttataccggcattacctttttcgaaggctggatagatcacccgtccgaccaaatcaacagcattgccggcaacgggaccgcgttcagcttcggcggtgcgcaggcgctggtcacgcaacgcaacggcggcgggaggatttgcgtctatgcggcgatgaagcgcgcccctgatgtcatcgatcaacacatagcctcc

SEQ ID NO: 17215 - DNA, 423 bp, Zea mays
  Coding DNA Sequence Number=SeqID_2812
tatgcgaaccgtctgactggacaatggaaacctgcgccagctttattgcaatggttggccgactgaaagtggacgagctgtcgctggacacaaataaagggggcaggcgttcaaaccgctcaggaaagcccctgatgccgcattcccgcagccggtttgtttatgcagttcgccgttttatgcttgattatgaaagctggggctgggggaaattaaaattcagtccggcccgtcatttgtcctcgcctgacacaccgctgtttcgtcagggcgtgaatccccgcgtcattgatgatccggtatggctgaaactggtctgggcaagcctgaatctgcgtaaagaagatctgctgagcgaaattcattatcccctgtctatgcttcaggctatggcggttatctggacacatgcagggctgcgac

SEQ ID NO: 17216 - DNA, 122 bp, Zea mays
  Coding DNA Sequence Number=SeqID_2813
catcgttcgtgtgattattgaggtacgctaatgatcgtgcgagatgaagggtgtggaccggcgatatctcagcaactatgtcgacagaagatgaatggattgaccataccaggatttttgat

SEQ ID NO: 17217 - DNA, 430 bp, Zea mays
  Coding DNA Sequence Number=SeqID_2814
tgcaccaagggcaaggcactcctgctcctcctaccaccgccagccacgcccgccgcatcgcccgccgcacccgggacagctgcgccgcagccctcgccaacactctatgctccctcctcctgggcctcctcctcatcgccgccgtcgtcgtcttcgttatctggctcggcctgcgcccacaccgcccgcgcttcaacatggcctccttctctgtggccggcggcctcgacccggactatagcccggccggcgccagcctctccttcaacgtcaccgaccgcaaccccaaccggcacattggcatctactacgacgccatgcacgcatccgtccacttctacgacgcgctcgtcgcctccggcccggccttcgccgacggttggtaccagcccaacaggaccaccacctcaatcacgggactcctcgactt

SEQ ID NO: 17218 - DNA, 461 bp, Zea mays
  Coding DNA Sequence Number=SeqID_2815
accgacaggcgggacatcaaccaagccgggacccaacaacagcacagaaaaccccacaggtcaaagacagcggagctccctccagcctccagccaagaacacgagcgaaccaccgcccaaccgaaaccgggccccaccggccgccccgacgccacgaacgcggccggagcgccccagacaagcgccacgccgagcgccgacacgccgacgccgcgacccccacggcgctacccgcagcctccggcgagcgagaaagcccacccgccgaccgccacccccagggcaccccgcggcaccccctccacccacaaccccccgaggaccccgacgccgccgaaggccaaccacaggcccgcgcccaccgccccgccgcggacccgacgcccaccatggccgaccccgcgcccgccgagacagggcccgccacgacgccgacggccctggaagactacaacgcgccc

SEQ ID NO: 17219 - DNA, 509 bp, Zea mays
  Coding DNA Sequence Number=SeqID_2816
gaggaccccgcgaagccggatcctgcggcgccgctggcccagttctgccccgtcggcggccatttcaacttcggcccgaccgacgccgagctcagggagttcgccgcggacatggaagccctcctcgggcacggcctggacgacggaaacgaggaggaatcgtcgttttacatggagacgctgggcctcctcgaccaatggaagtgggcgacgatgccacgcaagtcaaggtggagaccgacggcagcagtgcgtgctgcgaagccagtggcacgctggcctgtggcctggagctggacttagaggcatctgacgagatgctggacatcgacttcgagtacgcatcgcctcaggacacggcgacggacgagagagccgccagcagcgacacgggagccgacgcccagttcttgcagacgagcctctcgctcaccctcaactacgaggccatcatccagagctgggggagctcgccgtggaccggtggcggtgagcgaccacacgtcaag

SEQ ID NO: 17220 - DNA, 316 bp, Zea mays
  Coding DNA Sequence Number=SeqID_2817
tcggctcgagctcgctctggatcgattgttttttgtaactggtgagggactgagggtctcggagtggattgatttgggattctgttgcaagatttgcggaggggggcaatggcaaccgcggcgaaggtgatcaagtgcaaagctgcagtggcatgggaggccgtcaagccactgttgatcgaggaggtgggggtagcgcctccgcaggccatggaggagcgcgtcaagatactgttcaccttgctctgccgcaccgacgtctacttctggtaggtccaggggccgactcccgagggccctcggatcttgggccacg

SEQ ID NO: 17221 - DNA, 362 bp, Zea mays
  Coding DNA Sequence Number=SeqID_2818
aagagagggagcacgacggctcgctggccgtggtgctgggcgccctgcagcgcatccaccagggtttcttcgacggccaccgcgcggacgtcagggaggtgatcgcgaaggtgcggagccaggtgctgcccgagtgcacgctggcgttcagctttctggagcaagtcatggaggactaccccgaggccaccctcccgtggaggttggccgaggcgttcggcgccgcctgcaggaaagacgtcgacgaggaggtcacccatgtcgtcgcggaggatccggcggccgagaaggcgcagtgggcgcgggataatggcaagttcctcgtcaacacagagtgggtcaaggcggcgagtttccggtgg

SEQ ID NO: 17222 - DNA, 199 bp, Zea mays
  Coding DNA Sequence Number=SeqID_2819
ggtcattcactattagtatagcattattaagttaaattctggattgtactggtcttggaaatatttgagagctttatgcgttcatcagaggaaatggtcagaggctatacaaagccttcagcatggaatacgaggttacccaacatgtgcagatttatgggaggcacttggtctggcataccaccgtttgggcatgttc

SEQ ID NO: 17223 - DNA, 455 bp, Zea mays
  Coding DNA Sequence Number=SeqID_2820
tgcaggcgccgagtgtcaatctggcgctggagcgcgcgcatgtcagggtcaccgccgaggtagggctgtaggcgttgccggcggcggtggagcgggcgggctatagcgccggtccggtgaaatccgtccggccggatgccagctggcgcgaacagatcgagctgatggccgccttcctgctggcggtgccggtggtgctggacagcatggtgatgccggtgcccaagctggtgccgctgatctgcgccgcgctggtgcaggtctggctgggggcgcgcttttaccgggccgggtttctggccctgcgcgccggcggcggcaatatggatctgctggtggcgctgggcacctccgccgcctacgggctctcgctttgggatgtcttcgccggcgggccgctttatctggaaagttcggtggcggtcatcgccctggtgcggctgggcaaatatctg

SEQ ID NO: 17224 - DNA, 551 bp, Zea mays
  Coding DNA Sequence Number=SeqID_2821
gccatcactggctttggattcgaacggtggaaaagtgggatcgacgccaaaacgcagcgtctgctgcgccgcagccagttggctaagggcgctgagggctcatgccgctgtcagcctcggttttctatggtaacccgcgttatactgcccgccatcagcaagcggccgccactgccgggagatcgcatgaaaatattggtgatagaagatgaagccggggcgcgtgattacatgcgcaaaggattgaccgaggccggttttatcgtcgacgtggcggaaaacggtcaggatggcctgttttatgcgcaggagcaccattacgacctgattctgctggatgtgatgatgcccggcatcaatggctgggaggtgatggcgcagctggataagcaattgcaaacgccggtgattttcctgactgccaaaggcacggtggaagatcgcatcaaagggctggaactgggtgccgatgactatctggtcaaacccttctccttcgccgaactgctggcgcgcgtgcgcacccaattgcggcgcggtagccagcaaaa

SEQ ID NO: 17225 - DNA, 401 bp, Zea mays
  Coding DNA Sequence Number=SeqID_2822
ttttttatggacaactctactcaacatttataagagcaaggattttgttaataaatatatgtttttcataaccatgttggtccacaggatcaccgtgaaatagccaatgtgtaccgaccttctcatgcagacgcaacttatgacttcaagtacggcgttagagctgtacaggtagaattttttttctctataccacttgaagagcctcagttttttttttaaaaaaaataacactgaaatgtcttggacacatgaagtattaccgaatgaacaacacccactgtccaaaactagcatgttctggtgctaatattgtgaatccaccggctatctcctcctctccttccctcaactagcactagtacgtggacaagccccttccttatggcagaggcgcagag

SEQ ID NO: 17226 - DNA, 264 bp, Zea mays
  Coding DNA Sequence Number=SeqID_2823
tgcagaatgaggtcatcaccctgtgcggcggtcgcaatatctttgctgacagcatcgtgagctggcctcaggtgagccgggagcaggtgctgacgcggcacccgcaggcgattgtcactggcggtgatgccagccgcgccgccagcgtcgcgcgcttctggcagccgcagcttaacgtgccggtgattgcgcttaacgatgactggctgagccggccgggtccgcgcctgctgctggcggcaaaacaattgtgcgaagctttac

SEQ ID NO: 17227 - DNA, 246 bp, Zea mays
  Coding DNA Sequence Number=SeqID_2824
atgatctcaccatcccgtgtcctagtcctaggccaacgcacaggtgtcgtcgagccccacggctcaagacgtgtccggcggtgcgcccgtgtccgtcggcgatctggtaccaacttgccggctcggccggcgtgcaccatggcccttgcccttcccggcggcgcgcgtcggcatggcagcagccagcagcgaaagggagcgagcctgcagctggtccttccgccgtgaagtcgaccgggccaccgt

SEQ ID NO: 17228 - DNA, 525 bp, Zea mays
  Coding DNA Sequence Number=SeqID_2825
ctcgacgttcgctggagcggaagatcgatgcgcacgggctctcctttgctacgccgctgcctgcctcaaggttcgcttgagcggatgatgcacccgagctctcctccgacgattctggccgcgcgcaaccgtcacccctgcccccgcctccaaccaaccccgctccgctcgcgccgaaatcatcgcgctttcgcccatgccgccagatgccgcgccggccaccatcagcgtccctccccacaactactgcctccatttgtgtgttcacatcttctccctggcaactgcttctatcatctccaccaccatccccacgttctcctcgctccgcctctcgcgtcgaccccgcggaggccgctctcggggacctcctcctcgccgccctacaccacttcgagctcggccagccgccagacccctcgatgctccgatccctcctcctccaaatcggaatctccgacgccgcttcttgccgctccgaaatcgagtacctggaggagcaaatcctgagccaagaggaggacg

SEQ ID NO: 17229 - DNA, 358 bp, Zea mays
  Coding DNA Sequence Number=SeqID_2826
agttcttccgttgccggcgcctggtgccaacgacgagcttgtggagagaagagattcaggtcttcagaatcggactagtgagcctctatgtcgcacggaatacattcgttacctcgcttgggtggattcacgtcctgtgccgccagaatctttcgccgtgttcgtcctccgtcgtggatccgcatcacgccgtgggcagcgatctgcgctacgatcactgggtaggcgcgtggggtacaggaacatcggaccgggtgtctccggccatggcaccaccgcggggcgcaagcgcgccgccgcttggccaccgctgggttgggtgatggaaccgatcgtcggatccggatctaacggcgct

SEQ ID NO: 17230 - DNA, 261 bp, Zea mays
  misc_feature (59)..(59): n is a, c, g, or t
  Coding DNA Sequence Number=SeqID_2827
tgccgcgccaaaccggctcaaggtgcgggcgggcgtcctgaccggacgcgtcctcggcnacgtggtggacgcgcgcgcgaaggcggatgcgctccgcgagtgggcggcggcggacgacgtgccgctcgtccggacggtggcggtcggtgacggcgcgaacgacctcgagatgatgcgtgtcgccgccctgtcggtggcgttcgacgcgaagccgcgcgtgcgcgaggaggcggacgtcgcggtggtcgaccgcgacctgtc

SEQ ID NO: 17231 - DNA, 339 bp, Zea mays
  Coding DNA Sequence Number=SeqID_2828
gcagcgcccaggagaacgagaccatcgtgtcgtgcctcgcggacgtcatccgcggagccgcgccgccgccgtcgccgtccccgtggccgccagtagcggcagccgcaagcgacgctgccgcggcgtcgtacgggcccgcgccgatgcagatgcagatgcagatgatgcaggcctccggctccgggcactcggcgagcgtggcgcaagatggtggggccacgatgatgacgacgatgatcggcacggacgacacggacttttcctgggatccctcgctggccgatcatcagatgatggagcaggtccaccgcgacatgctgcacgtggtgggtgtcgccc

SEQ ID NO: 17232 - DNA, 550 bp, Zea mays
  Coding DNA Sequence Number=SeqID_2829
aacagcagcgtcatttctggcgtgactggcacgatggccagcagtgggatcgcgtgcagagcgaactgctgcaacgttaccaggcgcagtttggtgagtcggtaaaatattacgccatcgatcagggcaactggccgccaatggcgatttcgcagcactggcataacggcgtgtggtatttcttcacgctcggcatgagtatccggccgatgccgcaggtggattacctgtttgatgagctggcaccgcagtaccggcgtgtagagctggcgatggcggtggatggcgaagtgatgaccgagaccaacgcggtgcagatggccagcgcgctggcggagtttgctcatctgccatgggcgcggctgacgtggattggcgaagggcacacgctggcgtcggaagttgcgccggtcggctttgaaagcttcctgctggccaacgggctggcgggcgaaaacgcgcaactgcggctgccgaagcgcgacggcgatcggccaaatctgctgtgggcgacgccgatcaccgaagccgagcggctgtttgcccaggc

SEQ ID NO: 17233 - DNA, 300 bp, Zea mays
  Coding DNA Sequence Number=SeqID_2830
taaactctatccctccccccagccggccaccacccagcccctggccgccgcctctgctctctccctcccccgccggccgccgctgttccctccctccccaagccggccgccgctgctccctccctccccttccctccggccgctgcccgcacagccagcccgtggccgcgccgccgctgccctttccttcggccgccgcccgcccgcctagccagcccctggccgtcgccgcatcctctttgctcaccagtccggccgccagccagcccagctcgccgccggtcgtcctctgcgcgcggc

SEQ ID NO: 17234 - DNA, 177 bp, Zea mays
  Coding DNA Sequence Number=SeqID_2831
agcctaatagtagccagctatacgtgatccaccacagtgtgcagtgctgagtgcgctcgggtgcgcgtttccttatcggctctgccgcgtcgatgtccagttaggtcagacagtgtggttcaagccttgtgtcacagcatatttagtaagggtaggtttaactccctcgtcattccg

SEQ ID NO: 17235 - DNA, 368 bp, Zea mays
  Coding DNA Sequence Number=SeqID_2832
atgaatgcagatgcgctgggaacctgggacgacgatcatgcattgcggcccggcccggcccaccgggagtccgggacacaaagaccgtcgccacgagtgacgagaacacggagcgaggccgatggagggacgcacagcacagggcgtgccgcgtgcgtggcttgcctgaccaaccggagtggtgtgatctgcccgacgacgaacagggtggtgctgtgctgcccggctggtcagctgtgtatggagaccctgtcggctaaggatcaacaagagtaccaggagcacacgaagcagctgatcaaggaggcccaggcgatgtttttggccaacttcaaggtggaccaaaatcaaaaggtcgtccggcagcg

SEQ ID NO: 17236 - DNA, 220 bp, Zea mays
  Coding DNA Sequence Number=SeqID_2833
gggctggaacctccacccgcttggtgcttgtgggcttgcccggcttctcacgcgctaggagcgggctcccgtccgccactccgacgccgactcaagctgaccggcgctgggcgaccggctggcgcgctctcgtggcgctcgccgtcgacttaggacgggttaactggaaacactctgggggagccgagcgcatgcgacctgctacacatcctactctaca

SEQ ID NO: 17237 - DNA, 338 bp, Zea mays
  Coding DNA Sequence Number=SeqID_2834
cgcgcgatcgtcaaccggacgatgaagagcgtgaagaaagctggcagcacgttgtggcattggctaccacgctcttggctgatgagtgggcgctggacaacgaaaccctgctgcaccgcctgtatcatgaagatgccgagcgcctgttcgatatccagccgctgcgcttcaagtgcagctgctcgcgcgaacgttccggcaatgcgctggtcagattgggcgagcacgatgccaaggcgctggtggaagagtgcggcgggcaggtggagatcgattgccaattctgcaacgagcgctatttcttctacgccagcgatgtggcgcaactgtttgccggt

SEQ ID NO: 17238 - DNA, 232 bp, Zea mays
  Coding DNA Sequence Number=SeqID_2835
agggctgaccctagatagcctcgtggctgcaggctgccttggtgctgacgcgttatgtcatgcggtgtgtggtaagtcggtggattacagtacaccaactgatgagttgtcttggtctagttcccgcacagctacagagatgcgatgggagtgagtgagacatcaacctgaggagaggcctgatggtcagaggacgctccccgggtgatgattcaatgcatatcgcagaggg

SEQ ID NO: 17239 - DNA, 578 bp, Zea mays
  Coding DNA Sequence Number=SeqID_2836
atcggcaacgcgatcgagcacggcgagggcaagccgatccacgtcctggtcgacagcaacgcgggggccgtcgcgctcgccgtgcgcgaccacggcatgggcatgagcgagggcgacgtgggccacgtcttcgaccggttctggcgggccgacccctcccggcgccgcaccatcggcggcaccgggctggggctcgcgatctcgcaggaggacgcgctgatccacggcggcgtgatcgacgtgtggtcgcagctcggcgacggctcctgcttccgcctgaccctgccgcggcgccgcagcggctcggcggcgaactcgccgatcccgctgccgccggccgacgcgctcgatctcgccgagctggaacgcgaggccaacgccgccgccgaagacctcgaggagggcgaactcggcgacgtcgtgcgcggcggctcggtgtccgcgcaggacaacggcttcgaccagctcgacttccacccgaacccgcccgcgaagggcgagagccagcaggacatcctgaacggcttcatcgacgccgcggtgagccctgacggcggctaccagatcgcgcgcgcgtt

SEQ ID NO: 17240 - DNA, 60 bp, Zea mays
  Coding DNA Sequence Number=SeqID_2837
gagcaggtaactatgcaggatatcttgatacgaacagcctgcggagccccttgaggaaac

SEQ ID NO: 17241 - DNA, 585 bp, Zea mays
  Coding DNA Sequence Number=SeqID_2838
atggcttcgccgttggtcactcatgccgtcatgcgcgttgttgctctgcattttggctccggccaatgcaacccctcgcgcacggccacaccacacagccaaacttcattcacaaaccgacgagtcgatgcgtgcccggttgctacgcactattgcccttttctcccccagtcccgacctatctcagttgactcagctgagtgcgagtccgacgcatgcacgccccggcgggcctttttccgtttcgtgccgagtaggcgcgccgccgatgagtcgtccctttcgcgtcgccttttgctggaaaagcacatgcacgtagtccccgccgaggcacgagcgccacaagcaatagctccctctccctctgccagttatgttcaatgcgtgcgacggcggcctgactcggagcaccatgatccttcttccctcgtacgtgttgccgtgttggctacccagcgaaagagagagaaccagagccgggggcggccgggcggggcacgagcacgactcgtctcactcagcctcgccgctcacggtcccggcgtcgttttcggccgaaagagatggtcggatctcacacgcgac

SEQ ID NO: 17242 - DNA, 503 bp, Zea mays
  Coding DNA Sequence Number=SeqID_2839
cgaccacgtctaccggatggacttccaccagatggtcgtggcccacatcgcgtccggccgcagtgccacggtcgccgcgatccgccagcccatcggcctcgccgaccagttcggtgtcatccaggtggcggaggacgacccgacgaggatcgacgcgttcctcgagaagccgaaggacgccgtcgggctcgccgactcccccggcgagatcctcgcgtcgatgggcaactacgtcttcaacgcggacgccctcgtcgacgcggtcctccgggacggacaggtcgagacgtcgaaccacgacatgggcggcgacatcgtcccggacttcgtgaaccgcggcgacgccggcgtgtacgacctccagcgcaacgacgtgcccggctcgaacgagcgggaccggtactactggcgggacgtcgggacgatcgactcgttctacgacgcccacatggaccttatcgggcccgtgcccgtgtttaacctgtacaaccaggactggccga

SEQ ID NO: 17243 - DNA, 300 bp, Zea mays
  Coding DNA Sequence Number=SeqID_2840
agctgctgttccagctggctttgcagttgttgctgctgcgcgctgagctgcgtcagcgtttgctcacgctcttcaagccgggcgagttcggcctgccagcgcgccagttcgccgccccagcgggcgacagcggcttcactcaggcgaaacgcctgctgctgcgccagctgctgttgtaagcgttcacttgcctgctgatgctgatccagcgcctgctggctgagtaacagggttttttgctgttcgctcagcagcgcctgctgctgctcaagctgctgtgcacggctggcgatctgctga

SEQ ID NO: 17244 - DNA, 268 bp, Zea mays
  Coding DNA Sequence Number=SeqID_2841
ctttcagcaataagtcatttgagaatgcatgcatggaatttgatgaagagaatctaaagcctacattcaagattctgtggggaataccaggtcgctcgaatgcaatcaatattactgaaaggttgggtttgcctttggatatagtagaaaactccaggcatttacttggaacagctggtgcagagataaatgctgtatgctttttttgggcacttttctgtacttagaacttgcacatggttttgttgtccaaaatatcttgttatga

SEQ ID NO: 17245 - DNA, 216 bp, Zea mays
  Coding DNA Sequence Number=SeqID_2842
acctgcagaactggcgcatggagctgcttaacctgccctcttacacttgcttgcgggttgggcccgaccatgcgccgagagagaaggcatcggtgaactcaaagggggagcaactcaagagtcccaagattctcaagcacgcaccaccaagcacaccactccgccgcgaaggagcagatcgcccaacaacggcgacacagtgcgtactcccaagat

SEQ ID NO: 17246 - DNA, 195 bp, Zea mays
  Coding DNA Sequence Number=SeqID_2843
acccgtgtcctctgtggccaggatggctccaaggctatggcgagacattctccgaatgcacacgcgacgaccatgacgcagaccttgacctcgccgaactctactacatccctatgatgctttccgtgggtgctaacgtccctgacaccatgctgaaggaggccgcgcccatgaccataatggcgcccgtcgcag

SEQ ID NO: 17247 - DNA, 570 bp, Zea mays
  Coding DNA Sequence Number=SeqID_2844
aatcatataactcatgcgctacccggtttagcagcgggtcagtgacatccgacgactcgccggcggtgacgcccaggctgctgtccttgatgtccagctccagccccgaaaactgctcaggctgtacccactccatctgtgcccactggttcgttcctggctccgaatttctttcccatccatctcccttgcgcttcctggtcccttgttgtacatgggtcgccgtgtatgtgatgcgcttgaactggtaggcttctaagtgagacttgtctgcattctgctcttcgaaagccatcatatcctccgtagcagtccctggttgaaggttggtttcatatttacttccttgattagcaccattgtagcttatagaaagtaaaacattggcggatggcaaagtcagatccccatgaatatggtccttttccagatatacctcctcatctaggatgagttgatccttaaaccaagcacccctaatactgtctatgcctagatcagtgatgtcgttgtcgatcttacgcttggtgcccctaataacaatcttattaggtccatcagcctttcctg

SEQ ID NO: 17248 - DNA, 380 bp, Zea mays
  Coding DNA Sequence Number=SeqID_2845
acacaatataaaaggcgcgcggcgccgagtgcgacctggtcacgcagagggaatccagccggctggagatgatgtcccccagcctgaaacagcgcctatcctccaagaccggtgttgctcttgtactgatcatgcgcgaatatagcccgactgcgatggtggaaacgctgcgccataagctgtcgatctcccgatacaactcgattgtgccgggcggcggttatcataacttcaaagatttcatcggcctcccgaacgtgggcgaagcccatctggaaaatcgtccgctgccgcagattcgtcatatcgggtgttcatgggttccgcaccggccttcattgccatcacgcaatgctcgatgatgctgcttcattgtccgc

SEQ ID NO: 17249 - DNA, 392 bp, Zea mays
  Coding DNA Sequence Number=SeqID_2846
gcatttcgggttggtctctgaggtcgtcctgagtttctccttaggtctgtgacctcgccatttgtggttgttaaggtgcttagcatagtatctggatatgcctttcgtctccaaggctgctcgatactgttttattcaggactgaccccgagacatacggatagttcttgcagtcactattgcgttggatatatggcatgttcatggataaacgtccgttcttcagtaagtctgttagccgcttcttctttaggtttgcgttcgatatgtctcaccacattgggattgccgaactacgtttggtcttcggcagtgtgattagtgggtttgcaccgccattgaaggagaaacattagttgctcctatggtaagcacttatgcctcttcatgtg

SEQ ID NO: 17250 - DNA, 313 bp, Zea mays
  Coding DNA Sequence Number=SeqID_2847
ggtagagacgactgcgttcgcacgtctgacagtttccaagccgtagcgattgctagcacgctagccttccccgttgtgtcggcggcgttggtgcggacctgcggctctggcttcgcctgtgtggcagcgacaaaagcgctcgcgagcggtggctcggacaggcggggctggattatctatgaggcgacgtgggcttacggcacacacgagcggcggtgcaccaactcaccatcaaaggtgcggcggcggctgacgcgtcggctctggtcggcgacgtatgtgagtgacagccgcacactgtggctttggctgg

SEQ ID NO: 17251 - DNA, 406 bp, Zea mays
  Coding DNA Sequence Number=SeqID_2848
agctcaatctccttgcccagggtatcgatttttcccttcttttcatccaatgctgccttcagcttcctgatgtcaccatctttctcaccactgcagttctctagctcctcaactttgcttagcctccagttccctgtattagacacagcagcagccagctccgactccaaaatctgcaccctcgaatccacctctgcctccttagcactcaggacctcttgttcctccaactttgccttcacctcgacctccatttccaaccggcaagcctcagccgccttccagaactccagcggactcctttccacctccaccttctcgctggacaccatctgaaccgcctccttggcccgcaccaatttcttcgccaattcacccttctcgccaaagagctcggagttcctac

SEQ ID NO: 17252 - DNA, 340 bp, Zea mays
  Coding DNA Sequence Number=SeqID_2849
atcggcgcgaacgagaagacgggctacaccgcgctcgcgacgatgctgctcggcgtgctggccggcgtgctcgcgcgcagcggcgacctgggcagcgcgatcgcgatgggcgggcaggcgtatgcggtcgacaaccagttgcgcttctcgcggtcggccgagcgcgaggccgatcgcgtcgggtttcagctgctggcgggcgccggctacgacccgtacgggatgccgggcttcttcgaacggctcgaacgcgcgtcgatgggcgacgcgggcgtgccggcctatgcgcgcacgcacccgttgacgggcgagcggatcgccgacatggaggatcgcgcgc

SEQ ID NO: 17253 - DNA, 259 bp, Zea mays
  Coding DNA Sequence Number=SeqID_2850
gagttaagccgacaatgtcgttgcaagaatcgagcgggtatcgtcgataacttagtattcggatgtagaggcgtcttgtctcgtcaagaactgcaagggcgcgacagctccgacaggctggcggcgtacggtgacccggcgtccacactcatgatcagcacccagttgcagcaaacgatccacacgagcagcgccgatggcagcaacactgcccagcatcctgccatcctagcctcgagccggaattccgggagactta

SEQ ID NO: 17254 - DNA, 419 bp, Zea mays
  Coding DNA Sequence Number=SeqID_2851
tcgccggcgcgttgcgacgctccgcggcgtcggaccgggcgatccgtgtcgcgatcgccggtccgcgcgcgagcgcccgggtggtgctggcgctgccggtgctcgggctcgcgctcgggtcgacgtggggtgccggggccgtccaggtgctcgtcacgaccccggtcggctgggggtgttgcgtggtcgcggccgggctggtggccgtcggacgttcgtggaccgcgcggctcgtgcgcgcggcgaccccggacgggcgcgtgcccggggtcctgctcgacgcgtgggccgttgcggtgtcgggcggcggatcgtgggcggccggcggcgaggcggtgcgagcggcgttcgacggcaccggtgccggtgctgtgccctacgagggggaacgactgcgcgaggtcctcctgctcgcacag

SEQ ID NO: 17255 - DNA, 312 bp, Zea mays
  Coding DNA Sequence Number=SeqID_2852
tgggttggcttccagtcaccgttccacgatcagcgcagcgtggtgggcgttgctggctgcaagcccgcgcggctgggatttgctgaatgcagcgatgcgggacagcggcaaacggctcggcgatgttcggttctgtcagcatcgtccgggagtccggcgttaacagcgtgcgcgtgggcgatacctactttgtcgggcatctgccgtggtgggagcggctgtggaatctgctggccacccatccggtatggctgaccgtgtgtgccgtgctggtggtgatcctgttcgccctgatggcctggcgcctgatgc

SEQ ID NO: 17256 - DNA, 354 bp, Zea mays
  Coding DNA Sequence Number=SeqID_2853
gacggcatgctgttccgcgcggtgggccagatcgatccgcgcacgctcgcgccacaggtggcgctggccctgctgggcgcgtggacggtggtgctgatgctgtggggcaacttcggtcagctggtggactacaccacggtgggcgagtggctgggccatgcgttcggcatcggcacgctgttctggtaccgctggaagttcgtggacgagccggcgccgtaccgcgtgccgttgttcccgctgatgccgctggtgttcgtggtcaccgtgctgggcgtgatcgacgtcaccgacatcgccaaccccggcgacgccggcatgagcctggtgatcattgcgctgggcgtgccggtg

SEQ ID NO: 17257 - DNA, 265 bp, Zea mays
  Coding DNA Sequence Number=SeqID_2854
tgcagctggcgcaaatcaaggcgcgccatggcgaagacaagcctttcagtgaggtcaacctgagcgacatcgtgcagcaggcctgttttagcggttatgcggcggcgcggcgtaaacagatcgacctggggtttgaagagcagacggcgagccaggtgcagggcgatgcgctgttgctggccgagctgtgcgccaacctgctggacaacgccatcaaatacacgccacacggcggcacggtgaccgcgcggctgaaacaaaaggt

SEQ ID NO: 17258 - DNA, 245 bp, Zea mays
  Coding DNA Sequence Number=SeqID_2855
gggccatgggcctccacatcgtggccgcccgtcctgcaacctgaacctaaacgcccaacaaccgcgggccgcccgccggcaacaatccggttaatggttccaatgggggaatgggcggcgcctgtcccgaaaataatgaaccagaaccactaccagacccagcaggcttccaactcttttgcaaaccagtggttaacgaaccccttggtcaacaacagcgtaatgtggaacaaggcgccgaacgc

SEQ ID NO: 17259 - DNA, 233 bp, Zea mays
  Coding DNA Sequence Number=SeqID_2856
agggtgcaggtccacgtgaccgccggcgccggcgatgtcggcacgtcggcctcgtcgccgtcagcaggcccgccgccgccggccagccgggaggtggaggagaccgtgcgggtgcacgcgcgggcggcgcggagcgacgtggcggagctggtcgcccgcgcgctggccgcgatcaaaggcatggggcgcttcacggtggtggccgttgacgccggccggtccagcgatggcgg

SEQ ID NO: 17260 - DNA, 351 bp, Zea mays
  Coding DNA Sequence Number=SeqID_2857
ggctgcgcaacctgctgggcggcatcggcctcttcatcttcgcgctgcgccgcaagcccgaatggccgactttgctggaaatccgcaactcggcgatcgtcggcacgatgctggtcgcgctgtcctcgggcacgatcgcgctcggcatgcgcaccgtcagcagcggctcggctgcggtgatggtggccacggtgccgctgttcgcgaccgtgatcgcggcggtcgccggccggccggtgacgaagggcgagtgggcggccgtcgcgctcgggatggtcggcatcgtcgtactgaactcgggcggcgcggccgccgcgaactcggcgctcggcacgatctgcgtgctggccg

SEQ ID NO: 17261 - DNA, 437 bp, Zea mays
  Coding DNA Sequence Number=SeqID_2858
gcacccgcgtgcacggtcgacgatgcgcgcgcggcggccgacgcggccgcgcgcgcatttcccgaatgggcggcgctcggccccggcgcgcgccgcgcgctgctgctgaaagcggccgccgcgctcgaagcgaagcacgagcagttcgtcgccgcgatggcggccgaaaccggcgcgtcggcattgtgggccggcttcaacgtgcatcttgccgcgagcgggctcgtggaggccgcgtcgctgaccacgcaggtcggcggcgagctgattccgtccgacgtgccgggcgcgctcgcgatgggcgtgcggcagccggccggcgtcgtgctcggcatcgcgccgtggaatgcgccggtgatcctcgcgacgcgcgcgctcgcgctgccgctcgcatgcggcaacacggtcgtgctgaagggctccgaactgtgtccggt

SEQ ID NO: 17262 - DNA, 207 bp, Zea mays
  Coding DNA Sequence Number=SeqID_2859
tcgtggcccgcgtggccggtgtcgcccgccgcgctccgcgccgtctggtgctgcccgccgtggccgggtttctcggggttggcgcccccgtcttgcgtattccggctctgcgcaggctcccccgctcgttttcgggcggctccctcctgccctccggtctggcggtttggctctcctccccctggctgccgcgggtgcgtcccctct

SEQ ID NO: 17263 - DNA, 216 bp, Zea mays
  Coding DNA Sequence Number=SeqID_2860
aaccctgccattgaatccatacaagtctatcatccaatatcggaaatattgttctgtttagcctcaacaacataatccaggagtgtctttaccggttgatggttctagtgaactaaaacccaagaggacaaagctgaaaggaaggagggcagtgacaagatttttgaaaaccttgagatggaaaaagaaaaaggagtttcaaagaatgactgcaga

SEQ ID NO: 17264 - DNA, 242 bp, Zea mays
  Coding DNA Sequence Number=SeqID_2861
tgggcccgacaccaatgccacggtggcgcggcacatggtggcagatcgcctgggtgctgtgccgtcgcactcacccggtgagatgagctgtggatgcggcgcacttctggacgtgcatggaaagcgaaccgcggatctaccgcgaatgatcagggccagctgcacgcaatgtcggcgctgtgcccgcacctcaaatgcgtcgttcaatggaacgggcatgagcgcacatgggactgcccctg

SEQ ID NO: 17265 - DNA, 232 bp, Zea mays
  Coding DNA Sequence Number=SeqID_2862
tggtgcccagcctgtcgcgaggcatggaccaggaccagtcacgccattcactccgacagcgcccgccgtggagacgaagacgccggcatctgttccagcgcaggccactctgaccagtcacgccggcatctgttccgccgtggagacctgggtgcacgcacacgatgtcaaggcgcagctcctgcacgacacggtgaccaagaggagcttgtcgatgtacggccatctccgt

SEQ ID NO: 17266 - DNA, 483 bp, Zea mays
  Coding DNA Sequence Number=SeqID_2863
ggctcgatcgggaagaccgccaagagcgagatcagcgacggcacgttcaagggctacgagcaggacggcaagacgtgggccatgcccgtcgacgtcaacccggagggcatctggtacagccaggacctcttcaagcaggccggcatcgagggcacgcccaccacgatcgacgagctgaacgccgacatcgccaagctcaaggccgcgaacatccagccggtcgccgtcggcgccaaggacgcctggccggccgcgcactggtactacaacttcgcgctccgggcatgcccgagcagcgtcctgaccaagacggcgaaggacctgaagttcacgaactcgtgctgggaacaggcgggcaaggacaccaaggcgttcttcgacacgaagcccttcaacgacggctacctcaccaccgccgcccagcagggtgccggcagctccgccggtctcatcgcgaaccacaaggccgcgatggagctgatg

SEQ ID NO: 17267 - DNA, 456 bp, Zea mays
  Coding DNA Sequence Number=SeqID_2864
gttcgacgccgtctcggttgctgctgccgtggttctgctctgcgctgggctcgtaggccggagggagggaggcggctctgcggccgaggagcctctgctcaacggcacgcatgagtctgccgacggtagcggccgcggcgacgccgaggcgtccaggttcaccggcgccggctttttcagcttgctcaccttctcgtggatgggcccccttctcgcggtcggccacaagaagaccctcggcctggacgacgtcccggggctcgaccccggcgacagcatctccagcctgctcccgatgttcaaggtcaacctagaggcggtggccggcgacgtctccggctctggccggaaggccgtcacggcgttcaagctcactaaggccctgttgcgcaccgtgtggtggcacgtcgcggtgaccgcgttctacgcgctggtctacaatgtcgccacctacgt

SEQ ID NO: 17268 - DNA, 306 bp, Zea mays
  Coding DNA Sequence Number=SeqID_2865
gcgatcctctagatacgacctgcagggctgtgacgcgtatgagctcctcaactccaccgcgggtaaccgcctgtctgagatggacgccactccgcacaggagcctgccaggcttcggttccgtcgacagggtgaaggccaagctggaggccgcctgccccaacacggtttcctgcgctgacgtcctcacgctcatggcccgcgacgccgtcgggctggccaagggccccgtctgggccgtagcgctcgggaggcaagaccgcagggtgttcacacccaccgaagcgaaccaggtggagcccttggt

SEQ ID NO: 17269 - DNA, 490 bp, Zea mays
  Coding DNA Sequence Number=SeqID_2866
ttaacgattcccagacggcgcttaacgccacaaatctgctgccgctggcgcagcgctacagcggcccgttctgggcttacgatgccgaaatcattcagcagcgtattgcgcagctcagcgcgtttgacgtggtgcgctttgcgcaaaaggcctgctcgaatattcatattctgcgcctgatgcgcgctgccggcgtcaaggtcgattcggtctcgctcggcgagatcgaacgtgcgctggccgccggttttcagccgggcggcgaggatattgtgttcaccgccgatgtgctggactcaccgacgctggcgcgcatcgccgagctgaaggtgccggtgaatgccggctccgtggatatgctgcatcagctcggcgcggtttcgccgggtcacagcgtctggctgcgcattaatccgggctttggccacggtcacagccagaaaaccaataccggcggcgaaaacagtaagcacggcatctggcacagcga

SEQ ID NO: 17270 - DNA, 138 bp, Zea mays
  Coding DNA Sequence Number=SeqID_2867
atggccaatgaagattctgcgcggccgagcgccatgggtgagcataggggattcaacgagctggagccggcggtcaggagagtgagcagggggagcacgactagaggagctcggggcgcgacggttggagcaggcggc

SEQ ID NO: 17271 - DNA, 429 bp, Zea mays
  Coding DNA Sequence Number=SeqID_2868
gacattgaataagacattgccgccaaggtgcagtgccatttctgcaacaatttgatacaggtgagcggcagccatgcccgacaaccagcactgccccgcttgtggcgccctcaaccagtgcagcctggccgacccgcgccgggccacccaggcctgctggtgttacagcgtgaccatcgaccctgccgtgctcgaggcactgcccgccgagctgcgcgacaaagcctgcctgtgcccgcgctgcgccgccgtcgaagagcaacttcgctcccccgcttccgactgaccgtttgccatgcgcctcgaccgtttcctcgccaacctgcccagccacaaccgtcagcaagtccgcctgatgctggcgcaacgccgcgttcggttgaatggccaggtagtcagcgacccgctggccgaagtgcgcgaattcag

SEQ ID NO: 17272 - DNA, 550 bp, Zea mays
  Coding DNA Sequence Number=SeqID_2869
caggcacgcacgacgagaatccaagcagggccagtgcgcagcgaccatggaaaagatccgagctgggctacggaagctggagggcgagcaggaaaatccgggctggggcatcacggtctgctgcgcaaccatggagacaagcaaagggagcagggcgccgcagggaaggagctggggactaggcacatggctggaagaggctcggcgcgcagaggaagctccggcaccagggaggaagacgcgcatggcgctgggcgcggtccgagcagaggctagccagacacgcggagcgagcagggagcaagcccggcgcgcgacgcagaggaaaatcaagctgaggagcaccgagctggagctccgaacaggagcaaggagaagggaggggcgcgacgctgggcaggagcagggagggaactccggcgcagggagcagggcgcaggaggaacagaggccgagctcggtgagctgcgcgcagggaagttaggcgccgagcaaaacgcggcaaactgagaagtcgcggcgcaggaagtttggccggtgagagcgcgcg

SEQ ID NO: 17273 - DNA, 513 bp, Zea mays
  Coding DNA Sequence Number=SeqID_2870
gagcaattacacagaagccggccgcccacccgacgtggcggccgacgcgggcaacacccagcgcagcaagggcctggccaccggccggctgggcttgctggccagcgtggtgctgggcatttccaccatcgccccggtctacacccttaccggcgcccttggcccgaccgtgcgtgaagtgggagcgcacctgccggcggtgttcatcgtcggctttctgccgatgctgctggtggccttgggctaccgcgaactgaactcggcggagccggatagcggtacttcgtttacctggtcggcgcgtgccttcggcccgatgatcggctggatcggcggctggggcctggtggtcgccaccaccatcgtgttgtcgaacctggcaggggtggcggtcgacttcttctacctgttccttggccagatcaccggcaagcacgagctggcggccttggccgacaacctgctcatcaacataaccacctgttgcgtgttcatcgccctggcggtgtggat

SEQ ID NO: 17274 - DNA, 191 bp, Zea mays
  Coding DNA Sequence Number=SeqID_2871
cctacttgctgcctgcagtcgataacctatccagagggaacatggcaaatattagagctctttgatggctatttcctagaacacccagagggcttaagtttatttatgctgatttaggcaatgccaaagctatatccttcttctgaagtttaataacccagtgcctccccttgccttacatttatatgttg

SEQ ID NO: 17275 - DNA, 180 bp, Zea mays
  Coding DNA Sequence Number=SeqID_2872
acccctgctgttgcattataacgcggcactacaccccagcaacgaacggtcaccacctcattgaaggatcgtgcggataaagtcaaagtacccgatctatttagtccaactctaatgattatctgtgaaagcggtatacttgacacccttctgagctgagtcctcttcacatgaggcact

SEQ ID NO: 17276 - DNA, 213 bp, Zea mays
  Coding DNA Sequence Number=SeqID_2873
aagcaaccaaccacccatattagctcatggccggctctagttaatcgtgcatgcatgccatgcctaacctacttaccacactactgcaaggttactcatatatactctatgcgacaatgcatcgatcgatcgaacaagcatgcatgcatactcgatctatatatgtgtgatgatgatcttgatctttgtttgattcatcagaccctgacgcgg

SEQ ID NO: 17277 - DNA, 184 bp, Zea mays
  Coding DNA Sequence Number=SeqID_2874
ggtacgtacggttcgacaagatccagggggttcacaagtcgaggcagaaggatgccgagatatcgagttaatggagtggatccagggtttcacatgcccctgatcaccaacggcatgcctttcttcctcagaaacgcggatcagaatgagtgagaaagcaatgcccatactgtgtatacggtag

SEQ ID NO: 17278 - DNA, 564 bp, Zea mays
  Coding DNA Sequence Number=SeqID_2875
gcaagacggccgacggtttcacgcgcgcacccgcccgcgacgaatggcagctgtcggacgatccggcctacgtccatctgtgcaccaacgagacgatcgacggtgtcgagacgttcgagattcccgacctcggcgacgtgccgctcgtcgcggacgtgtcgtcgcacatcctgtcgcgtccgatggacgtcgcgaagtacggcgtgctgttcggcggcgcgcagaagaacatcgggatggccggcgtgacggtcgtgatcgtgcgcgaggacctgctcgatcgcgcgctgtcgatctgcccgtccgcattcgaatggaaaaccgttgcggagaacaactcgctgtacaacacgccgcccacctatgcgatctacatcgcgggcctcgtgttccagtggctgaagcggcagggcggtctcggcgcgatcgaggcacgcaatatcgagaaggcgaagctgctctacgacacgatcgatgcgagcagcttctatctgaacaaggtcgagccggcggtgcgttcgcgcatgaacgtgccgtttttcctggcagacgaaacgcgcaatg

SEQ ID NO: 17279 - DNA, 219 bp, Zea mays
  Coding DNA Sequence Number=SeqID_2876
tgcacacgggtctctcgccgccggccgggcgcctagcgatagcgcgagatgccatccggccggatgcaccgacgatctctgcgtgcgggctagcgatggcgtcgttctcggaggctcccccagggaacccgaaggcgggcgagaagatcttcaagaccaagtgcgcgcagtgccacacagtcgagaagggcgccggccacaagcaaggtgagctacacc

SEQ ID NO: 17280 - DNA, 289 bp, Zea mays
  Coding DNA Sequence Number=SeqID_2877
ttctaccgccgcatggtcaagggaacgttcagacgacgctggaagtggtctgtgtgggcagccatcggcatcaccgtttgctggacgctcgcattctgcattatgctgatcgtgacctgcaacccgactgaagcatcctggaaggtctacgatctcacctacacaaaggactggaagtgtgccgacacacgaacatcaagcttcgttgccggcatcttggccgtgatcagcgatacttattcactggtactgccatggtctatgatctggcccctggagatgccgaggc

SEQ ID NO: 17281 - DNA, 509 bp, Zea mays
  Coding DNA Sequence Number=SeqID_2878
cacgaggtcgctagcgtgaaggacaacggttaccagattgagatctattcccgagcttcgaggaatcgacgatcaagatttggtgaaccactggtcttgagatcaagctcttcaagttctacgagatcgaagaccctgagcatctgtttggtgaaggttgcctttggtgcaatctatgctcaggtaaagaagaaggcgccgaggctaatctccgggagttccaggacttcggcaagttcgaggattagactagcgacctcccccagtcagctgcccatggtgggtttatttacgttggctacgtttcgattctgtgtactttgatttatattatctaaatgactctagtctttaatatcattacttacaactttattgtaattcgaagcattgtgctatgatgagtcatttatgtaatcgctgtgtacgtgaatttctgatcctggcatgtacatggttcgcattcggtttaccttccaaaaccgggtgtgacaaaacataaagggcat

SEQ ID NO: 17282 - DNA, 598 bp, Zea mays
  Coding DNA Sequence Number=SeqID_2879
tcacggacaccgaggagcagaccatcatcaagctgcactccgtcgttggcaacaggtggtcggtgatcgcggcgcagctgccgggtcggacggacaacgacgtcaagaaccactggaacaccaagctgaagaagaagctgtccgggatgggcatcgaccccatcacgcacaagtccttctcgcacctcatggccgagatcgccaccacgctggcgccgccgcaggtggcccacctcgccgaggccgcgctggggtgcttcaaggacgagatgctccacctcctcaccaagaagcgccccaccgacttcccgtcgcccgcggtgcccgacatgaactcggggagattgtcggctatctatcgggggcgagggagtgagacgagggaggatagcaggtatccggaagggggcgacaatatcatggggagggagcggtgtggggggaggacggcgggctcacgggagccgcacgaaacggagggggcgcccgggcaggggcgtctattgcagggggggagggggcgggcattgcgtggcgggcgggacaggcaaagcgaggcaggggtagggagcgctgcatttgataaggcaggcgccgg

SEQ ID NO: 17283 - DNA, 315 bp, Zea mays
  Coding DNA Sequence Number=SeqID_2880
gaagtacgacgctaatgttagctgtgttgaaagtggcaaggatgctatcagtctacttcaacccccacattgctttgatgcatgttttatggatgttcagatgctagagatggatgggtatgaattaaataaatataaacgctcaacatttgtcgagtaccatttgcgtattcttgcaatgacaaccgatgttatccgggcaacttatggggagcgtatgaaatttggaatggacggatacttgattaaactctgcgacgaggagcaggtataccaagcagtctccagattagtagagggaacgacagatttagc

SEQ ID NO: 17284 - DNA, 306 bp, Zea mays
  Coding DNA Sequence Number=SeqID_2881
tattgccatgcgtagtgcagagctttccgccctccagcatgcgcatgcctcccctgcctgctcttgatccctggcgtgcctgcaccctgtgtttcccctccctgtccctcctttgctttcgtttttttcccatctccgtcgccgctgttggctctcgtggccctcgggtccccctcgttggccccgtgttgcccttctgttcttccaatcctgcgctcattgctgtgggcttgcctgctgcctgtctttcgcccggggtcggtcctcctcccttgcctttttgtttccttctcgtttccggcgcct

SEQ ID NO: 17285 - DNA, 241 bp, Zea mays
  Coding DNA Sequence Number=SeqID_2882
tcagcctcgatgtcgagatccacaatccccaatccttgttcgtcgccatgagcctcgccaggaagatggaactccgggaacaaatcacagcgcaaaccacgccgcaatgggccacgggccgtggtatcctgccgacgtcgcgggccacctaggcgccaccgacggcgacgacggttcccccgaacaccaccatcaccattgaaggtcggccggtcaagaagctctctcatgcggagatgga

SEQ ID NO: 17286 - DNA, 433 bp, Zea mays
  Coding DNA Sequence Number=SeqID_2883
atgagcgcaggacaagcgcaaagacgcaggagaaacgcgacgcgggaagccaaccaggccgagaccccgagagacaaggacaggcacacccgccacagcgccggcgacgaggccaacgccaactcctacacccggaaccagaccgagagccaggacaccaaccgggcgccgccgccgacggagacgacggagaagaagcgcgccacggaggcgagcgaggcggccaccacacacaacgacatgcagtgcagctgcaagggggacgcggcggccggcgagggcgcgcgcgggaacctccacacgggcgccggcaaaaacaagcccaaggggcaccaggacgaggccaacgccggcaacgcgggccaccaaggcggggccgaccacgcctacagccagccgctggcaccgacaaggagaaaagggccgcgccacg

SEQ ID NO: 17287 - DNA, 334 bp, Zea mays
  Coding DNA Sequence Number=SeqID_2884
atcattcgcaatgccagtcgtcagatctttcttgcccagcgcgcagcaagctcccacatggccaacaaatgggagttcccgggcggaaaaattgaacagcacgaaagcgcagaacaggcgttaaaacgtgagctgatggaagaaaccggtattgaagtgacggcggcgaaagcgattggtcaggccgaccacagttacgatgacctgcgtgttacgctgcatttcttcctggtggagggctggcagggtgagccgtggggacgcgaaggtcagccgcagcgttgggtcgagcagcgtgatttgctggccgatgaatttccacctgccaaccacg

SEQ ID NO: 17288 - DNA, 450 bp, Zea mays
  Coding DNA Sequence Number=SeqID_2885
ctggtccacccggagctgagtcggagtggcgagctggcggtgcgggctctggagcagttcgccaccgtggcggaggccatgctgataatgcacaagaaggggatcgtcaatgaacagtttctgctgcagcggctggcggacggggccatcgacctctatgccatggtggtggttctctccagggcctcaagatccctgagtgagggccaccccacggcccagcatgagaaaatgctctgtgacacctggtgtatcgaggctgcagcccggatccgggagaacatgactgctctgcagtctgacccccagcagcaggagctctttcgtaacttcaaaagcatctccaaggccctggtggagcggggcggcgtggtcaccagcaatccccttggtttctgagtactctcaattacagcctggcccaaaatgtgccttttctcaagccaaagc

SEQ ID NO: 17289 - DNA, 293 bp, Zea mays
  Coding DNA Sequence Number=SeqID_2886
ggtatggattatccgcacgatccgcatcatgtatttgtctcagatttcgtggacttttcgatatatgtcgatgcgccagaagacttattagagcgttggtacgttaatcgctttcttaaattccgcgaaggtgccttcagcgaaccggactcttatttccaccactattctcagctgcctgaagaggaagcagagagtattgcacgtgggttatggaaagaaattacctggctgtatttaaaagaaaacatcttacctacacgtgagcgggccagcctgattatgaccaagtc

SEQ ID NO: 17290 - DNA, 452 bp, Zea mays
  Coding DNA Sequence Number=SeqID_2887
atgggctgcttctgtgcgtcttgtgcctcccgagcctggatgggcctcctgctgtctttgggtgtgctggcgctcctcgcattcgccgctggctggcgcccgtgttgtccggctttcgtctggttttggcctgtgtgcctgattggtggtggctcgtcttcgtttggctggccttcgccctttcgctggccggcgcgcttggtgtgttccgccgggtttccgtggtctgggcgcgccctggagcttctttttgtgtctcggccagtgcggcgtctggcgccccggcgttctgttggctctcctcccatgctgcgggtgcgcccgcttggtatatccgttctgccgctgcctgcttgtcctcaactttgggggtctgggccgctccgccagctccctgcggccctgtcctgttatggcttgtcgccccgcccggcagaaaatacggcctgcgc

SEQ ID NO: 17291 - DNA, 137 bp, Zea mays
  Coding DNA Sequence Number=SeqID_2888
tgatcccagcagcacaatcagcgcgcgcgtgagggatgttgcgcgctaagggcgagaacaagcacgggaaggcgatcgtgcctgacaagcgcaaggagggcggcagctgcaccaacgagagggtggcccgcaagatc

SEQ ID NO: 17292 - DNA, 537 bp, Zea mays
  Coding DNA Sequence Number=SeqID_2889
gaacattatgatgctcggcgcgattggtattgtgttcttcatggctaatggtctcggctgggccaataccgctgtcgccgcgacctattcgctgacgctgctgttcctgcgcacgccgctgctggcggcagtaggcgcgctgccgacgctgctcagcgcacaggtggcgttgcggaaaattaataccttcgatctggccccttatagcgccggtttcaaagcgctgccgacggtgagcgactggcagacgctggagctgcgcgacgtctgtttccattatggcgagcacggttttgccgtcgggccgatcaacctgacgctgcgccgcggtgaactggtgtttctgattggcggtaacggcagcggtaaatccacgctggcgatgctgctgaccggcctgtatcagccgcattcgggccgcctgctgctggacggtaacgaggtggactggcataaccttgatgcttatcgccagcacttctcggcggtgttcactgacgtgcacctgtttgaccgcctgattcgtcgtggtggtga

SEQ ID NO: 17293 - DNA, 450 bp, Zea mays
  Coding DNA Sequence Number=SeqID_2890
ggaggccgccgtcgtgccacaggcacaccaccaccggggcggcggcggagacgcacctcccaccagggaggaagaccactcccccaaagccgaagccgaggccgggggcccacagggccagcaggcacacacagccgacaaccgcggggccccaacgcgcgccaccccaggcggccgcgagacaggagccccgccggacgcgacaccacacagcacaaggccccgcgccgccgcggggccgcacaagagcgcctaccaccacagggggcggagggcaggacacacggagcccggcggccccccggaggagataccgcggcacggcaccaagacccgggagggccgaaccaggagccagcaggccagacgacacccagaggcaggacctgcaagcagaccggagaggatgccccggcacagaggcagccagaccaaagcgcggaacccgga

SEQ ID NO: 17294 - DNA, 580 bp, Zea mays
  Coding DNA Sequence Number=SeqID_2891
tgtcacataccttcttagatgcctgttccggttgctagaagttcacaacctggagaaatctgaatcagcatacttcgagaaactgaggagggtgaaaaaatttgcaccactacaagaactctttggacccatttcagaagggatctgtgcagaaattttcagtgctattgaagcaagccaggggtgccttgagtatattgcctggggctcgttgatcactctactcttagatgttttcagaactcgtgagccgcatgatttctcatgccttgatcaggttcttgaccttttcctccggttcccaggttgcacttcattatttcaggagctcattgtggccctttcttgcatgtgcaaagttgcaccacttgtgttgacagaatgcccatattctgggtcatatccatttttagcgctggtttgccaccttcttaggcataaggatgtaatgtgtttatggtggaaagcagaagatttcgttttctcgtttgaaggcttccttacaaggaagattccaaataagcaggatctacagtgccttgtgccatctgtttggtggcctggttcttctgaggatgaa

SEQ ID NO: 17295 - DNA, 254 bp, Zea mays
  Coding DNA Sequence Number=SeqID_2892
aatgccacgctgagtgcccaggccagcctggcgcaggattatgtgtatctgcgcacggcggatgcgaatatcgcgctgctgaaccagaccatcgccgcctaccaggatagtctgcggatcacccagaacaaatataatgccggtaccgtctcgcaagccgacgtgttgacggcgcaaacggagttggaaggcgcgcaatccagcctgatctccgagcaggcgacgcgggcgcaatatgagcacgccatcgcgct

SEQ ID NO: 17296 - DNA, 177 bp, Zea mays
  Coding DNA Sequence Number=SeqID_2893
tcacgctagcacacaggcgcctaggcaagcttcccccatggtgctcgactccctgttccatggtgccctgtggtcgcccccttcttccccttgtggtcgcgctcctctgcttccttccattgcgtccagccctgcactttcttcccatggtcgagctactacacaaagcagcggcag

SEQ ID NO: 17297 - DNA, 290 bp, Zea mays
  Coding DNA Sequence Number=SeqID_2894
gaagtcgcggcgctgttgctctccatgctggcgctgtccggtgccgcttctgccgctgccgtaccgcaggtcacggtgacggtcactgacaagcagtgcgagccgatgtcgctcaatgtgcaggccggtaaaacccagttcatcatcaaaaacaacagccagaaagcgctggagtgggaaatcctcaaaggcgtgatggtggtggaggagcgcgaaaacatcgcgcctggcttcagccagaagctcaccgccaacctggaagcgggtgaatatgacatgacctgcggcct

SEQ ID NO: 17298 - DNA, 340 bp, Zea mays
  Coding DNA Sequence Number=SeqID_2895
caattcgcgattcccatgacgcagccaacacgcaccaatgggggctcactgtagatacgctgacacggacgatgcgtcgccggggcgaaacttccaaacagtggcagggcagcgcgacaggcaggctaggccttctgctccttggacatgatggatgcgctgccaccgggccatgtgagaggaggcaccttttgctgcgctgcgccgccgctgcttcgagttgccccgtttcctttcttcctccggtcccccttctctctccctccctcggtccctccattcagcggcgaggcagcccgtgtggccggcgtgcgcggcggcggcgtaaccatggaacgga

SEQ ID NO: 17299 - DNA, 174 bp, Zea mays
  Coding DNA Sequence Number=SeqID_2896
aagggcgcccacaccacacaaccgttcagggccggcttcctcacgggggacgaagacaaaaaaggccgagcaggccgagaacacgaccaagaacgccacacacaaccccagccacgaagccagcctggcctgcaacgctcttactcgtgttgccgggcgctaccccgaggccaa

SEQ ID NO: 17300 - DNA, 428 bp, Zea mays
  Coding DNA Sequence Number=SeqID_2897
atgaacttgagccacgcgctggctgagcgcatcttgcaaagccagccggatacggcggcacgtgataccgcgcgcactggcgtgcaggattttctggctgtgagctggccggtgttacagcagcaggtcccggacagcggcttaccggcgctgcgacaggtttatggcgacggcagcgtacgctcacaggcgttactgctgggctatgccggtcatgcgctggattacgatgatttccatgccgattttcgcggccatcccagcgtggcgattctgcctgcgctgaatgcctggcagcaacagcagcccgccactgccgaagcgttccttgatgcttatgtcatcggcgtggaagtggctggccggctgggactgtccgccagccagcagcactatgcgctgggttatcacaacacggccacgctggg

SEQ ID NO: 17301 - DNA, 329 bp, Zea mays
  Coding DNA Sequence Number=SeqID_2898
atgttcagcaccgttctgattgcgaacattgacgaaatcgcctaccgcgccatcagcaccataaagcgcctcggcgttaccagcgtggcggtctattcggatactgaccgcaacgcgcgtcacgtgaccgaagccgatgtggccatcgccctcggcggtgacaaagccagcgacagctatctgcgcatcgacaaaattctggccgccgcgcagctagccggcgcgcaggccatctggcccgtatacggttttctctccgagagcatgccgttcgccgccgcctgtgaagaggccggcatcgcgtttgtcggcccgaccgcgcagcagat

SEQ ID NO: 17302 - DNA, 544 bp, Zea mays
  Coding DNA Sequence Number=SeqID_2899
gtgccgtacggcgatatgttccaggcgccgttacagattcagcaggtcaccggccgcatcaactggctgcgcgatggcaacggcctgacgctggatggccagcagctggacgtgcaggcacgttcgctatgggcgcgcggcgatttccgctatcagcaaaatgtcggtaaagcaccgcgcctcgacattcttgccgggattcgcgtcaccgacgctggtgatgcgtggcgctacttccctgagccgctgatgggccacgatctgacgcagtatctcagcgaagcggtcaaaggcggccaggtggagaatgccacgctgctgtttgccggcgatccgcgtctgttcccgtttaagcaccacgacggcatgtttgaagtggccgtgccggtgcgcaatgctaccttccagttccagccgggctggccggcgctgcaaaacctcgatatcgacctcgattttattaacgatggtctgtggatgaaggcggcgcaaacccggctgggcgcggtggacgcgcgcaacgtcagtgcggtaatcccggatt

SEQ ID NO: 17303 - DNA, 189 bp, Zea mays
  Coding DNA Sequence Number=SeqID_2900
ataacgcagctattttacaggcattactgctttggcgcgattattaacatgatcgtccttgcccgtgaaggtatggattcttttgtttatcgtgtggtgttttttggtgttgtctttggtctgtgcctgatagtagcaaaattgctgtactggctgttcgatagtgcaaggcttgttcggaatttgtca

SEQ ID NO: 17304 - DNA, 140 bp, Zea mays
  Coding DNA Sequence Number=SeqID_2901
gtcgctggtcttggccagcgtgatactgggccggcccggcacggctagcggccgacgggccgtgcccatgtgcccttccactgttgctagcttcaacgttcgacctttggggttcgacgtggtgcggcagaatcgggtgt

SEQ ID NO: 17305 - DNA, 598 bp, Zea mays
  Coding DNA Sequence Number=SeqID_2902
aaggagccagctgacgaaatgtcggggccgcctgcggctcaagaagagagagatgaatcgcccccgtctctggagttcctctcggcgacggacctttctgtaaaatcagcagatggtggttctaccagcacgcttaagatgcagacgcgttatcctgcccctcctaccaatgttgcccctgcgagttcgacatgtgacagctcttcagtgaatactgatgcgcgcacgccgaagatgcaggtaaacatgtgcagagcaggtcctacggctgcttcgacgaatgtcaagaggagcgtgatgatcaagggtggtcgtgatttggtggggactggaaaagtagccactgctggcgctgaaattgctcaagagaaccaagcggtgaagaggcagaagctcgatgatggaagagccagacagatactcaatgtcaagactaaggtgctgcctcataaggcgagagttgatttagctggaagcgaaatgaggaggtcccatgaggatatgcgctctgcgaaggaagcagatccatatgtatcagctgcagaattggttaagaagtttgaatcagggaccagagagcttagcatcactcacagta

SEQ ID NO: 17306 - DNA, 194 bp, Zea mays
  Coding DNA Sequence Number=SeqID_2903
ctggtactgtctaataataaatcaaaataagaattattatttgcttacctactatctgagtgcatcgattactcatcgtattggatgtttgaattaggcagttttggctcatgagttgggtcacctcaagtgcgatcatggtgtatggctcacttttgccaatatactcacaatgcaaacatacactgtcccaa

SEQ ID NO: 17307 - DNA, 476 bp, Zea mays
  Coding DNA Sequence Number=SeqID_2904
ccgtcgccgatttcgagaacagcaactggcacatgttccaggtcacgctgccgctcgaccggctgtcgatctcgcgcgccgatttcatggcgcagatgaaggagcgcggcatcggcacgggcgtccactacccggccatccaccttttcacgctgtatcgctcgctcggcttcaaggagggcatgttcccccacgccgagcggtacggcgcctcgaccgtcacgctgccgctcttcacgcagatgacggaagacgacgtgccacgcgccgggcatccgggcgccgcgaacccggaggtatcggtcatcatccccgtgtacaacgaggaagacggcctggctgcgctgttcgcgcggctgtacccggcactcgacgcactcggcacgtcgtacgaagtgatcctgatcaacgacggcagccgcgaccggtcggccgcgatgctcgcggaccagttccacgtgggtcccgacacgaag

SEQ ID NO: 17308 - DNA, 335 bp, Zea mays
  Coding DNA Sequence Number=SeqID_2905
gcaatctggcgacatcagccatcgatctgtccgatggcctgatctccgatctcggccacattctcaccgccagccgcgtcggtgcccgcatcaatctggatgcgctgccgctgtcggctgcgttgcgcgatcacttcgagccggaacaggtgctgcgctgggcgctgagcaggggtgaagattatgagctgtgctttaccgtgccggaagtcaatcgtggtgcactggatgtggcgctgggccatcttggcgtggcgtattcctgcatcggccagatcgcgccggaagcagaagggctgacgctgctggagaacggcaagccgcgcagtttccat

SEQ ID NO: 17309 - DNA, 517 bp, Zea mays
  Coding DNA Sequence Number=SeqID_2906
tgaagaccctgacaactttctacggctaccatccattggagatggtaatgcacccgctgggactcttccccactgagaagagggatgaccccatgtggtgcaaccgagtgagccacgtgaaggacatgtgggccatgcctcccgaccaagttgggaggatcactgttcagtgcatgagcacactgtaccgccttcaggccctgcaaagctacaccgtggcacacctcactaaccttgctcagaccactaagctcaccctcgacagccgagaggacttcgtggtcgacttgtcttcagaattgctctatgatgtgcaagaggagcttgaggaagctaacgaccacctggagatgcaccaccaggatatggaggcaaacgaggccgaaagtgagggagaggaggctcccgagaaattggaaccagcccctgattcagatgagaagaaaagggactgtttccaaagagggctcaacaccaagcttcgtgagtgcctcaacactgttcatgccgacaactt

SEQ ID NO: 17310 - DNA, 214 bp, Zea mays
  Coding DNA Sequence Number=SeqID_2907
atcccgcataggaagaggtatggtctggatcacgatcgccaaccaaatggtgacaggcagagctttaataacgtactccatggcgagggaattcttgattatttaacgccagatcgaatcgtgttcaactatcattggaattgtttctatccttccattcttcaagataattcagatttgttggcgaaaaagcaaagaatctttgtccttgtaa

SEQ ID NO: 17311 - DNA, 272 bp, Zea mays
  Coding DNA Sequence Number=SeqID_2908
gagaagggcgcctgctattctagttggacagggaatttggtctatgatggggctttctgatatgatggatctgtaaggtcaggagaatactctactatctgcatacaaggagtcgtctgtagatgttaatcatgagtacacatagatcacattacacacacacgcagtgtgatcggtttgttttagcattccgtacatggctatgacaatttgtcagtagccaacttgagtgcatgacaaatatcacgaatttacgaagacaacaaccctag

SEQ ID NO: 17312 - DNA, 512 bp, Zea mays
  Coding DNA Sequence Number=SeqID_2909
tgagtggaacctgcgttcgcgtgaagcgctgctggattacctgaaagagcgcaatatcccgaccaccgcgtcgctggagaagatctacagccgtgatgagaacgcctggcacatctcgaccgaaggtggcgtgctggagagcccgtggaacgcgccaaacaaagattgctgggtgtggaccgtcgatccgctggaagcgccggatcagccagaaaacgtcaccgtcagcgtggagaaaggccaggttgtggcggtgaacggtgagaaactgagcccgttccagtgtctggaaaaactcaatgcgctgggagcgaaacacggcgtgggccggattgatatcgtggaaaaccgcctggtgggcatcaaatcacgcggctgctatgaaacgcctggcggcaccatcatggtcaacgcgctgcgtgcggtagagcagctggtgctggatcgcgatagcttcaaatggcgtgagcagctgggtcaggagatgtcttacgtggtgtatgacggccgct

SEQ ID NO: 17313 - DNA, 291 bp, Zea mays
  Coding DNA Sequence Number=SeqID_2910
tacccacatttatacactctcactaaatacttgttccagatgctgtcttaatttcttacacacccgtgcagattgtcattccaaacaggtgcgcatcctgaatcgctaatggacgctccctgtagcggcacatttagcgcattgggtgttggggttacacgcagagagaccgcttactggccagcgacttagcgcccgatcctttcgctttcttcccttactttgtcgacacgttcgccggttatccacgttgagcatttacatgggggctgcctttacggatccacagta

SEQ ID NO: 17314 - DNA, 391 bp, Zea mays
  Coding DNA Sequence Number=SeqID_2911
cctcctccggcatgggaagcactagctccccacgccgttgagcgagcaataccagccacgccagacctcccacccgtgggtcaggaggagccggtcattccttggcaagacatgacaagggctgggggagaaccatcagtgttcaaccctatcccctttcagccgagtttcgacaccagctccgtcactaggctgtatgtcggacttccttttccctcagggtgcttggactccgaggaagagggcagtctgagctttggcctggacttctccgggctgcgagatcctgatggggagagctacgacccgacccgggaatgcctccacatcgacccagagatccctgacgagggagatcacctcggcatgccacgggaaggcaagaagcctc

SEQ ID NO: 17315 - DNA, 361 bp, Zea mays
  Coding DNA Sequence Number=SeqID_2912
agaaggagatgcatccgctggccagcgcgaaggcatcgcggtgctgccgtggagcccgctggcgcgcggtaagctgacgcgtccgtggggagaaaccactgcgcgttcagtgtcggataacgtgatggaaaaactctataccggcaccgaagagaatgacgcggccattgcgcaacgactggcaacggtggctgcggacaaaggcgtgacgcgcgcgcaggtggcgctggcatggctgctgcataagccggtggttaccgcgccgattattggtgcctcgcgcgagcagcagtttgccgagctggtgaaagccgtcgacgtggagctgagttcaaccgatatcgccgagctggagagcgtc

SEQ ID NO: 17316 - DNA, 284 bp, Zea mays
  Coding DNA Sequence Number=SeqID_2913
ggagcgggccatgtcggtcacggagctcgccgagtacgtcgacctcatgccgtggcaccgcttcggcttcacggcctccaacggcgccatcctccgtgcggtggtgggcagcgccgcggtacacgtcgtggacctcagcgtcacacgctgcatgcagtggcccacgctcatcgacatgctctcgaagcggcccgggggcccgccggagctccgcatcaccgtgccttccgcccgccccgccgtgccgccgcagctcggagtgtcggacgcggagatcggcctcc

SEQ ID NO: 17317 - DNA, 478 bp, Zea mays
  Coding DNA Sequence Number=SeqID_2914
gaaagccatccgctggtgccgaacaccagcgcggagaatcgcgcccgcaaccgtcgcgtagaaattactctgctggtcgcgccggatgcgacgcaagcggaactcaacggcctggcgagagggaactaatccatgctgaatatgctttttgcggtgctgaccagccgcctcgcctggggttttgtcggcattaccgcgctctcctttatcatctgggtgattggcccggtgttttccattgtcgactcgcggccgctggagccagagcagaaccgcatcatcagtattgcgctgctctatctggtctgggggctgagccaggcgattccgcgcctgtataacttctggctcaaccgcaaactgatgtcgagcctcgaaaccagcaaaagcgatgcgccggagcaggaccgcaaacgcctgaccaatgaagaacaggtgctggcgagccgtttctccgaagccaccgacatgttgaaaa

SEQ ID NO: 17318 - DNA, 60 bp, Zea mays
  Coding DNA Sequence Number=SeqID_2915
ctcaccctctttgcagtaaaatgttatgtacacgcaccatcacagactaagtatcgggag

SEQ ID NO: 17319 - DNA, 202 bp, Zea mays
  Coding DNA Sequence Number=SeqID_2916
ggctcccaggctcagggcacgcataggctcgttatgccttcgccaccaccaccaccgggtccgttgccaccacaaccaccaccaccatcggacccgccgctgcctccaccacctgggggtgatctcccccagggcaccagctgctagagcaacatcattagtagctacaacaacattcgtggctacaggtgcagtttcaaaa

SEQ ID NO: 17320 - DNA, 280 bp, Zea mays
  Coding DNA Sequence Number=SeqID_2917
agattctgctgggttttgtcaccggcaagtcgcgcagctggctgatagcgtttgacgacagcccgctcgatgatgcgcaactggcacagctggagacgttactggcacgccgcgtgcgcggtgagccgattgcgcatctggtgggcgaacgcgagttctggtcgctgccgctgcgcgtcagtgatgccacgctgattccgcgtccggataccgaagtgctggtggagcaggcgctgctgcggctgcccgcgacgccgtccgcggtgctcgatctcgggtc

SEQ ID NO: 17321 - DNA, 284 bp, Zea mays
  Coding DNA Sequence Number=SeqID_2918
atgctggcaccccttacggactacaaacacggcattacgctgattcaggacagcggcattcagtttatggactttgccctgaccccgcggctggacgccgagtttcccggcaaattcgtgcgcaagaccgccagcggcccgctgctgcgcctgcaatgggaggccgagagcggcaaatatcagttgccggccgagggcgggcaagccgccgaagtggtgcggccggagttcagctacccgctgcagcagtcgctgggcctgctggaaaagctctggctgccgct

SEQ ID NO: 17322 - DNA, 192 bp, Zea mays
  Coding DNA Sequence Number=SeqID_2919
gcagaatctggcgatgcagatatcagctgaacgaaatctatgttatacttggcaacattctcattgctgtaaatactttccataggctgccagatttatgtgatccgcatatgatgcacccatacaagagtgctcgatttggagagaagtactcgcatgttggtgctgcggcagatgatgtatacacggtat

SEQ ID NO: 17323 - DNA, 346 bp, Zea mays
  Coding DNA Sequence Number=SeqID_2920
agcaagccggtatccgccgtctgtgcgtgatagccggtgaagctggctgggcgcgccaggaggcggccacatggcaggccgcactgcccggtgactggttaacggtcagcgacagcgatgacttcccgcagcgtgtcgcgcctgcggcgctgcgtaccctgctgggccgggaattccagcatgccatttttgatgcgcgccacggctttcacgcggaagcgttcgccgcgctggccgggacgctgcgggccggcagctggctgctgttactgacgccagactggaacgcctggccggcgcagcccgatcgcgacagcctgcgctgggccgatgtcgaccagcccat

SEQ ID NO: 17324 - DNA, 337 bp, Zea mays
  Coding DNA Sequence Number=SeqID_2921
agctcgacccggtgctgatgtccaactacgctgtgactgtgacggagatcgatgaagttcgtcccgtgcagacagtgcagtggttcggttgttggaacggccggtgcctgctgatgtactcgtcagcgtctacagggtacacatgcatgtgcttcccagagttcggagttcggacttcagaacgctacatgggcattaatggcgtggggcgggccgggggaacgaagtggtggttggtacttggtattgcgtacgatcagcctacgaggctgccgccggctaaccagtgcgggccacgcatgacgcgtgcgttcgtcgacttgctcggccgggatca

SEQ ID NO: 17325 - DNA, 360 bp, Zea mays
  Coding DNA Sequence Number=SeqID_2922
tcagagattccccttcagcgtggtgtcgagctaggttcacggcttcagattaatgaaaatacatgcttgttacagaatgaccatgctccatcaaagttactacatgagtctccctacaaacttcttcgctatctggttgctaatggtgctcatgcatggttcgtatgtgccatatccgcaagtggagcttatgcacatgcgcaagcctctccagtcacctgaaagtgatgtcagttcgcagtaaatgtcagaggatcactcgatgcagcatggtcattttacagcaaggcatgtctcttcattaatcttaagctgtgaacatagctaccctccataagggtttactctcatgatcctcct

SEQ ID NO: 17326 - DNA, 302 bp, Zea mays
  Coding DNA Sequence Number=SeqID_2923
tcgacctgcaggttacacgtaatcaaaagggcacatctaagacgcatgcgtgcgcccaagcgtccgaaccctcaagcatacaggcgtgaggttgaggagcggtcacagaacatatttagtggctttagcactgaactacttaacgaggctcttggcgtaagcagccaattggcaaggcagctcccatgtctaaatgaccaaagaggagaaattgtccgcgtcgaacaccggctcattttgctgcagccatatgcatcattggttgagcaagaacaaagacaagtgccatctatagaacggta

SEQ ID NO: 17327 - DNA, 289 bp, Zea mays
  Coding DNA Sequence Number=SeqID_2924
actgggctgttgtttctcgcggtggagatgaagaggcgcgctaccgcgggcggcggttcgctcttcgagcgcgcgcagcgcgtctcggggcgcgagcgggagagtttgccttgaagagggattcaccctgcgcgcagcagttacgctttcgcattctctcccaattgttgcaccctttcgccttcgagctctctacgcccctttgcattcgcactctcctgctttgtgcccgtgccgccgccgacgccatgactttgctatgtcatctcgagcgcttccagtctaaggg

SEQ ID NO: 17328 - DNA, 307 bp, Zea mays
  Coding DNA Sequence Number=SeqID_2925
acctgctgccgatgccagagcatcgccatccccaatcccatcatatgtgctggctccaatgggaacaacacagtatacaatgacgacatcactgacgccactggaccagcagccacatctccggagcatcatccaccagcgtacggccaggacgcacccttcggcagtggactagccctccgcttctacaaggtcgacttcccgacttacaacggcaccgtcgacccactaaattggatcaaccaatgcgagcagttcttccgcggccaacttcgcgagaccaagctatttgagctcgcccggttgc

SEQ ID NO: 17329 - DNA, 572 bp, Zea mays
  Coding DNA Sequence Number=SeqID_2926
gcaaccggaaagctcattacgcgcagctgcccgcgctggctgactgtttcgcctgacggtgagaagtttgagctgattgaagaacatgccagaaccattaatgtgatattcaggctcaggcttaaaggctcctcactcaatggcatcacgaaaacgctcaatgaacgcggcgttccaaccttgacgggggaaatcgggcgatggaatcccagcaccattgaaagtctgcttggcaataaggccctaacaggcacgtttactccgtcttatcagacgatggcaaaaggagtaagcgaaatcagcgggtattttcctcaggtggttccggacaaactcttccacgacgtgcagggcgtccgtctcgcccgattcggtaaccctggcgtcagcgacaatccttacctcattaatattttcagatcgctgatgtactgcggaacgtgcgggcactccatcattttgaccagcgtcgacaaaaagggccggggctattacgcctgtccaatgaggcgcctgaaacgctgcaacgaaccggccatacgccgtgatcacgttgatgctgccctagtgga

SEQ ID NO: 17330 - DNA, 399 bp, Zea mays
  Coding DNA Sequence Number=SeqID_2927
aacgctggcgcaaagcgcgacgcaacccgacagccgcagtttctggcagcgcagccgcgccttctggaccatggtaggcctgcgcatcggtgagaacggcccgtcctatctggcacagggctttatcgtctgctacgtcgccaaagtgctgatgctggacaaatcggtgccgaccaccgctgtgttcatcgcctcgctgctcggtttcctgatcatcccgtttgccggctggctgtcggaccgctttggccgacgcatcatctatcgcggcttctgcctgttactgatggtttacgcctggcccgcctttagcctgatggacagcctcgagccggccatcgtgattccggtgattgtggtggggatggcgctggcgtagctgggcatctttggcgtgca

SEQ ID NO: 17331 - DNA, 202 bp, Zea mays
  Coding DNA Sequence Number=SeqID_2928
cattcgctcttttatgggggccaaaggggccccccagccatatcagtcgttgctcccatttggtacgcccatttggcagctgctcagattggcccgttcataaagttccataagatgtcggaaacgtcctccagtcatggcgggcatatttcggcgggcagcgttccggtccaggagcttccgcgcctgcattaaaaagtga

SEQ ID NO: 17332 - DNA, 213 bp, Zea mays
  Coding DNA Sequence Number=SeqID_2929
tgcagggacaagagccggaacggagccaggaggaagacgcggccccgccggcgaacgcgctgatgctgatgcggtgccggtcggcgccggcgaagggattagcgaggagggtagaggcagaggaggagcgcgaggatgtgaagatcgccaccaataagactccggagaaagagacggaaaaggagagggagagcctggtgctcatgacgtact

SEQ ID NO: 17333 - DNA, 184 bp, Zea mays
  Coding DNA Sequence Number=SeqID_2930
attctagatggtacataacttaaacatatttgtttgggaagggatctggtcgccagcctactcctagtgaagatggaaatgtactaatgtggaagaagaattcaatactttagcacctaccttattggatagttttagatgtcttccactcattcgacataatgcacctcacaaagaatctttg

SEQ ID NO: 17334 - DNA, 178 bp, Zea mays
  Coding DNA Sequence Number=SeqID_2931
ttgacctgtcatattttgttagaaagggtctcccaatttttggcattggtgttggacatagcacatatgacaaagcttcggtccactactatgtgcaatctcatatccagattaacgagtaccgtgatcgtataattttggtgagtatccgacaaaatgctctgagtttaagaatcac

SEQ ID NO: 17335 - DNA, 418 bp, Zea mays
  Coding DNA Sequence Number=SeqID_2932
cagcaacgccatggccgtatgctgacccgcaccgagcgcttccatgaagtgttcgctgccgcccgtgaggcccgtcggccgctgatctatggccaactgatcatcatggtggtgtacctgccgatctttgccctgaccggcgtggagggcaagatgttccagcctatggccttcaccgtggtcattgcgctgctcggtgccatgatcctttcggttaccttcgtgccggcggccattgccctgttcgtcaccggcaaggtcaaggaagaggaaggcctgataatgcgcacggcgcgtcagcgctatgccccggtgctggcctgggtgctgggccggcgcaagctggcgttcgctggcgccgctaccctggtgttgttgtccggggttatggccagccgcatgggcagcgagttcatcc

SEQ ID NO: 17336 - DNA, 451 bp, Zea mays
  Coding DNA Sequence Number=SeqID_2933
atgtgattggctattaccgcgaaattgccaccgtcaactatctggcaccggtgattgaaaactggtttctcgccgctgcgcccaataatccttttattcgcgagtggcaaaaacagtacgcgccgatcaagcatctgggggcgcacaactattttaatgagctggcaaagcgcgatgattttgccctgctgacgcagaaaatcgccgagccggcacagcagctgggttcgctggcgcagcaggcggcgatgcgcgaacatcgccgcgtgaacctgtatctgcgtaaatgtgaggccaacgcgtattactatcagcggctgaacaactggcaaagtgacgcctttgcgcacacggtgctatttcatcagcgcccgcatacgccgccgccggtgatcaagctgagcggcattgagcagctacatctcgacttcaatctgcgtctcggtaacta

SEQ ID NO: 17337 - DNA, 470 bp, Zea mays
  Coding DNA Sequence Number=SeqID_2934
gatgctttcttagcttctgaatctttgattaaacaaatcccacgtcttttgggtccaggtttgaacaaagccggcaaattcccaactttgcttactcactctgaaaacatgattgaaaaaattgatgaagtaaaagctaccatcaaattccaaatgaagaaagttttgtgccttggtttagctgtcggtaacgttggtatgtcaagcgaacaactagctcaaaatatcaacttggcaatcaatttcttggtttctttgctaaaaaagaattggcaaaacgtgaaatcattgcacgtcaaatcgactatgggaccatcgttccgtctttattaagctacaactacacacatttacattggtctttggctagattcgtttgtattgtttcgaacgtttttacgcttttgaccactatttttgtcaccctcttctgtcaatatattttttgttcgctcattttacttacgtta

SEQ ID NO: 17338 - DNA, 275 bp, Zea mays
  Coding DNA Sequence Number=SeqID_2935
atgctgactaccatcctttaccgcagccatctctatgatcacgttcccatcaaaacgctggaggatatggttggcaaagccaataagaaaaacgaagttcagatgtcaccggcattctgttatttgatggacggcatttcttccagctgcttgaagggcccgatcaggccgttcagggcatttacgaccgtatctgccgcgacgcccgccatcacaatctggtggagctgatgcatgacttcgcgccagcccggcgctttggtaacgtcggaatg

SEQ ID NO: 17339 - DNA, 375 bp, Zea mays
  Coding DNA Sequence Number=SeqID_2936
atgatggtgcggatcgtcgagcaccgcgccgaaactttgaaagatttcgtgatggagcaggaggttgcatcctccgtgccacgagtgcccgaccgccccgactctgggactgctgccgtgcacgctgcacggcagcatacaactgcgcagacatcccggactccgtcgagggcggcaccgggggcattgtctgcagccagggagttgctgcgtcaccctccaagctccacggcctcgctgggggccatgaagcaatggcaggacgacgttgaccgactgctcagcatggcacattctacctcgaccaggtcgaggccacggtcatcccggtgccaacatgaggtgtcgacgtctgtgcacttgccctaagtgagg

SEQ ID NO: 17340 - DNA, 277 bp, Zea mays
  Coding DNA Sequence Number=SeqID_2937
ggatccaggaaccagccccagaaaaccagcggaagcagcctaccccaaaaaaaacccaccacacccctttttcgctggcaaagaggagctaaccaaacaacggcgggaaggaagagccggccacccgagcattagggcggcccaggccatcagggcttcatccccccggcatcggcgatctggggggcccgggaaaatctaagggaccccatctcagggatcttggaccccacccccccgggaagcccggaccacaggcggaaagggactggcccaa

SEQ ID NO: 17341 - DNA, 577 bp, Zea mays
  Coding DNA Sequence Number=SeqID_2938
gatccgatcgtcaacgccgaattctcaccgcagggcattcagctgacgcagttcagctcccgctgggtcaacggcgtgattcgcgccagcggcagctggacgcgcagcgataagcgcctgacgcttgacgatttagccattgccggcctggaatacacgctgccgcaaaactggcgcgatcgctggcagcagacgctgccgggctggctggatagcgtgctggtgaagcgtgcgaccgctaaccgtaacctggtgattgatatcaatccggccttcccgttccagatgaccgcgctcgacggtaatgcagagaatctgctgctggcgcgccagcatcaatggggcatctgggcgggcaaagccacctttaacgcggcggaagccacctttaaccgcaccgatttacgccatccgtcgattagcctgaacgccagcgatcggcagattgaggtcagcgagatgagcgccttcaacggtagcggattactggaaggcacggcaaccgcaggacaggaagcacagcgtccgtttacgctgaacctgaaaggccaggcggtaccggcaaacgtgctgcaaa

SEQ ID NO: 17342 - DNA, 506 bp, Zea mays
  Coding DNA Sequence Number=SeqID_2939
agccctcgacggttggattcgctcagcaccgcgacgagtgttcctccgtcttccgcgcagacgtcaaggcgcatctctcagcagccaccctgccgtgtgttggtactcgtgtcgctgccttgcaatctgccctgcacgtgttcgatgctaggcgtccacgagtgatgttgccagtgttcgaagaccacgttatcagtgaacaactccccggagtccatgactgcctcgacaaccccatcaccacgttcctggggcctaacatcaacacagatggcgccgcaggccgaacagttcgtgcagcagcggcaggctggagccgcgtgccacatgccggatctgatccatacgagcctgacggtgcagcaccaggtcgcggtcgcgctggagcagcaacaccagccccaggacgacatgtccgcggcttgccacagcaagcagcatgccacgaccaggaagggaactacaaaatcatcgccaaagccgtgaacgaagtgtaccgggcagtc

SEQ ID NO: 17343 - DNA, 450 bp, Zea mays
  misc_feature (317)..(317): n is a, c, g, or t
  Coding DNA Sequence Number=SeqID_2940
tgcaggcacgcagatgaggaagtcatggtctgcgagaatggcaagtgcaccggcgacattgctgggggcggaggagtgtgaagctacacgggcgtgtactgcgcgcatctcctctaggtcgccgaccgcgtggcgcttgccgtgggcgcggtctacctagatcacggagactgccgggcctttgttccggcagagctgggactgctcgctgacctcgtcctgctgcagcttagctgcaaccgattgtgcggtgtgctgacgtgcgctctatggcgcctacgtctcctacaagagctatgacctaagaaacataccgnttattaagcgcgttctaggacgttatgctatatctaccagagcttatatttctaaacctccaatttaacgactcatagggcgtctgtacatcgctgctctacgtacgcatgtcagcgccatcttgctaaacca

SEQ ID NO: 17344 - DNA, 257 bp, Zea mays
  Coding DNA Sequence Number=SeqID_2941
atgctgcgcagcttaatcgcctcggcacagctgctgtggcgtaacggtgaaacccgtttctcgctgctcggcaccagcctgttctggggcgccggcgtcacgctgcgcttcctgctggtgctgtgggtgccgatggcgctcggcatcacggacaataaaacgccgaccacactaaatgccatggtggcgatcggtattgttatcggcgcggccgcggcggcaaaactggtcacgctgcaaacggtgcggcgctgcat

SEQ ID NO: 17345 - DNA, 547 bp, Zea mays
  Coding DNA Sequence Number=SeqID_2942
agcgctcagcgtgcaacgattcaatcagattcacgacatctatcagaaaaccaatctgatttatgacatcaacattgaagtctttcaggccaaaatcaatcgtcttaaatatctatacggcgaggacaaagcgggcggcaccatgacggattacgtcacgcacgctcagcaactgacgcagcaggcccagcagctgccgtggacggcggacgccagagggttgctcaacgatgtcgccagccatcttgcccgttttcagcacagcatcaccgccatgacccaggcaacccgacagctcaacgatctgcgcagccagttggatgcgctgagccagcaggacatgacgtcgcgctataccgcactaatccggacccctgtcagcacacccgaactcaccaaccagatctatcagttgctgtttgccatcagtaatgtgcgcgaagaggcctgggcgctgcgcttcaacgtcagcgaggcactacgcaataaactggaacatgattttcagcgcgccggccaggatatgaacacgctactgactcagctg

SEQ ID NO: 17346 - DNA, 279 bp, Zea mays
  Coding DNA Sequence Number=SeqID_2943
atgcaaagctccacaattcgcccttaaccagtggtaacaacgcagaggacccggaggaacaggatagcttgttctcaacgctgattttcgccgctaaagtggagtgtttggcaggatgctatttttttcttccattagggtacgttcgggttttacggaacggtgggtttttatacggaacggtgggctacaacaattagagccggattgcttctctaattatttatataaggtttgatcagctggaataattttggatccatatttggccaaaaaaaa

SEQ ID NO: 17347 - DNA, 393 bp, Zea mays
  Coding DNA Sequence Number=SeqID_2944
tggatcgcggcgtgttctttgacctgcgctttctggccgacggtgcaccaaaccctgatttcatccttaatcagccgggctggcagaacgcgacgtttttgctggtcggtgccaattttggctgcggctccagccgcgaacatgcggtgtgggggctgaatcagctgggcatccgcgcgattatcggcaccagcttcgccggcatttttgacgataactgccagcgtaacggcgtgctgacgctgagtctgagcgaggcggattatcagcgtctgagcgcggtggccgccgatgcgcagcgcaacaccatcagcgtgtcgctggagcagcaaaccattcagttcgcggatgaagtgattcactttacggtcagtgccctgaagcgcgaaatgc

SEQ ID NO: 17348 - DNA, 133 bp, Zea mays
  Coding DNA Sequence Number=SeqID_2945
cagaaaccgcaagaaacgagggcacccacccgaaagggatttagagggtgtacaatctcctctttactccacgccgaacaaaaaatgattttagcccctctaatcccctcggatccccggactccccaactag

SEQ ID NO: 17349 - DNA, 423 bp, Zea mays
  Coding DNA Sequence Number=SeqID_2946
catcgtgatcctgtttcagggacacaaaaccggctacctcggcagcacggtgtttcgctacgacgccaccaaatatctgatgctcacggttacgctgccggtggagtgcgaaaccgatgccacgccgcagcagccgctggccggcatgagtctcaccgtggatccggccagtttgcaggatctgctgttaagcatcggcgatgacgagcagtttcagccgcagccgcaaacctccggcattcactctgcgttcctgagcgaggagatgctgtgcgccgcggaacggctgctggatgtgatggataaaccgcgtgatgcccgcgtgctcggcccgcagctggtgcgtgaaatcatttattacgtactgaccgggccgattggcggcgcgctgctgtcgctggtccattgccagacgccagttca

SEQ ID NO: 17350 - DNA, 517 bp, Zea mays
  Coding DNA Sequence Number=SeqID_2947
gctgcctgcaggatttaatatcgcggcggatggtcatcgccgacaccgccatcagcgtggccagttcgtgaatggtggccgatcgtttcgcaaacaggtagcgataaatagcgtcttttcggtcttcgggcagcatgatgagctcagggttaacagtgacgttttgcctgccatgccacgcgcgcatagcgtccggtacggcagcttcgctatcatagctcatctgaagttgaatcaggttcaacgaggcaatgagtcaggagacacgaaaatgcccgccctgcaacgtaatgaactggccgatctgaatgtttttctgctgatttgccggcgcaagagcttccgcctcgccgcgctggaactgggggtcaccacgtcggccatcagccacacgttgcgcagtcttgaagcgcgtcttggcgtgcgcctgctcaatcgcaccagccgggcggtggtgccgacggacgccggtgccgcttttttgcgccatctggaaaccggctttgcgcagattgag

SEQ ID NO: 17351 - DNA, 332 bp, Zea mays
  Coding DNA Sequence Number=SeqID_2948
gagtttgtatgtctccagctaaaaacagctcaattgggatgtatggacttgaccgttggaatgtgtctaggtacctcgaacagctagggcggtcaggcagccccaatggagccctggcaggcgcgcagtcgtcggatcggctcgagtcctcagccctcggagagcgcgagccgggccatggcctcctacagtccacacactcacacccccgccgctaccgccggtcttctgcgttcgggacgggggttttagttgagcgtgcggtggtagagtggcctggcttgtcagggcaggctgagagaatccaagtacttttataccgggcgcgcgag

SEQ ID NO: 17352 - DNA, 389 bp, Zea mays
  Coding DNA Sequence Number=SeqID_2949
tgcaggtttcactcggctttactactccactgagttgaaagtcggaactgcaacttattattttacctattcgttgtcagctcgcggactttgtaagaataccgcttgagaaagcaggtggtatgatggcactggtcgatgtttactgtctcttcaaccgtgctaggggaacagagttaatctcaccagaggaccttttgcaagcttgttcgctatgggagaaagttgatgtcccagtcatgctcaggaaatttgatagtggagtgaaggtgatccagacaaagacacatagtgatgaagaggtaggcaatcacaacaataagccttaatgcatactgaatgactaaaccacatattgcagccaatccgcattgttgctgttaatgtat

SEQ ID NO: 17353 - DNA, 347 bp, Zea mays
  Coding DNA Sequence Number=SeqID_2950
gatgattgtcatcggtatcgtcgccatcctcagcgccattggcctgcccgcttaccaaaattatctgcaacgtgccgcgctgaccgacatgctgcaaaccatggtgccctataaaactgccgtgtagctgtgcgccattgagcgcggcggaccggcgcagtgtcaggccggcgagcgcggtattcccgccgccaaaggctcacgctatgtggcgagcctgagcgtggtgaatggtgccattacgctgaccggccaggagagcctgacggggttaaccgttgcaatgttgccgatatggaatgcggcggaaggcgcactcagctggcaacgcagctgcaccagcgaca

SEQ ID NO: 17354 - DNA, 256 bp, Zea mays
  Coding DNA Sequence Number=SeqID_2951
tccactcgccggaagatgcagaacccacctaaaaaaaacgtgaagctcagctcgaccagtgctggtccggcagccgtgctacctcgcactcggagactggcggtggtggctgctgctccccgcccggcccggcccggtcctcgggcgcgacgaccggccgtggccgtgggcgtggccgctcggcgctgcttcgtcccgcggccgcaccctgagctgctccatcgcctcgatggccagcacgacctccgccatggag

SEQ ID NO: 17355 - DNA, 217 bp, Zea mays
  Coding DNA Sequence Number=SeqID_2952
atggcgggcaaaaccctgtatgaaaagctgatcgaacagcatgtggtacgtcacctggacgatgaggggcacgtgctgctctatatcgaccggtcaatcctcaatgaatacaccagcccgcaggcgtttagcggtctgcgcgaccggtcgcggcgcgtgcgccatccggccaccattctactcaacgtcgaccatgtgaacccgacgcggccgatgc

SEQ ID NO: 17356 - DNA, 372 bp, Zea mays
  Coding DNA Sequence Number=SeqID_2953
tgaaaaagccaacgccggtacctcacgatgcagcctttaaagccttcctgacgcatcccgaaacggcccgcgactttatcgagctgcacctgccgccggcgctgcgcgccgtctgcgacctcagcaccctgaagctggagtccggcagcttcgtggaagagagcctgcgcgcttactacagtgacgtgctatacagcctgaaaaccaccgccggcgacggctacatccacgtgcttattgagcatcagtcaacgcccgatcggcacatggccttccggctgatgcgctacgccgtggcagcgatgcagcgccatcttgacgccggccataaaaaactgccgctggtcatccggctgctgttctatacaggac

SEQ ID NO: 17357 - DNA, 264 bp, Zea mays
  Coding DNA Sequence Number=SeqID_2954
caagcttcagttgccggccgacagtgctgttcatcccgtctttcatgtgtcgcagctgaaacgtgcagtggggagagattctacactcattcctcagctgccaaatttgtctgatccattgcaggtgcccttgagcattttgcacgaccagacacgcctggtggagcgcggcggcgaactcattcgccaagtgaaagtgacttggtccgacatgccggtggaactggcgacatgggaagatgctgatgcactccgcgcacgatt

SEQ ID NO: 17358 - DNA, 502 bp, Zea mays
  Coding DNA Sequence Number=SeqID_2955
gttgaccttcaacgacgaatcggcaccgcatcacctcacgcccatccacgaggccctcttctccgacggcgctgaccccttcttcggcgaggagctcgacatcctcaccacctccgagttcgacatcgagcagtcgtctgtggacacccgatctctgcgcacgccgccctccgcaggagagttcgagcgcgtcgaggacatgccggggttgcgacacctagtcgtgctcagcgaccgcgctgtcgccgatgtttttgtcgcgtactccacgctcaaagtgtttgatcaaatgcccaacccaggtttcgatggaggtcctatctttgacgaggaacctgtcttcgagggagagccgtttccctccaccactgactacatcgacgcgctgcgcaacgagatgaacgagttcaagagcaagcgcgacgacgtcaagcgcatggtcgactcctccgagcgccagggcatggaagccaccagccatgtcaagtggtggctagagtgc

SEQ ID NO: 17359 - DNA, 155 bp, Zea mays
  Coding DNA Sequence Number=SeqID_2956
cagaaccgccgagcaaggtggaagaccaagcagctggagaaggactacgacgcgctgcgccgccagctggacgccgcccgcgccgagaacgacgccctcctctccctcaacaagaagctccaggcagaggtgtgtactatgatgcaggaggcggc

SEQ ID NO: 17360 - DNA, 357 bp, Zea mays
  Coding DNA Sequence Number=SeqID_2957
atcccacaactacaaacgcatgcagcagcggcgcatcgtgtttaagttcgggattaattacggcacgccggcggagaaagtgcggcagattggcggcatggtgcaacgcatcattgaaggcgtgccggacacgcgtttcgatcgcgcccatttcctgtcgtttgacgaatcgcagctgacgtttgaggtggtctatttcgtgctgagcgccgattacaacaaatacatggacatccagcaggagattaacctgcaactgatggcgcagctggagcagaaacagattcgtttcgccttcccgatgcgccgcgtggagttcaccggcggcgtgctgccgcgcattaacctcagcgatgc

SEQ ID NO: 17361 - DNA, 203 bp, Zea mays
  Coding DNA Sequence Number=SeqID_2958
cgctggcgggtattcgcgatccgctgacgctgcgctatgccaccattgtttcctatgccaacggtgccggcgcgctgctgcgcaccttctcgcgcgaccgcgaacgcgccattgcaatgatcaacgccatgacgccggatgagttctaccagcacgtgcagaacaagcatccggccgcccaggcgccgcgctacctgtggaaa

SEQ ID NO: 17362 - DNA, 298 bp, Zea mays
  Coding DNA Sequence Number=SeqID_2959
atgaccattcgtatcgcaataaatggttttggtcgtatcgggcgcaacgtgttgcgtgcgctgtatgaaaccggtcgccgggcggaaatcaccgtagtggcgattaacgaactggcggaagcagctggcatggcgcatctgctgaagtacgacaccagccacggccgctttgcctttgacgtacgccaggagcgcgagcagctgtgggttggtgacgataccatccgtatcctgcatcaggcggagattgccgcgttgccgtggcgcgagctgaatgtcgatatcgtgctggactgca

SEQ ID NO: 17363 - DNA, 175 bp, Zea mays
  Coding DNA Sequence Number=SeqID_2960
ggccagctcgcggaactcgatgcgttcctcggctggggcgtcgccgaagatcatccgctcgccggcgcggtcgcgatgccggtgccgccgcacgcaccggaacgcatcctgctcggcggctcgcccgacagcggcgcgctcgccgcgcgccacggctggcgcttatgctacgccg

SEQ ID NO: 17364 - DNA, 597 bp, Zea mays
  Coding DNA Sequence Number=SeqID_2961
agctactgatggcaactgggaatgaaccactcactacagaggaggcaatgagtagtgagcaatggcgaacagcaatgttggaagagatggcgtccatagaacacaataagacctggacattggtgaaccttccagcaggacagagagcaattggtctcaaatgggtgttcaaaatcaagcacaatgagcatggggacgtcaccaagtacaaagcgcgtctggttgccaagggctatgtacagaagaagggcatcgactttgaagaagtgttcgcgccggtggcgcggatggagtcagtgagactcatgttggctgtggctgcacatcgaggttggtcagtacatcacatggatgtgaagtcagccttcttgaacggggatcttcatgaagaagtttatgtaacacaacctccaggatttcagaacccagagaagggccaactggtgctcaaactgaataaagcagtgtatggcttaaaacaagctcccagagcttggaacattaaactggattctgagctagcctccctagggttcagtagatgcaaagtagaacatgttgtctacagaaggggagttgggaagtccatgctgatta

SEQ ID NO: 17365 - DNA, 269 bp, Zea mays
  Coding DNA Sequence Number=SeqID_2962
ggaggcgattttccgcgccgccgtgctgcgcttccggccgattttgatgaccactttcgccgccgtgctgggggcgttgccgctggccatcggcatcggccagggggcgagtttgcgccagccgctggggttgaccatcattggcgggctgctggtgagccaggcgctgacactttacaccacgccggttctgtatctctggctggagcggctgggcacgacattgcgcggcgggcgggacaaggccgcgccgcgttcaggtagcattg

SEQ ID NO: 17366 - DNA, 112 bp, Zea mays
  Coding DNA Sequence Number=SeqID_2963
caggcagcagatgacgcatcactgattaaaaagggcgagtatctggcgcgccttggcgactgtatggcgtgccataccgtggccggcaaagcggattatgccggcgggctgg

SEQ ID NO: 17367 - DNA, 463 bp, Zea mays
  Coding DNA Sequence Number=SeqID_2964
atgaagcaaactgtggcggccctgctggccaaaacgctggagagcgccggcgtaaaacgcatctggggcgtaaccggtgactccctcaacggactgaacgacagcctcaaccgcatgggcaccattgaatggatgccaacgcgccatgaagaagtggccgcttttgccgccggggcggaagcacaaatcagcggtgagctggcggtgtgcgccggctcctgcggccctggcaacctgcatctgatcaacggcctgtttgactgccatcgcaaccatgttccagtgctggcaattgccgcgcacattccttccagcgaaatcggcagcggctattttcaggaaacccatccgcaggagttattccgcgagtgcagccattactgcgagctggtctccaatccggaacagctgccgcaggtgctcggcattgcgatgcgtaaagccatcctcaatcgcggtgtgt

SEQ ID NO: 17368 - DNA, 214 bp, Zea mays
  Coding DNA Sequence Number=SeqID_2965
atgcctgcagctggcgaatgacagcgagtttggcctgagcgctaccgtgtggagcggcaatgaagcgctggcgcaggaactggcagagcagctggaaaccggcgcggtgtttatcaacggcaacggcgcctcagatccgcgcgtcgctatcggtggcgtgaagaagagtggttatggccgcgaactctccagcttcggtgttcacgagttctgt

SEQ ID NO: 17369 - DNA, 413 bp, Zea mays
  Coding DNA Sequence Number=SeqID_2966
gtggtgtgccgcgtgaacattacacccgggagagtgatatccgtgaagaaatgtgtgcctagccaccagacccggggacagttcaaggatgacggcaccaacgggcgggttcgggacttgttctcggggagagtggggcgcgtggggtccattcggcccaaagacattgttcggttcctcggctggtgctggaacaaaagccaccggctggttatgtacgaatacatggcccacggcaaccttgggcggtgtcttcaacaacgggccgggccgggcggcacacttgaattggaagccccgcgacaacaaggcccaccacatccttataggccttggcttccaggcaaaccattccggatttgggctggcccagcttgttcaagacggcggctttggacggttgttcaacaacg

SEQ ID NO: 17370 - DNA, 474 bp, Zea mays
  Coding DNA Sequence Number=SeqID_2967
ccaacggtgcgctgacgttacaggtggcgcgggcgttacagcgcctgacgctgcgctggggcgagagcattggcctgctgggcttcgacgaactggagtgggcggcgctggccggcgtcggtatcaccacgctgaagcagcccacctggcagatcggctatgccgcgctggagcaggtgatcgcgcgtatcgaaggcagcgaacagccgatccgcgagcaggttttctccgcgagacaggctggaggaaagatgtcgaaagcggaaattattgtggtcacggctgcctacggcgcgcacaaggtggcagaactgggcggccaggcagcgctgctgccgctgattaaagcggccggtgccgatggcgtcgagatccgccgcgagctgttcagcgacgacgaattgtgccagctgcatacgcttagcgacgcgctgcgccagcatcagctcagcgtcagctattcagtgccggaag

SEQ ID NO: 17371 - DNA, 205 bp, Zea mays
  Coding DNA Sequence Number=SeqID_2968
tcaaccggggcagattacatgttttatcagacgctgcgtgcaaataactggcgcaatatttgggtggtcggtgatttgcacggctgccgcgcgcagcttgatgcgcagctgctgcggcagggctttgatcggcaacaggatctgctgctatcggtcggggatttaatcgaccgcgggccggacagcctcggctgtctgcaactgc

SEQ ID NO: 17372 - DNA, 146 bp, Zea mays
  Coding DNA Sequence Number=SeqID_2969
aaaagatgcattgggctccacacatgcgtcgtcgccatctcccccgacaatctcggaggagacccctgcccgagcgtgacgaagagtgtgtcgatcgagactggtgtgctctcccaccgcttaggattagcatgcccgcccgccct

SEQ ID NO: 17373 - DNA, 209 bp, Zea mays
  Coding DNA Sequence Number=SeqID_2970
ctgactttgatttttccactgcactttacaagtgaaaaatatgctttttattttcaggcagggttactccagaaagtgtcattttcagttttggcactgtacttcttgaccttctcagtgggaaacgcataccgccttcacatgtaagcttcttgctagaaatgtcttatgctttgttagatatgaggtctgtttctgcaaatataaaa

SEQ ID NO: 17374 - DNA, 210 bp, Zea mays
  Coding DNA Sequence Number=SeqID_2971
gtaaggaattggctgcctttaaaaggcaaggtcaccatgggctaatcgttggactctatggcgctgggggcaaagggggcgaaggcaccgccgccaccacgaacgagttcccaccaaggacgaccacctcagccaccgaggcctccctggggacgaccacgggggatggcagctcaaggatcaccacgttagcagccgatgatccaagcg

SEQ ID NO: 17375 - DNA, 408 bp, Zea mays
  Coding DNA Sequence Number=SeqID_2972
gtatgtctggcagtcggattacatcagctcctcgtggaacaccgcgcgggtaaaagatccgctggtcgaccatttcgtgcagcagatcgtggcgcatcagggcgatgaaaaagcgctgctgccgctcggtcaggcgctggatcgcctgctgctgtggaacgcctacatgattccgatgtggtacaacgccgaacagcggctggcctggtgggacaagttttcccatccgcagattaaaccggcgtttgccacagggctggaaaactggtggtacgatattgcgccgggtggtccggtcgatcaggcgctggccaacatccagtttggtcatagtaccggtctgcctggcagcggcggcagtgacagcggtgcgcgcggtgcgctggtgcgcgacaatcccggcgacag

SEQ ID NO: 17376 - DNA, 329 bp, Zea mays
  Coding DNA Sequence Number=SeqID_2973
atgcacgtgcgcagctacacgatggaccgccgcgaagtggcgaccgcgctcgcgaacggctccgtcgacatcgcgatcgacgcgccgctgatcggcgacccgcacctgcaccaggcgctgctcgtgcgcgaccgctatgcgtgcatgatccgcgacgaccatccgttcaagggcgacacgctgaccatggacgactacctgtcgatggggcacatccacgtgtcgagccgccgcaagggcagcgggcacgtcgatgcggaactgacgcggctcgggctgcgccgcaacatccagatgcgcgtgcagcactacatggtcgcgccgctgat

SEQ ID NO: 17377 - DNA, 409 bp, Zea mays
  Coding DNA Sequence Number=SeqID_2974
aaaatttattatcaggcaagcaagctttataaaatttagaacctttaaaagtgattacatttttttttttttttttattttttttttttttttttatttttttttattttttttttttttttttttttttttttttttttttttttttttttttttttttttttttttttttcaaccaactgactttgtttgacttcaaagatccaaagacaagttgtttacaattaccaatcaaatcagcttcaatcgtatagacaattattaagaagtgttatcatttcgctttaggaaaacagttgggaggagagtcgtggatgtttccccacgccagtttaggtccggtcatagaggctagcgcaaggatagagtgagcatagaccattactaagaagtgttatcatttcgcttt

SEQ ID NO: 17378 - DNA, 412 bp, Zea mays
  Coding DNA Sequence Number=SeqID_2975
cttccattatcaaggcccctgttttcattaaaggtgcaaaacgccttgagggaaagaggcctgatatatttgtagtcaactcttttggttctggtttccaggcactttttattttcctactccttccatttctctctaacttgaaagggattccttttgctgaactcccttcatacctaacccatggtgttgcatgctttctgaatgttggagggaatctgaagggtgagtattgtttctcatatcacattcaggtggtaaataagtggagcttctcatattatataatttcaaatctatggttaattacagaaaaaagtgttgttctcatatcctgcactctcatggccattgaagggcctcttttcatggaaaaattagaaattctcatgctactacgtcggctttgaga

SEQ ID NO: 17379 - DNA, 282 bp, Zea mays
  Coding DNA Sequence Number=SeqID_2976
cgggcaagcgcaccggcaaaatctattacgttcaggtggaaggcgtaccgcaggaatcagatttatcccgcctgcgcagtggcatcaccctcaacgatggcccaacgttgccggcgggcgcagaagtggtgcctgaacccgcgtggctgtggccgcgcaccccgccgattcgcgagcgcaaagccatccccacctgctggctgaaaatcacgctgtatgaaggacgcaatcgccaggtccgaaggatgacggcgcacattggctttccgacattacgcctga

SEQ ID NO: 17380 - DNA, 78 bp, Zea mays
  Coding DNA Sequence Number=SeqID_2977
gagacgctgctctccaatctcccatactacgccgagcacggctacggcttggagctccacaaacacagatcaaaattt

SEQ ID NO: 17381 - DNA, 173 bp, Zea mays
  Coding DNA Sequence Number=SeqID_2978
gactttaaggatccccctgcacacacagcaactgcagccgacgcttgaatttggttaatacactgagatatatgttttgaaaggatgtttccctacgagggttctggctccagaagtggctgaactcagacaatgattgactacctcttcctcatggtccttgtgcatgaagg

SEQ ID NO: 17382 - DNA, 271 bp, Zea mays
  Coding DNA Sequence Number=SeqID_2979
atctttgccttgtgcagctatcgcaactattatgaactgcttggcacacgcattttgcacgtgatcgatccggtgcagtttcctgcccatcgatcacggggtggtctcagccacggtgattgccaacaccgatctggaagccgacggctgggacaccggtctgatggtgctcggcaccaagcgtgccaaagcgctggctctgaaacagcatctggcggatgtatctgattacgaagccgggcgacggtttgagccactggatgtcgacaca

SEQ ID NO: 17383 - DNA, 128 bp, Zea mays
  Coding DNA Sequence Number=SeqID_2980
ttcttaataaagctaacacgatggctttaataaaggaaaccgtaattttggtttatcataggactgacaacttctgcgtttgttggtctttattttcagatcaaagaaacttcgtgcgtttgttggct

SEQ ID NO: 17384 - DNA, 357 bp, Zea mays
  Coding DNA Sequence Number=SeqID_2981
gtactgaaactcattctttctgaaagccatttgttgcatcggcaatgtgtttttgcaggtccattgttacacttgcattgacattgctaacaagttcccaggcaatattgattgtatggtcgaaaagagctggaaagtatgactatagtgtcacaacagcaaattttgtggaaactttgaaatgtctactatcacttgtagcattgtccaggatatggaacagtcaaggtgttacagaagataataggttaattacatcgtttgatgaagttagagtttaccccattcctgcaatgctttacctggtcaagaacttattgcaggtatgtccagttgcacactcattttgttgtagga

SEQ ID NO: 17385 - DNA, 395 bp, Zea mays
  Coding DNA Sequence Number=SeqID_2982
gacccggccgttgaggatattctcatcaccgcggctcacgtcacgctgtacgactttgacaccgatgtcaaccagtgggtgcgttatgcgtgctcaggcgcgcgcctgtctgattcgcctgaccctagacggaaggacgtggaggggtcgctcttcgtcgtcaagagtggcaaggcccccgcgtcgtcctcctctgggcgatatgggcggctcctgttcgatcccgcccaactccacccaccgccgccggtcttcacccccgccgtcgctggagcagctcgccggaagtccggcgagcagcgaggagggcggcggcgggactgctctctcactcatttccctcccttcttccaccctctccactcctccctcttcctggaggtggccggtgacct

SEQ ID NO: 17386 - DNA, 411 bp, Zea mays
  Coding DNA Sequence Number=SeqID_2983
gcctccaaggttggcgtgagccttaggtaggtcagcaaggtcggatcctgcgaatggaagaggccaaacgacacgtcaaaggggacggtgcaggaagtgtttaaggtcgaggctatggtgtctgtacagagtgaggtatgtgttcatagcctccaagtacccggagacagtcactaattccgagttggccgcaggcctcaaggagagtgtcattaaggctgtcatacaggagaggtacctgtaggagaagactttcttccacctatacctgagggggcggttggtgatcgacgggcctctcgggtgcacgggcgtctgcggcagcaacatcattatcaacacctacggcggatataaagcaagggacgggggcgctttttcaggcaaagaccccggcaaggtggaccgcat

SEQ ID NO: 17387 - DNA, 280 bp, Zea mays
  Coding DNA Sequence Number=SeqID_2984
cgcatgctgccgtcaatctcgtcggcgtcttgcacggcggccacggcacgccgtacgggcccggcttcgagcgcgcgcacgtcgcgttgccggccgcgttggccgccgcgtgcgtcgaggtcggcgtgcgacgcgtgctgcacatgagcgcgctcggcgccgattcgcacggcgcgagcatgtaccagcgctcgaaaggcgacggcgaggccgcgctgcatgcggtcgcggcgaccgattcgctcgcgctgacgatcttccgtccgtcggtcgtgttcgg

SEQ ID NO: 17388 - DNA, 226 bp, Zea mays
  Coding DNA Sequence Number=SeqID_2985
atgtgggtcctcctgtgccggtgccggattcgccggaaggcgatgcaacggggcgagcaccgcgtctacgcagcaggcatgtacaggcggatgaggtcgttggccgcgtccggatctagaacggctcactataccctgaaggtggtgcacgagcgtgatgtggcggtggcgccaacacaagctctagccgatcaaggtgatcaagatctgcaagggcttcgcgtgc

SEQ ID NO: 17389 - DNA, 329 bp, Zea mays
  Coding DNA Sequence Number=SeqID_2986
ggctgcgaagccgtgcctacctggtcaccgagtatgtcgatggcccggacctggccgaatgcttcgcgccctacgtggataacggcgatgcgcccgaggagcaggtggatgccttggtgcatgtgatgcagcaactgattcgcgagcgtatcagccacggcgacttcaagggccacaacctgttctggcacaacggccagtggtcgttgatcgacctggacgccatgtgccaacacgccactcagctcagcttcgcccccgcctacgcccgtgatcgggcgcggctgctgcgcaactggccgagtggcagtgcgttgcatcagcggctt

SEQ ID NO: 17390 - DNA, 555 bp, Zea mays
  Coding DNA Sequence Number=SeqID_2987
tggtgttttatttggtttctccctgctgttcaacatcctaagcatacttgcattggagtttctaagttgtatgtgcatcaaacaaaaccattctgtatttaagttgatcaattatttaggacacttattctttctaaattatttgtagctcccaaggaacatcatgtcaaaataaaatcacaaaaggaatgcgacatacggtacatagatcaaactgttggtggtcaggtttccccaattgatcaagtccaccttccattctatcctttgtccattgtcttcagtcaaatcaactattttgttgatatgcctcatgaattgagaaagaatggagtaactgaaaagaagcttcaactgttacgagatgttaatggtgcattcaggccaggggtgttaacagcattgatggggatcactggtgcagggaaaactacattgcttgatgttttggcaggaagaaaaacaggagggtacattgaaggcattatcaacataggtggttaccaaaagaagcaagatacattctcaaagatctctggttactgcgagcagact

SEQ ID NO: 17391 - DNA, 247 bp, Zea mays
  Coding DNA Sequence Number=SeqID_2988
atgcggtctgtcgtcgggtgcttccgcctggccgtccggctcgtggcgcagccgggagtggtactggctgtgcgctgggcgcttgtccccgaggatgtgtcagcggcggggcgcccccccttggctgctgggtccggcccgttaatgtttctgggcgccttgacaggtcggccccgctgtgcggtcgtgtctgatgtggattggggctgtggcgccttcccttatctgttgggtgggtgtcctttgt

SEQ ID NO: 17392 - DNA, 370 bp, Zea mays
  Coding DNA Sequence Number=SeqID_2989
atgatcccgctggtgttcactaccgccttcgcctttttccagggccggcagcgggtgattgctgccgcgaccgtcggcgcgctggcatcgctggcgccgacgctcggcccgaccgttggcggctggatcaccgataacttcagctggcactggctgttttttatcaacatcattcccggtatttacatcaccattgcggttccgctgctggtgaacatcgacgcgcccaaccgcgaactgctgcgcggcgcggattatctcagcatcgtgctgctggcgctgtcgctcggctgtctggaatatacgctggaagaggggccgcgctggggctggtttgatgatgacaccattgccaccaccggctggattg

SEQ ID NO: 17393 - DNA, 420 bp, Zea mays
  Coding DNA Sequence Number=SeqID_2990
gacgatgaacgcaggcatgtattattactggcacgtagctatgattttcttcccatcggcttaatggacccgagcttagtttacatgtgggccgatctcttccctgcgtacttgggtattatccaatccaatctatcatcctcatcctagcttgcagaggcttgaatgcttgcattgcgtggttaagttcagacgggatgacagcttgaccaggagcaaaagatgaccccgcgaagtgaggggcgggagatgatgaagattacccgactcaaaagccacgcgttgcactctgggcggccggccgtatcttgttttgcctctgcaccgcgcgcgcggcggcagcgatcagaattgaagcagcgacggcgatgtagtacggctgatgagaggaggaagcacagaaagtagctttgctgccag

SEQ ID NO: 17394 - DNA, 375 bp, Zea mays
  Coding DNA Sequence Number=SeqID_2991
tgcagaaccgtggacagaagccgctggagctggtgattggcgggctgctgctgtttgtcgccgccgcttatatcgttgagctgttcttctcgcagccgcgcgtcagcgatctggtagtgggcatggcgctgccgagcctgcctacttcggacgcggtcttcctcgcggctggcgtactgggcgcgaccattatgccgcacgtcatttatctgcactcggcgctgacgcagtacggtaataaaggcagcaaggcggagcgctactcctccaccaagctcgacgtggcgatcgccatgaccattgccggtttcgttaacctggcgatgatggccaccgcagcggccgcgtttcactttagcggtcacaccagcattg

SEQ ID NO: 17395 - DNA, 457 bp, Zea mays
  Coding DNA Sequence Number=SeqID_2992
aaaccgggcagatcaccacgccgatgcgcgtcacctacatgccgggcggcgtcggtgccgtggcatataacgccatcattgcgcagcggcccgccgaagcaggcacgctggtggccttctccggcgggtcgctgctgaacctgtcacagggcaagtttggtcgttactcagtggatgacgtgaagtggctggcggccattggtacggactacggcatggtcgccgtgcgcgctgacgcgccgtggaaaacgctgggcgaactgctggaggcgatgaaacaggatccgactaaagtggtggtcggcgctggtgcctccatcggcagccaggactggatgaaaaccgcgctgctggcacgggaagccggtatcgatccgcgcaaaatgcgctatgtggcgtttgaaggcggcggcgagccggttaccgcgctgctcggcaaccacatccaggtggtatc

SEQ ID NO: 17396 - DNA, 246 bp, Zea mays
  Coding DNA Sequence Number=SeqID_2993
ggagccctagtcatagtgttgtgccgcagcctgccgccgccctgctctaaatcggaggatcgcttctcatgtctcatcctatgctcaaatcctaggtccgacactgattgcgtactaagacctttgatgcaagcgcaatagagcctccacagaggatgcttcatggcgttggatgtgatctcttctccatcgccattggtgcagataggattgtatctgcgggcgaggatggctctgttagaatct

SEQ ID NO: 17397 - DNA, 95 bp, Zea mays
  Coding DNA Sequence Number=SeqID_2994
attgacttactacccttaaatcatgcataaaatggcacatcgacggcaataatccaccattgaaaaccaaccattcgacgcaattgcctttctcg

SEQ ID NO: 17398 - DNA, 517 bp, Zea mays
  Coding DNA Sequence Number=SeqID_2995
gatcgatgtgatcctgtctgcgctgcgcgccattgtggtcctgttagcagtggtggtctgcggcgcactcctcatcttcctgcacccccgtctggtacggtgtgggcatgaccactcacgggccgaaccggctcgggccggtctgcatgaccaacatcgttagcgacatgctgtagatgactttatacgaatactgctgctcctccatcggccactgcttgagctctctcttggacccggacgacgacatgagctccctgcacatcgtgctcgagatgatcccgatgcacccgacctacgccgtgaggtacccgaccatggtcctgctggtgctctacacaatggtcgcgctggtcggctacgcgcagctgttagtgcactggtcctcgaacaaccggtactccttggtgggcaccatgcgtgcctcggcacagaccgcgacgtacgaactgttactcggcctggcacttatgggcgcttgggcacatgctggttcggtcaacatgcgcgacatagt

SEQ ID NO: 17399 - DNA, 334 bp, Zea mays
  Coding DNA Sequence Number=SeqID_2996
ttcacccgacgggtgaagagctgggggggcacttcctttggcggggctgggccgggctggccattttcgggcccattattggcgagggcgaactattcaagcaccaaccctggcaggttccaaggatggggcttgaccgggaaaaggaatgggacttttttttcccgggggaacggaaggacccgaacgggttgggggcgaaccgggccggcggggccgggtactggaagggcaacggggcaaaccagccggggggcaccccgaaaccggggggcattaagaagggacttgttttttacgccgggaaggggcccaagggcgaccagaacaactg

SEQ ID NO: 17400 - DNA, 336 bp, Zea mays
  Coding DNA Sequence Number=SeqID_2997
gatcctgtcagtttgcgtgtcggcctcgatccaagggcttgaccccccattcccatttaagtgtggtctagcctctgaggccggacttaggcacttaagttggaataattcgggcagttccgccacatctggtatcggagcttgtaccaccacagaggaatcaataaaatataaataccatccttttccaaagtaaaacttgatagaaacaatgttggatagatagtaggacgagcaggatagacctaggacgtgaagccttagaattatagaagggtagctaggtggctaagtgattaggccctacaggccacatttacaggatgggagttcttc

SEQ ID NO: 17401 - DNA, 378 bp, Zea mays
  Coding DNA Sequence Number=SeqID_2998
tcgcacgacgttgccgtgtgcacaacgctgatcgcatcctacgtccagaccggccgcacggaggaagccatcgaggcgtttgtgagaatgcttcgcgatgagtcgtcaaattctgcttcaccaaatgagtatacgttctctgccgtaattgccgcgtgtccaaatatggatcgtgcatatcttggagagcagttacatgcacaagctgcacggagagggctatctcatgcccgctctgtggccaattcccttgtcaaactctattcccgccgtggccatctttcagctgctgatgctatcttccgggagagtgtcgtcaaggatgttgtctcctggagcacaattatatcaggatacacacaagaagggcctcgccga

SEQ ID NO: 17402 - DNA, 242 bp, Zea mays
  Coding DNA Sequence Number=SeqID_2999
tgcaggatgcacagggcaggttgcaggggtttgccagtcgccgccgctttgggcacggctggaccatcggcccggtgattgctgacgatgttgcggcgtcgcaggcgctggtgtcgcagctgatgcaggatctgacgcagcagtttgtccggctggacacgcccgatgcccggctcggcgcgtggctgctcaaccttgggctggcgcaggtcgatgcgccttatgcgatggtacacggcaca

SEQ ID NO: 17403 - DNA, 233 bp, Zea mays
  Coding DNA Sequence Number=SeqID_3000
gagactaccacgctaggatcacgatttccatgcaactggacgaagcgaggggtagaaccgagggctttcttaccagggaacgaacagagacttccgggtcgcgatgggtggacaacaagcgcagtcgatgcggcgccgatgagaggtttcacagcgcccaggtctcccctgtgcgcgcgattgcaccaactcggttcctggcgcgcccaggaggctacccagaccgcggacga

SEQ ID NO: 17404 - DNA, 188 bp, Zea mays
  Coding DNA Sequence Number=SeqID_3001
tggccaaggagcacgcccggaggaagaagaagaagcagcagcagcagcagatgggcccctgcctgcccgtcgtcgccgccgccacatcgggcgcggcagcaccaccgaacaatgacaagcagccgccgccgccgctgccgacgacgacgacggcgaatgcggcgaagaagaagcacaccccagcgacg

SEQ ID NO: 17405 - DNA, 191 bp, Zea mays
  Coding DNA Sequence Number=SeqID_3002
tcgtcggccatcaggcataccttctcatgatgcatttttctgattttggtgaatctgggacttcggttgaatggactgaagagtcgtcggatgaggacttggattactttgcggccttggatgtggcggcggcggaggcttcgccgcgtgctgtggatgctgaagttgtgcatggtccaagtgctgggcgc

SEQ ID NO: 17406 - DNA, 385 bp, Zea mays
  Coding DNA Sequence Number=SeqID_3003
aagtgcgcaatgtactggaaaccaaccagtcgttcgtgttctttaagccggaagagtatgtgccggtgcgcggtgccagcgcggtaccgctgattgccaaagcctcggtggcgtccgatcgttcgctgattcccgccggcacggcgctgctggctgaagtgccgcagctgaatgagaagggcaaattcaacggcaaatatgagatgcgcctgatggtcgcgctggacgtgggcggcgcgatcaaaggccagcacttcgatatctaccagggcgtcggcccgaatgcggcgcatctggcgggcttctacaaccattatggccgcgtctgggtactgaaagccgcgccgggaaccggccagccgctgttcagcaatccgcaaaacgg

SEQ ID NO: 17407 - DNA, 343 bp, Zea mays
  Coding DNA Sequence Number=SeqID_3004
agtcgtcggcttccttcactgccaccgacgcggacgcatgcccccttgttgccgacttcttcctccacgtcggcctccctcccaacgacgcggccctccccgacgcttccctccaccgacgtgccaaccccagtcgccgacttccttcattgtcctcgacgcggacacatgccccccttgtcgtcgacgccgacttcttcctccccgccagcctccataccgccgcccacgacatgcgaccaccccctccccggtgacgctctagccgtgcgcccccatcagcgctgctacgcttcaatctactgacgtcagcgctgttgtggctgaatctactgtcgtcggc

SEQ ID NO: 17408 - DNA, 296 bp, Zea mays
  Coding DNA Sequence Number=SeqID_3005
atgggccagacagaaaaggaagcaccgaataggcacagaaaacaaagcgaggactgcacaccggacgaaggacatagaaaagagagcaagaacaggggagggagccacaacgcaccccacacgcagagcgagctgagcaaaaacacaggagtagaaccagaggaacagcaggaaaaccgacacaccaagggggcaggaagcacccaaggagaaggcacaggcgacaacacaacaagcggaagcagagacaacacaggggccgggttccagcatggagaaccaccgatcccgcacgg

SEQ ID NO: 17409 - DNA, 242 bp, Zea mays
  Coding DNA Sequence Number=SeqID_3006
tgatggctgatcaagtggacgaatggaaaggatactacatcaattacaagctgatgaagaaaatgttaaagcgatatgtccaacaaacccaacatgatgagaaagatcgcgaacaagttcttaaagacttttcaaggtttcttgatgaccagattgaaaggattgtgctttttctgctacaacaacaaggccatcttgccagtaggattgagaaattggcagaaaaacgcactgctcttctg

SEQ ID NO: 17410 - DNA, 558 bp, Zea mays
  Coding DNA Sequence Number=SeqID_3007
gcgtggttcaccagcgggttgaaaagattctcgccgcgcatcagcggcgcatgcttggctgggatgaggtgtaccatcccgacctgccgaaaagtattgtgattcagtcgtggcaggggcaggatgcgctcagcgaagtggtaaaacaggggtatcgcggcattctatccaccggtttttatctcgaccagccgcagagcgccgcgtatcactatcgcaatgatccctggccgcaggggctgaacggcatcgatcaactgcgcgccgacgatcaggcgcaaagctggcagttcactatgccgcgtctgaaaggcagcgcggtgcagggcagtttcaccctgattgagagcaaaaacggctggcgcggttttatcgatttcagcggcaaggcgcgacgccaggtcagcgacattcgctggctatcaccgacgcagctgaccttcagcgtcgacagctggatggggccgtttcagccggtggtgacgctgacgcgtgacagcctgaccggctacgtgctggtgggcaacgtgcgctatcctaccacaggcagcaggctgg

SEQ ID NO: 17411 - DNA, 401 bp, Zea mays
  Coding DNA Sequence Number=SeqID_3008
cgcggtcgcacaacatgcaggtggagtacgtgcacggccagaccaagatccttatactcgacaggccgctcctacttcacgctactatcatctgtcgccgaaacacgcttggggtgaacgccggtgacagatgcgatatgtaccagctgtccgaaaaggacctggacgcccctatttacaagccaaccaagaggatgtggaacaccttgttatggatgacgaccggacccgcaacaacgggcccggcgtcaggtactgctgctggcctggggatccactcccatcttaaggtctcctgttgcgaattcagtcgttgtcatatcaatcgccggccgggcttctactgcaccaggaggactagaccctctctatcgactaggcgctcagcacacgggacgttg

SEQ ID NO: 17412 - DNA, 519 bp, Zea mays
  Coding DNA Sequence Number=SeqID_3009
gaacattatcacaatctttagcgacttgcacgtatcttagctacatggcgagtaatcggccgctcaagttaacactgcatctagtaatgttatatgagtgaatgggagttgggggccaacacgcagcagttacataatgacactacatcagaaattcgacatatacttgagtaaaattgatctattcaaaaaagactaggggttcctacaagcatttctattccaccatcagaccttgctccactcatcaaccatagcagtcatatccccaccagagtggtccttttggagttggtactggatcccacgaaggcggaggttcaccttccccaactctaaatggtggtggagagaccggagagaaggcggcagggcgcgtggacgtcggagaggaagagttcaccctcgccgttgccgtcgcggtggtggccgtgctgcgccgtcgcgccgtcgcctcctgcgcccccaggtgtgcggagcagcggatgcctctggacttcgccgtttccttgtcgcggt

SEQ ID NO: 17413 - DNA, 449 bp, Zea mays
  Coding DNA Sequence Number=SeqID_3010
atgactgaactcagcacccagttttacgatgccggcaatgaaatttgcccgccggtgaaatccggaccgcactggatccgcacgcgcgtggtcaatccgctgaccggtgcggacgtgccggaagctgctggggcgcgtcgcgggcgcggatgccaaaggctgctcgctggcgatggaatcgtttctcgctgccgcgcaggcacgggcatgaaagtgtatgccggacatctgccgggcatccgccacagcgaggtggcgtggcacagcctgcactttggccagcagggcagcgcgctggaagtgtgcgtgccggtgctgtccgaggcgcagattgccacgctggcggccagcgtacgcgataacgcgcgccgctacctgcacaccctgagcgtagcgcgcatcaccgcgttgattgatgaagccatcgcgcgtctgcttgaccgttcgca

SEQ ID NO: 17414 - DNA, 161 bp, Zea mays
  Coding DNA Sequence Number=SeqID_3011
tggcccggttgtttccgggattatgattggatctaccttatggaaggttggtggaatggttggtggcaaggtcttttagaaacctaaccttggaggagggaaggattccactcctgggggctgattcgtttctggaaggtcaatggaaaaggactggtcct

SEQ ID NO: 17415 - DNA, 266 bp, Zea mays
  Coding DNA Sequence Number=SeqID_3012
ggcggaggagagaagcgcacgcgcatccgggtgtacgtgcacgagcggttcaccggccgcaacgcgacggtggggtccgtggcgccgtccctgcgcggcggcaactcgacgttcggcgaggtgggcgtggtcgacgacgtgctgcgcgccgggccccgcgcgtcctcccaggaggtggggcggtaccagggcctgttcgccggcgcggacctcgcggacgacggcggcggcggcggcggctacttctcggccatcacgctcgtgtt

SEQ ID NO: 17416 - DNA, 238 bp, Zea mays
  Coding DNA Sequence Number=SeqID_3013
ggtacccctgcagatagcagcaactttagtgatgctcataagctgctcgaggcattacctgcaaggattgcatcccttaccctgatgaaagattctgaaagattggatcttctcgaagagattggtggtagtacatatgtttacgaggatagatgggatgagaccttgaaaataattaccgaaacaggtacaaaaaggaagcagattgatcaagttgtctattacttggaggaaagat

SEQ ID NO: 17417 - DNA, 408 bp, Zea mays
  Coding DNA Sequence Number=SeqID_3014
tggcgcgcagaatcctcgagatcaagcatctggtacagacacaaagtgccccactggcgtcagtaataatgagcactggccgtgcgcgttcaggttctacctagaggcccatctggcgttcaggtggcgtgacctacagtgcgggtccacaggaccacaggcaaaaagttaacaatagtatgtaccgaggcgcgctgaacagcatcctgtccaagctggtacgtcaggcccgtctgatcgctgtcgagtcgttgtctgttgaagcgcctaatattcagctgctggtacagaaaaggaaagccatggcgatggaaaacgagctgatcatgtacggtgagagggatgagtatctgttactgcatgcgcagtaacctgtacaaggttcacgtgagtgatgcagcgggttct

SEQ ID NO: 17418 - DNA, 295 bp, Zea mays
  Coding DNA Sequence Number=SeqID_3015
ccgacagggcagacgaccggaactgggcgtccgggcaacgcaagacagccggcgcccggcgcgcccggacgcggcgcgcagacggcgcaaggcaacgcgggtgccgctcatgtcacacacgaagcgcgccgctcgaacatgcgggaccaagcggcgcacagaagcgagagatcaaggcgggcacgacaaggagagggacgcaccgagggaccgcgaccagggacaggccaaaaacgcaggtgaagaccaagaccgtcggacgtgcacacaacaaaggacaacaaagagcgccggg

SEQ ID NO: 17419 - DNA, 524 bp, Zea mays
  Coding DNA Sequence Number=SeqID_3016
ggcagcttggtttaggtgacttccttaataggagcactccaactttagtagatgcattggaaggtaggcatgtggaaagcctatcttgtggttacaactacactgcagcagtatgtctgcataaagtaatctcaaggaaggacctctctgtatgtagtggttgcaagatggcttttggtttcactagaaagaagcacaactgttaccattgtggatccatgttctgtaattcctgtagtagtaacaaggttgccaaggcagcacttgcaccagataagagcagaaggtatcgtgtgtgtgatgggtgtttcagtcagctactgaaagttgtggattctggtaaggtaaagtctgaactaaataccagcaaaggagctgaaattataaggtcatacacaccaaagttgtctcgtatattcagggatgtaaacttacctgtggaaaaggaaaaggtggctttggtacaacgctccaatcagagaaatgaggtcctgtacactccagtccaagcgaaatctcagaga

SEQ ID NO: 17420 - DNA, 527 bp, Zea mays
  Coding DNA Sequence Number=SeqID_3017
gcagcagtgcgcgatgcaggccattgcacagatggatcccacgctgaatttcatgtcaggcccggtatctgtcggcggacacggcaacggtccctttgccggactgccattcctgttcaaggaaagccacggctgcatagggcaacccatgatgcagggatcgcgacttaccgccggactcaaagcgtctgccgattccgaattcgttgcccggctcaagcgcgctggcgtaatccctctgggtgcgacgacggctcccgagtttgggctctattgcaccaccgaatccacactgcacggcgccacgcgcaatccgtggaatctcggccattcagcaggtggctccagtggcggatcttccgtagcggttgcggcgggcgtggttcccgccgcgagctccagcgacagcggcgggtcgatccgcggccctgcccactgcaccggcacatttggtctcaagcccagccgtgcgcgtacccccatcgatggcaagaccgatggggggctgtttcctttcatcagctacc

SEQ ID NO: 17421 - DNA, 507 bp, Zea mays
  Coding DNA Sequence Number=SeqID_3018
gaaattcactgttatatgcgccaagaatttggagttctgtttaaaggaattctcaaagcaagggcaggcacccatgccaaacaacatcggactacaaccgcttccctcttcaaatgtgcaatctaatcaaacagagtatccatctgctgttgtatccatcatcattgcctggtgactggagttcacatatgggaacctcagtaccagctagctcatattatattgtccccatgaatcagcaatcagtccagctaggtgcttcgaggccagaggtttcacgtacggcacaacctttgctaagtagggtatcattgaggccaccccagcaggtgctaaatattcatacatccttgccagcaatggctggatcacaaccctcaccatctatggcaggcaggatatcacaacacaaagttgcttctccaaaggttcaaatgctgaaatctccatcattccagtcatctaataagcggctgccagaaggagccaccgtcaaaatataagcaa

SEQ ID NO: 17422 - DNA, 354 bp, Zea mays
  Coding DNA Sequence Number=SeqID_3019
agactggctaggagcgaggcggcgtgctccccgaggccctcactagctcactctgaggacgcgggcgacaccggaggggccgcggcacgcgtcgtgtgcgtcactggcgacatcttctctgaagctcactctgaagctctcgcgtcccgtccgtcctccccctgtccccccacactaacctacccggctgcttctctcgctcactctgaagctctcgcgcccctcgacccggcctgggacaatcggcctgggacaagggtgcgccagtgctggactcgagggagacgaagctgcatccaacgcaggtgcctcccgcggtgcctcgcgccaggctaccagtacttccgcgtccaa

SEQ ID NO: 17423 - DNA, 371 bp, Zea mays
  Coding DNA Sequence Number=SeqID_3020
aagatagcgtcagaccggccttggaatcagcagtccaagatcgcggtgaaggagtgtgttcaatcctctggaatcggacggcaaggggctgtctagcacgtagcgctacatccggcacaggacgttcgggcccaacaagcaggagtataagaaggagagctccctcctcaagttcctgggattctatgtggaaccagcttctggtggatcaaggacaggacggccatcatggccatcgcgctcgcctacgacgacggcagggcggcccactgacaggagttcgtaggcatcgtctgggtgctcttcatcaactcccccatcaagctacatgaagcaggccaacgccgggaacgcccagtcggcgatcatga

SEQ ID NO: 17424 - DNA, 181 bp, Zea mays
  Coding DNA Sequence Number=SeqID_3021
atgcctgcagcctgctccgctgctcgcggtcgcggcctcgcgggccgtagcttgtcccgctcggcggccgacgcccaggctgactggggtagcgcgccacaggggacagcagtccagttcaccggcctcgtcagctcgtgctcacaacagcagacagcagtccagttcatcggccaccggg

SEQ ID NO: 17425 - DNA, 272 bp, Zea mays
  Coding DNA Sequence Number=SeqID_3022
cgtccaagacagagagcgcgggcgcgaggttagggaagggagtagtggctgacaggcggggtccacagaccagcgagggcgagtgtccgaacgggcggtcagcgctgacagagagggcccatcgagtagcgagagagaacgggcgcgtgtgcgaaaggattggcgccgacaggccggtcccaccgggcagcaggagggagagggagagagggcacatgcgcggtcgtgggtcgtcgctgataggtggggtccaactgacaggcgatgcgggc

SEQ ID NO: 17426 - DNA, 358 bp, Zea mays
  Coding DNA Sequence Number=SeqID_3023
aacatcgtaggctgcaaccaactataagcagacggtttggttcgttgacatctcaaaatctgggcacatttgacatatttggtgattggcaggatatttcacagccaaattctgaggctaatccacctgatggggttttagcggttcctttattgaggcatcagaaaattgccttgtcatggatggtgaaaaaggagactagtatctcgctttggctatggtggaattcttgcagatgatcagggccttggtaaaactgtatcagccatatcactgattcttactgagcgcccaccagttccacagtcatctactaagaacgagccatgtgaagctacatgtagctctcaagtgacaa

SEQ ID NO: 17427 - DNA, 491 bp, Zea mays
  Coding DNA Sequence Number=SeqID_3024
tcaatgaaagagatgctggccccgacccgtgaacatcgcttcgccatcggcgcatttaacgtcgctgacagctgctttatccgtgccgtggtggaagaagccgaagccaccaacacgcccgccattatttctatccatccgagcgaactggaatttgtcaccgatgaattttttggctacgtgcgcgaacgcaccctgaaaagccgcgtgccgtttactattcacctcgatcacggcgcttcaattgcgcaggtgctgcgcgctattcagtgcgggtttacctcggtaatgattgacggctcgctgcagccgtacgaagagaacgtagcactgaccaaagaggtggtgaagctggcgcacccggtgggcgtgtcggtggaaggcgaactcggcaccatcggcgataccggcactacggtggaaggcggcgtaagcaaggtgatttataccgacccggcgcaggcggaggattttgtgcagcgctccggcgt

SEQ ID NO: 17428 - DNA, 409 bp, Zea mays
  Coding DNA Sequence Number=SeqID_3025
ggtggtgcgcccacgcgattacgacccgcacaaaaagtatccggtgatcgagaacatctacgccggcccgcacgactccttcgtgccgaagacgttctggccgtttggctatcactccggtggcgacaagcagatcggcatgcaggcgcaggcagatctgggctttatcgtggtgatgatcgacggcatgggtaccgccaaccgctccaaggccttccatgatgtggcgtggaagaacctgggcgattccggctttgccgatcgcatcgcctggcaccgtgcgttggcggccagggacccttcctacgacatcggccgggtcggcatctatggcgcctcggccggcgggcagagcacgctgggcgcgctcgaacgccatccggacttctacaaggtgggcgtggcgttc

SEQ ID NO: 17429 - DNA, 214 bp, Zea mays
  Coding DNA Sequence Number=SeqID_3026
tgagaggacctgtccttgcactcttggaaaacatgatgagacggttaaagaatgcacaaaagcacttgagctcaatccatcatacctgaaagccctgcttcggagggcagaagcgcacgaaaagcttgaacactatgatgaagctattgccgatatgaaaaaggttattgaaatggatccttcaaatcacaacccaaggtctcttttcggctga

SEQ ID NO: 17430 - DNA, 188 bp, Zea mays
  Coding DNA Sequence Number=SeqID_3027
ttgggctcttgcttggatccagctttggctccgcctccttctgtgtcccttgcgcgttctcccagctgtcgcccttcccgccgtggggccgtttgcgccgtcctcggctggtcggtgctctcgttgtcgtctctcgtggtcctggctttctgttctttacctgtgcgttcgcttgttgggttcccttc

SEQ ID NO: 17431 - DNA, 447 bp, Zea mays
  Coding DNA Sequence Number=SeqID_3028
gtataattccataatcagatgcaccaacattgccaagcgacatatatcgaaacaaagagtcacataagatgtgattagcaaatatttcttacctatgtcattatgtgtctagtcatgaatgccaagcttcgctataacttagtgaacatggttcatgtccacaatatgtcgttagtgggaagacgaattgcaaaacatatagtgggagaatattttgttaaattgtttaatgaaagattaaagtaaacaaagtgctgaaatttgctttttatttttgttgtagtgatgacatctaagggtcttattggtgttaatttgtaatcaattcttgacaaacaaaaactcactactatgatctttattgattggcaccataacttgagaattgttctcaagcaagagaaaaaggagtatgttcataagaatcccaaccatgatgaactagtg

SEQ ID NO: 17432 - DNA, 196 bp, Zea mays
  Coding DNA Sequence Number=SeqID_3029
aaattgcggcctattttaatctacttattatttgcagacattgatgattgccatttataaactttattgtcagtgcaagggttgcagctgcaagaatacgtggggaagctatgaatgcagctgtggtgatgacaatatgctatacatgagagagcatgacacttgcatcagtgatttgggcctatctaaggctatc

SEQ ID NO: 17433 - DNA, 443 bp, Zea mays
  Coding DNA Sequence Number=SeqID_3030
ggtgcacgcacaggcatacgcagagctgccaggcgagcaagcaggtgcagcgcacggacggcgacccgctgctcttcgacgtcgtgtaccacggcacccacacgtgcgcccaggccgccaccgccgcgcaccacggcaacaaccagccggccacggaccaggccacctccccggggtgcgtcgtagctgggcccgccgcgctgccgttctcgctccggccagcagcctccaacaagccgacgggcgccgcagccgacgacggcgcgaccagcagccgtttcatcgcgaccggctgtaccgtcgtcaccgcgtctcctttcgtgtacccggcgacgccagagccagactgccaggtaggtgacttgaagatcaaggtgattatactttcgtgtggaagagggtatgcatataaatgtaaacataaaggattaagacaagctggg

SEQ ID NO: 17434 - DNA, 553 bp, Zea mays
  Coding DNA Sequence Number=SeqID_3031
atgaagcacaaggtgatctcccgtgcggtcgcctaccacggcaccccgcagggcgcgctcgcgatcaccggcatccccgcgatgaaggagatgttcgagccgctcacccccggtggcttccgcgtgccgaacaccaactactaccgcgcggacgagatgggcttcgccggccagacggaagaggagttcggcttctgggcggccgagcgcatccgcgagatgatcgagtacgagggccccgacaccgtcgccgcggtcttcctcgaaccggtgcagaactccggcgggtgcttcaccccgccgcccgggtacttccagcgcgtccgtgagatctgcgacgagtacgacgtcctgctcgtctccgacgaggtcatctgcgcgttcggtcgcatcggcacgatgttcgcctgcgacacctacgacttcgtgccggacatgatcacctgcgcgaaggcgatgacctccgggtactccccgatcggcgcgacgatcatcagcgacaagctgttcgagccgttctcgaagggcgacacgaccttctaccacgggtaca

SEQ ID NO: 17435 - DNA, 174 bp, Zea mays
  Coding DNA Sequence Number=SeqID_3032
actgacagcgctgagtgagcgttacagcgtcaccgttacgcactggtatgccgaagcaggcggcgatttctgcggctatgcagcctacaccaacggcatgcagacggaagctttcagtgattcgcttgaatggagtgaggatgaggacggttgctttgcagtgaccggtccgga

SEQ ID NO: 17436 - DNA, 566 bp, Zea mays
  Coding DNA Sequence Number=SeqID_3033
ttatcacgcctcttcgtctgtcacacgcgctcgcgccccagtcccgggcggcggtgcgcggctacttctcgccggtcctgcagcaggcaacccaccgctgttggtccaccagcagctccagctgcgagcagtatccgcaggcacccatcaccgccgccgcacccggtgctccttgtccccgcgacggaaagggagagggatacggggaggcggcgacggcgacggcgtgcggcggcgagaaggccgtctcaggcgcacatcaagacggcagcgacggcgccggcgcgcctgccccgccggctcatccccaggataaggaggcggcggtaccgctacgggcggctccggcgggaaggaaaggccgctccggcgtccagacgccgaggcagcgcggccgcccggcgaagccacaggggaataagaataagaagcctgcgcggccgggagctccgaaacaagggcgcggcggcggcggaggcatcatccacgtcgttgctcctcgtcgttcctcctcctcttcgccggcggcgtcctcgacgccgccgtctactactcgtcttagggcg

SEQ ID NO: 17437 - DNA, 169 bp, Zea mays
  Coding DNA Sequence Number=SeqID_3034
tcctggcttcggtcttcatcgcgtgtggcgccggtgcggggccattgtcggcggtggccggggtgtcgcagccccgcgtggctggggcgcgcggtggtcgtcggcccccggcgcgtggcgcgggcggcgagggatgcggcgacgaagtgaagcgcggcgacataatggg

SEQ ID NO: 17438 - DNA, 599 bp, Zea mays
  Coding DNA Sequence Number=SeqID_3035
gaacgtcctgccgtgaaattgcgatgtgttttacgcgtcgcctcgcacccggtcagagtgaccagttggtgcaggggaatttcaggggaaggaccattcgatgggcctccggaggctgcaaggacttcgctctcagcccggcgcaaaaagatttttggccatctcgacagcgctggtaccatgaacatacatgatgtgacgcacaaccgtgcccccgactgtatcccaaccgtccgattgcgttcatccccaccgtctgattgcgattccatcctcgctcgcgagtcgcgcctagcgccggatccgctcccgctcccacagtcgccgcctccttccccgtgcagctacccccgcttccatccccgccatgcgcgcagccgcccccatctccgccatgcgcgcagccgcctccatcctaacaaacatgtagacaaccatgcccgcagccgcctccaccggatctgcgactgtcgtacaacatatatgcgcgcccgcatgcttagcgcccaacatcccgtcgtccaacatccatgcacgaggcaggcgtcggatccgccgcctccgttcgccatccaaatacaggcggagctacctgcccc

SEQ ID NO: 17439 - DNA, 321 bp, Zea mays
  Coding DNA Sequence Number=SeqID_3036
cgcgggcgaccagcgcacagcagcccgccgcagccgcggcggccaagaagggcgcgacccacggacagccgcgacagggcaccaggggagcgcagcagggagcacggcagccaagggggccaggcagcccctgaaggcaaacgcacgcggaaagccggaaagaaccaccagggcggcagcagaggcgcggcgaggaccggcgagcacaggcaccggcacccgaagggcgcgagcaaggcgaaagggaagccagagccgcccaagacccccccccacgagacagcaaaccggcagggaaagacggcacagggaggcccaccg

SEQ ID NO: 17440 - DNA, 420 bp, Zea mays
  Coding DNA Sequence Number=SeqID_3037
aaacaaggtgcacctgctgggcttttcggccgtcggccatctgctcggcatggcggcagcgcggcctgacttcgtcacctattcaccgcaggattcgctggatgacatccggccaaccgcagacagcgtcgggctgatttacccggttatcacccttgaagcgccgtatcagcacacccgtactcaccagatgatcgtgggcaatgacgccacgccgacccaggaagccaactggtcagtgcaaaattacgttacccgcgcctatccgccaaccttcctggcgcaggcggaggacgatcatacctccaaccctcataacaccgagctgatgcgcgacgcctgccgccgtatgcgcgtgccggttgagctgattgaactgagcagtggcggccacggctttggcctcggtaaagccggcac

SEQ ID NO: 17441 - DNA, 83 bp, Zea mays
  Coding DNA Sequence Number=SeqID_3038
gaggaggcctgctgcactagcacgaggattttatgttatacagagcgctgccactgagattgctgggacagctcctgcttcag

SEQ ID NO: 17442 - DNA, 416 bp, Zea mays
  Coding DNA Sequence Number=SeqID_3039
aagtttttatcatgcgtcacggcgacgcagctctggaagcagcgagtgatgcggttcgtcctctcaccctgtgtggctgcgacgaatcacgtcagatggcgagctggctgaatggtcagacgccgggaatcgataaggtgctggtcagcccttatctgcgcgccgggcaaacgctcgccacggtacgtgaagcgctgaaactgccggaagggcaggaagtgctgccagaactgacgccaggcggcgatccgggcatggtcgcctgtcatttacaggcgctggcggtgcagggtgcgcacgcggtgctggtgatttcgcatctgccgctggtgggttatctggtatctgaactctgcccgcaggaagcgccaccgatgttcgccacctccgccattgcctgcgtggagtttgatgcc

SEQ ID NO: 17443 - DNA, 256 bp, Zea mays
  Coding DNA Sequence Number=SeqID_3040
gtgtttgtcgccgtgtacagtaccagtaataacggtttatgccttgcactatgtcactaagctgttatcaataagagtggataggttcattgcggaggtgatgtggctgagcaattagagttttttccggttccgagcccttgtcgcggtatctgccagagcgatgcgcgcggctattgccgtggctgtctgcgcagccgggaggagcgcttcaactggatgcaattcagcgatgcacaattacgcgaggtgctgc

SEQ ID NO: 17444 - DNA, 207 bp, Zea mays
  Coding DNA Sequence Number=SeqID_3041
cgacgacgtggacattctggaccaagccgaggagggagggattgacctggccttattctggcgggcgggggcctggttcttctgggcccggaagggccgtttccggttcggggaccaatcccaacaaaagttacttgaacaacggcaaaatggcggccggtgggtggttaactggcaaggcttacccaacttttaagtgtggattga

SEQ ID NO: 17445 - DNA, 380 bp, Zea mays
  Coding DNA Sequence Number=SeqID_3042
gtgagacagtctttgctgcatgctacaaggttatcaacgagcaccatgtcatcttggagggtaccatcttgaagcccaacatggtgactcctggatccgaatataagaaggtgacacatgaggtgatcgcccagtacactgtctgtaccatccagaggactgtccatgctgctgtgcctgctgttattatcatatatggtggacagagcgaggaggagggcctaccttgaatctcaatgccatgaacaaggtcagcaccaagaaggccaatgggccttgtctatatctttcgggccgtggccatccaggcgaggtaccttcagagcatgggctggcaagatggagaacgtggagaagcatagagcggctatcatcgccag

SEQ ID NO: 17446 - DNA, 217 bp, Zea mays
  Coding DNA Sequence Number=SeqID_3043
ggcagcggatgcctttcccggccccaccggcacccgagccccgcttgcccccgctcagctctccccccccccccccccctccctgcccacctacctcctgcctcacgggtattgcgcaatattggtgccgcactcagcctccgcgcttcccttcgcggatccactggaggcaccctgcctcgcctcttctgctgcccaccgcatagtctcaccttct

SEQ ID NO: 17447 - DNA, 297 bp, Zea mays
  Coding DNA Sequence Number=SeqID_3044
tctacagtccacctgtaggtaaaaccccaggccgaaacagagcgagcagccagatcgccacgcgctgcgtgatgctgattcttaacgttgcggtacgttgtctcgacgaagcggtgatccgcatcgcccgcgacggcgacatcgcggcagtgtttggcatcgggtttccgccgtttctcggcgggccgttccgctctattgaccagcgtggtgcgggcgagatcgttaatacattacgtacattaatgcagcaatacggcgagcgttttacgccctgtgacgcgttagtggcaatgt

SEQ ID NO: 17448 - DNA, 254 bp, Zea mays
  Coding DNA Sequence Number=SeqID_3045
gtgcgctggtccacaggcgaagacaccaggggggccggggtgggcctggcaccccccaacggcccaactaagcgcgcactatcggacgccgcattgtcttcttctctccgtctctcgttctctggcagcacctgcgctgagcggctctgccgtctgcggctgggctggcagcacgccgcactctacggctctgcgcggtctggccgagcggccagcgggcagcagggacagggcgtccagtccagccgtgactc

SEQ ID NO: 17449 - DNA, 389 bp, Zea mays
  Coding DNA Sequence Number=SeqID_3046
acctgaaccccgaggatctggctgtcgccgctgatcgtgctcggcacgcagtggtatatcctgttcaacgtgattgccggcgcgacgtcctatccgaacgactatcgcgaagcggcgacgaacttccggatccgaggatggcagtggtggcggcaggcgatcctgcccggcatcttcccgtattacgtgaccggcgcgatcaccgcctcgggcggcgcgtggaacgcgagcatcgtgtcggaagcggtgcagtggggcacgaccaggatcgaggcgcacggactcggcgcgtacatcgcgcaaaccaccgccgccggcgattttccgaagatcatcctgggcatcgccgtgatgtccctgttcgttaccctgttcaaccgcctgctgtg

SEQ ID NO: 17450 - DNA, 411 bp, Zea mays
  Coding DNA Sequence Number=SeqID_3047
acgcgcgcgcccttaaggtgaggctgcctcgtcagtctcctcgcttgcgtccctttttccactcgctgccgagtgggccccgcgtgacatactcccttccctgcgcggcatgctctcgggtcgggacagagtatggacccaaagctgtggctgacttgtggggccagctccacaggtgctcctcctacctgacgcgcgcgcaacagacggagaaatccgtggggatcggatcccctgcagtccggaggggagttggccaccctggttcgcggcgcataaaagggaagcacccgtggccctggactaccatcgaagccgcagaatcaccgaaagaaatggaggccccatcgccggatttctacggggaagcaagccgccgcgggttcaattcgcagtgtgcccgcgatcggt

SEQ ID NO: 17451 - DNA, 222 bp, Zea mays
  Coding DNA Sequence Number=SeqID_3048
tccgggttgctctctgcctggccggcccgcctgcctgtgtttggttccttcttggctcgggcggtagtgcctcgttctgcgtgtgctttctggcgttatgcctgctctgcactgctcttttccgctgtggtccgtgctgcggtttcgccatgttcactggtttccgcccctcgcgggcatgctgcagtggtttcccctttggcaccttcctcggtctctgtc

SEQ ID NO: 17452 - DNA, 505 bp, Zea mays
  Coding DNA Sequence Number=SeqID_3049
gtgcgcaccgtgcacgacgaccgcttccagatggccgccatcgctgacgtcgtctcgcacttcggatggagggaggtcaccgccgtctacgtcgacgacgactacggccgcggcggcgtcatcgcgctcgccgacgcgctggaggccacgcgtgccagggtgtcctacagggccgccttcccgctgggcgccgaccgcgccacgctcgccgacatcctccagcgcgccaacttcatggagtcgcgcgtcttcatcgtccacgctagcccggactcgggcctcaacgtcttcgccgccgcgcgggggctcggcatgatggtctcggggtacacctggatcgcgaccgactggctcgccaccgccgccatcgatgctgctggcgccgcctccaactccagcaacatacagggcgtcctcacgctgcgacagtacaccccggactctgacgccaaggcgtcgctcctctccaggctcgccgccgctgatccaaccagcaacaatgcca

SEQ ID NO: 17453 - DNA, 551 bp, Zea mays
  Coding DNA Sequence Number=SeqID_3050
ggaaaccaagacatgacctctactatcagcaagaccgacatgaacagcgccattgccgccctgaagaaagaaggcgaagaacgcgccgtcatggtagccaacaccgtctgcatctttgccccggatgtaccggccagtgttgccgaagatgtgctcgatggcatgcgcctgatgaacctgtcggcgaacaagaagttcgacaaggaaacccagcagcgcgagtggtacaacttctacaacgacggtctgggcaagttcggctggacgctgaccggcgccgctcatgtcgaggaagcaatcgacaaggacacccacacgctggccaccctggtaccccagattgtcaccgtccagatcggcgccagccaccgcctgagccgctgtgtacaacgctccttcgaagcgatcgtacaaacgccgaaagcgcagcaactgcttgaagaaagcagcgtgagcgtttcggggaaatccagcaccattcagatttcggcctgcgagatgacaccgcaagggctgccgatcatgcacatgaccagcgttcagctgagcta

SEQ ID NO: 17454 - DNA, 430 bp, Zea mays
  Coding DNA Sequence Number=SeqID_3051
ctggcgctgagctatgagcaggtaaacccgctggcgttcatcgaaccgacgtcgccgcatatcgtcagcgcggaagagggcagaccgattgaatttgcgcagctctccgctggcttacgcgcgctggagcagcaggctgaatgggtgctggtggaaggtgcgggcggctggttcacgccgctgtccgcgacgcaaacttatgccgactgggtcgccgccgagcagctgccagtgattctggtggtcggcgtgaagctcggctgcatcaaccacgccatgctgacggcggaggcggtgaaggcgcgcgggttgcgccttgccggctggattgccaatgacatccagccgccgggtaagcgacatgcggaatatctggcaacgctgcaacagcgcattgcgtccccgttcctcggtgagattccgtggctga

SEQ ID NO: 17455 - DNA, 382 bp, Zea mays
  Coding DNA Sequence Number=SeqID_3052
gttcttgggacccaggtccataaatttggtaaggaggttaatccataagcccaatttaaaaagggtttgtgtaataacatgtgttacctcccatggtgggtaaggaattgggtttcaaaccctaagggctttaaggttggaggattttaggaattcccctggttaattcaaaacctttccaaggtccgccctcccggaatccaagttaaaaggattaagttgaccaggaccgttggcccttaattggaaggaccaattaacccaaaattggaataacccccaaaaaattcggtaaaagggggtaataagggttaaccggttggccttgtttttcccaaaaataatgaaaaggtaacctcccacccattaaggcgttgaaaag

SEQ ID NO: 17456 - DNA, 350 bp, Zea mays
  Coding DNA Sequence Number=SeqID_3053
gtgtgcctcatggttgccgaggaatttctcctcaatggcaacctaggcccggcgagcagtgccaccgcactcgtggaggatgtcttgcagctcgacggtgatggtgtcgaggatccaggagaggacgacactccacccggcgccaagatgagactcgtcgagcgaacaatatcgctggcgagcaagggcattagcagtggcacactcttgctcccaggcgagagcagtaacccgctcatgcgcccgaacaacgacatacttagcattggcaatggtaactataaaggcaaagtgagcggcaacaacgtcgctgggtggcaaaggggcgtggcgccatcagaccagagaaa

SEQ ID NO: 17457 - DNA, 289 bp, Zea mays
  Coding DNA Sequence Number=SeqID_3054
ctaggcggcatcctacgtccacatccacgtgcaggcgcgcactggggctctgctgctcccgccggatcaggctgccgagcgagcgctcgaaccggagcttcctggagccctgccgcaacggccacgtccatcggaggggagagggccagggcagagaggtggccggcggctaggaagggagccgccccgggagggagggatgagcctcccgaagcggtggctggacctgggcagctgtctggcggctgtacggtgtgggtggtggttgagggagtggtgcccccccaca

SEQ ID NO: 17458 - DNA, 312 bp, Zea mays
  Coding DNA Sequence Number=SeqID_3055
ctgcagttaagggtcatgctttttgtgtgaccttttgattccggtagacactacacggaatgctttggaatgaaactgctgaggaaaagggatattcctgaagagaagtacaccaacgccttccttggctttggaccagaggacaccaactttgcagtcgaattgacgtacaactacggtgttgacaagtatgacattggaacgggctttgggcatttcgcaatcgctaatgaggatgtgtacaagttgtctgagaacattaaatcatagggtggcaagatcacccgtgatcctggccctgtcaagggagga

SEQ ID NO: 17459 - DNA, 265 bp, Zea mays
  Coding DNA Sequence Number=SeqID_3056
gatatagacaaccagcattttgtattgctttcagacagctgcgttcctcttcacaattttgactatgtgtacgactttctcatgggatcaagacacagttttctggactgttttcacgaccctgggccacatggagtttacagatactcaaagaatatgttacctgaggttcgagagtcggagttcaggaaaggttctcagtggttctcaatgaagcgacaacatgcaatggtggtgattgcagacagtctttattactcaaaat

SEQ ID NO: 17460 - DNA, 258 bp, Zea mays
  Coding DNA Sequence Number=SeqID_3057
gccgggcccacctgtcagtggcgaccccgcccactgtttgtcttccccaacccctccctcccgttcgagatgcccatgtcgcgaaaaccccatcaaaccgtccccgacgccgccccctattcatgccttggccctgctcgacccctccctcttctccaggctcgcgcccccaatccctggtccccagcgcggcggccggtgctgcctggtcacggcgcgcggccggtgctgcctgctcggtgcggctcggccggcggc

SEQ ID NO: 17461 - DNA, 175 bp, Zea mays
  Coding DNA Sequence Number=SeqID_3058
gagaaccccgcccgcaaaggccgcgccggatccccgggcggggtcaggcagggccagggcgggggggaacgggaaaagccggcggccgcgccctggacgccgggacgggaagaagccggcctttctagacgggttggtggtcaagggccaacgaacaagctgtggcggtggccgg

SEQ ID NO: 17462 - DNA, 229 bp, Zea mays
  Coding DNA Sequence Number=SeqID_3059
gtaaaagtccatcctgtgcgagtaaaccagcacggcgtgcccgtcctattggtgaaactcggaggcgttcatgggccccgcggcgcttctgcacgcctaccgctgggtctcagacagctgggaccattacggcgagcagcgggtgcagtcgctgtcggaaggctgggacaagatgtacaggtgcaggatgatcaagagctgcacggcgacgtgccccaagagcattgac

SEQ ID NO: 17463 - DNA, 333 bp, Zea mays
  Coding DNA Sequence Number=SeqID_3060
ctccgtgacgagcattacaacttttttcgctcatgccatgggtggcgcctcccgccaggactgtaggaataccatgcgtcttcccctgaaagctccctcgcgcgctctcctgttacgacgcctgccgattaccgtatacctgtcgcgctttctcccttagagagcgtggggctttctcatatctcacgctgttagtatggacgttcttagtaagacatgacctccaagctgtgctgagggctcaaaccccctgctacagcctacctgtgagccttatccggataactatggtctggagccgacccgggatgacacaacttatcctcactggct

SEQ ID NO: 17464 - DNA, 385 bp, Zea mays
  Coding DNA Sequence Number=SeqID_3061
gtgattcagatgaccggcgtcgccagtcgctacgtggggatggtgattggcctgatgctggtgctgctgggcatcttcccgctggtcggcaacctgctacagcagattccgccgccggtgctgggcggggcaacgctggtgatgtttggcagcgtggtcgccgccggtattcgcgtgatgacgcaggccccgctggggcggcgtgagatgctgattgtggcggtgtcgtttggcattggcctcggggtggaagcggttccggacgtgctgaaacagttcccgccgctggtcagcaacctgtttggtcatgcggtcaccaccggcgggattctcgctatgctgctgaacgtggtgctgccgaatgaagctaaaacggttgcggcgg

SEQ ID NO: 17465 - DNA, 354 bp, Zea mays
  Coding DNA Sequence Number=SeqID_3062
gggcgaatccgctccaatcgaagggcaaatcggcgggtggaggtccaatcggaggggcgaatggaggcggcgcgtcggatggtcgcgcggactgcagctgctactgctgccctcttttgtcttctcttcctctcttccctctctttccctcccactctctcgatttggtgcgctgcagtaaagggtgcgcgcgcgagataggtgtacacgctccaaaagcgcgcgtgtcgcgccctcctatttcccgcacgcacgcaacctcgtttcggcggtgtggcgtccacatcgacaaatcagacgccaaggcgacactaggcgcgctaggcgacgccatatctagccaaggcgtggcga

SEQ ID NO: 17466 - DNA, 183 bp, Zea mays
  Coding DNA Sequence Number=SeqID_3063
ttgctcgttcccttgcgccgtttcggacgggtcccttcccgcgtggaccgtgtcggtcctgtcgcgttttggctgtcgtcggggttgcacctccgtctcggcgtggggcatctccggtgttgtgttttcccccggccttttggctggccccctgttcgttctagcgctgccgctcggtggcat

SEQ ID NO: 17467 - DNA, 424 bp, Zea mays
  Coding DNA Sequence Number=SeqID_3064
ctcggtactcaaatcaaagtcgtccagtccactccaccagcagctcgccggccgcctcttcctctagcctgcactgcactgcgctgctcgaggctccagctaaagccgcctgtagcaacagcgacagagctcactctggattccttcgctccgtcaacgcgcggaagcaaagcagcacacactactgtctactagacgcattctcaggtccgtaagttccacaggccacagcagcacaatgggagcctgcacctcccgcgaggccacggcggtggcggcggcgccggggtcgccggcgccggaggcgagggtggtgctggcggacggcgcgctgcggcggttccctggcggcacgcgggcgtcgcaggccgtgaagacgacgacgtcggcgtcgtccgcgtggttcctgtgcagcgcggacggg

SEQ ID NO: 17468 - DNA, 568 bp, Zea mays
  misc_feature (33)..(33): n is a, c, g, or t
  Coding DNA Sequence Number=SeqID_3065
gtaagagctgaaggccgttactattctgcaaanaatgcagtttctgaaagaaataaaggtttcaaacatctgaaaatatttaagggaaacacttctgtaatgcccgctgaagattttgtcccatttggtacacaatcacttcctttgaaaagcacaactgtggaacaagagctagaggagtcttgggaagatgaaatacttcgccggactagggaattcaataagatgtctcgtgaacgccctcacgatgaaaaagtttggctggctttcgctcaatttcaggacaaagttgctagcactcagccacaaaaggctgctcgtttacaaactaccgaaaggaaaattagcatattggagaaagctgtggagctcaatccagatagtgaggaattattgctttgccttctgaagtcatatggcaagagggacaacactgagactctattgactaaatgggagcaaatacttacgaagcacccagatagctctacgttgtggaaacagtatctgcttctgtgccaaggggaattctccagattcaaagtttctgaaattcggaagtcctacg

SEQ ID NO: 17469 - DNA, 121 bp, Zea mays
  Coding DNA Sequence Number=SeqID_3066
accgacagtctagctttgtgtgggtgtttaattacctttgcacggcacccatcattggcttgtcagagcgaacggtggcagttgtcgtttgcccatcgaaatgcgtcttgtgggaaaataa

SEQ ID NO: 17470 - DNA, 394 bp, Zea mays
  Coding DNA Sequence Number=SeqID_3067
gacgcggaccttgtcaggaagatctatggcactgagctccgcgtcgaggggaggggccggaaaactgtgccgctgcagcgtcagcctgtccaccttcgcctcggatcacatcagggcgtgggcagagaacggtctgtggctgtgcatggaaatgggatggtggcgccggtcctagctctggatgctggtgctgctgtctgtgctggtgatgggctgctgacctcacctggaccttcctcgcctcagcacggatgtttggctgagccgctggagaaggctaggttgagctcgccccttcctgccactcatgtgccatgcatgtcaaccttggagaatatcttagctgggccgtctgggtctgctgctgtggggtcgctggattctgtcctccctg

SEQ ID NO: 17471 - DNA, 321 bp, Zea mays
  Coding DNA Sequence Number=SeqID_3068
acgtctccacgctggacaatgattactaccgcttcgatccggtgggccagcgtctgattggcgaatccggcggtcgcacttaccgtctgggtgatgcggtggaagtgcgcgttgacgcggtgcacatggatgagcgcaagatcgatttcgcgctgatctccagcaaacgcgtaccgcgcggtgaaggaaaaaccgcgcgcgagcgtgagaagcatggcggcaagccaccggcgaagcggcgccgcgatgcgggccgaaagggcaactttgagccggacgccgctttccgcggtgagaagcagccgcctgcggcgaataaaa

SEQ ID NO: 17472 - DNA, 434 bp, Zea mays
  Coding DNA Sequence Number=SeqID_3069
caactgatggcgctgcgcggtaaaaagcttggcatgatttttcaggatcccagcgcgtcgctgaacccgacgctgacgctgggtgaacaggtcaccgaagtgctgcgccgtcatcgtgggttgtcagcgcgcgaagcgcagcagctgggggaatcgctgctgcgcgatgtcgagctgaagcacccggcacgcatgatgcagcgctatccgcatcaggtttccggtggtgagaagcagcgcatcctgatcgctaccgccttcgcctgccagccggactgcctgatttttgatgagccgaccacggcgctggacgtcatcagctcggcgcaaatcctcgatctttacgagcgactgcgcgccgagaccggcgtcgcgtcgctgtatatctcacacgatctggcgctggtggcgaaagtggccgaccgcgtatgcgt

SEQ ID NO: 17473 - DNA, 351 bp, Zea mays
  Coding DNA Sequence Number=SeqID_3070
aaggctggcctgaaagtcacgctgcccagtctgcagactctgctagtgcttcagggacctgaaccggagtcccatcatgtcagtgcggaagatatgtacatacgcttgatgtacatggaccaagagattggtctgcagtcggtaagccgtgttctcaaccagttcctttacgccggcatggtgacgcgtcataacttcgaaggcggcatatccgtgttcgatctgacccagcagcatcgccacgatcgcgtgatttgcctggattgcggcatagtgatcgagttaagcgatgaatctatcaatacgcgtcagcgtgagattgcaacacgccgcggtatcaaactcagcaac

SEQ ID NO: 17474 - DNA, 302 bp, Zea mays
  Coding DNA Sequence Number=SeqID_3071
aggccacctacaaggtgccgggccaggccgtccacgtagtcattggccaagtggtgctaatgtaagcagtaccccgtgcccgcctgtagggcgccggcctgccagtgcctgatcaaggcccggagttcatgacccgtgagctgatcaaggtgggccacctcgacctcatcggcagcgacttcacctgggtggtcggccactggctggtcgacgaaaagcacccgaccgtcctcatcgccttggagcgccgcgagtggggccacttcttcggctaccgatagaacgacaagctgggtggccgc

SEQ ID NO: 17475 - DNA, 546 bp, Zea mays
  Coding DNA Sequence Number=SeqID_3072
tgatccgccggatcgtgtccgagaacccgtcctgcgtgatgctcaagcacgtggactggccggggctggagaagatctcgaccctgcggggcttcgaggccgacggctcgatgcgccacatcgcgatcctggtcggcaatggcggcctgttcctggatttcgagaccgagcgcggggccgacggggccaataccggctacgccttcccggagatgctggtcgacgtggtccgcctcggccgggccggcgagcgcgacgccgcccacgacctgttcgacgcccacctgccctacctgcgctacgagcagcagcagggcccgctgggcctcgccgtgcgcaaatacgtgttccagcgccgggggattttttcgtctgacgctcagcgcaagccgtcccaggcgctcaccccgcaggccagggccgaaatcgagtacctgctggcccgcctcgcccgcacggatgcgcgggcgaagctgatggatccgaaagggctcagccctttgggatccccgtccgggcgctcagtcgagccggtaggcgatgacc

SEQ ID NO: 17476 - DNA, 390 bp, Zea mays
  Coding DNA Sequence Number=SeqID_3073
ttcaaggaccacctccagccgtggttttggcttgtccagtccaagttgaaaccggagctcctcacgttgcaggcccccccttcggccggtccgggcttccccaaccccgcggccgccccgaacaaggccttgtaagttccggcccggaagggccttaaaggaaccccccccccggccaagccgaaccagttcaaggccctcgcgttgcggccaacccacctgttcccccccattgcaaccccaaaggccgggaagccaaccgggtttggccttggccttggccccgggcttctgccccggaagccttggccgggccttaagggcccccccgaaaaagaaccagaagttgaaggccccgccgttccaaatgaagccgaagccgcccttggg

SEQ ID NO: 17477 - DNA, 358 bp, Zea mays
  Coding DNA Sequence Number=SeqID_3074
accgcgcgttttgcagcccgggtgatgtccgtggtcgaagctcccggaccccttggccacctcatttgcggagaacagaccatgcaggaacccctgggcatcgtggtgatgggcgtctccggctgcggcaagagtggcttggctgcggcagtcgccagcgcgctgggctggacattcctggaaggcgatcttctgcacccgccggccaacatcgcccacatgcaggccggccagccgctcaccgacgccgaccgcgcgccctggctggcggccatcgaaacctggatggccacgcgcctgcacgcggggcacggtgtggtggtggcctgctcggcactgaaccaagctatcgcgacgt

SEQ ID NO: 17478 - DNA, 355 bp, Zea mays
  Coding DNA Sequence Number=SeqID_3075
caaggacctcaacctggctcacggcctcggcaacgtgactccggggttggtcccgctcgcggatgacctggccaagccccagccaccgctgctgcacctccttggcccgggaagccacctgctcctggaccgaggaagcctcttctcgagccgactccgcctctgtccacgccgacgccgctacctccggctccagctcatcgcagagcagccgaaggttctccgcaggtacgaacaaccccccacgattggagggcctgcggagcaacagaaggccgacggatggctcgccgccgcccgccccagcagtagcgacgacgacttctgatccgagcggccgaacaacaacagcgat

SEQ ID NO: 17479 - DNA, 165 bp, Zea mays
  Coding DNA Sequence Number=SeqID_3076
ctatcaaggagcaagaccacagggctacgaaggcgcgccctcgtcctcgctctcctcctgctggtcccgctgtttcttattatgctccacctcacctcatcgccctcgcctcggcccctccccgcgccccgcaagccctcttcccggtcccaggcctgcgactac

SEQ ID NO: 17480 - DNA, 334 bp, Zea mays
  Coding DNA Sequence Number=SeqID_3077
atgctggcgaaagcacagacgctgcccgccacgctgccgcacagcagtgagacggtaacgcctgcgccggcaccggctgccccaccgtcaccgccggaggtcgtagcggaacataccgaaccggccaaagcggacgatctggtgatgacggccgatgacgcgcgcctcggctcggtgaaatttatcaatggtacctggcgcgtgacgctgcgtcagaccaatctgccgaccggcaagccgccgagcctgcgctatcagatccgcaacggtaaaggcagcgcagtgattacccaggaagacaatattcgctgtaaagccgatgtcactgccgcca

SEQ ID NO: 17481 - DNA, 280 bp, Zea mays
  Coding DNA Sequence Number=SeqID_3078
tgctcggctggtcgccatttcacgggacgtacttcggcaagaggctggatccggagccggggccggcgcacggacggaaagaagtggcggtgctccagcgaggccgccccggactccactgcgagcgccacatgcaccgcggccgcaagcgttcaagaaagcctgtggaaacgcagcccgcgccccagtcccaaccgcccgccgccggcgccgccgccgccgccaacggcagcagctttcgggtcggatgcctccacggacggaatggtggccatcaccg

SEQ ID NO: 17482 - DNA, 543 bp, Zea mays
  Coding DNA Sequence Number=SeqID_3079
cggctcggtgtcgtggatgtactacgccgatcgtctgatggagtttccctctggcgtgctgggcgtggcgctcggcaccatcctgctgccgtcgctggcgaagagttttgccagcggcaaccacgatgaatattcccgtctgatggactggggcctgcgtctgtgcttcctgctggcgctgccgagcgcggttgcgctgggcattctttccggtccgctcaccgtggcgctgttccagtacggcaaatttaccgcttttgatgcggcgatgacccagcgcgcgctgattgcctattcggttgggctgatggggctgatcgtggtgaaagtgctggcgccgggcttctattcgcgtcaggacatcaaaacgccggtaaagattgctatcgccaccttgatcatgacccagctgatgaacctggcgtttatcggcccgctgaagcacgcaggtctgtcgctgtcgattggtctggcggcctgcctgaatgcggcgctgctctactggcaactgcgcaaacagcaaatctttcagccgcagccggg

SEQ ID NO: 17483 - DNA, 453 bp, Zea mays
  misc_feature (60)..(60): n is a, c, g, or t
  Coding DNA Sequence Number=SeqID_3080
taagtgccattctgactgtttcttctgcggcattgttatgtctcactacacgtggcatanatgtgacagagagttcaagagtgacaacccaacatgtttttgccactttgtcattcattgctgaaatctttatcttcctctatgtggggatggatgcattagatatagaaaagtggcgaattgtaagtcaaagcccaagaaaatcaattggggtcagttcgttgctgttggcacttatcttagtgggaagagctgcatttgttttccctttgtccttcttatccaacttgcttaagaagtctcaatctgagaaaattgagttaaaacaacaagtaacaatttggtgggctggtctcatgcgtggtgctgtctctatcgcacttgcttacaatcaggtgaaagaatcaaacttcattgcttttaattcttcatctcttgccactttcaagtttt

SEQ ID NO: 17484 - DNA, 541 bp, Zea mays
  Coding DNA Sequence Number=SeqID_3081
tgctcgacgagtggacaccggtgatcgccgggtccgaactcggcgagcacccgtacgaaccgatcaccaccgccagcatccgccgcgccgaggacctcggagacgcgatgcccatcgactggcggcaccgggatgaccggtacgtcgagaagctcgcgacgccggacacctcggtcgcggacctcatcggcgacgtcgacccgatgaaggtcgccgagggccggagcctgggcgaccccgagacgatccacttcggactggtgccccgcgggcaccgcggcatcgtcgcgatcaacgagctgcccgacctcgccgagcgcatccaggtcgccatgctcaacgtgatggaggaacgcgacgtgcagatccgcgggtacgtcctgcggctcccgctcgacgtgctcgtcgtcgccagcgccaaccccgaggactacaccaaccgcggccgcatcatcacgccgctcaaggaccggttcggcgccgagatcctgacgcactacccaatcgagctcgaggacgagatcgcggtgatccgccaaga

SEQ ID NO: 17485 - DNA, 514 bp, Zea mays
  Coding DNA Sequence Number=SeqID_3082
aattctggagtgtttgatggccacctatcatcttgatgcgcgactggctcaggatatcgttgcccgcaccatgaaaattatcgacagtaatgtcaatgtgatggatgcgcgcggccgcattattggcagtggcgatcgcgagcgtattggcgaattgcacgagggcgcgctgctggtgctgtcacagggcagggtggtcgatattgacgaagcggtggctaaacacctgcacggcgtgcggccgggcatcaatttgccgctgcgcattgacggcgacatcgtcggcgtgattggcctcaccggccagcccagcacgttacgccattacggcgagctggtgtgcatgacggcagagatgatgctggaacaggcgcgcctgctgcatatgctggcgcaggacagccgcctgcgtgaggagctggtgctgaacctgatccgcagcgatacgctgtcgccagcgctgaacgaatgggcgcagcgactgggcatagatctcaatcagccgcgcgtggtg

SEQ ID NO: 17486 - DNA, 175 bp, Zea mays
  Coding DNA Sequence Number=SeqID_3083
cacgcaggttgagtaaacccctgaatttttgccccacccttacaaagcggtatcgtagcttatcaccatacgagaagaaaaaatatgtatggaaaatgctttacatttatatgctgggttatgatgttgattttgggcatatggaaactgtctcgttgatatctgcaccaaagta

SEQ ID NO: 17487 - DNA, 369 bp, Zea mays
  misc_feature (250)..(251): n is a, c, g, or t
  misc_feature (255)..(260): n is a, c, g, or t
  misc_feature (266)..(268): n is a, c, g, or t
  misc_feature (276)..(278): n is a, c, g, or t
  misc_feature (336)..(337): n is a, c, g, or t
  Coding DNA Sequence Number=SeqID_3084
gtccggacgaggcacccttcagctacgggcagaggggtaaccttgaccggagcagtggtcgcagcgccctcgccgccgctattttcttctcgtttgtgtcttgctgctctcgtggtgaactcgctactccagtgctctgcaatattaagcagaagctattgtattgtttgggtcgtttgtcagctaaattgaaatgcgatggacatttactagtaaaaatttggggggggggaaaaaatttttttttttnnaaannnnnnaaaaannnaaaaaaannnaggggggggggggggaaaaaagaaaaaaaaaaaaaaaaaaaaaagaactggggggggnncccaggggtaaggggggaataccagcacactg

SEQ ID NO: 17488 - DNA, 443 bp, Zea mays
  Coding DNA Sequence Number=SeqID_3085
ggacggcgagcatccgtactacgtggtcaccgagttcgacgcaccggacgaagccacgcaggacgctgcactggcggtgcttggcgaaggcatggagcagggctggatcgtcgacggcacgatcgcgcagagccaggcgcaggccgccgccctgtggcggctgcgcgaaggcatcaccgaaagcctggctccgcacaaaccgtacaagaacgatgtgtcggtgcgcatcggcgcggtgccggcgttcctgcatgcgatgcaggcgctgctggcgcgcgagtacccgcatatcgaagtggtgtggttcggccacattggcgacggcaacctgcacatcaacgtgctcaaacccgccagcatgacggatgaggatttcatcgcgcagtgcgagcatgtcacccggttgctggccgcaacgctgaaggagcatggcggcagcatct

SEQ ID NO: 17489 - DNA, 237 bp, Zea mays
  Coding DNA Sequence Number=SeqID_3086
gtcatcttcctcttcgggccggtcccggaggggctgggcgcctgcccgacgctcacgcgggtgaggctgggccagaacttcctctcggggccgctcccgcgcggcttcctctacgtgccggcgctcgccaccgtggaggctgcagggcagcttcctgacgggacgggtggaggaggacggcagcggcggcggcggcagcagcagcagcaggctgtcgctgctgaacctgtcgggcgt

SEQ ID NO: 17490 - DNA, 359 bp, Zea mays
  Coding DNA Sequence Number=SeqID_3087
atgctgaccggcagcggctatcgtcacatcagctatctgttcttcaattcgtggaaatacaccacgctgccgggcggtatcgtcaacggcatcaccggcgcgtcgaatcaggtggcggacggtatcgcttttgacgaaggttatgcggtcacacggaaggatgacgactggcgctgggcggaaggctggctgccgcactcggcctggcgcaaaacgggcgcggcggtcggtggaccggttaatgaaaaaggtcagaatcagatgcggataccgctcagcaacgatgatggaattcagactcccggcattggcgtgttccctggcgtgaagacattacgacaggttgaatcctgcgccgg

SEQ ID NO: 17491 - DNA, 492 bp, Zea mays
  Coding DNA Sequence Number=SeqID_3088
gttttcgctgctggccggattaccgctgggactgattctggtgaccaccagccccggcggcattgctgaaaaccggagcatcaaccgcctgctgggtgtggtgatcaatggctttcgctcgctgccgttcattattctgctggtggcgctgattccctttacccgtctgctggtcggcacctctctgggcacctgggccgcaattgtgccgttatcgatcaccgccacgccctattttgcccgggtagcggaagtgtcactgcgcgatgtcgatcgcgggctgattgatgcggtgcgtgccatgggcgccagcaaattacgtattgtctgggaggtgctgattccggaagcgctgccgggcattctttccggttttgtcgtcacgctggtggcgctgatcggcgcctcggcaatggcgggtgccatcggggcgggcggtctgggcgatctggcaattcgctacggttatcagcgttttgacacggcggtgat

SEQ ID NO: 17492 - DNA, 317 bp, Zea mays
  Coding DNA Sequence Number=SeqID_3089
gttttttgtattatccattagacctatttgaagatggttatgttattaacattttttttttcattgtggttaacgtttttggtttaatatccttacgcgatttaggtttggatgatctttgaatttattttttttattttggattttttagggtgggcttggaggttttttagttgagagggatattttgatcgattatggtcgtcttttattggtatgtatttttaaacctattttgttattttccgtgaaagtttacgttttagtgtgttatgagtgtttacgtggttgtcttattttgctgatttgtgtgtttt

SEQ ID NO: 17493 - DNA, 543 bp, Zea mays
  Coding DNA Sequence Number=SeqID_3090
gcagagcaacatgtttctagttcatcatccatggaaggcacagaggtaactttatcgcataaaacacctccacctgaagttcaggacaagattctttttatgatcaacaatatatccatctcaaatatggaagctaaggcaaaggaatttaatgaggtcatacaggaaaagtattatccttggtttgcacaatacatggtcatgaaaagacaaatcactgctcatcttaacagggcaagcattgaaccaaatttccatgatctgtatctgaagttctttgataaagtaaactcaaaatccttgaacaaggaaatactgaaagccacatatgagaactgcaaggtcttgttaagatcagaccttatcaaatctagttccgaggagcgctccttgctaaaaaacctaggcagttggttgggaaagttcaccattggtaggaatcaggcactaagggctaaggagattgatccaaaatctcttatcgtgctatttaagaaccttactgtacgcattagggcctgtggaccctgttccgtgctcaga

SEQ ID NO: 17494 - DNA, 558 bp, Zea mays
  Coding DNA Sequence Number=SeqID_3091
catgatcggcatgcacgagcagggtggcctgccgttcccgggcatcgtgcatatcccgcagccttactggtacgccgaaggcgacgacatgaccccggatgagttcggggtgtggctggccgagcagctggagcagaaaatcctcgaagtcgacgaagacaatgtcgccgccttcatcgccgagccgatccagggcgccggcggcgtgatcatcccgccggaaacatactggccgaaggtgaaggagatcctcgccaagtacgacatcctgttcgtcgccgacgaagtgatctgcgggttcggccgtaccggcgagtggttcggctctgactactacgacctcaagcccgacctgatgaccatcgccaagggcctgacttccggttacatccccatgggcggtgtgatcgtgcgtgacaccgtggcccaggtactcagccaaggcggcgacttcaatcacggcttcacctattcgggccacccggtagcggccgccgtaggcttggaaaacctgagcatcctgcgtgacgagaaaatcgtcgagaaggcgcgcacaga

SEQ ID NO: 17495 - DNA, 507 bp, Zea mays
  Coding DNA Sequence Number=SeqID_3092
tggagcggcatctggcgatcattacccatgcgttattatttaccatcatcgtgctgttgctggtggataatcaccacgctgccggcaagcgttcagaatataactatctggtggccctgatcatcggttcggcactggtgttgcgccagcaatccttttatctgagtaaaatatttccgctgctgtgcctgctgtgttatctgttttttgtcaccaccggtctgatctgggaaaataatcgtttacatctgaatattccgcaggaagccgtttttaccgttttcaattgtgcggtgccggtgacggcactgctgtcgaccgtgttcacctatggcggcaattattccgccaccgatcttatcaagcgcgagctcgcgtccgccatcgagcgccagcagctggagctctattatcagccgcaggtcgatggcgacaaaaatctcatcggttttgaagcgctgctgcgctggaagcacccggagaaaggctttatctcgccggaggtgt

SEQ ID NO: 17496 - DNA, 566 bp, Zea mays
  Coding DNA Sequence Number=SeqID_3093
ctgacgtgggagaagggcaacatctcctaccacggcctgctcaaccgcccggcgcacaataagtacccgcccgccgcggcgccgtcgtcggctcagctgcatgccatagcaggaggaggcggcggccgcggcggcgggtcgccatccggggaccgcgagacgctcgaggcggtggtcggcgaggcggccgcgcggtcgcacttcctctcgcagccggcgccgccgtggctgatcggcgccgacgccgtggcgcgggccgcggcggacgcgctagtgccgtgcgccgcaagggcgggcgagtccgctgcagacggcggagaagcgggcgcctcgaggaggaagcggccgcgcgtggtcggcgacgacagtctggtggtgtgcgccagccaggggagcaccgcgcctcgccgccgcggcgagagcgcgctgctcacgcagctggacgcctgcggcaccgaggccgacgacgtgtgcggcttcagaacgaccacaaccaacaactccacgtccatggagcgtgacgacaagggctcaccggatactgagaacaccagcatcggcggagg

SEQ ID NO: 17497 - DNA, 260 bp, Zea mays
  Coding DNA Sequence Number=SeqID_3094
acggcgccttggctcttgttcttttcccggaacaggaactggctgcctctgctgggccttcgtcagtcagcatgcattggatccgctcagctcagctcatttggttcgtccgttcgttctgggcactgggcttctggctctggctctctgccggtgctggcccggcgaccggcgcccgtcaaaggaactgtccggcggcagcaaacaggccaacgaacgacgaggcaagcaaatccttgcgcctgcaagacgcactcgga

SEQ ID NO: 17498 - DNA, 584 bp, Zea mays
  misc_feature (422)..(422): n is a, c, g, or t
  Coding DNA Sequence Number=SeqID_3095
gtgcattcacgcttactcattgattcatgatgacctgccggcgatggacgacgatgcgttacgtcgcgggcagccaacctgccatatcaaatatggcgaagacacggcaattctggccggcgatgccctgcaaaccctggcgtttaccattcttgcggaccagccgatgcccggcgtaagcccgcaggatcgcattgccatgatttccgaactggcgcaggccagcggcgtggccggcatgtgcggtggccaggcgctggatttagccgccgaaggccaatccgtggacctgaaccagctggagcagatccatcgccataaaaccggcgcgctgatccgcgccgccgtacgtctcggcgccctcacagcaggtgcagcgggccgcgatgcgctgccgcagctggatatctacgccaacgccntcaggcaggcgtttcaggtgcaggatgacatccttgatgtggtcggcgataccgccgttctgggcaaaacccagggagccgatcaggcgctggggaaaagcacttacccggcactgctgggactggataacgcgcgggccaaggcgcaggatctctatcgaa

SEQ ID NO: 17499 - DNA, 169 bp, Zea mays
  Coding DNA Sequence Number=SeqID_3096
aggatatatcggtggtgggatacccgatatcctatacagtctcctgttatataccgctgttagctcctgtcatacaggattttctcctgctggggctaaacagcgtggacatcgtgctgccactctctcagggacagacgctggagggcactcaggtgttgcctgtctc

SEQ ID NO: 17500 - DNA, 393 bp, Zea mays
  Coding DNA Sequence Number=SeqID_3097
attgggctcgcccaactttcatcagctgccgatcaatgcgcccaagtgcccctacgccaaccaccagcgcgacggccacatgcagatggaaacgcccaggggccgggtgaactacgaacccagctcgctggacccggcctccccacgcgccacgcccgcgggtttccacagcttcgcccaagccgccgatgacggccgcaaaacccgcgtgcgcgccgaaagcttcgccgaccattacagccagccgcgccagttctacctgagccagagcacgcccgagcaggcacacatcgcctcggcctttaccttcgagctgtccaaggtgcaggccgtgcacgtgcgcgaggcggtggtggccaacctgcgccacgtggacgaagacctggcccgccg

SEQ ID NO: 17501 - DNA, 547 bp, Zea mays
  Coding DNA Sequence Number=SeqID_3098
tggcagcatggagcaatgagcaactgctgcatcacagccggccgggcctgtcggcagcggtgtttgccggtcccggcaccggcatcttcatcagcggcatgctggcggtaatgctgcacgccagcggcgtgagcgcggcgtttgcctgggcggcgtacggtgtgctggcgctgctgctgattgccgcgattgcgcgtttcctgccgcgcagcggacagctgcatcgcccgcaacaggccgctgagccgctgctgctgacgcgtgacctgaagcgcctgatcctcagctacagcctcgccggctttggctatattctgcccgccaccttcctgtcgcaaatggcggcggcgcgcttccctgatagcgcttttgcgcagtttgtctggccggtgtttggcggggcggcggtgatcggcatcgtgctggggatcgtgacgcgccactggggtagcagccatcggcggctggcgctggtgctgtgggcgcaggcgctgggcgtgatcgcggccatcgtactgccgggcatcaacggtctgctgctggcggc

SEQ ID NO: 17502 - DNA, 549 bp, Zea mays
  Coding DNA Sequence Number=SeqID_3099
gtgtggtcggccgtaactttgcctatcagaacatctccacgctgaaggcgctgttcgataaaaacaccaccaccaatccgtttatcggtgccggtggcgcgggcgtggcggtggatgattacaacgccgataacttcgatcacggcccgtacggctttgtcggcggttcaccgttctgggtcaaccaggcgggcaataagccaatctccggcctgccgacgccaacaggcacgccgaactggggcagccagtggaaagcggcggtggcggatacctataaccatcacgtgtcgatggatgcgcacggcgcgcaccagtcgtatcgcgctaactacctcgatctcgatcccaactacaaagatgcttacggccagccgctgctgcgtatgacctttgactggcaggacaacgacatcaaaatggcgcagttcatgatcggcaagatgcgcaaaatcaccgaagcgatgaatccgaagatgatcattggcggcgcgaaagggccgggtgcccatttcgataccaccgtgtaccagaccacgcacatgagcg

SEQ ID NO: 17503 - DNA, 259 bp, Zea mays
  Coding DNA Sequence Number=SeqID_3100
gacgtcgctaagagggcattttggattgagcgttcggggaagatgattaccgcgtcctcaatgaagatggcctgcgctttgaagatgagtttgtccgacataaaatgttggatgccatcggtgacctgtttatgtgtggttataaattattggcgcatttactgcgtttaaatcaggtcatgctttgaataataaactgctacaggcagttttggcgcaggaaagtgcttgggagtttgtcacatttgaagatgaagct

SEQ ID NO: 17504 - DNA, 352 bp, Zea mays
  Coding DNA Sequence Number=SeqID_3101
agttttcttgtaacttcagctcgctcgagatcctttgcgcttgatgtttatctctctctccaccctccctccgtgtggtttgtcgtttctggtttgcgctgctctctccgtccggccttcgtgtcccctttcgtgcccccggtccgggtcctcctgcgctgcccccatccggcccccgggctcgctgtctttcttcctgctttcgccgcatgggcgtgtttttgtcgtcccgtcgcgtgttggttgtccttggttgttcttgcggcttctttttgctttgtaactggcccccccttctccctggcggccgccgtttctcaagaatttgacgactgtcttttgttccggtggt

SEQ ID NO: 17505 - DNA, 428 bp, Zea mays
  Coding DNA Sequence Number=SeqID_3102
agaagctgcccgagccgatcttcacgccggccgcgaaggccgaactcggcgagcacgacgagaacatcacgttcgaggaaaccgagcgccgcatcggcaccgagctggccgcgacgatccgcgacatctcgatcaggctgtacaaggaagcggccgactacgcggcgacgcgcggcatcatcatcgccgacacgaagttcgaattcggcctcgacaaccacggcaagctgtatctgatggacgaagtgctgacggccgattcgtcgcgcttctggccggccgaccagtaccaggtcggcaccaacccgccgtcgttcgacaagcagttcgtgcgcgactggctcgaggcgcagccgtggggcaagaccgcgccggcgccggcgctgccggccgacgtcgtcgcgaagacggccgcgaagtaccaggaa

SEQ ID NO: 17506 - DNA, 510 bp, Zea mays
  Coding DNA Sequence Number=SeqID_3103
cgaccgtagcggcacgagcagcaacttgcccgtgtgcagccccaaactgggaagaagatgctaattaaagtgaagacgctgaccggaaaggagattgagattgacattgaacctacagacaaggtggagcgaatcaaggagcgtgtggaggagaaagagggaatccccccacaacagcagaggctcatctacagtggcaagcagatgaatgatgagaagacagcagctgattacaagattttaggtggttcagtccttcacctggtgttggctctgagaggaggaggtggtcttaggcagtgatggaccctccattttacctccctgccctgtcactcataatgaggcatcatatatcctctcactctgtgggacaccagagccactaccccctcccctggatgcccagtcttgtgtgtctgttggtgggagattgtgaggaccccaggaggcagtgttcctggcccaaagggcccttgctggctattgggttttagtttgcagtcctgt

SEQ ID NO: 17507 - DNA, 436 bp, Zea mays
  Coding DNA Sequence Number=SeqID_3104
tgatgaaaaccacctcagccagtatcgccgtgcgtaacctgtgtgcgccgacactaccctgttatccaccggcgcaggaccgtttccactggcgtgtgctgagccatctcggcagcggattcctgtcgatgatggacaatgccgacgtgctgcgcgggacgctggcgctgtacgaatggaccgacagtgagatgaaccgccgtcggctggaagccatcattgacgttaagcaccgcgaaatcgagcgtttcgaacagggctatctggtacgtggtgtgcagattgaggtgacgctggacagtcacggctttgccgggcgcggcgacatctgtctgttcggcgagatgctgagccgtttctttgcgctgtataccgatatctatctgttcaaccgcctgattatcatcctgcaaccgaccggagagcgcctggaatg

SEQ ID NO: 17508 - DNA, 332 bp, Zea mays
  Coding DNA Sequence Number=SeqID_3105
tgcctgattcagctgctccaccggtcctgctcgaacgcccgctggctggcgttgcgctgctgcggctgaaccgcccgcacgccaccaatgccctgagcctggagctgcaagcgctgttgtcgcagcactttgccgagctgggcgcagacccgcaggtacgctgcatcctgttgaccggtggcgacaacgtgttcgccgccggcggcgatatcggcagcatggccggggtcggcccgatcgatatctaccagcgccacaccgagcgagtctgggcgccgatccagcactgcccgaaaccggtgatagctgcggtctgcggttacgcctatggc

SEQ ID NO: 17509 - DNA, 455 bp, Zea mays
  Coding DNA Sequence Number=SeqID_3106
gggtagaatgctcgtcatcttcacgcttggagccgtgcatgtttcacgtcatcctttttcaaccagaaattccgccgaataccggcaatatcattcgcctgtgcgccaacagcggctgcgacctgcacctgatcgagcccatcagcttcgaactggatgacaagcgcctgcggcgcgcggggttggactaccacgagtatgccacgctgaaaaagcacgccagctatgccgcttttctggcggcggaagcgccacagcgcttattcgcgctgaccaccaaaggcacaccggcgcacagcgccgtcagctatcagccgggcgactatctgctgtttggcccggagagccgtggcttaccgccagaaattcttaatgcgttgccggcagaacaaaagatccgcattccgatgcgcgcggagagccgcagcatgaacctgtcgaatgcggtttcagtg

SEQ ID NO: 17510 - DNA, 291 bp, Zea mays
  Coding DNA Sequence Number=SeqID_3107
gggcgatgtcgagtatctgaagattgataatgacgggctgcacctgcgccatcagggggaagcgctgacgctggcggtagataacatcgtgatttgcgccggtcaggaaccgctgcgtacgctggcgcaggcgctgaccgcacgcggcaaagccgtgcggctgatcggcggtgccgacgtcgcgcaggagctggatgcacggcgcgccattgctcaggccactgagctggcgctcagccagctcgcagttgccaaacagcttcttcattttctgatgatagccaaggtggc

SEQ ID NO: 17511 - DNA, 175 bp, Zea mays
  Coding DNA Sequence Number=SeqID_3108
gcgagctgttcccgcgacgcgacggcgagttgccgagcgagggcaccgtcctgggcgcgatccaggtcccgcccgacggacagccggtcgtgctcctggccgaccacggcccgaccggcggctacccggtcgtgggcgtcgcccaccccgacgacctgtggcagctggcccagct

SEQ ID NO: 17512 - DNA, 284 bp, Zea mays
  Coding DNA Sequence Number=SeqID_3109
atgctgggcatgacagaggccggcggcggcgaggtcggcgacctaccggaggacgtgcagatcgacgaccgcattggcgccaccgacttgcccagcctgcgcctccttctatcgttcctcaagcgccaagcctggcaccggggctgcttctacggcctcagggtctacaccgcctactgggccgtgcaggacttggacgagaacgatggctatatctgaaccgatgtgctggactaccgcaagacgacagtcgtggcctatatagatctgaaaggtggcgactt

SEQ ID NO: 17513 - DNA, 338 bp, Zea mays
  Coding DNA Sequence Number=SeqID_3110
tctaatcacgcgatgtaatattctacttcccgattcgacgccggcgggcaatcctggttgtaacagccgtggactgcaactgcaatgggtcctccgtccgttcgttgttagtttacggcttttccccgcttggtgcaggtgctccgacgaggtgaacccgcggaagcgcccgtacaggttctcgaaccagaagctccgggacctgggcttggtgttccgcccggtgagccagtcgctgtacgacacggtgaagaacctccaggagaagggccacctggcggtgctgggagagcagaagaagaagacgacgacgacgacggaggcaggccgcgaggagt

SEQ ID NO: 17514 - DNA, 396 bp, Zea mays
  Coding DNA Sequence Number=SeqID_3111
gaggatccggaaacgcggctgcatcccatcatgctgtcggtggcgtggaatctgctggcgctgatgccgctgcaaaaaatcgccaccacgaactccggtgagctgctgtcacaggtagcgctggagcaaatctgccgactggtgcgcgaacccgatcgcgtggcggcgtggcgtatcgggccggaaggattaagtgccgaagaggcgcgccgtatcggctttcacatccgcgtcaaccgtccgtcggcgctgtttgcccgctgctggttgctggttgagggtgaaaccgaagtgtggatcatcaatgagctggcgcggcagcgcggctaccattttgccgcggaaggcgtgaaggtgattgagtttgcgcagtccgggcttaagccgctgctgaaa

SEQ ID NO: 17515 - DNA, 595 bp, Zea mays
  Coding DNA Sequence Number=SeqID_3112
ccccatgactttggacggtgaacaagtactggtggtcggtgcgggcatctccccggtccagatgctgatcgagatcgcccgttctgcacccgatgtgacgacgttctggtccagccgccggaagccggttttctccgacgcgcccttcagcccggagcccggccgcaaagccgtcgcccgggtcgagcgacgggtccgcgccgggctcccaccgacctcggtcgtctcggtgaccggcctgcgtcggacgcccgccatcgccgccgcggaggccgacgggatcctcgcctggatgccgatcttcgacgagatcacccccgacggggtgcggtggcgcgacggctctcgccccgacctgccgctcgacagcatcttctggaacaccgggttccgcagcgcgctggaccatctcgcgccgctacgactccgcggacccggtggcggcatcaccatgaccggccgcctcgcgaccgtcgtcgccgacgaaccacgggtgcaactcctcggttacggaccgtccgcgtcgaccatcggggcgaaccgggccggccgcgaggcggcccgcgtcgtggaaaacctcctacgcgagccgatg

SEQ ID NO: 17516 - DNA, 218 bp, Zea mays
  Coding DNA Sequence Number=SeqID_3113
accgcgcttctgtcacgccaggtgggcgtgatccgcaagcagtcgctgatcctcaatctgccgggacagccgaaatcgattaatgagactctggaagggttgaaagcggatgacggcacggtgaaagtgccagggattttcgcggctgtaccctattgtttacagctgctggaagggccttacgttgaaacccacccggaggtggtagcagcttttcg

SEQ ID NO: 17517 - DNA, 406 bp, Zea mays
  Coding DNA Sequence Number=SeqID_3114
aatatgtggttgatgcgggttactcgaaaatgaaggtgtacaatccgaagatgggcatggacacgcttcaaatcacaccaatttcccaggccaatgcaggtcagcgttccggtcgtgccggtcgtactggaccaggaaaagcatttcgactctacacagaaaaggcattcaaggaagagctgtacattcagaccattcctgaaatccagcggaccaatttggccaatacggtgctgatgctgaaatcgctcggtgtcaaagacttgctggactttgactttatggatccacctccgcaggataccatttccacctccatgttcgatctatgggctctaggagctctagataacttgggagaattgacggagcttggacgcaagatgagcgcatttcctatggaccc

SEQ ID NO: 17518 - DNA, 430 bp, Zea mays
  Coding DNA Sequence Number=SeqID_3115
ggatcggcttcgtccattcgatgctgtatcgcgggctgcccgatgcggtgcggcgcttcgaggccgactatccgggcgtcgagatcgtgctgagcgagatgaacacgcaggcgcaggtgcaggcgatccagcgcggccagatcgatctcggctacgcgcactggggccactgcccgcccgaggtcgaatcggcacccgtctatgcggaaccgttcgtctgctgcctgccggccgcgcaccggctcgcgcggcgccgtcaggtcgcgctcgccgcgctggccgcggagccgttcatcctgtttccgcgcgatgcggcgccgcactaccacgacctgatcatcgcgcagtgcgtgaatgcgggattcagcccgctgatccgccacgaggcgcggctgtggcagacgatcctgtcgatgatcgagttcgggat

SEQ ID NO: 17519 - DNA, 478 bp, Zea mays
  Coding DNA Sequence Number=SeqID_3116
agacaccaaaagtggccgacggcctgaagatcgagaaaatcccggccagcctggtgcacccgcgtcagctgtatgtgctgccgaatggcgacgtgctggtggcagaagccaacggggtgaaaaacccggtcacggcaccgaaagaattgatcatgagcctggtgcagaaatcttccggcaaaggtggcccgggcggcaaccgcatcacgctgctacgcaacgttaacggcaagtgggaacagcaccggtttatcgaaaacctcaatgcgccgtttggcatgcagctgattggcaatacgctgtatgtggctaacgccgacagcctggtgaaattcccttaccagaccggcgaaaccgaaatccgtacgccgccggaagaggtgacgtcgctgccgggcggtgagctgaatcaccactggaccaaagcgctgctcgccagtccggacggcagcaaactgtacgtcggtgtcggctccaa

SEQ ID NO: 17520 - DNA, 221 bp, Zea mays
  Coding DNA Sequence Number=SeqID_3117
cgagcttgaacgcatcagcatggattgtctggggctggcgtcggtgcaggcgacctttatgttctggtggatcatcgcggagaaaagttaccggcgctgcgcggtcatcgcctcaccgacggtgaaccgctgaccttttacccgggcgaaggaccgccgtgcctgccggtcaatagctagtggcaccagcatggggttcaacttgaacagatgcggccgca

SEQ ID NO: 17521 - DNA, 402 bp, Zea mays
  Coding DNA Sequence Number=SeqID_3118
atcagcggccgatgcaggcctcggacatcaccgtactggtgcgcagccggaacgaagccaacctgattcgcgccgcgctcaatcagctcggcattccctcggtgtatctctccaaccgcgacagcgtgtataccacgcccgaggcgcgagaactgctgtggctgttgcaggcgatccttgcacccgagcaggagcggatgctgcgcaccgcgctggccacgtcgctgtttgcctttgatgccgcgcagctggacgcgctggatcaggatgcgcgcggctgggatgcgctggtggatacctttgcccgctggcagcaattgtggcaccagcgtggcgtactgccgatgctgcgtcagctaatgctggaacgccagctggcagaaaacctgctggcctcagaga

SEQ ID NO: 17522 - DNA, 389 bp, Zea mays
  Coding DNA Sequence Number=SeqID_3119
cttagcgcctggattgaagagcatcagctgaaacccggcatgcgtttaccctcagagcgtgcgctggccgcccgcttcggtgcgtcgcgctcgtcggtgcgtgaagctatccagcagctgatcagcagtggcgtgctgatcagtaaacgcggcggcggcacctggctgtgcgagccgcaggagccgtggtcagaacagcgcatcgttgagccgattcgccagctactggccgccgatcctgactaccgctgggatattcttgaggcgcgccacgcgattgaggccagcaccgcctggcacgccgcgcagcgcgccaccgaggcggataaagagcggctgcgctatgcctttgacgcgctgatacaaatgaacgactgcgacgatcccga

SEQ ID NO: 17523 - DNA, 320 bp, Zea mays
  Coding DNA Sequence Number=SeqID_3120
atcggctcccggctttgggtgcacaacatggaaagtgatctggcatatcgttcgccctaacaccaaaaatggtgtcattgacggtgttatgttggggatggggcgggcattaggggaaacgatgccggtgccttttattatcggcaacacttaccaggtggatagcttttcgctttatatgccgggaaacagtatcacttgtgcactggcaaacgaatttgcagaagctgagtggggcctgcatacctctgctctgatggagatggggctgatttaatttgtgatcacttttattgttctcgcgttgtcaaaactgatga

SEQ ID NO: 17524 - DNA, 556 bp, Zea mays
  Coding DNA Sequence Number=SeqID_3121
tgatgacgaacctgctcgatgcggtcggccgctcggtgctgtcgtcgccggccacgcgccgcgcgcgcaaggccgcgcagcaggatgcgccggccgcgaaccgccgctcgagcgtgctcgcgcgcagcgcgccgcggccgtcgctcaacgccacgcatgcgtggcagggctgcgaatcgctgagcggctgggagcagatcgaccgcgtgctcgaagtcgaccagacgccgatcggcaagacgccgcgctcgtgcccggccacctatatcggcgtgtgggacacgatccgcaagctgtttgccgatacgctcgaagcgcgggcgcgcggctacacggcgtcgcgcttctcgttcaacaccggcgacgggcggtgcccggcctgcgaagggcaaggcgtgcgcaccatcgggatgagcttcctgcccgacgtgaaggtgccgtgcgacgtgtgccacgggcagcgcttcaacccggagacgctcgccgtcacgtggcgcggccggaacatcggcgacgtgctgacgatggagatcgacgaagcggtcgagttctttgc

SEQ ID NO: 17525 - DNA, 343 bp, Zea mays
  Coding DNA Sequence Number=SeqID_3122
tacccgatactacatcggcacaggcgctcctcgactagccctacccgctggacaggtgaccaaataatacatttttttcctcaactgctaagctggagtggccaggccaggatccctttctactgtgtggacaggcatgttcacgagctaacggtctcaggtggagaccatccgaccgtatctccgatttacctggctaaggtggcatgagcgctcacccccaacaatcccaatgtgtcagtggagagtgtgctcgtgcctatcggtgaaaagatcaaagctatggacgcgctgacgaagctgtttgtcaaggcagtcgagtaccggtaagtccgccggtgca

SEQ ID NO: 17526 - DNA, 570 bp, Zea mays
  Coding DNA Sequence Number=SeqID_3123
gaatggcaatagtcgtcgtcaggacgatcacgtcagcggccgcgccgcgctgctgtacgcctttgataacggcgtgtcgccgtacgtcagctggagccaggcgattaccccggcttcgctgaccgatcccgacggaaatcagctaaaaccgaccacctcagaacagtatgaagccggggtgaaataccagccgaacggcacgcgcgatctctacagcgtggccctgtacgatctgacgcagaacgatgtggccaaccgtaacgtgcaggacggcacctacaccccgtccggcaaagtgcatgcgcagggcattgaactggaggcgcgcagccagctgaccgaacggttcagcaccattgccggttatacgctcaaccatctgcgctttaaggattccgtggacggcaacgatggccatacgccgtacgtcacgccaaatagcatggcgtcgctgtgggggcattatcagtttgattacggcctgagcgcgggtgccggggtacgctacattggccgccagtgggccgataacgaaaacaccacccgtttgccgtcggtgaccctgtttga

SEQ ID NO: 17527 - DNA, 543 bp, Zea mays
  misc_feature (510)..(510): n is a, c, g, or t
  Coding DNA Sequence Number=SeqID_3124
ccttgtcgctgctcgacgaggaagagctcattttgcacataagaaaggaacgggataatggaaaacttcctgcagatgttgccattaacttggaggagctgtattataattacaggaatgcagtcctgcaaaatggtgatcctaatgcatatgagatcatgctttcaaatatgacagctttgtttgatcgtgttctactggatgtacagaatccatttacctttccaccgtatcacaaagctgtgcgggaaccatttgactattacatgtttcggtcagaactacattaggcctctggtagatttcaggaactcctatgttggcaacatttcccttttccatgacatggaagagaagccccaccagcgccacaatgttgtcctgatgtccaaccacccgaccgacgccgacccagcaattatcgcctcgctccttgaaaaaacccacccatggaccagtcaaaacaccgtttacgccgccggcgatccggccgttaccgatccactctgnaagccatttaccatcgcgaacaaatctcatttg

SEQ ID NO: 17528 - DNA, 218 bp, Zea mays
  Coding DNA Sequence Number=SeqID_3125
tggagaagatcactgtctcactgggggatcgcagttaccccatcaccatcgctgccggactgtttaacgatccggcttctttttggccgctgaaagccggcgacaatgccatgctggtgacgaatcagacgctggcaccgatctatctggacaaactcgcgacgctgctgagcaacgccggggtgaaagtggatcaggtgattctgcccgacggtgag

SEQ ID NO: 17529 - DNA, 366 bp, Zea mays
  Coding DNA Sequence Number=SeqID_3126
gataggatcgagcttggcgcaagggcacccgacgctggtcctgctacagccggagatcggcctggacatcgacaagctccagatgttgccatcctttgaggcccagggcgcgtggctggtggaggcgtcgctggaggaccacgcaggcctcctcgccgccgttgacaactatcgcccaccgccacagcggccccatgacatgcacccatcgcctggccgacctcgatgcctccgtggcttcgctcctctacccgcccacggcccgcccacatacctccgcctacagtcgaccactgtctggctgtccactcaacgcctgaccttcgcctgcggccgttgcctggccacccgtacagccgcaggtca

SEQ ID NO: 17530 - DNA, 559 bp, Zea mays
  Coding DNA Sequence Number=SeqID_3127
ggcatcaacggcatcagtacttttcgtgagctggcattacagggcattcctgcggtgctggtggagaaaggtgactggtgccaggcggccagcggcgcgctgtcgcgcatgatccacggcggcctgcgctatctggagaccggcgagtttggtctggtgaaggagtcggtgatggagcgcgatcgcctgctgaaaaacgccgcgcactatgtgtttccgctgcgcaccaccgtaccgatcgataatctcggcggtgggctggttaacgccacgcgacgtttcctgcgcctgagcgataagcccacccggcgcggcgcgctgctgatcaaaaccggcctgagcctgtacgacctctacacgcgacagtatggcgctatgccgcgccaccagctgcgtaacgaagccgccacgcgcgatcgctggcctggcttcgcaccctgggtgaaatacagcgccagctactacgatgcgtggatcagcgcgccggagcgactcgggtttgagctgattgaagatgcggaacgcgcctgcccggaggcgctggcgctcaattatctgc

SEQ ID NO: 17531 - DNA, 433 bp, Zea mays
  Coding DNA Sequence Number=SeqID_3128
gacggaatatgtgcgcaccagccagaaccggccgcaggtgctgccggcgcttggcatgatgctcggcgatatcggcgaacagattcgccagtacggttcggtagaaaatattccggcgcaggcggtcaccaacacgcgcaacgatatgtatctcgcctcggagaccatcaagcatctgcaatcggccaacgtcgcgctgccggaagagacggcgcgcaacctgacggcggtgaagcacgagctggacgcggctacgcgctttatcccgatgtgggtcaaagtggtggtggcgattgcgctgggtctcggcaccatggtcggctggcgccggattgtggttacggtgggtgagcgcatcggcaaaacccatctcacctatgcgcagggtgccagtgcggagctggtggcgatggccaccattggcgcagccgat

SEQ ID NO: 17532 - DNA, 594 bp, Zea mays
  Coding DNA Sequence Number=SeqID_3129
gcggattggaacagcctccattgttaatcagcgtcgaatgaattggttgggcgtttcgcgtttatcgcgcgccgcgatgcgtccagaatccggttcattcactcaccaccgcaaggacacggacatggacaagcgtcaactgggccgcacgggcccgcaggtttcggcgatcgggctcggctgcatggggatgtcggatctttacgggccggcggatcgcgacgagagcatcgcgacgctgcacgcggcgctcgacaacgggatcacgctgctcgatacgggcgacttctacgggatgggcgacaacgagatgctgatccgcgacgcgctgcgcggccgcacgcgcgaccaggtgctgatcagcgtgaagttcggcgcgctgcgcgatccggccggcgcgttcgccggctacgatgcgcggccgcaggcgatccgcaacttcgtcgcgtattcgctgaagcggctcggcaccgaccatatcgacatctaccggccggcgcgcgtcgacccggcggtgccgatcgaggacacggtcggcgcgctcgcggatctcgtgaaggccggatacgtgcgccatatcggactgtcggaagt

SEQ ID NO: 17533 - DNA, 199 bp, Zea mays
  Coding DNA Sequence Number=SeqID_3130
atgccgtcccgtatggccgtatcttaccgcgacggccaacggttgggcgataccacgcctgagcaggaggaggacgggccggcagaggcagggcgctggaatctgggaggaagcgtggagcagatgcatgcgcgcggccgcgggtactgcccaaaacgctcggagcatcaacgcggacgtgtcgaggagccgcggacac

SEQ ID NO: 17534 - DNA, 224 bp, Zea mays
  Coding DNA Sequence Number=SeqID_3131
tgttcgtcaaaaaggacctaacacgccgccgtttcctggccctctcgcccgtggagctcgagtgagatcccttcctcttggtccccttccgcagcccaccgccgcggcagccggctgccgcagcctttccgcccttggcgccagccaaaagctgagcctgccccgccgggagctggtgcttccgcctccagaacagagaaatcgggtccatatgcgggtgccgc

SEQ ID NO: 17535 - DNA, 389 bp, Zea mays
  Coding DNA Sequence Number=SeqID_3132
ctcaacctggtgtttaacggcatgagttccacgctcaacggcctgatccagacgcagcagggtaatctcaatctgggcggcaacgcggactggagccagctggataactggcgcgcgcgcgttactgcgcagggcagtcgtattcgcgttaccgttccgccgatggtgcggatggacgtttcgccggacctggcgtttgaagccacaccggcggcgttcaatcttgacggcaaggttgatattccgtgggcgcgcatcacggtgcaggaagtgccggagagcgctaccggcgtgtcgtcggatgaggtgatgctggacgagaacctcaagccgattcagccgaaaaccgccgcgatcccaatcaacagcaatctggtgatccacgtcgg

SEQ ID NO: 17536 - DNA, 525 bp, Zea mays
  Coding DNA Sequence Number=SeqID_3133
aggcgccgctgaaggtacaggaccagctcgcgctcgccttctcgcagtcgggcaagagccccgatctcgtcaacacgatggccgcgctgcgcgaagccggcgcgcgcaccgtcgccgccgtgaacgtgctgccgtcgccgctcgccgatgcgtgcgagcaccagctgccgctgctggccggccccgaactgtcggtcgccgcgaccaagagctatatcgcgatgctgtcgctgtccgcgcagatcgtcgcgtactggcagcgcgacgccgcgctcgtgaccgcactgcgcggcctgccggacgtgctcgcgcaggccggccggctcgactggtccccggccgtcgacgcactggcgaacatcgagcggatgatcgtgatcggccgcggcctgggcctcgcgatcgcgcaggaagccgcgctgaagctgaaggaaacgtccggcatccaggccgaggcgttctcgagcgccgaggtccgtcacggcccgatggagctgatcgatcgcgactatccgctgctcgtgt

SEQ ID NO: 17537 - DNA, 462 bp, Zea mays
  Coding DNA Sequence Number=SeqID_3134
cgacccaattccatccggagaaaagcgccgaggtcgggttgcgtctgtatcgcaacttcgtacactggaagcccgagacggcgcggcaccggtttggccggtacgcgcctgattcttttcattttccacgacgacacccgattgctatgctgctgattccggccatcgatctcaaagacggtcagtgtgtgcgcctcaaacagggcgatatggaccaggccacgattttctccgaggacccggcggcgatggcccgcaagtgggtcgatctcggcgcccggcggctgcatctggtcgacctgaacggcgcgttcgccggcaagccgaagaatctcgaggcgatcgaagcgatcctcgacgaagtcggcgacgaaatccccgtgcagctcggcggcggcatccgcagcctcgagacgatcgagaagtatctcgacgccggcctgtcttacgtgatcatcggca

SEQ ID NO: 17538 - DNA, 414 bp, Zea mays
  Coding DNA Sequence Number=SeqID_3135
acatccgcggtgacttcgcgctgggtgcggagcaacgtgccgccgcgctggcgcaggccgaagccaatccgggtcagctgcaacagcaggaacagacgacagacttcgcgtggctgatggacggcgacagccgcttcgggccggtgtgcgaagccatcgccaacggccgctattactggattccgttcgccgcgatccgcgagatggaatttcaggcacccgccagcgtgaccgatttggtctggcgccatacgcgcgtgcagctggtggatggcagcgagcagatttgccagatcccggtgcgctatccgctgctgccgggggcggatgagcgttatctgcgcgccagcgtcacggaatggcagccgctgggccacgatgacagccagtttaccggccatggccagaagctgt

SEQ ID NO: 17539 - DNA, 538 bp, Zea mays
  Coding DNA Sequence Number=SeqID_3136
aagcattaacgcctttgccggttggctgaataatgggtgaccaccggagatacggagcgtgagtggaccatgattcaatcagtaccgatggtcctgttgactgacaataatgagttcgtgtgcgcacaactggcctaattatggcccctcgaagccattggggttatgcagcaggatccatggacggatagatgaactatttggaactctcccgccggttggtgaacaactaaaccgttatttcagtctcacggagacgaaagaataacttgcgcctcgggttgcagatctgtaagaggatcttgattacacgaagtctaagcttgtgactgtacgtggtttctcaacgaaattactgtgaaaacactgttgctccccacataaaagcccttggcatacattgtcaagtctgcagctgctaatgagtgaaataagtcacattaattcggccttgctaactgttgcgcatccagaatggagaacggcgcctgcagctgcattaattaattacgcatctctccgggataggacacctgat

SEQ ID NO: 17540 - DNA, 81 bp, Zea mays
  Coding DNA Sequence Number=SeqID_3137
ctgcacccgtatcctgtgatggtatgtatgtatggtatcttccagtccgcttaggtttccacagctagctaccattgttct

SEQ ID NO: 17541 - DNA, 502 bp, Zea mays
  Coding DNA Sequence Number=SeqID_3138
acagtcgtggctctggatacgcgcatggtcacacttatgtttcccgccgcgggcgaatctcgcttatatgctcgtaatgattctccggtcaaccgcgttgtttttaataccggtgatgccgtcaccagccatcaagggtgtcagatgcaggttgattaagtccgcaatcaaaacgattaagtgacttacattggcaggtgtcttgatacatcagagagcaaagtggtgttgccagaagtgatgctgtccaccgtactggtgttcagcaagcaacaggattgcatgtttgccggcaagttggaccgcatggatcgttgtgccatgcgcttccgcgcacgcaaatgctagagcgctcagtatcgcttcccgatcaccggcctgtcgtgtatgcgcactagcgctgattcgtgaaccatcatgcacgtcgcacatgacgtcggtcgcagtcatgctccgcgcgtgtctgctgacccatcaagtcggcctgggtcagtccattgaa

SEQ ID NO: 17542 - DNA, 302 bp, Zea mays
  Coding DNA Sequence Number=SeqID_3139
ttctcacgaagagagcaagtgctctcttcgtgtttatcacacgtatagagtcgtagttggagcttgtcctgttagtgcatggggatccagcagaaaaagagggggctcgtgcttctcttgtccaggtcatacgcgatggtaggattagcggtttcctaagacttgtgctagcctagtagaaatattttgcgtagaccaagaaggcatgatagccctagtgtaggatcgatagcccataataggctagatcgggaggaaaccaactccctctatatctaggagcagcctctttcggaaaatga

SEQ ID NO: 17543 - DNA, 486 bp, Zea mays
  Coding DNA Sequence Number=SeqID_3140
tgcagcagctcgacagcggcatcttgcgcgccacgcggctggtcgatcagctgctgacgctgtcgcgggtcgaagcagacgatctgcgcagcgaatttcagccggtccccctcgcgccgttgctgcaccagctggtgaccgaacatcaggcacaggcggcaacgcagcacaccaggctgacgctgacggctgacgcggaaccggtgatgaacggtcatccactgctgctgggtttactgctgcgcaatctgctggataacgcgctgcgctacacgccgtccggcagtgagattcagctgcggctcagcgcgcgcaggctggagatcgcggataacggaccgggcgtcagcgcagagcagctggcgcggctgggcgaacgcttctggcgaccgccggggcaggcgcaaaccggcagcgggcttggcttgtcgattgtgaaaaatgtggctcagctgcacggcatccggctaaccttcagcgcggtgc

SEQ ID NO: 17544 - DNA, 186 bp, Zea mays
  Coding DNA Sequence Number=SeqID_3141
taccagcagctggtagatcagctacgtacgcaaatcgaagcacgcatctggccgccgggtgaaaagctgccgtcgctgcgccagcaggcggagcagagcgggttgagcctgatgactgtgatgcacgcttacgaagtgctggagagccagggctggattgtgtcgaagccgcagtcgggctactac

SEQ ID NO: 17545 - DNA, 536 bp, Zea mays
  Coding DNA Sequence Number=SeqID_3142
aatcgctgctgggatttctttacccccggcgtgccgtcagaattcaaagtgatggttgagcagcagattattccgcgtcttaaggcgcgttttacgttgccagaacccccgctgtgcctgcgtctgaccacctttggtcgcggcgagagcgatatcgccgccgagcttgaaccgctgccgctgccggaaggcgtagtgatgggctaccgttcgtcgatgcccatcattgagattaaactgaccggcccggccagccagcgcgtggcgatggagcaggtgtggcagcaggttaagttactgctggccgagtgcaccatttttgaaggctttgaaggattgccggccgtgctggcgcgggaactgcaagatcgcggcttccgccttgctctgagcgaacaatacacggccgggttgctgcactggcaactggccgccgcgcaggtgccgctcagtgccgccgagctgctgccggcacgtgaggagtcgctggaagcgcaggttacgcgtacgcgtcagttagccgctcagcagggtac

SEQ ID NO: 17546 - DNA, 571 bp, Zea mays
  Coding DNA Sequence Number=SeqID_3143
tgcagccattttcctcttgttcccaaaccgatagctttgactcacaacagcaaataacagatcactcccgtctcccatccccttcctctccgagcaatcctctgccggacgtcacattggtaaactatatgtctccaataaagaaattggtagagggagcaatggcacagttgtttttgaaggatcgtatgatggtcgtcaagttgctgttaaacgtctgctgcgttcccacaatgacatagctgaaaaggagactcagaatcttattatatctgatcatgatccaaatattgttagactatatggttgtgactatgacagcgattttgtttatatctcccttgagaggtgtcactgcagtttggctgatctaattcaaaaacactcatatctgtcttctggagagtctgtttctaacaatgaggccagtttcagcatcaagtcaaagatttcaaatgttaagggaatggatgtggaattgtggacacatgatgggcttccttcagcacaactcctgaagctgatgaggtacatgaatgatctcatatgttttctgctgcttgtagttgta

SEQ ID NO: 17547 - DNA, 568 bp, Zea mays
  Coding DNA Sequence Number=SeqID_3144
aggaagcgctgttgcatgcgctcgactcgcagaacttcatgcggatcggcggcacgagctcgatcgcgagcgatttccggctgatcgcggccacgcgccgcccggcccgcgaggcggtcgccaacggcacgctgcgcgaggatctgtggctgcgcctcgatgcggcgtcgatcacgatgccgccgctgcgcgaacgcgacggcgacgcgctcgcgatcgcggatgcgctgatcgacgagctgaaccgcgaagcgcgcgcgaccggccgcagcacgaccgacaagcgcgcggcgcccggcttcgtgcgcgaatgcctgtcgtacgaatggcccggcaacgtgcgcgaactacaggagcgcgtgcgcttcgcgtacgatgcgtccggcgatttcatcgagacgctgcgcgcgggcgaagcgagcttcgcggccggcgccgcgctgaacggcagcagcgtgcagatcaaggtcggcaccccgctgtccgacgtcgaggacctgctgatccgcgcgacgctggacgcggtcggcggcacgcgccatcgcgcagcgacgctgctcggcatcag

SEQ ID NO: 17548 - DNA, 310 bp, Zea mays
  Coding DNA Sequence Number=SeqID_3145
cattaacgggatttgcccgtgccggcacggttattgtgataagcatcgtgatcacggcagtggttaatttcgtgcttatcacagaaaagccactgagcactttgccgggaagcgtttacggcctgctgctggtaataaagaccgctctgttttttctgatgttattgctggctgccgccaaccgcttccggcttgcaccaaagctggaaaatgccctgcttcagggccactataaggcgggtattgcactgatgcgtaaaagcattattacagaatttaccgtagcggtactgatactggcaattgttgc

SEQ ID NO: 17549 - DNA, 410 bp, Zea mays
  Coding DNA Sequence Number=SeqID_3146
tgaacgtatctggagcggacgctcgccgctgtggctgctgttgtggccgctgagtctgctgtatggcgctatcacctggctgattcgcctgagctatcagcgcggctggcgtacccgctggcgcgcgccctgtccggtcattgtcgttggcaacctgaccgcaggcggcaacggtaaaacaccgctggtgatttggctggtgcaggcgctgcaacagcaggggctgcgtccgggtgtggtgtcgcgcggttacgccggtaaggcggaacgctatccgctgctggtcaatcaggatagcgcgacggaacaggctggtgatgaaccggtgcctgatcgcccagcgcactcaggtgccggtggcagtggcaccgcagcgccggcaggcaattgaggccctactagcggcgcat

SEQ ID NO: 17550 - DNA, 378 bp, Zea mays
  Coding DNA Sequence Number=SeqID_3147
gacgcacagtgattgcgcgggtaccgtgctgtgatagtcttcgcctgatgcaattaatcaggtgtatgtgatgaaaaccaggccgccacgagccacaatcagtgacgttgcccgcacggcaaaaaccggtaaaaccagcgtttcccgctatctgaatggcgaagttcatctgctttcgccggatctgaaagcccgtatcgaacaggcgattgccgacctcaactaccgccccagccagatggcgcgcggactcaaacgcggccgcacccggctgataggcctgatcattgccgatatcaccaacccctactcggtggatgtgctgagcggcattgaagccgcctgccgcgcgcgcggcttcacgctgctgatgtgtaa

SEQ ID NO: 17551 - DNA, 421 bp, Zea mays
  Coding DNA Sequence Number=SeqID_3148
gattttggaggttgcagcggcgtcgggggaggggacgggcgaggcagcggcgtcggcaagccgcggcggaggacgggacgggcgcggcggggtcggcagcggcggcgtaggcgcgtgcggcgctcgggcgcggcggggtcggcgcacggcggcggcggcgcaggcgcgggcggcgctcgggcgcggggcggggtcggcggtcggcggcggcgcaagcggggttggcggtcggcggcggcgcaggcgcggacggcgatcggcggcggcgcgggatcggcggcggcaggcgagtggccggcgcgtgatcggcggctgcgcgggaacgcgatggacaaaggcctgggcgagtggccagcgcgtgtttagcctggcccgccctaaaccccgtcggccataacgaagccgacgggagataatgtag

SEQ ID NO: 17552 - DNA, 172 bp, Zea mays
  Coding DNA Sequence Number=SeqID_3149
aaatatactgatgcacgcggttaccgattttatagagccacctcactgatgttatggctggaattcttgccgtgaagggcgagagttgggctgaagaggtagggctgctgcacaatgcttaatggtacgttctggcaccttttgactgctggctctgctttaggggaatcat

SEQ ID NO: 17553 - DNA, 243 bp, Zea mays
  Coding DNA Sequence Number=SeqID_3150
cattagcaaccgcatcctggctctgcaagctgtcgcaatcgcaacccaccgcgtccaagatgaagttcatcgccgcgtacctgatggcgtgcctgggcgcggacgccgccagcccgccactatagagggggtggccccggccgccgcgctcccgaccaaggacgacgtgtgccacatcctgtgctccgtcggcaccgaggtggagtgggaccgcctcgatctgctcttcgagctcctggaggg

SEQ ID NO: 17554 - DNA, 374 bp, Zea mays
  Coding DNA Sequence Number=SeqID_3151
tgcagctttatcacacccgctatctgcgcccggtcagcgaccatctggtggcgtcggttaagaaagtctatgcgccggcgtaaaatggtgaaagcaccgcgggtgttcaacttcttcctgaaacagccgtggatgcgcgacctcagccagcgccacatcggcatggtggatctgccgctgctctcctcgcccagcctgaagcagcagctgagcggccacccggcgatgcgggtcacgctggagcaactgcaggcgatggatgcggcccagcgcgaacagcacgtgctggtggtgcaggatccgtttaccaggtattacgaagcgcagctggtgaccgatttcatccggctgattgaaaaactcggctaccggcc

SEQ ID NO: 17555 - DNA, 175 bp, Zea mays
  Coding DNA Sequence Number=SeqID_3152
ccacacgcattctgggggagatccagcttcttcaggtggttcgatcacccaaccttattggaaataaagacaatgatgttccttcattttcgaagggagtgccagaattttattgtggttttggagctcatggagtttgatctccatcaagtgatcaaggccaaggatgacctca

SEQ ID NO: 17556 - DNA, 173 bp, Zea mays
  Coding DNA Sequence Number=SeqID_3153
accggcaacaaaatcaaagtggcgatcaataccggaccggatgaggcgctgtggcagaccgtgaagcaggtggcacacgataaatatcagctgcatgttgatgtggtggcgtttaacgattacgtgcagccgaacaaagcgctgttcaataaagatgtggacgccaacgcgtt

SEQ ID NO: 17557 - DNA, 581 bp, Zea mays
  Coding DNA Sequence Number=SeqID_3154
aacagtgtggcttatcatgcatgcagttcgtgatctggatcgtcataccgaggctgaatgagtctccgacgaggaagaggaagagcagagcatcctccggttcagcatcatcttccagtacctcccgcggctgttccagatcttcccgctctccacgcggatcgtcatggcgatgggggtcatgacggagacggcatgggccggcgccgcgtacaacctgatcctctacatgctcgcaagccacgtgctgggagcgctgtggtatctcctgtcggtggagaggcaggaggcgtgctggagggaggcgtgcctgctcgagagccccagaccatgttcttcgattgcaaggcgttgagcagcaacagaacgatctagtatgagatgagcaacatcacaaacctgtgcactcccagcaacgagttctacccgttcggtatctacgaggaggcggagcaggccaagctcacgtcgtcgtccttcacgtcacgcgcaagtacttctactgcttctggtggggactcaagagcctcaggtgtgccgtgtgctgcatgcaggaactggcatcttaagctcagctcaat

SEQ ID NO: 17558 - DNA, 381 bp, Zea mays
  Coding DNA Sequence Number=SeqID_3155
gggcgaaatcacttctttgaggcttggctgtcgcagggtgacctgcttctcaaaaaccgcctggcgttcgccttccttgacaacccggcagctcccaccgacatttcgtccttcatcgacgccgctctcgggtctgcgtgtcccggcatccgcgtcgaactcctcccatcttctaggggggtcaaactcctgcggttcgccaacaactcagaccgggagcggctgcgggcgctcagccccatcagttttggggggttgtccctctccctggagcgcccggaggagacctctaacagattcatccgcactcccgagtggttggccctggtggcccttactgacttccctccggagcagtggtccgacgcctctatcaaaagc

SEQ ID NO: 17559 - DNA, 339 bp, Zea mays
  Coding DNA Sequence Number=SeqID_3156
gtcacgggcgaggtgtgcgttcccccgtgccgtgccgtgccgttgcgctgtgctgaacctgaactcgacgtgacgggacgctacgccattttggtcccgagccgcgcgggcgcggcccgcggctccgtgtccgccggtgtctcccatgccgtccgtggcgggcgcggtcgtgagtggtgtgtgcccccccggttgcggtccttcccgaccttccgtggcgatccaacgtgggtgcgacagcatgctgagaacgcgcggaagctacgcttgataaggagggaacgtggactggggccgaacgctgcaaggaaagaagattcgcggccgtggcatcagcct

SEQ ID NO: 17560 - DNA, 288 bp, Zea mays
  Coding DNA Sequence Number=SeqID_3157
cgtttgtcggcattggcgaagtgatgccgggctgcccgctcaatgccgaaggctttatcaccgatgcgcaggtagaagcgctcaacgcgcgcggcgtggtgggtgaaatgctggggcattttttcaatcagcagggagagcgggtgtacggcgaaaccgacgagctgctgaccagcgtgctgctggagagccagacgcagcgcaatatcatcggctttgccggcagcgcgcgaaaatacgcagcgattcacgccgcgctgcacggcggctggatctccgggctggtga

SEQ ID NO: 17561 - DNA, 234 bp, Zea mays
  Coding DNA Sequence Number=SeqID_3158
tcgcccggagaatatcggcgcggctgcccgcgccatgaaaaccatgggatttagcgagttgcgtattgtcgccagtgacgcctggcaggatccggccgcgcggcgagtggcccacggcgccggtgagattcttgaccatgtgaaaacctatgacacgctgagcgctgcgctggcggatgtcgatttttccgtggccactaccgcccgcagccgggcgaagtttcgctattacgc

SEQ ID NO: 17562 - DNA, 103 bp, Zea mays
  Coding DNA Sequence Number=SeqID_3159
gaaagctgctgaatttggtcagctgaaagatggttatatgtttgacacatcaactggcatgtcaagaatgttgttaagtacgccaacatgtccagttctggag

SEQ ID NO: 17563 - DNA, 199 bp, Zea mays
  Coding DNA Sequence Number=SeqID_3160
tctacagaaatggaagcatctgcgccagcagcaaagccgtgttcattcggttcggttcggttcattcagaagaaagagctcggccgtgacgcgaagggtacgggcatggaacaagaggaaaacaccggcatgcacgccttttcagttaatcaggcgatcgaggcgcgccgagagatctcttttgcgcacggcacgctcg

SEQ ID NO: 17564 - DNA, 502 bp, Zea mays
  Coding DNA Sequence Number=SeqID_3161
gcgcccagtttggttcagcggtgaagccgctgcatgccggactggcggcagagcgtgcagtgatggcggcgcagctgacgctggcgaaattcgatggccggcatgaaggcgtgatcgacgcgtttctcgccgccagcagtaacggcgaggcgcagccgcatcggctggtggaaaactggggcgcgccgtggcgcatcagtacccccggtctggagttcaaacccttccccacctgcgccgggactcacagcgctgccgaagcggcacgtctgctgcggcgcgcctggctggcagaaggtcactcgctggactcgctgctggaaaatattgatgacatcacggtcgccttcccgcctggtggtgacatcgcggcggcagttcgcgtgccggctaacggcatcgaagcacgctttagcctggagtacgtgattgccgccatgctgatgtacgataatttacggctggaagattttgccgaaggcgcgctcaatccggcggtgat

SEQ ID NO: 17565 - DNA, 273 bp, Zea mays
  Coding DNA Sequence Number=SeqID_3162
ggaccagacggacaagcagtctcctcccagcggaagcacgcacggacatacaacagaccagacctttattcactatgaccaggtggcaccggtaccaaacgagagcaccgaaccaagatcgaagcctgagcccgcgacaatagagaccgcgcacaagaccacaacaacgacccggaagccaaatgaaggccaggcgcccaagaggcccacaacaaaatgcaagcccccagccaagtcacccgacacccggagccacaccgttcggaacggcca

SEQ ID NO: 17566 - DNA, 344 bp, Zea mays
  Coding DNA Sequence Number=SeqID_3163
tggacaacctcgatccgctaaaaaccccgctcacggtctcggaagtgggccgcgccgacccggacgtggtgaagagcatgttttatcccgccaaccgcgatgcgctgctgcaaaaaggcggctccagcgacaaagtccggcatttccgtgacgaccaactcaacaagcttttggtggcaatctcggccgaagtcgatccggcgaaacgtctggcgctcaccggtgacgcccagcgttatctgctggatcaggcttatgtgatcccgatctttgaagagccgcaggtgtttgccggcgcgccgtggctgaagggcgtgagttttgaagccgtaggccggccgtcg

SEQ ID NO: 17567 - DNA, 227 bp, Zea mays
  Coding DNA Sequence Number=SeqID_3164
tgctttggcctttgctggactgctgctttactgttacggccgacgggcgactggggtccggcggttcggcttgcgggcggcgggttcggggttcaggcttcaaccgctttaggcgaacaaccgaacaagaacaagttaagttcggccgttcggcctggttctgggcgggcggaagctggccccgtgggccggttccgtgggccttcaaactggttctgggcgctggg

SEQ ID NO: 17568 - DNA, 443 bp, Zea mays
  Coding DNA Sequence Number=SeqID_3165
ttggatgacgtgctcaatgtctgctgcaaagttcctgtaacctaacccgacggctcgtcccacagctcagtagtaggtacttggaaagcactttcggcgtccttgattcctgaacttccaggatcgcctgctgcaagagtgtcttctccaccaatgtgccaagcttcatgtatattttgttttgagatgcttggtttactttgatatcttgttggtgatggatcgtgagttgttggcttgttgcattgtgaattgcgtactgtaagtatcccatttgctgtttagcactttttccattcgaaagcaaagttcgaagtcctggctgcctggctcttccttggagatggaagttttagcacttcctgaaatatcgggaacataaagtccatgtgatcttttgtgcctttaaaattttggatcgttggtcctaatggaaatctgtt

SEQ ID NO: 17569 - DNA, 494 bp, Zea mays
  Coding DNA Sequence Number=SeqID_3166
atcggcgacatctcttttgggcgtgcaccgtacgacgcgcaagctctcttctcggtctacgacgatgtggagctgctgccagtacagcatcgtccagagcttcacgttctctactaaggggagcgttcgtgtgtacagttcaggctttctcgatctcatgtttggcatcgacctgtctgcgaacatgctctccggagaaattccgtttcagatggggaatttgagcagcgtcaagtcgctcagcctatccaacaatttcttcacgggacagattccagccacctttgcaggcatgcgtgcgattgaaagcctggacctgtcccacaatggtttgagtggacagataccatgcgagttgactaagctatggtcgctggaggtgttctcggtggcatacaacaacttgtcaggatgcatgccatggtcaggtcagttcagcacgttcagcacggacagttacgttggcaacgtcaaccttcacagtacgtgcgtat

SEQ ID NO: 17570 - DNA, 195 bp, Zea mays
  Coding DNA Sequence Number=SeqID_3167
accggaaatgtgacacgcagtgacgtcgccaaagccgccggaacctcggtggcggtggtcagctatgtgatcaacaacggaccgcgtccggtggccgaagccacgggtcagcgcgtgctggccgccatccagcaaaccggctattggccgaattcggtggcgaaagcacttgccttcggcagttcccaaaccttt

SEQ ID NO: 17571 - DNA, 97 bp, Zea mays
  Coding DNA Sequence Number=SeqID_3168
gttgaaaaggttactcagcgtccagtcgagagcttggtgtgccttgacaccaaggctattttgtgccattgttccccaaggcgagctagggcctgga

SEQ ID NO: 17572 - DNA, 346 bp, Zea mays
  Coding DNA Sequence Number=SeqID_3169
tgcaggccgaactgacgctgcgtcagggcaacgatgagcgcacggtgatcatcaccgccatcggcgaccagcggcgtccggccagcgaagcgcagcagatgtacgcggagacggccgccagcatcgaaaagcgcgaaaagaacgcgctggctcgcaaaatgaatgccctgaccatgccgcatcccgatcgtcgcccggataaaaaagagcgccgcgatctgtttgaaaacgtcgccttgcgcggcgagctggtcaacgcatctcaaacctggcgcgacatcgtgcagaaccacgactacgccgagccggtcaaaaccctgctgggcgaactgctggtcgccaccag

SEQ ID NO: 17573 - DNA, 156 bp, Zea mays
  Coding DNA Sequence Number=SeqID_3170
ctccttctgatgtgcaactttggtacgctgatgaccggtacacttgactggaaaggcataccttcatacgcgaacaatatgatgcggtgcttgagcaccattgttttgatcggcagctaccctggtgtacccgctcgtgcactcgcgggtgatcac

SEQ ID NO: 17574 - DNA, 148 bp, Zea mays
  Coding DNA Sequence Number=SeqID_3171
aggctgtttccaaagcattccaaggaggattacaaaagaactgttcagaaggctcttctaaatgttgttcctttcaccccaagtgctggtgttgttgaatgggtaaacggtactgttccactaggcgattatctaattgggagtacta

SEQ ID NO: 17575 - DNA, 273 bp, Zea mays
  Coding DNA Sequence Number=SeqID_3172
tggcggctcactctcgtcagtagtactgaccttctggaactcctacctggctgggcccaccgactccccctcccctccactgaccatgtggcgactggcgagacatcagacatggcatccccgccgctcaaacgcccagggcccccccacccgcgcctcctccttccttccccacctcctcctaccaccctcgccgaggccgcgccacacaaaagcagtcacgccgtctgacagccataaaaaacacgacgccatgcaggagcacattcctca

SEQ ID NO: 17576 - DNA, 382 bp, Zea mays
  Coding DNA Sequence Number=SeqID_3173
aaagtcgacctgcagagttgctgccgccgggctacttccattgcaagcataaactccgttattgctgtgcttggtggggcaacgagccttctgagcaatgagtatcaggaggcactacagtggaggatgcgggagccaaatttgggcgcaaagctcttccttggtggtgttggggtgcagaagactggtgaggagattgcaactgcacttaacaacattgacattagctccgagtatgttctgaagctccgccatgagattgaggagctctgtgtagagtatggacatggttatcacagtgccacggcgaagcgagtcgccagctggacgcctaggcgcccatttgctgaagaagaggggctgctgcaacaactttcatgca

SEQ ID NO: 17577 - DNA, 113 bp, Zea mays
  Coding DNA Sequence Number=SeqID_3174
atcatgcaataaatctctgagcgagttgacggaccagaccgggaccaggagaggagggatatcggatttcctctttagtgtgcagcagagccatccgtgacaacagattcggg

SEQ ID NO: 17578 - DNA, 535 bp, Zea mays
  Coding DNA Sequence Number=SeqID_3175
gggtttttctcgatgcctacgatctcggtgcgctggccttcggtattaaagatgtcacgcgcgagttcaatctgacgcccgccggcaccggcatggtggcgtcggctatcacctttggcgcgattgttggcgcgctgatcggtggctatctcaccgataaaattggccgctatcgggtcttcatggccgatatgttcttcttcgtggtagcggcactggcctgtgcctttgcgccgaacgagtacgtgctggcggcggcgcgctttgtgatggggctcggcgtcggcatcgatcttccggtggcgatggcgtttctggcggagttctcccgactgcgcggtcagggcaataaggccgccagtgtcgcgatgtggtgtcccacctggtacgcggcgatcagcatctcctatttgctggtgctgctgctgtatgcggtgctgccagagagccatactgactggctgtggcggctgatcctcggctttggcgcggtaccggcgctgttgatcatcgccatccgcagtcgttacatgag

SEQ ID NO: 17579 - DNA, 579 bp, Zea mays
  Coding DNA Sequence Number=SeqID_3176
tccgcttaaaccctgaaaagtgcatatttggtgtccagcaaggcaagatacttggctatctagtagcccactaaggcatagaagcaaacccaactaagatacaagccataatggacatggctccaccgcagtcgacccgatatgtccaacgattgacaagaagactcgcagcgttgaatagatttatctcacggtctgccgagtggagtctacctttcctaaaaatgctgcgcggagctaaggacttcgcctggggccctgagcaggctacaacctttgaatcactaaagtagtacttgctgaactcgcaactctgactatcccaaaccccgcactacccctcctgctttacgttgtagcatcgcccagcgtggtcagcgcagcactggtacaagaagggtgtaaaaatggcaggccccagtagtgcccgatctacttcatctccgaggtcctcaccagttccaagtgcaacatgacaggactagaaaagatagcctacggagtcgtcatggcttcacacaaactcaggcattacttcgaggcacccaaaataagaatcaccaccgtctgagatctagg

SEQ ID NO: 17580 - DNA, 501 bp, Zea mays
  Coding DNA Sequence Number=SeqID_3177
acggtcacactcaacactacgacaatcaatcgaaaatctgtccttttgtttcgatttttttggaggggacaaattgttggcgattgctcggtgctcatttggatccagatctcctgtcccttccctgtataaacaattcatggggtctccccctctacaattccacgttcccaacattgcgagaggcgccacctcagtacctcacaaagccagccatccaccgcattgccgccccctctcctctcctcacgacctcacgtcacccgcccgcctcagcctcgccaccgaggcgcgcgctgccaatgctgccacggtcccgtgacgcggcaccgaggctcgcgtttctcgagccgctcgcctgcgcgttgctgctcctgctggtgtcgccgtgccactgcgtcaacgagcagggccaggcgctgctgcgatggaaagacagtctgcggccggcgagcggtgcgctggcgtcgtggcgctccgcggacgcgaacccgtgctggt

SEQ ID NO: 17581 - DNA, 347 bp, Zea mays
  Coding DNA Sequence Number=SeqID_3178
cggagaagcgcatcggttttgcctgcggcacgctgactgctggcttaaccgccggcattctgctcggttcgctggtggcgacggtgctgaatacttcgctctcgccggcggcgatacgcgatcacggctggcgcattcctttcttcctcggcggcctgtttggcctgctggcgatgtatctgcgtcgctggctgcatgaaaccccggtgttccgccagatgcagcagcgcaaagcgctggcggaaaagctgccgctacagaccattctcgccagccataagcgcggcattgcggtgtcgatgctgcttacctggctattatcagcctgtattgtggtggtgattctg

SEQ ID NO: 17582 - DNA, 298 bp, Zea mays
  Coding DNA Sequence Number=SeqID_3179
tgcctgcagaatcgcccgccgaattcttcgctgagaacaagaacattgccgggtttgacaatcctggtaaatccctgtacaccacgttgcgggagctagttgagaatgcccttgattccgccgaatccatatcggagctccctgaaatagagattacaatagaagagatcacgaagaccaagttcaacacaatgattgggctagtggatcgacagcgtgttgacgaggcactatatgatgattttgagtcagaaaaggctcgtgaggtaagatgagcacctaggtttgtagtagtttg

SEQ ID NO: 17583 - DNA, 536 bp, Zea mays
  Coding DNA Sequence Number=SeqID_3180
tgtcctttttccttatccggtctgaagctgttggatattttacgtgcccatctcctttgtccgacgtcgcggcttactgctccctgcgcgtccccagccccagctcgcccatgccgcgctcctccaagccggagcttcctctgctcggccgtggccgccgccgtttccctcgttctcatccgctcggccatccttgatacaaatccagccgccgcccttcgtccgtggatttttccggccgcccacgatatttcccagcgcttgagctcatcctcttcttcagatcctgcacgccgtgcttcttctggcggtgcgctctccctgctccatctccctccgcgccgcgcgcccaggtgcctgctcgctgcctgcttgccccggcccccctgcgtccagccgagtggctcccccacgcgtgcctctctttcccccagccccctcgtctccatggccgctcgtcctagctgcgaccctgtcgcgaagctcctgcgcacccgccttcttttccctctgccgagctcccttattggccgacg

SEQ ID NO: 17584 - DNA, 166 bp, Zea mays
  Coding DNA Sequence Number=SeqID_3181
gggcgctgggttcttccaaaatcgccgtcggtcgttgggaggagcgcccgactctctctctctctcgtcctgtgtgtggtctcccggccttgcggcgcgcttccgccaagcggtgtgggccgcgggtgcgggagctcggcctgcagggctcggactgtgctgcttt

SEQ ID NO: 17585 - DNA, 489 bp, Zea mays
  Coding DNA Sequence Number=SeqID_3182
aaaaaggtgaaacggcgccagctcaagccggcggaacgccagcagcagatggcgcgcatcagcggcggcactgattatcagggcttccgccagcgcgatctggtgatcgaagcggtgtttgaggatctggcgctcaagcagcaaatggtggccgagatggaagaacactgtcagccgcacaccatctttgcgtctaacacctcctcactgccgattgcgcagatcgccgccggcgcgcagcgcccggagaatgttatcggcctgcacttcttcagcccggtagacaagatgccgctggtcgaggtgattccacatagcggcacttcagcacagacgctggccaccacggtggatctggcgcgtcgtcagggcaaaaccgccgtggtggtcgccgaccgtcccggcttttatgttaaccgcattctcgcgccctatataaatgaagccatgcgctgtctgctggagggcgagcccattgaacacattgat

SEQ ID NO: 17586 - DNA, 301 bp, Zea mays
  Coding DNA Sequence Number=SeqID_3183
gtgaacattaacgtcgcagaattgttaagcggaaatgacgttctgttattatttgtcgtattagccctcggcctgtgcctgggtaaattacgccttggctccgtacaactcggtaattctattggtgtgctggtggtttcgctgattctgggtcagcaacacttcgcgataaatactgacgccttaagtctgggctttatgctgtttattttttgtgtcggggtggaagccggtcccaactttttctccatctttttccgcgacggtaagaactatttctttctggcgatcgtcatggtgg

SEQ ID NO: 17587 - DNA, 262 bp, Zea mays
  Coding DNA Sequence Number=SeqID_3184
tccggccacaatcgcagccaggtgaactatggcgaacataacctgtatcatgctcgcacggcgctggagcgcctgtacgccgggctgcgccataccaaagccagcgcaaccccggctggcggtgaggcgtatgaagcccgctaccgaaccgggatggacgaagatttcaacacggcggaagctaactaggtgtggttagatatggcgcacgaagtaaagcgtgtcaacggtgaacataaaagcgtcgtcgatgcgctggccg

SEQ ID NO: 17588 - DNA, 415 bp, Zea mays
  Coding DNA Sequence Number=SeqID_3185
attgcgctgacgctgtcgaaacgcggcgagacctggctgttcgactgtggtgaagcgacgcagcatcagtttatgcgatcggcgcttaagcccggcaagctggaaaaaatctttattactcatttgcatggcgatcacatctttggcctgccgggtctgctcaccagccgttcgatggcgggcctgaccgagccgatgacgctgtacggtccgaaaggattgcgccagtttgtcgacaccgcgctcagcctgagcggctcttataccggctatccgctggagattgtcgagatcgaagccggtccggtgctggataacggtgagtttcgcgtcactgcttatgcgctaaaccacgtggttgagtgctatggctaccgcatcgaacagcatgataagccgggctttcttgacgcac

SEQ ID NO: 17589 - DNA, 308 bp, Zea mays
  Coding DNA Sequence Number=SeqID_3186
cggcgcgcatgctgttcgacatggcgctgcatgatttactggcgcagcaggccggcgtgagccttgcgcactggctcggtgccgctgcggccagccccggttacccgaccaaccagacgctgttctggggcagtgaagcgcaaatgctgacgcaggctgaacagtacgttgcacgtggctttacccagctcaaactgcgtaccggcgtggcggatgtggcgaccgatctggcgcggttgcgcgccctgcgcgcccgctttagtgaggccatcacgctggcgattgatgtcaacggtcagtggtcactg

SEQ ID NO: 17590 - DNA, 287 bp, Zea mays
  Coding DNA Sequence Number=SeqID_3187
ctgaagccgttgttgcgtcgcgccccggtctggagcgagcgtgatgtacgtaccttgctggccagctacctggcgcagcctgccgatggcacgctggtcgatacatggctgcaacgccccgcgttgcccctgagcatcaccctggccgatgccgccggcacggctgacctgcaattgctcagcctgctgcgcgtgctgccgggccagcgctatgtgggcgccggtgtttggcgcggtaccccagtgctggccaagctgctggtcggtggtaacgctgcgcggcattt

SEQ ID NO: 17591 - DNA, 386 bp, Zea mays
  Coding DNA Sequence Number=SeqID_3188
cgcaaagtgatgcatgcgctgatcagctggggcgtcaccattcagggactggtgtacgccagcgtgatcgtggtcggggcgccgatggtgatcaacggcgatatcaccaccggggcgattgtcgccgcgtcgctgctgtcttcgcgcatgattgcgccaatggcgacgctgtgtggcgtgctggcgcgctggcagcaggtaaaagcggcgaagagcagcctcgatgcgctgatgaatctgccggtggagaacagtaaagacgaaacgcgcattcactgtccggtgctgtttggccactatcagttcaccgatgccatgttccgctactacagcgattcgctgacggtggcgctacgcatcaagacgctgaccatcaagccgggtga

SEQ ID NO: 17592 - DNA, 164 bp, Zea mays
  Coding DNA Sequence Number=SeqID_3189
gctctgagttgaacgcagatgtactcagaggccacattgtacatagcaggtctccccaggcgctgactgcgctagaatataggaacagcgtcaccgtgtagggcatggctactgtcattccaaactacgagaggcatcgtttccgcaaagatccgcttgaatcc

SEQ ID NO: 17593 - DNA, 342 bp, Zea mays
  Coding DNA Sequence Number=SeqID_3190
ggtggccaaatctgctgctatgttatgtcatgatatgcaacctttgaaacctgctgaaatggttgaacatctgaaacaaggacttggaaaggaggggcagatcgtacatatccaagagatatcatctagagaggcatcatttacagaacttccttgtaatctttcagaagctatgagagaagcgctgaagagtattggaatatctagactgtatagccaccagtctcaagccataacatcctctatttctggaaggcacattgtcgttgcaacttctacatcaagtggaaagtctctatgttacaatattcctgttcttgaatgtctttcccaagacttgat

SEQ ID NO: 17594 - DNA, 206 bp, Zea mays
  Coding DNA Sequence Number=SeqID_3191
agtacaggccagcaccaccggtcagcaggcggactccacgcaccgtacatgcagcacaacagttcatccgctcgacaaaccggcttcgcccgcggttggtgcgtgtggcggtgtcatagatcccgctcgccaccaggcggacgaggcagcagtccgtgaccgcgacggagccggcgattccgagcaacttcctgtgaccgatctcg

SEQ ID NO: 17595 - DNA, 303 bp, Zea mays
  Coding DNA Sequence Number=SeqID_3192
aaaaatggctgtttgccgcgctgaccgcgctggtgatgattctggttctctgggcatattcggcgtcacgcagtaaacccaatccgctgatgactgccgcggtgcgtcagggcgacatcgaaaacgtgattgccgccaccggcaaaatggacgcgattgagcgcgttaacgtcggtgcgcaggtctccggtcaggtgaaaaagctgtatatcaaagccggcgacaacgtgcgtaagggccagctgatcgcggagatcgatgatcagccgcagcgcagcgatttgcgtaatgcgcaggcggcac

SEQ ID NO: 17596 - DNA, 398 bp, Zea mays
  Coding DNA Sequence Number=SeqID_3193
gtgcaatttccccaccaggaattgcctgctaagcatatagttttgccggaggccgtcaagggtctaaacaagggcatactgccaaagtatgcacggagaatgttgatcggctcaattgcgccaatatgcacatacaacgagtgcagggggtgtcgattcaagtgtactgctgagcaagtcccagtggatgcaaatgaccccatgaacagtgcttaccactacaagtgtgtttgccacaggtgatcttcaatgagtaggaggagctgctatgttatggtgtgtcctggagaatagtagtattttcctccccgttcttggttctcccttctccctcttcgcttccttctattctttggtttctctgttgaaaagaggctcctttgtcttcatttctattt

SEQ ID NO: 17597 - DNA, 456 bp, Zea mays
  Coding DNA Sequence Number=SeqID_3194
tacggcgcctcacatcgcgggttgccgcttcacgtgatcgtgtcgatcaccgaatcccagcttcgcgcagatgtacctggcggtgttcgacgaccacaccggcgaccgctgtacttcggacgggccaagcggctcgcgtcggagtcccagcggttcgtgacgttcgccgagtacggcggctgctccaaacccggctgcccgcgcccgttctcccacaccgaagcccaccacgccgaacaagactgggccgacggcggcatgactgacatcaccgacctcgcgccggcctgcggaccccacaaccgagccgtgcacgacggacccggcggctggcgaaccgagaagatcctcgacggccccgaccgcgggaagtacggatgggtcgccaacggcaccaccgacccaccccgaaccaaccacctccaccgacccgaccggatccttgacgacaccgga

SEQ ID NO: 17598 - DNA, 347 bp, Zea mays
  Coding DNA Sequence Number=SeqID_3195
atagtttattggatcatctgcaacattgtatcttgaacaagtatcacatcaaagtaaagcggaaataaataacaggggcaatctcccacaggaagatgaccggcgcatcgttagacttagaattcgccgtcgacaagatctccatcaaagtctccagcatcaccctcttgctcaaacgcgtcctgcagatcgtcttcgaacggattcggttcgtctaccacaccgtcagcctcttcactgtctcctatgtgcagaacgatgggtgagcagggagggtcgtcgagcagaggggtttggccggcagcagttgcctggggtcgcggcttcactcggctcaacggcgttct

SEQ ID NO: 17599 - DNA, 491 bp, Zea mays
  Coding DNA Sequence Number=SeqID_3196
gtgctccgctactcagattagcctactgcaacgcacaacagcagcaccattccactgcgctgcacagcacaaccgtcacacgagacgagacctcgcaccagccacgactactcgcctcccctttcccctcctcctcgtgctctcttgtcaacccccaacgcagcacgcacaccctctcctctctcccgtcccctcacgcatccctgccgggtgccggcctcgtacaagcaaaagacagacagttcccgcatcaaccggctagccagctagcccttcaggacctcgctgcattccccatgggaggcgccatgaggcagctgcttagctttctgggagcgatcaatggccgcccgaccccagggagaagacgaacgacgacgctgcggcggcgcctggtgcgggacggtggagctgaggaggagcccaagtttaccgcggcgattaataactctgatgaagctgcccgcctgcctgcaggagtgcagcatgtg

SEQ ID NO: 17600 - DNA, 461 bp, Zea mays
  Coding DNA Sequence Number=SeqID_3197
atcaccggacgcaaattcagcgccaccacaaaaaccagtaaagcaaacaagccaatagcagataagcgggtgcgcacaaagcgacacattgcccgccgtgaactgatgagaattaacatgactgaccacgtagattttgtcgttgcgcaatgggccagcgccatgccggagctggacgcctcttccatggcgatttttggccgcatgctgcgcctgatgaagcatctggcgaaaaagcgcgctgaggcgctggcgccctttggttttcgcgatggcgaatttgatgtgctggcgacactgcggcgtgccggcgcaccttaccgcctgtcgcccacgcagctctacaaatcgctgctggtcacctccggtgccatgaccaaccggcttaaccggctggaagaagaggaattgattgcgcgtgttgccgatgccgatgataagcgcagcacgctggtgacgct

SEQ ID NO: 17601 - DNA, 570 bp, Zea mays
  Coding DNA Sequence Number=SeqID_3198
ccgctttggcggcaaccagatggaagggcaggtcgcgccggagatcggcaacctgcgccggctccagttcctgtccttgaccataaactcgttcaccaacatcagcggcatgttctggaacctccaggggtgcgagaacctcaccgcgcttctagtatcgtacaacttctacggcgaggccctgctggacgccggctgggtcggcgaccatctcaggggtctccggcttctggtgatggagaactgcgagctgacgggtcagataccaacgtggctgtcgaagctgcaggacctcagtatcttgaacctcggcgacaaccgcctcaccggcccgatcccgcgctggatcggcggcatgaagaagctctactacctggacgtgtccggcaatctgctgtccggtgggattccgccgtcgctggcggagttgccgcttctcacgtcggagcaggccatggcaaacttcagcacaggccacatgccactcaccttcaccctgacgcccaacaacggagcggcgagcaggcaaggccgcgggtactacctgatgacaggcgtcaacacgacctt

SEQ ID NO: 17602 - DNA, 387 bp, Zea mays
  Coding DNA Sequence Number=SeqID_3199
tactcggcacgaggccttccaaaaaaagcgcacacgcctttcgtgcacctccccggtcccttccccgtcccccccccccgcccccttcccccgcctccgccctcgccgacgcccgacccccacaccggccgacgcgcgagccccggctccatcttcacaccagcataaatgggtgatgcgtgtttctcaacacagctaattgatggagaatgggctcttcaacgtctccggattggagaacttcatgaacgactgtcagattgggtgaatgcgggctgtcctatgctgttgtatcaataatgggcccgcatagtagtgggaaaagtaccactttttgaatcatctttttggcaccaattttagggagattggatgccttcagaggaa

SEQ ID NO: 17603 - DNA, 460 bp, Zea mays
  Coding DNA Sequence Number=SeqID_3200
gttcagtcggtagtggattacgccatctacatgctcgacccgtccggccatgtggtgtcgtggaacgcaggtgcgcaacgcatcaaggggtatcgtgccgatgaagtgatcggcaagcatttctcgttgttcttcaccccgcaggattgcaccgaaggccgcccggagcgcttgctgcgccaggcgctggagcagggcgtggcgcaggatgaaggctggcgtgtacgcaaggatggcacgcagttctgggcgctggccgcgctggatgtgatccgcgatgaccagggccaggtcgtcggcctggccaaggtgacccgggacatcaccgaccggcgcgagtcggcgctgcaactggatgcggtgcgcgctcagctgttccaggcgcagaagctggaggccctcggccagttgaccggtggcctggcacatgacttcaacaacctgctgaccataataatca

SEQ ID NO: 17604 - DNA, 269 bp, Zea mays
  Coding DNA Sequence Number=SeqID_3201
gtatctactgattgtctttttgcctttggtcgggaggtccggaaccgggtttttcggacggtttttaggatttgaaggaaccggtaaaaaggcccccacggggggttccattttcttcggttctatctttgaatgccttttaagaagtcgccctgggaggtagggcctggtaactcaaaaaaggccccaggatttccacggaaaaggtttaaggcttctgggggtttcttggcggccggtaaagccccgggatgaatgccggagtagat

SEQ ID NO: 17605 - DNA, 507 bp, Zea mays
  Coding DNA Sequence Number=SeqID_3202
aagtttcactcaccggtgctatctcagcttgcgctcagctcggtgcggtgaagcgagccgcctgggttcaggaaattgcagaacggaatggtcttgggaggaatgtggttgtcgggtcagggttggtggacatgtatgccaagtgcggtctcattgacgaggcgcgcaaggtttttgaagggatgcacgataagaatgtgtatacctatagctcaatgattgttggcctagcatcgcatgggagggccaatgatgtaattgctttgttcaatgatatggttaggagggcagatgtggaacccaaccatgttaccttcattggagtattgacagcctgcagccatgcaggtatggtaaaagaagggcgctactactttgcgcagatgaaggacaggtatgggatattgccttctgcagaccactacgcttgtatggttgatttgcttgcacggtctgggctggtaactgaagcccttgaccttgtgaaatcaatgactgtggagcctc

SEQ ID NO: 17606 - DNA, 241 bp, Zea mays
  Coding DNA Sequence Number=SeqID_3203
ccctgtgaacgtcgcaccgcgcgatccggcgatccgccgcgtgcggccgagcgtgcaggacgccgcgtgcgaacacgcgctgttcgacctgaaccgctattaccagaagctgcgccgcaagatgcccgcgcattcagcggcgacgctcgtgcgggcgcagcgcgcgtgggtcgcgttccgcgatgcgacggcgccgctcgtcggcgaggacggccgcgtcgacctgatcggcgcgcgcatc

SEQ ID NO: 17607 - DNA, 301 bp, Zea mays
  Coding DNA Sequence Number=SeqID_3204
gttcctgggacgcaaggacagccccaacttcacgtggttcgtgtaccacggcaggcggttcatggacgccgacggcattgtcgtcaacacggtgatcgagctcgagccgggcgtgctctccgccatcgcaaggcgcggggccggctgccctgctcccccggcgctgtacccggtcggcccggtcatctcgttcgctccgccggccgagccgccgcacccgtgcgtgcggtggctggagacgcagcccgcggcgtccgtcgtcctcctctgcttcgggagcagggggttcttcggcgcggcg

SEQ ID NO: 17608 - DNA, 261 bp, Zea mays
  Coding DNA Sequence Number=SeqID_3205
tggcgcgggcgctgaaccgcatcgctccccggccactgccctcttcgtcctgggcgactccacggtcggctgcgccgcggcgacggcgagcagcattctgtcgctcaacctgaccaccaccaccaccacgctgccgtcctcgctctccggcgagccgtgcctcttcttccacgaggcgcggctccgcgtcccggacctcctcgcggccaagatgggcctcccttcgccgcccccgatctcaaagctcaacggcacagcgtc

SEQ ID NO: 17609 - DNA, 273 bp, Zea mays
  Coding DNA Sequence Number=SeqID_3206
ggagaggcgcaaaccacaagaggaaagtgagcaagagaggccgcaggaccatcggcagggccctgggtcgagctgggacaccgagatacaacggaagaagcgagggatgcagaagccaaggaaacccgcggcgaaagacaccggaactggggggaaaaccgtgaccgacaaccacacaaagggaaggaaccggggcatacggggaaccgacaccaacgcgagcacaaggcgcaccgagagcaggggcctcagcgacaacaacagaaagcgagg

SEQ ID NO: 17610 - DNA, 210 bp, Zea mays
  Coding DNA Sequence Number=SeqID_3207
tggtgctgtcccgacggcagttgggggcactccgccgacaccactctcaacaggctcctgctgctgggagccagacccgccggcggacctgatatccggtggagcaggtgcgaccttggggcaggaggggcagcacgcccttccagcgaccctgcaagcggggcgacctgtgctgttgttactgccgctcctgtggttgttgatgctgtc

SEQ ID NO: 17611 - DNA, 174 bp, Zea mays
  Coding DNA Sequence Number=SeqID_3208
aatgatgaattgtggtttgagtataaatgtaaatgtaaaggtttattatgcatatatttaggcaagacaatttagatcatgttttgttgggtgatggtagatttggcaggaaaattgagttccatctgcaaggagggcgtcaaaaaaggcttgtttttcaagtaagagtatcta

SEQ ID NO: 17612 - DNA, 335 bp, Zea mays
  Coding DNA Sequence Number=SeqID_3209
tcgctgacgcgcaccgcgggttccaggaggtgctgctcgcgctgcggcgcgacgcggccgacgcccgcctcgccctccgcaggcgcgacgccgccaggctcgcgtccgcgtcccgcgcccagcgcaggggcgacagggagctcgcccgcctcgccgccaggtccgccgcgcgcctgcctgctggggctgggctcggcgggagcggaaccgccgaggaggccgagatggctgccgcgctcatggacgccgcggccgccagcgccgccgcctccgccgccgtgttctcggccgtcgcgtccgtgtctgccgccgtgtcgttgtgctcgaacaagaag

SEQ ID NO: 17613 - DNA, 211 bp, Zea mays
  Coding DNA Sequence Number=SeqID_3210
atgagacggcgagcgggcttaagcagggaccatgcgaggcgcatacgagccccatgcctcgatgctggggacaccgccgagggaaccaaggagacttctccacctcaatgcgaccggcacactgacggcatcaaagcacgggctggaacacaggggtccgaagtagcacggacgccgaccagggaaggcggcatagccagacgaagacaag

SEQ ID NO: 17614 - DNA, 169 bp, Zea mays
  Coding DNA Sequence Number=SeqID_3211
tcgacatggtcgcagacgagctcaccgagcgcgcgcgccgctcggtctccgtagcgcggagccacaccgtacgtattcctgctcgtgccgcagttgttcctagtcggcgtgcgcgaggcctcgcgctacatcagacattattacttattcttgcacgagtgcactaggg

SEQ ID NO: 17615 - DNA, 237 bp, Zea mays
  Coding DNA Sequence Number=SeqID_3212
tcttcagcgtgctccggtggacggaccgggcccggtcaggccgcgcatgcgtgaaggggatcttggagcagcactgccggcttgcagacgaggcctgccggcgcctcggcgccaagcagtacctggcccgacagccgtcgccggcgcactggcgcgaccacttcggggcgagctgggaccggttcgtggcccggaaggcccgcttcgatccctcgcacgtgcttgggccgggtcagg

SEQ ID NO: 17616 - DNA, 365 bp, Zea mays
  Coding DNA Sequence Number=SeqID_3213
gggaagcccgcacgaaagccacggggaagacaccgacaacggggacgccggcagcgcgcgcaagaagcacgaaagcacacccgacgcgaacgactggatgggcctggacggggcgcacaacagacccatcggctgcgacaggctgtacaccggcgccggggagacgcacaacagggagagcaaagaggaccgcaacggggggggcgacaccgacgcacaagagcggaaggggccgctgcaccacagcacactcggaggcgacaacgacggggggggcttcgcggaccacaacgccaaggaagcgcacgtcggccgaccacacgggagcgagaacgggcagcggagcaaggcagcgccccaagaga

SEQ ID NO: 17617 - DNA, 248 bp, Zea mays
  Coding DNA Sequence Number=SeqID_3214
ctgttgtcgagcgaggcgttttttttgctgcacgacatcgtgtccgtggacgctgccgggaccgggggcagcgccagcgcgcacgtgtcgaacgcgtcgtcgctggccccgagcgtgagcagctcccgcgagcagagcccggaccggggcggcgtcagcgccagcctcgccatgctcttcgccaagcccgaggtggcgcccaggctggcctgcccgctgccgctggagtcctgggtctcgccgtcgtc

SEQ ID NO: 17618 - DNA, 564 bp, Zea mays
  Coding DNA Sequence Number=SeqID_3215
gtaggccgaggcttgatcatatatatgttcaacataaataacactagctagataataaggcaagaagtactgctactgatgaagtcatatatactaattgaacgaaaagtactgtgaccgactgatgccacctactggctttccgctgcagctacataacggcatcgcatcacatcacaggagaactgatgtggagcaccgagacgcggagataagcggttcatatactacataagtaaatatatgcaaacgttaatttaattagttaaaataattaattgagaaatttgaaggaagggagccttgatgctgggatggttcgggcgaccttcgcgctttggccgctagactgcaaaacctggagtagacccaccatccgagaaagcccgcaacggccatacatcctatgactgcgatggcggctatggcacctgctttgagcccggggcgttggccattgctgttgccgagagctggcagcggtggggacacaacaatgaagtagtgattaagaaatgtggtgctgcacaccagcaacctcacacatgtgttctcttactcaag

SEQ ID NO: 17619 - DNA, 559 bp, Zea mays
  Coding DNA Sequence Number=SeqID_3216
ctgcggtgtacgtcgtcaagcaggcgcgccacttcgcgccggacgccaccgacgtcgcgtcgggcttcaacatcgccgcgttcaacctcggcgtcgcgggcggctcgtcgctcggcggcctgatcgtcgcgaacgtcggcctcggccatacgccgtggatcgccgccgtcgtcacgctcggcgcattcgcgctgaccgcactgagcggccgcttcgaccgcggccagggcctgccggaacgcacggccgaatccgagcgacacagcatgaacgcatcgacccaacgtccgccgttcgccggcaagactttcgaagtccgttacgacggccttaccgcactcaacgcctatgacgaggacggcgtccacatgcgctacgagatcaccgaaggcgcgtacgccggcgcgaagggcgaagtcgcctatacgtggcagcacgtcgccggcgagacctacgcgatctcgtggcaggaagccgatcgcgcgaccgtcgtgcatatcgacgatttcgccgccggcacgtcgcgctcgttcttcaccgcggcatcgctcgatttcta

SEQ ID NO: 17620 - DNA, 250 bp, Zea mays
  Coding DNA Sequence Number=SeqID_3217
gtttggctgtattcagactggtcttgtaatgtctccgttaagtaataaatcattgtttgctgaaaaccaccagaaccctttcccaacaattttcttaagatgtcttaacctgtttttttttcaactgacgaccctttacaaatttacccgacaaaggaaccactggttgaagaataaagtattgcggcttcactttggaagctgagctcatgttgcttgtatgaattcactagaaattttgtctaccagt

SEQ ID NO: 17621 - DNA, 546 bp, Zea mays
  Coding DNA Sequence Number=SeqID_3218
ggcgacgtgatctccggcggtaacttccacgccgagccggtggcctttgccgccgacatcatcgcgctggcgattgccgaagtcggtgccatctccgaacgccgcctggcgctgctgctcgataccggcctctccggcctgccgcccttcctggtgcgcgacggcggtgtgaactcgggcttcatgattgcgcaggttaccgctgccgcgctggcctcggagaacaaatcgctggcgcacccgggcagcgtcgacagcctgccgacctcagccaatcaggaagatcacgtatcgatggccacctacgcggcacgccgcctgggcgagatgtgcttcaacaccgctgccgtggtcggcattgaagcgatggcggcggcgcagggcatcgacttccaccgcccgctgcaaagttctgccgcgatcgaacaggagatgagccgcattcgtgcgcaggtcgccttcctcgatcaggaccgtttactggcgccggacattgatgccatgcgcctgtgggccagcagttacgtctggcctgaaacccttact

SEQ ID NO: 17622 - DNA, 295 bp, Zea mays
  Coding DNA Sequence Number=SeqID_3219
ggctccctcgcctacggctgaggagattaccgaaaagtaggggctcgagttcggcctctggaaagtgttcagctccaaggaagaggaggagggagccgaggggaagaagtcgcggacggcgaaggagctcctggccaagtacggcggcgcgtacctggccatctccatctcgctctccctcgtctccttcgccctctgctacctcctcatcagcgccggcgccgacgtgcagagctgctcgccaaggtgagctgctgctagctcaagccagccagccgggtaggccaagtgtctc

SEQ ID NO: 17623 - DNA, 574 bp, Zea mays
  Coding DNA Sequence Number=SeqID_3220
gtcagacagcgtacagccgcagcagcccgccgcacagccagctgtcgcgcagcctgccagcagcgcccaggtgaaagtgtatgacaccagcagccagccgattgctcaggtgatgcagcaggcgcagcaggatggtgccaccctggtggtgggtccgctgctgaaaaataacgtggaacaggtcgccaacagccagacaccgctgaacgtgctggcgctcaacgagccagagcagatccagaaccatccgaatatttgctattttgcgctttctcctgaagacgaagcgcgtgatgccgcgcaccatatctgggatcagggcaaacgccagccgttgctgctgatgccgcgcagcagctatggcgaccgcgtgggcaaagcgtttgcgcaggagtggcagaagctgggcggcgcatccgtgctgcaacagcgtttcggcggtgtgggcgagctgaaacagggcatcaacagcggctccggtattgcactgagcggcacgccattgacggtacagccggaccagccgcagggcgtggcggtcgccggtcaaaaattaaagcaccgcagaccagcg

SEQ ID NO: 17624 - DNA, 596 bp, Zea mays
  Coding DNA Sequence Number=SeqID_3221
ctcattttatcctctgatggagataaattgaacacactgatgtgttgagatttaattatatcttctgtcatgggctgggcttatggccccagatggcagtatgccagatcagatccgaccttatatactgctgctgccctggccggccgcccgtacccaacagattgcccatgacaactttcagtggcagtctagtttgtaatcaacaaaattatatacataatttatttcctaaaaaaaaaaaaaaaaaaaaaaaaaaaaaaaaaaaaaaaaaaaaaaaaaaaaaaaaaaaaaaaaaaagaaaaaaactaaaataaaaaaaaaaggcaaagaaataaaaaatctaatagaatacctaacttaaattcaatggccgggcctttacaaaaaaccagactggaaaaaaactgactttacgtaacttaattgacttgcatggcataaaactttggttagatggggtaatatccaataggcctggcccgatctgacttcccttcagattggcagcccaaatggcaaagggaacgcgccctgcattggagcataacttaagcgcgtgaggaggaccggtacactgggaccgttacactagc

SEQ ID NO: 17625 - DNA, 259 bp, Zea mays
  Coding DNA Sequence Number=SeqID_3222
gcggttaggacacgcggtggccaacggcgagggcacgtcggcggtgagcagctttatccacgacggtgagcaaggggaggggtaccgcggctggccgggatggcgtccagctcaccggcggcggggatttttaccgagctatgtttatccgatggccacggcgcacgaatcacggcgagcggcaatcaacggcgacgggccaccggcggtgagcaaatggatgggatcttcttcagttacccgatactgtaccatggca

SEQ ID NO: 17626 - DNA, 566 bp, Zea mays
  Coding DNA Sequence Number=SeqID_3223
gtcacgcgcaattgcaaagtaccgtgttcgcaagtacaagacgagcgaagtcgacctgctgagggaaggcaacctcaaggaagcggcaatggtggacgtatggacggaggtcgacgcgcacgcctacaaccctgccatctcgccgatcgtgtacgagtgcctcatcaacccgatcatgctcggcctgccgaccaaccagaaggtggtggacgagagcgtggagaagctgaagaaggtgctggaggtctacgaggcgcacctgtccaagcacaagtacctggccggggatttcgtcagttcgcggacctcaaccatttcccctacaccttctacttcatggccacgcctcacgcggtgctctttgactcgcacccgcacgtcaaggcctggtgggagaggctcatggcgaggccggccgtcaagaagctcgccgcagaaatggttccgaagaagctgtgatttgctatgggggatttcgcgtcctgggatcagatcactgatctgtacggcgttttcttgttggtgtcgcgaataaggcaatgagcttgtgttgctggaattgcatt

SEQ ID NO: 17627 - DNA, 521 bp, Zea mays
  Coding DNA Sequence Number=SeqID_3224
aaagtcctgacgatcaatacccataaggggttcaccagctttaaccgtcgctttatcctgccggaactgcgcgacgcagtgcgcgcgacctcggcggatatcgtctttttacaggaggtgatgggcacgcacgccatccactccgctcacattgaaaactggccggaaaattcgcactacgaatatcttgccgacaccatgtggcacgatttcgcttacggccgcaacgcggtctatcccgagggccatcacggcaatgcgatattgtcacgctttccgatcaccgaataccaaaaccgcgatatttctgtcgccggcagtgagaaacgcggcatgttgcactgccagatcagcctgcccgatcggccggaaccgattcacaccttgtgtgtgcacctcggcctgaaagagaagcatcgtctggcgcagatgcgcatgatgtgtgaactgattgagtcgctgccaccggatgcgcccctggtggtggccggcgattttaatgactggcaggtacgcgctaa

SEQ ID NO: 17628 - DNA, 204 bp, Zea mays
  Coding DNA Sequence Number=SeqID_3225
tcgtttcgaaaattgagggaggagccatgctccactttgccctctctgggtccgctcccgatggaaggcccttggcatcggcgtgcacgccgccgaaccactgttggagcgccctgccgcgagcatgcaggtgcagcacctgcattgcccttccccgttgcagtacagtgttctgcttgggttgccagttgtatttctccatgc

SEQ ID NO: 17629 - DNA, 215 bp, Zea mays
  Coding DNA Sequence Number=SeqID_3226
acaactcaaggccttccatgccgtggccgttcacggcagctttacccgcgctgccgaaaaattgtttctgacccagccagcggtgtcggaccaggtgcgcaaactggaggagcgcttcggcgtcttgctgttccaccgcaacaagcgttcggtgcagctcaccgaccttggcgagcgcatgatgggcatcagccagcgcctgatcgctgcgaggc

SEQ ID NO: 17630 - DNA, 479 bp, Zea mays
  Coding DNA Sequence Number=SeqID_3227
gtattatcggaaccatctccatcggccttatcgtcggcctgctggcccgcttcatcaagccgggcgactacagcatgggctggataatgaccatcttgctggggattgccggctcgctgctcgccacctacggcggccaggcgctgggtatctaccaggccgggcaggctgccggtttccttggcgcgctgatcggcgcggtgatcctgctgctgatgcccaagtcggaccagcaggcgctcgagcaaatgcctgatatcgaccacaactcgccggaagccatgggcacctttaccgacaagggcggcctgaagcagagcaagggtctgccggcggtgatgtactcgaccaagaccgtggcggccatgaatggcaaggatattcgcctgggcggctacccggtgcctctggagagcgatgccaagggtaacagcacgttgttcttcctggttccgtacccgggcgcgtgcattcatgtg

SEQ ID NO: 17631 - DNA, 404 bp, Zea mays
  Coding DNA Sequence Number=SeqID_3228
atgaaaatcacccgcctcgaaactttcgtcgtcccgccgcgctggctgttcctcaagatcgaaaccgacgaagggatcgtcggctggggggagccgatcgtcgaaggccgcgcgcacacggtcgaggccgcggtgcaggaacttgccgactacctggtcggccgcgacccgctgctgatcgaggatcactggcaggtgatgtaccgggccggcttctaccgcggcggcccgatcatgatgagcgcgatcgcgggcgtcgaccaggcgttgtgggacatcaagggcaagcatcacggcgtgcccgtgcacgcgctgctcggcggccaggtgcgcgaccgcatcaaggtgtattcgtggatcggcggcgaccggccgagcgacgtcgcgaacaacgcgcgcgcggt

SEQ ID NO: 17632 - DNA, 382 bp, Zea mays
  Coding DNA Sequence Number=SeqID_3229
catcagccaggctctgcacagttacttcgcggtcagtgatgtgcgccaggcgcgggtcgaaggggtggaggggctgagctatatcgagaccctggctgactgggagcagcgccagcaacaggggccgctggcgtttgccggggagactgaccggatctacctggcgaccccgcaaacccttagcatcgtcgacccgcattgggagcggcgcattaccttgaccagcagcgggtcgcgctcggcagtgatctggaacccatggactgaacgggccagggaactgccggacatggccgacgatgggtggcagcggatgctgtgcatcgagacggcaaatgtgtgggatgacctggtggaattgaaacctgtgggcagcagctcg

SEQ ID NO: 17633 - DNA, 472 bp, Zea mays
  Coding DNA Sequence Number=SeqID_3230
atgtcagtctcgcaggtcgccatagtgtccacgcctgtcgctgtttccgcctcgcctgccgggtctccggtcgagcccgtcgtgccggtcaccgtgcgctggcgcggcagcgaggcttaccaggcgagcttcgacgcgatgcgcgcgttcacagacacgcgcacggccgacaccggcgacgaaatctgggtcgtcgagcatccgcccgtctacacgctcggccaggccggcgacccggcccacctgctggtggccgacagcggcgtgccgctcgtgaaggtcgaccgcggcggccagatcacttaccacggccccggccagatcgtcgtctatctgctgctggaccagcgccggcgcaagctgatggtgcgcacgctcgtgacgaagatcgaggaggccgtgatcgaaaccctcgcggcgtataatctcgatacggtccgcaaggcgggcgcgcccgggataaacgtagcat

SEQ ID NO: 17634 - DNA, 289 bp, Zea mays
  Coding DNA Sequence Number=SeqID_3231
gggacagcaccgaagtccgcgaccggggccgggtcgtgttcctgagcagtcgcgcaggacgagtgcgacgagccgcctcggccggcctcgtgctggctgccgtgcctatctcggtggccggcatcgtcgcggccccgcaggcggcccacgccgccgagcagctgcccgagtgcagtggcgtctccgccgagcaaccgaaggggacgacgctgatcaacgtcccgacgaacgatccggtgacccagatcggcgtgccacgggcacagcagtggttgcgtgggcacaggac

SEQ ID NO: 17635 - DNA, 352 bp, Zea mays
  Coding DNA Sequence Number=SeqID_3232
agcgcactgattgtggtggatatgcagaacgcctacgccagccagggcggatatctcgatctggccgggtttgatgtctccgccacgcagccggttatcgcccggattcatcaggcggtcaccgccgcccgcgcggcgggaatgcagattatctggttccagaacggctgggataatcagtatgtcgaagccggtgacgccggttcgcctaatttccataaatccaacgcgctgaaaaccatgcgtcagcggccggagctgcacggcaccctgctggcaaaaggcggctgggattatgcgctggtggatgaactggtaccacaagccggcgatatcgtgctgcccaaaccgc

SEQ ID NO: 17636 - DNA, 390 bp, Zea mays
  Coding DNA Sequence Number=SeqID_3233
ttaggcacagtcctgacgacatgtcatttgagcgtacacgtggcctacgaccaggcggcgtaccgtcgccgcggggacgcggcgcggctcaacttccctgacgacgcggcgtccagggcgacgctcgaccccgtcgtcaacgccaagctcgaggccatcagtgccaccatcgccaccgccgccgcgtcgtcgtccaagaatgccgccagggccaagagcaaggccgtgccaatcaacgcacccatcctggaagcggtggcgtctccgagcagcagctcctcctccgacgaaggctccgggtcagacgacgagatgtccatgtcctcgccctccccgacgccggtggtggcagaattggggcagcttgacttcggcgaggtgccgtgggac

SEQ ID NO: 17637 - DNA, 599 bp, Zea mays
  Coding DNA Sequence Number=SeqID_3234
tttgcccaactgtctgatcaaagttcattcccccgttggtgttggtggtgatgatgaacatgttctcgtcgatccaggattacgagaatttcgaggcttacatctgcaaggcttacaagggcactccaccgaaggcctgtgagggcctggaacgtctgcagatggccctcgagacagccgagggccgccctttttttgggtcatgtgaagttgaagcagcgttccatctcgttgtccggttttttattgtacagtaatagctaatatgataatgataataattacatttctaaaaaaaaaaaaaaaaaaaaaaaaaaaaaaaaaaaaaaaaaaaaaaaaaaaaaaaaaaaaaaaaaaaaaaaaaaaaaaaaaaaaaaaaaaaaaaaaaaaaaaaaaaaagaaaaaaaaaaaaaaaaaaaaccaaaaaaaagcaaaccaacctgccggctcttaaacttggttctttccaaacacaaaaactcgagtcccctggcccgcttccccccaacgggaaaaacccgggaaacccccccgttttaaaaacccttaaaggaccagccccaatttcccccctttgccaaatttgacaaaactcccaa

SEQ ID NO: 17638 - DNA, 211 bp, Zea mays
  Coding DNA Sequence Number=SeqID_3235
ttgaggcgcctttttataccacccgaacccacttgatggtcggcgagttcggggtcaactccatggccggggtgttccattggatcatgcagaacgaagggtggaccggcctgttccgcggcaacgccagaaacgtcctgcgcgtcgctccgagcaaggctattgagattttcacctatgaaacggtcatgtaatttcctaaccccgaagg

SEQ ID NO: 17639 - DNA, 301 bp, Zea mays
  Coding DNA Sequence Number=SeqID_3236
tgaagctgatactggccgaaccgttcaagcgtctgtgggccgagcgtgatgccttcgagtccgtggaggcgctgcaaggcgaggtctatcgcgaactggaagggcgccgcacgctgcgcaccgaggtcgctggcgagggcttcttcgtgaagatccaccgcggcattggctggggcgagatcttcaagaacctgcttaccgacaagctaccggtgctcggtgccggctcaggaatggcaggcacatccagcgactgcaccaggttggcgtgccgaccatgactgccgtcgcctatggcgag

SEQ ID NO: 17640 - DNA, 544 bp, Zea mays
  Coding DNA Sequence Number=SeqID_3237
atgcccgcggacacggcgacgttcagctacgaggagctggcggcggcgacgggcgggttctcggaggcgaacctgctggggcagggcgggttcgggtacgtgcaccgcggcgtgctcccggggcccggcggccgcgtgaaggaggtggcggtgaagcagctcaaggccgggagcgggcagggcgagcgcgagttccaggcggaggtggacaccatcagccgcgtgcagcaccgccacctcgtctccctcgtcggctactgcgtggcgcagcaccaccgcatgctcatctacgagttcgtgcccaacggcaccctggagcaccatctccacggtcgtggcatgccggtgatggactggccgacgaggctcaagatcgccatcggcgccgcgaagggactggcgtacctgcatgaagactgtcacccgaggatcatccacagggatataaagtccgccaacatcctgcttgactattcgttccaagcacaggttgcagatttcggcctggccaagctcaccaacgacacgaacacgcatgtctcca

SEQ ID NO: 17641 - DNA, 178 bp, Zea mays
  Coding DNA Sequence Number=SeqID_3238
agcagacgcggctgcgctgtatctatctcaacaggatcagcatttgtattcaccgaggtgatgcttatgatcggcatcggccgggagtgctgccacatgagcaactggcggaagccacctctagtgtgccaccagatgcgcccggagatattctcggcatcggtgatactggagctca

SEQ ID NO: 17642 - DNA, 173 bp, Zea mays
  Coding DNA Sequence Number=SeqID_3239
tgggtcccctgatccactgagccgtcggaagttagtagtagcagccacatgtactacccaggtgcagctcctaaaattcctaactgttcatggaaaagggtctgcttgcgcttgtatgcaacatttgcatagtccgtggctcccaacctcttttgatagtcagagtctgtgtt

SEQ ID NO: 17643 - DNA, 529 bp, Zea mays
  Coding DNA Sequence Number=SeqID_3240
tcgtcaaaaccgacatcgccggcaacgtactcaaacgtagcagcgccacgcgcttcaagttcgcccgcttcggcggcccttgtccactctggaatgtctaccgcgctttcgtacagcccggccgcttgatggtgcagcttgcccgcaccccggaccaggtgtcctatctcaacatcgcgcgcaccgtgggccgcggcggcggggcctatctcagccggccacgcaacgtcgcgatcgtcatcggctgcgaggtctcctacgccgcgcagaccgtctatgcgaccgggcttgatctgtcagaccccaccgtcgccgacccgatcggccccggctgccgggcctgtgaacggatcgactgccgtcaccgcgccgtgccaccggccagcggtacgctggatacaggcaccgtggaacgtggtgtcgagtttgccgtggccttgccgacccagcggacgccggccgaagccggccaccgtcctagtgtgaccgtcatcggtggcgggctgagcggaagcgtgttcgcgctcac

SEQ ID NO: 17644 - DNA, 210 bp, Zea mays
  Coding DNA Sequence Number=SeqID_3241
gcctgctagaatgcgcacggatgataatgctacgagcgcaaatgctaggagccctgaggattgtcaggtgacttgcttcaacagttgcagctatagtgcttacacatataacaacactgctgttttgtttggcatggagacctacatggtcaacctccaagaacagcacactggtgatggaggaggaaccctcttactcactcaggcttg

SEQ ID NO: 17645 - DNA, 499 bp, Zea mays
  Coding DNA Sequence Number=SeqID_3242
gagagcggcaaagcgatccagctgccgtgcgaagccgagtggatgcagctgcgcgagcaggttgccggcgatcagccggactggatcgacgcgccgggcaacatcaatcttgcccgctgggcctcttcctgtccggtagaccactttacccagggtgacttcttcgacattgtcggcaacgtctggcagtggaccaccacgccgaccaacggctttgaaggcttcagggtacatccgctgtatgacgatttctccacgcccacctttgacggcaaacatgcgctgatcaaaggcggcagctggatctccaccggcaacgaagcgctgaaatcctcacgctacgccttccggcgccacttcttccagcatgccggtttccgctacgtggtttcctcgcatcaggagagcatggcgctgaatccgtatgaaaccgacagcatggtatcgcagtacctcgacttccagtacggccccggctattacggtgtgccgaactacg

SEQ ID NO: 17646 - DNA, 437 bp, Zea mays
  Coding DNA Sequence Number=SeqID_3243
aatcacatgctacgatcactttctccaagcaagtttttcacagtatattttttaactacggtgctacataactcatattaacttgtgttgcgctctctgaccaagttacctgcgcaatcctatccctagatccctctgctcaacacacagatggctgtggcatttcagaggggcacacacactcccagcgtgcacggtgtcgaactgtgttgctcctcgctagcacttgtgaagtaatcataatttatcttcactacaagagttcaagcctcctttctagttatcctcaagcaatagattccgagggcatccttgatttcatgcacaaccgactcagcgaggtgcaggtagagacccactgtatatgctcaataaagcagcttcagaactagttgttccactaaaggactctccatcgttgatcttgcgcagggaga

SEQ ID NO: 17647 - DNA, 556 bp, Zea mays
  Coding DNA Sequence Number=SeqID_3244
gacattctggtggtgatgcgcgaacgcacgccactcagcgcccggctgataggccgcctgcccaacctgaagctgattgtcacctccggcatgcgcaatgcctcaatcgatctgcacgcctgtgccgaacggctgattgcggtgtgcggcaccgccagtagcagcgcggcgccgctggagctgagctgggggctgctgctcggtctggcacgccatattccggcggagagccaggcgctgcgcagcaacggtgcgtggcagcatacgctgggcatgacgctgcacggcaaaaccctcggcctgcttgggctgggtaagattggcggtgagatggctaacgtggcgcgcgcctttggcatgcgcgtgtgcgcctggagccagaacctgagcgaagcacgcgcaacggcgtgcggcgcagagaagatggcttcgctgccggcgctgctcagggcgagcgatgtggtatcgattcatctggtgctgagtgaacgcacccgtcatctgctggacggcgtggcactggcgcacatgaagccgggcgcgctactgattaaca

SEQ ID NO: 17648 - DNA, 389 bp, Zea mays
  Coding DNA Sequence Number=SeqID_3245
agcgtttcggcgacatgcacgtgcaggcggtggccgcggccgcgctcgccgatcgtgcggccgccgcgttgcagcgcgcatggtcgcggcgcgacgcgttgacggccgacgaacgcgccgcagcggcgctcgccgtgtcggacgcgaagatcgtcgcgcagcgcgcggcgctcgcgaacggcgaggcgctgttcgatgcgtgcggcgcgcgcgcgacggccgcatcgctcggactcgaccgcttctggcgcaatgcgcgcacgcatacgctgcacgatccgctcgactatcggctgcgcgacgtcggccggttcgcgctgacgggggaatggccgcaggcgtcgctgtatacgccgtcaaccaaacgttgctatcggaaggcccggtgc

SEQ ID NO: 17649 - DNA, 199 bp, Zea mays
  Coding DNA Sequence Number=SeqID_3246
atggccgcacaacgtaacgctaagatttctgaaagaaaaaagccgcagcaggcgcgatccagtgagctggtggcggctattttgcaggcggcgactcaggttctggagcaggaaggtgccacgcgctttaccactgcccgcgtggccgaacgggcgggcgttagtattggatcgctgtaccagtattttcccaacaagg

SEQ ID NO: 17650 - DNA, 308 bp, Zea mays
  Coding DNA Sequence Number=SeqID_3247
agtaggactacaccatataacagctatcgccaatgaagcgaaaagaaacctggatttctataccaaagtattaggattacgcctggtcaagaaaaccgtgaattttgacgatccgggtacttatcacttctattatggtaatgagtcaggcacgcccgggaccatcctgacctttttcccctgggaaggcatcggtgccggccgtaacggaaccggactggccacacatatcggctacagtgtcccgaaaggggctctggcattctggaaagaaaggctgacacagtttaatgtaccctatgaacagg

SEQ ID NO: 17651 - DNA, 207 bp, Zea mays
  Coding DNA Sequence Number=SeqID_3248
catagatcatggtggtgcaagtgcatggaagcggcgcaagggggggcatgcacaggtagaacacaagcgccctgtggtagtcctcgacgcggaggagggcatagatcatggcgaagacgagggaccaagcaagaacagggttggaggtggtcaagccccgatgacacgtctggatgtgaggcgacagtcgcggcaccagagcagggc

SEQ ID NO: 17652 - DNA, 557 bp, Zea mays
  Coding DNA Sequence Number=SeqID_3249
gccaattatctgtccgtcgggcaaatctacctgatggcgaatccgctgttacgcgaaccgttgcagcccgggcatatcaagccgcgactgcttggccactggggcacgacgcccggcctgaactttatctatgcgcacctcaaccgcatcatccgccagcgcgaggtggatctgctgtacgtctgcggcccggggcacggcgggccggggatggtggcgaacagctggctcgaaggcagctacagcgaaatctatccgcacgtcagtgaagatgccgccggtatgcagcggctgtttaagcagttttcatttcctggcggcattcccagccatgcggcaccagaaacgccgggctcgattaacgaaggcggcgagctgggctattcgctgtcgcatgcgtttggcgcggttttcgatcatccgcagctgatcgtaccctgcgtgattggtgacggagaagccgaaaccgggccgcttgccgccagctggcacggcatcaaattcctaaatccgcagcgtgatggtgcagtgctacccattctgcatctgaacggcta

SEQ ID NO: 17653 - DNA, 208 bp, Zea mays
  Coding DNA Sequence Number=SeqID_3250
agggaggagtgttggtcgctcgccaggagccagcatgggacctcgtcggcgcaagggaggggacaccgttgcccggagccaagagccatctaccaggaaccagcgccgacaccacttctagagctcaatcgatcagcggctcaggtcagatccaccttattccatccataaacaccctaaggcatccgcttctcatcgccttatgctt

SEQ ID NO: 17654 - DNA, 204 bp, Zea mays
  Coding DNA Sequence Number=SeqID_3251
gaagcatatccccttcttgttacgattggatccttccgttagacctgtatcttctgcctcccttctatttatttcccccctcccttctaaacctgtcctccaggttctctccattcgctatggcgtctactcacaactccaagcagcgcctggcgctcgctatctgcgatttcctctccgcttcgacaaatgacggcactctca

SEQ ID NO: 17655 - DNA, 556 bp, Zea mays
  Coding DNA Sequence Number=SeqID_3252
agggccactggcaacagctgatcgctgaagccggcccgctgcgcgagctggcgcagcatcgtcttggcgtggtgctggcgattgtcacgctgctcgccagcatcggcttgctgacgctgtccggctggtttcttgctgcctcttcgctggctggcgtcgccggcctgtacagcttcaattacatgctgcccgcagctggtgtgcgtggcgcggcaatcacccgcaccgccgcgcgctattttgaacggctggtgagccacgacgccactttccgcgtgctgcaacatctgcgcgtctttaccttcagccggctgatggcgctggcaccggcgcagctggcgcgctttcgcaacggtgaactgctgaaccgctttgtcagcgatgtcgataccctcgaccatctctatttacgtgttatttctcccctgctgggtacggcggtggtgattgtggtggtgacctgtggcctggcgctactcgatatgcgactggcgctgctgctcggggcgattatgttgctgacgctgctgctgaagccgccgctaatctggcgact

SEQ ID NO: 17656 - DNA, 485 bp, Zea mays
  Coding DNA Sequence Number=SeqID_3253
gcagcagatcaaagaccagccggtcgaattcgtctggcagtcagaagatcacatcagcctggtagcggtgctgcgcgtcggcccgacccagcatctgattcagggactgcaccagtcgttgttccgcgccgagaagcgcatcggcctgattctgttcggcaaaggcaatatcggctcacgctggctggagctgttcgcgcgcgagcaggagacgctgtcggcgcgtaccgggtttgaatttgtgctggcgggcgtggcggacagtagccgcagcctgctgagctacgacagcctcgacgccagccgggcgctggccttctttgatgatgaagccgaagcgcgcgacgaagagacgctggtcctgtggatgcgcgcgcacccgagggacgatctggtggtgctcgacgtcaccgccagagattcgctggcgcagcagtatcacgagtatgccagccacggcttgcacgtgatcagcgcccacaaag

SEQ ID NO: 17657 - DNA, 564 bp, Zea mays
  Coding DNA Sequence Number=SeqID_3254
gcaaccgcatgaacggcgtgctgacggcgattggcggcggcctgcgcgtgcaggtcgaccagagctttggcaactgcccgcgctatattcagctgcgcgatttccgcttcgatcatgcgcccggcagggcttatcagggcgaggttgagacgctcagcgcgctggatgacgccgcgcgcgccgccatcgggcaggcggacacgttttatgtcaccacttatgccgaccaggcgcgccgtcaggtggacgtttcgcatcgcggcggcaaagccggttttgtgcgcatcgctgccgatgatgtactgaccattccggacttcaacggcaacctgttcttctccaccctcggcaatatcgtgctcaacggcaaggccgggctgctgtttatcgactacgccagcggcgatgtattgcaaatgagcggcgatgccacggtgataaccgattccgccgaaatcgcggcctttcagggcgccgagcgcctgtggcgctttagcgcgcgccgcatcgtgcgccggcgcgctgccctcgccctgcgctgggccgatcaaccagacggcgtat

SEQ ID NO: 17658 - DNA, 305 bp, Zea mays
  Coding DNA Sequence Number=SeqID_3255
gtcaacgcagtccattttcggcgcggcggccggtggattcgggcaggcggcgtccagactgcacgatccggcgccgtcgccatcggattttcacggcggactcttgggctccgagggcctgcacttgcaccacccaaggagcgacgtccacgggcacggcggcgacgagctgtcgggcgtggtcgcgggcggcagctgcaagctgaactactcatcccacgccggcgcggccgccacctcgtcaccgggcgcagccagcggcgacaagccacccgacggcggtgccggcgctcccggaaggccgg

SEQ ID NO: 17659 - DNA, 365 bp, Zea mays
  Coding DNA Sequence Number=SeqID_3256
ctgcagccgaacacaggactgtcatattatcacctcctaccacaggtggcctttcggacagactggatctggtcatttctccccaattggtggctaccatgccgagcagaatatggtgttcatcttggatgtagcatgtttcaaatatcctccgaattgggttccatcgcaacttctttgggaagccatgaatatgactgatgactcaactagacttcttagagggttcatgcttatatcaagaaaggttgcagcccttcattgttgcacacagtgagttgcagagatgaaaactagaaaagcatgtcaatgttttgtgttgaagatttaccaagtcttctcaaggtagagattggtactagcgt

SEQ ID NO: 17660 - DNA, 128 bp, Zea mays
  Coding DNA Sequence Number=SeqID_3257
gggataagattaggaaatcacccctaaaaaaaacaataattttatttgttccactacaagcttggaaacattcccaggatcaggggctgccctcagggtttattcttaggtccggaaacaattttgtg

SEQ ID NO: 17661 - DNA, 409 bp, Zea mays
  Coding DNA Sequence Number=SeqID_3258
catacgcaacgtttaactgctctgcgccgccgcgcaacgcctgcgttgaagtcggcgggaaaattcatcatcatcagtgcagtaacctatgcgcccggcggcctggccggctgggcagtgaaatcggtggcgcgccgtccgctgcgcctgttgctgccgaccgccctggaaccgttgctgagcaaggcgtttatccgcctgtcagcacgtttcatcagggagagcgatgaaaagactcgctggttaaccagctgctcaatgtccacagcggcgcgcgtttgccgctgttttccgtggtacgcgaagagcggctgctgggcgtgaagcgcgtaccccagcgtgagctgggcacgccgcgctttacctatgacgaagggctggcccagctgtacggcacaccgccgatgtg

SEQ ID NO: 17662 - DNA, 242 bp, Zea mays
  misc_feature (131)..(131): n is a, c, g, or t
  Coding DNA Sequence Number=SeqID_3259
cagggcaacattggctttatgtccaagctgtcgaatgtagcggaccacttgatgtgtctcagcctggcgaaagtgctatttggcgccgctatgctgtttgcggcgctgcctcggctgggtggctttgccgnctgcggtgaatcgttcgctacggttctctccgctttcccttctacctgtgtcggcagcagcgaagcccttttctcccgttcggttttctttcccctacttttccttggctg

SEQ ID NO: 17663 - DNA, 534 bp, Zea mays
  Coding DNA Sequence Number=SeqID_3260
gagcgctaccgctgctgagctacgcggccaaccggctggtctccggacagccgctgatgctttggcaggtaacggcgggctggctgctgctgctgccgctgttatggctatggctgggattgtggtggccgccgggacgcggcgcggcgctggcgcagttgctgggcgcggagctactgttcgccctgctgattggcatcggcggccacgccgccagtgagctggcccgcagcggcagcccgctggcgcgtaccgcgctgggcagcggcctatggtgtgcggcaggattagcgctgctgctggccgccgaagcgattcgccagcttagccagcagacgccgctgcgtattctgcttaatctgcaactgtggctgccgccgctgatactgctgctgagtggtcagctggacgcgctgtcgctgctgaaagagtacagcaatcgcaccgctgtctttaacgccgcgttcagccagcatctgctgctgctgggcggtacgctgctgcccaccttactgattggtctgccgctgggac

SEQ ID NO: 17664 - DNA, 258 bp, Zea mays
  Coding DNA Sequence Number=SeqID_3261
tgtgctaccgcgattgcgccagtatggcctcagcgtgccgggcttggaccgatgggctcgtcatcttgcctgtggagcacgttcgacctctgcgcacaccgctacgactgggaggtggcgtctggcatcgtcacttgcctcctagtgtggaagcctgcgtcggctacgcctacgcgatcacgaggtagcaaaagtcgtcctggacctccaagcgcgcgacatccgcgaggtggtggctgatggatgccgcagccacat

SEQ ID NO: 17665 - DNA, 102 bp, Zea mays
  Coding DNA Sequence Number=SeqID_3262
aacggcatcgttgttcgttgacggcgtttctggctcctggtacatcaagtttgatacgtttactcctgcagttttttctcgtctccaaacgaccgagtacat

SEQ ID NO: 17666 - DNA, 214 bp, Zea mays
  Coding DNA Sequence Number=SeqID_3263
atggtcgagacactactggaagttaaaaacctgacgaaaactttccgttaccgtacaggcttgttccggcgccaccatcttgatgccgcgaagccggccagttttaccttgcaaccccgaaaaacactggcaattattggtgcaaacggttccggcaaatccacactggccagaatgctgtcaggtgtaatataaccgacatcaggtgaaatat

SEQ ID NO: 17667 - DNA, 425 bp, Zea mays
  Coding DNA Sequence Number=SeqID_3264
ggtaagatcacaattttgcagacagatattcactgaaacaagtaggctttcatgtcctttttttctctcaaagtatctcatggtatgtttgtactcccaattataagatgttttggcttttttagataaatcatgttaactgttttgaaaagtcaaaacgtcttataatttggaatggagggaatactattttattgttattgagtattaatgaagtgtaactgttttgattctcttcatggatctattttaatttctcggtcaccaaatcagtcctaaatgtttgagattgccccaaaaaaaaaaaaaaaaaaaaaaaaaaaaaaaaaaaaaaaaaaaaaaaaaaaaaaaaaaaacaaaaaaaaaaaaaagggggggagggttttaaagaatcaaatttttacttcccgcttgcttcccaaata

SEQ ID NO: 17668 - DNA, 236 bp, Zea mays
  Coding DNA Sequence Number=SeqID_3265
aaatgggcccgcgagctggattatcggttgattaaggagttgtgggcgtggcaccacgacaagctggcggtgcgttttgcctatgagtggcgtgatgacagcggcaactggtttcgcagctacggcaatgaaaactggcactttggtgccgatggtctgatgattcagcgcttcgcctgcatcaacgatttgccgatcagcgctgaagcgcgactgtttcactggccggctggcag

SEQ ID NO: 17669 - DNA, 399 bp, Zea mays
  Coding DNA Sequence Number=SeqID_3266
tggcggtctggtgctgacattgatcgtcgcccgggcgcgcaacggcgccattggccgggcgggggctatcccctgggatgtgccggaggatctgacatccttccagcgcgagtcgctgggcggggcggtgatcatgggccgcaagacctgggagagtctgccggtgaagccgctgcccaggcggctcaacatcgtcgtctcggcgcggccggatgcggcggagctggtggcgccggatgtcggcgcggcgatcgcgctggcctatgagcgtggccatgaccgggtttacggcatcggcggggcgcggatctatcaggagatgctgccgcttgccgaccgtctggtgatctccgaggtcgcgctggatgttccggatgccgacacgttctttccggattt

SEQ ID NO: 17670 - DNA, 572 bp, Zea mays
  Coding DNA Sequence Number=SeqID_3267
gacaagctgatttacgacctcggcggactgccggagaagccggaggtcctggccgggctgatcggtgaaatcggcatctccagccgcttcacgcctgatgaagagaaatcgctgcgtgccgccggacgcgccagcgcggccaccggcgtaccgattcaggtgcatctgccgggctgggagcggctcggccataaggtgctggatattctggcgcaggaaggtgccgatctgcgccacaccgtgctgtgtcacatgaaccccagctttgccgacaaaacctaccagcgcgagctggcagatcgcggcgtgttcctcgaatacgacatgatcggcatgagctactactacgccgacgaatcggcgcagtcaccgtccgatgaggagaacgcgcgcgccatttgcgcactgatcgacgacggttatctgccgcagattttgctgtcgcaggatgtcttcctgaaaaccatgctgacgcgttacggcggtcacggctatggctacatcctcaaacattttgtgccgcgcctgaaacgtcatggcgtcagcggcgaacaactcgaaaccctgatgat

SEQ ID NO: 17671 - DNA, 250 bp, Zea mays
  Coding DNA Sequence Number=SeqID_3268
ggttaagagacctgtatttgcgagtcgattaggggttcatagtgtgaggctgggctactttccaggaggattccccgtaaaagctcctttgtctcattagagtcgtgtctacggcttatgtcttactgttttccgagcgatgcgtgcggatatttatagccagaaaagtctgggtatgcattgcggtgtattagctacagcattgtgtatgtcgggggtaggtcatatcctctccggaacagcagtaggt

SEQ ID NO: 17672 - DNA, 578 bp, Zea mays
  Coding DNA Sequence Number=SeqID_3269
tgccggcgagcattcttgaccttttcgccagcctggttgagcccttcaccattgccgcgaatatcacggcgttcctcaaaccgcagccacaggatgtggcgctgatttacggtgccggtccgatggggctgaccgccattcaggtgctgaaaggcgtgtacggcgtacagcaggtgctggtggtggaccgcctgccagagcggctggcgctggcgcagcaaaacggtgccgatcgcctgtataacaacagcgagatcccgctggcggcgcagctggaaggcgttcagccgacgctgattattgacgccgcctgccatccggcgatcctcgccgaagcggcggcgctggcctcgccggcagcgcgcattggcctgctcgggttttctgctgagccgtgcagcctgacgcagcaggcgttgaccagcaaagagctgtcgctgtttacctcgcgcctgaacagcaaccgcttcccgcaggtgattgcgtggctggaacagggactgatccagccggaaaaactggttacccactatttcccgctggcgcagatcgagcgcgccatgacactgtttgaacaa

SEQ ID NO: 17673 - DNA, 157 bp, Zea mays
  Coding DNA Sequence Number=SeqID_3270
tgcaggttgactataaaggatccccctggcgtcgcgcgagatatacggcacggcggcgtccgcgcacaaggacctgcgcctgtaacgacgggttcctgcacgacctgctttttgagcccgagcgcgacgaggtcggcgccgagattgtcgcctggat

SEQ ID NO: 17674 - DNA, 537 bp, Zea mays
  Coding DNA Sequence Number=SeqID_3271
gtcgccccgaaagatgctcaggtgaagcgctacgaagataacaacaccacgctgtccgcctatctctccggtcaggtgcagtatgtcgccaccggtaacctggtggtcgcggcgattgcgcgccagaacgcggaaaaagccccggtgccgcagtttatgctgaaagattcaccgtgctttatcggcctgaaaaagaatgagccagcgctgaaagagaaagtgaacgcactgattgagcaggatctctggccgcactggccagagctgctggccggactgtgggtcacggtgcagcttacggtgctggcgacggtgggcggtgtcggactgggtattctcggcgcggcgctgcgcagcggcaaaccgggctgggccagccgcctgtggggcatctacgtcgagctgattcgcaacacgccgttcgtggtacagctgttttttatcgtgtttggtctgcctaatctcgggctgaaactgacggccggtgaagcggcgctgctggcgatgctgattaaccttggcgcttacagcactgaa

SEQ ID NO: 17675 - DNA, 109 bp, Zea mays
  Coding DNA Sequence Number=SeqID_3272
atgtaacagctcaatctaatcaaagcgaccctagcacgattcccagtgaagattatatatttatggggttagatgatgtcctaatggaaacaaggacgtctctggataa

SEQ ID NO: 17676 - DNA, 547 bp, Zea mays
  Coding DNA Sequence Number=SeqID_3273
gaaggcgaagtactacctgctgctgtgcgaaccggtgagcggcgaggaggccgagcggatcggcctcgtgtcgctcgccgtcgagccggccgacctgctgccgaaggcgtacgaagtcgcgcagcggctcgcgcacggttcgcagacggcgatccgctggaccaagtacgcgctgaacaactggctgcgcagcgcggggccggcgttcgatacgtcgctcgcgctcgaattcatgggcttctcggggcccgacgtgcaggaaggcatccggcggccgcacctgccgtgccggccgcttcgcccaccagtcaaccaggatgcccgtatgacgaacgatgcctccggctccaatcctttcgccggctttgccggtttcaagcctgccgacatgctcgaccggatgtgggacatgatgcggatgtcgccgttcggcgggatggcgtcgtttccgggcgccgcatcggggctgccgccgtcgctgtcgagcatgtccgacatgatggcaacgctcacgagcgtcgaggaactcgacaagcggatcaccgat

SEQ ID NO: 17677 - DNA, 153 bp, Zea mays
  Coding DNA Sequence Number=SeqID_3274
aacacatccctttgggccaccattaccaaggttgccgttaaggaaaactgcaggcggcagggccacggcgaggcgcttctggcgggcgcaatggaacggttccggcggcggaaggttcaacggctttcccttcaagttgaccccacgaggacg

SEQ ID NO: 17678 - DNA, 286 bp, Zea mays
  Coding DNA Sequence Number=SeqID_3275
atgcggcatactggaacgtcggcgagagcggcgccgttcatccggacatctgggaattcggcctcacgccggtgttccgcatcatcaaggacacgggctggttccggccgttcttcgaggccggcatcggcgtgcggctactcacgcacgcgcggcagacggcggaccgcacgatgtcgagctcgtttcagtttgcggatctggtcggcgtcggcgcgcagttcggcgcgcaccagaattatctggtcggcgtccgcttccagcacctgtcgaacgcgggcctcga

SEQ ID NO: 17679 - DNA, 542 bp, Zea mays
  Coding DNA Sequence Number=SeqID_3276
gtcgactgctcttgggactacgataaccagggttgcaacggtggtctgatggactccgctttccagtacgttcaggctaacggcggtatcgacaccgaggagagctacccctacaccggcgaggacggcagcgcttgcgcgtacacaagcgataacagcggtggtgtcaacaccggctacaccgacgtcaaggccactgagaacgacctccgcgacgctgtcgagaaggttggccccgtgtctgttgccatcgatgccagcaactggagcttccagatgtactccaccggtatctactacgaacctgcctgctcctccaaatccctggaccacggtgtgctcgccgtcggcttcggcagcgactggcccaacaaggagttctggatcgtcaagaactcatggggtacctcctggggtgaggaaggttacatcaagatggcccgcaacaagaagaacaactgtggtatcgccaccatggccagctaccccaccgtttaagaccgagactgatttaatagaaggccgagttaataaaatctgga

SEQ ID NO: 17680 - DNA, 308 bp, Zea mays
  Coding DNA Sequence Number=SeqID_3277
gctgctctccggcatgctgaatatggacgcctacgcttacggctttaccaccgagaacacccattatggtgccacccgcaacccgcgcgatctgtcgcgcgtggccggtggctcatctggcggttccgcggcagccgtcgctgccgggctggtgcacttttcactcggcaccgacaccaacggctcgattcgcgtgcctgcttcgctgtgcggcattttcggcctgaaacctacctttggtcgtctgtcgcgcagtggcagccatccgtttgtcgccagcctcgatcacatcggtccgtttgcccgct

SEQ ID NO: 17681 - DNA, 305 bp, Zea mays
  Coding DNA Sequence Number=SeqID_3278
caggaacccattgaaagccattgcaaagtggatccgcaattatttaacccgaatgctgatattataatgcgtgcccgtggtatgtccataagcgatatcggtattatgaatggtgattaactcgctgtgcataaaacgcagtatgttcaaatcggacaggtcatcgtggcacggattgaagatgaagtcacagtaaaacgtttcaaacaaacaggaaacaagatagaactgattgctgaaaatcctgagtttaagcctatcgttgtggattaacgcgaacagaatttcaccattgaaggctagca

SEQ ID NO: 17682 - DNA, 543 bp, Zea mays
  Coding DNA Sequence Number=SeqID_3279
gattccttaccgctttggtgaggaggcgatagatacgcagcactattacgggctgtggaacggcgcgcgcgagcgtatcgcggcgcacctcggccatgcggtgaagctggagatcgagccgggccgcttcctggtggcggaatcgggcgtgctggtgtcgcaggtgcgggcggtgaagcagatgggcagccgtcactttgtgctggtggatgccggtttcagcgatctgatgcgtccgtcgatgtacggcagctatcaccatatttcgctgctgcctgccgatggcagcgcgccgggtgacgcgcatgtggagagcgtggtggccgggccgctgtgtgagtcgggagatgtgtttacccagctggaagggggcaaagtggaaacccgcgcgctgccagcggcacaggtcggcgattatctggtgttccatgataccggcgcttacggcgcatcaatgtcctccaactacaacagccgtccgctgatcccggaagtgctgtttgagcagggcgtgccgcgtgagattcgccgtgcgcagaccat

SEQ ID NO: 17683 - DNA, 311 bp, Zea mays
  Coding DNA Sequence Number=SeqID_3280
tgcagcgcattcatgctgactggcagcagccgctggatgtgccgcatctggccagcgtttcgttcatgagcgttccgcgcttccatctgcatttcaaaagcgtcacgcagacctcgccgattcagtatctcaagtcgctgcggctgcatcaggcgcgtttgatgatgattcgcgataatctcaccgccgccggtgccgccgcacgtgtcggttacgaaagtgattcacagtttaaccgggagtttaagcggatgtttggtcgcaccccggctgacgaggcgcgggtgatgaaacgcgcctttgcgctgctg

SEQ ID NO: 17684 - DNA, 277 bp, Zea mays
  Coding DNA Sequence Number=SeqID_3281
aggaaacttccaatattaggtatgagctattgccagctcttgatattgtttgtcaaggtgctgatgttgccaaggaaggagctaaattcagtccttccaggttgaggagttttgactacgaaccgctagctgcagttagcatcggctaggtccatcgagcagctttgaaggatgggtcgtatgttgtcgtgaaaatgcaataacctggggttgcagatagtatataaagtgatgttgagaatgtaagactacttctaacttacacaaatctcattcc

SEQ ID NO: 17685 - DNA, 537 bp, Zea mays
  Coding DNA Sequence Number=SeqID_3282
gacgctggtcagcattctcgataaagcgctgctggccatcccgccggaaacgctgtttaagctgatggcgcagtggcgtcaggcggaaccgccgtttctcagcggctcgtggcagaactataagcaaacgattctgctgattgtttcggtatcgctgggattgattctgttgatcctgctgtggaaccaccatctgcgcaaagtgattcagcagcgaatgcaggcagagaatgcgctgaaaaatcagctcaattttacccacacgctgtttaatgactcgccggtggcaatgtacatccgcgataagcaaacgcggctggtggactgtaacaatgcctatctgcgctttttgcacatcaaacgcgacgaggtaatcggcaaacgactgtcggacgtattcaacaccaataacgccagcattcacacaatcgaagatggttatcagcagacactgctggatggtgaagcggtaatgcgcgacgtccagctgatgtttggccagcaggccttccatctgtatcactggacgctgccatt

SEQ ID NO: 17686 - DNA, 394 bp, Zea mays
  Coding DNA Sequence Number=SeqID_3283
atctggcgtgtcaaaacgccgcgtatgacgagctcggctgggcgcgccatctcactgcgccggcgctggacgcgctgctgctgccgctgaatccggtacggctggggaccagcctgatgagcgacaccatggccagcgcctggcagcagcgtttacgggaagcgctgagcgcctttcaccagcagcatccggagctgccgggcattgtctctgatcgcctgcgtcgtgtggcgctgccgcatgcgccggcaccgctggtgccgggattaattgaccagatgctggcacaaggcgagttgcggcagaaacagggctggctgcacctgcccgacttcgcgccgcgctttaatccgcaagaagccacgctgtggcagcaggtcgagccgctgttcat

SEQ ID NO: 17687 - DNA, 526 bp, Zea mays
  Coding DNA Sequence Number=SeqID_3284
ggaaagcacccctcgcatgcagagggagcaataaaattttatgctttgcacacatccaacatatatttcccctttatttgatccccaaaagacgtaaatataaaacaacccccctttttggccggttccctgacacggttaattaatacccatatacgaaaagcatccagggatgccttgaaacatgcatcacttgaacaaaagctcacaaaaggcagcgcgcgtcgtcgtcggccggggcatgcatattgaaaaagttggggtttcgcggaagggcctcaagcaacaggagtaaatatgagggagcataaacgatcactattgttgcaggaccaagcaggagggaggcacccaatgtttttgcatgtctcccccgggaaacaaaggggggccgacagaatcgtcaccttgggcgtcggggggagggagccatccggcacggttccgcgcggggagggggcggccatggccgtcgggggagctgccatgagctgcaaaaccagcagtatggccaccaccggaccgg

SEQ ID NO: 17688 - DNA, 329 bp, Zea mays
  Coding DNA Sequence Number=SeqID_3285
tttggcggccgcgttgacctgatcggccagcgattgattgaagtgtggtccggcatgccgacgctgttcatgctgattctgctctccagcgtgattcagcccaatttctggtggctgttactgctgacagtgatcttcggctggatgagcctggtgagcgtcgtgcgcgctgagttcctgcgcacgcgtaactttgattatatccgcgccgcgcgcgcgctgggcgtgagcgatagccgcatcatgctgcgccacatgttgcccaacgccatggtcgccacgctcacctttctgccgtttatcctgtgcggttcgattactaccttaac

SEQ ID NO: 17689 - DNA, 517 bp, Zea mays
  Coding DNA Sequence Number=SeqID_3286
tggtgggcgacagcggcaataccctcgtctcactgcaaaacggcgccgtcaccaatgacgacagcccgaccctcgccggcctgacccgtgcgggcagcctcgtccgcatctttgacggcggcgatctgctcggcagcaccaccgccgacggcaatgggcagtggagctttgccctgagcaacctgagtgagggcggccacgcgttcagcgccaccattaccgacgttgacggcaatgtgattgacaccgtcaccctgaacattacggttgataccacgccaccggcggcagccagcgatctggcactgctgaacgatgccggcagtaccgcacagccggtgacaggcggcagcgcgatcaacgatgcgacaccgctgctgagcggcacggcggaagccggcagtattgtcacgattcgcgatggcaacaccgttctcggtagcgtcagcgtgggcagtaacggtagctggagcttcaccacgccagcgctgggcgagggcaatcacagcctgagcac

SEQ ID NO: 17690 - DNA, 229 bp, Zea mays
  Coding DNA Sequence Number=SeqID_3287
ctcctagcaaagcagcacattcggaagagagaaggaagcaagagacagagaggggtggagggggaatgacagtgggaatcacgtgtgtttgcccttgctcatgggtttattttggtgtctactaaatggtaggtgaggagcactctttgaaggtggagaaggtgttgttccaagggaagccagactaccaaaatgttatggttttttagtcatctatgttcagcaagac

SEQ ID NO: 17691 - DNA, 224 bp, Zea mays
  Coding DNA Sequence Number=SeqID_3288
gcgactttcaggcacaactccggtgcggcctccctgctccgtccggcccaccccagcaagtgctgccacccggcctcgcatcgcgcggccgccccaccctgccgtcagctcgtcggccaacacccgtgctccggcccgctccaccctgcctcgaccgtccacgaaccaccctgctcagtgctcagccggctcgccccaccacgctgttggtttctgtcccgccc

SEQ ID NO: 17692 - DNA, 481 bp, Zea mays
  Coding DNA Sequence Number=SeqID_3289
caggctatttctgggtggtcgatccgattgacggcaccagcccgttcctcaacggtatgccaaactggtgtgtttccgttgcggtgctgcatgacggcgtgccggtgattggcgtgatctttgcgccgacctatcaggagtgctacgtcgccgcgctcggccagggcgcaacgctgaatggccgccgtttacaggtggatccgtcacgtacgctgcaaaatcacgtgaccggctttggcgctaatagctatgtcagcccggaagaggtgggccgcctgctggcgtcgctgctggcagcggggggcaactttatccgtatcggatctggtgcgctgatgctggcgtgggtggcagccggacgcgtggtgggctatttcgaaccctacatgcacgcgtgggattgcctggccggttactgtctggtgaaagaggccggcggctggtatcacccgtttaatactgagggcgaccggctgttgaa

SEQ ID NO: 17693 - DNA, 438 bp, Zea mays
  Coding DNA Sequence Number=SeqID_3290
agaaaaatcgctcttgccgggtgtctgcacctctgccactgcaacggcccagctacatcaacgggagttaattcctgtgatcacttctcttactcagcctgttgtgggtattcgcctaggcatgcagcttctggctgaaagcagccaagaaagcggtgatatccgctactgaaattaatcagcgctcctgttaaaaaaatggccacttgtggcctgccattaccgcatatgggctggaataaggctaattttccatcagatcatcctctgtttcatggcatcgaaaataatgcctatttttattttgttcacagctgcgcactacccgttggcgaatacaccattgctcaaacagattatggcggctcgctcagtagcgctatttcaaaacacaacttttttggcgtccaatttcatcccgagcgttctggtgcagca

SEQ ID NO: 17694 - DNA, 480 bp, Zea mays
  Coding DNA Sequence Number=SeqID_3291
atgggcgacagctataccggtacgctgacgcgcaaggatcttgagaccccgaccgggtacaatacctataccatcagcggtctgccgccgggaccgattgccatgccggggcgcgcctcgctggaagcggcggcccatccggagaagaccaattacctctatttcgtcgcggatggcaaaggcggtcacacctttaccaccaatctggccagtcataataaagccgtgcaggtttaccggctggcgatgaaggaaaaaaatgaaaataagtttatcgtcatcgaagggctggaaggcgccggcaaaaccaccgcgcgtgaggcggtggttgcggtcctgcatgagcagggtattgaagacgtggtctttacccgtgagccgggcggcacacctttggccgaacagctgcgcgtgctggtgaaacagggcattgatggcgaacaggtgaagtgataaagccgagctgctgatgctgtatgc

SEQ ID NO: 17695 - DNA, 383 bp, Zea mays
  Coding DNA Sequence Number=SeqID_3292
tttccgggttgacgaggtccataattgggggccgcccccttttttttttttttttttttttttttttttttttttttttttttttttttttttttttttttttttttttttttttttttttttttttttttttttttgaacaaacgagcaaatgcttttatccccgggaaaaacaagcaagtcaagcaacaaacaacagcgcaggcgagcatccgagcaccacccgcctcccaattccagttgtcttccttccccgtccccggacgtgccagctcagctcgaggccccgcctcctccgccgttctctccgatccccaattttaaacgcccccccttctctctcctgcccacgtctcgcctgtgccgagtcgagcaatttcggg

SEQ ID NO: 17696 - DNA, 477 bp, Zea mays
  Coding DNA Sequence Number=SeqID_3293
cttgtttatcaactactcaagaaacatgtagcctaaataagtcgatatgaattctataaatacaataataaataatcaatacataccgttctgattcttgataaagaatccatccatcctatccctataaacataaaatttaattttatcaactaacctactaatctagcaaataatggattaaagcaaaataataaataatcttacttcttacctagcacagtagcactagcagccacacgcacatagcagactagcagcagaagcagtgctagcacacggttcccttcaccttcactggttcagctgttcagagaatcaggccggccacaggcgtcgggtttagttcagcagtgcccagccacctagccgctcaggcttccttcctccatggtggccagtcggagsagcaaacgcaggagctggcgagggcgagckgckgatgggagggcgggaggtcgatcaccggtgccgcgc

SEQ ID NO: 17697 - DNA, 300 bp, Zea mays
  Coding DNA Sequence Number=SeqID_3294
ggacgcgacgcacgcttcgttcatgtcagtgcaagggggtcacacagcttgggcgtaaacttctagtgcaactaccgctacacgtggtcgtcgtcggggtacaatacccagaccttccaggtgagcagggaggtgcacgacgcggcggagagggacgtggcgaccgtttgactgagaagaagacggtgtcgagctcagcatgctgccgccggcaggacggctcactgacggtggtgcacgtggagcccggggggcgggccagtcggcagtcgggttgcgcgctttcatcaggagtcaaaa

SEQ ID NO: 17698 - DNA, 244 bp, Zea mays
  Coding DNA Sequence Number=SeqID_3295
cggccaccgaatgaaccaacattttaaattgtgccaagggcttccaggtaatcaaaggaatgacctttgctctgttgtacctccactaaaaggggaacatggtcgtggtcttccgtgactctaaggagaggacgtcctcttccaccatgatagaaacgggcggttggtacactatgaccttgggagtttaattaaccttgggccggaccctcagacaacacatatggttgtcgccatgggttac

SEQ ID NO: 17699 - DNA, 565 bp, Zea mays
  Coding DNA Sequence Number=SeqID_3296
cgggcagccgcattttgtcgctggaggggtatcacaccagcgactggtatccgttcaacaaacagggacgcattgataacccgaaatccaccgcggcggtcggtgccatgctgtgtctgctggcactcgatctgcgtctcagcagcttctggttccgcgccggcgattttgaaccctactcgaccattcgctatcttggcgtgctggatgaaaacgccacgctgagcgatgacaatctgtgctacagcgagattgatctcgacagccacagcttcgcgctggaccgtaaaagcagcttccgcattcgcggtaacgtctgcctcggtttccgtcagctggagaacgaccgctggccggcgacaccgctctacagcctgagcattaccgatccgcaactggcgcgccaggtagcgggcgaaagcgtgctgcgcatcaggctggcggtacaaccggggccggataacctcggcccggagcggctggtgctgagcgaggcgcgcatggacgatggcacgcgcgtgccgctggagcaactgagtctgaaactgaatacgctgtcggccac

SEQ ID NO: 17700 - DNA, 570 bp, Zea mays
  Coding DNA Sequence Number=SeqID_3297
cagcggcgctttcgcatctgcatgaccgacgcgagtcacatcacgctgctgccgcggctgttggcgcatgtccgcgcgcaggcgcccggcgttcggctggaggctgcacgcatcgacggcaacacggaacgctcgctcgaatccggcgaggccgatctcgcgatcggctatgtgccgtggctgggtggcggcatttatcagcagaaactgtatgaccaggactgggtatgcctggccaatcggcatcacccgaggattcgcggtcgcctggggccgaaacagtatcgttcggaaggacatgtcgcgattacggcgggaacgggcgcgcaactcctcgaacaggcgctgcggcaggcgcgtatcgagcgcgacgtggtgctggagctgccgggctttctcggcctcggggcgatcatccagagcaccgacctgatcacgacgctgccgcgccatattggcgagacactcgctcaggccagcgatctggcggttcatgcgtgcccgatcgcggtcgacggattcgcggtacggcagcattggcatgcgcgatatcaccatgaggcgggcaat

SEQ ID NO: 17701 - DNA, 596 bp, Zea mays
  Coding DNA Sequence Number=SeqID_3298
tgatcgcgctttttgccggttattcgctgcacaagctcggcaccgggcgttttcagcgctttttgctgtcgttcaccaatatgaccagcaatttcgccggcgtgccgctggccttcgcctttgtcatcctgctcggactgaacggctgcctgacgctgctgctgcgccactacggctggctggacagctttaagctgttttcgcgcgacggcatggtgctggtttacacctggttccagattccgctcggtattctgctgctctacccggcgtttgacgggctgcggaaagactgggaagagtcggcggcactgctcggtgccagccgctggcgctactggtggcacatcggcctgccgattctgtttccggcactgctcggcacctttgtgattttgctggccaacgcgctgggcgcctacgccaccatttatgcgctgaccaccggcaacttcaacgtggtgccggtgcgcatcgccgcgctggtgtcaggcgatatctcgctcgatcccaataccggcggcgcgctggcgatgctgctggtgctgattatggcgctgattaccgtggtgcagcagtatttggtgcgtcgcagc

SEQ ID NO: 17702 - DNA, 277 bp, Zea mays
  Coding DNA Sequence Number=SeqID_3299
gtacggtgctaatgtagttgtgttgaaagtggcaaggatgctatcagtctacttcaaccctcacattgatttgatgcatgtttaatggatgttcagatgccagagatggatgggtatgctaacgaggaaaggaagaacaagttggctttgactgaaggctcgacgtccatcatttacatgttcttgcaatgacaaccgatgttatccgggcaacttatgaggagtggataaaatctggaatgggtggattcgtgttctaaaccctttcaataggagg

SEQ ID NO: 17703 - DNA, 334 bp, Zea mays
  Coding DNA Sequence Number=SeqID_3300
taccgcagcgtaaatccacagggcaccccatgaaaatcaaacccgatgacaactggcgttggtattttgacgcatagcatgaccggatgatgctggatctggccgatggaatgttatttcgctcgcgcttctcgcgcaaaatgctgacgcccgatgcctttaatgacagcggtttttgcgttgatgacgctgcgctttattttacttttgaagagcgctgtcgccagagcggtttaaaaagcgatcagcgcgccgagctggtgctgaacgcgctggtggccagccgtttgcttaagccgctgttgcccaaaagctggcactttaccagccatgc

SEQ ID NO: 17704 - DNA, 187 bp, Zea mays
  Coding DNA Sequence Number=SeqID_3301
gattgccgtctctctaaacacacatgggacaagggtagtacagaaattgatagagaaagttagcagcagagagcagattatgctcattatttcagccctacagccaagcttcatgctgcttgtcaatgatcacaatggtcatcatgtaatacagagatgtatggtcaactttggagtcgaggataat

SEQ ID NO: 17705 - DNA, 403 bp, Zea mays
  Coding DNA Sequence Number=SeqID_3302
gacccacgcgctcgttatcgtaaagcgatggccttgctcctccaaccaatggctcggagagctctatcggaacttggcgcgcgcgatcatcgacgcggccgacgagatcatcgtcggcaagcatccgcgcgaattcccgctcgccgtatggcagacgggctccggcacgcagaccaacatgaacctcaacgaggtgatcgcgaaccgcgcgagcgagctgctcggcggcgagcgcggcgaagcgcgcaaggttcatccgaacgacgacgtgaaccgcggccagtcgtcgaacgacgtgttcccgaccgcgatgcacgtcgcggccgcgtacgcgatcgtcaatcacctgctgcccgcgctgcgcacgctgcgcgcgacgctcgacgcgaaatcgaaggccttc

SEQ ID NO: 17706 - DNA, 272 bp, Zea mays
  Coding DNA Sequence Number=SeqID_3303
agagcaaaatctaagacccgcgtttgggtatgatggtcattgtgtctggcgtcgaggtgtcacgcgatctggcgtatgccgaagcgatcttgaccttactgaacgaccaggatgaataaacggacaagaacggactactaactctaaaagaagcgcgtgactacatccgtattctgctccggaaagcgattcgtgtgcccatgacgccggagctgacctttttttacgataactctgtcattgaagggatgcccatgtagaatctggagtct

SEQ ID NO: 17707 - DNA, 349 bp, Zea mays
  Coding DNA Sequence Number=SeqID_3304
agcttttgcactggtcggccgccgcctgccgcagctcgccgccccgccgtccaccgtcgtccgcctggactccactgctcgcccgccgccccgccgtccactgctcccggcgtcctgcgtgggcacggctgggcaagctccatggcggactgctactgcgtgggcgacgtactgctcctgcgtgagcgagcgggcgtactgctactgcgtgggcgcggccgagtccctttctgtccgtgccatggagctttctgtccagcaggcagcagcaggccagcagctccagctttcccagcgtcccggcgtcctgcgtgggcggcgtactgctactgctccagctttccaagct

SEQ ID NO: 17708 - DNA, 426 bp, Zea mays
  Coding DNA Sequence Number=SeqID_3305
tgcagcgcattaccgacgaggtgatgcacagccgtgaagatgcgcagccgtgtctgcgctttggcgcgcacgaactgcggcgctaccgggaacggctttactggctgccgcgacagcactcactgagtcagcactcgctaacctggcagccgctgacgcagccattaattttgcctgatgggctgggtgaactgcgcgccagcctggcgcaggcggaactgcgccagccggcggcggatgaacaggttattgtgcgctttcaggcccacggctatcaccatgttgttggccgggctggtggtcgcgaaatgaaaaaactgtggcaggagctgggcgtcccgccgtggcagcgcgaacgcattccgttgatttactacaaccagacgctgattgctgcgccggggctgtttatcacccgcgcaggcg

SEQ ID NO: 17709 - DNA, 557 bp, Zea mays
  misc_feature (430)..(430): n is a, c, g, or t
  Coding DNA Sequence Number=SeqID_3306
atcgtcggtgcggtttactggctgctgtatgcgcgcaagccggtggtggatatcacggtaatgaaggaccgcaacttctgggtggccggtctgctgatggcgggcatggcgatgattctttatggcagctcggtggtgttaccgcagctggcacagcaggatctcggttataccgccacctggtccgggctggtgctgtcgcccggcgcggtcctgatcgtgctcaccatcccgctggtgctgaagctgatgccgattgtgcagacgcgctacatcatcgcctttggctttacctgtctggcgctggccttcttctattccagcaccctgacgcccaacgtggatttcaccacgctggtgctgatgcgcagcgcgcagtcgattggcctcggcttcctgtttgtgccgctcaccaccattgcctttgacncagtgccgcagcgcctgaatgcggatgcctccgcgctgttcaccatgttccgtaacgtggccggttcgatcggcatttcgctggccactgccggcatcaccgaacgtgaacaggtgcgatcggccca

SEQ ID NO: 17710 - DNA, 552 bp, Zea mays
  Coding DNA Sequence Number=SeqID_3307
gtatcgtctgttttatcgcaagccggtgcatctggtgcgcggcgaagggcagtatttatgggatgcggcgggtaataaatatctggatgtgtacaacaatgtggcgagtatcggccactgccatccggcggtcattgaggcggtgaatcagcagatgaagatgctgaacacgcacacgcgttatctgcacgagcgcattcttgactacagcgaagcgttgctggcgaccacgccggaagccatcgatcgcgccatgtatatgtgtaccggctcagaagccaacgatttggcgattcgcgtggcgcgcgcctggagcggtggcaccggtattattgtctcgcaggaggcgtaccacggtaccagtgatttgacctctggcgcgtcaccggcgctgggtagcggtcagccgctggcaccgaccacccgcctggtgccaccgccggatgcttatcgtgttgatgcgcccgaccttggtgcatggttcgccgaccagattcagcagcagattgatgacatgaaagcgcacggcattaaattcgctggtttcctcgc

SEQ ID NO: 17711 - DNA, 286 bp, Zea mays
  Coding DNA Sequence Number=SeqID_3308
gctcgtggcgtgcgctgccgcggcggcggcgctgctgctgctcggcgtggcggcggcggacgtggcgtcgatcatcacgcaggacgtgtacaaccagatgctgcccaaccgcgacaacacgcagtgccccgccaacggcttctacacctacgatgccttcatccaggccgccaacttcttcccggggttcggcaccggctccagcaccgacgagctcaacaagcgcgagctcgccgccttcttcggccaggcctcccacgagactaccggtcagtaacgtaataca

SEQ ID NO: 17712 - DNA, 186 bp, Zea mays
  Coding DNA Sequence Number=SeqID_3309
gtatcttaatattatgtccacacccatggtgtgtagtacactatacggtattttaggttggtttggaggatgcgatggtcatgagataatggccaccacgtgcgtttcatcataatcgatctgatccttgattgcgtgctatatagtcgcacacgcaggtagtgcgtcggatctcagaaatgtacc

SEQ ID NO: 17713 - DNA, 208 bp, Zea mays
  Coding DNA Sequence Number=SeqID_3310
gggaccgcgactgccaatgcgtttttctgttggataaacaccagggtgcatcctcaaacgatgtgctgctaaaagcaaaacacctggttaatgctgacaaggagggccataccggggcactcgactctgtggccagcgctatgctggccatttgtattggcgaaaccacgaagttttcccgctatctgctggattcttacaagcgtta

SEQ ID NO: 17714 - DNA, 437 bp, Zea mays
  Coding DNA Sequence Number=SeqID_3311
tctcggtaccctggtgtgaggctgaaggaaggtagccacattaacagaagccttcttacattgggaaaagtcattcgccaactcagcaagggaagaaatgggcatatcccttacagagattcaaagctcactcgcatattgcagtcatctttgggcggcaatgcgagaactgctattatctgcacgatgagcccagcacatagtcatatcgagcaatccaggaacacacttttgtttgcaaactgtgctaaaaatgtagttactgatgcaaaggtcaatgtagtgatgtcagacaaggtgttattgaaacatcttcaaagagaaattgcaaggctagagaatgagctaaagtttcctagaccaacctcttgcagcaactatgctgatctatattctttgttcattttcaacaaagaatgttgtccttcctatgaaaa

SEQ ID NO: 17715 - DNA, 123 bp, Zea mays
  Coding DNA Sequence Number=SeqID_3312
ggaggcggaccaacagccgcaccagcatggcgcagcgcgacgagatcatccgccgcaccgtctacgtctccgacatcgatcaccaggtccccgatccatttctgtgtgctctgttctgttttg

SEQ ID NO: 17716 - DNA, 270 bp, Zea mays
  Coding DNA Sequence Number=SeqID_3313
attttgccgccatcggtcagctgggcgagggcggtatctatctgctggcgattggcctgtcgcaggtgatcagcaacgtgccggccactattctgctgttacaaaaagtcccgccttccgaagtgctggcctgggcggtgaatatcggcggctttggcctgctgccgggatcgctggccaacctgattgcgctgcgcatggcacaggacgccaaagtgtggtggcgtttccatctgttttccctgccgatgcttgcctggtcgatgctgt

SEQ ID NO: 17717 - DNA, 539 bp, Zea mays
  Coding DNA Sequence Number=SeqID_3314
atctacgaggatgagctgagcaatttcctcgagcagggagcgctgtttgagctggttctcgccttctcgcgtcagggccctacaaaggaatatgtgcagcacaaaatggcacagaaagcatctgaaatctgggacatgatctcccaaggtgcttacatctatgtctgtggtgatgccaaaggcatggccagagatgtacatagagttctccacaccattgttcaggagcagggctcccccgacagttctaaggccgagagctttgtgaagaatctcccaatggagggcagatatctgggggacgtgtggtaaaagacgattgtgaaatataaacgggcaaaaaaataccctagtattcaggggataaacatccagtcgtattatacatgtgtacaactattgccagaagagtaatgataatggattagatcagatatttttctttggttctctattttgtttattctctctcgttttcttttctttttgaggttctctctagagcattttttgtagctatgtatgataaatcctggata

SEQ ID NO: 17718 - DNA, 536 bp, Zea mays
  Coding DNA Sequence Number=SeqID_3315
ctcgtggtgccggtcaacaagaagatccgcatcatcacgaccgcgaacgacgtcgttcactcgtggtacgtacccgcgttcggcgtgaagcaggatgcgatccccggcttcgtgcgcgatacgtggttcaaggccgacaaggtcggcacgttccgcggcttctgtaccgaactgtgcggcaaggaacacgcgttcatgccggtcgtcgtcgaagtgctgtcggaagacgactacgcgaagtgggtgaccgcgcagaaggccaagctggccagcgcagcggtcgatccgaacaaggtgtacacgatggccgaactcgtcgcgcacggcgaggaagtctacaaggcgaactgcgcggcctgccaccaggtgaacggcaagggcctcggcgcattcccggcgatggacggcagcccgatcgtgaacggcccgatcgccggccacgtcgagcgcgtgctgcacggcaagggcgcaatgccgtcgtgggcgtcgctgtcggacctcgacatcgcatcggtcatcacgtacgagcgcaattc

SEQ ID NO: 17719 - DNA, 501 bp, Zea mays
  Coding DNA Sequence Number=SeqID_3316
gttaagcttttctctcggatgcttttggagggactcacccctgacaatgctgtgtttacaattgttttaacagcttgctgtcatgctggtctagtagaagaagggaagaagttctttgatataatgaagaatgtgtacttgatggtgccatctggtgagcattatgcttgccttgtcaatcttcttggacgttgtggtatgctagaagatgcatattggcttatcatgtcgatgcccgggaaacctcatcctggagcatggggtgcactgttgggtggatgcaagcttcactgtaatataaagcttggaaaaattgcagcaaaaaaactttttgaaattgaaccggataatgctggaaattatgtctccctgtcaaatatgtatgctaacattgacaggtggggagatgtttctgaagttagggctgagatgactggaaagagaataaccaaaatagcagggcgtaccctagttttgcagcgaagcagtgttgaccagaat

SEQ ID NO: 17720 - DNA, 188 bp, Zea mays
  Coding DNA Sequence Number=SeqID_3317
gaatacatgacaactataaaaagaggaaaagacacctcgtaaacaggaaaagaagagcaaaacatggaaaacaagcaaaaaacataccatgaacaagaatgcaatggaccagaaatcatgaaggaaaactccagcagaaaacaggaccttacagaaaaagacatcgaagaacgctacgaaacacaaaa

SEQ ID NO: 17721 - DNA, 504 bp, Zea mays
  Coding DNA Sequence Number=SeqID_3318
acgtgggcctgtccatgggcatccagggcaccgaggtcgccaaggagagctccgacatcgtcatcatgaacgacaacttcgacacggtggtgacggccacccggtggggccgctgcgtcttcaacaacatccagaagttcatccagttccagctcaccgtcaacgtcgccgcgctcatcatcaacttcgtgtcggcgatgacctctggcaagatgccgctcacgaccgtgcagctgctgtgggtgaacctgatcatggacaccctgggcgccctggcgctggcgacggagccccccaacgacgccatgatgcggaggccgccggtcggccgaggcgacaacttcatcaccaaggtgatgtggcggaacatcgtcggccagagcatctaccagctcgtcgttctcggcgtcctcatcttcaagggcaagagccttctccggctgaacggcggcggggatctgtccgacgcccagctcaacacgttcctattcaacacattcgtgt

SEQ ID NO: 17722 - DNA, 382 bp, Zea mays
  Coding DNA Sequence Number=SeqID_3319
tggcggtcccataattctatatcaaccggagaatgagtacactgagtggacaaatggcgcgtcctttgaccctcagtacatgcaggacatcatgaactctgcaaggaatgccggtgtcgtcataccgttcattaacaacgacgctgctccagatggacacgacgcaccagggtccggagtaggcgcggtggacatttatggccacgattcgtatccgcggacccatcttcatggccatcaggaggtcttccgacatatttccaccaacttcatgaggagcagagcccgtcgactccgtattcacttgttgagttccaaggtggttcttttgatccctggggaggcaccggttacgaaaaatgcactgcacttgtcaacgaac

SEQ ID NO: 17723 - DNA, 439 bp, Zea mays
  Coding DNA Sequence Number=SeqID_3320
gctcgggttgtgtgggccagcgccatgccgcgcgtgatggtggagcccttcctcagggagtacctgcaggtgccggccgcggccgccgtcgccgcgagggagatgaagacggcgtgggggttctacactggtctcatggagggaggtggtgaagactgcgaggcgacgatggcactgatgacgaagaggacgtcggcgggggaaggcgccggcgacgtcgtgggattctccgctgcacgctccgtggcgttcctctccagcagccctctcgcgtccacttgcaaggtcgaggtgtacgtggtatgcccggaggagaagagcaagtggcggcgcctggcgcggcgcgactaccccaccccgctggtcttccacgacggccggctcgcgtttctgccgacgccactcaacacggtggccatgttcacgtggcttcctctgg

SEQ ID NO: 17724 - DNA, 395 bp, Zea mays
  Coding DNA Sequence Number=SeqID_3321
gcggcgaatccgctgattaacgcgatcccgcagattcgccactccgtctcgcacgacgatccggcgcgactgcgccagcagctgatcgatcagatccgtcgctttgagctcagctgccagcagtcggggctgagttatgaagtgatcgtcggcgcgcgctactgcctgtgcaccgcgctggatgaagcggcggcgctgacgccgtggggcagccgcggcgtgtggaccagcaacggcctgctggtgacgtttcacaatgaaacctggggcggtgagaagttctttcagctgctggccaagctgtcgcaaaatccgcgtcagcacatcctgctgctggagctgatctatttctgcctgctgctcggctttgaagggcgcaaccgcgtgctggataa

SEQ ID NO: 17725 - DNA, 385 bp, Zea mays
  Coding DNA Sequence Number=SeqID_3322
ttcgcgcacgtctggctgcgattgtcagcctgctgtgcctgttactgattattgctgccgtctggggaattatcggcctgcgcgctgccgatcagcgcgcgcaaaatgcctatcagaacgagctgcttccgctgcaatactcctcacgcctgtaccgcatggtgcaggagcaatccgctaccctgttcgatgcgctgcgctactggaccgacagcagtgaagtggaaaaacgcctggcgcgcattacgcagtacggtcagcaaatcaccgccgatcgtcatacctggcagcagctggcgtttgatgcgcagaccaaaccgctgagccagcgcttcctgacccatctcgacggctggcagggtgcactgcatgaagccggtgagct

SEQ ID NO: 17726 - DNA, 585 bp, Zea mays
  Coding DNA Sequence Number=SeqID_3323
ggtaatccggtccaatgcgaaaaatgtttaatgcctgaaatttccaacattaattccgggggggctcaatgaagggataaccctggggaaacctggggggccccctcccccaattaatcgggcggcacacctggccagccttttagagaaaaaaccgccacagcccgcttttttattaattttgaaaccggcgggaaagggtggtttttctttttctgccccagagggggttttttttttcgccctaaactggttagccctaatatgccataaacccgttggcccgtggataatgccccaatatgacaaaatctgttttccccctggtagcaaaacacttctaagatgggcggaccacggcgcatacaaaacacactactggagttccttgcccacaccactaccggatttttggaatcaagccccatcccgcaaacgaattggtccttatgcaccccatgctttgtggaaaaccggccctgctttccattggaatggccgccccaataccggatgtggtggtttgggtagaaaaccggttatgccatccaggcaaattcacccgccccgtatacattatatatt

SEQ ID NO: 17727 - DNA, 523 bp, Zea mays
  Coding DNA Sequence Number=SeqID_3324
tgccaggaactcgaacctttcatcggtgagcagttggcttctctgctctacctggagccagacagtgaacttacggctatgctaatcgcagcagaggccaagcgagaggaggaaaaaagcaaaaggagtcagtgccgacgaggcagctgataatcaagatattgtgctgttcgacgataatgaagaagacgaggaagaggaaagcgaggaggaggaagaaggcgccggccgagagcctcaagggaggggaggaagaggagggagggggatgatgtggccgcatcaaatgccgatgatgcgtgggccgatgatggcaggccgtggcttccctcccaacatgatgggtttcggcggtggcttcggcttgccagacccattcggcatgccacgtggcttcccgcccttcgttgggccaaggttccctggagacttccccagaagccctatgcccgggatgggggttcccttggcaggcccccgcagcccttccctctgggcctcgacatgatgatgggccctgggc

SEQ ID NO: 17728 - DNA, 425 bp, Zea mays
  Coding DNA Sequence Number=SeqID_3325
aggttgccacttttccatttttcatttttaggatcaataacaatgttagtattattaaatgctacaagctaaatttctatcttgatgtggataaaatcttttttatgtttttccctggcttgttgaattgatgaaacaagtgtttttattttatgaaggttaggatatacacagcttcacaagttgacaatgagttggaagcagcaaagagggattatttacaggcagcagttggcattacaaaaacaagcaagttaataattccaaagttactagattggtatttacttgactttgcaaaggacttggaatctttgttggattggatttgcctccagctacccattgaactgagaaaggaagcaattgaatgccttgaaagaagggggagacagcccctttcgcagctggtacaaatgatgccc

SEQ ID NO: 17729 - DNA, 436 bp, Zea mays
  Coding DNA Sequence Number=SeqID_3326
tgaacggcatcaaaatccctggcgactgggggctggagattggcgtgctgtcagagatttatcgcaattacaccacgcggcagacctgccaggtggaaatcgcggacaactacgaccataagcatcagccgctggcggaagaggacggcaccggtggcctgaaacgcatgagtaacgatatcgtgcagtcgctgctgcgtaagctggcgacaatgggcgtgccgctcaccagcgactcgttccgcgtgctgaaggccacctattatcgcaacgcgctcgacatgatggagatctacaaccacgaagccaccatgaacggactgaagtttgatcagcacattgaagaagcggcggtcgagatgttcactcaggcgattctcgacgccggccagtcgttcatcgagcggccaaacgagaaaccgtttatccccagctg

SEQ ID NO: 17730 - DNA, 489 bp, Zea mays
  Coding DNA Sequence Number=SeqID_3327
atgtgtgccacgcatcagacgcagcactggatgctctgtccgcagtgtgatttaaccgtaaaactgcccgccgtaccggtgggcagccgtgcgcgctgtccgcgctgtcacaccacgctggtggctaactggcacgaaccgcgtaaacgtcccaccggctatgcgctggcggcgctgtttatgctgctgctggccaatctgtttccgtttatcagcatgcatgtggctgggctcagcagccagatctcgctgatggctatcccgcaggtgatggatcgcgaggattatcgcagcctcgccacactgttcctgctgtttgtgcagggcattccggctttctgcatgattgccattctgctgctggtgaatccggtgcgcttgccgcacagcctgcgactcgggctgacacgcattctgtttcaattgcgcagctggggtatggcagaaattttcatggccggcgtgctggtcagcttcgtacaaactaat

SEQ ID NO: 17731 - DNA, 245 bp, Zea mays
  Coding DNA Sequence Number=SeqID_3328
ggagtatacaggatgaagctttattgtcacgcgatatgcctcaatctccccctttgggggtgttctcgactaaaataccccatcctaacatatctactagtggagagatatgtgtaaacaccctgacaaatgattggaatgactgaccttgcattaaaacatgttcttctggctagattggtgtagggcacacataaaacatttcatagtattcttcgtagggctgattaatgtatttgtcaaca

SEQ ID NO: 17732 - DNA, 522 bp, Zea mays
  Coding DNA Sequence Number=SeqID_3329
gagtcaccgggcattgaagccgacaagctgaccaaagtgctctatcccaatgacaaccatgcgccaggtaaacgtctgcggctgatgcagcagtatttccagtgcgcctgcgcggtgagcgacatactgcgtcgtcaccggctggcgggccgtgcgctgcatacgctgccggatttcgaagttattcagctcaacgatacccatcccaccatcgctattccggagttgctgcgtctgctgctggatgagcatagcctgagctgggacgacgcctggcacattaccagccgcacctttgcctataccaaccatacgctgatgccggaggcgctggagcgctggccggcgagcctgctgcgcgaactgctgccgcgccatctgcaaatcatcaaacagatcaatcgccagctgaagcagcaggtcaaacagcgctggccgaacgacagtgccctctggcacaagctggcggtggtgagcgacggcgaagtgcgcatggccaatctgtgcgtggtgagctgtttc

SEQ ID NO: 17733 - DNA, 302 bp, Zea mays
  Coding DNA Sequence Number=SeqID_3330
atgcaacatcctaaccccggtgcgtttccgcacggctttctgtggggcgcttcaacctcggcgtatcaggttgagggtgcctggaacgaagacggcaaagggccgtcggtgatcgataaaggccattttcctgaggggatgacggatttcaccgtcaccagcgatcactatcatcgcttccgggaagatatcgcgctgctggcggagctgggcctgaaaacctatcgattctccatcgcctggagccgcatctatccgcagggtgacggcgagctgaatccggcgggcattcagttttatca

SEQ ID NO: 17734 - DNA, 292 bp, Zea mays
  misc_feature (35)..(35): n is a, c, g, or t
  misc_feature (78)..(79): n is a, c, g, or t
  misc_feature (113)..(113): n is a, c, g, or t
  misc_feature (138)..(138): n is a, c, g, or t
  Coding DNA Sequence Number=SeqID_3331
ccttcctcggcgacaggggctacggcggcatggtntacggctccaacatcgtgctctggaagtggtgcgagggcggcnnccagcggtggaagatcgtcccctggtaaatgtgntgttctgtggctgctctggtctccnacaagaaagaaagcagagcccccccggttgttttattggtctggttaaaataacatcgtttctctagttaaaaacaagataaaaattacatcagttaagacacagaaccgagagaagagccaacgcggttcatctcctccgatataaatctgct

SEQ ID NO: 17735 - DNA, 403 bp, Zea mays
  Coding DNA Sequence Number=SeqID_3332
acgtgcgccgtgacgctctggccgaccttaagaaactgaccaaggacaaggaaatcagcgaagacgaagagcgtcgtgccgctgacgagatccagaagctcaccgacaagtacgttgccgaaaccaagccagcggcgccgtcctcggtgccgcgtcatgtcgcgatcatcatggatggcaacaaccgctgggcgaaaaagcgcctgttgcccggcgttgccgggcacaaggcgggtgtcgacgccgttcgcgcggtcatcgaagtctgtgccgagtcaggggtcgaggtactgaccctgttcgccttctccagcgagaactggcagcgccccgccgaagaggtcggtgcgttgatggagctgttcttctcggccctgcgccgcgaggccaagcgcctgaacga

SEQ ID NO: 17736 - DNA, 223 bp, Zea mays
  Coding DNA Sequence Number=SeqID_3333
caagacccattagaaattttcccatcaaatgggtattctattttttttaagatatgcatatatttatcatgatcgaaacactaagatcctgttgtagttttctttttgcatataaatgttcaatctcactaaaaaaaaatgtttagtgagaagaaatcaaaattcttttgaaatctaacggttagaagagcaacataaggatccccacaaaagagttgcatag

SEQ ID NO: 17737 - DNA, 218 bp, Zea mays
  Coding DNA Sequence Number=SeqID_3334
gtctctatggagataaagctcgtccaggtgtacagtgagaatacagtcctcttgaggccccagctcaggtttaatgagggagaggacttccttgagagtggaccttgacatccgccggttcagcaacagtgctaggtaggggctggactcgttcaaggcacgcctcaagagcggcatcctcgattgggggtcaacgatacaggacaaattccattcag

SEQ ID NO: 17738 - DNA, 327 bp, Zea mays
  Coding DNA Sequence Number=SeqID_3335
aagccaatatggtggtctgtgattctgatttttgtactgggattcaccgcaggcggttttattcttggaggtgtccacaacgctattctcatcatcgttgttgtaattctttgtggtgcggtgcgtgcatcattcacttggaatagttgttttgcaaggaaagccattgttggtttcatttcccgttacccagatgcagagtttagatctgccaagaatggacaatttgcgaaggtttctggggtatattcaattaagcaaatacccatgggaaaagcacagtcttgcaaacacacacatgcacacgtaaccatccatgctttgatc

SEQ ID NO: 17739 - DNA, 385 bp, Zea mays
  Coding DNA Sequence Number=SeqID_3336
aggtgttcgatctgcgtgagagcatgtgcaacggcggcggaccggcctgcctgcgtctgcgcgtggtgttaaccgaggcggagcgtcaggccgtcaatccggccgtgctgatgaacgatcgcctgtttacgcgtctgaatgactgggtggatcgtcactatcgcgaccgcctgacgcaggccgacctggccgatccgcagctgctgagcgaagggcgaagcgcgctggacgagctgacacagctgctagacttaggcagtgtctacgcgtttcagcgcaggccgcccgcgcagcggcagggcagtaacgcccacctgcactggcagtggcatgatgagggcatactatccctgacaccgcatacgcccacgcagcaggcgctggt

SEQ ID NO: 17740 - DNA, 288 bp, Zea mays
  Coding DNA Sequence Number=SeqID_3337
aaggagaccatgttgaagggcgcccgacggacccggaacgcgcgagggacctgccaccagcgggttgttttttcagctgcaccggaccgcacacccccgcgacgggacgttgaccaagaaccggaactggaggtggcctacccgggcctgaccctgcctggaagcccgcgccagcgacgcccacgcgcgagggcgacaccaccgaggccactgccggtgccgcactactgccaagccacgacagccgcgggggcggccaacgctgcgagcccggagcgcaagaacctg

SEQ ID NO: 17741 - DNA, 280 bp, Zea mays
  Coding DNA Sequence Number=SeqID_3338
accccacgcacgagaacgagcgaaaagcaaccgagaaaagcacacatgctagcatgcaagcgtgacaaaccgagaggcgcgaggggggctcaaaggaaggacaggggctccaggggcacaccgtacagccggtgggcgggctccacttggaagaggacgagcaagggcagcaacgccggaccgccagcgggggaaagaaagaaccacaacaaacagcggggccgaaaggaagcgacgtgcgccgcgaagacagcgtccagggagacaacgaccaaaaacg

SEQ ID NO: 17742 - DNA, 218 bp, Zea mays
  Coding DNA Sequence Number=SeqID_3339
ttgcatcgtcgagccaacaccattgttgcaggcggcatcagcatgtggagacaattcctcgaacacaaggtggccatccagaatcgcgtgacccttgttgatgtgctgttggagttcgatcatatcaggaggcgatttgcacagcctgaagatcttcagcagctgatacacctcgccactgccgggcatgaggggcttgccgaagaacatctcggcga

SEQ ID NO: 17743 - DNA, 278 bp, Zea mays
  Coding DNA Sequence Number=SeqID_3340
gaagaaccagctctcacggggccaatccaatcctccatcgggaaatttcagcctgccatccttgtcgtccgccatgcaggcccctaccgccatggacttgtctcacaaccagctagacggcccgcttccctctgacgtctctggcctcaccaaccttggtcaggtagcgctatccgggaacaaattgatagtgacgaaaaaccaactgcctcgctccccgcccgctgcctcgctcgccggacgtttcgttcgtgaacctacgcgccaccttcgtaaag

SEQ ID NO: 17744 - DNA, 130 bp, Zea mays
  Coding DNA Sequence Number=SeqID_3341
aagcccgttaggttcttcgtcagcaccggaacgcagggcggggggcaggagaccatggcgtggcgattgtccacactgactccacatccacagcttctctttctttgcctttcgtatcggatggatggat

SEQ ID NO: 17745 - DNA, 447 bp, Zea mays
  Coding DNA Sequence Number=SeqID_3342
agctcagctatcctatactgccgcaaccggtcgaactgcatggcaatctgacactgccgacttttgccgatggcctgccggtggcgggtgagctcagcggtgcgcttaacctgacgcagtggccgcagccgctggcgctgacgcttaactggcagcagcagcagggcgaactggtggtgcgccagcaacaggaaccacagccgttgttgcagctgccgtggcaggtcgatgcgcagcaaatccgcatcactgccggtcactggcgctggccgttcgggtcgcagccgctgtcgggcggcgtggcgctgacgctggatgactggcagcaggggctggaacagacgcagatccgcggccgctttaatttactgaccgccggacgcggcgggaaaggcaacctggtactgagcgttgggccgggcaagctgagcctgactgacagcgcac

SEQ ID NO: 17746 - DNA, 323 bp, Zea mays
  Coding DNA Sequence Number=SeqID_3343
gcagcggtccagcactcctgtgcttccctaccgcgatgcgatgcagccttttctcaagtggattcaaggctgccgacccgtccaatcttgggccccccggttcgggcgcagctgcgactttggcggcaccgccgccctcaccaccgcagacccaagcacttcgacgtgccagtatccatcaacgagcaccggcgcttcggtcctgaacacgtcgactccgctgacgccaacgaacgggtctccgcccggccccgggtacgggagctctccgccggccggatacgccaactctcctccgctgtacgggaacatgtcgccgccgg

SEQ ID NO: 17747 - DNA, 268 bp, Zea mays
  Coding DNA Sequence Number=SeqID_3344
atgatgcagcaatacctgcgcctgaaggccgatcatcctgacatcctgctgttttatcgcatgggcgatttctatgagctgttctacgacgatgccagacgcgcatcgcagctgctggagatctcgctgaccaaacgcggcgcgtccgccggggaaccgatcccgatggccggcgtgccctatcatgccgttgagggctatctggcgaagctggtgcagctgggcgaatcggtggcgatctgtgaacagattggcgatccggcactca

SEQ ID NO: 17748 - DNA, 168 bp, Zea mays
  Coding DNA Sequence Number=SeqID_3345
gcagcaccgccgttggatatttgttgctggagtacactactcgctatcacagtgcaacggtgctatgtgaagatctcgacggtgacggcgggttgcgcctcgacgactgcggcgacatggcgaatgagagcatggtcgcgggcagctccaccctgacggtgcagaaga

SEQ ID NO: 17749 - DNA, 458 bp, Zea mays
  Coding DNA Sequence Number=SeqID_3346
atgccgacctcgcaaatcatgttatgcatgggcgaatggctggcgcagcggcgtgatgagggattagtgacggatatcgtctggcagagtattgatgacaacctcaaccatctgtcggcgtatctgggtggctgcgaccggctggccagcacaccgattcccttcgcctacagcctgattctgcaccgcacggtgtatctgttctgcaccctgctaccgttcgcgctggtggccgatttgcacctgatgacgccgctggtgtcggtgtttatttcgtatacctttttgtcgctggagtcgctggcggaggagctggaagatccgttcggcaccgcgcccaatcatctgccgctggacgcgctgtgcgtgaatatcgaacgcaatctgaaagcgatgaacaacgatttcccgctgccggcagcgagccagccggaccgcggcgcgatttatcatacgta

SEQ ID NO: 17750 - DNA, 182 bp, Zea mays
  Coding DNA Sequence Number=SeqID_3347
agagatccccctggagattcgcaaacagttgctgatcagcctattgaatgggtgaaggttacgttgtctgcagttccaggagttaacatggaagatgtagatgataatgaaccaacacgaaagaaggaccatcgccgtgttcctagtacaattgccattgaggaagtaaaggctgcagcatt

SEQ ID NO: 17751 - DNA, 279 bp, Zea mays
  Coding DNA Sequence Number=SeqID_3348
gcttggattatttggaatttggactttacaaaacagtcattatgacttggctaatgttgcaccaacacttgcaaagttctatcatcaagcagtgaatcctatgaactagcttgcactcgccacatgagctcacccatttatcttcaatttgagaggttatttcagttcaaccggaaagtcaacgaattgacatacactattgcttctaagaagatatcgtttcaactggggttgtaaaaaactgacataaggaggggtactgaaatcaaacttatatgg

SEQ ID NO: 17752 - DNA, 397 bp, Zea mays
  Coding DNA Sequence Number=SeqID_3349
tcaagccgccaactttagcaatgttacccttgagatagccttcacattcccggacactgggcctttgccgctgatggagaagaggttgctatgacagccatgtttgtgtccgctgattggttgaatgaacattaccacgaagagcgtttgcaggtgctggatgcccgcatgctgccgccaggtcaggaagcggtgcgcgatatcacggcggagtatctggccgggcatctgccggatgcgccttttttcaacatcgaagcgctgtccgatcacaccagcccgtatccgcatatgatgccgcgcgcagagacctttgccgtggcgatgcgcgagctgggcatcagccaggataagcatctggtggtgtacgacgaaaataatcttttctccgcgccgc

SEQ ID NO: 17753 - DNA, 236 bp, Zea mays
  Coding DNA Sequence Number=SeqID_3350
tgtcccgtcccgtgcaagtaaaaagcttgctgcttgcgccgtacgcacgtcctgagcctgcgtgtgtttgtttcttcatccagggctgcgacgggtccatcctgctggacaacagctccagcatcgtgtcggagaagttcgccacgcccaacaacaactcggcgcgcgggtaccctgttgtcgacgccgtcaaggcggcgctggaggaggtctgtccaggcgaaatatcctgtgct

SEQ ID NO: 17754 - DNA, 560 bp, Zea mays
  Coding DNA Sequence Number=SeqID_3351
atcgtcgatgcgtcgcgcaaggcgcagctcgcgcaggtgatccagcagatcctgcccgagcacgacgaaccgctgccgaacgcggcgaagctgcatcatttccttgccgacgaactcgcgctcacgccggacacgagcgcgctcgtcgggcaggccggcacgctcgtcacgcggctgtcgggcggcctcgccgcatgggcgcgccagctcgagttcacgccgttccggctgcgcgtgaccggcaccgccggttcgggcaagacgcaactcgcggtgcaggcgatgcgcgatgcggtcgccgcaggcaagcgcgtgctgtacgtgtgtttcaaccggccgctcgccgactacatcgcacgcatcgcgccgcccggcgcgaagatcgcgaactaccatcagctgtgcgactgggtggcccgcgacggcggctatacgcccgacttcgacgcgcccggcgcgttcgagcggctcgaggcgcgcttcgcgcaaacgccggtgacggagcgctggcgtttcgatgtgctgatcgtcgacgaaggccaggatttccacgcgccatg

SEQ ID NO: 17755 - DNA, 204 bp, Zea mays
  Coding DNA Sequence Number=SeqID_3352
atgccttcgaagatgagctacattgagattaggcggtctactctgaaggagaaagatccgcagtccatgaggaggcttgagtacttcagtagcaaagtgaatgtgcgtcttcctggggaagaaacaacaccgaagccagggaaagatgaagtcattgtgtacaagagcttcttcaaggcgggactttggctccctatgtataag

SEQ ID NO: 17756 - DNA, 395 bp, Zea mays
  Coding DNA Sequence Number=SeqID_3353
tggattgacccttttaaatataacaaaagtttttctgcttggaagttttaaaaaaagatgtcctttataatatatttatttctgcttgtaaaggaatatgttaagggtatcggtaatgattctgtaatactgagttggctgcattctttcggtaagcagttctacagatcagtatccagatcagactacaccacaatgcgtcttggctttatcaagactcactgcccttcaaacccaaaattcgatttccatggatacatggtaagggttttggaggctgattttaggagagtggtaggcatcagctggtacctgtggatcttcgtggtgatattcctgttgctgaatgttaacggtaaaaaaaaaacttagctatatcctctgctaagtgctaa

SEQ ID NO: 17757 - DNA, 407 bp, Zea mays
  Coding DNA Sequence Number=SeqID_3354
gaaagctcttgaacaaaggctcctgcagaagcaaagactgcaacaagaaatgatgaaatacatatcacttcggcaactaagccaggttgaagatgcccctgatctgcaaaaaagaatcatcggatgtttccggaacatatctcgcttatttagtgattctgcaaagtgtgaggagaacttgaacatgcttcatcagctaaaagatgctgatatctggaaaatattcactagcctgcttaattgttcaactacatttgagaaagcttggtctcttcgggcagatttgcttaagatatttggtgaaaaacatgtgctttataattttgttggcgcattagcaatgggatgttcatatttacttgtaaacaaggagtatgcaaaagagatcctttctgaagcttctgaac

SEQ ID NO: 17758 - DNA, 296 bp, Zea mays
  Coding DNA Sequence Number=SeqID_3355
ctgtggcagatgtacgcggacgatccggatccgctcgcggtcggcgcgcagtggaatgcggggatggcgcgtgcgatcggcgcggcgatggcggcgcgcgatgcgctgccggccggacggtttctcgacgtgaggttcgaggacacggtatcgaatccgctcggcgtcgcgcaagcggtgtaccgcttcgcggggatgccgctggatgcgcggcagcgcgcggcgatcacggagtggctcgcgcgcaacggccgcgacaggcgcgccgcgcacgactattcgatcgcgcgcttcgg

SEQ ID NO: 17759 - DNA, 82 bp, Zea mays
  Coding DNA Sequence Number=SeqID_3356
tgaagctagtttttggtatggacatatggttgcctacatcagatcattaaactggatttcttaacagttttttctttcgcag

SEQ ID NO: 17760 - DNA, 306 bp, Zea mays
  Coding DNA Sequence Number=SeqID_3357
tttgtattaacccatcccctgaattcatgccatgtagctgaaactttgtgtaccataactcgagttgcatcatctactctagctattaagctttcaagtccaagttttgttgcaaaaattttgggttatgcattggaagattcacaatcaaagtctagccttgtcaactcactttcagtgtgtatttctttgttggatcccaaaaaatcagctatttcatctccactttttcattcattccgaagtcaaaacatgtatgagccaccaattcctgtaaatccagatactattggtgcaatgctacct

SEQ ID NO: 17761 - DNA, 67 bp, Zea mays
  Coding DNA Sequence Number=SeqID_3358
tgcagacagggcatccaagatgtccaaggccgtctcgatacactctcaattcagcatctatgttatc

SEQ ID NO: 17762 - DNA, 376 bp, Zea mays
  Coding DNA Sequence Number=SeqID_3359
tgaagtactcaccagaatcccttgaggcatttgtccagactgtcgccagcggctcgttttccgcaacggcgcgtgcgctggcaaaaagtcagtccaccatcagtagctcggtggcctatctcgaagatgacttaggctttgctctgtttgatcgcagcggtcgccagccggtgctgaccgatcagggccagcgcgcgctggcgctaggtgcagcaaattcttgctgccagccagctggctggatgaactggcggtcgtgctgtcgcagggcgatgagccgcgtcatcagcctggcctatttctgacttctggcaggctgatctccatgaaaatctgttgacgcgctgtgaggcacgctatccgtatatcgagtttg

SEQ ID NO: 17763 - DNA, 503 bp, Zea mays
  Coding DNA Sequence Number=SeqID_3360
agtccagcccgacgccgattgtgctgttcgtcgacgaaatccacacgctggtcggtgccggcggccagcagggcaccggcgatgccgccaacctgctgaaacccgcgctggcgcgcggccagctgcgcaccatcggtgccaccacctgggccgaatacaaaaagtacattgagaaagatccggcactgacacgtcgtttccagaccgtgcaggtgcaggagccggatgaagccaaagcgattctgatgctgcgcagcaccgtcagcgcgctggagaagcaccatcaggtactgctgctggatgaggcggtcagcgcggcggtgaagctgtcgcatcgttatattccggcgcgccagctgccggacaaagcggtggcgatactggacaccgcctgcgcacgcgtggcggtgagccagggcgcacagcctgcggcactggaagattgcctgcatcgtctggccgcgctggagattgaagcggagatcattgagcgcgaaagcaaa

SEQ ID NO: 17764 - DNA, 354 bp, Zea mays
  Coding DNA Sequence Number=SeqID_3361
tacaggaatccgaagcattcccgtcggctaggcatgtgtctgttatgtgtgtaaactcaatgcatgtccgcccctccggcctcgcctagctccaaagctccctcctgctcacgggcacgcggcctcgccctgggggccatgccctgggccgccgtctcgcctcgtgtccacctcgtccagcgtcacaagtggcgctgccgccggtgatggctacttcgatctcccgtccgccgtcgactcgtccagcagtacctacgctctgaagccgatcccctcgccggtggtggcggcgtcggctgacccgtccccggactcggcgcgggagcccaagcagatgcgaactggcccgcgcct

SEQ ID NO: 17765 - DNA, 175 bp, Zea mays
  Coding DNA Sequence Number=SeqID_3362
gcatccgcatgcgtgagcggacgatgcttaaagactgcagaactgtgaatgagcaggagaggctgaccaaagtttgctatggcacatattgcgcattatacagagcaatggatacgatgacaactgagattatggccttaaagaaggtcgagatggcgattgaacccgaaggtta

SEQ ID NO: 17766 - DNA, 201 bp, Zea mays
  Coding DNA Sequence Number=SeqID_3363
ttgggtgcaatctgtcacctttcaagtcatttcaggtatgttgcaattgtatggccagatatcccttcttttgctgtatacaaagcaaatgattggtcagttgttgattcaggcacagggaagctttttgcctgggacacttgtcgagacagatatgctctggtagagagtgcattggccccaagaatgccacttgttgtt

SEQ ID NO: 17767 - DNA, 111 bp, Zea mays
  Coding DNA Sequence Number=SeqID_3364
aaagccgaggtcgagcagcaaaggtctccggcgacagctagcttgctccccggatcggagggtctggaggtcgtaaggaggaaggagcccatggagctgtttctgcagagc

SEQ ID NO: 17768 - DNA, 512 bp, Zea mays
  Coding DNA Sequence Number=SeqID_3365
ggttgatttgcagaaccgtccgttccgcctgaccggcgacagcggcgaatacacggcggatgcgctgatcatcgcgaccggtgcttcagcgcgctaccttggcctgccgtcagaagaggcattcaaaggcaaaggggtttcggcctgcgccacctgtgatggtttcttctatcgtaaccaaaaagtcgcggttattggcggcggtaacaccgccgttgaagaggcgctctatctggcgaacatcgcttccgaagtgcacctgattcaccgtcgtgacagcttccgcgctgagaaaatcctgattgaccgcctgatggagaaagtgcgtaacggcaacatcgtgctgcatactgaccgcgcgctggacgaggtggtaggcgatcagatgggcgtcaccgggttgaaactctcgtcaaccaaaggtgaagccccggtctcgctggaagtggcgggcctgtttgtcgccatcggtcatagtccaaacacggcgattttcgatggccagctggatc

SEQ ID NO: 17769 - DNA, 284 bp, Zea mays
  Coding DNA Sequence Number=SeqID_3366
gaaaggctctgtgtctttcttggcagtccccacgccctcgccaccgcgctgcaggggcgacgcagggccgagcgctcctcgatccagagccaaggtaggagatggctctcacgagaattggcctcgccggcctcgcggtcatgggacagagccttgccctcaacatcgcgcagaaagggtgccccatctcggtctacagcagcacgacctccaaggttgatgagaccggcagcgtgccaggtgaaggaaacctccggttggttcacgacccctcttccgagcca

SEQ ID NO: 17770 - DNA, 410 bp, Zea mays
  Coding DNA Sequence Number=SeqID_3367
aacgggttgtatgcgctggatcgtcagcagcgcccactgtttggcatccagtcgattgatcatcgcgccagcgccacggtgcaggcgctggaatccagtggtgcggcggagcagatttacgcgctgtcattacaaaaaccgtggcccgccgccacgccggtgctgatcagctggatgcggcagcatcagccggaacgctgggcgcagatcggccatctgctgtgtgccaaagatgtcatcgcccattttctgtgcggcaacgtcagcgcggactattcggatgccgccggtgccgggctgattgattatcgccagcgcagctacagtcgtgaattgctggcgctgtacggcatcgaagaggcgctcgccctgctgccaccgctgcgtgaatcctgcgaggttaccggcgt

SEQ ID NO: 17771 - DNA, 395 bp, Zea mays
  Coding DNA Sequence Number=SeqID_3368
tcattttcgtatctctcacacgctaacacgctcgccatcttccgacctggcgccgccaccgccgccgccacgcttcttgcctcctcgtacctccggatccgccgctcccgcgacgctgccaccgtcctgcgcctatctctctcgtccggcattgcgatgaagcaatacaccgcttcacagatactttttgctctcattaagattcggcaatttgctcttgcccgcgacctgttcgatgaaatgcttcaatataaatttcccttggacgagtatgtttacacggccggaattcgggcctactgtgagataaggaatttggatggtgcggggagattgttggcgaggatggaaagtgagggtgttaagggcagtgctgtgccatacaatgtgttgat

SEQ ID NO: 17772 - DNA, 233 bp, Zea mays
  Coding DNA Sequence Number=SeqID_3369
tgcctcagctatcttccatggccagagggggtctccagcagcataccgcgaagaacttggctgggaaggaaccggatagtttgagcgtccgtggtagtgtcgcaaagcttaatgccaaatctgggaacatgcaagtgaaggcttaagcacaaaccctccccaaggttaatggcaccaaggttaacctcaagaatgcaagctcagacacagaggaggcgataccctacactgcc

SEQ ID NO: 17773 - DNA, 300 bp, Zea mays
  Coding DNA Sequence Number=SeqID_3370
caaaaagcccctgggataattagcgttaaaaggggggtacccatttttaaatccccggtaaaaagtcttttaaaaggcgaattttaagggcccattctgttttaaaccttttgggaaaaggggtctttgcttgaaaccccattatttggaaaactgccggattttcccatgtgctaaatgtgtaaaaagttgggtaacgcaatggatttccgtgtaaagatacttgtaaatcaaaggccttttaaattcaatttaggaaactttattacatagaatatgacgccccatttattttttatc

SEQ ID NO: 17774 - DNA, 294 bp, Zea mays
  Coding DNA Sequence Number=SeqID_3371
ccgccgatgcgtccaccggtatggacggccttatttatctatatacaacggcacgcgggatcctctgaccgtgtccgacgagatgcaccccacaggcgacgcggtggatgacgccctacccgtcgcgcccgacatcgccaagggcgaggtgatggaggacgacgtcctacccgtcgctaccgacatcataaaccacgccgacttactatgccccgaggctggcagtagatggcgacctactcaccgacgagctccgcaatcgcatcgtcaagcaggtacgctctctgtggacct

SEQ ID NO: 17775 - DNA, 458 bp, Zea mays
  Coding DNA Sequence Number=SeqID_3372
acttctgccgccaatcttgactggttcctgcgtgaatttgatgatggccgcgccggccagggcgcggcgcgcagcagcgacagcgtggcacaggtcaggcctgacgcgcagctgccgctgtatcacccttacctctattcagggcggaaagccgaacccgccaaagctggcttttacggcctcggcggctggcatacgcgcgctgacatgctgtttgcgctgttcgaaggcgtgacctttgcccaccgggcgcacattgaccggctgcgcgcggcaggcattacggtgaaccaggccacgctctccggcggcgcgacgcgcagcagtgtctggccacaaatgtttgccgatgtgctggggatgccgattcgcgtcgcaacctgccacgaaaccggggcgctgggcgcggccctgtgtgcgggcgtgggcgtgggtcagtggccgaatctggctgccgc

SEQ ID NO: 17776 - DNA, 296 bp, Zea mays
  Coding DNA Sequence Number=SeqID_3373
gctatggaccttaatggtttggtgcttttggattctttccttggggaaggtgaaggccttaaccaattggcatttggtgcccaagaaccagggaagaaccatggtgccttcccttggtttttccaggtaagaaaacttgaaaaagggtcttcaattggttattaaaaaggaaagaattcggaaacaagcattaatggcaagttctaatcttcccagcaaagtccttaagattgaagcattgtgaaaaaaggatctccaaaaggtcttctgtcataagtctcttaagctcccgttct

SEQ ID NO: 17777 - DNA, 269 bp, Zea mays
  Coding DNA Sequence Number=SeqID_3374
aagccacgggcgcaagcggaaccggaccaagaacaccccggagcaaaaggagcggacgcgcgagaacgcggagaaacagggctggcgcaaccagcgcaacgacgacggcgcccacgaccgcaacagcgacgagaacggcggcaagcggcaggggcccaaggagcggaggcacaaccacaaaaaccagcgcgcctccaaccccgcagccgcggccgcaaccgcgggcaacggccacagccccgccgcaggcgccggcaccggaaccgcca

SEQ ID NO: 17778 - DNA, 327 bp, Zea mays
  Coding DNA Sequence Number=SeqID_3375
gacaaccgacccaagcggcgcatgaaaagggaaccagaggcagcacggaacgcgaacaacggagggacacaccgccagcatgcaacaccagagggacccaaccccaccagcggtgcacaagaccaggaccacagacgatagaccacaggcccccggggagccagcaaagcacagacgaggaaggccgcacacaaacggaccagagggcacgacgaggcaacagacgcaggaacaagcagaggcaacgcggcagcagcacggcactacacaggcgaggagaggggccccacccccagatcccgacatgcaagagaacgccggccagga

SEQ ID NO: 17779 - DNA, 188 bp, Zea mays
  misc_feature (112)..(112): n is a, c, g, or t
  Coding DNA Sequence Number=SeqID_3376
gtaaacgtcacttgtgtaaaacatgtttcagtaaacaagtttttccgttttcatccgttgaagcactgccaccacgttgcacagacagcatttgcacgcacacaagtcaagnacaaacagtatttaaatccatatagatactaagttgtacaacaaaaaaatcaatagttttaccatcaatccggacg

SEQ ID NO: 17780 - DNA, 454 bp, Zea mays
  Coding DNA Sequence Number=SeqID_3377
gtacctgagcgagccggtggactatgccttcagcgcgattcgcttcctgccggtggtggaaaacccaggcaaagtcttctgcgttggtatgaactatgccgacaagcgccaggagtttgccgccacgctcgacgcgccgacgctgttcgtacgctttgccgattcgctggcagcacacgagcagcccctgctgaaaccggcgaccacggctgaatttgattacgaaggcgagctggcggtgatcatcggcaaggctgcttatcaggtaaaagccgccgatgcgctacagcacgtagcgggctacagctgctttatggatgccacggtgcgcgacatgcagttcacctggtttaccgcaggcaaaaactggcagcaaaccggcggctttggcccgtggatgaccaccgccgacgacatcccggacccgcagcagctggcgatcaaaacctggctg

SEQ ID NO: 17781 - DNA, 304 bp, Zea mays
  Coding DNA Sequence Number=SeqID_3378
tgcaggaataccagccgccgcagggccccgactgggcgcgcgcggccggcgccctgtggctggccgcgcccggcttcacgccgtcgcccgaccaggtggtcgtcacgagcggcgcgcagcacgggctttatgcggtgctgaacagcctgatcggcaccgacggcgtgatcgtcgccgaccggctcacgtattacgggctgaaggcgctcgcgccggtgttccagttcgagatcgtcagcgcggcggccgacgacgacggcctgctgcccgacgagatcgaacggatctgccagcgcatgcccgt

SEQ ID NO: 17782 - DNA, 204 bp, Zea mays
  Coding DNA Sequence Number=SeqID_3379
gggccgcgatgaacataatgcacgccgtgcgccgcgtgtaagctgctccggcgacggtgcgcgcaggagtgccccttctcgccctacttctcgccgctggagccgcacaagttcgccgccgtccacagggtcttcggtgccagcaacgtctccaagatgctcctgttcatcgggcatcacaaaactctggatttttgccataca

SEQ ID NO: 17783 - DNA, 299 bp, Zea mays
  Coding DNA Sequence Number=SeqID_3380
agcaggcaggtgcaggtctccgggtggggcgcgtttctatttctatttctaccagacaatcacatggtcgggtctcgggtcatcacgcacatgtggggatttgagcgagtcaacaactggcgtggcctcgtggctcttccgccgcccaggcactccaattcctccgcgttgctcgcgtcacgtgatgaactgatgatgggccgaaggcggcggcttcctctcccgccgtcgacgaggttcggcttgtgtgccctcgccgaccgctcccccgtcaccgtctgtgctgagtgtgcagtgat

SEQ ID NO: 17784 - DNA, 503 bp, Zea mays
  Coding DNA Sequence Number=SeqID_3381
tgtggagtgagtttcctgccggtccgcaactgttgtatgcgctgcaaaataatgagattgattttggtaccaccggtgaagtgccacctatcttcgctcaggccagcggtaacgccgtgacttatatcgcctgggagccaccggcaccgggcagcgtcgggattgtggtgccacgcgacagtactatccacaacctggcagatttgcgaggtaagcgtatctcggtcaataaaggatcgaatgttcactggctgctgttgcagctgcttgaggaagccggcatcggtctggatgaaattaaagtggtgtacacgccgccgaaatatccgctcacagccagcgattatctggccgttgatgcctggatgatgtgggatccgctgctgagtgccgcagaaagcaacgccgatttgcgcgtgctggagaagggcgaaggccgggtgcgcaaccaccagttttaaatggcgcgccatgattatgtgcagcagcatgacgatatcgtg

SEQ ID NO: 17785 - DNA, 214 bp, Zea mays
  Coding DNA Sequence Number=SeqID_3382
aatgcaatgaagctcagctctcctgctttctctaaaaaagatagcaatgtaccaatagtagataaatatgatattatgttttatttttctaccttatttcagaaaacagagcatggtagagtatgttttggtagatcaggaattcataggtggggactttttgctcggagggacattcaagaaggagaaatggtactttccttctcatatgttg

SEQ ID NO: 17786 - DNA, 335 bp, Zea mays
  Coding DNA Sequence Number=SeqID_3383
gcagatcttccgtcagacctgggaaccgagcgttgccctggatctgaacaccaagcagaaagccctggaaggcgacttccacgaggtggtgctgaccctgtcggttaccgtcaagaacggtgacgaagtggccttcatcgctgaagtgcagcaggccggtatcttcctgatcaagaacctggatgcggcttcgatgagccacaccctgggtgcgttctgcccgaatatcctgttcccgtacgcccgcgagaccctggacagcctggtgacccgcggttcgttcccggccctgatgctgtcgccggtcaacttcgacgccctgtacgcgcaggaaa

SEQ ID NO: 17787 - DNA, 165 bp, Zea mays
  Coding DNA Sequence Number=SeqID_3384
gcgcatcgcggccaatcatgtagtcgtcgcggccggcaccggttcgcggcaattcttcggccagctcggcgtgcgcgtgccgctcgaaggcatcgccggctaccaggcgctggtgaccgatccgggcgtcgagttccgccactccgtgatctatgcggacggcgg

SEQ ID NO: 17788 - DNA, 230 bp, Zea mays
  Coding DNA Sequence Number=SeqID_3385
ggaccccacgcccagcccggcagcgacgcgggccagccggccggggcgcccggccgaggcccacccggccaagagacgcgcgccccccccggcggcggcagggggccccccccccgccgggacgcggacccgccgcggcgcgccccgggggggggggggggcggccccaaccccccccgccatacaccccacgcacccccaaccgccgcacacgccccggccctaccgag

SEQ ID NO: 17789 - DNA, 496 bp, Zea mays
  Coding DNA Sequence Number=SeqID_3386
gactgtttagtcctcgatatattatccttaagtcaatagtaactgttaagggcatggttgtaattctacacaggctgcgttctgtgcttataaatagatgaacagtgacatcgtactgttcacgctgattggtattcactcgcacgtcacatctggattctcgccttctggaataacactacgtaagtgtttgttagacgacgaccacttggggaccatccttttgtgttggcacttgttcagtcggttcttcttcaggttgatccatcaacattaccttgtggagtagcccacccattacatcatcttacagtcgagttgactcgttttctgcatcacgtgataaactagcgtaccaataaaataaactcaacttgaagaccgcgatatcagagaataattctagttcgcgcgcatctacgcaaaattgatggggaaccgttatgggctatgtttctccagcactaactaggtatatcctgttagttcggacaat

SEQ ID NO: 17790 - DNA, 293 bp, Zea mays
  Coding DNA Sequence Number=SeqID_3387
gcaaggttcaaaaataagtccaagggtttttccttcaagatggtggccgccaccaagacaaaaaaggctgcggggtggcccaaacaacgggttaaggggaagcccctgccttctacgttgttatatcacgtcatcagcacgccagccgtccgcaacctcgaaggcctacaaataacctaggacaccgagggccaccacattgtcaacctcatcgtggccgaagactggcgggccctaataacactatacatgcaaggccactaccgtccaacagatcgcaatgagtcaaacga

SEQ ID NO: 17791 - DNA, 441 bp, Zea mays
  Coding DNA Sequence Number=SeqID_3388
tgacgccgctgccaatgggcatcatcatcagagcaagaaaaccaggacggcggcggcgcgccgagacgacgacggaggcggcggcgacggcggcaggaagaagctccggctcaccgccgcgcaggccaccttgctcgaggacagcttccgcgcccacagcatcctctctcacgtatgtcgcacgcacgcacgcatccatcctgcgcccatgcatgcatacgtatttctccagtcttgcatacgtgctgatggatccaatccaatctaccagggggagaagcaggagctggcgcggcaggcggggctgagcgcgcggcaggtggaggtgtggttccagaaccggagggcccggaccaagctcaagcagacggaggtcgactgcgacctgctccgccgctggtgcgcccgcctctccgacgacaacgaccgactccgccgaga

SEQ ID NO: 17792 - DNA, 193 bp, Zea mays
  Coding DNA Sequence Number=SeqID_3389
ggcaacggcagcaggctctgcaagctccagggcttgatctcacctgtgtcgcggatgaatcggaccttgggtgggaccgtggctaccgcgcaatgcacacaacggtcattgcggcatgcgagcacgtagccgtagctcatgatgacgccccccggcccagtatggagctagtcgtcgacggaggcccggcaag

SEQ ID NO: 17793 - DNA, 454 bp, Zea mays
  Coding DNA Sequence Number=SeqID_3390
cggcagcgcggagtcactggaattaggtcgcctggccaatgcacagccgccggagctgctgcgttacgacgcgcgcggtgagcggctcgacgaggtgcgctttcatcctgcctggcatctgctgatgcagggcgtgtgcgccagccggttacataacctgagctggcagcctgacgtgcagggcagcgccatggtggcacgcgcggcgcgtttcattctgcatgcgcaggtggaagccggttcactctgcccggtaaccatgactcacgccgcgatcccgctgctgcaaacccatctgcccgctccctacgccgactggcacgatcgactgctgagcgatcggtatgatgcgcatcatctgcccggcagccagaagcgcggcctgctaattggcatgggcatgacggagaagcagggcggcaccgatgtgctgagtaacaccacgcgtgccgaa

SEQ ID NO: 17794 - DNA, 93 bp, Zea mays
  Coding DNA Sequence Number=SeqID_3391
tgatcttttcatgcttcagtctactcagatgtgtcaggtttgctactgaggttgctggtgttcaagaccttggtatgttaggccctgcagtgg

SEQ ID NO: 17795 - DNA, 192 bp, Zea mays
  Coding DNA Sequence Number=SeqID_3392
ctcgcggtgcccattctgttcttcgccgtctgcccgtcttcctcggcggctcacctccatggaagcctaagaaccggatgggcacgagcacgaaggtcattcgcgtctgccaataccacgaagttccggatcagtggtcaagcgcacgagcacgaggaagctgctatgctggcttatggtaactttgataac

SEQ ID NO: 17796 - DNA, 289 bp, Zea mays
  Coding DNA Sequence Number=SeqID_3393
cctgcccggcggaaaagaagcgcacgatcggcgcgttcctccgctccttgtcgctttccccagcaatcctttcgccgtctgtgtgggcgtggtggcgcacggtgcgtctgtacgcgaaccacacctcgacaaacgtgtcggcgtaggtgtcgctgggcgagaaaaagtggaacgcgagcatgtcccgcggcgcgcgtctgtcgcgcatgcacatccagccagtggtcctcgaccccgtgatggcgcgcacccggcccctgcccgtgaacgccagcggaggcgtgtactt

SEQ ID NO: 17797 - DNA, 278 bp, Zea mays
  Coding DNA Sequence Number=SeqID_3394
tttgagcctgtctcattgcagatgtattcctcacttcagaaaattacagctctacctgatgatacaaaagtatactgtgggcatgaatataccttgagtaattcaaagtttgccttgagtgtagaaccaagaaataaagcattgcaggaatatgctgcaaatgcaactaagttacgtaatagtaatatacccacggtaacattacctcagtctttcgaagcctcttgctccaacttcatttctacatgtaaaagccactgagttaacacaaagaattt

SEQ ID NO: 17798 - DNA, 325 bp, Zea mays
  Coding DNA Sequence Number=SeqID_3395
ctgggtttacttagcgcgattggtgcagcggcaggcatcatttatcacaacaataaaaaagatcacggtaagtcaggtgagggtgaaggcgggaatctgcctgatccggtattcacgcgaggcgcaaccattgatgctgtgacggataacgtgggcgcaattcagggaccgctggccagcggcgactataccgatgacgcgacgccaactctgagcggcaccggcaccaatcctggtaatactgttgagatctgggataacggcacaaaaattggtgaagccattgtcgatcaggacggtaactggacatttacgccaggcacgg

SEQ ID NO: 17799 - DNA, 175 bp, Zea mays
  Coding DNA Sequence Number=SeqID_3396
aggtgcagcagatccagtcggcgtcgtccggtctgtatggccgcaacctcggcacttacagtgcgattcagaactggctgctctccggcgccgatacgcgtcagctgcgccagttcggcctgaacgcctatcagatggaaggcaccgacagctacggcaacgtacagtttaccgg

SEQ ID NO: 17800 - DNA, 465 bp, Zea mays
  Coding DNA Sequence Number=SeqID_3397
ggcctatgtggagctgatcgcgataagcggggcgctacgggattacgggagctgacgtcattaccgcactgtacaccaagttttgggtcagcgggcttgggtttccaccatttttacccaggcgaatcagtatcgcgtagtgctggaagtggcgccgcagtatcagcagtcgccggcgtcttttgatgacgtgtatctgccgaccaccaccaccggcatggtgaaactcaccgccatcgccagcgtgcatgcgcggaccggggcgctgatgcacatgcgcctgaatcagttcccggcggtgatggtgtcgttcaatcttaaccccggtttcgctggaggaggggcagcgggcgattgcgcaggtcacgcagcagcttaaactgcccgccagcataacgctgcgctatcagggtgaaaccgcggcgtttcagagtgccaccggcaacacgctgtggctgattctgg

SEQ ID NO: 17801 - DNA, 220 bp, Zea mays
  Coding DNA Sequence Number=SeqID_3398
ctgaagctgaagtcaaccatgataactcagttttcacaaacccagatcttggatcttttaagttcaggaaaaaatttgaggctcgggcctttagctttcttcctctaccaatcaatactagcaagccagtgcatgtaaatgcttattttgaactctcttcaaatcgaagggatatatgggtcggaactgacatggtaaaataggcagagtacggtcagaa

SEQ ID NO: 17802 - DNA, 280 bp, Zea mays
  Coding DNA Sequence Number=SeqID_3399
atgaatccgtctcgtctgtttgtcctgcgcccggtggcgacgattctgctgatggtcggcgtgctgatcgccggtctgttcgcttatcgctttctctccacctcggcgctgccgcaggtggattatccgaccatccaggttaccaccctttatcctggcgccagcccggacgtgatgacctcgtccgtgacctcgccgctggagcgtcagctcggtcagatggccggtcttagccagatgacgtctgccagctcgggcgggtcatcgattatcaccctga

SEQ ID NO: 17803 - DNA, 409 bp, Zea mays
  Coding DNA Sequence Number=SeqID_3400
gtccctctaggtccagaagacaccgcaaccctcggccgtggcacgccgcaccagggcactccccttgtgatggtcgagaaagaaggacccaaatgacccatcgatcgagtcaagcaccaccaccacaaccaccacttctataagcatgggcgatcaaagcgtcgcgagtatggactcagatgggctgacgcctagcgctgtcttctcacagatcatgaaccccaaggggcggtgaggtaaagctcatcccattcgttaccttgcaggcataatttattcattcagcatgtttttcatgagttcgccccgcccatgttctctcaagttatgaaccagaagtaagagaattgtttcatactactagatattctgccttgccttgtacttcttctccagtattgtaatgact

SEQ ID NO: 17804 - DNA, 586 bp, Zea mays
  Coding DNA Sequence Number=SeqID_3401
gtaccatagccgctgacgatcagcagaaagccagctcaacccagcgttccgcggccgctacggtgcgccagagcgcagcggcgctggcggcggccgaacagcaggtgaaggtgcttgaggccgcgctgcgtcaggcggaggctgatgtcgcggcggcgcaggccagcgtcgaccaggccgggttgaatctctcttatacgcgtattattgcgccggtggatggcatggtgggtcagcgttcggtgcgcgtgggagcctgggtcagcgcgggtacgcgtctgctggccgtggtgccgctacagcagacttacatcaccgccaattatctggagacgcagctggcggatgtgcgcccgggccagagagtggtggtgaagattgatgcattgcccggcaagaccttcaccggtcacgttgacagtatcgcgcccgctaccggcgccacgttttccgcgattgcccccgataacgccaccggcaactacactaaagtggttcagcgtttgccggtgaaaattgtgctggatccgcatcaaagcgatctggcgcaattacgtgtcggcatgtcggcgattccgcagattga

SEQ ID NO: 17805 - DNA, 369 bp, Zea mays
  Coding DNA Sequence Number=SeqID_3402
ggtgcggtactgctcaccgacccgtccgccgtggctcccgcattcaccggggtgttcatggagaaaatggtcggcttcatcaagctttacttcccggtgttcctgctgggcgccgtgttcggcaagctgatcgaactgtccggcttctcgcgttcgatcgtcgccgccgccatccgcgtgctcggcacccgccaggcgatgctggtgatcgtgctggtctgcgccctgctcacctacggcggcgtgtcgttgttcgtggtggtgttcgcggtgtatccgttcgccgccgagatgttccgccagagcaatatccccaagcgacgatcccggcaaccattgccctgggcgcgttctcgttcaccatggatg

SEQ ID NO: 17806 - DNA, 218 bp, Zea mays
  Coding DNA Sequence Number=SeqID_3403
atgggcgacattcacctggtcggcccatccaccaaccccgcgcgtggccaaattcctcccacgcacgcttcacccaggctggccgcgcagtctggtctgggcccacctgtcggtcgctgggcacactgcgccgacagcccgggccctatatgtgcgcctgagctagtgatgcgtgggcccggtgccactgttgatcttcaagccgtcgcgggtgcgca

SEQ ID NO: 17807 - DNA, 415 bp, Zea mays
  Coding DNA Sequence Number=SeqID_3404
ggtttcaacgtcgatgccggtatcgctaccgacttcgcggagaactggaccttcggcgtgaccgggcagaacctggtctcgcgcgatatcgacaccaaagaggttaacggctatcgcgatacgtatcagattcgcccactggtaaccaccggactggcgtggaatcgcggaccctttactctgaccggcgatgtcgatctgaccgaaaccaaacgttttaaatcgcaggagagcagtcagtacgctggcgtgggtggtgaatatcgcgtgctggactggctggcgctgcgtgccggctatcgcgcggatatgaagtcgaatgacaccgatgtgtttacggccggtctcggcgtgtcgccgttcaacaacgcggtgcatctggacctggccggttcggtcggcaaagacaatacct

SEQ ID NO: 17808 - DNA, 431 bp, Zea mays
  Coding DNA Sequence Number=SeqID_3405
attattgtgcgcaatgaactgccgtgggctgatgagatggtggaaaagatggtgctgctgattaaagaggagctgcaccacttttatcaggtgtgggaaatcatgcaggcgcgcgatttgccctatcgcaagatcaccgccagccgctacgccaaagggctgctgcgtgaagtgactacccatgaaccggatacgctggtggataaactgatttgcggggcgtatatcgaagcgcgttcctgcgagcgcttcgccagcctggcgccgtatctggatgcgcagctggagaagttttatatctcgctgctgcgctcagaggcgcgccactatcaggattacctgacgctggcggcacagatttcaccgaaggatatcgcgccgcgcgtgcgggcgattggggcagcggaagcgcgcttgatcagcgaaccgga

SEQ ID NO: 17809 - DNA, 175 bp, Zea mays
  Coding DNA Sequence Number=SeqID_3406
gggcaaatttacgaacggcaccagggggtgtggcttggcaagttcacgggccaggccgaggccgggggggcctaagaagtggccgggcaacggttccggggcccggaagcagttaccaacttccggccgctggcggaattggaaccggaagccgccgtccaggtccggttccttg

SEQ ID NO: 17810 - DNA, 370 bp, Zea mays
  Coding DNA Sequence Number=SeqID_3407
gggcaaggcccgagccaggacatcccccaggccatcaacgtggtaccggctcaggtcatccgtgaccaggccccgcgcaacctcgatgacgccctggccaatgtcagcggcatcacccagggcaacaatttcggtggcacctccgacacggtgatgaagcgcggcttcggcgacaaccgcgacggctcgatcatgcgcgatggcatgcccatcgtgcagggccgcagcctcaacgccagcaccgagcgggtcgaagtgctcaaaggcccggcctcgctgctgtacggcatccaggaccccggcggggtgatcaacgtggtcagcaagcgcccgcaactcgagcagtacaacgccctgaccgtgcgtgggt

SEQ ID NO: 17811 - DNA, 515 bp, Zea mays
  Coding DNA Sequence Number=SeqID_3408
tgaacagtgtgagggcctgcctgaattcgtcagcggtgaaggtgtggtttctgttccggcagaatccccgtctgaactcagcgcggtacagctgaatcaggtacagcagatattcagctccacgggagtcgggtgcgatcaccgccggcaggaccgcgcttattaccggccgggcgctgaccgcatagtcatgccgacggtatcgcagttccggacggaggcggactactggtccaccctgctgcatgaactggtgcatgccaccgggcacggcagccgcctgaaccgggaaggcattgcctcatcgtcacggcagtttggtgacccggtttatgcgttcgaagagctgatagcggaaaccggcagcgcctttctctgtgcggagctcggtattaccggcgacgtgcagcacgaaagctatcttgccggctggctgagagcacttcgggaagacaaacgggcaattttccgtgcctgccggttcgcccgtgaagcctcggaatatttacttgccc

SEQ ID NO: 17812 - DNA, 186 bp, Zea mays
  Coding DNA Sequence Number=SeqID_3409
agaagcggccggcagtgcgctgagattcgcccttaagcagtggacccaccgcagagccctttttccccctcctcttttttttttttttttagactttggttggcatactacaacagagttatgtgccccgtattactaaccactatattaaacctttgattaattgcgttgcacaaaatttagaat

SEQ ID NO: 17813 - DNA, 171 bp, Zea mays
  Coding DNA Sequence Number=SeqID_3410
gcgatgcaaccttacgttcttgtactttattacagtaaatatggttcaaccaaacaaatggcacatttgattgctgatggtgtagaagcaactggcgttacggctcgtatcagaacagtccccaatcttgcgactgttgtgactcaagcggaagcaagtatccctagtgaa

SEQ ID NO: 17814 - DNA, 195 bp, Zea mays
  Coding DNA Sequence Number=SeqID_3411
gttgcgtgaagagcttgatactattgagcatagtgccgagccgaatcccgcatgggctgttttttcatctggcttgaataaattgattaaacctcgtagtgagcagatggaaaaccagctggatgcagaccagtggtcaattgcagccgatcctgtccgtaagttacgctttctggataaattgcaccagcaggt

SEQ ID NO: 17815 - DNA, 299 bp, Zea mays
  Coding DNA Sequence Number=SeqID_3412
gtgccgcatgcaggtattgtctacaaggtggacgagcagctgtcgttttatggcagctatagcgagtcgttcaagcccaactccaccatcgcgccgctggtcggcaatgtggtgcttgactcgtcggtggcgccagaagagggcaaatcgtgggaactgggcgccaagctcgacataccgggccgcctcacgggtaccctggcgttgttcgatatcaccaagcgcaacgtgctggtttccaactttgataccagtacgcgcgaaacggtgtacagcaatgccggagaggtcagctcacg

SEQ ID NO: 17816 - DNA, 286 bp, Zea mays
  Coding DNA Sequence Number=SeqID_3413
gagtcaggttactgttcgtcacgcaacgcccgaagatgccgccgttctgacgcgtatctatagccagccggaaacccaggcgggcacgctgcatctgccgtatcagtcaccgtcactctggcaggagcggctcgcgaatccccgtccccatgtcaccatgctggtggcctgtattgacgggcaggttgtcggtcagctgacgctggaagtgatggcggtggcacgccgccgtcactgcgccactatcggcatgggcgttgatcaagcattccatcggcgcggcgtg

SEQ ID NO: 17817 - DNA, 336 bp, Zea mays
  Coding DNA Sequence Number=SeqID_3414
ttgttgaccgaatgatgccgggagcaggccgactggacacatctggttctcccaagacaaagagctggaagattgcaggagtttgaaactcttgtctcttctgcgggcgtcgatgcgctgcaagtgattaccggcagccgtaaagcgccacatcccaaatattttgtcggtgaaggaaaggcagttgaaattgccgatgcggtgaaagcgagtggagcatcggtcgttttatacgatcatgccttatcccctgctcaggaacgtaatcttgagcggctgtgcgaatgtcgcgtaatcgatcgcaccggcttaatactcgatatttttgcccagcgc

SEQ ID NO: 17818 - DNA, 515 bp, Zea mays
  Coding DNA Sequence Number=SeqID_3415
tttaatacatacatgcaaccctcatgaatatacaggtacaagatcatcatcggcctggggtcggcgctgcggtacctgcacgcggagtgggagcagtgcgtagtgcacggcgacatcaagccgagcaacatcatgctggactcctcgctggacggcaagctgggcgacttcggcctggcgaggctggtcgaccacggcgtcaagccggccacgaccaaggtggtgctgggcacggcgggctacatcgacccggagctcgtgaacacgcgccgcccgagcgccgtgtcggacgtctacagcttcggtgttgtcctcctggagctcgtcacgggccggcgccccgtggaggagcccgacgacagcgacgagctgttcgtgctggtcaggtgggtgtggcgcctgtacggcaggaacgccatcgccgaggcggtggacgagaggctgaagctggtaggaagggaaggcgatgagatggagcgcgcgctggtggtgggactctggtgcgctcaacccga

SEQ ID NO: 17819 - DNA, 163 bp, Zea mays
  Coding DNA Sequence Number=SeqID_3416
tacccctgctacgaagcaagatctgaaacaaaccctccactctgtggagagtacgacgatccagcaagccaggaaggcgaggcggtgctggtcgccggagcttcaccggctgtttgttgccgccttgcatcaactcggcggccctcaagttgctactccgaag

SEQ ID NO: 17820 - DNA, 312 bp, Zea mays
  Coding DNA Sequence Number=SeqID_3417
cgaacctcgcgcacggtttcgcgggtctcgaaggcagcgacaagttccagatcaaggcgatccgcgaaccgaacatcggcatcgtgtcctcgtacaacgagatgctgtccgcgcacgcgccgtacaagaatttccccgacatcatcaaggccgccgcgcgcgagaacggcggcgtcgcgcagttcgcgggcggcgtgccggcgatgtgcgacggcgtcacgcagggcaacccggggatggaactgtcgctgttctcgcgcgaggcgatcgcgatgggcacggcgatcgcgctcacgcacaacatgttcgacg

SEQ ID NO: 17821 - DNA, 423 bp, Zea mays
  Coding DNA Sequence Number=SeqID_3418
atgcctgctgaccatcttctccgatgcctgctccgaggacaaggagacgaggatcagcaggcgctgtccccgtcggtctcccgctccagcgagagctcgtcgatcgggtcggggtacggggacgcgtcgtacccgcaggacccctacggtctacggcatcctggagcttgggcggccagggacaccgggccctacaagcggttccacgtggtcgacgccgcgtccttggaccccaatgcgctggccggcgacggcgacacgaggcctctcgttcggagactgaaattcggctgcctggcgatcgggtggcggtttgaccttgaacgcgcggacgctgatcggggagatgcccaattatgtgctgatctgctgggtcttgctgctggctgctgcggaggctgtcgtgggttgacctggcgtggg

SEQ ID NO: 17822 - DNA, 346 bp, Zea mays
  Coding DNA Sequence Number=SeqID_3419
atgtccgacttactcacggtggcaaagctggcaggcgtttcacgcgccacggccgcgcgcgccttttccgatccccatctgctgcggcgcgacacgctggagagagtgctggcggcgtcggagcagctcggctttcgtcctaaccacatcgcgcgccagctgcgcacgcagcactccaccaccttcggcgtgctgctgccctcgctgcttaacccgatcttctcctgccagttacaggcgatggaacgccaggcgcgcgacgccggctatggcctgctggtggccaccagcgattaccagcccgagcgcgaagccgccatcgttgaacatatgctgcgccagcgcg

SEQ ID NO: 17823 - DNA, 225 bp, Zea mays
  Coding DNA Sequence Number=SeqID_3420
ctcatgaatatttctgagtactcttagttgaaaaatactttcccaagacaaggagtactttactgaacttgcgattgatgttgtcttgaggcttaagggtagcacccacttggaatatattgaaattctgaagatacatggagaatctcttaaggattcatttttggacgaagggtacgtatttatagaaaaaataccggtatctgccacattgctgattaagag

SEQ ID NO: 17824 - DNA, 306 bp, Zea mays
  Coding DNA Sequence Number=SeqID_3421
cacgtgttcgggtcgttcggcctgagattgggcagcggtttcagggagaccaaaatcagttttgagttgctgtacatagcctgctttcaacagattgtttgtatatagtctccagatatgatttacagataaagtacgacataaagataattcttgatcgtttataactcattggtcagcgtttttcagggagaccaaatcagttttgagttctgtacataggctgctgctttcaacagattgtttgtatagtttaaacacattgtttgcatgttttttttcttcttcttatttcgcatttgcacc

SEQ ID NO: 17825 - DNA, 586 bp, Zea mays
  Coding DNA Sequence Number=SeqID_3422
aaggtgctggccatgcgtggacaccagcttcaccgtcacctctcaagcggacggctacgaggccgacgccttaggggacctctacctgttcaagtggaccaccctgctggtgcccccctccacgctcatcatcatcaacatggcgggcatcgtggccggcgtgatccgacgccgtcaacaacggctacggctcctggggcccgctcttcggcgagctcttcttctccttctgggtcatcgcccacctctacccgttcctcaaggggttcatgaggaggcagacccgcacgccctccatagtcgtgctgtggtccatcctcctagcatccatcttgtgtcttgtctgggtcaggattgacccgtttataccgaaggccaagggccccatcctctatccatgagcagtcaagagctgagctcgcctacctacgttcttgttgcatgtacggacgccactgtgcgtttggacatacaggcacttttgggccaggctgcatcatgtggaccttttgcttccttttggtctgatttttgtgagttagtgactgagtcagacagagtgccgggtgttgttcctgcaaggaaa

SEQ ID NO: 17826 - DNA, 216 bp, Zea mays
  Coding DNA Sequence Number=SeqID_3423
cctagggacgttcggctgcggcggatcagacgccttgcctcgttgattggaggctaaagaagagcgtagcagcaatctactgtctgtgttggtggtttcttctgggtaacgtgcgtgaaccagatggggtgttcctctctgtttttttttttcttttctgtgtatgtattgtaccatgtaatgtatagtatggatcgatttcattgcattaattaa

SEQ ID NO: 17827 - DNA, 577 bp, Zea mays
  Coding DNA Sequence Number=SeqID_3424
ggagccaggctttgtgatcatgtacgcgcgcctacatgcatgttgattgatccaattgcatcggctgtgaccatatattcattggaccgcgatgatatgatttgagactatctctatatgctattagcgcgcttatttgcatgtctgttgtagaggacagctttgagtatcttgatgcccccgtcgagaggattgctggagcttgatgtgcccatgcccgtacgctgccacccttgagaggatggctgttccccaggtggatgactttgtccgggcagccaagggtgcttgtttcagggcaccagttccgatggcagcacccccctagtccagcagaaccccgcatgttgcatttctttgtctaattttaatgcccgggccccaaaaaaacgtgtcgcataatggtgtgacgggtaccccctgccgctgcaactcaactatagcatgagctgggtttttgtagagcccccgaaaggtgttcagtaccccagttccagttccgcttattttcccccccccacccggaaggctgcgggtgactctgggtctgttttatggtccccgaatgattgcaccc

SEQ ID NO: 17828 - DNA, 317 bp, Zea mays
  misc_feature (272)..(272): n is a, c, g, or t
  misc_feature (275)..(275): n is a, c, g, or t
  misc_feature (283)..(283): n is a, c, g, or t
  misc_feature (286)..(286): n is a, c, g, or t
  Coding DNA Sequence Number=SeqID_3425
aatgcggcacgagcgagagcgggtttgtaccgcgcgaaccactgctcgatcgccatggccgccgcgctcaggtgcccggcctccgtgagggtctcgggccccgccgcctcggggctcgccaaggtgcgccaagcgtcctgtgtcgtcgcggtgagcggggcccggcagagccgcggcggcggcgtggccgtgccgggcgtcgctgttctcgcccaagcccgcggcggccaaggacgcgcggccgaccccaaggtgcaggagcccctgtacgnttngtacgagnatnctaacgtagtcggtgaccccgcgagtagccc

SEQ ID NO: 17829 - DNA, 443 bp, Zea mays
  Coding DNA Sequence Number=SeqID_3426
gtttagacggttcatttatattcgttaggaataattatgttatttgctagctcactatttatagctctacaggtgctcaaatgctcatggtcttctcattaggagtgatagagcagaagttgtatcaattccagttggaataattcctgcatggtctgctagaggccaacactctacacaggacgaagaccttgaagaagcatttgaaggactttatcttgatgacccttagggcctagggccctacactttgtaatctcctactattcttcctattcctactctattctggtgatgtaaactgtactcttagacatgaactcctaaacttaggaatggcctacagcaccgcttgttcctactctattctagtgatctggacatctggtgatgtaaactgtactcttagataagatctctttaaatcagagctgggctgtact

SEQ ID NO: 17830 - DNA, 206 bp, Zea mays
  Coding DNA Sequence Number=SeqID_3427
gccgcagctgacttcgcggaccagggtactataaatactcctaatgtatggaaggcatactatgcggatacaaaagccattattaaccttaatgatgagttctacaatattatcagggaagggtccttaccagcaatgagccgtttttggcttaatgcggactatgtcaagtgtattcatgcggactgggtgagttctgcactgga

SEQ ID NO: 17831 - DNA, 511 bp, Zea mays
  Coding DNA Sequence Number=SeqID_3428
gtaagccagagcgtggccttgacttgccatctcttaaagatctagaagacgaagggttccggagacctgctctcctgatcgcagatgcacctctgcggctggtgctgctaccgctgatgttcgatcagggcctcaacgcgaggcatctgactgagaagaagataagcgttgaggtgccgcgggacgaggaagatggctcgttcgcgcccaaagacattgcagctgctttgaagagggtcctagtggatgaagaatgcgaggtgttcggggataaggccaaagagctcgcccagttgtttggaaatgacgagatgaatgatcagtgcgtgcgagattttctcaagtgtatgtcggaatacagcaggcagcgacaggttgcattatagggctggtaacgtcaaattttagatagggccataggggctttttcaaaggtttactacgacagacaacatcaccgagataataaaaaatatataaaaaatactcgtgtgttgcaacaggaacatat

SEQ ID NO: 17832 - DNA, 163 bp, Zea mays
  Coding DNA Sequence Number=SeqID_3429
ggataaacactatgttagggttgttagatgatagtatctctcattctggtgctggcttgatgcatccacaagattaatccaccaataccatgtgatggttcactctgatccatgtccttcagctcgcataatcatgtagcataccttctactgaacatttaac

SEQ ID NO: 17833 - DNA, 183 bp, Zea mays
  Coding DNA Sequence Number=SeqID_3430
gtggttctcttctacagcccggtgacacccagtggttgcttcctcatcaaggtcagccagggcgcgaatctaatgcttgggaatgagggggctggcaactactttggccgctggtcaagacaccctttggcaagggagattggtggccctgtgcctttggtcgcatcaggaaagcttggccga

SEQ ID NO: 17834 - DNA, 451 bp, Zea mays
  Coding DNA Sequence Number=SeqID_3431
ttcaggcctcaggagctgtctcaagcctacagccgttccgcctcgctcttgtatctgacggtctgaccctaccctatctctgaggaggtcgaatctggcctgcccttctctctctttctcctacgatcctttctctcagtccaacgaaaccctcggaggcacggttcggttcgacgacatgctgtctggcgtgaagctgggtccgcgagaccagatccagtctgattttttttgtaggggtgaccagggctccgattccgactcctccgacggcaagaggccgtggaagcacagtaaaagagggcgggacaagaaagagaagaagagacgaagcagccggcggcagcggaggcggagcaagaggtactcgtcggaagattctttggggtcagacaccgacgattcaatcggagaggaagaggaggatgatgtcagtcggagcaagcgtcgc

SEQ ID NO: 17835 - DNA, 284 bp, Zea mays
  Coding DNA Sequence Number=SeqID_3432
gggtcctgctctcttgtttgccgcgcgcagccggcgtttctccctgacgcgctcgcccagccactgcggcaagctacctgctcgagttggccaattgtaacatatgctggtaccctcggctcgggttaaaagcatatacggaatcgaaagcaggacaaaaacgaaggattgaaccagtgtaaaaggtgcgcgcgtgaaagcttcggctcagtaacggaaagaggaaccgccttaaggaggaaaaggctatctagtcctcgacagtttgttcttaagtcaatagt

SEQ ID NO: 17836 - DNA, 515 bp, Zea mays
  Coding DNA Sequence Number=SeqID_3433
aagtgataacctgcaatcggctctccatcctgacacccagctcgttgggaaaaaaaatcagctgcatctgatggctgttgttttcctcgacatacttgtagactaaccagagtaggtttttggattcatttcctatgtatacttgtgctaactacagtttccaagtctttgtaaccatatatatgcaatgcctttggcttcaaggaagtcttcggtatacttgtgtaccaagagcctgtttcttgtctgaccgaagctggtactctggagaacatattccttaggttatttgcgaagtgctcggagaaggccctttgcataaggtttcttatttttcaggctctatgacgcgcatcctgcttttggctaagatacatgctcaccggatggtacaaatgatcacctgctaaaggctctccatcttgtcccccagctcttgggaaaacccgcctgccactgacggctattggtccctcgacatactttatcaggaacatgcgatctccagaggagca

SEQ ID NO: 17837 - DNA, 176 bp, Zea mays
  Coding DNA Sequence Number=SeqID_3434
tactgcgctcagacctcggtgacgggctgaccattgccagcctggccataccaaaggcacgtgcgcgcgtgtgccccgagcccgtctctcctactctggttcctatcgccttcattcaattcctggctacttttggcacggttttttatggcacggcccagaatataggcaggcag

SEQ ID NO: 17838 - DNA, 376 bp, Zea mays
  Coding DNA Sequence Number=SeqID_3435
agattgctcgctggtgagtcacctaatttcacgaattgcgaactacttcgtatcctttttttttttgcctgcattagtgttctgctctgatgtaagataattaaatgtctcttttgcgacgcattaagtgccatgtgatcctacttactaaccatgaccatgtttagagtatttacactggctagacgagtaatcagtataataactaataaggtaaggttacaaagtaaaactgtaaaaaacttgaaatggtaagtttgatcattcacacattttcctcgaacaagcaacagaacttgcaatggtgtctatcaactcggccttgcaattattctgataattatggtcaaatgttggtaaggccttttagtttctg

SEQ ID NO: 17839 - DNA, 193 bp, Zea mays
  Coding DNA Sequence Number=SeqID_3436
aacttcaccagagaattagccggctccataattttccttatcgatgtctttggggggggcaagataccaaaaaaaggtggccctgggataaccccggccgatctgttggtaataaacaagacagacctagcccctgctgttggagctgatctgtctgtaatggagcgaaacgccctttgcatgcgcgaaggag

SEQ ID NO: 17840 - DNA, 507 bp, Zea mays
  Coding DNA Sequence Number=SeqID_3437
cgttctaatcacaaccttgcattcttttctggcgcggccccaagtatttggtcggtgcccttttggccgcccgtttcccccggggccgaggagccgccaatagcaaggagagggtttccttctccctccacggttccaccgagctccccgatcccttcgtcccaaatcccacacacccggttcccccccggccgcccacgcgtcccgccatggattgtggatctgtggatctccaagggtcagggagggccagcaccgggccgagcacgagcttcaagtcccttctgcgaattcgggaaggagatcctcatcgaaaaagagtctaacgttcaaccggtgaatagccctgtgacggtttgcggtgacatccatgggcagtaccatgacctgatgaaactcttcgcgactgtgggccacgttccatatactaactatattttcatgggtgattttgtggaccgtggcttcaacagtctggaggttttcaccatcctgttagcttttaaa

SEQ ID NO: 17841 - DNA, 440 bp, Zea mays
  Coding DNA Sequence Number=SeqID_3438
attcagtacgctcttccttttatatctgttgacctcacacgcgatggcaggcgcctttaagacttcggtgtccatgtgcagaaggagctggtcgcttctgattactgaggcccaaatccaggaggggataggctcccccaccaatatcctttgcgcaaggcgtgctcaacagatcaaatgaacctttgccagcgtgtccttcagatccggcatatgccttttgagatagtatgtcatagtcgcatgcttaatgtagtgacatgacctacctctaggcatgccttacattccagaagccaatgcggtgccaaggatagatgtaaagtttgcgggcgtctgctgctaggcaaggctgtcctgctgcatgcctcgccacttttttttttggaggaattgttcttgtgacataaaaggggccgtagtctgtcttaaatgccctc

SEQ ID NO: 17842 - DNA, 135 bp, Zea mays
  Coding DNA Sequence Number=SeqID_3439
catcctcttgtccagaaggacatgcacgtgggcagcagaggtttggccgggagaatgtgcatgaattttctcagcagagacatgaggatagtggtggtcatgctttgttgctgaaattttatattggccttcgag

SEQ ID NO: 17843 - DNA, 437 bp, Zea mays
  misc_feature (190)..(190): n is a, c, g, or t
  misc_feature (412)..(412): n is a, c, g, or t
  Coding DNA Sequence Number=SeqID_3440
accgattcccggctggcacttgcttccggcacccggttcttcgagggccatgtccgcgaggagggaatccttttctcctctccagaaactccgcgttggccgttcctctcggccaataacccccagtgcctccagcgccgattcaaaggtcgggccccccccccagtggagaggcggctcgaaccccaanagctggaagcaaatggaggccaccaccctggagagcagtggaattgaccccatgaaccagaggaggtggtcttggccctccatcaagcggcccccgtaggtcgcaggtcccccattggatttaggttcccatgttacatacataggattcccccttgtgtagttggcaacgattctctgtgtttttaagccgatcacctgcacccatttggcacgctcgacntgtgagaaagggtcaataggccccc

SEQ ID NO: 17844 - DNA, 500 bp, Zea mays
  Coding DNA Sequence Number=SeqID_3441
atcttctggatgaggattatcactcaagctagcatgtatttcaaacttatgaaaattttacatcattcaaaatgtaatccttctaattcacttttgtaaccactccgatcatgtacaatgtaaacttgttgtaaactgataaaattttgtaataaaaaaattccgctgtaaattatggtgtgtgttttgtgtttacttaatcttgtgatccgggttataagtggtttatccggggtcgttgggacactcggacatatcctgttaatttatctggtgcacatgcatagccgtttgaggtctttgggacaagggcaggtgcatgtgggcccaataacttgggaggttctgccacaaaaaattagctttagggaataatccactgttagaagagagttgtagttcaaaacaccccctctgccctaaaacttaatatttttgtacagagtgaacccttaacattgtaagcctcaatttttagactaagagttatacaccagtga

SEQ ID NO: 17845 - DNA, 248 bp, Zea mays
  Coding DNA Sequence Number=SeqID_3442
tttgaaggaaggcttttccctcacggccgggctcttgcgggatctccacccatatggtcctggcgcgcgccgccgcccctcctcggcgtcaaccgccaccctgtagcggttccgccgtacctcgacccgctcgctcggacgcagcgacatgggtggctaagcaccgctctttctctacccctcggtctcgctcgctgaaacagcggcggcgggaaggaggcaaaaccctagccgggcgtcgaggcttg

SEQ ID NO: 17846 - DNA, 325 bp, Zea mays
  Coding DNA Sequence Number=SeqID_3443
ccaagggtgagtttgacgcccccatgaccaaggcccaggaaaccggcaaactggtggtcatcgacttccctcccccctggtgcggtccatgccgcgccattgcccccctgtttgttgaacccccccaaaagttccctcaggttgttttccttaaggtggacgtggcccaaatgaaggaagtccccccggccttcgaggtcgaggggatgccgcccttcccctttgtcaaaaacggcaaaacggttccgccccttgtgggtgccagaaaggaagagctcctggcccagatcgaaaagcatgttgcgcctgcgcctgggtttgggtt

SEQ ID NO: 17847 - DNA, 567 bp, Zea mays
  Coding DNA Sequence Number=SeqID_3444
ttgtgcaaaggccactggccgcgaaagcagggccatcttctaggggcacagcattggcatggcctgggcttcggcacggggacggcacagatggagtcatggacgggtccagcgtggatgcgcgcgctaccaccttgcgtgctggtggcacggatggaggccaaatatatgtgttgaatgacacgatcagaaagaaggggcgaccggggctgcagccccggcagccccctcctagatccgcccctgatgctcatgacatggtgcttatcttcaatgccctgatggaaggaatggccttgttcttgaaatgcatctggttgaaacctggagttccaactgaaaatatactctatcttggaggaccaaacatcgcctcggaaatttataacaaagaatatgcaaacgctcgaatctgtggatccaacaagtggaggaagcctcttgctaagtttttgaggcagccacatttcattgtctgggacaacagtgatcttgtcacccatgaggtgatgggtggcctgaagaatgtctatgcaatcggtgctggtaatactaacttctgcacaa

SEQ ID NO: 17848 - DNA, 547 bp, Zea mays
  Coding DNA Sequence Number=SeqID_3445
tactcgagctgatgaggattccggctctcatcaagtgactcctccccctcacgatgactttgcggatagatgtctcaatactagtgggggagctacgaataacaatccggtgttctgatcgagagcgatggagctaatgtttgaacttgtgtgtttgaacttgtgaactaaaaatgtgaactatggatgtgaacttatatgaatttgtgaacttatgtatttggacttatgtatttgaacttatgtatttggacttgtgtgaatttgtgatatgaatatatatccatgtgtttgaaatcaaaaaaaaaaaaaaaaaaaaaaaaaaaaaaaaaaaaaaaaaaaaaaaaaaaaaaaaaaaaaaaaagaaaaaaaaataaaaaaaaccaaaaatacaaaaaaaaaacaataataaaataatacacccttaaataaaatcaacctaacttcaattttaaagcaccgaactttttagaaaaacccttagctgtaaaaaacttaaagttactgaacttaattcccttttacacaattggggttttaccagaat

SEQ ID NO: 17849 - DNA, 194 bp, Zea mays
  Coding DNA Sequence Number=SeqID_3446
cgtaaaatttgcaaggcccaaagcgccggctcttttggttttttccctttcttttcgggcaaggttcgcgggtttccccggaaaagtttaaatagggggcctcccttaagggccccaataaaggggttaaggggccctgacccaaaaaaaattgattagggggagggtacaggaaggggcacatccccctgaaa

SEQ ID NO: 17850 - DNA, 583 bp, Zea mays
  Coding DNA Sequence Number=SeqID_3447
agagtgtccgcggttgcattgtcgctctggacctctccgtcctcgcccttagcatcgtcaagaagggcgatgctgagatccccggtgtcaccgacgttgttcaccccaagcgcctcggtcccaagcgtgccaccaagctccgccgcttcttcggtctcagcaaggaagatgatgttcgcaagttcgtcatccgccgcgaggtccagcccaagaaggagggcgccaagccatacaccaaggcccccaagatccagcgcctggtcactcctcagcgtctccagcacaagcgtcaccgtgtcgcactcaagcgccgccgcgcagaggcctccaaggatgccgccaacgagtacgcccagatcctccacaagcgcatcaacgaggccaagtctgcccacgatgaggccaagaagaggagggcttcttccatgaagcactaggtgctggttatgagtgcatgagtactgggatgatatcggcgtcggctcaaaaacgaggtatggggttctcatataaatgaaagcttcggatttctaggcatgggcattacatacccagactgcatactttagcagtcggtttccaa

SEQ ID NO: 17851 - DNA, 172 bp, Zea mays
  Coding DNA Sequence Number=SeqID_3448
aagcccgcttcgctactgccgctggccgctgtactggatcgcgcaggggtagcgtgtgcaccgacgtgtgggtcatcgcgcacgagtgcggccaccacaccgtcttggactactcgctgctgtactacgtgaacctgctgtggctgcatctcggcgttcatggtgccctact

SEQ ID NO: 17852 - DNA, 524 bp, Zea mays
  Coding DNA Sequence Number=SeqID_3449
ccgtgtcatcggtgtcgtctaccacccctccaacaacgagctcgtccgtaccaacaccctgacccgctccgctatcgtccagatcgatgccgctcccttcaggcaatggtacgaggcccactacggctcctcgctcggccgcaggaggcaggccaaggccggtgagaaggaggaggacaagaagaagtccaactcggtcaccaagaagcaggccgagcgcctcaagaccagtggaaagattgagaatgctgttgagaagcagttcgaggccggtcgtctgtacgccgctgtctcttcccgtcccggccagagcggtcgctgcgacggttacgtcctcgagggtgaggagcttgctttctaccagcgtctcctcaggaagtaaaggtgatatttggggcttcttcggtgcatcggtcaggtcaaaatgggtgtttagtcatgtatctggtctgcatagtcgcgggacactgaatgcactcggcatgataacgccacttctctagataccacgagactatgaatca

SEQ ID NO: 17853 - DNA, 579 bp, Zea mays
  Coding DNA Sequence Number=SeqID_3450
caattaacgccagcagaggatgatattgactgcaagcatccttatgcccacaagggggaaggatgaattcactaaagcagaactggctatcaatgaggaccctgacacaaagaaaagcatgtgcacttatggatagattgcgggctctacgtaccatgatcattgcgtgaatgacgcattggaacaccgcttgagcaaagatgccaagagacgaaggacttctatcagcaggaccttgaggtgtcacatgggcgcaaacacattggagtgagaactttatggtttcatccgaaaacataccttatagagtggtcaaatggggaactttatgttgggacatatacaacttaccgataggaggaatgcttccctgtgtgcccaaagcattgataaacccagcaggtaatgatctagcacaagagggactactcctgtggctagaagaacaccttaggcgtttacagagtggcatgatcaagacccgtatgctgatggcatccagatatatcagcttatatccagaagcacctccatcatgcagttcagctgttacaaatggcattaagaacatcctgggag

SEQ ID NO: 17854 - DNA, 308 bp, Zea mays
  Coding DNA Sequence Number=SeqID_3451
cagaaactgatggagcgaaatgcagaattgcagaagacgcaggaacacatgatggagatgcagcataaccaggtcccggtattggtcagcaatccatatgcacaaaagaagcgatgcctgccgagaacattgacaggtccctggtcactgagttggtgttgatcggactcgacacgatatttaacattatgggacttgtacattcttcaggatttggagaacccagatttctgttgtatattaccgatcaacagagtcctatgtaccagtgcataactttcttctcctgacactatgcctcctcgatt

SEQ ID NO: 17855 - DNA, 571 bp, Zea mays
  Coding DNA Sequence Number=SeqID_3452
ttttgcatacccctcaactataaacatatatgagtaggtacacactaaaatgaagacaacatgcatgcagcaacctattcactgaagtttcatctgtactactcggattcggctcgaggtgtcttctttcaggaatatgtgaagggcatatcgtcgacagggatgcaatctaattgtggttttgaagggcaaatcaatgcatgttggactcacaacatgactactaaggagctagatacaatacgatctgccggctttctagtttcagttattcatggaaggttagttttgttaacagtggataatcttgttcagagaatggtgcacatgcatttcatgtggcttacattacaaaattcaggtacgatatcattgcgcaattgtgccatgcaaaacgtctagcagaaagccttcttcctgttgcaagaatggtagaacttcatggtgcacatctagtgagccatgaaagaccagacgaggtaaagggaggacctttaataaaacagcaacatgtgccactgaaacattaagggcattgatgtgattggttgttctgcttatttgcttaaat

SEQ ID NO: 17856 - DNA, 197 bp, Zea mays
  Coding DNA Sequence Number=SeqID_3453
ttcggctcgaggcttgattgatatggctcatagctacttcatatgtgactacttgttgggctcgtatttaggatgatatgaatctgaattttatctcgtgccttatcattacggaatatcatcgtggtccaatttaattgaatgtcaaatcaatgtactgaggctgaaaaacattggcttctgtaaaaaagctggct

SEQ ID NO: 17857 - DNA, 498 bp, Zea mays
  Coding DNA Sequence Number=SeqID_3454
tctctcttatgcacgacggtctcgctcgtggtctccgtgaggcttccaaggccctcgatcgccgacaggcacacatgtgtgtcttgaacgagaactgcgaggaggaggcctacaagaagcttgttgtcgctctctgcaacgagcacaacatccccttgatccagatccccgatggaaagcagctcggcgagtgggccggtctctgcgttcttgaccgtgagggtaacgcccgcaaggtcgtcaactgctcttgcgtcgtcgtcaaggactggggtgaggagtctcaggagcgatctatccttctcaactatttccagactgagcagtaagggcttttaaacggtgtaggatgtgaagggagaggattagaggtgcggacttgactttatttcgagaccgctcgacatgacttttcgcttgtactctagccacttcggttggcatctaaaacggtttaggcctcatatctcatggccatgtcgcatttgagaggaataa

SEQ ID NO: 17858 - DNA, 543 bp, Zea mays
  Coding DNA Sequence Number=SeqID_3455
gagttgctgactaatggcggccattccgagcggagcgatagcccaagccggagctgagcgtccggcggcctgaacaggagaggcgagagagagcagggtgcaggtaccagaagaatgggtccgccgccggagaagcggcggacgctggtgctggtgaacctggcgtccatcatggagcgcgccgacgaggcgctgctgccggcggtgtacccggagagtggggcgccgcgctgcacgccacgcccatcgcggatcggggccctcacgtatgtaccggtccatcgtgcaggtcgcctgcctcccggcgtcgcgctagatggtgatactgcacagccgctcccccgtcctcgagctgatggcctgcctcgtggacttgtccctcacctgtccctgcagatggagctcatgcttcccgcgaccatagatgacttcttcatcgaacatgctgcggcactgtcgcgtggtacgacgatgcatattgactttgtcattctcgtgtgcggcaacttgactgcagggttgaagtcctacaatcacactgcc

SEQ ID NO: 17859 - DNA, 276 bp, Zea mays
  Coding DNA Sequence Number=SeqID_3456
gaagttaaaccaccctgtcacaataatcggttgaattatctcactggggggtctttctgacaaatgggtcttgcgggacaaatcttgaaactgggggggcgggggataacaaatgggcggggaaaacacctccatccttttgggcaaacccacatttaccagactttttttccagtaaccaacacaggtaatggagaagcctttggtaattcagggccccttggaatttggatcagccccctggtgtggtcgcgcatggctctactctacatcaga

SEQ ID NO: 17860 - DNA, 176 bp, Zea mays
  Coding DNA Sequence Number=SeqID_3457
gtcgggatcagagagggcgcgtcaagagcagccggtctcctggcggcgcgggctccgtctcgctcctcggtctgtcctccttgtgtcgccgggtgactgggagcgagagaatccctccatccatcctttcctacgttggtcgccgggcgacggagagcgaataatcctcccttcct

SEQ ID NO: 17861 - DNA, 79 bp, Zea mays
  Coding DNA Sequence Number=SeqID_3458
acactcctacacactgcatcgaggttatgcctataatatacgtcgcatatcgtcatacttatacatgcgcgcgctggct

SEQ ID NO: 17862 - DNA, 531 bp, Zea mays
  Coding DNA Sequence Number=SeqID_3459
ggctcttgctcccaagtacgaggagctcggccagctctacgcctctgatgagctctccaagctcgtaactatcgccaaggttgacgccaccgccaacgacgttcccgatgagatccaaggtttcccaaccatcaagctcttcgccgctggcaagaaggactcccccgttgactactctggttcccgtactgttgaggacttggtccaattcatcaaagagaacggctcacacaaggctgaggccactgttcccgaggccgctgctgaagatgctactgagtccgccaaggaggctgccgccgacgccgccgacgccgtcaaggacactgctgagaaggctaccgatgctgccaaagaggctgctgctgatgccaaggaggctgtcaaggacactgcggagaaggccaaggacaaggccgcgagcgccaaggacgagttgtagatgcctttgatgcatccgattttttgattgtcaacggcgccttttgcatataccagtacccctttcagcatcttgctatggctcatatg

SEQ ID NO: 17863 - DNA, 423 bp, Zea mays
  Coding DNA Sequence Number=SeqID_3460
ttcggctcgaggaaactcatcccaagtggcccgagaatatggctgcacaggggtgatctggatgcagtgtgctcattcatttcaacacaatatgtgctggacaatgttgggcttcctatagaagcagcttggcgtgcatggcacgtcgacaatgagggtgctggctacgccattgggtataaagggctggtcttcgcgacggccagaggagctgggcacatggagccatactaccagcctcgcagggcattggcattattctcgtcattcctcgaaggggagctgcctccacgctgatcgatgaagctagcagggtgcgcgaatgccattaactcattttgcacagcctatggaatcataggcggtacatgaggcctagagtttttactatacttggagctggccgcgatattttatataaat

SEQ ID NO: 17864 - DNA, 266 bp, Zea mays
  Coding DNA Sequence Number=SeqID_3461
ggagccagcttgtaccgcaggaagggatcgctatcgatcatgatgatcctgatggtgtatacggagaccctataccgcaaaaccggggatgactagccttatggctgatggccccatggagggaggaacgccttgctgagagtgagggggaccaggacacccttggggcacgcagagaccgtcaaggcgtccaccacccatggccagaatgaccagggttagcgctgagctaagttctacgaggacggcgcccactttgtcaaggg

SEQ ID NO: 17865 - DNA, 384 bp, Zea mays
  Coding DNA Sequence Number=SeqID_3462
tgtccccgaagaatctcgtgtactttggattgaccttaacatgagcaagatgaagtacgctatttgaccggacaagacaccaggccttcaattacgaactttcaattcaatactgcaaggctactctagacatggaaggatggtagaggcgaaatcattccttagcaaccttcctaagatttatcctggaatatcgaaacaagaaaaacaacgactgtcggaactgctggcgaaacacacttcgtaagatggttgatattataagaaccaaaccctttttgtgagcatgataggtaggtaatactaagactgaatttttagttgtccttagcagcatgcacattagagtggacttgtacagattacatatgttctggttatgaa

SEQ ID NO: 17866 - DNA, 506 bp, Zea mays
  Coding DNA Sequence Number=SeqID_3463
gtacgtagcctgtcgtatactcaggcagccagccagctcgccggccgatgatgggaggaagaacagtggccccgccgctcgtcgtcgcgctggtgaccatcttcgccatcgcggcggcgacccctccagccactgcggcggcggcggcggccgagggggacgaggtgaagtgtggcggttgctctccgtgcggcggcgccgactgcccggtgctgtacccgtcgccgcccccgccgccgtactactactacagccctcccccacccgcgacctaccccggggagtcctcgtcgtactacacgccgccgccgccgggcgcgtacatccagatcgggagcgcgccgccgggcaagggcccgctgtacccgcaggacccagggttcatcccggccggcgcgccgggccgcgccgcgccgctcgcggtcgtcgctgcgctcgcggcggcgttggcgtgcgcatgggccctcttgtgatctctatgggcttgacattaacaagccctagcg

SEQ ID NO: 17867 - DNA, 492 bp, Zea mays
  Coding DNA Sequence Number=SeqID_3464
ttctagttctggcatcgtacccgcgcgcgtgcccaataagtgctgcagttcgctggcattgatgatgcctaacacactctcccgtggctacactaagacccttgactaatctagctaaggcaacctaccactggctcgagaagacctacagctttctcacttcctgaatactggacccagaccaagccctccatggccccgttccagcagtacaccgacctgctggcaaagcccaccaagggccttgtgctccaggccccaactgtgacattggatgcttaggacggaccgagtggagagctctactcgtcgggtgcttgcataaatgcggcatctatattatagctaacaactgccagagaccattctgggttctgatgcgccctggatgctggtctgcactggcaagtttcgaattatgctatggcactttttatcgatgaatgctacataatgatctcatgatagtgctccgttccaaacagaatggtt

SEQ ID NO: 17868 - DNA, 190 bp, Zea mays
  Coding DNA Sequence Number=SeqID_3465
gtagcagaacaagttgagacgtctttccaggtttcaacaaaaactgagtcaaataagaatgctggaaatgctattttatatgaatgcgtggagacaataatgggcattgaagctacaagtggtttacgtgtgttggcaattaatattttgggtcgttttttgtccaaccgtgataacaacataaggtaga

SEQ ID NO: 17869 - DNA, 76 bp, Zea mays
  Coding DNA Sequence Number=SeqID_3466
tttgttgcccgttcttcgttctaattctttttttctttgaggtgtgcccagagatcgaaaggtgcggtgatttgat

SEQ ID NO: 17870 - DNA, 493 bp, Zea mays
  Coding DNA Sequence Number=SeqID_3467
atgtttcttgtgtgcacatgtgccttgatgagtcatatacatgtgttataaattccaccaatgttttcaccctacgattgatcagttccctcttccttactcatatctctcgccccatcagcgggggtctttgccccttcaccggttgcatgatctttcccaccccccaagttgatcaagtcccaatataagatcgtctggtgtctgtacccattagcttcttttattttttctttttcttgtcaaaatcggcgatcacaaaccacacatgtcagcgcacacaacagacatgcagccgcaggagttcaattcacccaacccccttggaggcatggcgaggcttgcatcccatgagatgcagggtgctctgcaccacggggcgcgtgtaccggaaccccgggcggccccccccgtcggcgacggcaatgtagaccagctggggcggcggaggcgatgcctcttcccgccatgtccccgcaacagatctcgggag

SEQ ID NO: 17871 - DNA, 424 bp, Zea mays
  Coding DNA Sequence Number=SeqID_3468
gacgcggagaggatggacaggctgtgggagagcttcaacgaggacctcgtcgtcctgcggcggcacgtcccgagaccgaggcccgccgctccaagtccgccgccgagcaccccggcggcaccaacaccaacaccaaggcgccgcggggcctggctgacgacgacgacgacgacgacgaccactggtacctctgtaactactcggcgtcgtcgggcgccgacgacgagtccgacagccaggagacgtcggcgtcgtcgcccgcggagcggcgcgggtacgggtgcgcgcccaccatgctgcgcgcgtcgtcgcgcgccggcggggcgggccagttctgcggcgccggcgccagccaccgcggccgacggcgcgggcgcggcggcggggcggcggctgggtgggcgctcctgctgaggctcttccg

SEQ ID NO: 17872 - DNA, 334 bp, Zea mays
  Coding DNA Sequence Number=SeqID_3469
actaacctaaggtgagacactttgctagaagactctaagtaaaggtatgaatgcttctatcgactaaagtggatgttcactgggcacggttagtagtatgtaacaactgccagtttcttctctattgtcatatatacttatatagtgcttattttctggagctaaagtaaaagttctttcagcaacatacaatgagaggtctattaggtcacatctccgacgtgtgaaggggctactatctctgtctagtctttatgtttccctatcaacgtccttagctctgcttcaggagtccgctcaaggaaaatttgcaggacttatatatgtgttctct

SEQ ID NO: 17873 - DNA, 426 bp, Zea mays
  misc_feature (43)..(43): n is a, c, g, or t
  misc_feature (65)..(65): n is a, c, g, or t
  misc_feature (77)..(77): n is a, c, g, or t
  misc_feature (79)..(79): n is a, c, g, or t
  misc_feature (81)..(81): n is a, c, g, or t
  misc_feature (83)..(83): n is a, c, g, or t
  misc_feature (92)..(92): n is a, c, g, or t
  misc_feature (105)..(105): n is a, c, g, or t
  misc_feature (107)..(107): n is a, c, g, or t
  misc_feature (113)..(113): n is a, c, g, or t
  misc_feature (124)..(124): n is a, c, g, or t
  misc_feature (127)..(127): n is a, c, g, or t
  misc_feature (129)..(129): n is a, c, g, or t
  misc_feature (137)..(138): n is a, c, g, or t
  misc_feature (146)..(147): n is a, c, g, or t
  misc_feature (158)..(158): n is a, c, g, or t
  misc_feature (176)..(176): n is a, c, g, or t
  misc_feature (197)..(197): n is a, c, g, or t
  misc_feature (219)..(220): n is a, c, g, or t
  misc_feature (237)..(238): n is a, c, g, or t
  misc_feature (241)..(241): n is a, c, g, or t
  misc_feature (245)..(245): n is a, c, g, or t
  misc_feature (270)..(270): n is a, c, g, or t
  misc_feature (282)..(282): n is a, c, g, or t
  misc_feature (308)..(310): n is a, c, g, or t
  misc_feature (321)..(321): n is a, c, g, or t
  misc_feature (356)..(356): n is a, c, g, or t
  misc_feature (366)..(367): n is a, c, g, or t
  Coding DNA Sequence Number=SeqID_3470
ttcgttcggagcgcacacacacacaaccagatctcccccaaanccacccggcggcacctccgctncaagaagcagancngngngaaaacccngaccggcaagacnancacccncgagggggagncgncngacaccanngacaacgnnaaggccaaganccaggacaaggagggcanccccccagaccagcagcggcncaggggggggggcggaacagcnngaggacgggcgcacgcnngcngacnacaacagccagagggagagcacccnccaccaggggcnccgccccaggggaggcaggcagaacnnngggaaaacccngaccgggaagacaaacacccgcgagggggagcccncggacagganngacaacgacaaggccaagaaccaggacaaggaggggaagcccccaggaccaggagcggg

SEQ ID NO: 17874 - DNA, 205 bp, Zea mays
  Coding DNA Sequence Number=SeqID_3471
gaagggatgtagtactacggtcaccacacttttaaataaaggaataactgattaataatgatgttaaacaggaagggtcaagtttagggaattattacattctagattttcatgggagttagactgattaattctgtgggctgacactggtatattttgtctcggcatgaatggtcttttctacccgggcattgtggttatacta

SEQ ID NO: 17875 - DNA, 561 bp, Zea mays
  Coding DNA Sequence Number=SeqID_3472
gggccgggatctctctagtctagcccctctgtcgctctcagacgacgggtgcgccgccgccgccgccctaagccaggtgctgactgctgaggctttctttggtctcttcgccggcgacgacacccgccaggtactcccacccgttcttttcccttcccttcatcctgttcgaagctgagcaccgaaaccctaacctaaagctatttagctatttgacaaccctcctaacttcgaagttttttttgttgttgcaaaaatcacccatattcctttactggatctgcccctgctagtatccacggtgtcattgcaagacgagatggtttccttcgagatgaatgacctcaagaagattgggcttggcctgaccggctttggaatattcttctcatttctgggaattgttttcttctttgacaaggggctcatcgcaatgggcaatattcttttcctgtcaggtttgggtttgccaattggtctgaatccactatgcagttcttcaccaagccaaggaattacaggggtattttgcaaccactgtatttggtagggctattgccc

SEQ ID NO: 17876 - DNA, 259 bp, Zea mays
  Coding DNA Sequence Number=SeqID_3473
agtacgcgggcgcctagcgccgtcttctcgcagatcatgaaccccaaggggcggtgaggtaaagctggccccattcgttaccttgcaggcgtaatttattcatccagaatatattttttcttaaatgttctctcaagttaaggcttaagaaccagaagtgtgaggattgtttcgtattagatattctgccttgccttgtactacttccttctccgaggtattgtaatgactatacaatctgttggcttgcaaaaaaaaa

SEQ ID NO: 17877 - DNA, 317 bp, Zea mays
  Coding DNA Sequence Number=SeqID_3474
atggacagttgtaggatgagtaagcaacctggatgctctttcattgaagtggacggatgtgtgcacgagttctttgcaggagatgaatcacaccttgagatagatgctatatataacattcttttggggatcaatgaactgttagtagcagagtccttgtatgaaagttgtgatatttttttgtcaattaagtaggtaggttcaaaatgtaataagctgtcattttatgtggagcagaaagaatgtttacatttttgtatttctccagaaggcgggaaatttcatttttctgctagacacatcccttcctgtatatg

SEQ ID NO: 17878 - DNA, 565 bp, Zea mays
  Coding DNA Sequence Number=SeqID_3475
ttatccacaagaacttcgaccttcgccccggtgtcattgtcaaggagttgaacctcattgaccccatctacttccagaccgctaagaacggtcacttcaccaaccagagctttacttgggagaagcccaaggagctcaagttttaatttcgtaatgctcgacgcatagagtgggattgaatcaacttcatcctacaagacttaagatttatgatgacgacgacgacatcacatgagaaagatttgcatatctttgggaggcgggtaaagagccttttcaacaagtgtttcacggcgtccagggcaaattttttcacccatgataccagcccgttagttctttccaaaaagttagatgcacatttccttttcatatagagacagcctagggcaggctgttagatacaaaagcttcaacatttaggggcaccagtgcgttatcaacgcgcacgttggccttttttgcggcacgccgcatgtggaggaaagtccaaggactactagattaggagaatcaaatacaagcccgagcgtctgctctgagcaatacctcagccgcagacgag

SEQ ID NO: 17879 - DNA, 397 bp, Zea mays
  misc_feature (225)..(225): n is a, c, g, or t
  misc_feature (245)..(245): n is a, c, g, or t
  Coding DNA Sequence Number=SeqID_3476
ttctgtagcggtagactgtagttctgttcctccccactcactcctgcgcttcctcgccgcgcggttccttctccctgatcctcctttggcttcgcggttcatggcgatgtggagggccgacgctaggcaggtggtcgaccggacgctcgggtcatgggcccggcgcgcgctgtccggcagcgtgatcaaccctggtgctgcttcctcctggggggggggggctcngctgctcttctgtggtgccnctgttcttgcttggtcccccctccttcctatccgagcgcctccggttctttggctccctggctcggtgggctctcagggacctgctggcgcgtggcctcgtccggttggtctcggttctctctcgcctgcggctcttctcctagggctcttc

SEQ ID NO: 17880 - DNA, 485 bp, Zea mays
  Coding DNA Sequence Number=SeqID_3477
tacaggagccttgtgcatcctgcgcttacctgataggggatgctattacatccctcgtttctcctaccccataaggtgactggttttctacaggggtttatacgactggaaatccttatggggtaggagaggatatcgtgttcagcatgccatgcagatcgaagggtgatggtgattacgaactagctagtgatgtgttgatggacgattttctctgggaacggattaaaaagagcgaagctgaattgcctgctgataagaaatgcgttgcccctcttacaggagaggggaatgcattctgtgatcttccggaagataccatgctcccaggagaagtgtagcttagttccagaagccccagcagcggaatgcatttgccaattcattagctgagacttgaaacatctccctgcgtgatgcagcaacccctttaatatatataaatgggggtatccaaaaattgcgccccccgaatttgactatga

SEQ ID NO: 17881 - DNA, 198 bp, Zea mays
  Coding DNA Sequence Number=SeqID_3478
tggccctcggtactcagttataaaaacgcgtccttctctccgccctgatctgtacagttttgggagtgcatccttggacgctgggtctcctggatcagcctacagtgcagtttccatggtgtgaactctctactgaccggttgatgggagttttctgcgtagccgattggacgtggtagcgaataagaactggttttt

SEQ ID NO: 17882 - DNA, 186 bp, Zea mays
  Coding DNA Sequence Number=SeqID_3479
ctgccacttttacaagttatccgccccacaaaaactataaactacgcctatgctcgtgacaatgaaacactatttgatattattagtgtgaaggtatggatgaacctctcaattgacaagtgatgcaggataaataatttgtccacaagcatgattgcattatcccatgtgcttatgaaatttaca

SEQ ID NO: 17883 - DNA, 475 bp, Zea mays
  Coding DNA Sequence Number=SeqID_3480
taataattagcgaccgacagtgggctcttcggtcacaggaatagtacctgactctgctcgctacctgatatcaggacgaattcaggatcacatgatgattactagtgcgccagcattttttgcaatctctatttttgaggtcaaatgatatctacctccacataaatccacattggcagagaccacattttgctactatcattattgattttaaatgtcggaccattggatgccaaaagaagaatcatagcaaacgacaaccgtccatcttctcccccatgctccccggtgccagaccccaattatttggcctccgcctgagaggggagaaagacccgttctactcgctgctgatcacggggctcgcgaatgccgacaagggtctgggcaacggcgtagacaagcgccaccggaacgagctcctcgaccacatccaggtcatcaccaagccggcgatccggagggtgcctcttac

SEQ ID NO: 17884 - DNA, 118 bp, Zea mays
  Coding DNA Sequence Number=SeqID_3481
ggcatcacaatgacatgctcaccagagacttacaccttcgggaccgctgcacctaaccttctagcaagggacgaacctccgatcctggatccagtgagtccatgttttgacgcatcag

SEQ ID NO: 17885 - DNA, 84 bp, Zea mays
  Coding DNA Sequence Number=SeqID_3482
ggctcggtcatattgcgagcccacccgagaggctcggctcggctcggtaattgcttgctattcgagcagatatgcccagcgcag

SEQ ID NO: 17886 - DNA, 377 bp, Zea mays
  Coding DNA Sequence Number=SeqID_3483
accacggtcaagatgtcgccaagctgcacggccagggtcgaccccgcggcccatgaggtggacgcggcatgatggggagtcggcgctacggggcatgaggccgactaggtggagcacggtgaaagccgatccacgacacgatgcttgtaggagcactggacagcaggccggtgggttcttttcctcacccagttcgttcgccgtatggaaccatcgaggctattgcaggatttgaggagtgatttatcggatactaatgtgttcttgttgaacctgagtttccttcaagcgatcacctgtacaaccacttttagcaagacgatcgctacgctcacattgagagccactgtcattctgactcgctgctgagtgattct

SEQ ID NO: 17887 - DNA, 384 bp, Zea mays
  Coding DNA Sequence Number=SeqID_3484
gtcaacaacatttacctcaattttgacgccttccccggggacaaggaccacgggggggtgggggacggcaccaacattgtgttttggaagtggtgcgagggcgccacccagcgctggaagatcgtcccctggtaaatgtgctgttctgtggctgccctggtcatccccatgatttggagctttgaaggcatacccccctgtggtcagcaactgctcccgtgttgttaaaataaagttggtggggatcgatcgatcgatttttggtgatgggggtccccccccgggggtttgtgtttagtcccagtcgtttgtgaggaagtcagttatgtttgagtgaaaggggtacttccctcttcggttaactcgggccttgtcatgaggagg

SEQ ID NO: 17888 - DNA, 431 bp, Zea mays
  Coding DNA Sequence Number=SeqID_3485
ttctcgggtttctaggcgcttttctggcgttgcccctttttcgccggcactcttccctccgcctttgtgggcccctcggttttcacctgttttttgggtcccggtgttctctccggctcctattggcgtcttctttcctccttgcttaccttctcggcttttccccccctcttctacccctcttgccccccctttgcttctcttcttctgtgggcccttcttttgtggaccccaccgcttggcgcactcttgctttggggtctttttggcggtgtctactttttccggtgttctttgttccgctttctttctccacttgttgcgcttctcttcttcccttcactcctcgcccgtcttttttaccactctttttatcgtgtcttttctttacgctttgctcttctcctgttgtaagttgtccgcggtaccct

SEQ ID NO: 17889 - DNA, 600 bp, Zea mays
  Coding DNA Sequence Number=SeqID_3486
aattcaatagttcagccacccggtttctccctcttactatccgttttaggcctcgtttcagtcggtttggcatattccaggtctggttccgggtggaaaaaatgagtcggtttgaaattcgatcgtctctgcatgaatcattcgtttcgatccgaatccaaaaccatagccgggccgggttggagtttcctctcccactactgcccggtacgaatcccggtcttctaccctccggatcgaatctcggcccccccgcgcatcactggcgagtggcgaccgaggaggcggagcgaagtgacgtcgcagcgcagcctcgacggtgaccctccccgtcgccttctcactggaaaaagaaagggcagcaataccaccattcttgcttcccttgaaaagtgcggcgttcggttactgtggtaaccctgcaagatgattgaaaatgatggatatacactggatttgaatagtcagagaatccactagttcccagctgattcaaatagtttcagtttgtgtttcagtttctgcttcagtattgtcacacattcttacaaggtgtatccaatggtttatataaacaaaatacactaggttgcacacttt

SEQ ID NO: 17890 - DNA, 458 bp, Zea mays
  Coding DNA Sequence Number=SeqID_3487
cccgcagggtcatatggaacagcttgaagcatctacagatcaacaacttgatcagcacttgcctttgtttaatctaccgcacaagatcctctgcaaggtggtcaatgtagaacttagagctgaaactgattctgatgaagtttatgctcaaattatgctgcaaccacaaacagagtgcaattccagagagagaacaactacgaccgccgccgccgccagtgcgacaggcgcgaccagcacgtcctgcccacgcttcaccacacaagcggctcctcttcacaatcgccgtcactggaatagcagttatgatcggctccatactgttccaaagggacgagggtttctaactctagtagccatggactcgctctgtcaagttgctccttgaccgggagagtcaggccacaggaggtggtattaatgtataataactcgttgaatcaattgcaataactgga

SEQ ID NO: 17891 - DNA, 332 bp, Zea mays
  misc_feature (52)..(52): n is a, c, g, or t
  misc_feature (74)..(75): n is a, c, g, or t
  misc_feature (96)..(96): n is a, c, g, or t
  misc_feature (113)..(114): n is a, c, g, or t
  misc_feature (153)..(153): n is a, c, g, or t
  misc_feature (174)..(174): n is a, c, g, or t
  misc_feature (187)..(187): n is a, c, g, or t
  misc_feature (198)..(199): n is a, c, g, or t
  misc_feature (215)..(215): n is a, c, g, or t
  misc_feature (266)..(267): n is a, c, g, or t
  misc_feature (279)..(280): n is a, c, g, or t
  misc_feature (298)..(299): n is a, c, g, or t
  Coding DNA Sequence Number=SeqID_3488
gcggcgaacgcccttacggtcttcgccacaaagtgccaggcgctgcagcagncagtgcttgcccaccagaccannggcaggtggagcccgctgccnccggtacccaggcgacnnatacggtgtggtcctgcagccccttcctgcagcagcagnccgcagggcgagcctcgcggncgctgatggcggncccaggtagcnngcagcagctgacggcngatgtgccggccctgggcagctgcagcagccaaggtccctttgcccttgcnnaacgcagctgcnncggcggtgtctacttacnntgaggcacctatgttccctgtagtaattatgta

SEQ ID NO: 17892 - DNA, 488 bp, Zea mays
  Coding DNA Sequence Number=SeqID_3489
gactgcgctatcctcattatcgctgccggtactggtgagttcgaggctggtatctccaaggatggccagactcgtgagcacgcccttctcgcctacacccttggtgtcaagcagctcatcgttgccatcaacaagatggacaccaccaagtgggtctgaggaccgttaccaggagatcatcaaggagacctccaacttcatcaagaaggtcggatacaaccccaagcacgttcccttcgtgcccatctccggtttcaacggtgacaacatgattgaggcctcctccaactgcccctgggtacaagggttgggagaaggagaccaagtccaagggcacccggtagaccctcctcgaggcatcgacgccatcgacccctcccagccgtcctaccgacaagcccctccgtcttcccctccaggatgtgtacaagatcggtggtattggcacggttcccgtcggtcgtgtcgagaccggtatcatcaaggcc

SEQ ID NO: 17893 - DNA, 516 bp, Zea mays
  Coding DNA Sequence Number=SeqID_3490
gtcgccatgggccaagtttacgattgtgaattaaacggcgttctgaaggaatggcaggttcgcggccagggcctccttttacagagaggatgtcgatgtcgtcgccgcaaacgaccccttcatgaccacggactacttgatctacatgctcaaggatgacaccgtacgcggccactgtaagcacggtgacattacactcaaagactgcaagacccttctctttcgagataagatgggcaccgcctttggcatcaggaactctgaggaaatcccgtgtggtgacgatggcgctaactacctcctggagaccaccggcgtcttcactgacaaggacgacgctggtgcacagtctcgaaggcgtagccaagaaggttgttatctcatgccccaagcaaagacgcacccatgcttgttgctggtgggaatgaggacaaggacacctcccatgttcacattgtgtcccatgctaactgcaccacaggatgacttgctcgccttgttaactgccattcatga

SEQ ID NO: 17894 - DNA, 332 bp, Zea mays
  Coding DNA Sequence Number=SeqID_3491
ccttcgcgtccgatgcggctgacgggaccgtggggggctgcttccatcaagcaacgattgacgttatctattggagcttaccagcactcttgcgacttgtcacctgtggtagaataaccgtagtacttagtggatgtagcaacgcgtagcatatatatatatatatatatccactggtgtctaattgaaccgtagtataactgccctggatttaactagaacattgtgtatacctggaataattggagcttgagtctcgaaccaggagctatccgcacatgaacttttgggactttaagtatcttatcatcttaagcttacctaataatcag

SEQ ID NO: 17895 - DNA, 389 bp, Zea mays
  Coding DNA Sequence Number=SeqID_3492
tagactacttggcttcccccaaaagcttgaggctgcctgcgttggaaccgtcgagtttgggaaaatgaccaaggaccttgccctttttgttcccggattttcaaatatcccgaggagccctttcctgaacccggaggagttcatttaccctgttgcttatgagctcagatcaagggtggcagccaactcgaacctttgaaatccttgccgaaattgtggtggttttctgggggacgcttttgaaccgtttttattaagttgccattttttttccctgggcccccccccttatgaaagaaaaaggccttagttaggggaacatttgcagggtgcagcagtatgccaaatcattatcatttccgtttccatttccaattggagatttccgt

SEQ ID NO: 17896 - DNA, 107 bp, Zea mays
  Coding DNA Sequence Number=SeqID_3493
tcttcagcgatgtctccacaaacttaacagatttcggcggcatgcccggttccccccccgccgcctccgaagccgggggggggggcgggaacgagccctgaaatccg

SEQ ID NO: 17897 - DNA, 365 bp, Zea mays
  Coding DNA Sequence Number=SeqID_3494
ttttaaaaccacaattcgcaaccattatatatcacaattcacaaccatcataaacaaaaaactttaaattcatcaaggcccggcaaagcccacatatcctttcaaagccccaatcccatctcacatattcaaggctttcgttcaacaaactatagagattcaattcaattcatatgggcccccatacaaaatgggaacaagcccaagtttaaaggcaaagaaacaggcaagggtccccaggccccaaaaccgctacagggattattagaggggggggggctatctgtggcaggggggctgggaggcgaaggaccccacaaaagccattccagggggctccgccccacttgcataaggcggagctg

SEQ ID NO: 17898 - DNA, 151 bp, Zea mays
  Coding DNA Sequence Number=SeqID_3495
ggccggcgcaccaaaggcgagaaaactgtcagtttggaggaactgcagcgctacttctctggaagcctgaaagatgcggccaagagtctcggtgaacattctgacatgatataacatgcctctctcttcttgtgcagtttgtccgacaacg

SEQ ID NO: 17899 - DNA, 416 bp, Zea mays
  Coding DNA Sequence Number=SeqID_3496
taaatgggcatttatctgtccagaccattacggtccaacaagggtaatcacactacgacatatatcactagtccacacatataaggcgtagttccttccagttatggaactgcaaggcactactcaatatagccaggaaacagcaagtcatggtgtccaaaacaacaggcagaaaaaaaaacaccatgtaggtgtagaccctaaattagatgcgtaattatattaagcaacagcgcggaggaaaccacacggcagggtcttggaaaatgtttgttcccaaacagctgctgaagcacaagccccagcggatgtttgggcgcccccactgtattcgggagctggcgaaactgtcgcgccacgggccgcagcaggggcagcagagtgatcctgggatgcagcaggaggtgttctttttt

SEQ ID NO: 17900 - DNA, 499 bp, Zea mays
  misc_feature (456)..(456): n is a, c, g, or t
  Coding DNA Sequence Number=SeqID_3497
gttcgatgttgacccagataatctgagttcagttagatacacagcagactatgtacgggaacaattatttgtacccccttttcacaaagtaccagcaaaagaacatgcaaaagaaaagaagacttcagtaaatacagctccaagaaatttgtctagggtagatatgtgcaagaaatttatgcaagtcgcaacaagatctctggagacaggcaagaacttaatgctcgggattgaagcatgcagtgaagtccttgaatcaacggaacctgatattgacgatgacacgaggcacgggtttttgtgtactcgagcagcattgtacctaaagaggaagtggaaaaatgatgtgtacatggcgattcgggaatttgtaatagagcgcggaagattgatgccacatcatatcaagcgcacctacatatggctgaggcactattgcagttaggaagactgaanggagcatctgagtatgcagagggcagcaataggcttcttcccc

SEQ ID NO: 17901 - DNA, 320 bp, Zea mays
  Coding DNA Sequence Number=SeqID_3498
gagtgcgcggggttccaaagccaaccaaaaacttgcccggcaacgagcgctcaggtgacatgccccccccccccagcttccaggaacccggcggcgccaggggaaaggaaggtcaaggatttctccagctacgtgacgtacgctactttgcatgattgagcccccctggcatccagtaggagacaaaatcccctgctggctatgtgtttcttgtattcagcatgagtgtaccccagcgtgtgttgttgtgattgtgattgctgtctatttgcattattgtacgtgtgttgctgtcccatttagatcatccccttatttgt

SEQ ID NO: 17902 - DNA, 550 bp, Zea mays
  Coding DNA Sequence Number=SeqID_3499
ctcaagttttacatgtttcgaaagagtaatatttattacaagtcctgatatactcagagtgcataacttattacaaaagcaggaaggtagaaaccctccaaagcttatacataaacctagctagtccttctccagaactggaaacgccctccagccacaggaactcctagaatacttctcatcacctttgttgcagtgaagaggttctagatccctctacccaaccatcgattagatagctccatcctcttaatgagaagacactggagtagactcctctttagcaaccacttcatcttgaatcttcactctttgtgttgggagctctgagatgattacggaacaagcttcatacgggccagcacgtccttaggacgtccaagccatggcgaggtgggagaactgctggcgcggccactagcacaggggaatggcgtgcgatgaactggagagggctacagagacctgcagactttaggatcaccacccaaagcagtgaaccatggctagactcgaggcaaggaggagagcttcactgaacctgcaccta

SEQ ID NO: 17903 - DNA, 578 bp, Zea mays
  Coding DNA Sequence Number=SeqID_3500
cttgccaatatctccccaaagaaaaaaaaggaagggcatggcttccatcattatgttgggagcttggatcctatggaagcatcccgatgcctgcgtcttggcaggtttgcagccgaatatgtggagtgtttttttgcatgctcttgaagatgaacaacatctttggtgtctcgctggagtgcaaggactgcagagtttaggcttgggctccctgagcggttaggtggcgtttcctggtctgttcatttctatttgccgtaaaagttttgttcttgtccggagtgcaagcacagcccctcccggctctgtccggagtgagggtaaagtttgtacgggaggccccttttccagtgcttagtataaaaaaggtaatacttgttttcatgaaagccccctaacgaaagttacaggtacaaatttagattgaggagtgatgttgttgactcaataccaaaacagcaatgcattgggttttgagaatcccccattcaaggggttctaatgctccgtttgccccccaatattggaggtcatggaattgaattaggttacaggtttactaatgctccgtttggatg

SEQ ID NO: 17904 - DNA, 524 bp, Zea mays
  Coding DNA Sequence Number=SeqID_3501
aaggccggtatgactcacgtcgtccgtgacctcgaccgtcccggatccaagatgcacaagaaggaggtcgtcgagtcggccaccgtcatcgagacccctcctatggtcgtcgtcggtgttgtcggttacgtcgagactccccgtggtctccgatccctcaccaccgtttgggccgagcacctttccgacgaggtcaagcgtcgcttctaccgcaactggtaccgctccaagaagaaggccttcaccaagtacgccaagaagcacgccgaatccggacccaagtcctcgatcgcccgcgaactcgagcgcatctcgaagtactgcaccgtcgtccgtgtcctcgcccacactcagatccgcaagaccggcctcgagcaaaagaaggctcacctcatggagatccaagtcaacggaggatccatcgccgacaaggtcgagttcgccaagtcccacttcgagaagaccgtcgacgtcgcgtccgtcttcgagcaagacgagaacattgacgtcattcggtgtcacca

SEQ ID NO: 17905 - DNA, 286 bp, Zea mays
  Coding DNA Sequence Number=SeqID_3502
tacttcacgggcgaggtctctggttcaagtccaggatggcccagctgcgccagggaaaagaatagaagaagcatctgactctttcatgcatactccacttggctcgggggggatatagctcagttggtagagctccgctcttgcaattgggtcgttgcgattacgggttggctgtctaattgtccaggcggtaatgatagtatcttgtacacgaacccgagcttgctgaactcgaggcagggtatccagccgttgcgcagcaggtagtccacctgcttcagcaggt

SEQ ID NO: 17906 - DNA, 261 bp, Zea mays
  Coding DNA Sequence Number=SeqID_3503
gccggccggtgcaaaaggagctccttcacgtcactttcttccccatcacgtttttcctctacccaggtcgagctcgccctactgtgcttgcctgtgctcgtcggccatgcctccctgtggctgctccctcgtcgtttcccatagccgctcgcgtcgctcggtcagacatcggcatcctgcgccgttcacagttcactggtcgagtgtaacgccctgaatttagggtagaattttttcttctttaatactcatcaaattcag

SEQ ID NO: 17907 - DNA, 157 bp, Zea mays
  Coding DNA Sequence Number=SeqID_3504
gcatacttgcgatccatatgttgtgcaccgacctcacaattacatgttgtcattaatattcgtttgcagggatccaagtctgggacagttcttagagcaatacttggagctcattaagataaacgaatcgcagattgattggaattcagaggatctg

SEQ ID NO: 17908 - DNA, 358 bp, Zea mays
  Coding DNA Sequence Number=SeqID_3505
tggtaggttgcgatcattttttcatcattctggatacctatcttcgtcgtattatatatttcttataatgtctgctatgttcttggttacttgtacagatagggagcattcaaccatcagcgattcggctcaggttcgatgaggcataccattttactctaatctactcttatgggccgtcggatccttagtaggcgaggcggtggtttggttgaccaatatattccccttccgaggagacggcagacaactatgtatttcacttttgaatttctctatgttttatgaatgacaccgacacacatgttacaacttaagtatgaaaatgcaatgagctgtgtgctcctcattaaataaa

SEQ ID NO: 17909 - DNA, 552 bp, Zea mays
  Coding DNA Sequence Number=SeqID_3506
aaaaaccatccaagattttcagccaaataataaacttttggaggaacccccgggggtgggcccatacagtcccagcaaacatatacccttataaaacccacccaaataacaggacaaactgtcccaaacgttaaattgcaacttgaaactagcgcgaaagaaacatgacacattgtttccgaagggaagggaacaatataactagccccagtaccttatacttaaaaaactactgggaaacaggcccggggtccccaaaactttttatttttaaaaaggggaccccaactgacatccaccctgaagggacttttagttggggaagaaaccgcccactgacaccatttttggagctacatgcccaacgaaaaaaaaataatagggcccgggcggagcgcctaaaaacacgggattcgagttggtttaattaaccctttggggcagcgttgaaaacctcgtaaaattcatccccataaaacggccgaaagataaatcatcctccactccctttttgccccaaaaaaggggggcaatcccaaacctaaaagcagc

SEQ ID NO: 17910 - DNA, 110 bp, Zea mays
  Coding DNA Sequence Number=SeqID_3507
caagcttaccttgctgcttacagaccattaccggagcctacctacaactgagcgatttgtttctaggatggttcatacaaatatatatgcatgacggaagcgtctgtttg

SEQ ID NO: 17911 - DNA, 542 bp, Zea mays
  Coding DNA Sequence Number=SeqID_3508
aggtgccaccgtcatctctgctctgctctcgcaacgcaagcacacgcccggccgcctgccacagttgccatggcgaccatagccacgatggcgctgctgaagcccgccgccaaggccgcggcgcggtcggcgccgtccaccagcagcggcagcgtctcgctgcgcgtaccggggcaggccgccaagaaggctgcggtgtccgcgtccgcgtcgtccacgctggcgggcgccttcttcgcggcgctggcgtcgtcgcccgacgctgcgctggcggacgtcgtggcggcggcggacgccggcggcgacagccgcggccagctgctgctcgtcgtcgtggcgcccgccatcgggtgggtgctgtacaacatcctgcagccggcgctgaaccagctgaaccgcatgcgcagcagccaggccgtggccgccggcctgggcctcggcgccgccgcctccgccggcatggggatggaagccccgcccgactcctccgccgccgcggggcatgacctcgcgatgaccgcaggtccgagtgcacccgacca

SEQ ID NO: 17912 - DNA, 229 bp, Zea mays
  Coding DNA Sequence Number=SeqID_3509
ggcgggattcgaccggcgtcttccaccttggagtttgtttcttcggctatatctagcttatccggttcagcaacagtcttcggagtcgtccccctcaaattttgttttgtttcttttttttccttttgtttggtcggctttgtgattttactatcaatcttttctgtcgctcagatccatagcctccccctttccgttcgatctttgttcttgttgcctcctctgatcc

SEQ ID NO: 17913 - DNA, 494 bp, Zea mays
  Coding DNA Sequence Number=SeqID_3510
cccatgttcgccctcgagtcggagaacaaggacgcccagctttttaactgggtgcaaagggggcccccaaactctttaaagtggatgcccgttttttttgtcaaactgctgctgggcggttttcagcaccccaccattccccccggtttggggggcatttacatcgttgcgaggttttttttcttcaaaggatacccccccggcgtttcgggcaaccgtttcaaaattgggggggtccactacttggcgttgcttgggctgatcatttgcccagcatcttttggcatcaacctgctcatcagggagatgcttttaactttggggttatatgtgagcccccggctgggttaacccccccagtttctcatggtttgagcctaaaaacttttttatactagtcgtttgggggtttaaaatggaggtatcgtttctttctttgtctgggggttgaataaccaaaaaagtgtgggtttgcgttttaaaactgtgatgga

SEQ ID NO: 17914 - DNA, 252 bp, Zea mays
  Coding DNA Sequence Number=SeqID_3511
aatgggacctgctgagaccttctttgagtcattgtgacgccggagttcagtaagcgttggacctctgtcgtgtgatgcctcccctggagggagtctgattacttggcatgttggacgtgccgtggacgttcaaggccgattccccccggtatgatgctatttgctcaatggaaaccgtccatgttatcgttaccgggtttgtttaaggaaccagagctcttcttctgtggaactgtgttatcccactagcac

SEQ ID NO: 17915 - DNA, 455 bp, Zea mays
  Coding DNA Sequence Number=SeqID_3512
gacataaatgctcaccgcatagcaagatcataggacatgcaaggctgatcgtactcgcgaaagatggcgcaaacacacgaccacggatctatttcctcatgatcgatggagtgtcttcactctgctcagttgtggcagctggtaatgttgtgggttttgttgtaatgggtcagaggtgacagcaggaccattggcacattcatcaatttaagttcagtgtcaccggtgagagcataaatggagtcattggagcactcagtcgtttgaagcatgggcttgctgggagtgagcaactaaaataaatgctgctgcctcgagtactcccacaacaaccgttgagcgcttgagttcatgcaccaaattttggtgggctgcttctagtgtcaatttttgttgcttatatgatcctgagaaagttaaatactttttcaatgtgttggttgattttatgttac

SEQ ID NO: 17916 - DNA, 372 bp, Zea mays
  Coding DNA Sequence Number=SeqID_3513
attacaacagcatatagtgagtcgtattaaaaccagcagcctcccttgaaagccagcacatccaaactaagaaccgacagacctcagccctcaggcaagccgaccgccgacgtaccaccgcgccaacccgagagaaagagggggaggatcatgacgatcgctcatcgccgcgctcctcgtagtcgccgtcgcggccaccgcagtgctggcctcccaccgaggccgccgccgccggcgccccagccgactccgactcatccgtatcagcaggtacccgtcacaggtgcaccgaggcgtctgccgcaagaacaggttcaggatcagggctggcagcacactatgtcctccaaactctcacgctggatttagtcg

SEQ ID NO: 17917 - DNA, 485 bp, Zea mays
  Coding DNA Sequence Number=SeqID_3514
acctccgccgctgcagaatagaaattgcggcattgcctccggcttgagcagaagatcatctgggtgttggagtcatccagaggcacaagctgaggaatggggcaaaaggactccaagccttcacatggatatggctgcgctgcttatgattacgggagtgcttcatcgggatacacctcgagaaacactgggaattcgtcctccagttatagcgtcaggtacgcgccttcttcggagaacagtgtacagccggagacacatgccaggttgcagaggaagtattccaagatcggggatgactaccgttctttgagccaggtgactgaagctttggcacaggcaggccttgaatcttcaaatcttattgtaggcatgtgattttacaaagagcaatgaatggacagggaaaatttccttcaatgcgccgctgcctgcatggttttggaaacactccggacccatgatgagcaagctgtatctatggg

SEQ ID NO: 17918 - DNA, 515 bp, Zea mays
  Coding DNA Sequence Number=SeqID_3515
atgtgtttgatcatgccgcggcggcgtgttctgggtttcatccgcgtgccaagtgccaacacgtacgtacgtcttttgcatcgtgtcctcacgcacgacgtacgttacggtttaaggttgttggcgcttttgctggtcattcggcgaggtcttttctgttctgctagtcgccgctgggcccccccgaccaactgggagtcctcggggcgctccccccccccggggtcaagcccgacggcgggttctaccccctgagccagatcaagggccccatcccccagggccccggcttcgagccctacgtggagggcaaccccgacgaggccggcaacaaccagctctaccagctctacttttgggtcgacccccccggcgacaactttgtcgactgccccgtcccccccaacggcaggccctgcggcaaccggatccaccccccgcctttttgagctaaccccctcttcccgccagttgctgcaaaaaactctgctagcccctttgcttgccttctatgc

SEQ ID NO: 17919 - DNA, 557 bp, Zea mays
  Coding DNA Sequence Number=SeqID_3516
atacgccacgccttgtgagttctgtccaaggctgtgacagttcagattgtaaggatgaagcttgggagccgaagccgaaggacaggaggattcagcgaagccctcaaggaacaaagatcaaagctttatatcatctcgcggtgtgttgttatgctgatccggtggcatgactgacgaagaacattttttcttttgctattgaattttgtttccttttcacagttcttggtgttttttttctgctactcctactaaacagatcgggaaattgtatatatagctagaggcagaccgttgtagcagccaacatattatgaagtcaattcagatcaaaaaaaaaaaaaaaagcccagtcaccagggcgcatcctcctccccacccgtcgacggccaccacccgccggtgcgcctcagtgcgcaaacaaaaaggaagaaaaatacctgttgtttgtggccggagtgcacagggtgcgtggccagagtggagggctgactctgacgcaaattagcaggatccggcggcgttgaactacgcctgtaccagttcacgcaagagaa

SEQ ID NO: 17920 - DNA, 552 bp, Zea mays
  misc_feature (483)..(483): n is a, c, g, or t
  Coding DNA Sequence Number=SeqID_3517
agtgtgtgtactaccttatactctcttttctgtcactcagatcagaggccaaagatttgttgggtgatgactggattcaaatgcaccgaaggattgtacaacaaaatgccaatcagtataggaggattgcttgggcgaaggtatccatgctctggatctctggttatttttccttggatattgatatctttccttttttttaggattactcgacctcactaaatagatattctcactagacactacctacatgtccaaacacatttgaagtaggcttccagatacattgttggtcataaacttagcacctctgatgcataatggaattgacctaatcattgcaacaactgccatgtagtatctagtacttgttcctgactgagtaggcaattgtttaggcataagattatatcgggatgtaggattcttgcaggaaacaccacctggcctgtttgtacatgcaatacgataatatcacttggnaaaatgaaactagtagatatccatgtgggacaaccttatttggtctgatgttacaggtgttgcaatgcc

SEQ ID NO: 17921 - DNA, 313 bp, Zea mays
  misc_feature (99)..(99): n is a, c, g, or t
  Coding DNA Sequence Number=SeqID_3518
gggaagcacacacccgccgctgtttcttcatcttgctcctgctcgcacccaggcggcggcgacggcggacggcggcggccttcatgctcgggctctcancgacgggatcagggggctcccgcctctcgccagtggcgtggcgccctcgcctccgggcctctgcgcaccgtgcggggaccttgtgtggtgagtgtttccagcgctgcgtgcggggggggggctcaattagaaaacctcaaatgctgtgcctgagcgccaaatcaagaccctaccaattcagggaggccggacagagggcgatggccggagggct

SEQ ID NO: 17922 - DNA, 232 bp, Zea mays
  Coding DNA Sequence Number=SeqID_3519
gactagttctagacctcgagctctactcacataccactgcatgggtgttggggttcttgtattcctgctagtgatgaccctctcccacatccaccaagtctactctgtctagagcatcaagcgccagtgatgaccacgctcacaattcttcaccccaccatagctagaacgttctagggagttgctggtctgtatgaagcttgttccgtaatcatctcagaactcctaccag

SEQ ID NO: 17923 - DNA, 173 bp, Zea mays
  Coding DNA Sequence Number=SeqID_3520
caccggcgagcgtccgcccgacgtaccttatgtcccgcaccgccgcccaacgtccgggtcgcccccacgtatccatgccttaggtgccggctagcccctaggcaaggcgggacccctccgcccagaggcgcgcccaggcgagcgcggaagcgcgcctatatcatggggggggg

SEQ ID NO: 17924 - DNA, 539 bp, Zea mays
  Coding DNA Sequence Number=SeqID_3521
gggacacagaggtccgatgctcgttctggtggcgagcgtgagattcacagaaccatgttgcagttgttaaatcagctggatggttttgattcgagaggacatgttagagttgttctagcggcggatcgtattgggagtctggatccagccttgcttcggcccgggtcgaattgccttttttattttattccctttacctgatgtcaagactagtttttgtatcttccagatacacacatcgaaaatgaccctggttgatgatgtaaacctagtatagtttattatgtcaaaagatcacttttcaggtggtgacatcaaggttttttgttctgaaggtggcttgcctgctttgagagaccggaggatggaggttttgcataaagtcttctagaaggccttagcaaaggttttgttcaagaggaaagaaggcgccccggatggcttatatatgtgaaaatcatttttttttatattagtcttagtgatttaaatggggtttgtaatctgcttaatggtcaaaaaatgtttgcttccagcat

SEQ ID NO: 17925 - DNA, 207 bp, Zea mays
  Coding DNA Sequence Number=SeqID_3522
gctcttacgactatcgttttcgggccacctgcgtgcaccgtcatgaatcgcgtggagagaccacaggcggtcctgtcgcgcgaccgtgctgtgctcgttagagccggtggatacattaccggcataaaggttggagtggcgattggcagaatgcatcaacaaaattatcaaccggatgatcggaatcatcctccagggcataggaat

SEQ ID NO: 17926 - DNA, 546 bp, Zea mays
  Coding DNA Sequence Number=SeqID_3523
ggcaaagaagccgttggtttgacgtggcactcccttgcaaccgggctggcagtgacactggagcgatcgatcgtggtaaggaggagcagagcttggatggaggggggaaagtgcagggaagagctcccccgattccagagaagagcgtcagtcgctggatagggagatggtgccagggcggcactcctgttttccgtgaaggcccaggccaccaggcaaggcagccaccccaaccctcctggccggttgtccgaggagcttgaaggacagttctttccaagccctgcggcgatggcgatgatggggcgcgcgatgcccaagctccggccgtgcgagcagcagcagaaggggcccttcgtggtgtggaagatagattggcctttttgggtgtcatatacctgtttctttaaaaattaaacaaaataaaatgtaaggcaactgtgcattttgcctggctgtggttcatggtttattgctttaatttctggtagtggaagtagctaggtatagtgtctactgatgatgtaatgatttgctgtaccaaaa

SEQ ID NO: 17927 - DNA, 519 bp, Zea mays
  Coding DNA Sequence Number=SeqID_3524
gaggccgacctttccaagcttgtcttggcgggccacagccgaggtggccacacggccttctccctggccctggggtacgccaagatcagcagcagcctgagcttctccgcgctcatcgggctcgaccccgtcgccggcacgggcaagaactcgcaactcccgccggcgatcctcacctacgcgccctcgtctttcgacatcgccatgccggtgctggtcatcgggaccgggctgggcgacgagagggagaacgtgctgttcccgccctgcgcccccgtggatgtgaaccacaccgagttctatcgcgagtgcagggctccgtgctaccacctggtgaccaaaaactatggccacctcgacatgttggacgacgacgctcccaagcttgtcacctgcctctgcaaggaagggaacagctgctaggacgtgatgaggaggaccgtcgccggtatcatggtggccttcttgaaggccgtcatgggcgaggaggatggtgatctcaaggccatactcacagac

SEQ ID NO: 17928 - DNA, 371 bp, Zea mays
  Coding DNA Sequence Number=SeqID_3525
tctgcaagcagcacagctaatgatatagggaactgccaaagctcaaatggaggggccacgtatggacttgctgataacaaggtatcacagacatttgttgaggtagaagttggcaatttgatgagaaaaacaagtaccagtaagggtataaatcctacatggaacagtacattcaacatggtacttcatggagagacaggcattgccaagtttcttctgtatgaattggattctggcggtgtcaaattcaattacttgacaagctgtgagataaaggacactgatgcagtaatgtaaacaggtaaagtatgttcatgatggtttaacatctggtcgatgatgcaaagcatactgatgcatcgaggacaaaa

SEQ ID NO: 17929 - DNA, 389 bp, Zea mays
  Coding DNA Sequence Number=SeqID_3526
aaaaggcaggtgttcctctagtaagtgatgggataacaaaacaattgcattacaggtttcaaacttgcattatatattccgcggtatcagatctgaccaaattgtcaggcatcaccaaacaaatcgaactgtgagagctcgcacatgtctaaaaacaacacgggtatcaagtacgaagcatatttggttgccattctcggtgattcggccagacgatatcgtagccatcggccaacgtacacaaatactcactgcacaggtctttgtccgttctactacgcggtaagaccgctccaactactagtattgtctactccagtgagaggaaagatgagtaccattggcttggcgattcctctctgtagatacgagtcctatatcaagtgata

SEQ ID NO: 17930 - DNA, 445 bp, Zea mays
  Coding DNA Sequence Number=SeqID_3527
tgttgtcccggctattatacgcagcttccatcgctgcgaagctatccattcgtgatcgtcatggccagcaacgcaccgtggaaaacctcacccccaaggtcttaaaatgtgagtttgcagtccgtggggagattgtgatgcatgctcatcgcctgcagcaacaactacaaacacaaccagggtctcttccttttgatgagatcctctatagcaatattgagaatccccaatctctagatcagcaacctgggacattcttcagggaggctcttgctctttgcgatgcatccgagcctcttggaaaaagaggagaccaaatcatagtagagcgctgatgcaatttctcgagcaaagcagattcttgcaactattcactgaaaggcaacatgtgcctatacatacagcccgggtatcaaaggactgactcacacaattgctgctggaa

SEQ ID NO: 17931 - DNA, 303 bp, Zea mays
  Coding DNA Sequence Number=SeqID_3528
attcggctcgagtgtccggttgccttgtttcctcgtcatgcacactgaatctaaaacggaaggaaagaagcctaccactagtctgcacagggttttgatagcagacaccgtctgtctccttttaagttttaacagcacattacaaggattggaggtagagctaggaagtggtaactaactccattccccatctcatcggctttggagctctcgtgctgccgtcagttgaccatccatgttgaaaagactagctgcgagattttcaccagcacgagctagatgtacggtagaacaaccgggcgc

SEQ ID NO: 17932 - DNA, 357 bp, Zea mays
  Coding DNA Sequence Number=SeqID_3529
tgttccccaaaaggatcgaaaggagctccaacctgaaccagcgagagtatcgatgctaacactgtgtgaaatcttctagaaatgacatcgaatggaacttcaaactgatcaagcgaaagcatctatacgaagactgtctaaaatcttctaggaacgacatcgaaaggaatttccagctgaacaagcgatagcatctatacaaagactgtctgaaatcttctagaaaaacctaaaccctatcgggaatggagacgctctcggcgaagcagtagggcacagtggacgtgaagctgaagccgacttccaaccaatccaactcgtagacgggcggaaatcggatgtgccaactagaagagt

SEQ ID NO: 17933 - DNA, 268 bp, Zea mays
  Coding DNA Sequence Number=SeqID_3530
tgccctgctgcctgctttggcttgggctgctgctggggccggtcggctgcgacgtccccacgccaagtgagcctctgccatgcatggccgtccgtgacttccacactgccccgctgattcctctcttggtcttgggtgctgactatgccatgacgatcgcaggaagcctgcgcctggggagccaccagctgcacccggcgccggatatgaagctcagctactctcatgtactggcaattggctgtttccgtcaggacacgacggcgat

SEQ ID NO: 17934 - DNA, 365 bp, Zea mays
  Coding DNA Sequence Number=SeqID_3531
aagtcacccggatatcatagcagtccttgcaccaatggaactgagattatttctatattctttggcccctgaatgtgcttcaaatgccaccagcagccccattttgccagtgttatgtatcaggagaaggacgccctcctggtagctcatgtgtcccattttcccacccagcccaagatgtatgaccctgtttctttgcctgaactaagctgcctggcctggtaggattgagtagacccggaatattctcaaacaggtttggtggactaggtctctttcctggttgtacatttaatataaggtctcttttaagggtatttagggataggcttttcctgaagagttgtctctctcttaactatatt

SEQ ID NO: 17935 - DNA, 405 bp, Zea mays
  Coding DNA Sequence Number=SeqID_3532
gtccaaggagaacagctcgacgccacgcagtgatcaatccccaagagccaagcgtgtgagtcccgctgcatcgtttcttcccagacaagacgccgccttcaactccgcaactgatgattcattgataaccggccgcccccgcattgttcattatattaggtcgacgtctgcgggcgcgtgcgggggatccatccaaatctctcactctgctattgtttctgtacgtccaagattataatgatactcataatcacctcgtcgcaactttcgcgtgaaaaaaaaaaaaatcaaaaaaataataaaaaaataacatgcaaatcaaataaaaacataaccttaaaattaataaaaatatgttcactcatcctctaactatgggggggtctttctataggatccaagttt

SEQ ID NO: 17936 - DNA, 357 bp, Zea mays
  Coding DNA Sequence Number=SeqID_3533
aagcaccaaaggacgtgaatccggtaacagattttgaaggcgatgatgaggaaaacaaaagggagtaggaatgtcctgtcgatttggttaggggagggtatattctgagatcatttgaagtgggtgctagagcagttttggtacttaagagaggactggccattctaattactaccagtggagcacgccccttgcggctgttagttcttcgcatgggtggttagttgtgttgttatccccatagtctgaatgatggttatgatagagaaaaaaaactagtcaggtgtataatatttatagtaatggccccccattgcttctggttcctgtgggctcgacacccgttatgaatgtcag

SEQ ID NO: 17937 - DNA, 420 bp, Zea mays
  Coding DNA Sequence Number=SeqID_3534
gagagcccgttcactactccatggatctgtatgcgcagtatattttgcaaagcttgaggcagtacattgaaagcaactatttatctgggcgtcttgcaatgaggtgactttaatcagttcaagcaattgacatcgggtcccctacatgatcgtgaatttgaaactgccactgtagcatatgtcttgaagtctaaagggaatagtgctgatggatcttggctctggtgcaccacagaggatagcgtctatgacgctgtcaaatctatgactcaccacaacgtgggagctttggtggttgtcaaacctggacagaataaatcaatcgctggcattgtcactgatagagattatctccggaaaatcatactgcagcgaaggtcttccacgccaactaactgttgacgacctcatgactgaaga

SEQ ID NO: 17938 - DNA, 502 bp, Zea mays
  Coding DNA Sequence Number=SeqID_3535
atatgttgctgaagcgacgtcaaagacgctcctcaggatatatactccactaatataacacaaggacagcaattctctgatggatatgctgacattctaggctgctggaacagaaggtcaagaagacagcacagaagaaggctacgacgctcgggcagaacgtcaccttggatgacaatgccactgctggagacagcgagtgcaaggtcgatcccaaagtgctctccaagctgtatgatcagagggtgatgccactgaccaaggatgaccaagtctagtatctcctgcgccgcctctactgatcagtgatcacccgattatctgaaactgctaactttatgtacgcgtggaatacagcttgctttgcacatgccctcttatggctctatcgttcacaactccactacgagagaacgataccaggatctggcctacgcctttgtcagcctgcctggccgtcatctgcatgagtagtcccactgtaagtgacgctcggcatgga

SEQ ID NO: 17939 - DNA, 464 bp, Zea mays
  Coding DNA Sequence Number=SeqID_3536
gcttttctttcgcatgaagtcatgttgatttttgtacgttctaacagcgtctccatcaatatcctattgaatctcccatatctaaaaaaaaaaaaaaccctttttccctttggattacaggatggaactataagagattccttctttgtagacttttataagggatataagactccttaaatgccccgaaaaaatgtctatgtagtttctattctgtttcatgggaccctgttgtaactcgtgaactttgattgagcacctattcggatttagtagcacgttcagaaaatcattcgctgcttatcttttttcacacttccgagttagttattttgtgtgtttttttactttgtgttcaactaagtttccttctaattttgattctttaatgcaatttattataattgaggtgtacatttgtccatcaatgtaaatatgtgaaagattctttggctgtaatccag

SEQ ID NO: 17940 - DNA, 335 bp, Zea mays
  misc_feature (139)..(139): n is a, c, g, or t
  misc_feature (158)..(159): n is a, c, g, or t
  misc_feature (184)..(185): n is a, c, g, or t
  misc_feature (229)..(230): n is a, c, g, or t
  misc_feature (244)..(245): n is a, c, g, or t
  misc_feature (261)..(261): n is a, c, g, or t
  misc_feature (283)..(284): n is a, c, g, or t
  Coding DNA Sequence Number=SeqID_3537
actgccggtccgaatttggccgtcatcgactttccctcatcatgggtagacatatcaggtctgccctgtagaaccgggatggatacgtccgcaggggtaagctctgtgccggcctatccgtccggtcgtatgggccgtnagcttctcggacttaggtnngcaaagtaagttcggctatcaagcnnctagccaaggtcctgaccagttgggaggtgccctgagattgatnngaggtggagcttanntcagagacggtgatcnatattcttctcgtcaggtgatnngaatgggtgccagatgttgcacataattatggcctaaacaataagtgagcc

SEQ ID NO: 17941 - DNA, 564 bp, Zea mays
  misc_feature (141)..(141): n is a, c, g, or t
  Coding DNA Sequence Number=SeqID_3538
ggaaacttacgctcgcgctgctgggagaggagatctctggtgcagcactgagagccaagcgctgagcctgcactgcttccgtacacacgggagcttttcgaataaacatgatcaacacatggcagccctttcatatcacangagctggacacgcccctgctctctactccaaagatatgatcataattggttcgcttctttgatatcggcgagtgcgcgtgggtgcccggcgagcgagccacgggtcttccctgatggcctcttcccagctggtggaaagtcagacatagacggcatatttccaccaccctacttcgagtggatgcagttcattaaggaattcactgaatacacacatctggaccagagcgtttcatatctatgtgattacatggagaaaaacgggcctttcgatggcctgctcggattctgccatgtaaaaatggaaaccagaagtcacttttactgagcacctgaccattgacgcatcctatattctttggaattgctgttttcttccccgagttcatgtattgcgcgatcatatccgcctgcaaactagaa

SEQ ID NO: 17942 - DNA, 133 bp, Zea mays
  Coding DNA Sequence Number=SeqID_3539
gaccctgacttagtgttggctcttcaaatgtctgtccaggatgcaaacatgtccagtgacactgatatgagtaaggtgtttgaagacagaacgtttgtgtcatcaaacattaaaaccatatgtattattctta

SEQ ID NO: 17943 - DNA, 559 bp, Zea mays
  Coding DNA Sequence Number=SeqID_3540
gccggccgcatgtccgtcagtgacatgggcttttcttgggatgagccctgtgcgtcgtgggacggctgaaacgtgtaacaaagagtctcaagttctatagatcttcacttcccctgcttgttctacattttacgatcctgattgatatttctttttatcatattagggccgagatgtatatatactgggttccgcaaatgttggaaaatctgcatttatcagtgcaatgctaaaaataaaaccaagatagttcttcttgacttgttgcggaactcaccgtactcgagatcaaagttgcaggcagacacgatcaagaacattgtgaccaatattgcttcccaaatagatggtgaagaccgtggcggcaaagcgaagaagatgcttgtcgagatggtgaaagtcaacatggagcaaagcatgaggcatgtgtgacaattggggttgggaggaaatgacaaatgatattaggcacatcatcaccccttagggaatgagaacaacaacataagtgggacaatacctcctgaactggagaacctgactaaccttatcagttgta

SEQ ID NO: 17944 - DNA, 340 bp, Zea mays
  Coding DNA Sequence Number=SeqID_3541
caaggcaatttggacgcccctacttaggaacttttagttcgagctggtatccccattcccaaaaaacgactggaaccccatggtggttggcatcaagggcgaggttatggttaactacaaaaggcggaagctttccgtggacaactaaaattgtggccccagtctttaaaagcttgcttcttgttgattcaattgttttcccatgtttgtcagcatttgttcagtgcaagtttttctgtacgcaaaccacccttgttaggggtgtttttgttgtttaggatttttaaatttggttccctatggggcccccatgatttgcaaattttgcatgttcagcttc

SEQ ID NO: 17945 - DNA, 354 bp, Zea mays
  Coding DNA Sequence Number=SeqID_3542
gttgtaatgattgacgggcgagaaatcggcgatgggaaaattggtccagtcactagacaaatccagaacgcatacaaagtcctgacagcagggcaaggagtaccgataccgaggattgctgaggtgtaattgtcgaagatgcatcccttatctagctaggatcagtcccccaaggagcctgatgataccaatctagcacaacaataaattaataatctccatttatcactgttgtttaaaggcaccatgtggagcataataataaattaataataatctccatttattatcactattgtttaaaggaaccatgtaatcattgttattccaaacaggatgtatacttctggagat

SEQ ID NO: 17946 - DNA, 549 bp, Zea mays
  Coding DNA Sequence Number=SeqID_3543
ttgtcaagaacgctattacccaccctgcccgcaagatcgtcgagaacgccggtgctgagggctctgtcattgtcggcaagctcatcgacgaacacaagaacgacttcaacaagggattcaacagcgccaagggcgagtacgtcgacatgattgctgctggtattctggaccccttcaaggttgtccgcactgcccttgtcgatgccagcggtgttgcctcactcctcggtaccactgaggttgccattgtcgaggcacccgaggagaaggccggtcctccaggcggcatgcctggcggtatgggaggaatgggcggaatgggtggaatgggtttctaagcagctgaagcctgaccgtctattttcttcttcttatacccccatttcgttattatgactttagtcttacgtctctcccagtgatggcttatgtacgcgatattgagttggtctccgctcctcagtcacggtttttttctcaaaagcacggcatattggttatttgatgtttttttgtacaatactgtgtatctagaagacgtcctgggaa

SEQ ID NO: 17947 - DNA, 591 bp, Zea mays
  Coding DNA Sequence Number=SeqID_3544
agcatctctagttctttccacaaactcttctccagaaccaccactggaaggcggatatgactgcggtctcgtaccaggacatgtagcatcttgggtttctgactgtcgccgctttattctccacattatggggtattcagtggaagataccggtcctgttgcctgtatatcttggacgcctgacaattgtgctcttgcagttgggtggaaatttaggggacttactgtatggtctgtgtctggatgtcgattgatgtgtactattcgtcaaactggttcaaattctgcctcatctcctatggtgaaacctagcgctctaaaatttgagcctcttatgggaggaacatcacacattcaatgggatgataatggatataagttatttgctgtcgaagaaagcttgtcagaaagggttcttgctttctcatttgccaaatgttgcccaaacagagggctttcaggcacaacatattcccaccaggttctttatggggaagatcgaatccttttggtgcaaccggatgatgccgatgaactgaagatattgcatcttaatgttccagttaagtgttaacttctttgcctttgatt

SEQ ID NO: 17948 - DNA, 477 bp, Zea mays
  Coding DNA Sequence Number=SeqID_3545
gcggctcctcactagctatgctgcgcgtggtggaccgggctaccgaagtaaccactaatgcaatgcgcaagcaggtgagagccgggacatgagctacctgagcccgtacctggaggccgtgaggctccgacttcacgggcggcgccaacttcgccatctccggctcctgcacgctgccccgcaacgtccccttcgcgctccacgtccagggccagcagttcctccacctgaagcagcgctcgctcgacctcgccgcccacggcgggacggctcccggcgacgccgacggcttccgggacgcgctctacctgattttctttttccagaacgacctgtccggcgcattcgggagcggagcgccctacgacgacgtgggccaccacaggatcccggggtatcggactctgtactacaacggggccaagaacttggtgggtccacgggaccagggcctgtgggctggttgccccagaagct

SEQ ID NO: 17949 - DNA, 427 bp, Zea mays
  Coding DNA Sequence Number=SeqID_3546
gggcaggaaaaagtcctcctcccagggaatccgctgggaataaattggttccgccaccaacctgattatggggaccaccaccaccctgatggtgttcccgggaaggttcgggttggggccctcggcaaaccccaaggggaagggggggtttaaactggaggggcgcgaatcccgcctgcaaaagggggacccccccgggtttaccctcccccacaccctggcctggggggccgtcggccacatcctcggggtgggaatcggggtcgggttcaaaaacaccggcgccttcgaccagatcattggatagatccctacgtccccgttgttaagatcagactcaacagctttgattgtgcccccggccggcagcaggtgccaggtggtgactttgtaacgtgtgtgcgtgcgtgtaacattgcatccatct

SEQ ID NO: 17950 - DNA, 311 bp, Zea mays
  Coding DNA Sequence Number=SeqID_3547
ttcccagcgggcgtgaaatgccttttgctgtatctggatgctggactcttgcggtcttgccttaccgagacgtgctgaccatcagataaggcgtgtaacaaggtgacacgatagtctttcgtctagagcagcgggcgaacaggcgcacactgtcacacttacgtgtccggttcagtcttttagcacctcattactagtgcgatatgctcagtttgattggtgtcggagtacaatattttgttgcatgttgtcttataacacacactaatttggcggctcgcgaggtgctagataagcaacgacactcgtgc

SEQ ID NO: 17951 - DNA, 521 bp, Zea mays
  Coding DNA Sequence Number=SeqID_3548
acggttgcagtgagcatctgcgcaccaccgttcaaagatggtgaagttactcaagcccggtaagtccgttatccttctgcagggccggtttgccgccctgaaggccgtgatcgtgcgcgttttcgaggagggcacccgtgatcgttcctactgccactgtcttgacgggggccttgcctagtacctcctaagatggtgatccgctgggactccgtcatgaagacgtgcaacaaggcctgcgtcttgtgctccataaagctcgcaaacttcacgcacctcatgcccacccggtacaccctcgacgattacttaaaggtcttcgtatctggcggacccgactcgctcttcacccgggacaagactgtcgaattctgcaatgacggcaaggctcgcctctaggagaggctcaagaccggcaagaacaggtggatttttaccaaactgcgtttatagacgtggggccgccctcatagcgtatgatctagctgtcaatattcatgggcctgacaccctttaaggtt

SEQ ID NO: 17952 - DNA, 536 bp, Zea mays
  Coding DNA Sequence Number=SeqID_3549
cgccgtggcggcaagtccgaggagaaggaatggcagcccgtcaccaagctcggccgtctcgtaaaggccggcaagatcaagagcatggaggagatctacctccactctctccccatcaaggagtaccagatcgtcgacttcttccttcccaagctgaaggacgaggttatgaagatcaagcccgtccagaagcagacccctgccggtcagcgtacccgcttcaaggccatcgttgtcatcggtgactcccagggccacattggtctcggtatcaagacctccaaggaagtcgcgaccgccatccgcgctgccatcatcatcgccaagctcgccggtgtccccatccgtcgtgggtactgggggaccaacctcggtgagcctcactcgctccccaccaaggagtccggcaagtgcggttccgtcaccgtccgtctcatccccgcccccccccggtaccgggtctcgttgcctcgcccgctgtcaagcgtctcttgcagttgggctggtgtccaggatgcttacaccgcgtccactgg

SEQ ID NO: 17953 - DNA, 563 bp, Zea mays
  Coding DNA Sequence Number=SeqID_3550
cggacgagcgaatctactgtcggtcgcggcgccgttttctcgctctcgcgctcgccttctgggatgggatgggaccgcacgcacacggccatccttctcctctcctctcttcacctaccgattctcttgctctgcgcgcatagaagaggcactccttcattgtcagctgcctttcgcatgtcggcatgcatgcatcttgcccgacaccacgctggcccgtgggtagtcgccgcacgccgagcaccggcaggctgcgcagccgtcgaccatgaatttgccaagaaggcaccgatcacataacctcatccatggagtagaagaactcgttggcgagaagcatgatctcctacctaggctcctcgctcgttgcaggcaatcaaacggttcaagtcaatgtacaggaaggtggcctttagctggagatctctcctgaccagatcccacaagtcaccatccagatcagtcaaatgccgagctcttgatccgacaggtgcatcccttgacccattggtgctcctgacagcctcctctgcagctctgctatatcttcttgcagctgcaaa

SEQ ID NO: 17954 - DNA, 538 bp, Zea mays
  Coding DNA Sequence Number=SeqID_3551
tcatcaatatcaccatctctctgtagcatcgatcccaaataacggaaggtgtccttctttggtactacctggcctcccaaacttacatctccatcctcactaattgtagtaccaaagtcatatctcatatactcggttatggtactgctaattctaaatcattttgactccagtgtctcacgccataactctagctttctatttactccttcctggctttcatctacatatatcaatagagaaggatgagttcaaacatgaaatcttggctcttgcaaggcaccaggtccttgcctcgtttttcgcaaaggctttactgagtggaatgctgctgttgaaaaatgaaaaatcatagcattgcgtcccttctagagcttccataccaccaggattgccaacaaccaaatgacttaggcatgctctcagcgtttaaatggacacagattgaaaggaagcccagcatgacggtcagggaaccctccctcagtccaagtcctcactgcagaccaaactaagttagctgtattgactctgcaag

SEQ ID NO: 17955 - DNA, 500 bp, Zea mays
  Coding DNA Sequence Number=SeqID_3552
cggcgttggtctctggcgggatagagggaggagggaagaggagaggggagggaggagggaagaggagagggggagggcgcacacccatagcagatttggttacggcggttgagtgctggtgcggtggtgacttgagtgtttgcggcggctgcgggaagattaaaaaggggtcggtcgccttacctcgccttgccgccttaacaactatgttattgtgtccaatcacacatttgagctctgctaagactaaactcaagtccattgagtctcagcttaatgaagccctcaatgctagcgatgctagatcaactattgggtctgaatctgcttcagtaatttcttccccaaagataacagaatcaactgctgactcatcttcagtgacgaaaaggcttgaggaggaattggcaaaaagggatgcccttattgagcaagtgtgacctgttaatttctgactgttccatgtttaacttttgttttgctatcttcaactacaagtt

SEQ ID NO: 17956 - DNA, 492 bp, Zea mays
  Coding DNA Sequence Number=SeqID_3553
agaaaggctcagtcctcgagcagcagctcagtgagattgagaatgaattagttgcatcaagtgaagaaatagagttgctgaaagagcgtattcaacaagaagctgctgtatcagcagaaagaggaatgcagcttgaagaagcaatgcccagcgcagagggatgcaaagaaagaattaacgagctacaatgctccctagattcctcgatgtctaaaagccagctacttgaacaagagagttaaggagcggacttgataaatgttcatgagcatcacggacacgcagcgtcatctcagttcgacgcaacagaacgtctgcagcatggagagatcgtgcttcacgtcatcaaagactccgatgctgaatggtgcatactctcggactcaggagctggagcaggagctgaacagcacatatgaaaagctcaagggggttgaagaagaacttgagcagtacctgcccggccgcccgaagggcggaattccacacact

SEQ ID NO: 17957 - DNA, 216 bp, Zea mays
  Coding DNA Sequence Number=SeqID_3554
atgttagtaggtaccaatctccgggtcttggtgggtatgggtcaagtaacaggttctagcactagttcgtcattattctttatccccccagcgcaccttgtatcgattcctgggtcattattgtacaagtcagcaagtttcctgctctgtgtgcttacgggcaggggatcatttcactagtcagcaagttctatacattgaatgcttccgggcagg

SEQ ID NO: 17958 - DNA, 419 bp, Zea mays
  Coding DNA Sequence Number=SeqID_3555
tcaaggcgcacttccttgcgggcgtcgccgcccggaaagtaaaggagcggtctaagcccttccataggccgcccctaccctcccctgcgaggggtgtcagcgcgagccctacgaccctttcgccggccgcgcaagaattcgtcaggaacgccatctcccagtcgccagagtcctccagcgccattcacgcatctctccgcgcaagctacagaggctcggccccgtccgcgagcactcccaagtcaaggttttcgagacaccctggccgtcgcatcgcgttctccatccacaaggcagggttccgcccctcccatggtgagcggtgtgcgagtcgttagtaagcctcttaactgtatatttcgatacaatggtgtaggcggcccaatcctgttctgtaacccattgcataatgatggaag

SEQ ID NO: 17959 - DNA, 119 bp, Zea mays
  Coding DNA Sequence Number=SeqID_3556
cttgagggtaacttcttggcctctttcgctctcggcttgggccgtcaccactggtgccggtatcgcctctttaccccctcgacaccatccgtcgtcgcatgatgatgacctctggtgag

SEQ ID NO: 17960 - DNA, 429 bp, Zea mays
  Coding DNA Sequence Number=SeqID_3557
tgtggatggccatattccagctcctgtcgccttcttcaacccgccgcctgccttgccggagcaaccagcccagacaatgctagtacatgacgtgcgcctgacggcagctgctggccttggaggtacgcactccatggaggaagaactgattggacaaaactcccggacggctctgatatattttctgaagaagggatcggaggtatagacggagttgaggctgactctggaggatcggagacacgatggtggagtggctgggaactcctccgaggattcagcgatgatcctgatgtccatgctgcaacaggatattgctggccaggctcgaagcttagacgataatatggaccgcttcattaaagctcatagagaacggatgatgcaatctatactgtcagaaagatcttgttttgtaatttgaggcac

SEQ ID NO: 17961 - DNA, 165 bp, Zea mays
  Coding DNA Sequence Number=SeqID_3558
ggatgctggtcgtcgcgggccgatccggctcgacacctgggtctcatggcggaacagttgggcgggcccgccgcgacgttgtcgttccatctgaaagaactcatgcagcgccggcctcctcacccaggagcgcgacggccgggatctgatctaccgggcctcctt

SEQ ID NO: 17962 - DNA, 331 bp, Zea mays
  Coding DNA Sequence Number=SeqID_3559
ttcgaggaggttgacagggtttcacgggcgggggccaacccccccccccccccccatggtccccccggcggccccggttttttggtgcgcgaaaccagggtcaaggaggacatcaacccctgccccggcgaggtccccaagcgcagggaaagtttcctccccagggctaattaaaccgcccggcggccggcatccacgcccgttggtgcctgcctgcgtcccttatgtatgtctgtggttgactggttgtccagggtcatcgtacttggctatggtacgtgcacccactcagctcctgtacaaattacgccaataagctcgtgccctaaat

SEQ ID NO: 17963 - DNA, 520 bp, Zea mays
  Coding DNA Sequence Number=SeqID_3560
gcgggaacgattttaggatatggctacgcagctacatctcgcgtgcccgctgcgactgtgaagctcgccatcgtcggatcggacaaaggggatgatcctcagcaatccctgagcagactagaggagtatctaaggcaaagggaggtgtgaaaaatgctgccgaccaccgctttcaaggggcgcgtgatctcccgatcctgccacccggtcttctgctgctacctccgcctcatcgtcaagtgtaaacaaatggatatagaatacacgttttgaaaaatgatgcgtctctgtccttcaccatcagtatgctatgaatacaccaaacatgcatgacgtcaaacacacaacacgtgtgccactgattatcttgcatgtgtcgttattctgatgcttttcctcgcgtctgcaacatcacacttactgtgcagcatatggagagagtgcctcacatgctgctctaactatcacttcggttgtggttctccatttcttgtctgttgcgaaacctatggccacactt

SEQ ID NO: 17964 - DNA, 587 bp, Zea mays
  Coding DNA Sequence Number=SeqID_3561
tgagcgccagacaggatgagttccaacacgaagagtagcctcacgggctatctcccggctatcctcatggcagctgctgcaccattaatagcatacttgggcatccgcaacctgctcacgcgcctcgatcccgaagcccaacaaaaagaagaagcccgcgcaaaggccacggccgcaactcgcaaacttgatgctattctcacatgtaaacggcggaaaagctatagcgagtatgatagcgaagatgacgacgagacggactcgcggcatcgacggccacggttgcaagacctcaatctcaacacgtacgaacaaacaatcgctatggaagtcgttgcgcccgaggagattcctgtcagctttgaggacatcggaggtctcggctccatcattgaagaactcaaggaatccggcatctaccccctcaccatgccccacctatacgcccacagttcctcgctcctcagtgcaccttcaggtgtcttgctctacgggccctcccggctgcgggaaggacgatgctggccaaagcccctcgcacacggaatccggcgcttgcttcattaacctgcacatttcgactctga

SEQ ID NO: 17965 - DNA, 184 bp, Zea mays
  Coding DNA Sequence Number=SeqID_3562
tgcgtggacctggagtcgagctatagcattagcatgtgtgtgctataccgatcgatatctggatcatactctcgtagcaaatagcgatcatagtaataacagaataaggatgctgcaatacgtctaatcggtgatcattatacgatggtttatacggtatatatacactgcgttggtagcaagc

SEQ ID NO: 17966 - DNA, 470 bp, Zea mays
  Coding DNA Sequence Number=SeqID_3563
ccgattcccgaccagcttttagattccgatggcggacggccccttctgcccctttctggagatcctttttgccatcatcctcccgcccctgggggttttcctccgattcggttgctgcagaataaagttttgcatttgcctgctgctcccaatccttgggtacgtccccggaatcatttacgcgatttatgtccttgttgctctcgactctggccagcccgagagggaatactccccccctgcttagagcatctggttgtgccaggcgggcctgcccagttgagtcgaaatcagtattttttttctcatgtggattgtctgacatggcataaacggcaatgggtaaccaagtgttgtggtctatatctctgttacccaacctgtgagctctctttattgtgccccagttattcaatttgtaattgtcctcccccaccaccacataagatgcgcatgttctttgtaaaaaa

SEQ ID NO: 17967 - DNA, 49 bp, Zea mays
  Coding DNA Sequence Number=SeqID_3564
gaagttcactctctgttgaaaggagtaatttccaagccaactggttaca

SEQ ID NO: 17968 - DNA, 142 bp, Zea mays
  Coding DNA Sequence Number=SeqID_3565
attataatgtatatctctccctgtcaaaaaaaaaaaaaaaaaaatagctttttcctcttcccgggaggggggggggggcttttttttccccactttttgccattttttgtcggtccaagcttcgtttcaagctcccgggcgg

SEQ ID NO: 17969 - DNA, 235 bp, Zea mays
  Coding DNA Sequence Number=SeqID_3566
tatgctgggaattcggcatacgagcgagcaggacatggttaagttggagcagggaggccaaaccgtctgcatcagtgggttcatggcgtatgacgtagtccaccgccgcctggtcctcattgtggatgcttggacacgtataactactgcatgcttactacatagggtttctggcttttataacgtcgggagtgctctccacacttatgcagatagccgggaaggcaatcctgtc

SEQ ID NO: 17970 - DNA, 551 bp, Zea mays
  misc_feature (99)..(99): n is a, c, g, or t
  Coding DNA Sequence Number=SeqID_3567
aaaatcagtctccaaagacgctctgcttcgctgcgcgggggggtgccgggaactgtgggccactcgcgggcccgccgccagacaccccggtgttctccntcgccggcgaatgtcggcgccgcctgtgcgtaccgctcgccgacacttgatggggacagtgctggctcacatgcgccggctatcctcggcgcccgcgacgtcgccaggctcgccatgggctgccgccccctgcgcgccgccgcgtattgcgacgcggactggtaccgcctcttcagggatcaatggccatttgagaaagagcctcgcgatgctttggggctaagagaactatacatccgtagacacactgaaatacatcagatgaaatttggtgaccccatatcagctctttattacttagatcctgcgggaacaacaccaagtcatgtaatgatggataggaactccatctggttttgtcagggtccagcagccaaaaaactgaatattgactcgccagaaactgaacttgtagacacacacaggaaccatagtgcacgtgacactcggtt

SEQ ID NO: 17971 - DNA, 484 bp, Zea mays
  Coding DNA Sequence Number=SeqID_3568
gcttttttccactacgccaagcctgtccttcatttaaatggcttaaatgttccggaaaatttccctttaacagggatttgatttataatggccatccttttgttcaaaggttcagttgtgtaaaaccctctcaaaggacttgggcacatgcaaaagccagcaatttttaaagcagggctctttcagccaagatataggtaaatataatagtagcttttaacaaaaagaccctttctaaaaagcctatagccccaaaactaacccaaacaatattctgaatttaaaacagtatattgtccatgcccctattttaaatgcgcgcgctgaggccttttgtcatgaaaccccaagaggcttagtctatgacaaattggcatctgacaatgtatcgagctcctaagggataatatgaatggtgtaaacaagtaaactaccccatataagtgattcagagctacccggtccctatgtttctcttatatat

SEQ ID NO: 17972 - DNA, 323 bp, Zea mays
  misc_feature (162)..(162): n is a, c, g, or t
  Coding DNA Sequence Number=SeqID_3569
acgagcatctgcttgtcgaggaccaggacgaggagtacgtcgcgctgctcctgtccaaggagagcgcgttagtatgcgccccggcggaggaggaaacggagaagtgggtgaaagaggcacgctgcgtatcccggccgatgaagcactgagaaccagggtatngtaacgtctctcgctcggaaggcccatggctcgaggatcccataaccaacgatccctacatcagtattcattaaatgggaagcctcctttagctacgcacgcattttagtcccctacacgcccttggattggggcggggctctggtaatcatccttcaacc

SEQ ID NO: 17973 - DNA, 349 bp, Zea mays
  Coding DNA Sequence Number=SeqID_3570
gaagagtactgaaccagtcagggttgattgacgtgttcaccgagacataatggaaggatatgcttttgcttgtgctaaagaaatctgagtatgatggtttggctgattggctctatgcatctatccggcataaggatccatcgctgcctaccgtttgtgccacattttaaaattcagttggggaatgctgttatggtgtaatggagctgtttttttatgagttggagatgctctaaggcaagcatgcctacctccattcttgaatatttgtcgtccgttaatttattttaactaaaccacgacaattaaaagagatcgctttcagtaatttgcactggttgttttagca

SEQ ID NO: 17974 - DNA, 545 bp, Zea mays
  Coding DNA Sequence Number=SeqID_3571
gatggacgagtgagagtgctataattgcccctacaaggaagctgcaccattccatcgccctagattttattcccctttttacagaggagaggggaaaactggaagccattttgaaccaaagacgattcagaaataagactgtctgggagattaatccacttaaactggacttcacaaaagcacttgttatcggaaagttttgtattggattatcttaaagttggccaaacctgctacctacaacaaggctctttcggtgaaattctgaaagcaaattggcgaggaacacccattgctgtcaaaccattcttccatccttatctgatgacaggctggtgatgagcaggccaatgcagaaagtgttcactctgaagacgccccaacttgttcatacagtagtgcactttcagttattttgtttttgttattggtttgtatgaatgctgtagttggtttcatgtttggatatgcttgtatgattattaatctggaaatggtacaaacaattcagatgaacatttttagtgacgaaaatatggtctaat

SEQ ID NO: 17975 - DNA, 138 bp, Zea mays
  Coding DNA Sequence Number=SeqID_3572
aatacttaaactggtttgcctactgcttgttgttgctagtgtggtgagaaattataatttactcatatttctttcgtggcaaaaaaaatgggtaagtataagcgcattcgattgtaccatgcagaacttcgttgattt

SEQ ID NO: 17976 - DNA, 89 bp, Zea mays
  Coding DNA Sequence Number=SeqID_3573
gcgtcaagctctggaggctccataatcgctgcgttgctgctggagaacggagcggacgtgaacggcaggaacatctacggccagacggc

SEQ ID NO: 17977 - DNA, 475 bp, Zea mays
  Coding DNA Sequence Number=SeqID_3574
acgacgacgtaccagatgtggcgctggcagcccgacgggctgcgacctgccccatatttgaggctaagattgcgttgtgtgagaatctattgagacgaagggggtgatgtttgtgggggattctctcattctggaccagggggagtctgtggtgtgcctgccccattcacaggcaccatggcacacatgatctgtagtctcagagtggttctgttagtggagtccatcttctcgagtgcagtgccacggccttgttgtgctgggcttcgttcctagagttgtggaactcgggcgaccctctcctttatcgtctgaattgcccggtggtctagccgccatggttcgccagaggtgccgctactttccttggttccttctccctgttcttcggcgcttacgatctgtggatgaacgcgaccggtgagcaactggttgatagagctttcttcttgcggcctcttccttttttagcttt

SEQ ID NO: 17978 - DNA, 501 bp, Zea mays
  Coding DNA Sequence Number=SeqID_3575
ttttgcgtacatacacatcacatgactggttaattacatatgtccaacgtaagcctcagtgcaccccatgatggcatacatacatattttgcatacatacagcgacagaagcgatgatggtgcagcacgacaaactgaaacagggacgcggcaacatgggcttgacccagcgaacagcgacgcaaagagcaaagcgaggttgcaaccgggcgggctcggatacaagcacacgcagcgtatcaccgtgtccagcgcgcgcgttacggactcgatgtcgactgcgagcagtttcgcgcgtacgacaacgcgacggaggagaactgaacagggagcttcgcgacagcacgcgcaggaacaacgaaatgctacacgcgcgatgcaaaggcgagcaggacgcggactgggcagagtcgagccagggagcttcgacgaacgcgaaggggctcaggcaggatcgacggcgcggctggagaaacaggagatgcgccagagaaaacacca

SEQ ID NO: 17979 - DNA, 238 bp, Zea mays
  Coding DNA Sequence Number=SeqID_3576
atacctatttgatactaactttttgtaatttttctataattttaggccaacttgaagatgctttgcccttctaaaaaattgaatatcttatagttcgggatggagggaagtgcatgtctcccgtatgaattgtccaggggcagggttgtaccgggctatccttttttgtatttgttcatgagacatcgtaatcttttatattttttgcattatataatgttttcccaaaatgttacag

SEQ ID NO: 17980 - DNA, 502 bp, Zea mays
  Coding DNA Sequence Number=SeqID_3577
aaacgttgatctgtgtcgatcccatgtgtatttagtactactactgcccatgaactgtatgagtagcagtatcagcactgcaagctgcaaccaaagattcagatactgtttaaaaaaaaaaaaaaaaaaaaaaaaaaaaaaaaaaaaaaaaaaaaaaaaaaaaaaaaaaaaaaaaaaaaaaaaaaaaaaaaaaaaaaaaaaaaaagaaagaaaaaacgaaaggaaccaaaattatatacaggctccataaaaacaataaactggtcctataatgtacaacaaaagtgaatggaaaaaccaggggtttaacccaagttaaaaaggggaaaaccactggggtaccccatcttgttggcctatataaaaaatatgcctttaccgacctgccttaataacagaatgggcccccaccatgggccttggcaaacaccttttcaaacctgaatgaaacttggaaggcgccgtggatacgcccattaaggccgctaaatttgccggcaac

SEQ ID NO: 17981 - DNA, 465 bp, Zea mays
  misc_feature (240)..(241): n is a, c, g, or t
  Coding DNA Sequence Number=SeqID_3578
agtggagtcggttaagtacttctgatttgagcgcggtgttccataaggaagtatttaggccgcttatcttggtcagaggttccgggacgaagatttccggagcggcgagctgtcgaacaatggcagttcgtcaactccccttgcacgtgacggcacagaatttccgggtcagatgagaggctacatcgatcaaagctgaactattcgggaatgctgtcgtcgaatcatgtattaggattnntacgccccacgatcccgtagccgccgcccacgatagccgccgccgccgccgtgctgggacgacacctcgccggacggcgcggaggacgccgccgaggcgacggccacgagccgccgccgccgccgccgcggcggcggagggagcagccgggaggccgcgtggacggctgcaggcgcgcgcagcaccaggagcgccatcgtgctggcttgtttggtgcttgctgt

SEQ ID NO: 17982 - DNA, 555 bp, Zea mays
  Coding DNA Sequence Number=SeqID_3579
caatgcggcccaatttctaacacggctttgaacctaggtagccacgagcccctcagccccctcactccggtcacccaccagccgccgctacgtgacgaggtctcccgtgtgacacagactgccgtccttcgcctggcgagtggtgacctgcgacctccgtctccggctgccgtcctctgccatggtccgtggaccgtagtccggcagcagcagggctccagcctctgcccgaccgcttgcccgccaccggcgtctgctacctccgcatccggcctctgggcaccggtctcccgtctctgcccccggcgttcatcgtccggtctccgacaccaggccctcagctacagcagtacagcaccagttcccgcaacagcgaggtcatcgacgccgccatctaggacggctcttaagttgcaggaagcaggtgaagtgaacctcatgtccagttcttgctcctctttaactagtaactagatcatttgtagtgatggaagctgtaaagaagctccatgctcatcctcgttgtttctggcctgcacaactgtcaatatgcaa

SEQ ID NO: 17983 - DNA, 282 bp, Zea mays
  Coding DNA Sequence Number=SeqID_3580
gatataaaacctagtcaaactaaagactacttatcaataatttcattttcatcagtttgtatgtagactgacccctgaaagtttattgcaggacactgtatgttcagtcttacaggcagtttcatcaatcccatcttgtaaactgcttgaagaagtatgcaagaggaattttgctacgcattttgattattgcacaactgcttgcacggactttgtgtcattagatgaggcaacatttaaggatattcttgaggcaagtaatataaccatcactggcaaccc

SEQ ID NO: 17984 - DNA, 415 bp, Zea mays
  Coding DNA Sequence Number=SeqID_3581
caagccctggcctggtggtgttgctggacccgacgcggagggacctcggcgcacaatacgagctcggcggcgagctgggacgcggcgagttcggcgtcacgtacatgtgttcgccatgagcgcgcggtacccgtacaagtccgtctccaagcgctgtctgtggacgctcgtggacatggaggacgtgcaccaggaggtggacatcctgcgctacatgccggcgcaccccagcatcgttagcctccgtgccgtttatgaggacaccatgcacctgcgccacatgaggacgccgtgcacctcgccatggagttctgtgagggaggggacctcttcgacaggatcgtcgctcggggccactacatcgagcgcgcagtcgtcacgcgcaccatagttgaggtcgtccagttttgtaaga

SEQ ID NO: 17985 - DNA, 499 bp, Zea mays
  Coding DNA Sequence Number=SeqID_3582
acaactccagacgtcggcgactgtgggcacacaagctgctgctcgtggcttccttgcacgacggagagtgcgggagatgcgtcggcagatgctcgaggcagccttggtgacggttgacctcggcacacgggggcgcgacctcgccctgtcggacggccatcagcagcggcaccgggccgctatctccaagtgcgagcatggtacgtgtcccgcgggcgacgaacttcaactctacggcagcggcggtagagaaggcactcccctcgtcatcggcaagggcgcactatttagcgccaccacattccgctaccggccgccacgagggcgcctccgctggttattgttgcgacctactccagcacccgtcatgctgcagctcgagtacgagctgcttgtccaggaggggtgtactgtcagggccaaatttctagcattgttgattgtggttccatgggtgatagattttctagtgcatgactatgttatgatgcccttttta

SEQ ID NO: 17986 - DNA, 354 bp, Zea mays
  Coding DNA Sequence Number=SeqID_3583
tccatcccatcctcttggtatattttgtttcatttggcatcctagattctgaatccggtggagagtttttgaaatattgtcgccgattacccgtaagaacaacgaccactcttctaaatctgcaaggtatggcacttggggaatatgttttatctatgggaccctccatgcgataaatggcttagttgctgctgggagaaattatgagaacaatatttgcattcggaaagcatgtgaatttttgctctcaatacaactcaaaactggtggctgggcagagagctatcgttccttggaagtcagatacttttaggctctttatcgcaacaatgggcaaactgtcaaccatgtcca

SEQ ID NO: 17987 - DNA, 487 bp, Zea mays
  Coding DNA Sequence Number=SeqID_3584
gcatggcatgagtggatccatgccatgttatgaatctagtccttcctttcttgtatcttccatgtgacgcggcgtgtgcgtcccttcatgtgtgatgatgccagatgaatactacaaataagacgttgtgactgtgccaaaaaaaaaaaaaaaaaaaaaaaaaaaaaaaaaaaaaaaaaaaaaaaggaaaaaacatcgccacagaaccgcaagctagtttagcctccggaagggacattcttctaaagatggcagcaagtcatgtccatccatggggactgcgaaacagcttccgcacctggttcctatatttaatatatttagtctgatctcccagttatctgtaaaccaccgagaccgagtgcaagcagacttggttgattcacaatttgcctggtggttgctaatgatatgggatgaaacggttgccggcttggctgctattaaggttgtgcaatctgccgggcaattttagcattctaaggcc

SEQ ID NO: 17988 - DNA, 403 bp, Zea mays
  Coding DNA Sequence Number=SeqID_3585
aaatctatggcagctcaccaagtccggtattctgcatatgcacctcctccgctctcagggaagcactcccgcgcgctctttgctggtttcaagtacaatatttcctcgacggttggcacttggaactgcagcgggtcggctgtgtagagccctttcacgcacgaccgtacgtggaccttcaccagcgcgtacgctgttgtccaccacatagctccaccgccgtccgtcatacctctcccaggcgcagcaccccatccctagcgatctccgccggcacggccgccgtcgccgggaccctggcggccggggcggtagccttcgccgtggcctcggcctcccttacggcggtgcgcaccgcgtcccgcacggcaggcgcggacagcgtgacggtctgcgctgctgc

SEQ ID NO: 17989 - DNA, 283 bp, Zea mays
  Coding DNA Sequence Number=SeqID_3586
gttcctgtttattgtctatttgtctctgggtttttggttagcttgtttgtcgttgtctccgtgtacgttcttcatcttgtcttttactttggagaagaaattttattacaggatgttatttgaaaccaaccagtaacatcgatgaggatctcgccaagaatggtggggggagatgcccagtctcccactcctttcactctctctcttcctcatcatgatcctctcctagcttgtctttatatcagtaaaaaaaacgtgggatcttttcgagcaccaaaataga

SEQ ID NO: 17990 - DNA, 418 bp, Zea mays
  Coding DNA Sequence Number=SeqID_3587
atctccctccgtaacagcggccgggcagcccgcgcctggccgccgccgcccgtcgctcccaccatccgcgcgcccaacccggctcgcccccgccgtcgggcacgctccggtgaacccgcccacggcatcgccgcgcgcgaccaaccccgaccccccacccggggtaaagctgtgggggctgtgttgctcgggagtggcagctactccgccggggctccctgcaggtggaccacacggcgcccgggccccgccttccgccatggggagcggccttccggcggtgccgcttcccgacgagcaagtgatcgaggacccaggtgttcagcaggtggaaattgctgagcaggagctcgttgaagctccccccaggagaagaacatgtggtctaggaggagctctacaacgatgagtatgagct

SEQ ID NO: 17991 - DNA, 477 bp, Zea mays
  Coding DNA Sequence Number=SeqID_3588
tggatcagggacacacgtacgggtttgaccaggagcaccatgcatggtccatggatcatatcatcattatcatggcttcatgggatgggaatggatcggagtacgtgcttaaccatgatcagtacacacgtatctctcggaggggcggcggtatcccgggtgatggccgggcgattaattagtagctgtagttcttgacgaacattccctccttggcctcggcaagtacacctccgacggcgaggccgccgaggccaaggagggcatgttcgtcaagaactacagctactaatcgcccggccggccgcggccatcaccggaataccgccgacgtacgaccctctccgagatacgtgtactgatgatcatggttaagcacgtactccgatccatctccccgtgaaagccatgatatgatccatggacgaccatgcatggtgctgatcgatgccgtacgtgtcctgttacataaataca

SEQ ID NO: 17992 - DNA, 491 bp, Zea mays
  misc_feature (460)..(460): n is a, c, g, or t
  Coding DNA Sequence Number=SeqID_3589
ctcttgccgaccaaaaagggacactcttcctgatgggcaggctttgaggacaggttccagagagaagcaaatctgtctacttcagcaatctgtccatcacttgtgaagcctcctgaaacaggcccgagaacctagcaaggtactcggcctggttgggtggtgcgatattggctaaggtcgttttccctcaaaaccagcatgtgaccaagggcgagtatgatgagacggggccgtccattgtgcacaagaagtgcttttagagacaaatgccttgaactagcacggttggtgcaccatttgctgctgttcatgtcgcagttgtgctcgtacctgaacgttgcggccttgcgggtgctgatgcagcgatgcttgtgtctacaccttactccagccacagttcatacctgacggttgctaagtgttgatgcatctagctagctcggttaggatggattggtcnttagctcccaccaccctggaatggagtgtag

SEQ ID NO: 17993 - DNA, 408 bp, Zea mays
  Coding DNA Sequence Number=SeqID_3590
gctggaccacaatgcagccattaatgattctgtctagccacacattacattaagcgtctgtaattcatgcctgccaaaacatatatcgttgacaggtcaaaatataactgatccaaaagcagcatacacacatggttcattagaagtggcgaacagactattagcgagtattgcttgcacacaaaagcacatagttcgtttgtccagcggcaatattagcagaagacaagtgctattctcgttggacagaaaaacgacatgtcccttcatttccaacgatagacctgcaatccactattgccatcgggtacatgaaggtgcttcctctatctagcttcagcttcttgtcctttagtagctgctctctcctaagttcttcatatagaagcctaacatcggattccttgt

SEQ ID NO: 17994 - DNA, 356 bp, Zea mays
  Coding DNA Sequence Number=SeqID_3591
cagtgtcgccaagatactgccattcacagatttgtcggatcaacggtgcaaaatgcatgccaccatgggttagtcgatccaactgtcaacctaaaggaggctatggatgatataaacggtatgtttgggagaccactgaacttgtgcgacagagcaaagcggaaagccaacgcactgtcagatagaagaaaagctgccccagcttctggttgtttctccatattagctgctgacgtggacctagaagataataaccctaccagcaaagccggtcagaacggttcttgtcgatgcccaggatggtctgtgtctgttcgagcccacagtcgacacccgtgacgtctcatggcagagat

SEQ ID NO: 17995 - DNA, 468 bp, Zea mays
  Coding DNA Sequence Number=SeqID_3592
agtccgcgcactgtagcgttgtcagccgaccgttgagctcgaccgttgctccgcttggcacaccggacactgtccggtgctacaccggacagtccggtgaattatagcggagtgtcttcctaaattcccgaaggtggtaagttcagcttcgagttccctggtgcaccggacactgtccggtgcgccagaccagggcagccttcggttgtcttttgctctctttatttgaaccctttcttggactttctattgggttgtgttgaacctttggcacctgtagaatgtatgatctaaaacaaactagttagtccaattatttgtgttgggcaattcagccaccaaaatcaattaggaaaaaggtgtaagcctaatttcctttcagagctcattgaaggcaagttgtgcccttgaccacttttgttacccaataatgttctttataatcatttaccatgcattgacttaatt

SEQ ID NO: 17996 - DNA, 537 bp, Zea mays
  misc_feature (27)..(27): n is a, c, g, or t
  misc_feature (44)..(44): n is a, c, g, or t
  misc_feature (54)..(54): n is a, c, g, or t
  Coding DNA Sequence Number=SeqID_3593
tttcagagaaagtcaaggtcgtgcttnccagcatgtcatgtaanctgcaaagcnatcatggagttccacttttgctgactctggtgacagcgacaaaccctctcctgtggaggagttcccaatgagagaatggagcatccgcattttcatgcttgatgaggccggcaacgagcagcctgccgatgtcttcaccaaggttgtttacaatctgcatccaacattcgagaacccagtccagactttcaccaaggctcccttcgcgtgtaccaacgagggatggggtgaattcgagattggcatcgactgctacactacagagaagacgaagctggcgcctatcgtgcacgacctcaacttcctgcagaacaagtacgagagtgtccacagtgtcgtcttcaagaacccttcgcaggcacttcaagagaagcttcgcgagacgggtccgcttcccaccgacgaggaccggggcaagaagaagggtggcctgggaggtagcgccggaggccgcaagagcgcgcaacaaaagcacgactacga

SEQ ID NO: 17997 - DNA, 390 bp, Zea mays
  misc_feature (60)..(60): n is a, c, g, or t
  Coding DNA Sequence Number=SeqID_3594
ttcaacccacttattagctccttatccacatcgtgcacagtattgtccaccttcggtctnccgtccaaacacactgcgcctttgacccccccgaccttgaggtacaccatctccacgtccccctatgccgcctcagctgacgccaccgccaggacgaaacccagcaccgccgtcgccgtcgcacgggccagccatgccccggacgccgccattccgcgaggcaagacctcaccctcctacgagtcgcagaaggagaaaaacgagcagacagagagacagagacgcaagcagtggctctgcgcggcctcaggggtgagacgctgacactctttgttcccaccgctgctgggagtggctgtggcataaatagcagcagatgactggttgagg

SEQ ID NO: 17998 - DNA, 445 bp, Zea mays
  Coding DNA Sequence Number=SeqID_3595
tttttccttattttcagcaacaccaattttttccattcaaccaactgtttacattgaaccctgctgcttttttgcagcaacaacaatttttcccattcagccagttaggttctgcctacgttcagcagcaacaattttttccttttaaccaattggccgccctgaacccctttgtttttttccagcagcaaatactactcccttttggccagctaggtacaacaagccccgcttcctttttgacccaacaacaattgcttccgttttaccaccagtttgtggctaaccccccaaccctttttcaactgcaacagttgcttccctttgtccaacttgctttgacaaacccagcagcctttttccaacaacccatcattgggggggcccttttttagattgcttattagttgtaattcaataatgaagttttttgggtgaggtatgg

SEQ ID NO: 17999 - DNA, 449 bp, Zea mays
  Coding DNA Sequence Number=SeqID_3596
gatttttgccagaacattgggatcctgggcctagcttatgggggcgtgatgggcgaccggaccacctctaattgctcgtcggagcagatgttccgccgcaaatccgctcctcgccgtggccgacgtcacccgaacgaccatccatgctcctccttcgttgcttggtcttcttgacgggtgctgacagcaagaatcccggcggctccagcttggagataagcttcctctcaagtccgggggaatgtcagcaccggtgacaagaacgcgacagcaatgacaagagcaccaccagcagcaaccatgtcgatgccggcagaggcacaagcgggtgatgggcggcaagcgcgggagggtcgtttaaactcaaagtattataggccgcagtgggctgtgtaagccgtggggctgtgtaagccgtgtgggctgaaaccgtgagtagtaagctgaac

SEQ ID NO: 18000 - DNA, 227 bp, Zea mays
  Coding DNA Sequence Number=SeqID_3597
cccccctgtggctgggaggagtgctacaagaaaaatatttggcggatccaatactaaaggttggtaaaagtaatcaacacactgttgacatattagcatggtggaaagcacacaaagaagaatatcctctcttgggccagcttgctcatgatgtcttagctatgaaagtgtcaacagtagcttcagaatctgcttttagtgctggtggtcgtgtactcgatccatct

SEQ ID NO: 18001 - DNA, 558 bp, Zea mays
  Coding DNA Sequence Number=SeqID_3598
cactgcatgtatagcacgccattacggcctctgtttggttcaagcgcttatgattcgcatcagtctggccaccagtgatgagcgctgttttgcggacgcaaaatgcacatctgtgatttagttcagtcttttttttcatctgattggttgcttgcatcgtctcaaaaaaaaaaaaaaaaaaaaaaaaaaaaaaaaaaaaaaaaaaaaaaaaaaaaaaaaaaaaaaaaaaaaaaaaaaaaaaaaaaaaaaaaaaaaaaaaaaaaaaaaaaaaaaaaaaaaaaaaaataaattgggccgcaatttcaaacaacatcaactttaaaaaaaacctctggcaacatcccatcttaatacgttttagaataaaaaacccgtgcgggcactaaacgtaacaccctaaaagcccacgccgattgcccttgccaacgtctcaacatactgaaccgcaaacgccaccccccaaaaagcgctaaactaaaaaacaaggaaaggcccgctctcaaactcccctaattaactctctaaacaccaaaaggcctccctcttctaatatataaa

SEQ ID NO: 18002 - DNA, 363 bp, Zea mays
  misc_feature (129)..(129): n is a, c, g, or t
  misc_feature (191)..(191): n is a, c, g, or t
  misc_feature (276)..(276): n is a, c, g, or t
  Coding DNA Sequence Number=SeqID_3599
aacacacaaagaagaaacaacacaaacaaaaaaaaaaaaaaaaaaacacagcaaaaaaacaagaaggaaaaaaaaaaaaaaaaaaagaagaaacggagaaaaaaaaaaaagaagaaaaacaaaccggtntaaaaaaaaaataaacaaaaaacgaatgcagatctatgttaaaatataattattataataanaaaaccacccccccaccacaaaaattattatataattaaaaaaaaaaaaaacaccaaaaatactaacccccaagaggatccgcgnccccggcgccggcgccggcgcggggcctatccggcgtgtccatctggtccggcgaccccgcggtgggcgtcccgcatctgtctccct

SEQ ID NO: 18003 - DNA, 413 bp, Zea mays
  Coding DNA Sequence Number=SeqID_3600
gggtccattccaataataattttgtgtggcagggcgggcacccgagcccaactcattccctttttactccaaataagggaaggggcggtaactattccccccattcattttcagggcgaggtttttgcaaaaggtcttttttcattttttgaagaaccccttcctgtgctggagagactaaagcattttaaaaaggccaaagttggccgtagtttgaagttgttccccagatccctttctcccctaaaggggatgcccatcagacccatacccattttaaggcccccagcctgtccaatgtacatgtttattaggaaaggaccccccgctaaatttgcaaatgtaaaacattgttgggtaagctctcaaaaaaaaaaaaacaaacttttgccctaaggcaaaaagctgtatgt

SEQ ID NO: 18004 - DNA, 479 bp, Zea mays
  Coding DNA Sequence Number=SeqID_3601
ttactcgtgttatctttgtttgtctgttccagaccacttcgtcctccgaggcgagcaaccatcaaggattttttgggagttggtttttttccaaagaggcaaggggggagttccccccagctcactgtatttcaaatccaaaggcaaaaaataatttccccacaatctctgaacagatgtcaaaccacagttgaatccgacgctcgagtttgcaaaaacaccttataaaaaaaaaccttttcatccttctttgataagggcccaaaaaaaattgctaacaaaaaaggatccttggccctcatgagttaaatatgatacacaggacctaaactgtcagctttttttcattcgggtaaaattggactgcttggtatcccaaaaagtgccgtccggggaggaacccaaaaacggaaaaaatgttgaaaaatgtctttggcataaaaagattgaacaaaaccaactgagggaacttgtcaaca

SEQ ID NO: 18005 - DNA, 109 bp, Zea mays
  Coding DNA Sequence Number=SeqID_3602
ctgtacgtaacaggtatcacatgctgtgctgccacagtggcaaggcaagtaatgagttgagcagagcggaagaactgcactgcactgcactcacccttgcgtttggcaa

SEQ ID NO: 18006 - DNA, 153 bp, Zea mays
  Coding DNA Sequence Number=SeqID_3603
gaaatagaaaatggacaagcaaggggtgtatcctggaggccgttagtgaagcaagtgctgttgaaattatcaatctcaaggatagcctaaatgaatgggtcactaaagtgggcgatggtggtagtggaaccacagtttttagaaaagcaaatg

SEQ ID NO: 18007 - DNA, 445 bp, Zea mays
  Coding DNA Sequence Number=SeqID_3604
ccctcgaggagaccggcatcgatgcgaggagcggcaaggtcgtggtgaagatcgatccgacctatttccgcccgaccgaggtcgatctgctgatcggcgatgccagcaaggcgcggcaggtgctgggctggaagccgaagcgaagctttgcgcagctcgtcgaagagatggtggcgagcgatctggcggaggccaaacgggatgtcgcgaatggcaagcataccgtttgagctgaagggcaaggtcgtctacgtcgccggccatcgccgagttcgcgctcatggtagccgagatcgtcggctatcgcggtgagatgatctcggacacctcgcgccctgacggcacgccgcgccaactgctcaatgtcggcaggctcgacaagctcagctggcgcgcgacgacctcgcttcgcgatggcttgaagcgcgcgtatgaggcgtatcaa

SEQ ID NO: 18008 - DNA, 585 bp, Zea mays
  Coding DNA Sequence Number=SeqID_3605
gccgcaagaccaagcgtgtccacaagacctccaccacggacgacaagaaactccaaaccacactcaagaagatgaacgtccaacccattcaggccattgaggaagtcaacatgttcaaggaggacggaaacgtcatccacttctccaaccccaaggtccacgccgccgtcccctccaacaccttcgccatctacggcaacggcgaagaaaaggaactaaccgaactcgtgcctggaatcctgaaccagcttggtcccgacagtctggcgtctctccgcaaattggccgagagttatcagagtctgcagaagaaggaggctggtgagggaaagaatgacgatgaggatgaggatgatatcccggatttggtggagggggaaaactttgagggtactgttgagtaaaatgcctttctgtcaagagggtgagaaaaaaggaaagttgtctcttttctttccttagctatatgtcctagcggaatttattaggatattttgttgaggaatttttttattttgaagaaaaatgaaaaaaggaatttcttgggacctgcattattattatgaatgcgagtgtgtgtctagt

SEQ ID NO: 18009 - DNA, 419 bp, Zea mays
  Coding DNA Sequence Number=SeqID_3606
ttttgcttttcctgttgggcttcactgcaactgttgatgctcgctttgatccaagctccttcatcactcaagtacttcccagtggtgatgctaattactatgtgaaatccacaaccacagcttgctgtgatgcatgcccttgcacaagatcaatccctcctcagtgtcgctgcccacatgttggggaaagctgccactcaccttgcaaagcatgcatttgtacaaagccaatccctccaaagtgtcgttgcgctgatatcactgacttctgctatccaaagcgttccccctctgaagctgaagctcactaagaatgagcatgttccaataattatgatgtgggacaaagtcacttttaggctttgttttcatgtatggaaatgaattaatcgaataaaagttactttggccattcagtt

SEQ ID NO: 18010 - DNA, 452 bp, Zea mays
  Coding DNA Sequence Number=SeqID_3607
aatgggtttctcaatacatcaagtaagacaaacacacgctgtgttattattaagccgtaagcttgcttctataaatcctgttttttgtatcgtcttgcttcgttttttagagctcactagtccccccccccccgatccatcactacacacatctcctattgcaaacgaacataaaacactacctaagagatcaatatggctggagtgatgaagttggcatgcttgctcttggcctgcatgattgtggccggtccaatcacatcgaacgctgcgctaagctgtggctcagttaacagcaacttggcagcgtgcattggctacgtgctccaaggtggtgtcattcccccagcgtgttgctccggcgttaaaaacctcaacagcatagccaagacgaccccagaccgtcagcaagcttgcaattgcattcaaggtgccgctagagccttaggctc

SEQ ID NO: 18011 - DNA, 526 bp, Zea mays
  Coding DNA Sequence Number=SeqID_3608
gagaacgctgctacgatcgaaggaaacaccgctgcggatgcgccggtgacggatgcggccgttgagaagaagcctgcagcgaaaggacgaaagacgaagaatgttaaggaagtgaaggagaagaagactgttgctgccgctccgaagaagagaactgtttcatctcatcctacttacgaagagatgattaaggatgcgattgttacgttgaaagagagaactggatctagccaatacgcgattcagaagttcatcgaggagaagcgtaaggagcttcctccaacattcagaaagctgttgcttctcaatctgaagagactcgttgcttctgggaagcttgtgaaggtcaaagcctcgtttaaactcccatcggcgtcggctataagcatcatcccctaacgcgggagcggagaaatctgctcctgcgaataataaaccggcgactgtggcgtgtaccacggcgaagagaatagccgctgcggcttcctgggctaataacacgatcggcgttaaacctacgactgct

SEQ ID NO: 18012 - DNA, 207 bp, Zea mays
  Coding DNA Sequence Number=SeqID_3609
cgttgctgtcgcgccgcgttagcaaccagccgcgtctgccacaggtcgtggctcgcttctcccctgcttttccgcgtccccgcagcgccgacgacgactgggtgcgcagcgcggcgccgccgttctacgccgggcgcccaagtcctcgacgggaccttctctggcgacgagcgccccaccaggccctaagctcatatgagcacggag

SEQ ID NO: 18013 - DNA, 479 bp, Zea mays
  Coding DNA Sequence Number=SeqID_3610
gcggtgaatcagctgactcaacctaccatcctatcgccatcaccagttccacggctacggaagcggatccaaagttcgtcgccctgtcttcccttagccgcgaatgaacgcagctcgcactaggcatcctcgatgctgggccaatcacacggtaagcgcctttgtgggagcttacatttcactccctcagaatcaatagagcacctcgcccttcatcaatactcttgctgtcctcaacagctcagctgaaacaatggccccatctttcatgctgataccaatatcaagcttcccagaagcatgtccaatcgtcacagttttgctcgtcaccgcccctgaggaagatgaggctttcgcagcagcctctccgccatgccgcgcctctgccgacatcatcttccatgcaatactcccctccacttgacatgcagccccaagacacagcgctagcgtcagaggaacagccttatgtgcctgcc

SEQ ID NO: 18014 - DNA, 493 bp, Zea mays
  Coding DNA Sequence Number=SeqID_3611
tgtaagtcagcgtgcgttggctcatatgagcagagcttgcttccgcatctcgctactctccgtgccttgctcgccggtctgctagctgcagtacccacgggagccggaggtcatcaaggcggcgtcggtaaaccatgtccatggccacaggccacagctgagcttcctccgctgcccgccactcgtgccatggcaacgacagatattgaaagcatgcaagtagagttgctggccggttattacaaatcgaggttcagcgtgggatataaataatggattttcctgtgtgtattagggttgttgtggcggctgcttcattcgtttattcttgtgacttgttgctagcgattggagtgagctgcttttgtgtgtgtgtgtgtgtcaccatttcgtgctatcagacgtacgacatggaaatgtggttgactactatatatggtacacatacatataataataatcatctgtgttggtgaacgtgcctctgatgaat

SEQ ID NO: 18015 - DNA, 301 bp, Zea mays
  Coding DNA Sequence Number=SeqID_3612
tcccggctgtgagctcctctgtttgcgccggtccaccgcagcagcctcaacatcccctctgcgttgcgccctcgacgtgctcgacaaaatgccgcagcgagcagcggtcatgagatcccctccgtgttgcttgcatcggcccgatctgcgcagtccctgtcgcgacgccaaaattcttcggtgagacctcgctgatctgtgttcattgattttatgaaattactgaactaataagctctttaataattgtgtatgtcgtttaatcgcagcaccttgtcgttgttcacgcttcgcgcgtcgt

SEQ ID NO: 18016 - DNA, 45 bp, Zea mays
  Coding DNA Sequence Number=SeqID_3613
gagcacaccaggggaaaaggagcaggacgattggtgaccacagag

SEQ ID NO: 18017 - DNA, 566 bp, Zea mays
  Coding DNA Sequence Number=SeqID_3614
aggaagaaccccaggcgtgaactcgtcggtgacaatgcacctgctaaagctccacccccagttgtttctgcctaaggcataaactcgtttaaggttaaaatgtgttagttgtttttcagcaatgctacttatgcgatcacaggaaactggtggggggcccccaactgttttatcaattttagcccagtcgtgtaattctgtttctgcactattcatgtctgctgagtacaagtagtgtttcacgctcaaacgagttcatgcctcaggcagcaacaactgcggttgcagcttcagcaggtgcattgtcaccgacgagttcacgcctggcgtactccctcgccccgtccttgtcaacaatcttgataacaaagttctgaggcgcgacaaccaatcgcagccgaatctccttgatgcacttgtcaacaagatctactgcttccctctactacatcgactacatggcaaccttgctcagaatcgacaaaggtgcttttgggtccggttcgtgcttgctgcgtgtctcgtatggcactatttgcacctcccgtctatgtgttttcattggt

SEQ ID NO: 18018 - DNA, 494 bp, Zea mays
  Coding DNA Sequence Number=SeqID_3615
gttgaactaccatgtgaaccatatgatgttatatactccctccattttagattataaaatgttgtcttttctagatacattgttttactacgcatctagacgtagtgtatatctatgtgcatagcaaaatccatgaatctaggaatggccaaacttcccgctgtggtgcaaaatgcaccaaacggtgcgggtgcattcattaaggccgctggcagaatatgcaagggggtgcgggatggcctttttgatgggtcaaatgagtccaacggggtcgaagttggttacgctgttcccaactcttttgcaggtggtgttggcttgtcctctcaggatgggggctgctgcagtttattgttggcagcaagtctttcaaatgcacaaggttctcccttcagtattttgatgtttgcctatagctggacccggatgatttgttctttcatccctcatgtttcaatccataagcatttcatgttcagtgttttcctgtcctt

SEQ ID NO: 18019 - DNA, 522 bp, Zea mays
  Coding DNA Sequence Number=SeqID_3616
caaccagctggaggatgcccgtcccctccccgattccaccacccagaaggagagccccccccccctggtgctccgcttgggaggtggtatccagatctttgtgaagcccttgactggcaagcccatacccctggaggttgagagctccgcccccatcgacaacgtgaaggcaaagatccaggccaaagagggcttccccccagcccagcagggtttgtttttccccggcaaccagttggaggatgccccccccctagcagattccaccatcccaaaaggagagccctccccccctggtgccccccccccgcggtggtcagtaacccatggttcatttaagctgctgctgtacctgggtatctgcgtcgtctggtcccccctggggtccccctatatggaggtcgtcgtctaataaccacctgtggtttgtgggccctgaaccggggttggggctccgttggtttaagggccccgttgtgccccctgggtgggcccccaacctcttctgccccagtagggctt

SEQ ID NO: 18020 - DNA, 577 bp, Zea mays
  Coding DNA Sequence Number=SeqID_3617
gcgacataagaaatacaggtccggaatatgctgtcataacagctcttgcattatgacagagtatgtttgaaatgttggatcaagagatcgaagccacgatcatgcctcttgtgtatcgctacaagatttgggtgttttgcaaggagggggagaaggtctcagaggtgaactttcacgtgattggccacaagtgcagccacttgagatcgtacaacacccgaacaacataccgccctgcaaatttatccggaagcagctcacctttaacagacttattcgacaacaacatatagagaagaaaccattgacagagccagtatgctcggaattcggctcgaggaagaaccggaggaggaaacattgtttcggggcgtgcgtgcttgccaaacttgaagactcccagccctttattggccctcatcttggttagattcagttcattccatgagtgtgagcggctgtggcaacttccaccctgctcgtccagggtgcaacaacccacatggacggtgcaaactttatcttagaatgttgttcgacggcgtgaattctgacactgtggatgaaacgtgatcac

SEQ ID NO: 18021 - DNA, 373 bp, Zea mays
  Coding DNA Sequence Number=SeqID_3618
cttctcctcagtgtttgaatttagaagatatcgtctacttgaattcaagatgcagaacgaagagggtcaggtcacggaactctacattcctaggaaatgctctgctactaaccggatgatcacatcaaaggatcatgcctctgtgcaactcaacattggtcatttagatgctgatggcatctacaccggacaattcactaccttggctctctgcggttttgttcgtgcccagggagatgctgacagcggggtggacaggctgtggcagaagaaggtcgaagccaaacaaatctaaagagagcctttttaagctgtctttttgctttgttctgaatgtttgttatttaattcagaaatgatcatcggacatact

SEQ ID NO: 18022 - DNA, 411 bp, Zea mays
  Coding DNA Sequence Number=SeqID_3619
atccatgtcgcgcacaaatatttttcagccgcctagccgtcctcttcccttgatattccttggcgtcgtcttcaactggaccaccggccaccagcctgccgcgccccaccatgtgaccatcgagctcttctctgacggccatccttccttgtcagctgcggccaagctgctcgtccgtggtcccgggtgcccgacctcttcctgcgcgccgtcgttcccctcgcagctcgcggaggccgacctcggcaacgcccccatcgccgtggagttctcccggccgtctccagcctccctcccatggcgcgccatcacctcatcttctttcctgggtgcgccgttttccccagcggcaagccgcagccgtgcagcttgccctctccagccgcggtgcgcatctccatggcggtcgag

SEQ ID NO: 18023 - DNA, 370 bp, Zea mays
  Coding DNA Sequence Number=SeqID_3620
tctgtatctctcatattttgcttaaaccctaaaaccctttttggattaggttttctccaaatcttatccgccgtgataaaatctgattgctttttttcttcatgaaagtttgatttgtgaaactcgatgattctctcacgctctgtctccgtgcttcatttgtgtggagtctcttcttcagcgccgtcgaagctcttatctcagaggctcaaggccccccccgctctcgcttatcgttcatctgcttctttccgtttaagctctctcaagcgacccgcgagccgacggggtcgtgcgtttccggctgcgccgcatgcaccaggcgggaaagggccgggtgcgccctttttggctgaccagtccgttccgg

SEQ ID NO: 18024 - DNA, 211 bp, Zea mays
  Coding DNA Sequence Number=SeqID_3621
tgctcttgaccgagattataggagacgcctggccgtggtgtcggcgccatcacctatttggttcttcggctcccagtgcgacgtgtcgattgttccatgcacatctccctcgaacggcagcagaactggagtcgcagcgtatgccctctctctcttctatctcccatgcgatggcgcttgcttgaggatgcagaacgcaacgttctttttt

SEQ ID NO: 18025 - DNA, 442 bp, Zea mays
  misc_feature (137)..(137): n is a, c, g, or t
  misc_feature (172)..(172): n is a, c, g, or t
  misc_feature (175)..(175): n is a, c, g, or t
  misc_feature (222)..(222): n is a, c, g, or t
  misc_feature (302)..(302): n is a, c, g, or t
  misc_feature (319)..(319): n is a, c, g, or t
  misc_feature (333)..(333): n is a, c, g, or t
  misc_feature (339)..(339): n is a, c, g, or t
  misc_feature (356)..(356): n is a, c, g, or t
  misc_feature (389)..(390): n is a, c, g, or t
  Coding DNA Sequence Number=SeqID_3622
ataccgggcactgtaaaagtgcagggggttcagatgcggaatcggtcgggcaaggggcgtttgctgtcgggctgtcttgatggcagtggcagtggaaatggtggcgcctgccgccatggcgcatacggttccgtcgnccgccgtggacgccgcggatgccgatgcgacccancanaccgccagtgagtcgctgaccagcgatatcgtcgccaatggtcgccngtcagcggacgcgcctggactaagagcgtaccgccatcgcgacgatctacatcgtgcccacctggcgacggggcgttcanttcgcagaccggcgtcnacgatctggcccangccttnccggcgtgtctgtctcntcaccagcggcgctccatccctcaccggtcacnnccgttgtctctttctgcccgtctacacacatctatgcctttctctgtcgccg

SEQ ID NO: 18026 - DNA, 447 bp, Zea mays
  Coding DNA Sequence Number=SeqID_3623
aaaaccatggtctctattcttatttttagagaaaaagagagaaaaaaatatgtccaacagtctaagatctaacctccttattttctcgaggtcgaataccatgccatgcgctgcgcaaatttttgccgctcgccaagctctcaatccactctgttgttcccagtccgcgccattttcctccattctcgcctcggcccgctcacctctcctctcgcgcccgccacggcagctgccgccccatccttcggcgaataggatttcttcaagatccagcggatcccaacgctggcgctggcatcggcggcacagagccgaagaagcggaagcagaagcctagtggcgcgctagcggtgctgaagaagaagaggcggaggccgctgcccttcatccccagcactgacccggcgcagcggctctggcagatgttgtgcctgctcgttttttcag

SEQ ID NO: 18027 - DNA, 330 bp, Zea mays
  Coding DNA Sequence Number=SeqID_3624
gttgacaaggcagccgatggtgctcgggagctgctccaggtgggcgcagcggagacccaggcacctgctcatacgaaaaatgcatgaccagacattaatctaggctactatatatactgactgtaagacggaacggggtgcagcgtttctaccacacttgtgaggccgcaggcgtgcatgtccatatatatgcatcaaggctggacgcattcagcttacagaggggagccgaatcaatctattgctggagtcctatcaatacacatggctggaatatagccgggctctctatgggagattgatttcggtgattgaagaatacatgcagac

SEQ ID NO: 18028 - DNA, 539 bp, Zea mays
  Coding DNA Sequence Number=SeqID_3625
gagaaggacgatgccctgcagaaatataatgagcttaatgatcagaatagaattctacacaatcagttagaagctttacacattcggttagccgagaaagaacggaatattgctgggctttcatcacatcgtactgataattcacatgcagaagatgatctacaaagtgtcatcagttatctgcgcagatcgaaagaaatagccgaaacagagatatcattgcttaaacaggagaagtctcggcttcagatagaactggaaagttctttaaagtctgccaaggaggcacaggacttgttgcgaggtcaagctgatagtgccagggcattgatgttcaaggatgaagagttcaagtcctgcagattcaggtcagagaaattaacttgcttcgtgaaagcaacatacaacttagggaggagaacaggcacaattttgaagaatgccagaaattccgtgaagaagctcaaaaggctaaaatggaatctgagaggttgcagaaccttctactggagaaggaggtagacgctgaaatgtgcaaa

SEQ ID NO: 18029 - DNA, 183 bp, Zea mays
  misc_feature (157)..(157): n is a, c, g, or t
  Coding DNA Sequence Number=SeqID_3626
aatcaattccccaaagggcctcttgactgaattaaggctgtcatttgtaggaagccagatcgagtggagtgaaaaactgatttgtaataatagacacagggatggcggggggtgggttgggcaggggggaaaaggtacagtgtggtgtgttgtccancaacatggacaggacacaagagaagc

SEQ ID NO: 18030 - DNA, 188 bp, Zea mays
  misc_feature (68)..(73): n is a, c, g, or t
  Coding DNA Sequence Number=SeqID_3627
gaatgaaaggctggagaatgtctgttcctctgtagatgttgtctgtacattgcatctcttggaaaaannnnnnaaaaaaaaaaaaaaaaaaaaaaaaaaaaaaaaccctcgtgttcgttcggagcgcacacacacacaaccagatctcccccaaatccacccgtcggcacctccgcttcaagatgcag

SEQ ID NO: 18031 - DNA, 198 bp, Zea mays
  Coding DNA Sequence Number=SeqID_3628
cggtgatcgaggtccattttggcggggcgcgtctacgcactccagaagccgctcttgcgtccatggcgatccttcagtccggtcacatacgcctgatggtcggcgtgcccgccatattcctcgatcctgcgggcaatctgggcacaggtttgcaggtggcgggcggcatgggggtatcgtttggaacgggccttctcg

SEQ ID NO: 18032 - DNA, 533 bp, Zea mays
  Coding DNA Sequence Number=SeqID_3629
gcttctttactactgcttcaatcttgctcctgatcaaaccccaacacaagacttgtactttgtgaaaaagctgttgaatttgaaaggcgatgatggttttagaatgaaccagatccttgttgggttatggtatataatgggtttatggcctgttgtatacgctatgctcttacttcccactggtcgaagtaaaactcaggcatggcctttcgttgttttcctcatcctcccctgctttgtttcctagggagagagagtacaaaaatgtatagccttttttttttggaatattacaagtttgggtgttgagaattgggattgttcttatggtggacaaaagctatgaatcaattagcctttctactaaaaaaaaaaaaaaaacagccgatccctcccacccgctgtcccaacacaacaaagcgccaaagaggagtcgttttccccgctccccggccccccccccggcggcggggccccgggacaccaattttcccccccaaaaggggggggcgtaatataacgccctcctccgg

SEQ ID NO: 18033 - DNA, 411 bp, Zea mays
  Coding DNA Sequence Number=SeqID_3630
tgtaatttttgtttgggttcgctattttgctttcctcggagaagatgggctcgcttttgactctggaaaaccatctccgggcagaagaagagagccccgttccgagcatgtgattgttggggctgttatcttttttgcaaatcatgaagaggataacctggctggtggtgtggcagtaatttttctgagtagcactagaatgccacttcctctgcgataggaatggattaacagcacatcatttacaaatgatgaagtggagaacgggactggtggtgtggctgtaattttgctgagttgcacttgcatgtaacttcttctacgatgggaatggattaacagcacagcatgcatgcaccacgagaaagattagcttttccttttcttttcgttctcatcttattggacaaa

SEQ ID NO: 18034 - DNA, 416 bp, Zea mays
  misc_feature (35)..(35): n is a, c, g, or t
  misc_feature (42)..(43): n is a, c, g, or t
  misc_feature (46)..(46): n is a, c, g, or t
  misc_feature (67)..(67): n is a, c, g, or t
  misc_feature (74)..(74): n is a, c, g, or t
  misc_feature (82)..(82): n is a, c, g, or t
  misc_feature (92)..(92): n is a, c, g, or t
  misc_feature (96)..(96): n is a, c, g, or t
  misc_feature (100)..(100): n is a, c, g, or t
  misc_feature (124)..(124): n is a, c, g, or t
  misc_feature (128)..(128): n is a, c, g, or t
  misc_feature (145)..(145): n is a, c, g, or t
  misc_feature (148)..(148): n is a, c, g, or t
  misc_feature (151)..(151): n is a, c, g, or t
  misc_feature (161)..(161): n is a, c, g, or t
  misc_feature (174)..(174): n is a, c, g, or t
  misc_feature (179)..(179): n is a, c, g, or t
  misc_feature (184)..(185): n is a, c, g, or t
  misc_feature (188)..(188): n is a, c, g, or t
  misc_feature (191)..(192): n is a, c, g, or t
  misc_feature (194)..(194): n is a, c, g, or t
  misc_feature (209)..(209): n is a, c, g, or t
  misc_feature (219)..(219): n is a, c, g, or t
  misc_feature (225)..(225): n is a, c, g, or t
  misc_feature (237)..(237): n is a, c, g, or t
  misc_feature (250)..(251): n is a, c, g, or t
  misc_feature (260)..(260): n is a, c, g, or t
  misc_feature (273)..(273): n is a, c, g, or t
  misc_feature (281)..(281): n is a, c, g, or t
  misc_feature (283)..(283): n is a, c, g, or t
  misc_feature (293)..(293): n is a, c, g, or t
  misc_feature (297)..(297): n is a, c, g, or t
  misc_feature (301)..(301): n is a, c, g, or t
  misc_feature (303)..(303): n is a, c, g, or t
  misc_feature (319)..(319): n is a, c, g, or t
  misc_feature (322)..(322): n is a, c, g, or t
  misc_feature (324)..(324): n is a, c, g, or t
  misc_feature (329)..(329): n is a, c, g, or t
  misc_feature (362)..(362): n is a, c, g, or t
  misc_feature (365)..(365): n is a, c, g, or t
  misc_feature (374)..(374): n is a, c, g, or t
  Coding DNA Sequence Number=SeqID_3631
ggtttactcagtctcgggatcgttagcatcgtttntcaagannggnaacatgtctccgatccttcanggttcgnctacctcncgctcaaccntaangggngaacgcactctggccatttaattntganttttttgggaactaaangcnttntcttccgaanctttttcttatgncgaantacgnntcnaanngnagcttagtctgattntgagagtcangctttngctatggttaanaattttggaagannaccagagcnaatagcattgaangctgtggnancttcacaccnactngtgngnttatatagggatgcangtnanaaggngaatcgccaggatttttacaccaggcggacagncgnttgcactcnctgcgcggtggaccgcagagaccaatacagtagctctgcaag

SEQ ID NO: 18035 - DNA, 403 bp, Zea mays
  Coding DNA Sequence Number=SeqID_3632
acatacaaaccttcgcattatcattcccattctctagattgttcgtagtgactctgtttgatttcgaaatggctcgcaccaagcaaaccgcaaggaaatccaccggcggcaaagccccaagaaagcagctcgcaacgaaagcagccagaaaatccgctccggcgaccggcggcgtgaagaagccacacagattccgtccaggaacggtggccttgagagagatcaggaagtaccagaagagcactgagcttctgatccgtaagcttcctttccagcgtctggttcgtgagatcgctcaggatttcaagacggatctaaggtttcagagcagcgcagtggcggctctacaggaagcagccgaggcttaccttgttgggttatttgaggacaccaatctctgtgc

SEQ ID NO: 18036 - DNA, 365 bp, Zea mays
  Coding DNA Sequence Number=SeqID_3633
aagcatttcatttccctcattcatggcttcccaatctcattctcaccctaagcttacagtttccacatcacctggaaagtgaaagtggaagcgggggaggtcccaaagggcatagcctgtgttttccaacgacacatgaagggtcattccggtgccgtttacatcgatctgggacagctttttcatcatctccaccatttcggatgaaacgctccaagtccatgtctgctgataagcctgtcgtttctgtttctcacctgtgagtgagtgagcaactatagtgttcatgctgtatatttatcaatccttaactactttcagttcaactttagtagtgtaaataaaggctttgaaccctgcttcgg

SEQ ID NO: 18037 - DNA, 500 bp, Zea mays
  Coding DNA Sequence Number=SeqID_3634
cactatttggtgacaagctcccctgcgggcaggtcgactctagacactccaatatatcaaaccctggtgcatacccgcaaccaccccaaaacaaaccggcacttttgaaaacgcccccggttcatttataagagctcttgcgcttggatcgcttcttttctttctcattctttcttgcgatcatactcatttgtaatcaaggcaagagacaccaattgtgtggtggtccttgtgggggaactttgagttcccggttgattgagaagagaagctcactcggtccgagcgaccgtttgagagagggaaagggttgtaagagacccggtctttgtgaccacctctacgggggggaggtttgcagagaaccgaacctcggtaaaacaaatcctcgtgtctcacgtctttattcgcctgccatttgtttttacataccctctctatcggactctattcttatttctaacgctaacccggctcggcgctggctttaactttgtaaa

SEQ ID NO: 18038 - DNA, 529 bp, Zea mays
  Coding DNA Sequence Number=SeqID_3635
gacgaagttttgagtccttcccctgcccagcgtgcacacgactccacttcatcgacctcgcctccggcaagccgatgaaccgggatcgttgacggcggcatcgttccgacctcgtggaatgaggtccgcaatattacggcactgaatcctgtttactgaatcgtcaagtatcgccattgatggccatgtaacgacgttcatttcatcgtcacattgcagcatccggccagacgcatgtttttcgacgctctcgccccgtcctccgcgctccagctgacccggtttaccgatatcgacgcgtttcggccggccgagtccctggaggattctcgaagcattcccctcgacgtcgccaatttcgccgcggcgcgagcgatcgtaaacctgccggcgtgccgcatatttgtggcaaggtcgtttgcacgcatcctggagacaacctatcgcgcaccgggcggcatggtgatccttccaatgagcgacgatctgtgcgcccgctcgagcggagtggagttcgactcgcgcttct

SEQ ID NO: 18039 - DNA, 327 bp, Zea mays
  misc_feature (229)..(229): n is a, c, g, or t
  misc_feature (245)..(245): n is a, c, g, or t
  misc_feature (300)..(300): n is a, c, g, or t
  Coding DNA Sequence Number=SeqID_3636
tccgacccatcacaagcgcgagaagacatggcctcgacgttcggtgccacttctacagatggccttatggctgctccatcggggaagaatgtgcgccttcagaggagggctaacttcagagtaaaagcggctaaggagctgtacttcaacaaggatgggtcagctatcaagaagctccagactggagtcaataagcttgcagacctaagttggaggtacactcggaccnaaggggaaagaaatgncgtttttggagaagcaagtacgggtctccccaaagattggttaaacggatggggnggttacagttggcaagagaaggttgga

SEQ ID NO: 18040 - DNA, 313 bp, Zea mays
  Coding DNA Sequence Number=SeqID_3637
ggatagcaccaacgtccctgcacgggcccccattcgtgcctcatacgggagatgaagaatcaaattctgcattggctgacatgcacacagtaagaagaaattcacctaaagtatacactactagcagttgtcacatttcttatttcccattgcaagccatcacaatgcttcatgatggagatgcgaataacttggtagatccacaactacatggtgagttcaacttggaagaggctataagagtatgcaaagttgcactttggtgtattcaagataatgaacttgatcgacctacatgatattggtatgcccc

SEQ ID NO: 18041 - DNA, 460 bp, Zea mays
  misc_feature (33)..(33): n is a, c, g, or t
  misc_feature (78)..(78): n is a, c, g, or t
  misc_feature (360)..(360): n is a, c, g, or t
  Coding DNA Sequence Number=SeqID_3638
tgctggccgcaggaatggccgaattctcctggntcacggtgcttggtttcctatccctcactttcaatcaggcatggngatttatcggttcaacggtgacgccggcttcgtcgttttcgtcgtggtaacttatctcgacctggtggccctggttcgcttgcttgcgctactacgagcagttggaatagcagcactcccaaaagcgcgcgagggttaaggcttggggtttggagcctcacgaccctccttaatatcatgttcagttacaaggtggctgagattatgcccctgccagtcaaatttgttgtctggtcgatggcagccgctacccacctgtggcggcttctacgctttcttcgntcacagcgagaaggctgttattgcccagcggttggcgccacggcctcgccgcggtccaaggaagcattcttcaattatagttcgtttgccaccaaaggcg

SEQ ID NO: 18042 - DNA, 344 bp, Zea mays
  Coding DNA Sequence Number=SeqID_3639
ggcgccgccggatcgaaaaaacaagaaaaaaagaagaaaaaaaagaaccatttaagagcttataaaacaatggctatcgaaaagaaaaccctgctcgcctccttcatcaccatcatgatgatggtaatgatgatcgtgaaccaagtcgaggccaggaaccatgttacaatcaagccgcctccaaagtgatcatagtctttttgtttttctaaatcgatggctccaaaagtttatgagaaaataaatggttccttcaacgtggagcttaaagcatggcttaactaatttttatttactatatatatatcattcttttcatcctcttatttgtttagttatggatg

SEQ ID NO: 18043 - DNA, 463 bp, Zea mays
  Coding DNA Sequence Number=SeqID_3640
gttccgaccgcgaacaagtcacagacctctcccacgccgattgacgagaacaagccggccgtgatcaaccaggctcccaaccgcgtggaaccctggtctcgcagccagcagccgcgttctaaggccatgaccggccctcgtttcgaacaaaccaacttcgacgaacaggtacgagcttgaggagaaacacatgaatggccagaggaaaagactaatagctctcggtagccacaacccgactctgcgatgatgctcgtacaccaggttcctgtcaagtggacgcacagccggattgtcgcctgcgagggtggcggcggcgccgctggccaccccaaggtcttcatcaacaccgacaagcctgagatcgccatctgcggctactgcggcaaccccttcgtatgtgccaattgctgccaaatggatctctaaatcagaaactaacgtgtcctaaaaggccaacgag

SEQ ID NO: 18044 - DNA, 498 bp, Zea mays
  misc_feature (217)..(217): n is a, c, g, or t
  Coding DNA Sequence Number=SeqID_3641
ggcagttgagctggtcctcaggaccggttcaaccgcccccatgggccagttcaactggttctgaccagtgtggtcagagagccagaaacagcagagggaagacgccaaaaattcaaatttctaacgcaggattctgaaaaagtgtactgcagagattccatgcgccacacaaaaaaagtcaaaacaaagtttctgcgcagatgagaccggacgacanaagaaaaagctgcgcaaaaaaattaatttctgcgcgccctgctgccctcacacttctgcgcgggaagtgacaaaaaaaatttccttgctgcgcgggcgacagcaggcttttgcagaacctgcgcaaggcgcggaacgccggagcacaagcgctactcggacgagccatcggaccggggctcttggacgtcaaggcgagcaggatcggcggtcggggtagggaaagtttgggaggggaagcgagaggccgcgttaccaggcgttcaagcaggcagccggctc

SEQ ID NO: 18045 - DNA, 423 bp, Zea mays
  Coding DNA Sequence Number=SeqID_3642
cggtcgtcggcatgctgatcgcgctgggcatgatcgtaacaggcgcgatcttgcggatcaggtcgccgtccatcctcgacctcaatctgttcgccggttcgtggttcatcgtaggaacgacgatggcctgggcggtggcgcgccagacctttgcgcctgggcgcgtgacctatcatcgcgtgatcggtgccgtgctgctgtacctgacggtcgcggtgattttctccgcgctctacgtcttcatcggctcgctggatccggttgcctttgtcagcatgaaggtgacagacagtccgaggctcgcgagcgacgtcatctatttcagcttcgcaacgatgaccacgaccggctatggcgacgtcgcgccgctgcatcccgtcgcgcgcagcctgtgcaacatggaagcgattttcggccagctct

SEQ ID NO: 18046 - DNA, 341 bp, Zea mays
  Coding DNA Sequence Number=SeqID_3643
accttagctcaatgccaaagactcattgcataacattgataacgatatattatagatagttcatgacagatagatccggcagagccaaccatgaccatggctgccttacaactgattcaaacggaaagatactggtgctgctcacttgcatttcttactaccacgacagaccaaaacgaaacgacactgctagtactactgatagatagtttgctccgacgacttcacgcgagagtcagccgagcgatacctttggagggcccgggatgcctgcggaggtaccatgggacccccgccggatccgaacgcgtgggggcgccgcgcctaacgccttttgttgg

SEQ ID NO: 18047 - DNA, 310 bp, Zea mays
  Coding DNA Sequence Number=SeqID_3644
agcttttcagctcacgaggagaagagatcgcagccgcgtatcatcaaagatgactttcaagcgcaggaacggagggaggaacaagcacaaccgtggccacgtcaagccaatcagatgctccaactgcggcaaatgctgccccaaagacaaggccataaagaggttcatagtgaggaacatcgtggagcaagctgccattagagatgttcaggaagccagcgtctacgatgggtacacgttgccaaagctgtatgcgaagacgcagtactgtgtctcatgtgcgattcactctcacgttgttcgtgtccgt

SEQ ID NO: 18048 - DNA, 221 bp, Zea mays
  Coding DNA Sequence Number=SeqID_3645
tggagcaaatcagtatccatacacggtggatgccttggagaggctgtatgacaacagtttagaggtgggtatgatgctgcgctgtgcgctcgctgcaggcacttcagaagaaaatctttggcctcttgcgatagatgttcaggcagcagccgcacaagaacgcatcgcagagagctgcccgtgctgccgcatagctgcagttgcaattagtgctgggaatt

SEQ ID NO: 18049 - DNA, 186 bp, Zea mays
  Coding DNA Sequence Number=SeqID_3646
atcaaaaggttagccaattcaacttaaagcaacaacatcccatggatgttgggtggtgtccgagctcatgaggaacccggaagccatggccaaggcccaagcagaggttcgacgagtactcgacagcaagaacccaggcgaccacgagtaactcctgggctgcctgagctacaccggcatggtgat

SEQ ID NO: 18050 - DNA, 577 bp, Zea mays
  misc_feature (539)..(539): n is a, c, g, or t
  Coding DNA Sequence Number=SeqID_3647
aagaagaactattccataagtgtattgctgagcagactaacttcatcagtgatgggagatctccttatgaagagccttcggtcatctatgagggaataattgatgaatggacatacattcatgtttcggggtccagcccagatgcttggaatcccacagttaaggctttgcgcgaccgcctggatgcctgggttggaaaggtgcatactccattgctttcagttgaggcagaaacccctgatcttgttgctgcctaatttagcacccgttccccttccgcgagaggcttggtcagccaggtgatgagatgcattgggccccttgtagccattttctggataatgaacctgctgccatgagcgtttgtcagcctgcgtcctgataggggcctgtaatttcttttttgatgtcctctggccatggatgggtccaccttcacccagtgttccggaaacgggcccaaatgattgaaatttttatactagtagggtgttcctgtagttttcccagttgaatttaatttgtaactgagtttgtantctgctggccctggatgcaggagaatcctggtggaaaa

SEQ ID NO: 18051 - DNA, 178 bp, Zea mays
  Coding DNA Sequence Number=SeqID_3648
tgctgctccggatgcacggacacaagaaatgataaacgagaaactgaaaaaggcagaagaactaggtgagaatgggatggttgatgaagcccaaaaattgttggatgaggcggaagctctgaagaaggttggtgttttcttttaatatttagctttggcagaattctatcagcttacc

SEQ ID NO: 18052 - DNA, 240 bp, Zea mays
  Coding DNA Sequence Number=SeqID_3649
ttttgctccgttccgttgtttgccatgcttcccaatatggccagctacttttgttaccatccattttatatttcatttgctactctttctaattcccctgttcattgttcaatgtctccaatatgtcaagagagttagattttgattatcattgttattcctgaaaatgatacttcttgcattcttggcttcgagcaactttttgaatatgatattttcctcactgcagattagtccaaa

SEQ ID NO: 18053 - DNA, 350 bp, Zea mays
  misc_feature (57)..(57): n is a, c, g, or t
  misc_feature (287)..(287): n is a, c, g, or t
  Coding DNA Sequence Number=SeqID_3650
aatcgttcgaagaccatcggcgagctcttcttcggcgtagcctttcttcccccgggnttgaaagaagaagatggggctgtctttcgggaagctgttcagcaagctgtttgcgaagaaagagatgcgtatcctcatggttggtctcgatgctgctggtaagaccaccatcctgtacaagctcaagcttggcgagatcgtcaccactattccaaccattggtttcaatgtggagactgtggaatacaagaacatcagcttcaccgtctgggatgtcgggggtcaggacnagattcgtccattgtggaggcactacttccagaacacgcaagggctgatcttcgtggtggaca

SEQ ID NO: 18054 - DNA, 218 bp, Zea mays
  Coding DNA Sequence Number=SeqID_3651
aagtgtgatagatcgcaccggtctcggcctccgtgtctactctaagttgcagctgccgcagccattcatttcgttggcaaccagggcagaactaaatatccgtggataagagctgcactgtgtgctgctgagatatcaagaacgtaacgtacggtggaagacaaggccccgttctcgattagcccaagccaaagcagagtgagaaagagagtcgtatt

SEQ ID NO: 18055 - DNA, 535 bp, Zea mays
  Coding DNA Sequence Number=SeqID_3652
ttagccgagccgaactttcatttgcagggaaaacaatggttactcatgaaggcaggaagaaggataaacctttccaaaagtgaagggcgggttaggcattataaacacattctgttccaaggtgtgaactactcgagtttgcttattatcatggaggcggctgtagttttttttccaccgcgactcttttttttttcccctaagggacgtacgttgtcatttttggaaacttttgaaagcatggggtgcgcgtgaactatggatgtatgagtccctccgaagctaaactgtttgagtactatgctaagctgaggagctgcattcccatcatgtggtggagcgcgagggaggcttttttatcggacagcctcccttgtcaccgacgcaatcaggcccccccccaacccgtggactacgctgggtttggctttggcatgagaacgccccctgtgtttgtcgtaagcccccccgcccctagagaaacaagtagctttataatcccaatggatccccatcccacaaagctatggatgcg

SEQ ID NO: 18056 - DNA, 359 bp, Zea mays
  Coding DNA Sequence Number=SeqID_3653
gaatgttaaaaattctcccaattggggtaattcttgggggcaaaccagaatttggtccttattgaaaactccctcagccgggagtcccgttaaaacaaaccccggcagctggcttgcctttgagcaaatcctcgcaaggtccacaacacaggaagattggggaaactacatccaaacccgagcgttcctcacaatggttgggacaaagggatcccctactggctggaaccccaaaaagaaaggggataagggtgggacaacattttttttggctgggtggctccgaaacatttcagggggtggaaggttgaacaacaaggccccttggagtccaaaaacaccttgtgggctgaggccaa

SEQ ID NO: 18057 - DNA, 525 bp, Zea mays
  misc_feature (49)..(49): n is a, c, g, or t
  misc_feature (79)..(79): n is a, c, g, or t
  misc_feature (85)..(85): n is a, c, g, or t
  misc_feature (122)..(122): n is a, c, g, or t
  misc_feature (124)..(124): n is a, c, g, or t
  misc_feature (128)..(128): n is a, c, g, or t
  misc_feature (131)..(131): n is a, c, g, or t
  misc_feature (179)..(179): n is a, c, g, or t
  misc_feature (186)..(186): n is a, c, g, or t
  misc_feature (188)..(188): n is a, c, g, or t
  misc_feature (190)..(193): n is a, c, g, or t
  misc_feature (195)..(195): n is a, c, g, or t
  misc_feature (197)..(201): n is a, c, g, or t
  misc_feature (216)..(216): n is a, c, g, or t
  misc_feature (225)..(225): n is a, c, g, or t
  misc_feature (231)..(231): n is a, c, g, or t
  misc_feature (238)..(238): n is a, c, g, or t
  misc_feature (241)..(241): n is a, c, g, or t
  misc_feature (250)..(250): n is a, c, g, or t
  misc_feature (252)..(252): n is a, c, g, or t
  misc_feature (256)..(256): n is a, c, g, or t
  misc_feature (258)..(258): n is a, c, g, or t
  misc_feature (262)..(262): n is a, c, g, or t
  misc_feature (269)..(269): n is a, c, g, or t
  misc_feature (279)..(280): n is a, c, g, or t
  misc_feature (282)..(282): n is a, c, g, or t
  misc_feature (285)..(285): n is a, c, g, or t
  misc_feature (290)..(290): n is a, c, g, or t
  misc_feature (294)..(294): n is a, c, g, or t
  misc_feature (298)..(298): n is a, c, g, or t
  misc_feature (300)..(300): n is a, c, g, or t
  misc_feature (305)..(305): n is a, c, g, or t
  misc_feature (309)..(310): n is a, c, g, or t
  misc_feature (321)..(321): n is a, c, g, or t
  misc_feature (329)..(329): n is a, c, g, or t
  misc_feature (331)..(331): n is a, c, g, or t
  misc_feature (335)..(335): n is a, c, g, or t
  misc_feature (337)..(337): n is a, c, g, or t
  misc_feature (341)..(343): n is a, c, g, or t
  misc_feature (345)..(345): n is a, c, g, or t
  misc_feature (347)..(347): n is a, c, g, or t
  misc_feature (349)..(349): n is a, c, g, or t
  misc_feature (351)..(351): n is a, c, g, or t
  misc_feature (353)..(353): n is a, c, g, or t
  misc_feature (364)..(364): n is a, c, g, or t
  misc_feature (366)..(366): n is a, c, g, or t
  misc_feature (378)..(378): n is a, c, g, or t
  misc_feature (380)..(380): n is a, c, g, or t
  misc_feature (383)..(383): n is a, c, g, or t
  misc_feature (395)..(395): n is a, c, g, or t
  misc_feature (425)..(425): n is a, c, g, or t
  misc_feature (449)..(449): n is a, c, g, or t
  misc_feature (497)..(497): n is a, c, g, or t
  misc_feature (500)..(500): n is a, c, g, or t
  Coding DNA Sequence Number=SeqID_3654
gatatggtgggctttgcccgcctgatggcggcgcatcgtcatgaaatcncggcggtgatcattgatccgattgtccagngcgcangcgggatgcgcatgtaccatccggaatggttaaaacnantccncanaatatgcgatcgcgaaggtatcttgctgattgccgacaagatctccantggattngntnnnncngnnnnnctgtttgcctgtgancatgcgcanatcgcnccggacnttntgtgcctangnctancnttanccggggngccagtgacnntntcncccanactntggntncgcgntgcnnggtgaccggtnagaacgtnanaacnangtgnnncnanancntntggtaacccancngcccgttctccngngtntgaccgactgcncctgtctgcctctaaaggtggaagcgcagngggagctgcattagatgcgcgaanagtcgctcgctcaaagtgcggaacatgcgccgctcggcgcgggcgtanacnaatcctctaatttcgccgagcgccc

SEQ ID NO: 18058 - DNA, 494 bp, Zea mays
  Coding DNA Sequence Number=SeqID_3655
cagccggcaagaaactcccgaaggaagccggtgccggcggcgataagaagaagaagatgaagaagaagagtgttgagacgtacaagatctacatcttcaaggttctgaaacaagttcatccagatattggtatttcaagcaaagctatggggattatgaacagtttcatcaacgacatcttcgagaaattggcatcggaatcttcgaagcttgctaggtataacaagaagccgacgattacctctagggagattcagactgctgttagacttgttcttcctggtgagcttgcgaaacatgctgtttctgaaggaaccaaggctgtgactaagtttactagctcttgaattgtggatcttgttgaaatcgatgtttgtaaaattagggttttttagatttgatggttgttgttgactcttcgatcgatttctgttttgttatcttggtgcgatgtaatcaaatcggatccgatttctttcttcgatcatttctcc

SEQ ID NO: 18059 - DNA, 402 bp, Zea mays
  misc_feature (360)..(360): n is a, c, g, or t
  Coding DNA Sequence Number=SeqID_3656
gttgattagtcgtgaccgtggcgacgaggcattcaagattatccagcgaatccacagcgagggcgataacggtgaagaatttgcgaaattggagtttgcacagatccaatcgacgattcaacaagaacagcaactggcatcgtccttcgtctgggctgatgttgtccgtgatgcccccatgcgtcgtcggttcctccttgctggtatcgtcggcttcttcactcagtggagtggcaatggtttgctctcgtatgttccctgcatgtcagcttacgcaaagaagcgaatcagactgactctttgaggttctatatgaagaagatccttaccttgcggcatcactgatgaccgaaccgtcanaggtgaatcactcttcagactgccttggcaatgctacagcgt

SEQ ID NO: 18060 - DNA, 437 bp, Zea mays
  Coding DNA Sequence Number=SeqID_3657
cgaacgggccaatgaaattgttaattccgactccctttttggggcgaaattgggtttcccggggccccccctcgagctgggggctgcgggggaaatccggctgcgaggagctatgctgccgggagagggagccgagcagagacgtcgcgtcatggggaggggacagcagagctgctgggcgtcatggggataggctcctgctgtgcctgctcggactccaagctgccgggggggtggagaaccagcagggagctgcacggctgggaaataggggcgccatgctgaagaaagggaaagtgcaggggggctcgaccatgggaggaagaaggtgtgggctgcacaggggcatcgagctccctgctctgaatgccggggagaagagggagcgctgggcagaggaagaagaagggggaggggatgaggagccggcctgttct

SEQ ID NO: 18061 - DNA, 398 bp, Zea mays
  Coding DNA Sequence Number=SeqID_3658
gccgtcttgcaggagctaggaacatgcaagagtaagctcagctaggaatcagatatgtctactggccttctttttatacttactgtgactcatattgtcatatatagtagttaattagttatatacataatatatatataatttatggctatattgccaaaacgcctagaaaagcgcctagaagcgcctaagaccgagtactcccgactaggcgctaggcgaatgggtcaccgcctagattccgcctagcgcctagctgaaccttggctgctactgtgatgttttgatctaatcctggtagcaattgtggtgtgcattccatcatggaagtgatggattcatcagtgattcgttgttattgtctagtccagattagttcatagaccacattttagcaa

SEQ ID NO: 18062 - DNA, 309 bp, Zea mays
  misc_feature (248)..(248): n is a, c, g, or t
  Coding DNA Sequence Number=SeqID_3659
tgtaagtgctggaggttgtacaagagtgaacaagcctcaagaaggagagacagagagagacacaagagaaatcgctggtcagacacgagagacgccaagggaagccagggactgcaggaggacggccaagggcttttatgagttctggttctacggagtggaatctggtactgcggatctaccgtacagcaaacgaacagaactttttttcctctcgcaacagtaatacacctaaaagcagtgcctanatcgcagtcctccgatcatacgcacgcctcggtccttcttcgagcgcaaatctctcttccg

SEQ ID NO: 18063 - DNA, 414 bp, Zea mays
  Coding DNA Sequence Number=SeqID_3660
ttcatcttcggtttctccaagagcaaagcgcgcatccagatctggctcttcgagcagaaggacctccggattgagggtcgcatcatcggatttgatgagtacatgaacttggtcctcgatgatgctgaggaaatcaacgtcaagaaaaacactaggaaatctctgggccggatactcctcaaaggtgacaacataactttgatgatgaacactggcaagtgaagattcttatggcaggaatgatgtttggtgcacgcgttgagtatctgtgacacattgtactccatccatccagacttaaatgtatcatgtcattatggtttagtgagagttgtattggctgttaactacctgagtaacctcatgtgttagctatatgctacatgctgtgacaatgagctgctcagtgctcac

SEQ ID NO: 18064 - DNA, 229 bp, Zea mays
  Coding DNA Sequence Number=SeqID_3661
catgcctgcagagctcataagaatcattattagccttgtggctatgtgccattcacttggggttatgcaccgtgatctaaagccagaaaacttcctcctttgggataaagaagatgacctgtcaataaaagcaatcgattttggtctatctgtgttcttcaaaccaggtaggacatcaaatttgatgtgcggcggcagcgtcttctgtaaagctgaaatctcagaaaac

SEQ ID NO: 18065 - DNA, 422 bp, Zea mays
  Coding DNA Sequence Number=SeqID_3662
ggaggaacctctggaaacaagttcaggatgtcactgggtcttccagtggcagccaccgtgaactgtgctgacaacaccggagccaagaatctctacatcatctccgtcaaaggtatcaagggtcgtctcaaccgtctcccatccgcctgtgttggtgacatggtcatggctaccgtgaagaaaggtaaacctgatctacgtaagaaggtgctgccagctgtcattgttaggcagaggaagccatggcgccgaaaggacggtgtcttcatgtacttcgaggataatgctggtgtcattgtcaatcccaagggtgaaatgaaaggatctgctatcactggaccaatcgggaaggagtgtgccgacctgtggccaaggatcgctagtgctgctaacgccatcgtttaagttctatctctcttttg

SEQ ID NO: 18066 - DNA, 312 bp, Zea mays
  Coding DNA Sequence Number=SeqID_3663
gtcagctcgccgcagttcttcactgcgcccagctcgcctgctcgctcccgcgcgcccaacttgcctgctcgccccagtgctcctgctcccccttgtgcgccaccgccgctgttgcctgtcgcctccaccggggccgctcgtgctggtgctaagcgtcgcgcccgtgctgagaaggttgtgcagcctgtcgttgttttgggtccgaccgcacacccggggttgcccctcaaggtgttttctaggagtaggacggtgtcaacgactgtagcaaaatggttcgtgccgatcgcacgaaagacagtgaacaagatt

SEQ ID NO: 18067 - DNA, 537 bp, Zea mays
  misc_feature (73)..(73): n is a, c, g, or t
  Coding DNA Sequence Number=SeqID_3664
aacaacagagcccagtgacacttagccgctatgagtctcaaaagagaagggattggaacacttttggacagtncttgaagaatcagagacccccagttccattatcccagtgcaattgcaaccatgttcttgacttccttcgttatcttgatcagtttgggaaaacaaaggttcaccttcaaggttgcatgttctttgggcaaccagaaccccctgcaccctgtccttgccctctaagacaagcttggggaagccttgatgctctcatagggaggctcacagctgcatatgaggaaaatggtggatcaccacatactaatccttttgcaagtggtgctatccgcgtgctccttagggaggtcacacagcgccaagcacaggctaggggtctacctcacaacaacaaaaacaacagcccaagccagggaaatgaacaatcaacctcctccgccatgcactccccccggatttccctcttgatataatggataatgtggcatataaattaaattggaggagttcttacttacaaggcac

SEQ ID NO: 18068 - DNA, 464 bp, Zea mays
  Coding DNA Sequence Number=SeqID_3665
aggaggatgtcattgccacagccaatctgagtcgccgtgctattgcagatatgctccgggcttgcaaggaagctgcctaccacccagaagtggctccagacgtgcggctccgagccctacactttggccgggaatgtgccaatggctacctggaactgctggaccacgtgctgctgaccctgcagaagccaagcccagaattgaagcagcaattgacggtgcactcaaagcgtgtggctggatcagtcactgagctcatccaggctgctgaggccatgaagggaacagaatgggtggacccagaggaccccacagtcattgctgagaatgaactcctgggagccgcggctgccattgaggctgcggccaagaagctggagcagctgaagccccgggccaaacctaaggaggcggacgagtccttgaactttgaggagcagatactggaagctgccaagtccatc

SEQ ID NO: 18069 - DNA, 564 bp, Zea mays
  Coding DNA Sequence Number=SeqID_3666
gcggtacttcgagcgtcagcagtaactacaacgggctttttcaagcatggttcgccgatggcgagcgcttcataacacaggcggcggactcgactctcatttattcgaggaccgcggtccaggaggacatcacccaggcgaccggctctgcgttcggcggaacgggcaactggttttacaacaacgcgggctcgcggatcgacatctatcaggtgggtgcgagcgcaactccgaaggcgtcgattaccgtgtccaatcccaccgtcatcctatccggaaccaccttgggccttttgcaggacggtcagctcagtgtcgtcgatttctctttggcgacgcctgcgaagatgcctcagacgctgcccgtcgctggacaattggccggctatgcggcgacggatgcggcccattggtttgtcggtaacaccaacggtgttgtcctgaacggcacgggttcgcccgctactgtccggatgttcgattacggcaaagccctgagtattgcgggcagcgcgagccgctttgcggtggctactggctcgggtcgcgtcatgttctatgaca

SEQ ID NO: 18070 - DNA, 407 bp, Zea mays
  Coding DNA Sequence Number=SeqID_3667
ggccggccgggaatgtgactattctgtgatggatgccaaaaaaaaaaaaaaaaaaaaaaaaaaaaacctcgggttcggcgacgacggcgccgacttcggggaggagcacgtccaggtcccacccggcgcgacgctcgagtacatcgtgcacgtcgacagggtgtccatcgcgccggcgtgacgcggcagtagatagttcgcagtcctgcaggtgttctagatcattagtttgatggctcggctcggttcgtttctgtactggcagtctgacactcggtagcgtgaccacgactgtgctagctgccatgagccatgggacaggttcattcgcgtctttgcaagcaagatcgcccagaagagcagacagatttctgagcctgcagaccatgctcgtttcgacaaatata

SEQ ID NO: 18071 - DNA, 583 bp, Zea mays
  misc_feature (30)..(32): n is a, c, g, or t
  misc_feature (367)..(367): n is a, c, g, or t
  misc_feature (552)..(554): n is a, c, g, or t
  Coding DNA Sequence Number=SeqID_3668
atcggaaggcccgaagaggccactcacccnnncccttgaaggctgcgttgtctgattttatctccacactcatcttctttttttccggttccggttccagcatcgcttacaacaaactcaccaacgacggacccgcttcccccgccggtctcatctccgccgtcttagcccatgcatttgctctcttcgtcgccgtctccgtcggcgccaacttctccggtggtcacgtcaaccctgctgttaccttcggcgccttcgtcggcggccacatcagcttactccgcggcgtcgtttacatcatcgcacagcttctcgggtctatcgtcgcctccttgctcctcctcttcgttactggactctctgttcnccgcatttggactttccgctggagttggagttggacccgctttggtgtttgtgatcgttatgacgttcggtttggtgtacactgtgtacgccacagccgttgatcccaagaagggtaatctgggaattattgcccccctcgcgatcggtttcattgttggcgctaacattttggcgggtggggcnnncgatggagcatccatgaacccggctgtat

SEQ ID NO: 18072 - DNA, 493 bp, Zea mays
  Coding DNA Sequence Number=SeqID_3669
gggcgcacgcaaacttgaattctctacatctacggccgcttttttttttttttttttctttttttttttttttttttttttttttttttttttttttttttttaaaaaaaaaactttttttttaattacaaacaattttttatttctaggggggacccataaactaattgtcacaggaattacaaaaggttttcattattcaaactgccataattaataataataaatcgcgagggaaaaagtatggttccccttaagcaaagtaacaaaccttattattattaatattatttttagggcctagcactaacagtttgctaaagttttgcataaagcagccgccctagctcctttatattttcagcctccaagcacacgagcacgcggacgttgccggaaccaccgtcgtcgttcatcaagggcataaagccgccgcgaacaaactccgcccgcaacatggattgcggttttccccagccaaaatctgggtcgg

SEQ ID NO: 18073 - DNA, 110 bp, Zea mays
  Coding DNA Sequence Number=SeqID_3670
tcaccaccgtcgcaggagaacgcatggacggccacgcgggcgactccaccatccagtgccagcacctgctccagctggagtccggggccgacatagtgaaggcgcacacg

SEQ ID NO: 18074 - DNA, 438 bp, Zea mays
  Coding DNA Sequence Number=SeqID_3671
tagggaacacataattccggaaatttttagtggttcatattatagagcaattaaatgggcgtttgatatgtaagcattggcagtgcctcagggaatattgatctcgtacataataattagacaatggttcgtctcacatgtaaccttattttcttggcaaaggatcccccccccccccccccctcttgtggggtttttcacggtgggcgatcagtgattcaccagtatatatatggctattattattacaaaaaaaaaaaaaaaaaatatgggtaccggacaccctcgagcgggcccgcgggacggcggggccggctatacggaacgccgatgggcacggtctcactggagcatccattgacaagaggagcgcgtgaggagcaccgctgggggggcgcccacgtcgtcccggctgtggagacgcttgtcgcctttggc

SEQ ID NO: 18075 - DNA, 180 bp, Zea mays
  misc_feature (48)..(48): n is a, c, g, or t
  misc_feature (60)..(60): n is a, c, g, or t
  misc_feature (62)..(63): n is a, c, g, or t
  misc_feature (67)..(68): n is a, c, g, or t
  misc_feature (72)..(73): n is a, c, g, or t
  misc_feature (77)..(78): n is a, c, g, or t
  misc_feature (135)..(135): n is a, c, g, or t
  Coding DNA Sequence Number=SeqID_3672
aatcttgtttttttcagcgaccatttgagatcgagaccgaccacaccnaaaatccatctngnnaccnncgtnncgannccggccagcgaagatccacctcgcaaccagctccgctgctccgcagctccggcacanactaacgaggatgaacgacctcatgaccgacgacccggagctcgg

SEQ ID NO: 18076 - DNA, 548 bp, Zea mays
  Coding DNA Sequence Number=SeqID_3673
atgattagattcacccatggcttacatggactgtttacatatagttctataagatcacggcgaggcccccacctgaaggcagcttcccggctattgatgtgcaattctggtgtggttgtggtatattctgtgggatggagggtggctgacgccggcatgcagaatagtcagccgacgaggctacgtcgtaatcaggctgcctgttgttttcagactccaacctgtctttgttgtctgcggtcaagtttgacttgtctgaaatcgacggcgacagggtgatggcgcagtgttgggggaatgttcctgtggtcgcctccaccccaggctttcaccatcgtgtcggcgttgtgccaagagtcggaggtaccgccttggttgcctggtttgttcgactgccaagagttggtgtcgcgcgtcgacggtttctgacggcgcgccgccgaccggactggccatccgcccctgcttggttggggccccgtcacttcgttccatccgtccgggggcatcggccacgtgctgggtcagagtgtgcatttgtggatcgt

SEQ ID NO: 18077 - DNA, 507 bp, Zea mays
  Coding DNA Sequence Number=SeqID_3674
atcaatcaaaatggccgtcatcgacatcaagaccaaagcccagttcgacgaactcacaaaggcaactccctacgtcgccctccaagcccacgcaacctggtgcggcccctgcaaggccatctcccccatgttcaacaagcacgccgaggccttttccaacgacaagtacacctttgcccgcttcgacaccgacgaggtgcccgatctcgcgtttgagctgggcattcgcagcattcctgcgttttttattttcgagaatggggataaggctgatactttgacgggcgcgaacccgcctgcgctgaagaaattgacggagagcattgctgagaagagcaaggctggcgagctcaacaccaccgaggacttttaaacacgtgcgggacgaagacgaggattgttgcagaggaggatacatgaagtattaaggaagaaagagaacaaatgcaaacgagatacctgcaatgcatggtgttggcgaagaggataccacaatctacaacggac

SEQ ID NO: 18078 - DNA, 411 bp, Zea mays
  Coding DNA Sequence Number=SeqID_3675
ctactccgcagttcgacgaaggtgtgtgcgttatcctgtgactgtgagcagtgtgggggcgagcggatccagtgagagcggcgggaggatggctgggttggcagcgctgcagggcgccatggcggcgctctccgtctccgtgcccgccgcggcgagcaccagcagcttctggggcaaccggctcgccacctactccgcgccgcagcctggggccggttccttcctgctccccaattccgttctgttttgctgctatgatggtttgctaatagctgttgaggtgtaatgttctagggtggatcggagtatctggacagcgttgcaacttgcaaagcgcgttttggatgggattgtctgtatcgattggatgcaatgaaacggaaaattaacgacattttttgcgttgttatt

SEQ ID NO: 18079 - DNA, 565 bp, Zea mays
  misc_feature (316)..(316): n is a, c, g, or t
  misc_feature (330)..(330): n is a, c, g, or t
  misc_feature (424)..(424): n is a, c, g, or t
  misc_feature (439)..(439): n is a, c, g, or t
  misc_feature (446)..(446): n is a, c, g, or t
  misc_feature (452)..(452): n is a, c, g, or t
  misc_feature (455)..(455): n is a, c, g, or t
  misc_feature (468)..(469): n is a, c, g, or t
  misc_feature (488)..(488): n is a, c, g, or t
  misc_feature (494)..(494): n is a, c, g, or t
  misc_feature (515)..(515): n is a, c, g, or t
  misc_feature (519)..(519): n is a, c, g, or t
  misc_feature (525)..(525): n is a, c, g, or t
  Coding DNA Sequence Number=SeqID_3676
cggcgtatcgcgcagcttgaaatacgcttcctgccggccaggattgcccgccccaagagtggactgcgcgccgacttgccggaaagcgtcgctgtccacatgattgatgtccgcgaggtcaacccgccggctggcgaggcgccgatccactggcggcttctgacgacacacgcagtggtcagcgagacgaatgcttgggagatcgtcgatctttatcggcaacgctgggcaattgaacagctgttccgcgtcctgaagagcgcaggcttcgatattgaaaatgtgcagatcgaggagaaggcaccccgcgaccggntgataactgcaacnctgatcgcggctgtatgcatccagcaactggtgcacgcccgtgatggtggtccgggaacgctgcggcctctgagcgatgcattcgagcccgagnacattccactgatcnaggcctnctgcgntgncctcgaaggcaanncggagcggcagaagaaccntcatcngaaaggctcgcttgcgcgcgntgcntgggtntgcgcacgtctcggcggatggaccggctattacggcaagc

SEQ ID NO: 18080 - DNA, 572 bp, Zea mays
  Coding DNA Sequence Number=SeqID_3677
gaaaacaccaatcagacaagcttgcagcattcacgctgcgacggagcgagaaaccgagcaccgaacagcacgcaacagagctgtagaggcaagcgagctgcgagcagcggagcaggcagcacgcaagtgcagcagcacggtagcagaggcagccaggcacgcaggcagccaggcgcccagccggcagccgcctaggcctagccaggcgagcagccagcgggcaggagcgccgcagcgaccagcagccgagcgggtgagcgccgcagcggccagcagccgagcgggtgagcgccgagcagccgagcagagctgctgcgcggtgcgcactgggctggcaggagcgcagagcgctggaggcttggtcgcctggggctggaggctggctgcctggctggagcggtcgagcggcactacggcagtgtgcgacggcggcgagcgacggggcttgcgtgcctctgccaggcggccgcgctgggccctcctgccgcgtcggactgctcgtgaggaggtggtggtgtcttggaggagggggataaagttccgctcggagccgcggctgatccgagctggca

SEQ ID NO: 18081 - DNA, 289 bp, Zea mays
  Coding DNA Sequence Number=SeqID_3678
gtgatctgggatttgcgggatcaatgaatcaatccacggctttcagtcgtttgttgcagctgaaacactgcatgcagtctgcagcatactagtaccgttaccgtccgtaccggctctgcacagtttgtaaatactcgagtaattattatcgtcgccgcagcagcattgtgttctgggtaaatcatgcaatcagatcagctagctcgcctgggacgtgaatgcgaaagcgaatgtgaatcccgagaaatgtattttgcgtgacctgacctgagctgactgctcccgaatg

SEQ ID NO: 18082 - DNA, 424 bp, Zea mays
  Coding DNA Sequence Number=SeqID_3679
gtggcaacacttccgggcacacaattgtgctctggtcatgtcaccttgtatgttcttcgtcactttgcaaacaactgcaagtacctcatatcgttttgtgctcgtgctattccgcctattcgcgctaaaaaaaaaaaacaaaaaagaaaaaaaaaaagcggcccgtcgggctccaggcttcagctccctgttacccgttggagttgagtggcactctgcgcgctagtcagtgatcataggctgtagcctgtgtgcatagttgaaatccgctcacagttccacacaccatacaacatccgaagcataaagcagtaaagccttgagccgcctaatgcctaatgctgacatccatcaaacagtgatgggctcactgctcccttttccagtttgcaaaacctgaaaccgccagctgccattatggata

SEQ ID NO: 18083 - DNA, 579 bp, Zea mays
  Coding DNA Sequence Number=SeqID_3680
gttatcatgtgatatctaacaataattgagtctcctaagccttgtttgtatactagaaacaaggtttaggagtctcaattaggccaggttagttttagctttggttccggttaggtttctactgcgacagctgcggcgcagaacttcaattcgtagcatttctaaaaagtagtttctatttgatcttcctttctccgagtggagtaggtcgtttggtccatccatcaatggccgaaccggactgctggggtactccaccactgatgaggagggctgttgctggtgttggaatctggaaggcagaagacgagtctgttcgttcggccaaggaagaagagtgcaccttgcacttggactgtatgtattgggacaggtgcatgttgcgtgcacccttggttacatacatcacatggtgttgtcacccgtaacgacatgataggcctagttaggagagctgagtggtggtagcgaggtgttgaagcaagaaactatgactttagcttgctatctgtgtgattgcgatctgtgtgaggctgaggtaaaaaaatatgaatggaccaatggaacagtaaagtcagt

SEQ ID NO: 18084 - DNA, 237 bp, Zea mays
  Coding DNA Sequence Number=SeqID_3681
agttttggattaactatcagttgacaaataccctcagtgtaaaactagtttggtattcgagaaggagttccggatcgatgggatcgaggaacgggaacgtggtacgttgttttttgctactaaaactaggatttaacactactggaacgagattgttcccacgttcccggaatggaacgaatgttcctggaacgagcaacgtgaccaagttcccagttcccggttactacatcactg

SEQ ID NO: 18085 - DNA, 441 bp, Zea mays
  Coding DNA Sequence Number=SeqID_3682
gaggcgggtcctattaagagcaagccgaattctatgatgagccccaggaatatgctcccccccctggccccggacgtggcaaagggaaaaggggcggcatcccttggcgtgggcgtggaggccccgggcccccgcgcggtggccgagggagctactcctaggcgcgaaaaattcgacgtgccgaatgggtgggcttattagttatctgttagcgtttgctccagtgctcttttatggagctccgcccccggcctggaattatcttgtaggcccttccagggggtactctacttcagctgctgtccctgtgcaactcgtccgggcaagttttgtggctcgctcgtggttttgtagctaggttaagcgagtgaagttcccctcggtagcccagtatttcctgcgagattgtttattcttctgttaatgtaccccccctactat

SEQ ID NO: 18086 - DNA, 230 bp, Zea mays
  Coding DNA Sequence Number=SeqID_3683
gacgattaagaactttgcagtcatttatctggtggacatcactgaggttccagacttcaacaccatgtacgagctgtacgatccttctacggtcatgttcttcttcaggaacaagcacatcatgatcgatcttggaactggtaacaacccctggtgcaacgggcgctcgtgggctggcgagtgctcctttggatcactcgacctgttaccgtggcgcaccggacgggcct

SEQ ID NO: 18087 - DNA, 364 bp, Zea mays
  Coding DNA Sequence Number=SeqID_3684
atccacacacgggtgcgggcttctacagccttaggagcacatattagaacttgtacctgtattaataagaataaagcgtatactctgaaagactctaaaatatgaaacattgggctcgcaaggaaaatggaccccgggccatatggctaattgagtataggtgttgtgatgaacaacacagatccatgagctaataacgtatgctagtgactatgtgtgtagatcacatgatgcacgatttactcggactaagggattgaggaaagcaacacctcaggagaagacattaagaagatccaagaaaagtgcaagtgtgctgctgcggactgtctgtgcgagacgcacgggactgtctggtggcaca

SEQ ID NO: 18088 - DNA, 580 bp, Zea mays
  Coding DNA Sequence Number=SeqID_3685
ggcctgaagaatacggcagccgcctccgcctccacgcgacaagcgacggcggaggcgtgcagtagccacgtccaccacgcgatcgtataaaatggatcactctatccaaccttcccgacagcggctgtgtgcaagaaaaaatagggtttcggtggcagcagttgtacctccactcacgccgccgtcgcctccgagccccactccccgatccagacaaccaccccgcccagatccggatccacctagtgcagcacggtcgtggctaccggatctcacagcctccgcggatgctgcgccgccgccatcccactgaagtccgaccagcgcctcgtcgaggtattcacccccttcctcgagaagctcatacgcctacgtcgagctccgttccggcacccaggcctgagacgacccccctgcaggcgctggtgggtgagagggagctgccgagcaacgggtcgccatcggtggtggatgacgtcggcgtccaggccgcgaccgttccggacggattggcacagcaagatccgcacgacgcagggcgtccgcgaccgccggatgcggcttctcgatcggggtcacg

SEQ ID NO: 18089 - DNA, 353 bp, Zea mays
  Coding DNA Sequence Number=SeqID_3686
atccatactttgatcaggttggctgcaagcatcctggatgtgaacctgcttatcctacacctgtgtgtgaaaagaaatgcaaggtgcagaaccaagtttggggaggaaaagaaacatttcagcatcaatgcatacccaagtaaactctgatccaaatgaatagagcaatttgccgatggtctaccaaaaaaaaaaaaaaaaaaaaaaaaaaaaaaaaaaaaaaaaaaaaaaaaaaaaaaaaaaaaaaaaaaaaaaaaaaaaaaaaaaaaaaaaaaaaaaaaaaaaaaaaaaaaaaaaaaggggggggccgttttaaaggacccaagtttacatccgggggcttgcaacgtaat

SEQ ID NO: 18090 - DNA, 482 bp, Zea mays
  misc_feature (426)..(426): n is a, c, g, or t
  Coding DNA Sequence Number=SeqID_3687
atgcaacgagcaaaccagccgagtaaccgctcaagcttaaccagttgaataacggtttcagctcccatattcctataggattcccatgtgcaatgggatcaaggttgtttatgcattatgcattataggaaacgacacgcctgatgttgtatgggcagaggtgggcttgcagagagcatctcaaaattgataattgtagcttctgccaatatgtttatccttcttcgtctcttgtgctcaagagttattcacagcagtttttcaaatttgacctcaccctagcaaggttaccacaccacatgttaaccatgccacacttatttaaggtgatatttgtttaattttcataagtttgggagccaaagaagtcattgcctatttaggtcgctgccgagtagagcctagctggctggcagggacatgcgngaaaacttatttggttcattgaatcaaaaagatcaggctgagtggagcgtttgttt

SEQ ID NO: 18091 - DNA, 340 bp, Zea mays
  Coding DNA Sequence Number=SeqID_3688
ggcgctaaggggctggcaaaaataacggtccccctgggggtaacccccccaccccccggggttaaagggccggtaaaggggggggccatttgccaattagggtgggcaaatgttgggaaaggcgatcggggggggcctttttggtattaacccaactggggaaaaggggatttttttcaaagcgattaaattggggaaacccaaggtttttccaattccaacgttgtaaaaacccggccaattaaatttaaaaccaccccctaaaaggggaaatgggccccctaaaagcaaggtcaaacggcccccaatgtgaaggaaatttgcaaaaattgcccctaag

SEQ ID NO: 18092 - DNA, 499 bp, Zea mays
  Coding DNA Sequence Number=SeqID_3689
gcgctcgtgaggtcaactcgggccacctggcacgaaagctcagggctccttgctcctcctatgaacccaccgcacccgccttccaggctcccattttctcgcccgggagccgcaattccatcctgctgctcgagttatatactcacccaatagaacaattctatgcctgacgattgcacttctcgagggagaagatcatactgaaccagaactcgagcggtgtcgcaactctaaatggtaggcatgatgacttctttggaagccaccatgaaagttccctcatcgatggcaacctccacatcaaggaaatgcccaccctgaccaaacagactctactccccaattcggcggaacagttttattttccaagacccggtcaatctttgccacgccattcctccattcttggggcctccctcctccaaatgtatttttctaatgacaaagaacctaaatttggcaatcatgtttaaacaaaccccttccaagatacaaattg

SEQ ID NO: 18093 - DNA, 495 bp, Zea mays
  Coding DNA Sequence Number=SeqID_3690
tcacgaggtttctactatccaaagaatcaccctggtaactggaatctcaagtgccaggtcaagaacaagtaccacaggatgaagcgcttggaggatgctgtgatgagttcgtgagtggtctaggtcgtcgtctcccagtcaactttgggttgctggaccgttgtctccttataatttaattatttattttgtatagaattcatgttatgtagtaaagatatgacattcgatcttgtgccatgattcatcatatgtgtgagacttggtcccagcacacctggtgattatgttcacgtccgggctttagacccctaaaacccggttgtgacaaggtgggcgccaatgttggtcacttgttctcaaaggctataaatcaagaacaaggcaacacaattgttaatggttaaaggccttcgtccttcgaagcattatttcatctcggatataatgatcttcagacgaaggacatgaaggtcacaccttcatcattttatc

SEQ ID NO: 18094 - DNA, 544 bp, Zea mays
  Coding DNA Sequence Number=SeqID_3691
agactctctacttcgtcgttgcggcgggccggagcgctcccgacaagagagccgcccctaccggacccgcacagccccctcacgcttcctgcggagcttggcgcgagagcaaacccagtcttgcgaatgcagaacccctttgtcgacatggctgtaacaaccccacccttcagtgggcgccgcttaaacccaatgccgcgcagtgtccgccggtagcttagacggcttcctggcaaagaagattttgaagatgatagacgatggaagttataccaagagaagcaagcaaggatttcagaagagaagaagagactgaaaactgtcaagatttcagttgcagtaggtgatttggctgccgaagtttctagtgtgtcttctcagccagtcaaagaatcagcgacactagagagtctcctaaagaaaccacatatccactacaagcttcttgagaagcatggctttggaaatgaaacattatctagaatggagaaagactgtgtagagatcgatataaaatatgaaggtttcattgttcgccagcaaa

SEQ ID NO: 18095 - DNA, 453 bp, Zea mays
  Coding DNA Sequence Number=SeqID_3692
aatagcatacacatgtttcctaaattttgaagtgatctttcagttctattacatgcaaaagtataaatatacatctagcaaactaaaaatctctccatcggctgggtgatacgccaacagctagcatgcatgcgagtaatcattttttcacacttcaagcaatctgatccttgcttccagctcctcttccttggctttcgggtcgccacagggagatccgcgcggaggtgcagtatgaataggaagaagggcgtgaggcagttggggactggccgtgctcgacgaagaggatcagtagcaggatggcggccgctcgacagagggcgctggtggtgggatggtgccgctcaacggagtgccagagggcgagaccgcgcgggtcagggagcgtcggtcgatcgacagaggctacaggggtggggcacaggacgacggttgccaatttcgacggag

SEQ ID NO: 18096 - DNA, 489 bp, Zea mays
  Coding DNA Sequence Number=SeqID_3693
gtgggcaagggacggcttgacgggtggaagtgcttattgaatgctttgcgactgttcagtgaccacggcaagagtaacaaacgcaagcgcgagccgactcctccgtcggaggacttcggcgactcggaatactcggaggaggagttctcctccgagtccgaggggtctccggctcccgtctctcccccggcgtcgtctgatgattcagacgactcccaggggattgccgcggaagtctggatgtacatccgggccgtcgagcgctccgggctcgagggctcggatgagtcggagtactcctcggatgaggaggacttggacggcggcgaggacgaggacgacgacgacggtggcgacggcgacggtgacggcagcggcagcggcgggggcagcggcggcggcgacgagagcaagggcagcaccagaggcggcagcagcaagggcagcaccagggtcggcggcggtggcagcagtagcaagggcagcacc

SEQ ID NO: 18097 - DNA, 226 bp, Zea mays
  Coding DNA Sequence Number=SeqID_3694
tacgagacgcttggtacgatcctatgcgctctgtagtttgtgcgactatgcatctgttttttcgtgtgtcaatcctgatgatcaacttgtatgatgctgatcagcttactatcgaattatttgatccgttgtggctccgcctgatcgaaatttggtgattggttacacaaatttgatcatttgctgttgccatgcttctatgtttcagttctatcaattattctaa

SEQ ID NO: 18098 - DNA, 556 bp, Zea mays
  Coding DNA Sequence Number=SeqID_3695
gcttgtgcccatacttgtttgttagtgtctccaacacagagagaatgcggagatcccaggactaccacgcccacattacaaaaattcaaagggagcctattgttctcactgatgtccctcagtacccaaatgttcatcatgccttcaagaaggagactgtttatgaggaagatgagactgagggatcctaccacaaccaccaccaccaccacaaccacaacccagagtttcgtgagaggattgaagtggtagagtatgagaaacctgctgaggttggtgaagtcgtttatgaagaggaagtggttgaaaccgatcaatatccacgaaggaacaggggtggtcttgaatcgcacaagtggaagacctacaggccatgagcttcttgttatcaagtgactattttgctaagcaggctacctaatatatcataattaccggtgtgcttgtattaaataaattcctgcttagccagctgttatgacataaattatacgtcaattattaataaagcatatctgcagtatatatttaaattagcatgcgatctgtaaagcct

SEQ ID NO: 18099 - DNA, 260 bp, Zea mays
  Coding DNA Sequence Number=SeqID_3696
atcaggtggcgaaagcccagccagcgagggagccgcagaggagcctcgagccgagcagatggagacagacaaaccttagggagccccagatccctcggcttagctttgccagtgatccaacatttgtgtgattgaccctgttcccctcctgttatagtcggtaggggggagtgaactaaacgaaaggttcacccacatttatttaaggaatgtgtgttgggacattcaaggtattatgtttattgtccttaacaagggag

SEQ ID NO: 18100 - DNA, 363 bp, Zea mays
  Coding DNA Sequence Number=SeqID_3697
ttgcaaaattaacggtccccctgcgggtaaccccccccccccccgcgctttaaagcccgctacaaggggggttcatttgccaatccgggtgggcaaatttttggaaaggcgattggggcgggcctttttggtattaacccaactggccaaaaggggattttcttcaaagcgatttaatttgggaaccccaaggtttttccaatccccacgtttttaaaccccggccaattaatttttaaaccactccctataaggggaatttggccctttaaaaggaaggttgaacggcccccaattttatggaaattttcaaaatttgcccttttgaaaggcccccccggcaaggacaaaatggggcggatt

SEQ ID NO: 18101 - DNA, 447 bp, Zea mays
  Coding DNA Sequence Number=SeqID_3698
gaagtatctttgttttcgctctcttcttctactttcgatctttgacgattagaaaaggaaagtgatggctgccgttaatgggtaccaaggaaacactccggcggcgtcaaagcaatctgctcctccgactaagactgttgatagccaatctgttctcaaaaggctgcaatctgaactaatgggcttgatgatgggtggtgacccgggaatatcggctttcccagaggaagacaacatattctgttggaaagggacaataacaggaagcaaagatactgtgtttgaaggaactgagtacagactctcactctctttctccaatgactatcctttcaagcctcctaagatcaagttccacactggttgcttccaccccaatgttgatctctacggcaatatctgtttggacattcttcaggataaatggtcgtctgcatacgatgtcag

SEQ ID NO: 18102 - DNA, 63 bp, Zea mays
  Coding DNA Sequence Number=SeqID_3699
gtctggcgcagtgcgcgaaacccaagcagcaagcagtccgctatccagcaagtgctcgacaga

SEQ ID NO: 18103 - DNA, 580 bp, Zea mays
  Coding DNA Sequence Number=SeqID_3700
gtgtcttacagctccgcgtggcttccggccagagcgacctggtacggagcgcccaacggcgccgggcccgacgacaacggcggcgcgtgcggcttcaagcacgtgaaccagtaccccttctcctccatgacctcctgcggcaaccagcccctgttcaaggacggcaagggctgcggctcctgctaccagatacggtgcagcggcgacaaatcctgctccggcaaaatcgagacggtgatgatcacggacatgaactactacccggtggcgcagtaccacttcgacctgagcggcacggccttcggcgcgctggccaagccggggctcaacgagaagctgcgccactcgggcatcatcgacatcccagttccggcgggtgccctgcaacttcccgggcctcaagaatcacttccacgtggtggacggctccaacgcggtgtacctggcggtgctgatcgagtacgaggacatggacggcgacgtgatccaggtggacatgaaggaggcaacttcccgggtcgtggacgccgatgcgcgagtcctggggctccatctggcggatggactccaaccatcgcct

SEQ ID NO: 18104 - DNA, 112 bp, Zea mays
  Coding DNA Sequence Number=SeqID_3701
ctgccgacccatcgtttaataactagactagaaacgacattgatagagcgagctgaaggtgatgattggttgcgcgcctgtgtgtaacctgtaacgacgtctgcagaaggcg

SEQ ID NO: 18105 - DNA, 490 bp, Zea mays
  Coding DNA Sequence Number=SeqID_3702
ggtatagcctcgactagttcttaactacaggagctacagcagcctcttcttttgtacttgttctgctgtctcctctattcacctagttttctctgtattacctctcaggcgattaatctatattccatggcaaccccttccttccctgtgctgttcactagatgcctatcctgatttgatgagatcttccatatactcacatccttgtttgttctctcctttcgtagcttagcttgtgccatctttttataccccatcaattcttaccaacacgacttccgaggcgatttcaatatcaggatttggaatttctggcatatttgcctttggttgtaaattagatgtacactgttgctggccactacactaaaaactttgtatgccagtgtgacatctattaacattaagaggttcttgcacagaaacatttgccgcttttgtttatgatggcaccatcaaacatgggaagcacttctaattatccaggagt

SEQ ID NO: 18106 - DNA, 454 bp, Zea mays
  Coding DNA Sequence Number=SeqID_3703
aggttgggccatctaggaacatctagtgtttgaactttgtctgtttaaccaatttaagtgcacacattgataaccttttttgacaaactggattttgtagcttccagaactagaggtgttgtgcatgcacacatgtttttgtgggagctggtgaactagcattttgagctgaaacttcactataggcattagaaggcttgaaagaccttagcatttgaattttaagaacacaaaacttatctttgtcaaacaaacaaatagataactaacctaaggacactggaatgtgtttttgggactatcctatacttgggacttttgttttctcatattgttgtttatagtgtcttcgtaaagcaccctgaatttacaatgctaactccagaatccagatgccattaatgtcgacggatgctaagagaatgttattaagtacatgtttcctttgcttgaa

SEQ ID NO: 18107 - DNA, 439 bp, Zea mays
  Coding DNA Sequence Number=SeqID_3704
gtttcctcgcctctgattgacactgctcaagcttatctcggcgaagaagaagaagaagagagaaacagaatggcgactcaaggatccgcacagaaggaggctgacatcaagatgatgtgtgctgctgaggttcacctcggaaccaagaactgcaactaccaaatggagcgttacgtcttcaagagacgcaacgacggtatctacatcttcaaccttggcaaaacatgggagaagctgcagatggctgcacgagttatcgttgctattgagaacccacaagacatcattgtgcagtcagctaggccttacggtcagagagctgttttgaagttcgctcagtacactggagctaatgcaattgctggaagacacactcctggtacattcactaatcagatgcagacctcatttcagttagccaaggtttcaccaatcagat

SEQ ID NO: 18108 - DNA, 386 bp, Zea mays
  Coding DNA Sequence Number=SeqID_3705
gatttacctgcccatggttcattttgtcaactggtccggcagtttgcgcccccatgagctccccgaagttcgccggcggcggcggcggccccaaaactttttggccttaggtggtcgggtttagcgtggaggaccccaaaaaggttttcctcaaggccaacccggaccccgacattgtggttttgcccgtcggctccttggtgcccccggattttccccctaaccgtgtccgcatttttgttgacattttcgcccagaccccccccatcggcttataatatataagctaccccctatttcctttccttgccccagacctttaaataaatatatatccgtttaaataacccgggccccccgaataatggatgtttgaattcccccca

SEQ ID NO: 18109 - DNA, 396 bp, Zea mays
  Coding DNA Sequence Number=SeqID_3706
gagatggacaaactgcttgttgacaatatttttcagtgatgtggcagaaacatgctaggcctgctccacaggctcctctcggtgtctagtatactattatatgctaaactgtcggccaattcatccttcgacagtactgaaagcccatcttctaatgttgggaatccgaagcttctcctcatctcccgacagacagatatctctttgctgtccgggagacagtacaaaaaatcctcttctccgctgtcgttgaacactaatgcccccttcggatatttcagcttctgtgcatagtgttgagcttctcgttcttcttctttagagagtctttttcccgaagcatgatgaatgatatattcaatactttttttaaaagcttcgggagcaggagcatca

SEQ ID NO: 18110 - DNA, 462 bp, Zea mays
  Coding DNA Sequence Number=SeqID_3707
aacgatgtcagggatcatccagaagattgaggagacccttcatgtggtgagggcacaagaaagaggagcacaagggggaacaccatggccaacacaaaggggagcaccatgggcatggagaacacaagggggagcatcatggtgaacacaaggagggtgttgcagacaagatcaaggacaagatccattctgacaagggtgaaaaggagaagaagaagaggaaagagaagaggaagcatgaacatggtcatgagcatggccatgacagtagcagcagtgacagtgattagatctttcactgctactctctattaagcgattgtacggtaccatagttgtggggaagccagtctctttccttatccttctcatgatgcactaaaataagagagaaattatgtgtgctcctgcttttatatttacttggtgaatgtaaaacctcatctcttttggtttggtttg

SEQ ID NO: 18111 - DNA, 493 bp, Zea mays
  misc_feature (157)..(157): n is a, c, g, or t
  Coding DNA Sequence Number=SeqID_3708
gcgcaagaaacgacgcagcgagagcggcgcacgggccccacgcccgcgcgacgagggacgaggagcacaaggaccaggaaccgaacccggagccagagcggaagcgccgccagaacccgagaaaaaagcggaggcgggggagccaccccccgagcgngcgagcggcaccgggacagcgggcagcgccaaccagcgggaaaacgacgagggcgccggcaccccgagccgcagcgcgagggcgagcgggagcaccggacaggaggcggcggcggccagccggcggcaggcgggggggaggggggcggcggccccccggccgagggggccgcggaggcacagcggggggtcgtccggcaggtcctccaggtccgtgcccggccccgccgccgccgccggtatgctccccatggtggtggtgtgatctgagactgggggttgtgcacgtcaaaggcgaggagcaggggcctcaagagatctcgatgcgtgcttggga

SEQ ID NO: 18112 - DNA, 208 bp, Zea mays
  Coding DNA Sequence Number=SeqID_3709
gcgaatgccgctattgctgcaattccctccacacaggaccctatacctgctagcgcaaccaaaagtgttggcacgcgcatacacagctttggaaatactaattacgagccatctacagacgaaatgaagtcttttcttaacgaacttatcgaaggatactatatcagaagtgcatccatcaagcacggtttgagctacttcgctgcac

SEQ ID NO: 18113 - DNA, 443 bp, Zea mays
  Coding DNA Sequence Number=SeqID_3710
tgttggatgtgtacccatcgcctgctccttacatcatttttgacatatatatactcccttcgttccagtaaaaaaaaaaaaaaaaaaaaaaaaaaaaaaaatatccgcatccgctgcctccgcctctcgagtctcgtccacccgtcgtcctcctagctcctctactcgccagtcgccatgggcaagattaagatcggaatcaacggcttcggaaggatcggcaggctcgtggccagggtcgccctccagagcgaggatgtcgagctcgtcgccgtcaacgaccccttcatcaccacggactacatgacctacatgtgggagtacgacaccgtccacggccactgggagcacagcgacatcacactcaaggactcccagaaccttctctttggggaccagccggtcaccgtctttgggctcaggaacccctgggaaattccctg

SEQ ID NO: 18114 - DNA, 453 bp, Zea mays
  Coding DNA Sequence Number=SeqID_3711
gagacggccagggtcatcaccttactgccgccgcaatcgttggtcatgacggtagcgtttgggctcagagcgctaactttccccagttcaaggcacaagagttcactggtattatgaaagatttcgatgaaccgggtcacttagcccccacagggttatttctagcaggagccaagtacatggtcatccaaggcgagcctggcgctgtaatccgtggcaagaagggagctggaggcataaccataaagaaaactggacaatcatgtgtctttgggatatacgaagagcccgtgacaccaggacagtgcaatatggtcgttgagaggttgggtgattacctcctcgaacaggatctctaagcccccatctcctcaaacctactacaatgttccaccttccacatttttttatgcaaacttaatatatatgatttgatttctgggttctttctaa

SEQ ID NO: 18115 - DNA, 556 bp, Zea mays
  Coding DNA Sequence Number=SeqID_3712
acctcggcacctaatttcttgtttgccatggcgtagcgccgtagcctagagccctagacggatcggccgccgtctcgtaccgtacggacgtacgtacgtacgtcctaaattataggctcgtgtaaaataacgatccatccacgaaccgagttgggggaccatatataggagttgtcaggaaatttataccgatcagactcccactcccctcccggttgtttgccatggcgtagcatagaacatgaatgatggttgatactgctgctgctcctgagaaccaatcaatcctactaccacaatggcgaaaaaaaaaaaaaaacggccccgtgctgtgtttgaatttcctctgcctccacctctgttttccgattcggatcggatcggacccgctcgcgcggtttccttctggccgcgggtttgctccctctgtacatgatgacggctggccaagaaatcgagcgatgtgatcgatccttcatttcttgtgtagtgacaagttgtcaaattggtagcgacagatgtttgattgagttgaaagaggcaccttgacccctag

SEQ ID NO: 18116 - DNA, 578 bp, Zea mays
  Coding DNA Sequence Number=SeqID_3713
ttggcttctcggctcatggcgatgacggaggtgcgccaattaggacagctggcgccaccggctcgctcgaatcaagggccgcgcacacgcctacacggagcaaaaagatagacatggtgttctacaagggcgcacgagaatgccgacaagaaccccaacttcgtcgggtgcgtagagggtgcactcggcatccgcggatgaatcgcatgcgcacgcacatcaatactttgtcaccgatgacaaggaaggccccatctgggaactgcagaagcacattgaacacatgtatgtcctgattaccaccccattccacccagcttatgtctctgcggagaggataacgaaggcaaataatcttgagcttcttctcacgctaagaatcgcgctcccatacatatggagcttccaccatctgctgctgcgggcttaactggggatgacgccactggaagcctcactctctctgcggcagaagatgagctcttgcgcattctgactctgctcaggaacttcttgcctgcgtaccaacaggtagttcaaggcgaatgcatcgtatccggcattgctccagacagctt

SEQ ID NO: 18117 - DNA, 470 bp, Zea mays
  misc_feature (441)..(441): n is a, c, g, or t
  Coding DNA Sequence Number=SeqID_3714
atctcgaagagttgcgtgacacaagtcacaatggtcgtggctcagcgactgaggcagcccgccgcacaagtgtccacagccgtgtcgcattgaactcctggcaacgtgattcaagtcacgcaagcggtaatgaaagaccgcgtctccgtttcgaaatgttgctggccagatacaccgcgcggaattcacaggcgctgctgaccaaaaacgaaagctctcagtttcgcaggccaaaagggtcaattaggctaagcccaatattttcgattccgatttttggggaactggttatgggctcgtttgtgaagtgggctggtggcgcgggggttgcggcggtttccaccctgctgttgggggcatcttcggccttggcgcaaaactgcgcgacgacacaaaccctccgcctatcaacaacatcggcacgctggcagtgcctacganttccgctagccttcatttcggcggcatcg

SEQ ID NO: 18118 - DNA, 360 bp, Zea mays
  misc_feature (235)..(235): n is a, c, g, or t
  misc_feature (238)..(238): n is a, c, g, or t
  Coding DNA Sequence Number=SeqID_3715
gggttcgattttggatacacgtatatatcgaatctctaaactcatacacgtgaatcgcatcgtctcaatattacaacaataattcacaacaatcaaaacatggtttagaaaataaattgatgttttggggttgtcttcaaccttgggtgaacggatgacggcgaacggtgtgagcacggtcgccgggtgctgcgtgggcgagcttcacggtggtgagcaggggctcgatcgaggnggngttcctagcatggtggttcgccgggatgctgcatgggcggcgagtacgaactccggcgagtctccacggactccgggatggaccgcgatggcggggacgaactccggtgacggcatggacag

SEQ ID NO: 18119 - DNA, 383 bp, Zea mays
  Coding DNA Sequence Number=SeqID_3716
ctcactttgaagctctagggatccattctatgtatttgaaatccaaggaggattgaggacgaaggaaatatgtgaaacttgttggattggtatcctgttgtgtctaggataatatggttgggtcatctagtacaacattttcatggacatcgaggaaggttggcgcagccttgaatgcatcgttgctggttgtgaggggaggaaaggatgatctttttttagaaaaaaatctcacaaaggtggtctcaaagttgaatgcaacctttttgttcaatgcttgtccgttcgaaaaatactcatcaagaagctttgaccgtgtccaacaggttacctatatagttaccaaatcactatttttgcactctagactgcattgtttgtag

SEQ ID NO: 18120 - DNA, 342 bp, Zea mays
  Coding DNA Sequence Number=SeqID_3717
atccgaaggccgaggcgaatctaaaggtaaaaaaggtaaatctgaacatggaagaggtaaacatgaaggtgaaggtaaatccaagggtagaaaaggtaaatcaagaggtaaagataaagataagaaaaagggtaaaggttcacgtaagggttcatctgatgatgatgaaagttcataaatggaagttcatataataattgtggtaaatgcatgggtaaagataaattcatgcaaagataaacacatgtaaagataaacacatattggtccatctattacaatatttagaatacgttatgtataattcatgaattttatgccacctataagaataaaactgtt

SEQ ID NO: 18121 - DNA, 457 bp, Zea mays
  Coding DNA Sequence Number=SeqID_3718
gagctctctctcagtcgaaaacaatggcgtcttcttcagcgacgctctctctctgctctactttctctgctcattgcaatgtcaattctcgccgttctagcactatcctctgttctctctctaaaccttcgcttaatttggctaaacctctgactggatttctttctccttccactgcgtcgacgtctcgaaccgcattcaccgtcgctccgaaattcgcggaatcagtcgtcgaagctgaaccggagactaccgatatcgaagctgtggtggtttccgatgtttcggaggttactgaggaaaaagctaaacgagaagagattttcgctggtattatgggtggtggacgccaatacatagtggttccagggagatatctctacactcagaggctaaaagatgcaaatggtgatgaccacattgttctcaacaaagtggcgcttggtggcacaaccca

SEQ ID NO: 18122 - DNA, 110 bp, Zea mays
  Coding DNA Sequence Number=SeqID_3719
ggtctatgctaggagttcggctcgagcatctcctggcctctttctatgtatctttgatcaggcggctgcaatgggaggtagcggaacgtgatctcggtgtaccccgagga

SEQ ID NO: 18123 - DNA, 360 bp, Zea mays
  Coding DNA Sequence Number=SeqID_3720
atactcaaaagcaaatcatcaaacaaagtgtcttctcttagaaatagaagtgttgttacatgatttagcttaaatcacgattaacacaaccaaccattgttatcatgtcagatggaagattgaagtacacttcatatcttagctttcatgagtagtatgcatctattgggatttcatatacaagattagatgcttgggcatacaacactatatcacgtatggtgtaatgacaaatgagtttgtcatactcattgcccttctctttttaatacttgtatatttgcttaactcatacttgttgtatttgcattggtcagttgggttcatagattaataatagtgttaatccaatgaacctca

SEQ ID NO: 18124 - DNA, 525 bp, Zea mays
  Coding DNA Sequence Number=SeqID_3721
gagcttctggaagcctccaacggacccggtgccggcacggcctgccccgcgccgccacagggattgattgtgatcagatctattctgtaatgtacagcggctgagggtgaaccgaagatgaccgttgtgcgattctatctcgacaatgatagctgtgttgtgctagacgcgcggcagcgcggcatcgacttgctcctcagcgatgagtccaaacgcgagacacccgccatcgatctagcttcttgagacaagcatgagcctcatcggtacggagtgagccgcgttctcacacatgaaccccaaaaactccattgtctcagatcaagcgactgctcggtcgcaagatctccgaccccgagctccagagagtatctcgcgtcctgtcccgatccgtgtcacggagtgccccgatggatttcccttgatacatgtgcgcttcctgtgtgaggtacggacgtttacccccacccagctgcttgtcatggcgctgtccaatctgaacgacattgctgacgggaaccttaa

SEQ ID NO: 18125 - DNA, 154 bp, Zea mays
  misc_feature (129)..(129): n is a, c, g, or t
  Coding DNA Sequence Number=SeqID_3722
ggattatagtgcatgtgcgcattcaacacgcaacgggcatagtagattctgactacaatccagggtcttgaagaatgagttctcctatatcaagatcctcatggatctgaagaaggaattcagctgcantggtactgttgctctggacccagag

SEQ ID NO: 18126 - DNA, 481 bp, Zea mays
  Coding DNA Sequence Number=SeqID_3723
gagaaaacctaaatgcaatccaatggaccgcctttaaaaacaattcccctgggaaacccgtggggttccccaattaaaccgctccgatcacccccccctttaccgccaggcgaaatggcaaaaggcccccacccttaacctttacaaaaattggccaaatgaatggcaaatggcacccccccttaacccggccccaaagccgcgggggctagggggtttcacgccatagtgtcactttcccttggccggggcctaatgccccgacttataacttatttcccctctctttccgggccttcccggggagtttttcccatgagagtccaaaatcagggagttctcgtttaaggggttcccctttaaaggtcttacccaaacctctccccaaaaaaaacattttttacggtttagagggcaaaacacccgtgaccataaaacctgtaaacctgggtttatcacactttaaagcagggaacaccca

SEQ ID NO: 18127 - DNA, 505 bp, Zea mays
  Coding DNA Sequence Number=SeqID_3724
gcccctaccggacatacaaagacaggtcccgacgcttctccaacaaacaaaacccaggggcggcccgtctcgagtactcagcacacgctcccttctcttcgacgacacgcactatcatataaaggagagcaagcgcaagttctggcacgaggccatacacgccgcgcgcctgggacatccacgccttcaaccactttaatcggcacgtagacctgtcgaggctcatgagagacttcaacctccacgagctcaccgcgccccgagagtacgaacagatggggctcgtgtacatgtaccactgcatccccatggaggagatcaccagcgcatccggcgccgtcggtctctgctacggggcgcactccaacctctgcatcaaccagctcgtgagtcgtcgtgactgccgctctggttgtttatggcaggcagaggacacgcgcggtaaccaaatcatttgattactcacccaagcggcaatgctacttgttgtgtgcaggtccggcac

SEQ ID NO: 18128 - DNA, 152 bp, Zea mays
  Coding DNA Sequence Number=SeqID_3725
gccgggtttggctgtgaaaccatctcatttgtatttcacatatgaaatatgattcatgatctgaataatttggggggtggcaaaatgatttttaattccttttaggtgatgccactaacctgaacattattgtgatagatgactaaggcggt

SEQ ID NO: 18129 - DNA, 292 bp, Zea mays
  misc_feature (48)..(48): n is a, c, g, or t
  misc_feature (67)..(67): n is a, c, g, or t
  misc_feature (75)..(75): n is a, c, g, or t
  misc_feature (87)..(87): n is a, c, g, or t
  misc_feature (96)..(97): n is a, c, g, or t
  misc_feature (112)..(112): n is a, c, g, or t
  misc_feature (123)..(123): n is a, c, g, or t
  misc_feature (147)..(147): n is a, c, g, or t
  misc_feature (191)..(191): n is a, c, g, or t
  misc_feature (199)..(199): n is a, c, g, or t
  misc_feature (226)..(226): n is a, c, g, or t
  misc_feature (244)..(244): n is a, c, g, or t
  misc_feature (252)..(252): n is a, c, g, or t
  misc_feature (260)..(262): n is a, c, g, or t
  Coding DNA Sequence Number=SeqID_3726
gatatttttatgtactcctagtctatttatatgtattgctacaaatanaagtgaggtcgcgaaaatnttaaagancaagctggtgcntgggaatcnngagtctcaggcgagntgtgcccttgntcactcttatttacccaataaagntcatgttaatcactgtgacatgttcaggttaatttgatgggacntaataganttccctagtattgtttatcccaccccntgtttaccactgaacttntgggtagntttgacannnctttacctggttttgggattaatattacat

SEQ ID NO: 18130 - DNA, 217 bp, Zea mays
  Coding DNA Sequence Number=SeqID_3727
ggatgacgccacgatggccaagtcattcatcatcgccctcgaaggtccagccctcacctggtacaccaggttgcccccattgtccatcgactcctggagaagtctccgggacaaatttttgctcaacttccaagggtaccgcccagacaccgacgccttcgccgaactgtcactctgcaagcaggggtaccgagaaagaatgcgggagtactaccgc

SEQ ID NO: 18131 - DNA, 52 bp, Zea mays
  Coding DNA Sequence Number=SeqID_3728
atgggacaaaaaatagggcgcattcggtttcagacttcatctgaggctgtca

SEQ ID NO: 18132 - DNA, 370 bp, Zea mays
  Coding DNA Sequence Number=SeqID_3729
gataggtctagttgtcaccggcatattcaaacatacatgtcagaatcaaattacattcacatcatctcactctgcatcctctatctctgcatcctctggaacgcctcggagatacataacgttgttgcccctgatcagaatctctcccaggttcccagagaactgcccaacaaggcccggccggccagggggaaccgcagtcctgaagtagaagtgggggcagtaaattgtgacaaaggcagtgttacggccaccttacatctttgtcagacatatatttccgcctcgaatctattagcatgtcttcagaataccaggtcatgcacacacacatgaacacgctcaacatcatcacggttaagaccacgga

SEQ ID NO: 18133 - DNA, 68 bp, Zea mays
  Coding DNA Sequence Number=SeqID_3730
atatcatttcagttcagccttcttgacttgtactgtggtacgtctcgcaggtctcgtctgaagttggc

SEQ ID NO: 18134 - DNA, 511 bp, Zea mays
  Coding DNA Sequence Number=SeqID_3731
aacctggatgtcgtggaaagcctgcgcaattcgtcgatcaagctgatcctgacacggcatgagcagggcgcggccttcatggccgcgacatacggccggctgaccggcaagcccggggtgtgcatcaccacgctcggtccgggtgcattgaacctcacgaccggtgcggcctatgcgctgctcggtgccatgccgatgatcatgctcaccggccagaagggcatcatgagcagtcggcaagcaaaattccagattgtcgatgtcgtcagcgctttcaagccgctgaccaagctctcactccagatcgtcagtacgagcagcattccgaccatcgttcgcgatgccttccggattgccatggaagagcggccgggtccggtcctgctggaattgcctgaggacatcgcgggcgaggaagcagaagacgtcgcgatggtggcgcaacacccgatcgaaattccggtcgcgcatcgtgcctcgctggaccgcgccgctgaaatgatcctcaagg

SEQ ID NO: 18135 - DNA, 82 bp, Zea mays
  Coding DNA Sequence Number=SeqID_3732
gcaaaaactgatacactttaccacaagggaaaacaggctcagtttgcccagtttatgagcatcacaaactctcgggcctttg

SEQ ID NO: 18136 - DNA, 273 bp, Zea mays
  Coding DNA Sequence Number=SeqID_3733
atgatcccgttgtcccacaaccctcacccagccaccatcgccaacgcgggggtctgggggcttttctgcgatcagcacctccttataagaacgacgcgatccactgctaccccaaagaagcagcagatgaagcgtcagggccttcgtcttcacaccatcgctgagccttcgagcagcctccaggaagagcagcagaggggtgggtgggaaaaggaggagaggaggctgacgacggggagcaagggtggtggccggcgaccttggaagatagac

SEQ ID NO: 18137 - DNA, 459 bp, Zea mays
  misc_feature (359)..(364): n is a, c, g, or t
  misc_feature (398)..(400): n is a, c, g, or t
  misc_feature (417)..(417): n is a, c, g, or t
  Coding DNA Sequence Number=SeqID_3734
aaggaccctttctttgctgagcaaagagagaataaagaaacaacaaagtttccagtgtgaatgaaaaatggctttcagggttctgggttccaagttgaggccattggcggcggttcacaaatggtggcggtttccgtattcctctgctgcggtggcggaaagcacgagggaagtgatgggtctgaaggattatgcagattatagaaggtccctttatggccaaatcactcacaaggcccttcttgttgatgctgttggcacccttgttattccttctcaacccatggctcagatatatagggagattggggagaagtatggggtgaagtactcagaggatgagatattgtgtagatatnnnnnngcttatggtcagccttggggtaaatctcgtctcnnntatgttaatgatggtangcccttctggcaattcatagttagttattctactgggtgttc

SEQ ID NO: 18138 - DNA, 313 bp, Zea mays
  misc_feature (57)..(57): n is a, c, g, or t
  misc_feature (64)..(64): n is a, c, g, or t
  misc_feature (72)..(73): n is a, c, g, or t
  misc_feature (83)..(83): n is a, c, g, or t
  misc_feature (95)..(95): n is a, c, g, or t
  misc_feature (98)..(99): n is a, c, g, or t
  misc_feature (102)..(102): n is a, c, g, or t
  misc_feature (125)..(125): n is a, c, g, or t
  misc_feature (128)..(128): n is a, c, g, or t
  misc_feature (134)..(134): n is a, c, g, or t
  misc_feature (137)..(137): n is a, c, g, or t
  misc_feature (141)..(141): n is a, c, g, or t
  misc_feature (143)..(143): n is a, c, g, or t
  misc_feature (151)..(151): n is a, c, g, or t
  misc_feature (161)..(161): n is a, c, g, or t
  misc_feature (196)..(196): n is a, c, g, or t
  misc_feature (208)..(208): n is a, c, g, or t
  misc_feature (220)..(220): n is a, c, g, or t
  misc_feature (228)..(228): n is a, c, g, or t
  misc_feature (236)..(236): n is a, c, g, or t
  misc_feature (238)..(238): n is a, c, g, or t
  misc_feature (242)..(242): n is a, c, g, or t
  misc_feature (277)..(277): n is a, c, g, or t
  misc_feature (283)..(283): n is a, c, g, or t
  Coding DNA Sequence Number=SeqID_3735
ctccgtgtctggatacttcctccgcccgcacggtggtggcgcctccggcatctccangattagnagatgctnnttctgagccnggtgagcgttgnttnnacncgagatataggattctgtagctntgngagaangangagncnttggttanttttatttangcttttctgaataatgaagaagactatcctgatgntgacaatcttcngcgttatatatnatacaaangaagaggntngcantgaaaagttaaaaaggggacttttctccaatacanggaatnatcttgacagaatataaaacttttcttcta

SEQ ID NO: 18139 - DNA, 586 bp, Zea mays
  Coding DNA Sequence Number=SeqID_3736
acatctggctattgtcgtgcagcacctcgaaacacttccagaatggcagctagagaagaatagccgggctgaccatcccaatcagctttagcgcacggcacgatttcaatgtagttagatgtcggcctgcatccagaaatgctaggctcatccgcgaggggtgatgtcgaccgaggacaggagcacaccgacggcggagctccgttgctgggcaaccggctgcttgcaacgtccaatcacaggtaagctcccacccaacatccaaaatacgccaaccgtcgtgctcttccacaccccggcatcaccgtgtctaaagcccgtctacgcgcctgatggaccttttttgaggcattgtctgcttgaattgcattctgtgtccgccagacacgctcatcgcctttaatctactcacttttcgcaattcgaaacctgttctctgtcactgaccacctgtactcaaccgcgtgcgtgtagcaccgaaccttcgatcaaaggttgtacattctcccgatttcaagcatgttggcatcaccaacacccgcgccagctggccctgttcgccgaacttcacaacgccaggctttga

SEQ ID NO: 18140 - DNA, 454 bp, Zea mays
  Coding DNA Sequence Number=SeqID_3737
atgtgtccgccccaacgccgatagtcctcgcccctcccctccccgttgcgcccatccatgccccctccgcgcccgcgcctcccctcaaccaccgcaccgagatcgccgccgatctgagctcccctccccgttgcgcccacccatggtcgccgcttcgacttgctgttgctgctgctcctgcacgacgaccactgtcagctacttgcttttgtttcgtagcttcgtagtttttgaagttgtgatacatgggtgtgcaacaagcaattcctattatttcctaccttgaaggaagggaacgacgtggtctgcgcgggcatggtgggcgcgtggaaggagaagtcgttgaaggcgccgccgaccgcagctcggctgtcgtcttgctgtcgtcttgctgagactgagatgcgatcaggtcggcggcctgcttccagtcgaacctctgcgccgggatggc

SEQ ID NO: 18141 - DNA, 548 bp, Zea mays
  Coding DNA Sequence Number=SeqID_3738
tgcagggcgtcttccagcatgtcgacggcgtcaccagcgcggtgtccggctacgccggcggcgacaagtcgaccgcggactacgagacggtgagctcgggcacgacgggccacgcggaatcggtgcgggtcacgttcgatccgcgcaggatctcctacggccgcatcctgcaggtgtatttctcggtcgcgcacaatccgaccgagctgaaccgtcaaggccccgattcaggcactcagtaccgctcggcgatcttccccaccagcgccgagcaggcgcgcgtcgccaaggcctacatcgcccagctcaaccaggcgagggttttcgacgccgccatcgtcaccaaggcggagccgggcagggagttctacccggctgagggataccaccaggactacctgacgctgcatccctcgaacccctacatcgccatcaacgacatgcccaagctcgacgagctgaagcggctgttccccgcgctctaccggcccgagccggtactggtgagcgcgtcgcgctcgacaaactgaggcgatcggcttcactta

SEQ ID NO: 18142 - DNA, 338 bp, Zea mays
  Coding DNA Sequence Number=SeqID_3739
gcagaccatgcgtgtcgcccagaagctctacgagggcgtcgacatcggcggcgagacggtcggcatcatcacctacatgcgaaccgacggcgtcgacatggcgccggaggcgatccaggacgcccgccgggtcatcggccgcgagttcggggacgactacgtccccaacgtgccgcgcaaatactcggtgaaggccaagaacgcgcaggaggcccacgaggccgtgcgcccgaccgatatgggccgcctgccgaagcagatcgcccgctacctcgaaccggagcaggccaagctctacgagctgatctggacgcgcaccgtggcgagccagatggaat

SEQ ID NO: 18143 - DNA, 426 bp, Zea mays
  Coding DNA Sequence Number=SeqID_3740
cgggctgctccctgatgggttcccacacgctcggtgtcggagttaaaaacaatgtggccccaagtgatctgtcagtggattcgagcccccggtatgagatcatctcggcagggcatctcggggaggcccctgtttcggacccgtgctggctccagtacataagggagtggggcccgcccctcccgtacagctcccgttcaaaaataaacccggcgttgagcttcctcccgttctttttcccggtttcccaccagaggcaatattccccccccttccgggggaactgtacgaggaggaaggtcctccggggcccaaggagaagaccccctgggaaggcgccgagaaatgctaggctttgtccccccccttgtttacccctgtccccttaatctgtcccccaaagctgttttgtcctttatgaaaaag

SEQ ID NO: 18144 - DNA, 386 bp, Zea mays
  Coding DNA Sequence Number=SeqID_3741
gggtacgttattgcttgtgcacgacaaacgagacaggccgtggccagcgcggtgggcggttttccgtcgcgctcggacacgggctagatcgctgcaagggcctgatgccccgtccttcgggctgcgccatccagggggcgctgctccgtgcgccaggtgcccaacggcgactgccgcaacgtccagggagatgaaaatcatttactgcaagccgcacgtgtgatgcgatgcggacatggggtcgtcgcgccatctcgcggcctgtgttgtgctttctttcatgtcgccgtctccgtcgtgtgtcataccgccattgtcgttaggttgttgttgagtaaccgtttgcttcgctcagtagccttgctgtccagggtattatcactcgc

SEQ ID NO: 18145 - DNA, 209 bp, Zea mays
  Coding DNA Sequence Number=SeqID_3742
atagcttgtctgctttaatgacacgatgaccatctcattcgccatgttgtgaagttcaacttgctgaaaccaataattgatgtctttgttgacaatggggagagatataacatgctacattcaggagtactcgaattgttggaatacatacggaaggtacgtcttcagttgccactttgaattctggcatttactttgccaccatggat

SEQ ID NO: 18146 - DNA, 450 bp, Zea mays
  Coding DNA Sequence Number=SeqID_3743
acttaatctatgcaagcgtccacgcgtcctgaggatattcttctgaaggaagaacttgacggcatggccaaaaactatcctgatcgtttcaagatctactatgtcttgaatcagcctcctgaagtctgggacggtggcgtcgggttcgtgtcgaaggaaatgatccagactcattgcccagcgcctgccgccgacattcagttttccgttttcaggtattgcgatgtgggcctcctcccatgaacaaagccatggccgcgcacctggacgagccttggctacacgaaggagatgcagttccagttctaagcgtagctgttacattctctctaccagtaccagaataaacggcggtggaacaagtttcgtcgcctctttgagcagacgaagcctgaccctgtcgccatatagctccaaacagacgcggtttgccactctcatcagtcacag

SEQ ID NO: 18147 - DNA, 587 bp, Zea mays
  Coding DNA Sequence Number=SeqID_3744
gactacatcgcgacgctccacaagatcgacaagggagcattcgggtatgggtcgtacttctgtttgtcgctgatggacaagttgtaccgccctgacatgactgttgaggaagcggtggaccttgttgacaagtgcatcaaggagatcagactccggctggtcgtcgcgccccagaatttcgccatcaagatcgtggacaaggaggtgcccaggggctatgctacacgtgttctgtttgtcacagtcctgccaagttcaccgacccaatcatgactgttgaggaagcagtagatcttgttgacaagtgcatcaaggagattcggctgcgattggtcgtcgcgcctcagaactttgttatcaagattgtcgacaaggacggggcgagggagtacgccaggcgtgatctcgtcggtgacaatgcacctgctgaagctgcaaccgcagttgttgctgcctgaggcatgaactcgtttgaggttgaaatgtgttagttgtttctcagcgatgctacttatgcgatcacaggatactggtgggggtcccacaactgttttaacaattttagcccagactctgctgagtacaag

SEQ ID NO: 18148 - DNA, 422 bp, Zea mays
  Coding DNA Sequence Number=SeqID_3745
aggaccacactatcttgcatcaaagcatgtatctacactggctcctggtgatcaaccagcaggatcatgtataaccattcagcctgtttgatactgactactctcatcaataacacctactatcatcaaagcaacctgccgctctgaaccccgatcgatctatttaccagtaaaacatgttactaccagctcaactcagcttgactcgaacgaactgcctgtgcattccttcctagacgagcacgaactgaagctggctgcttaccagcagctggcggttaacctacgcatccatcctgactagttcaacaatggcgggccttcgtccagccagatttgccgaagctgcctttctactaccaacaacgcagcatacgccggcgaccctcttacagatagatcattagttgcccttcagtcat

SEQ ID NO: 18149 - DNA, 179 bp, Zea mays
  Coding DNA Sequence Number=SeqID_3746
accacctacgccatgttagagacaaacacttgtaaagggcgacctcatgctctgatgcatcctcaatcgagcattggtgaacaagctttccccacttgggaatgtcccttttagttcacagaattctacatgttgggtgtgttaggcttgcaatagtagaaggtgtattgttgcccaat

SEQ ID NO: 18150 - DNA, 524 bp, Zea mays
  Coding DNA Sequence Number=SeqID_3747
tcgtcgcgcgttacggcccggtcgtgtccctgcgggcagggccgagcctgtcggtcttcatcgctgaccgccgcgtcgcgcacgcggccctggtcgagagcggggccgcgctcgccgaccgccccgccctcccttcgcgcgctcctgggggagagcggcaacaccatctcgcggtccagctacgggcccgtgtggcgcctcctgcgccgcaacctcgtctccgagacgctgcacccgtcgcgggtgaagctgttcgcgccggcgcgcgcgtgggtgcgccgcgtgctcgctgagaagctcgggcgggaggccgaggaggcgcaggcgagggcccaggcgccgccccccgcgatggaggcgttccggtacgccatgttctgtctcctcgtgctcatgtgcttcggtgagcggctcgacgaggccacggtccgcgcgatcgctgccgcccagcgcgagccgctcatctacaggtcgaggaagatggccgtcttcgccttcctgccgtcggtgaccaagcacctcta

SEQ ID NO: 18151 - DNA, 466 bp, Zea mays
  Coding DNA Sequence Number=SeqID_3748
gacaacggctgttcacgattcagaaaatggatgcggcgacagtggtgtggggggtgatagcttgggtgagcgacatcagttgccaccaatcagagtataccagggaagagccatctccaggagcagcgtgagcattggtcgaaggacggtccctaaggtagttcacgagtgttggtggggcgtcgagcccatgtgattatgttagttgcgttcagtactgtgtatactgcgcaagcacgacacatactgacatagtgtcctcagttcatgcactgttagcatgcatgcgctggtttactacaatcagagtggagtcacgctactagcaagcacgagtggacactaattgacaggatgcgtgcgtggacacctgctcgatttgtgggcacatctccgctcacaaagagatatcccagagaacttagcgcaccagacgcgctgactagcacggctcaccttgattggg

SEQ ID NO: 18152 - DNA, 336 bp, Zea mays
  Coding DNA Sequence Number=SeqID_3749
tttggaagcacttggtcgtcgggccgagcgcaacaatctcactggggccgacctagcatccctggtcaatgaagcagccatggcagcactggaagagagactggaattccgtgacaaggggacatcctccctgagttcgtgaggcctgattgagaagccgcccttcgaacgtgctccaacgaagatcaagcccccaggatctgaacagcaaatcaagaattatggggggttggcaatgagaaccccggcaaactgacccccccccagctggccccatgttaagtggggaccccaggacaccctagtgaaaaaaatgcaacctttcgtatgcctcgc

SEQ ID NO: 18153 - DNA, 415 bp, Zea mays
  misc_feature (337)..(337): n is a, c, g, or t
  misc_feature (381)..(381): n is a, c, g, or t
  Coding DNA Sequence Number=SeqID_3750
cgggattgaagccaattcaaccaaaatccaggccatcatcaacatgacgcccccgcagtcagccagagatgtccaacgactgacaggcagattggccaccctcaacagattcatctccaagtccgcagagcgaagcctccctttcctcaaaacactccgtggcgcaaaagacttcgcatggggaccagagcaggcggcggccttcgcttcattaaagcagtacctgtcagagttggcgattcttacaagccccgaccccttgctacccctgttgtctacatcgcagcttcgccgcatgcggtcagcacaacactggttcaagatccgggtcacctanacaggggactcggagaatgttagaaatccggagcatcagtccanatggcaatggcagccgactattggttccacatac

SEQ ID NO: 18154 - DNA, 391 bp, Zea mays
  Coding DNA Sequence Number=SeqID_3751
aatcgtccacagataatcaaccgcccttttgcccgggatgtaatatgaggtgctcgaaaaacctgaagatatcttggtaggaggcaccaatctaccgcagccgtgcacagagttgctccagcagcatcctccctccatgactggtggaatccctggcctacgacagcagctcggcgtccttctccgaccggacctgcgagaagtccagcgcctcggtgatgcttccgaacagggactgcttgtcgccctcctcgtctcccttcgcataagctctcactgatctggggccgccaccgctcggcctggtttggtgagctccaaacgaggagctcctggaaggggtcagcggaagcgctctcatggccattgcttttgcttcaggagttcaggt

SEQ ID NO: 18155 - DNA, 255 bp, Zea mays
  Coding DNA Sequence Number=SeqID_3752
ctcgcgggtagatgcgcccgttgctgcgggggtggtgtcgggtgctggacggaggactgccgagggctcggggcaggtgtctttttcttcggacgaggggccggtacggtttttggagatggctgtgtcggtgaaggacggtattgagcggcagcagcgtgttgctgggaatgaggcatgtgttgagcgcttggtgaggccatggcctggtgtgatggagggaccggcaccatttgactcgggaatcgaggtgaa

SEQ ID NO: 18156 - DNA, 488 bp, Zea mays
  Coding DNA Sequence Number=SeqID_3753
atccaccgtacacctttgttatcctatccctgtctcgtctgggggaaccagcctttgaagtcaacgcagacccagcgatccttgtcgcgcgttcttcactcctgctcggaattcggctcgagccccccccccacggagggaaggatggcggcgcccaaagcggcggccggcaggaagacgggggtgggcccgtacgaggtcggcaagaccatcggcgagggcagatggaccaaggtcaaccacgcccacgactcctgcacgggcgccgtccgcgccatcaaggtgctcgactcgcagccacgttctacgccacaagatgggcgagcagatcaagcgggagatttcgactatgaagctaattcaaacatcccaacgcggttcagctgcatgaggatatggcgagtaggacgaagatatacatggcttcttgaatttgctgaaggaggccagttatatggtaggatcgtaaatctcggacggctaggaga

SEQ ID NO: 18157 - DNA, 509 bp, Zea mays
  Coding DNA Sequence Number=SeqID_3754
ccagcagaggcttatcttcgcaggaaagcagctcgaggatggccgtaccctcgccgactacaacatccagaaggagtcaaccctccacctcgtcctccgtcttcgtggtggcatgcagatcttcgttaagaccctcacaggcaagactattaccctagaggttgaaagctctgacacaatcgataacgttaaggccaagatccaagacaaggagggaatcccaccagaccagcagaggctgatcttcgctggaaagcagcttgaggatggccgcactttggctgactataacatccagaaggagtcgactctccaccttgtcttacgtcttcgtggtggtatgcaaatcttcgtgaagactcttaccggcaagactattactctagaggttgagagctctgacaattgataatgttaaggccaagatccaggataaggagggtattcccccagaccagcagaggttgatttttgctgggaagcagcttgaagatggaaggaccttggct

SEQ ID NO: 18158 - DNA, 505 bp, Zea mays
  Coding DNA Sequence Number=SeqID_3755
caagttacaagctgggtagttcaccctccaggggacatgcatcatgccttgaatatgctaatgcacaatcagtcgacctaccatgtgcctggaggaggtcgaggtggagagccttattcaggtggcactcctctgcacgcagggctcccccctggaccgtccaaagatgtcggaggtggtgaggatgctcgaaggtgacgggctggcagagcgttgggacgaatggcagaaagtagaggtggtgaggcaggaggctgagtcggcaccgctccgcaatgactggatcgtcgattccacgtacaaccttcgtgccgtggagctgtccggcccaaggtagccactccacgactccgatgaaagaaaacactgaattggccaagattcagtctaattgctgcttgtgtatatgaaaggtagcttttggaattgttagcgacaatttgaaaggatcttctttttttttttggattccccgctagctcaaatgttggttacccttaggttg

SEQ ID NO: 18159 - DNA, 577 bp, Zea mays
  misc_feature (519)..(520): n is a, c, g, or t
  misc_feature (537)..(539): n is a, c, g, or t
  Coding DNA Sequence Number=SeqID_3756
aaggctgtggcagttcttggcaacagtgagaatgtcggtggaactatttacttcaatcaggagggaaatggcccaaccaccgtgactggaagtcttagtggtcttaagcctggcctccatggcttccatgtccatgcaatgggggacaccacaaatggttgcatgtcaactggagcacatttcaatcctcatggcaaggagcatggtgcccctgaggatcagaatcgtcatgctggtgatctaggaaatgttaatgtcggtgatgatggaaccgtcagcttcactattactgacagtcagatccctctgactggaccaaactccatcataggaagggctgttgttgtccatgctgatcctgatgatcttgggaaaggtggacatgagcttagcaaaactactggaaatgctggtggcagagtagcttgtggtattattggcttgcaaggttaaacctccacgctcaacctgcggggtacatgaagtaacatgcgtgatcatatattgaggaagctttannattgtggaataaactcnnncatctcatcttttgtttggttagcttcgatctgtactt

SEQ ID NO: 18160 - DNA, 548 bp, Zea mays
  Coding DNA Sequence Number=SeqID_3757
aattcctttgttccaatcaagcgggggcagcctttttcagggcggggccgcgggatcaatccaacataagcatgctgcaaacggggaaggcactcgcattcaacaatgctatagcagggctcgctttatggggggggctgagcatgagcatacatcagccaagatattgcgtggaaaatcccgcggaggaaatacgataaaggggctgcctggaaccatgggacaaacggccgtcggggcacattctcgtctaactcggtagcagtaactcgggcccacgttctcattatgtgcagatttctttccatgctctcgttgctgttcatgcggtgaagggggctccagtcgtgggacctgtccatgcactggcagaagaggagacgtgcttgaaggtcaagcagaagctaggtgttgcagcagcaccatgttgttcgagctctccggtatatctggatggatgcctagtatcagctgatgtcctgtcgagtagtcgagattggggatcatgcgggggttgaggggtcttgcgatcacggagcgcgagatta

SEQ ID NO: 18161 - DNA, 434 bp, Zea mays
  misc_feature (243)..(243): n is a, c, g, or t
  Coding DNA Sequence Number=SeqID_3758
atcatcaccatctcttacaacaaatctcaggcggctcaacactatcctcttctacattttccaacgatggcctcaaacgcactctcgtctttcaccgccgctaatcccgctctgtctcctaagccactactccctcacggctctgcttctccgtcggtttctctcggcttctccaggaaagttggcggagcagagcagtggtcgttggagcggctacgggggacacaaacaaaatgccgatgnaccggagtcgtggtccagcctttcgaaaaggtgaagaaaggcgatctgggcattccaatcacatctcatggctctctcgtcggccagaaggttgccgacgtaagcgaggcagtcattaatgagcaaatcaatgtgggaatacaacgtctcctatgggtaccatttcaatggtacgcatactttgacagaga

SEQ ID NO: 18162 - DNA, 348 bp, Zea mays
  Coding DNA Sequence Number=SeqID_3759
gacaacataaccgttcggctcgtcgacctcaagtcacataggaagatcaagagcagagcataaccgtggattcggtaagacttggacagtagaaatggttgttactaccctaggacgctagaaaggtggagaaaaggctcctgttcagtctgctgcacatgtacactggttggcccaacactagtctttttccacaaccatataggctgccacgtttgttcagggactcatacacagatctaatctggttagaaattgggctgacgaggtaaggtaaatctgaaatatatatatatataatatacatatgtagattccaaatagctattactgactgggtttggggca

SEQ ID NO: 18163 - DNA, 597 bp, Zea mays
  Coding DNA Sequence Number=SeqID_3760
taaccaccgcggcagctgcgaaaaaaaaaaaaaaaaacctgcgaccgcgaggagtggcgcacgacgaccagcgcggaggaggtggagcctgcggcggggagatttgctcgcccggctggggttgcggtgggaagagggtaggaggcagagacaaccagcgatggcggcgtccgcgaggcccggggagagggcgaccagcttcgccgtcgcgtgcagcctcctcagccgcttcgtccgacagaacggcgccgcgcccgcccagctaggcctcgggatcaaaggcgaggacgagcagcaaaggacgccggcgacaattaacttgctccccggagcggacggcgaggagaccgagaggaggaaggagaccatggagcttttcccgcagagcgccgggttcggtgtcaaggatcccgctgctgcccctagagagcaagaaaataaagagaagcctaaacagctcacaatcttctatggcgggaaggtgctggtgtttgacgatttccctgccgacaaggcaaaggacctgatgcagctggcgagcaagggcagcccctgtggtacagaacgtttgtttttgcctcaccctcctgcacttgt

SEQ ID NO: 18164 - DNA, 424 bp, Zea mays
  Coding DNA Sequence Number=SeqID_3761
aaaatggctcacctcttcagagagctgtctctgggtcactccaagcgagagacgacgccgccgccaccgtcgatggcatccacgattccctccgatctaccaccgtctccactcggacaactcgccgtccagttctccgaatccgacctccgcctcatttcctacgagatcttcgtcgccgcatgccgtagcgccaccgggaagcctctctcatccgccgtctcgtcactctccgttgctaatccggactctccgagcaacggcgcctctcccgcttctccagctgcccagcgttctctgaccgcagccgccgcgagcaagatgaagaaggccttggggatgaagtcgttgtcatccttatcgcctggatctaccaagagccctggctcgggctctggttcgggctctggctcgggtggtaagt

SEQ ID NO: 18165 - DNA, 351 bp, Zea mays
  Coding DNA Sequence Number=SeqID_3762
tgatgaaacccttgccaaatatgaggtggaggagtaaccagaatagctcccaaaccaggtccttgttgagattggcgacgatgtgggttctcagctctctccggttcttaaagggcgcatcgacgctactaacaagaaagtcgataacggtcaagcacgtcgtgcaaggaacgtggcggctctggtcttttagaaccctctgtctgttaagtttgaggttctggacaggcgaatggcatctctgcgcccgtatctgagtgtgagttgttgaagaaagaacgtgtttgtaatgtgaatacaaaacagagccatctgcccatgatacgtgttgccctgctcttatgtataatt

SEQ ID NO: 18166 - DNA, 390 bp, Zea mays
  Coding DNA Sequence Number=SeqID_3763
gacaacgacgatcatgatggcgacaatgacaagaagaggcagccaggcgtcaagcgtgcctgtaatgaatgccgtcaacaaaaggcaagtctgtctacgtcgctcacattatttctagttccttgcctacgtttagttcgaagagttactaacgccattttctgaaacagcttcgctgcgatgtcgttcaagaaccttttcaaagctgctctcgttgcaatcgcctgaagttggactgcaagatcgaatccaacttcaaaaggataggcaagcgctcgaagcatgccgaaatggaaaaggagatagaacgtttgcgacgaagcgtgaaccgcgcgcagcttcagggctttgtacctgacgaagaggaagatttacaatcgcctctggcgc

SEQ ID NO: 18167 - DNA, 164 bp, Zea mays
  Coding DNA Sequence Number=SeqID_3764
tgacatcccgtctgccgatgccagaatcggtcccgggaggcaacgccacgagcagaagcccccggcccacatgggcacgcgggcgccggaggatcggcgcgcgcggcgagccgcgcgcggcagcccgtgcgcgagacggagccggatctcgtcctgtgctctct

SEQ ID NO: 18168 - DNA, 162 bp, Zea mays
  Coding DNA Sequence Number=SeqID_3765
gctatctatcttcttcgagcgtcccctgccaatacggaactttcttccatgctcaacgaattggtttatcccctggattacggattgtttttatgttttataccccaacaacgaatgtttttcagtttttttctccagcaagcccctatagtaaagattttt

SEQ ID NO: 18169 - DNA, 444 bp, Zea mays
  Coding DNA Sequence Number=SeqID_3766
catcatcgacgcctgcgaagacgacgcccgcgaagacgacgcccgcgaagaaagctaccgtggagcgcaccgtcatcggacagctctactattcccgcccgcacgaccaagcgtacccccacgggtccatgtacacgcatacctgggacttaatcgagcttttggcgaaacttcaggagaaagaccctgttgtcatgggcgaagaccaggcagttggaaagctcctccagaacgcaggggagcaagttcacctcgtcaatatgaatgccaccgagaaattcgactacgacgacgccgatgcgcgaaccgctgactcaccatgggcacgtaccgctacacatccgatggccatgttacacgccctgtacggccgcgatgagctcgccgtgcaccagctcaaggatcgtaacctcttcatgaagattgccaatgcgttcgactcga

SEQ ID NO: 18170 - DNA, 241 bp, Zea mays
  Coding DNA Sequence Number=SeqID_3767
gccgttggactgataaattaccatgcttgagttgaaggtgaggaatagtaagccaagctcctgtgatccagtagaagtctttcattactgcagccgaaagatatctctgctgtccgaaacatgtcagtttctttaatccctcgccctatcagcaacgaaagccaacaccccggcgaggacggcggcgaccagcgctacgcctcccgtgcccatgtcgagcgaagaagcaaactgcaaccac

SEQ ID NO: 18171 - DNA, 549 bp, Zea mays
  Coding DNA Sequence Number=SeqID_3768
ttcacggtgtcactttctgttgtgtgtgtttttttttttttgcttcttctttgcatcacttgtactcagccgaaaaaaaaaccttggtgctcatggccacttctggttacacttatactcagatccaaactcatgtattcggtccctctcttcttatgaatgtatgtatgagatgtgtcttgttgtaatctatgggatcgagtacggaggtctaaaacgtgggtctggttccttttgcgtttttgtctgtgatttacgcgtggatctagtcactggattaaactaacagtgctctgtgcacttcgaccgatccggattttagggttaatttagttagggctcaaccctaactggatctgcgtttctgttacttgactctgtttcttggccgtggatcgttggatcctgagccctgtgcaccgtctctgttgatggtgtgccgattagggttaggtcgtaaaccctaaccctaaacagttgtgcagtgctctccctggtttgaggccgagacacactgcgtctcttacattggccaaacctaaatcttag

SEQ ID NO: 18172 - DNA, 474 bp, Zea mays
  Coding DNA Sequence Number=SeqID_3769
acaacactgtctcttcagttccgatcccacgcgccgccatcatggtgaacgttccaaagacaaagaagacatactgcaagagcaaggaatgcaggaagcacacactgcacaaggttacccaatacaaaaagggtaaagattgcattgctgctcaaggaaagcgtcgttatgaccgcaaacaatctggttatggtggacagaccaagcctgtcttccataagaaggcaaaaaccaccaagaaaattgtcctgaggctgcaatgtcagggttgcaagcatgtttcccaacatgctattaagaggtgcaagcactttgagattggtggtgacaagaagggcaagggaacctctctgttctaggttcagaattaggatttgcagtttttctgtttttgctatattggaatgttttgtttctctatgaatttatggtagctatattttatatttgcaacatcttttgtgattgagaagt

SEQ ID NO: 18173 - DNA, 545 bp, Zea mays
  Coding DNA Sequence Number=SeqID_3770
ttctgctcactgcaatgaagccgtgcctcaaaattcaacttgaccagcacaaacgacaatgttgcactgcactatgttgcatcgcgtcaaccgtgtcgaggttgtcatgaatgaaattgttgatcgagttttgcaaaactatcagctcaataacccactagacgctgcgagcgtggtcgaatcgagagagaaagtttcccagtatgtcgcaaagcttgcgtcggcagggcagaatgatcgtcgtcggctcatcgtttttgcgagggcttatttgaaagagctacatcaggggccggatcgacggtttaccggctgttgaaggagttcggcttcgccggcggcttgtcccgttcacccaaacctccgttcggcgcgttagaattaggtcagtcgtattaacttagcggtgctgtggcattgtttcgcgcgagtgaaacgtcgcattctcagacgttcgctcggcgttgtaggatcaacgattattggcgatggtaggtttggattgccgccgcaaatgccggaccctgctttgtcagttgtgattg

SEQ ID NO: 18174 - DNA, 514 bp, Zea mays
  Coding DNA Sequence Number=SeqID_3771
gagaagatctttaacaccatagtgcgcgcagtgctcacacggtcgacaagggcgccggccacaagcaaggtccaaacttgaacggtctttttgggacgcagtcgggtaccactgcaggctactcctactctgcgtcaaaccataaacaaggctgcagtctgttaataagacactttgtatgattacctgcttaaccctaagaagtacattcctggaaccaagatggtcttccctgggctgaagaagccgcaggagcgtgctgatctcatcgcgtacctgaaggagataactgtgtagttcattgtacatgacttttgccatgaagagaaaaattgttttgctgcttaataaaaaacattttacactgtttgtgtcaccctgcttgaacagggtgcaaccacgtctcattattttcgttcttatggtgcccgtatgaaatgcctaagtgtttagctgtgcacgaataacaggtagactttgacgactactatttctactgctgcacaagagacag

SEQ ID NO: 18175 - DNA, 388 bp, Zea mays
  misc_feature (359)..(359): n is a, c, g, or t
  Coding DNA Sequence Number=SeqID_3772
cgataagcttgacgagctactgccgctcggcgagcactacaaatccgtggcgctgtggggcctcggagggtcagggtatggactttgcattgtgacatcgcgacatcacgttgagcttccgctgatccttgcagcaaaacccagattacgcttgagtacgcgtacggacggttccagcccaacgtgtgcggcgtgttctaggtgcaagccgacagcgaagccacgtttacgcacgactataagtcgatcgcggccaagctgagggtcgacacaaggcttgagggtgaagacctgtttgaggcggtgcgcgctgcgatcgaatcccaccatcgtgggtcctagttctcgcaacgcggacnactgaggctgttcggctagcaatcacgga

SEQ ID NO: 18176 - DNA, 598 bp, Zea mays
  Coding DNA Sequence Number=SeqID_3773
aagttctgtaatcttggcatctgaagctgcaaagatggaccaagtgaatcgagcacaaggtgaggctgaagcaatactcgctagagcagaagcaactgctagaggccttgccatgttatctcagtctctcaaagaaactgggggagtagaggctgcgagtttgagagttgcagagcaatacattcaagccttcagtaacattgccaaggagggtacgacaatgttgcttccaagtacagcttcaaatcctgcaagcatgattgctcaagctttaacaatgtacaaaagccttgtcaaccaaggtccaaagagtgaacaccaagaaacatcagcaatggaaggtgactgggaagacataggtgagaaagagatatcagaaggctccaaaaaccaatcaggctcaacaacattcgaaacagagaaaccaggtcacaccggtggaccagtattttctcttcagagtcgcactgaggagccatagtagccagccaaacaaagaatgagagatttctatgtgtgtgcctgagagaacagaaaattcatcttttccagtttaaaaaaaatgagacactgtcgtcgtccccgtttgaagggcttg

SEQ ID NO: 18177 - DNA, 514 bp, Zea mays
  misc_feature (286)..(286): n is a, c, g, or t
  misc_feature (393)..(393): n is a, c, g, or t
  misc_feature (411)..(411): n is a, c, g, or t
  misc_feature (449)..(449): n is a, c, g, or t
  misc_feature (465)..(465): n is a, c, g, or t
  misc_feature (475)..(475): n is a, c, g, or t
  Coding DNA Sequence Number=SeqID_3774
gaaggctatgctgtgctattggaaaatgttgtcaagttccccactgatgcattacaccctttaactgttgatgagatacctttagctctgaaaaaggagtggaaatggcacctatttgaggatgtgaagcatttacaccatatgaatacgagtttgtctagctacaagatactcaagaaactagagcaggagtggcataaaaaccaaatggagaacttttctttgagtacaacaaagatagttgacaccattctctgcaattgcctgggaagaacagaagagcaantggaggttatggacatcaaaagaaaaatggaggaagaccaatttgaaggccaggaatgaccaacctcatggaaaatggggaaggaggggtccaaaaatgtgaaaaanggtagggggggccccggnccccatttcgcccctatagtggagcgtattacaattcnctggccgtcgttttanaaccgtcgtngactgggaaaaccctggcgttacccactttaatccgctt

SEQ ID NO: 18178 - DNA, 529 bp, Zea mays
  Coding DNA Sequence Number=SeqID_3775
ggtttcaacctgctgttggccgaccgcgagtcgttgtggtacctatccaaccgcgcccccgagttcgctcgctcactgcggcccggtatttatgggctttccaacgagctgctggatacgccgtggccgaaacttcaacgtgtccggcgccgcttcgacccgctggtgaaacagcctgacaacatttccagcgacgctttgttcgagatcctggccgaccctacccaggccggagtcgatgacgtgctgccggataccggattgtcacgggagtgggagcagcttctgtcgtcccccttcatcagcaataaagactatggaacccgctgttccaccgtcctgctgctggaaacctccggtgcggtttcgctcacggagcgccgtttcggcccccagggcattccgctcagcgatacccgtttcgacctcgccgccaacgaatggccgtgaggctgcgcgccggcccagctagaatctaagtcatcttttgtgaccgcacacgttatatcgcaccgttttgatggcgcag

SEQ ID NO: 18179 - DNA, 281 bp, Zea mays
  Coding DNA Sequence Number=SeqID_3776
cagggagggagctttgccccagccttgaaacttatagcaatttttcacctcccagatctacggcaggctccaatcggcttcagatttctcaagtccctagaaacaacatttttttatgatatgcatcctacttttgaaagcaacattgaagaaagaaatttagagcgtattgcatacatattcgggacaatggcataagtatggtttgattgtgtgtctacgggtaaccttatgccctccaccgaaaatagggcgggttgcattggcgaaaggtccgtgat

SEQ ID NO: 18180 - DNA, 503 bp, Zea mays
  Coding DNA Sequence Number=SeqID_3777
aatcacaatcctcaaactcaaactcaaagctacttttcacattccaaacactctcaaaccaaactctttccatccaaacctcaatcaacatgtctgccccaaacgttgacaagcctaatgagggcatcgtcggtcaagtcggcaactccatcagcaacgctgccaactacgtctccgagagcctccaaggcaacgccaaggaagccagcaaggaggccaacaagcaacaagccaagggcaatgctggtgacacctctctcaccggccgtgccagcggtgctctcgatgccgccggcgacaagctcgaccagtcaaagcacgatagtgctgcgaaagccaacaaggaatccatttgaggttctccacggttcgatcatcatgaagtgacggcttctctacacgacgttgatggatccttgacgagatgatcatcactgttcgggatgttgggtcaagacgagatatcctgatggcattgtaatcgtcagatagctttgttaagc

SEQ ID NO: 18181 - DNA, 182 bp, Zea mays
  Coding DNA Sequence Number=SeqID_3778
caacacttgattttagttagacaaataaaatttccgagtacgaagccctgcttatcggtcttcggaagctaaaagcaatgggaatcagaagggccatgctaaaaactggttctgaggttggactttatctgggcatcataaaaagagttgcaaggttcaaaatccgaagcttgggccttcgg

SEQ ID NO: 18182 - DNA, 398 bp, Zea mays
  Coding DNA Sequence Number=SeqID_3779
aatgtgtagacattggtgtacgtcatctaaacatattggtgagcccccgatctcatcataactgaagcactgtacttttaccattgtaaaatctgtcttttttgggccaattatataaattacaaaattgcatttttggattttatggacattatgatttgatcaactcccagttaattgagacacttgctatctgctgacaaaatattgttgatgtccactgggccccccccaattgcagcctttgtttcctggtgaaagtggtgttgatcaactggtggaaatcataaagattttgggtactccaacaagagaggaaatcaggtgcatgaatccaaattattctgaattcaagttccctcagataaaagcccatccatggcacaaggttagggatc

SEQ ID NO: 18183 - DNA, 485 bp, Zea mays
  misc_feature (358)..(359): n is a, c, g, or t
  misc_feature (362)..(362): n is a, c, g, or t
  misc_feature (399)..(399): n is a, c, g, or t
  Coding DNA Sequence Number=SeqID_3780
ctcggcgtcgtctgtcgtctgaggtctcctcgcgcgcgtcctgacgtcctccgctgcccgactccggcgtcctccccaccgacccatccacagctcaagccaacattcacccgtatcccgcgcgcgcttgattcgccgcatctgagcgtcacggccgcgactgcgcgccctgcgtcgcctcccgccgccgccgcacggccgcgacggatgctcggccaccgcttccccgccgcgctcggcctcccgcgcggtctgctgctggggaggagcgtcacccgccgcagtctgtccgccatggccggtggcgaggcggggggcccgctcgggggtttcttcgattacatggagcggctgcgcnnctncgagcgctcgggcgtgccgcgcggcgccggcaccgantccgacgacggattcgacctcgggcgcatgcgccgactccttcgtcggctcggcgatccccacaccgacttcccggctgtgcatat

SEQ ID NO: 18184 - DNA, 286 bp, Zea mays
  Coding DNA Sequence Number=SeqID_3781
aacgcggggctcttcggtgcagaaaagttgaacgagggcaggctttggtgcaaagacgattgacctaagggcagcgtgtgggaggttattctgcgtctgtcatcggcgtctctcatgttctctttggcgcgattggcgcagcgcaacgagtcgtcgtttccggtcgggtcgtcagagagagaaagagagcagatccgataataagatgagattgcaggtatggactaaaggcgaggtagggaagaggatgggatttcgtgggtcccgtcacgcgatgagcggaaaa

SEQ ID NO: 18185 - DNA, 462 bp, Zea mays
  Coding DNA Sequence Number=SeqID_3782
ctctctccgattctgagttgtattaatcaaagcgatggcagcagcaccagcaagagctcgtgccgattacgattacctcatcaagctttttcttattggcgacagcggtgtcgggaagagttgtctgcttttgagattttctgatggttccttcacaaccagttttatcaccaccattggtatcgatttcaagataagaaccattgaacttgatggtaaacgcatcaaattacaaatctgggatactgctggtcaggagcgatttagaactattacaacagcttattaccgcggtgccatgggcatcttgctggtttatgatgttactgttgaagcatctctcaacaatattaggaattggattcgcaacattgaacaacatgcttctgacaatgtatacaagatactcgtgggcaacaaggctgatatggatgaaagtaaaagggctgtgcccacctccaa

SEQ ID NO: 18186 - DNA, 502 bp, Zea mays
  Coding DNA Sequence Number=SeqID_3783
atggacatccgagatccaacggccaagacggtcagggtagctggtcctaagtgcggcggcgccgctcgacctcacagtgagatctcgatggagatgagggaaacagccacggcagggctctggggacttggggaaggactcgggcgtgttcagggcgacatggcgaacatgatcatgggcacaacaccggcgcgggggcaccagagggcgcagaacgcggtggggtggcccaacggcggcgcggatctactccgggacgcctcgggtcaaccgtggcggagctccgatagcacgacgagaactccggtgagcgcggactgggtgaaccgaggggtgtccgaggctgctgacgacgagatggaactcaccgaggtagcggacacggtggaggctcaacggcgaccacagatcgggcacgagaccacggtgagcggcggcggaacttcctggggctcaggcacgggggtcgtggccgagaaacacacggtcgtgggcacgtcca

SEQ ID NO: 18187 - DNA, 559 bp, Zea mays
  misc_feature (30)..(30): n is a, c, g, or t
  misc_feature (39)..(39): n is a, c, g, or t
  misc_feature (58)..(58): n is a, c, g, or t
  misc_feature (87)..(88): n is a, c, g, or t
  misc_feature (119)..(119): n is a, c, g, or t
  misc_feature (137)..(137): n is a, c, g, or t
  misc_feature (156)..(157): n is a, c, g, or t
  misc_feature (212)..(213): n is a, c, g, or t
  misc_feature (222)..(223): n is a, c, g, or t
  misc_feature (234)..(235): n is a, c, g, or t
  misc_feature (243)..(244): n is a, c, g, or t
  misc_feature (271)..(271): n is a, c, g, or t
  misc_feature (273)..(274): n is a, c, g, or t
  misc_feature (287)..(289): n is a, c, g, or t
  misc_feature (297)..(298): n is a, c, g, or t
  misc_feature (307)..(308): n is a, c, g, or t
  misc_feature (339)..(340): n is a, c, g, or t
  misc_feature (358)..(359): n is a, c, g, or t
  misc_feature (371)..(371): n is a, c, g, or t
  misc_feature (394)..(395): n is a, c, g, or t
  misc_feature (419)..(420): n is a, c, g, or t
  misc_feature (427)..(428): n is a, c, g, or t
  misc_feature (437)..(438): n is a, c, g, or t
  misc_feature (447)..(448): n is a, c, g, or t
  misc_feature (464)..(466): n is a, c, g, or t
  misc_feature (485)..(486): n is a, c, g, or t
  misc_feature (498)..(499): n is a, c, g, or t
  misc_feature (524)..(526): n is a, c, g, or t
  Coding DNA Sequence Number=SeqID_3784
tcgcgagctggcctgcttaacctttttcancacccttgnttcctcccaccaatcatcncagcccttattacccgcagttaccctttnnggtgcatttattgggcaccaaaacatcaggngcacaacaactaccaacncaactcgtgctagcaaacnncttgctgcctactctcagcaacagcgagttaccttcttccatttcaacccaactnnaggttcatnntgaactctgcnnttcttatnnttgcaacaaccaacccaactaccattncnnagccagctacccnnngctgcctnnacccccagnncaatttctttccattttcaacctaactagcnnagcattgaacctctcctnngcttatttacgnagcagcaacccaactacctaccnnattcagcccagctttagctggtgnntgagccnnctgctaccnnttcttgacnnacaaccacagttgttnnngccgttcttacccagcacnngttgcgccttannacgctggcaccctctcttaccaacnnngcaacaattgctttgccattcaaaccaactttg

SEQ ID NO: 18188 - DNA, 380 bp, Zea mays
  Coding DNA Sequence Number=SeqID_3785
atgtcgggtttctccacctaaggcgaaacgttctcctcgtcgtctccttcacctccatctctgttggtcccttttccctcacaaccggcttcgtctccgtcaccagcgtgacttgactgtctccgccatcctccacgataactcaccttcgtctcttcctactcgacaaacccgaaatcgttttcacctcaatcacatccggcttcaactacaagttactctaatctggtctgatgatatacgtacgtgatattggcaagataatagtaacagttccacgacaacttttatggaaagaaaaacaactatttcttggtgaaacagttcggcagaggcaatgctaatgtttaatttagcaaagagagcaacaacctctacaa

SEQ ID NO: 18189 - DNA, 571 bp, Zea mays
  Coding DNA Sequence Number=SeqID_3786
tttatcgccgggtctttccctggcttggtctaccagggcccaacctttgtccccaacccgttttccctcgccgccacctcctttccccattcccacccctctcccaaaccctccacagccccacccccccctcgcccctaacctcaaccccaacacccgtccctcgccgtctcacccccgttccttccgccccggccaaactcccccccccttctccctgtgttccattctcgtccaccccccccgtcagaacgcactcccgccctctccaatcccctctccccccctccccaccccacccccacccctcccccccccttcctccccccccacaatataccaccccccccccccatcacgacgccgtctctccgccaacccctccccatctccccggctcagcgccacaaggccttcccaccacgcagtctgtttccacccccccccataaacccctcacgggacccagattatcacccctcagtccaaatcaccacccccccccccgcaggctctcccacgttgccccccccccccccccccacccataatagcctcttctttacacccc

SEQ ID NO: 18190 - DNA, 403 bp, Zea mays
  misc_feature (146)..(146): n is a, c, g, or t
  misc_feature (330)..(330): n is a, c, g, or t
  misc_feature (367)..(367): n is a, c, g, or t
  misc_feature (370)..(370): n is a, c, g, or t
  Coding DNA Sequence Number=SeqID_3787
ggagtttaggcagcagtttaggcacaatggaaagttcttcctaggttcgaacaaagtgatgcaggttgctcttggtcgttctgcagaagatgaactccgttctggtatctacaaagtctccaagctgcttcgttggtgatactggncttcttgttactgatatgccaaaggaagaagtccaaagcttatttaaccgcttatgaggattccgacttttcaagggaccggaagcatttgcagtacaaacggttgaactgaaggaggggccctctatacagttcacacatgagatggaccccttctttggaagcttgaaatgccttggccgantcgactaaggcaccgggcattgggcccgcggcctttngtntttcggcggggactgcatgacgacgtcctctcc

SEQ ID NO: 18191 - DNA, 286 bp, Zea mays
  Coding DNA Sequence Number=SeqID_3788
aatttcttcacttgattcattttgggaggccaggcaaaacgggagcttttttagtgcatatactccacttctctggaactgtttggcatccttgggatttaaaccttccaagccaacattttaaaggaagatgttgtgtcaaagctcttggactttattgctgaacctcactctgcagccgaatcttggggctctgatgaccacggatcaaattctaaaaaacgcaagagaggaggtgaaagtgcaagttatacgcctgatgacacacctattaagtctaggaaga

SEQ ID NO: 18192 - DNA, 398 bp, Zea mays
  misc_feature (78)..(78): n is a, c, g, or t
  misc_feature (112)..(113): n is a, c, g, or t
  misc_feature (122)..(123): n is a, c, g, or t
  Coding DNA Sequence Number=SeqID_3789
agagcctttcacaaccaggttattaattcattccgacttcaagggggtcctcactttatccggggagaaaacgcaagnggttacaggggcttttccccgatttacttaccgnnattgtttgnngcccgatcaagggagaaagtacattccagtcgggggcgcacgcgctgtccctgttgcccgggcactgggctactgtctggggcaagcctacctgggtgaatctgaggggagtgaccctctgtaccagctgcctccaagtttcacctctgttggaggacgcactgcggggcaggcgagggcctctcctgttggcacccctgcaggggaggtgcaacatccagcggcaggagcatttctggttcggttcgattcgggctcgtgcaacatccagcggc

SEQ ID NO: 18193 - DNA, 359 bp, Zea mays
  misc_feature (157)..(157): n is a, c, g, or t
  Coding DNA Sequence Number=SeqID_3790
ttttttccaccaccacactctagatggtaatgtacaaagggtggattacaagagttccattccatgcgagcgcgattgagttcgtccatccaacaaactagcgcagttattcatgctacacacagctcgcgtcccatgcgttcagaattttcagatnccagacgctggcacacccctcgatcaaaagagagaagagggcaggcaagaaaggttcagggtcgccagagctggcagagttaaggagccgtctgccggggtcgtcgtagtcttctccgctgaagagaagtcctgctcctcgtcgacctccacgtccaccgccgcctccacgtccgagagactggtgcagttgctgagcaagt

SEQ ID NO: 18194 - DNA, 312 bp, Zea mays
  Coding DNA Sequence Number=SeqID_3791
aatgagattcagttagagtgtcccccccccccacaaaagaatgatctacagcatctaaaactttacgcagagtttcagggatacctcatagttattatcattattgtaacgaacacgcgagaatattgcgagcccacgtcagagctgcgtcattctggatttgcacgaggctacagggcggatgctggggcttgcacgtcgcgccgactcactcttttttttttaaccctggtagctagtactggtcgccgtagcagcacttgcagaaataccaaggagcataaggaggcaaaatattctggctgccattgt

SEQ ID NO: 18195 - DNA, 234 bp, Zea mays
  Coding DNA Sequence Number=SeqID_3792
ctcatggaccttggacgcggcggacgctccacgtacaacagggagaacaggcctgctgcagatgtggtcgacagtcatacctgcgagtgagccatatagctagcgggctgcttcctctcgctagacgggactcatggctgtgccaaggcagagaccttcgatctcgtgagctgagttttactatactgttagttggtgatctctttgtgcagatcggtgcgtctctgcatgcgc

SEQ ID NO: 18196 - DNA, 478 bp, Zea mays
  misc_feature (392)..(393): n is a, c, g, or t
  Coding DNA Sequence Number=SeqID_3793
tcctgtcggccggatcgaaaatggtattattaagcccgggatggccggttacctttcgttcttccaaagttcccccttggaaggccaaggccgtttggaaggggccccacggaggcagtttttccttaaggggaaaacacccccgggggaaaaaacgttgtggtttttcccccccgggaaaaaaaaaaagttttttcccctccaaagagagaaccctcccccaacgggggggggaaaaaaaacccccccccccgggggggggggcccctcccccaaaaaaaaagaaccccccccccccccacgggagggggggggggcgggtttttttttttttttcccccccccccccgaaggtattatatttttttttttaaaaaaaacacacccccccnnaaaaaaaaaaaggggaggggtggtttataaaaacccccccccccccccccccacttttggtgtgacaacaggtgcggccccccat

SEQ ID NO: 18197 - DNA, 537 bp, Zea mays
  Coding DNA Sequence Number=SeqID_3794
gatgatgcatatggattaggttttcaattgatggttcagatggaagccacacttttgcagcgtgtaagaatattcactggctgtacagaaccatatttttgggtgttcgattttttcaagttagaaacttctgatgatgcatatgggaagtctgtcagaatatgcagcagccgaaatctgttaatcaaatttattagaaaaaaaaaaaaaataaactcgcgccgggggcgccgcgtgcccgagagctgcttcccattcatgtgcggcgctcgatgcggccagggaatttcgtggtgcatggctgaaatctgttatatagagcatatgcaaatacgtctagaggattcctctctctgcccagttcgacattatccgtgcacgtatcctgccctttcaaaatgacaaaggtttctacggactaatttttagcctttctgttttagtccttaaattattaaatacagtgactaaaagagagattatctctattttagtccttatgtttggcaatttagagactaaggtgtcgtttgattc

SEQ ID NO: 18198 - DNA, 504 bp, Zea mays
  misc_feature (268)..(268): n is a, c, g, or t
  Coding DNA Sequence Number=SeqID_3795
ttaggcccgccgctactgttatttcgagagaatttttgggctagcggggtgtgaacagaaacttggtgccccgctgctctgccttttgtcgtccactgtttcgcgtcaattctcgcgcgaaaagggatgggcactggagaggggtcgccgccggcgaggcggggcatcagcggtaggcgccgtcgatggccggacggagaggacgacgacgagtatgtgctggatgaggaagaaggagagggataccaaacgcagatgtattcaccgngtcgtcccggcaccaccggtggcggtccatggatcggccgcgtgaggcttacgaaggccccggagtacgccgcggggttgccgatgatgtgccggctgtcggagccccaggagtgcagcatcttctccggcggcgaccaggggggggtaccatggttaatgcgagtcggggcgcggtgcaggactcagcatgtgtactgtgcgcttgcttgtccggtgttttgtagctgtgtggtt

SEQ ID NO: 18199 - DNA, 210 bp, Zea mays
  Coding DNA Sequence Number=SeqID_3796
aacattgttggctgggtaagcagtgttctttctttctttcttttttttacctttttttaccccctttacctcgtcatgttggctgggttttctgcagctcaacaccctaactggggagcaccggctggaggatatcatcgatgagcgatgcggcgatgtggaggtggaaaccgtggaaaccatcctgggcatcgcaaccatgtgccccga

SEQ ID NO: 18200 - DNA, 100 bp, Zea mays
  Coding DNA Sequence Number=SeqID_3797
gcgggtacatgctttcatgagccgacgcggagacggacgtcaacgagatctgtcgtgcttggcaagtactagcgcacacaccttgcggcgagtacaacgg

SEQ ID NO: 18201 - DNA, 331 bp, Zea mays
  misc_feature (228)..(228): n is a, c, g, or t
  Coding DNA Sequence Number=SeqID_3798
catactagtgtactgagatcatctgaaactgagaagcacagctctgatggagatggcgacaaggtggttggagggtcggcatttggctggaacttcataacctctggagggccaggcactgaacctgtttattctggaatgtcaaaggaagaataccagaagctctcacccaattatgcaagtggaggcagagcttgagttgcccaacacattgtaaggtttgttagnggagttgggataataatattcactttgcgtatccgttcatccccatgtttaataagtataaaatgaaagaatggattaggttctacccatgaagccttaatta

SEQ ID NO: 18202 - DNA, 58 bp, Zea mays
  Coding DNA Sequence Number=SeqID_3799
cctcgaagcataaaggtgagttacctgaagcatctcctatcatagtgggcatctataa

SEQ ID NO: 18203 - DNA, 396 bp, Zea mays
  misc_feature (352)..(352): n is a, c, g, or t
  misc_feature (370)..(370): n is a, c, g, or t
  Coding DNA Sequence Number=SeqID_3800
aagacgggcggtccgcgcgtcgcgatcttggcggagtacgacgcgctcccggagatcggccacgcgtgcggtcacaatctgatcgcggcagcgggggtcggcgcgttcctcgcggcggcgtccgtcgcagcagaggcgggcggcgaggtcgtgctcttcggtacgcccgccgaggagggcggcggcggcaagatcaagctcatcgaggccggcgcgttcgaaggcatcgacgccgcgatgatgttccacccgttcgatcgcgacatcctcgcgcatcccgcactcgcgtcttactggtactcgttcacgttccacggcaagcccgcgcacgcggcagcggcgccacacgcangaacagcgcgctcactgnatgcatggacacgctgccctcatcga

SEQ ID NO: 18204 - DNA, 382 bp, Zea mays
  Coding DNA Sequence Number=SeqID_3801
aaaaataatggcaacgactgcatctccaatggcgagccagctaagattaagcttctgttctgctactaatgtgaggcgtctcgctgttcctaagggcgtatccggggctcctttcggcgtttcaccgaccaagaaaacgttttctttcaccgtccgagctctccagtcagacaagccaacattccaagtggtccaaccaatcaacggagatccattcatcggaagtttagaaaccccagtgacgtcaagcccattgatcgcgtggtatctctccaacctcccggcttaccgcacggccgtcaaccctctcctccgtggtgtcgaagtgggtttggctcatggtttcctcttagtgggtccgtttgtcaaagcaggtccatta

SEQ ID NO: 18205 - DNA, 99 bp, Zea mays
  Coding DNA Sequence Number=SeqID_3802
agccgttgcggtttccgtgggctgtgtgcgccggtgtgctgccttgttcagtgcgaatcgacgcgtgtgctttgcatgccgtatgagacatacaactcg

SEQ ID NO: 18206 - DNA, 417 bp, Zea mays
  Coding DNA Sequence Number=SeqID_3803
atcgttttggcggaggttgatcagcccgcgaccggtggcttccaggaacatggcgaccatggcaaggaaagcaggttcggcaagacaaaagcatccaggcagcgcgagtagagttagacgctggagaagtgtcgggggaggatgctgaggtcgctacagagccgacgttcgagctgggcgaggttgcttggggttatcaggatgctcagggctcagaacactgcacccttgcgcaaccgacgagctcagaggccacaaacgtgtcaatttcgaactgacaagtggacgcggatgctgcctggtcttaggtagatgtgctctctttttttagggagcctgctatactaactgtctgcgttcttaggtaaagggcaggtaaaagtgggggggaccacgcggatggtccatacacgcagg

SEQ ID NO: 18207 - DNA, 335 bp, Zea mays
  Coding DNA Sequence Number=SeqID_3804
ttagtggcacatcaccagagtagacataagctcatctgaaaactttctacaaagaggcaggaagcctctgtctctcagtagagcattctgctggtcatgccttgcatagtctttagtcaatggacaacttcaaagctctgcatatggctctagggaagattgaagaatcaaatacactggcactgctaaccttcgagccggcactaacaaaattcccatgctaactgttgcctgaggattgccgaatgtaggagtgcattatgagacgtggaacactgatgttgataggcctgttgtgcttcataagctggactgaaagccacgagaccttactt

SEQ ID NO: 18208 - DNA, 528 bp, Zea mays
  Coding DNA Sequence Number=SeqID_3805
ttttatttcggccattttgtgctgtgtgtgcgactgtgcgctgtaccagctcgaaggaatggcccaacccggtgtcgaaaaactgctacggcgagacggcaccggcgaccgggctcaactcgaccggccaggcctcgggccaggaccaggtgatccaggccgtgctgcggggcatgaagagccccgtccgtctcctcgacatcacggcgctgtcggcgatgcggaaggacgcgcacccgtcggcatacagcggcgacttctcgccggcgcagcgcgcgcgccatcgaccgtccggggcaccgtcccgcgcccagatccggcggcgaacgccgcgcccaggcgcggagattgaggagcgaggagaacccgcgagtacgggcacgaaggcagcggcgacaaaagggagcacgacgcggggccgcgggagcgttaaaaaggggaaggatcgcgagcgggcagcggcggtggcggcaagcgggggacagacggaagaggggagggggtggtgactggtgagggcctcggcac

SEQ ID NO: 18209 - DNA, 543 bp, Zea mays
  Coding DNA Sequence Number=SeqID_3806
acgaggaggctatgtgcacaggataggaataacaatcacgtctcctgcttcaactcgagtccacataccaatgcgtggcacattcatgcgcacaacctccagtaaatcatgcaccagtaagtgcactgcggagacccttgacaaagtggccttggagcttctcctagtcgtccctctaggtccaatccaatcaacgttgaagtatctaatttataaagagcaggaaatatgttagaactattccatgggttacaatttaatatatgttgttgaaaacaatcactaagatcatgacaaccaagtctgattgcttctttaattttgtaaaatctaggatgatgtcctctaccctcttctttgccttgccatatgtattgataggtttctgtttaggcagtttcctgaaatggtgttttgctctaggacaatatcgcggttattgaaccttaatatatcgtgtccctgggatgtgtttttttttttgccactttataagtaatttcatttggatgagacttaattctggtttgactccttacattg

SEQ ID NO: 18210 - DNA, 251 bp, Zea mays
  Coding DNA Sequence Number=SeqID_3807
cattcaaggatgttcaactgttggaaaggtcgttttttttttagcaataggatctgcacattgccaccctcttgaatttcaaaacaagccagccctggggaaaaacaaaaccaaaaacaaaaggcggcggcgcctcctccacaccacggtcaaaccagcacgccgggaacccgcggggcatgatgacaatggataaccaaagaagaaggcagcccgccgagcgagctataaagctttttggcttgggcggg

SEQ ID NO: 18211 - DNA, 143 bp, Zea mays
  misc_feature (30)..(30): n is a, c, g, or t
  misc_feature (49)..(49): n is a, c, g, or t
  misc_feature (72)..(72): n is a, c, g, or t
  Coding DNA Sequence Number=SeqID_3808
ccccgatccttgaagctttgtttcatctgntgttccctgtgaccatggntactccatctctcaatgtcatcnaatcctctcacctcccgccattgttaccgtctccacttatcttctacttcgttcaagggaaatgtaagtgt

SEQ ID NO: 18212 - DNA, 168 bp, Zea mays
  Coding DNA Sequence Number=SeqID_3809
gacgactagttctatcccattggaagatacaggacgcctgtttgcttgtttggattttttcacattgttgtcgttgacggattctagttctgctataacctgatgccatacgaggacatttagtcagtaaacttatgttagccctgtttccttcttgtcacagcaaca

SEQ ID NO: 18213 - DNA, 417 bp, Zea mays
  Coding DNA Sequence Number=SeqID_3810
gattggaggaaagctggatccagctgacaagaagaaaattgaggatgccattgaggcggccatccagtggctagacaacaatcaacttggggaggcagatgagtttgaggacaaaatgaaggaattggaaagcatctgcaacccaatcatcgccaagatgtaccagggtgcttctggtccggacatgggtggtggtgcaatggatgatgatgctcctaccggtggaagcggtgctggtcccaagattgaggaagtggactaaatttagatgatataattttttttaaagtcgcatttatcgtgttttttgttgggttagtttgcgatttagctttcgatcaaagactctatttggcactatttcgttctgttttatgttttattagcttcatgtcactttttactgtagttcattga

SEQ ID NO: 18214 - DNA, 298 bp, Zea mays
  Coding DNA Sequence Number=SeqID_3811
attgtcaattgtcttccctttactatgggaacatcccttgggtcaatctaatatggaacactcactacactaatggtaaagtgccgtatgcaacaaatgaaagagaacctttctagtggaaggacatcattttggctaaaagatctttacagaggagttgcaaaatgtattgttggagacgacaccactttacttttctggttcgacatctagaatgataagttgctacagcaaatctatcccatattcttctcttatgccaagaacaaaaacatctctgtctccaagttcgtctcat

SEQ ID NO: 18215 - DNA, 351 bp, Zea mays
  misc_feature (85)..(85): n is a, c, g, or t
  misc_feature (101)..(101): n is a, c, g, or t
  misc_feature (106)..(107): n is a, c, g, or t
  misc_feature (111)..(111): n is a, c, g, or t
  misc_feature (156)..(156): n is a, c, g, or t
  misc_feature (158)..(159): n is a, c, g, or t
  misc_feature (166)..(173): n is a, c, g, or t
  misc_feature (176)..(176): n is a, c, g, or t
  Coding DNA Sequence Number=SeqID_3812
cgagccaagggcattgacgaagaacaagaaaaaaaaaaaaaaagaaaaaagaaaaaaaaaaaaaaaaaaataaaaaaaaaaaaanaaaaaaaaaaaaaaanaaacnnaaanaaaaaaaaaaaaaaaaaaaaaaaaaaaaaaaaaaaaaaaaaaaanannacaaaannnnnnnnatncaccccaccatctcccctcccctctcccgccgctgccgtcgctcgccgcgggagaaggcgccgcctcttttggtggtagtgagactgcgacggcggcgcgtcttctgcctggctcgagctccggttgggcctcgcgcgcctggcagtggccagtggtggtgtgctcagtgcacca

SEQ ID NO: 18216 - DNA, 190 bp, Zea mays
  Coding DNA Sequence Number=SeqID_3813
cctggctgcctgtgtgcttggctgcctctgctgccgtgctgctgcgcctgcgtgctgcctgctccgctgctcgcagctcgcttgcctctgctgcgtgctgttcggtgctcggtttctcgctccgtcgcagcgtgaatgctgtaggcttgtctgattggtgctttctgcttagatttgtttccttgcattt

SEQ ID NO: 18217 - DNA, 554 bp, Zea mays
  Coding DNA Sequence Number=SeqID_3814
tcaggctgagtctctccgttacgagctcctcggtgggcttgctgttcgcagggcttgctacggtgttttgagattcgtcatggagagtggtgctaagggttgtgaggttattgtgagtggaaagcttcgtgcagcacgtgccaagtccatgaaattcaaggacggttacatggtttcctctggtcaaccaaccaaggattacatcgactctgcagtcagacatgttctgcttagacagggtgtgctcggaatcaaggtgaaggtcatgcttgactgggaccctaagggaataaatggacccaagacaccattgcctgatgttgtcatcatccatgctcccaaggaggaagacgtcaactctgcacctgctcaggttgctgctccggctgctcttgcaccagaagctcccctcactgccgtagattaccctgagatgatcccagtcgcctagaagaaaagctctttttttactagtactatgtgatttcgcccttaaaactattctgctttttgacagtttatagtttgtcttcgaatcagacacctttcttcaa

SEQ ID NO: 18218 - DNA, 535 bp, Zea mays
  Coding DNA Sequence Number=SeqID_3815
aagagaacatcaccaccaatgcttccccaggctgcgatcttccttgccctgagcctcctgtttgctgccaccgacgaatggatgaaaacccaactgctctgtcccagtcgatgcaatgaccaccagcggtgccgactccgcggtggtacattcacgaacaatgcccgatccacgtcatcaaactcaaagagcgagctatcgtgctatgcctcattcaggactacctacctcactactagcaatgctgtccgtagttgtaggatcaggtggatctctgacactgattgagtctctgcaccgacatactaggtcaacgacctcagcatccacctcgacgtgccccttattctcaacttcatcctcaagaactgcggaaggatttgcccagatgacttcacttgccccaactaagcttgggatccgcttgtatgctccatctcgtcaatctattgactactatgtcgagctcttgttatattattgaataaatctggcgcataaaattctttcgctggaccatggactactgtatctg

SEQ ID NO: 18219 - DNA, 175 bp, Zea mays
  Coding DNA Sequence Number=SeqID_3816
gcggtggttatcttcgctcggcgccgacgccatgtaaacgctggtgactctactgcagaggagcttgtcactgctacccaagtccagtgtgactatatgtcatttactcgtggtgagaaacctccagctgttggttggaatttcacaccccccctgaagtcatttgttggctatg

SEQ ID NO: 18220 - DNA, 301 bp, Zea mays
  Coding DNA Sequence Number=SeqID_3817
gttgagcatacttcgatttgcactagatgtagagatgttaacattgatgctatacatgatcacatggctttaattaaacaacaaaatgatcacatagctaaattagatgctaaaattaccgagcatgacttagaaaatgaaaaatttaaatttgctagaagtatgctctatagtgggaaacgccctggcatcaaggatggcattggcttccaaaagggaggaaatgtcaaacttaatgcccctcaataaaaccttctaaatttgttaagagggcaaggctccagaacctcaggataacgag

SEQ ID NO: 18221 - DNA, 360 bp, Zea mays
  Coding DNA Sequence Number=SeqID_3818
gcgcaaaattcatccccgcccacttccccccacaacccccgcccccctcccaaaagggctaacccccggggcccctagggcgcccccccccccccttccagtccggagcccccaccccccttttcccttaggaaaccccccccccccccgctacattcggaacgccccccccccccggtgacgccccctcgccaaatggccccctccccccccccctcccactgtgccccgcggctccggctctctcctcggcggggcgcggtctcccccccctaaggggcgataacccggttccccccatgcccgcggaacccccccgaaagacccacgtgccccaaagcgcccgagtggcccgccgcc

SEQ ID NO: 18222 - DNA, 563 bp, Zea mays
  misc_feature (526)..(529): n is a, c, g, or t
  Coding DNA Sequence Number=SeqID_3819
aaatctccgacaaccacaactaactcatggcaaacgcagcatcaggtgtggcaggccatgatgactgcatgttaaagttgtgggagctcaaggcgaagcggacatatcggtatatagtttataacattgacgagactcaaaagcatgtcatggtggagaagcttggtgagccaaccgaaggctatgaagatttctctgctagccttcctgctaatgagtgtcgttatgctgtttatgactttgagtatctgacagaagggaacctccccaaaagcagaactttttgcattgcgtggtcgcctgatacatcaagggtgaggaacaagatgatttatgcaggctccaaagacaggattcctgagggagctggatggaattcaaatagagccgcaagcaactgatcctactgagatgggtcttgatgtgctcaaaagccgtgccaactaaatgattatgaacagtaggctttctgttggggagctccccttaagccttagttactctttttatggaaatatccatagtnnnngggtcggtcaacttggctagttatggtctcaaac

SEQ ID NO: 18223 - DNA, 484 bp, Zea mays
  Coding DNA Sequence Number=SeqID_3820
acgctcttaagctggatccctagacggccgggttgtttttttttttttttttttttttttttttttttttttttttttttccttaagcaaaggttcatacataagtacatccctcgtcacgcttagtccaacaacaatgggtttttactttttacaaatatataccaaccctgcccctcaggggggcctcccattacatatattaataatcaatgcgttttattatcatgaaaacggaatggaaacccaaatactcacacaaacaggcttttgggaagagccttttatttccagaaacttcagtcccaatcacttcacttattacggcaggagctcctccttggggcggggtcggtcacacatttccttgttcaccagggaacaatcttccagcgctggtggggtcccttgcaccactcccacagcacaagggccgtcccgtcgcgcacacccccctgggccttgtctctctgtgaagcatcaa

SEQ ID NO: 18224 - DNA, 446 bp, Zea mays
  Coding DNA Sequence Number=SeqID_3821
ttttttgacggctcctgcaagttattttactttgaatacacaggaaaaaaaaatctacaaacaagaagctctgttctacggctcttttaaagaatgctttgtatttacaaaaaaatttttttttgtgattaaaagcaccagctgaaaatacaggctgctaaaaacttaagacactgaaaatccattaaaagacagtatgccaaacatacattaaaaaccttttagggaaacaaagatgatgcaaccaacacatctcacccactgtgccaggcagccttttccgatttccctgcctgtgttcccagtaagtggggcggggagtgcttaccccagggggaggaccctggcctccccccatgggcgactgtggggatccaactacgtgtctgagagggaaccggcacctcctggaccagcatcctcagagccacaggacctgagggcca

SEQ ID NO: 18225 - DNA, 440 bp, Zea mays
  Coding DNA Sequence Number=SeqID_3822
attagaccaccagttcagatcgcaccacgcacacgagcaccatttacgcaaaccagccgccgccgagtaaatctcgcctgtgtccaccactttgagcgttgtggcttcaggccatcggcggtcctccacgaggacggccgtggctgcgggtggcgcgttggagctgcatggtggcgggaactcctcgccagcgtcgcggttctacgcatcatcatgaataggagcccatgtgctgcgcaatcgaagaaactgttggacgatctgccgacccccacacaaaaggggatgaagaaattaatcaaatggccgaaactatcatggacaaggttgttgaccaacttctgaatgaagccgccgaagcagtattgagggaagattaggtgctatttggaaaaaacatttaaagtgtaatttatgcaacactttgtacatttgaatgt

SEQ ID NO: 18226 - DNA, 398 bp, Zea mays
  Coding DNA Sequence Number=SeqID_3823
tctttctctctgctttctgaaatgactgctgacgtaagctctctcgtacggttactaagtaggtacaatgacgatagaaccacggtaaaagattccgcccaacagggatcgtcggtggccctaatgacccgtgatctcctcggaagcggcagttgtcgaggaggaggaggaggcgatcagtcgctggaacttgaccttgacctgaaagtccccaacggttgggaaaagcgtctcgacctaaagtcagggaaagtgtatctgcaacaacaaaactcaacaacctcgtctcatcatcgtcgcgcagaacaatccaaccaaacttttcgaaaatttcaagatttaaattttcctagcaaatctccggtgagaccattgttaagcctcttcgacgacacaag

SEQ ID NO: 18227 - DNA, 447 bp, Zea mays
  Coding DNA Sequence Number=SeqID_3824
ggcggtaaatcatgtatgctgtctcagatcttacattactcaccattgggcaacgccacgagccaggctgtgaacgtgacgttcactgcgcgtgctgagaggacacgcgtggcgttctacagcgtgtactacaacacgaggagtgacgaccacagctcgctgtgcgggccggtgatcgacgacgtccgcgtatggggcttgaacaccgcggctgggttgaaggcgagtgctggactggttcttggcattgttggcgtcgttggcatggtgctgttctaaaaactggatctctcggtggctgtagtcttgggaagcatggatgtgtaatctcatctgttagttcgaggaagggcagggcttactggttttggtagtaagcttgaagtttgtcgagtaatatgagcttaggctgaaaaaaaagctcccagaacctacttgttattgcct

SEQ ID NO: 18228 - DNA, 499 bp, Zea mays
  misc_feature (130)..(130): n is a, c, g, or t
  Coding DNA Sequence Number=SeqID_3825
ctgattgattcttgagagtgagaccaattcctggcttgcttagatgagccagaatatccataccttgctcaatgggcattttggggggggaggagccttttagaccttctcaagtcaaaatatattcaanacatgactttggatctgaaatcctcccagagctgtctagatcatagtgtgcaggcatgcatttttacgggccattgggaggatgttggcccgatccttttcgttctttgatgccgcctctggccctcgctgagcacccctcccagtttgctttttgcgatcccggaacgcccttcttccctgccccccgatgctcgcctccgacgcaattgggcaagtgccccctcccatatgcatttctctcggatggttgcttactgagagaatgcaacatcgagcattctgtgattggagtctgctcacgtgtcagctctggatgtgaactcaaggactccgtgatgatgggcgcggacgtctatgaagctgaaga

SEQ ID NO: 18229 - DNA, 257 bp, Zea mays
  Coding DNA Sequence Number=SeqID_3826
ggtatgtcgttgcttattttggtaatttatcatcctcttatttcattgagcatgctcaacatctggctccaggcgcagcaaattgctttggcaagcatggtatcattgcatctgtgcagccagatcatctattagatgatgccaatcgtgctggaagcaagattagggtggaaagggctaagcgaagctcctacacatttcaatcactgttagatggcggtgcataggtagctcctggttctgactggtttatttca

SEQ ID NO: 18230 - DNA, 472 bp, Zea mays
  Coding DNA Sequence Number=SeqID_3827
ggagtatgcgcggatgtgttatattactgatgcacttgacgggtgttgcttagcgggatgagtcaaaacaagttgctacgataatcaagagcatgctgcagctggctttggagttacgatcatgctttcagagtggtgacacttgtgatttatcagtaaatcaactcagtaatttgcaataccttataaacttctctcaggtggatgtaattagaacaaagttcgaggatcacatcaaagatctctatattttgcattcgaaatcttcaaaatatgccgtgcttggcctttcccggtttctggcggtttcttgaactacaattgagtatcattctacgaaagtcagcaaagatatggacagcttctgtttttgataggacattgcaagactgaaatatacgctggtttgatcaaattggcccttgtcaatacttggagatgcatgtatgtccctaacggtgtatcccagttt

SEQ ID NO: 18231 - DNA, 392 bp, Zea mays
  Coding DNA Sequence Number=SeqID_3828
ctctcttattggtaccatccaaccaattcaattgtttacctaattcaatttcaatgatttaattttcaagttcaagccaatcattttgcaaatttcaattggatgaaatctttcgaaagtcttttatttgtctgtcattttttatttgtctgtcattatagacaatactatttatattatctatataattaaattatctatggaattcgaacctgaacttcatttacgattccgtttttctatctcactggcccctatttctttcatatttcatcagcatacgatttatacccagcatattttgtttaccgatttcttttcgtgggcgaattctttctatttttacatctaggatttacatatacaacatatatcactgtcaaggtcgagag

SEQ ID NO: 18232 - DNA, 413 bp, Zea mays
  Coding DNA Sequence Number=SeqID_3829
ttcgccgcgggccagccggagatcggtggagaagcgggttgtgtcggtgccgctggccgagtgcggggaggggccgccgccgtctgactcgtgggcgtggcgcaagtatgggcagaagcccatcaagggctccccctacccacgtgggtactaccgctgcagcagctccaaggggtgccccgcgaggaagcaggtggagcgcagccgcgccgaccctgccgtgctgctcgtcacctacaccttcgaccacaaccacgaggcgccgcggcccaagagcagctgctgccaccagcaaggcaggccgccggcgccgaagcctgatgagcccgtcgtggccgtggccgagcaggaggatgagccggaagactggcaggagccggagcagaaggtcgtcctagcgaaagcttcgactt

SEQ ID NO: 18233 - DNA, 476 bp, Zea mays
  Coding DNA Sequence Number=SeqID_3830
gtaaaggcccaatcaaccactcattcggagttcataaagctcagctccatctcagttcttttgttgcagcgtgagcttcctcaatcttctcatattcaatcaaagcgtcgcccttgacaaatccggtatgacggtccaaattcacaatgcaggtttggacctgtccaaattatggaacagcatattggacggtcatcttatcgagcttcttcatgaactccagaggccatcacattgcatccttcaatggatcggatgggtcacggaccgccgagcgagtagagatcgccgcgtcccatcgcgccaaagcgcgaatcgcggggcgcagaggagttggggtcctcgcggaagccgcggccctcggtcatacgcggcgcgtcgtcacccagcgatggtggagcggagacgcgaggtgggggccggcgctggatccgcaccggcgatcctcgtccatgaggtcgtcgtcgtataggtcg

SEQ ID NO: 18234 - DNA, 99 bp, Zea mays
  misc_feature (26)..(27): n is a, c, g, or t
  misc_feature (52)..(52): n is a, c, g, or t
  misc_feature (60)..(61): n is a, c, g, or t
  Coding DNA Sequence Number=SeqID_3831
cttcgcgtaattgcattttaagcccnnctttggcactcattgccgtcccccntcggctcnncatttcttggagggtgaccgcgcagctctttccggcgg

SEQ ID NO: 18235 - DNA, 491 bp, Zea mays
  misc_feature (464)..(464): n is a, c, g, or t
  Coding DNA Sequence Number=SeqID_3832
aacttcagcactgcggtcatcgacgtcctcttgaacgcggcgctcgggaacggcgccgcctcgctcacgtacaagggcaacggcgtctaccagaccggaaacagcggcgatggcggcagtggtgtggtcatggagatcacgaccatgctcggcgcagacacgagcttcggcaaggccggcgacgtcatcaacttcaacctgctcgacgtggcgacgtacttcaccggcgcgcagctcgccgcgaaggcgacgctcagcacgagcggcgcgacgtactcgctcggtatcacgtttacgagcacggggccgggcttcgagctgctcggcttggaaacagcgcgcagagtccgctcaccgtcgacagcaagaagatcgaggccgcctcggcaagatcatgatcaagaccacatccaccagaacgactcgcaggggcacgcgcttcttacctacgatttgtcggtcanccgaatcgttgacgtcacgctgaccgg

SEQ ID NO: 18236 - DNA, 397 bp, Zea mays
  Coding DNA Sequence Number=SeqID_3833
cggaatatcacaaaacacgcttgaaaatactttaatttaatgcttcggaactcttatctgtagcctccgttttttcacctgtctggtttatcttcaatctcaggtggaccgacttgtcgattggcggggaggagattggaagggtgttgggtgtgaaggatgttgtagaatgaaagtttgatggcatggaggaggaagagggggtagaagaaagggtggatgaaattttgggtgaatattattttgctttttcttatttttgtctttctttctctttatcattctctttctctgtccggtgctttatggcacggggctgaacatttaactggtcagcttggttatacttttttattttctgggcttttctttaatttggcttgtatgttttcttcct

SEQ ID NO: 18237 - DNA, 543 bp, Zea mays
  Coding DNA Sequence Number=SeqID_3834
atcgtatcaaagatggcgctgcccaaagcgaaggagatcgtgtcttccaattccgtcgtggttttcagcaaaacctattgccctttctgcgtcgaagtgaagcagctctttggtaacttaggtgtcacttacaaggccattgaactcgattctgaagctgatggaagtgagatccaagcagcattagtcgaatggactggtcagcggactgtgccaaatgtgttcattggtggaaaccacattggtggctgtgattcaacaactgccttgcacaatcaaggcaagctggtgcctctgctgacatctgctggagctcttgccaaatcaactgcttgaaggagctcaatttctgtttatgtagttaactaccgtaataaaaaattgtcgagtaaaggtgtggatttaattcaacaccctgaaactcgtgtttgttcctgtgtggttctctttaaactgtaaccctggcaaataagtcaattgctgtggaggcatttggaagattttctttggaattatttgggcttactttataacatatgcact

SEQ ID NO: 18238 - DNA, 279 bp, Zea mays
  Coding DNA Sequence Number=SeqID_3835
gacggtttacgtggattgcaatcgatgccaagctgcgcgccttcccgctctaccgctctcgtgtaattctgagtggtttggatcgtttctcgatgcatatcggatgattttttttatagcgttatgaaaaagaatggctcctgttctttggattttttactccttcctcgtggccaatatttctggcaatggggatcaataaaagtctctgggtctttggataagcaggatgcctgaaaattaaatcagagacctgttcaagaccaggttgcgagatgg

SEQ ID NO: 18239 - DNA, 550 bp, Zea mays
  misc_feature (373)..(373): n is a, c, g, or t
  Coding DNA Sequence Number=SeqID_3836
gaatagcgccagtaaataagacttaaacagtgctctttttttggatgaacatgggtcttagaaggttctttagttctactggatataacatctgactgtttgctgttgcctgttgcagctcacattttctggtgcaattattgaggtgtgcatgaggaaactggtattttatccagaagttgttggcttcccccgagagggcgcagaccccttcccctatgtggaaacccgttattcttaggggtcgccacccaagctcataatgctcgacaccaagggtgaacagaaggagcccataaggattgataactggaagcgagagcacattcgccagtttctcacggcgaaagggacgccagtgaaattagacagntgagttcttgcgataagtgcctgaatatttccagtttgacgttccaatagaacctacgtaacctgtaccttgctaccaaaatcgtaccccatgtatgagattggcgttctcatatttacacctaaaaatgatcgtacgagaagcctgtgtgtgcggcatactttgtaacctgtttgt

SEQ ID NO: 18240 - DNA, 560 bp, Zea mays
  Coding DNA Sequence Number=SeqID_3837
gcagagaaaggtaactcgcctcctccccttcgacgccacccccgcctccgtccccaccccctgctactccgcccccaccccctccgcctccggcctagccactgtttgcccagtccccgtcactccgaaaggagcagcagcctaaggcaacgctgccaagagtggagaacaaatcaaaagggtgatcatctcggtgcccaccaaacctcaacaaccaagtttcatgtctaatctcgacgttcagcttccatctgctttgatttgtttgtcgaggcaaatgctgaggctctggtgttgctcctggaacgaaggattaagtgcatgtgcgcatcttagagcgcaacgatagaaagtctctgaatacagtccagggtttgaatatgaagaagaaattctgctgcaatggtaatgtagttcagtacccagagctaggtcaggtcattcagctccaaggtgatcaacataaggacgccctcacgtaaaactactatatcttagacgtagtgtttttattgttgttttatgtgggaccattgattggtcagtatggatcttctttt

SEQ ID NO: 18241 - DNA, 454 bp, Zea mays
  misc_feature (41)..(41): n is a, c, g, or t
  misc_feature (44)..(44): n is a, c, g, or t
  misc_feature (50)..(50): n is a, c, g, or t
  misc_feature (53)..(53): n is a, c, g, or t
  misc_feature (57)..(57): n is a, c, g, or t
  misc_feature (61)..(61): n is a, c, g, or t
  misc_feature (76)..(76): n is a, c, g, or t
  misc_feature (80)..(80): n is a, c, g, or t
  misc_feature (84)..(84): n is a, c, g, or t
  misc_feature (99)..(99): n is a, c, g, or t
  misc_feature (101)..(101): n is a, c, g, or t
  misc_feature (108)..(108): n is a, c, g, or t
  misc_feature (111)..(111): n is a, c, g, or t
  misc_feature (128)..(128): n is a, c, g, or t
  misc_feature (132)..(132): n is a, c, g, or t
  misc_feature (136)..(136): n is a, c, g, or t
  misc_feature (154)..(154): n is a, c, g, or t
  misc_feature (165)..(165): n is a, c, g, or t
  misc_feature (425)..(425): n is a, c, g, or t
  Coding DNA Sequence Number=SeqID_3838
gatttgagaaaacagagtccatggattccagctggagtttntcnacggtngtnttgngganttaacggcggtggtncggnacangtagcaagttggatntntgtggantangttgaggatgcaagatngttnatgnaacggtcgggttttaganaggaaagcaangggtgaggatcatttctgggcgatttccggggaggaggaggagataggcgtcgttttgggatacaaagtcaagcttgttcctgtgccatcggtcgttacggtgtttagagtggagcagtatatggattcaggaactgtggatatggttcacaaatggcaatcggatggtaagaaaactgatcagaatctgtttatgagaatgttgattcaaccagtgacgaggaagaaggtaaagactgtgagagcttctgtggttgctntgtttttaggcagagcagatgaagttgat

SEQ ID NO: 18242 - DNA, 589 bp, Zea mays
  misc_feature (519)..(519): n is a, c, g, or t
  Coding DNA Sequence Number=SeqID_3839
ttttgtgagcaatcccttcggcagcttattgtacaaagcatcgcatgatgcagaagaagtggccgttgttgagatcgataccactgcaaccgatcgttacagaacacactggcccttcatgcgcgacaggcgtatcgattcttaccagcccgttaccaaaagatacatcgacgaagactgattaaactacatcatttgaaattaccgaaagaagccggttattatttcccggcagaatttgaaccgcacgaagccacctggctcagctggccacataaagaagccagttggcccggtaagatccataccatctatccgaactattcattgtttgtgaaatacctcgcattgagcgagaaagtgcgcatcaatgtaacagatgaagccatgaaagcttttgctgttgaacagttgcaaaaagcaggcgttgatatgcagcaggttgaatttttcctgcaccccaccaatgatgcctggtgcagggatcatggcctgctttcctcgtcaccctcatgccgnacaaagaaaagtaatcgttgactggactacatgcctggggcacaaataccttcttatgactggcgatgtg

SEQ ID NO: 18243 - DNA, 292 bp, Zea mays
  Coding DNA Sequence Number=SeqID_3840
gagacgtgtttaactcatgcagacattccttttttgcgcgcctggggcggatagcgcacacaacagactggttgagtcggcgcgttgggttgaaccacgttgcagggtggtcgacttgtgcttcctttaactattagaagcactgggctcccgttatatctgccatatatatatatatatatatatatatatatatatatatatattacagtagccctggagtctgacttggaagagatgtctgctcaggcaagttggacaccatatttctacctgttactctactcaattg

SEQ ID NO: 18244 - DNA, 332 bp, Zea mays
  Coding DNA Sequence Number=SeqID_3841
gcgcggcggatcagccaccagtccgagcctaccagtgctcgggccggcccccggctgacccctgcgcgcgcgcaggcatccttttccaccggcgacgcactcccctgccctccaggccccgctgcgcgcacgccacccgcttccggtcacctccctctcactctctccttccttggatcacagcccctttggtcgccgcctaccccccctcccgcggctggccggcagcaacagcagcgctgccgacccgcaagagcgccggctctcggggcccggcgcgggcgccggtgctcgcggcggcggtcgcgggtcctcggccagcaggccgaacg

SEQ ID NO: 18245 - DNA, 408 bp, Zea mays
  Coding DNA Sequence Number=SeqID_3842
ttcgcccagtttcttcatcaactcagcggctcgtgtcttctttcttctctgcttaagaaagctatggcgtacgcaccaccaccgatgaagcaaggaaagacaggatttgaagaaacacaagagcagattcacaagatcagaatcactctctcctccaagaacgtcaaaaaccttgagaaggtgtgcactgacttggtccgtggagcgaaagacaagaggttgagagttaaaggaccggtaaggatgccaactaaagttctcaagattaccacaagaaaagctccttgtggtgaaggaaccaacacatgggacagatttgagctccgtgtacacaagcgtgtgatcgatctcttcagctctccggatgtggtgaagcagatcacttccatcaccattgagcctggtgtt

SEQ ID NO: 18246 - DNA, 180 bp, Zea mays
  Coding DNA Sequence Number=SeqID_3843
cactcgttcgttccaaacggagaagaggatcaggttcgttccaagggaagggagaagagggtcaggagagagagagagagagagagagagcccttgctcgttgtgttgtcgatgctaataccgcattgtaattgacgaaatgactaaaatgaagagtagtgtagtagatgtacaactaaa

SEQ ID NO: 18247 - DNA, 450 bp, Zea mays
  misc_feature (32)..(32): n is a, c, g, or t
  Coding DNA Sequence Number=SeqID_3844
gtggaattcgcagccgaaaagttttcggctgncggcgcgaggagcgatcggcagaaacgccatcgacctgttcgtcgccggcagcgagcgcgaaaacgtcaacgccgcgctgcaacgtttcctgaaatccggggaagacaggctaaccaacccgcggcgtgaaattgtcgcgcggcgacgcgacggtcaggagttcagggccgagctcagcgtcacggcgctccggcgacgtagaggcctcctcttcaattcgttctaccgtgatctgaccgacaagatcgccgccgatgagcgcatccgacacgcagagaagatggaagcgatcggccagctcaccggcggcgtggcgcacgatttcaacaacatcctcaccgttatcaccggtacgatcgggatcctggcggaggcggtggcagcggagccacagcttgcggtcatcgccaagatgat

SEQ ID NO: 18248 - DNA, 406 bp, Zea mays
  Coding DNA Sequence Number=SeqID_3845
gagcgaaaccaaagccgcatcaacccctctcgcgaatcgatggacgcgagcgcggcggcggccggaggaggagacgggacgcagaggacactgaatccttatgtgactggtaattcggtgattgcaatgaaatacaaggatggtgtgatcatggcatgtgacactggagcctcctatgggtcaactttgcgatacaagagtgtggagcgtatcaaggaggttggaaagcatagccttattggagggagtggggagttcagtgatttccaggagattttgcggtatctggatgaattaactttgaatgatcatatgtgggatgatggcaactcattgggccccaaggaaatccatgcctacctcacaagagtaatgtacaacaggcgcaataagtttgaccctctat

SEQ ID NO: 18249 - DNA, 483 bp, Zea mays
  Coding DNA Sequence Number=SeqID_3846
gtgatgcgtggtgccgaattgcatacggctgagcgctggaccatgagtagtgcacacagaaacgaatagcctgcaggccatgtgtctcacgggcaggagcattttcgaatatggtgtagagtgatcagactcacaatgcagctgctagacagcacccaacggcctcttgtagggcacggatcaccgggaccacaggaacacggggctgtatgccccttgagctgggccctcacggcccgcgcagccgtggccttccacctgtacgtacagcgcgaggcacagctccggctgcatcgggccgcccctgccaatggcgcatcatgcccatgctgagatgacacagctgaaccctgccctacaagagcccgctggcgctgctagcccgcatgaggtctgtcaccacacctttcgtaatgcctgccggggcacatgctgcgcgattacttcgagcgctcacatggccagccctatccatatagaact

SEQ ID NO: 18250 - DNA, 596 bp, Zea mays
  Coding DNA Sequence Number=SeqID_3847
atcagccaggcgcttttctttttgacccggacccagagccggacctgggggggggggccctaagcgctgctggagaacccctaactggaagaccagacggaggcgacgcgcatcgacgagaacgccaactgggagttcttgaatatgcatggcatctagctggggctggggcggtaccatctgggcgttcagcgacgtcacctacttaccgctggacgtgctcaagttcgccatccgcttacccgcgcgtccgcccgcccgggcgcaacatcaacaacaagacgggcttcaccaaccggaccgactacggcaagggcgagcgagaggcgcagcgggccacggcacacaggacgctgcacggcctcaaccaggccaccgtcagctgcgacctcttcggcgaccaccagggctaccgcgagctgtcagagctcgccgagcatgcagccaatcgcgccgagggggccaggctcagggagctgcacacgctgaaaggacacgtcgagtacgtcggctagctcaagggcctatgcattgacaccattcagcagagctacaccgcgtatactcgactcagaagactagctgatatgttgtgc

SEQ ID NO: 18251 - DNA, 224 bp, Zea mays
  Coding DNA Sequence Number=SeqID_3848
tacccctgcgcctataaagcaacacggcgaccccacacaggttcatatcgtcttctgcgtgtatgtagctggttcttcttcaattctctttgtggggaaaacgttcatcgggattttcccagcaatcagcttgataggcgacatcgccattgtggggatcttctacttcattggctttgcattgttctgcctggaggctttgctaagcgtgtgggtcattcagg

SEQ ID NO: 18252 - DNA, 586 bp, Zea mays
  Coding DNA Sequence Number=SeqID_3849
gatcgggcggccttgtttcaattaacccgggcccgatcatggccgtccgcctggaatccgacggcccagggccgctccccccacaccccgcctccctgccgtttgagcctcgcctgtcagccgcccgcgtccgcgctgcccgcctggccccgcctgtcagccgctcgcgctcgctctgcccgcccggccccacctgtcagcccgccgccccgcgctgcccgcctggccccgcctacaacgagcagtctgtgtttcccgaggaagttgcagaggaagtccctgatcagcagtttggtgaaggcaaggggctcaggctgtttcctgagtacctctccgtaaggacctcgtcgatctccgacgccctcccagtgctggactccgccgccgaacgccttcgtcgcctagaccagatcctcggcgcccgcctggaggcagagggcaacaggctctgccgggcgatggtggattacttgctgacgtgcttccggagccatgacccagccatgtccttggcaccggtgctcgatggtccgatggccgccacagaagacgtcgcctgggagagcgtccaagacgtcgtggagac

SEQ ID NO: 18253 - DNA, 58 bp, Zea mays
  Coding DNA Sequence Number=SeqID_3850
ctactttggcaaggcatcgcaagcttgcgagttcttcgcgcaagctgggttcccgtgc

SEQ ID NO: 18254 - DNA, 411 bp, Zea mays
  Coding DNA Sequence Number=SeqID_3851
gagcggcggtgttcagctcatctacgcgaacggcctcgccagcaacacactggtcatgtccggcggcacgttggacgtgctctcgggcggcattgcctcgtcgacgacggtttcccagggcggactggaggtcgtcagcgccggcgggatcgacatcgggacaagagtgaggtcaggcgctgtcttggtgaactccgggtccgtgagcggggcggtcatcagcggtggtcgggaaaccgtctccggcggcctcgatgtcggtgcgaccatcctggcaaatggccaggtccgtgtctttgggggcaccgtgagcggtgcgacgatcgcagctggcagccagtacatcaactatggcacggcggtagacaccaccatcagcggcaccggcagctaccagtacctcggagttag

SEQ ID NO: 18255 - DNA, 536 bp, Zea mays
  Coding DNA Sequence Number=SeqID_3852
tcgtgcaagccgtaccggccgcgaggaaggtgagcagtgcgccgtgctcgcgcagcaaccttcgcggcgaggtctggcagatccggcgaccggcaggcaaagcccgcgccggcccccgcgccgagccctgccccttcggtctgagagctgttctccgacaggcgggcaccgccgcggcagcacaaggacaaacccgccggcgttgccaacggccggaagcccggcctgagtagcggcgtccggggcctgaacctggctggtgctcgtcggcggcgaggaggcgccaaagggaccggcgaagacctgggcacctggagaagggcggcgacgacgacggtcgcccagctgtcgcaagaaaaacaaatcgcgggagtcggcggatccgagggctaccttctccggcggcggatacgtcgcccttggttcgcctccctcgctctccgtggagttttccgagcgcgcggtcgtgtagacgaaagaaccggctacgggagagaaatccggcgtagcgtgcccatccatttagcgggagagag

SEQ ID NO: 18256 - DNA, 485 bp, Zea mays
  Coding DNA Sequence Number=SeqID_3853
gtgccgaggttcttaccggcgaagagcgcccgccagacaaatggaactgggtgataaggcggtcggttttctgctgactctgacaagcttaaccttatttacatactacacattactgggtcatcattgtgccatttgtcgacagcagaccacgtctgggcacaagtacttcctgcctcatgagtatgcgcttttgataccggcactggccggcgtggttctcctttcgttcttgagcgtgtttgtgggccttgtgatgctcaaatcgaagaacatgaagaagacggcttgctgcgggtttgccatgtacactgctgcgtcattcacttactgtgatgaaatgcatgagtccgcaggatctaagtgctacacgctcgggtctgtaatcaggtccgtcatactttagaggtctctactttggcatccggatgtgtggccttttttattactggcggtcaattaaaagcagcgttcatcacttctct

SEQ ID NO: 18257 - DNA, 106 bp, Zea mays
  Coding DNA Sequence Number=SeqID_3854
ggtggattgtgataacctggcccttgagatgggatgtctggcccaaggcttaatagaattaatagtgtaatcataccaacaaggtgcatctatgttcaacgccggg

SEQ ID NO: 18258 - DNA, 315 bp, Zea mays
  Coding DNA Sequence Number=SeqID_3855
gagtccaataggcacctcgccggctcccgcgagcagtaagcgccgaaccgaccgcacccgcgaaccctgagagccatggccttgctgccagcatcgctgatcacgtcgcactcctcaacggcgcccccggcgttgaacatagatgcaccttgttggtatgattacactattaattctattaagccttgggccagacatcccatctcaagggccaggttatcacaatccaccccccttagaagaccgacgtcctcgtcggtcaaccccaatccaggaacctccccacttagccacgtctgtgtctagtgtcgtcat

SEQ ID NO: 18259 - DNA, 272 bp, Zea mays
  Coding DNA Sequence Number=SeqID_3856
gatactgctcactacctgtctgcacggacctaatggaattgcatcaggaaagcgaggaggaagtcaaaacacactgaacaggcagaaaatgcgtgctcgtcgtctccgaccctgctcaggcgggatatgcgtcctctctcacgtcagcccaacgcgtgggtggtttgtccctcgcgcttgtttaacattcggccgggtcgccctgcaaacgagaacttacacttgatgctggtgggcccctatccgtgactttcagtgatacagagttccat

SEQ ID NO: 18260 - DNA, 287 bp, Zea mays
  Coding DNA Sequence Number=SeqID_3857
ggcaaaaaatgtccacctaaaagcggttcccaaaaagcgcggcgaggttatcagccccaaaaggcagccattgggtcccaaagcccggctttatggtttagggcacccccatttagaccgtaactcccctcccaaataatgtggtcaatgatctcaagggtggatactaggttgtttggtccatctacctgcagtacccagttttacatttgtgttactttaaggggtgcaactttgccccctttaaacagtagtataaacctgttgtctgttcctgttaaaaaatt

SEQ ID NO: 18261 - DNA, 430 bp, Zea mays
  Coding DNA Sequence Number=SeqID_3858
tgtgcaccccatctctgccgtgattatggagtggtctctgaaacctcgcgacatcgagccggagatagtgggtctctgcatacgggaaaaaaatgtggctggtggaagacaattcacttcatttgcacataccccctggaagtacgctgatacgccaaagaagcagagctaaaaaatacttgaaagcaccaatgatgatgcgattggtatggccctctccctgcagatgccctcaggaacattgccgatgcccctttgtgaacagcctcttctagtaaataataatgtatggagaagaccaatgaagggcccagtcttgttggaagtacgaataatgtcccgcccccggaatgtgtgctcccatatatttcgtcgcatcagtttgagttgtggttgtgtgaaccccccatattttccctcgcaaaagaat

SEQ ID NO: 18262 - DNA, 268 bp, Zea mays
  Coding DNA Sequence Number=SeqID_3859
gggctcattaaagggtgttctgcaagtgacctcccagcagcaccgggtgtgccccgtgtctctctagtcacaatacgaggcacgagtatgcctcgtagacgttgcatacacgctgtttgcaccattgctcagacacttgtgtgcgcccatttctcacacaccgacacctcgcagtggagccctaaaaagaagagacggaaccctcacaaagtgtgccatgtctcgatctgtgcgtgtcagtcctatgcgcagcgacagtgctactcat

SEQ ID NO: 18263 - DNA, 540 bp, Zea mays
  misc_feature (78)..(79): n is a, c, g, or t
  misc_feature (170)..(170): n is a, c, g, or t
  misc_feature (387)..(387): n is a, c, g, or t
  Coding DNA Sequence Number=SeqID_3860
tcacacaaacaatagtcctcgtggggggttttatccctcgaacctcttttgtagttcccgagcctccgtgtggctccnnggtaattcatatcacagcaattcccaatgcacgacattccttgttactgctcatagatattgagtttcttgacctcattaatgaagagttngccaatatagttgtcaggcaattgtgaaacttaaattatttttgcttgaggcaggatttaacaaacaaacatggcggcgaaagtaatggagaaactgatggctgttatcaaaacaagatgaaattttattgacagagtgtttctgcaacacatgattttacaattactgagaatgagagaatgaccagaaagaaacgacaaaagatgatggtgaaancaacatataacttggacagggattttgtggaaatttgccccagtttaagttccttgttcctcaattgattgattcgcctttgacttttggtgtggtggactgctcatggggtcgacatccttcaccgattaatgaaccttgtcagccaattcg

SEQ ID NO: 18264 - DNA, 174 bp, Zea mays
  Coding DNA Sequence Number=SeqID_3861
gccgacaggacagacagggactcgtccgtccctgctcttgaccgtatcttcaagctgaaagatttccccatgtgcccagccgtctgccgtcggcgtcagtgtactgcatgcctcccaccggtctgcctgcggccgtgggccgccttcagccttggattgggactgcacatggag

SEQ ID NO: 18265 - DNA, 462 bp, Zea mays
  Coding DNA Sequence Number=SeqID_3862
acaaacaggcccattgttggtcaaagtcttgctgtaacaaaacaaaatacgccatagattcacaggcagcagtgaaagaagaaaagagagaagcccggaaagcgaagaaagagctcaaaggcctgtataaatcagaaacgcagaaggctcagaaagttgctgctgttactggaccttcttccattcgactaatgtgatggttgatctgtggcacgtttactgatgagtggcgactatgacagtcttgaatccaaaagaccgcctggagccctggacaaatgcatcaaatctatgaacgatgacccaatcgcaaggaaatgatgatgtgttctgtgaatggtggttgagaaccagtttgatcaaactggaaacggggtctcaactcgctgatgactttaggggcctggatgttgtggaagcatcagaatggctgtttttaaaggtgctgcacccagtgtccag

SEQ ID NO: 18266 - DNA, 400 bp, Zea mays
  misc_feature (39)..(40): n is a, c, g, or t
  misc_feature (52)..(52): n is a, c, g, or t
  misc_feature (60)..(61): n is a, c, g, or t
  misc_feature (72)..(73): n is a, c, g, or t
  misc_feature (94)..(94): n is a, c, g, or t
  misc_feature (114)..(115): n is a, c, g, or t
  misc_feature (144)..(144): n is a, c, g, or t
  misc_feature (166)..(166): n is a, c, g, or t
  misc_feature (206)..(206): n is a, c, g, or t
  misc_feature (269)..(269): n is a, c, g, or t
  misc_feature (328)..(329): n is a, c, g, or t
  misc_feature (341)..(343): n is a, c, g, or t
  misc_feature (361)..(362): n is a, c, g, or t
  Coding DNA Sequence Number=SeqID_3863
ttgcgccgagcctggcttgcggaaactctccgcgcgcgnngcccgcgtccgntggctgcnnccggaggcccnngcgcggcgctttcggccgcgntctgcggctttgcccccacnnctgtggcgccgctttcagttacctcgttntgttaggggcatttgctgcagnattccaacgggccctattcttcaatttcttcgcgtgcgtnttagccccggcttgcatttctcttgccagcaagataccaactttgaaggcttatatcccccgntagctgctttccagttcattcgctttcagaatctattagagccggtcatttcgatgttnnaaatctaccacnnncatcttcagctttctcanncggtgtccttcccagctttcacctccttctgacgtagc

SEQ ID NO: 18267 - DNA, 529 bp, Zea mays
  misc_feature (389)..(389): n is a, c, g, or t
  misc_feature (434)..(434): n is a, c, g, or t
  misc_feature (502)..(503): n is a, c, g, or t
  Coding DNA Sequence Number=SeqID_3864
ctgccccgcttttcagaagatttggactttattctgcaacagccgaacccggcgttcgactggaatccctatctgaagccgctcacggcgggactggcggaattcggactgaactgcgaggtgctcaacaaaagcaaaatggagcgcaacattcgcgcggcgctgctgaagaatgactccatcggcaaccaactcaacctcagatttgaacgtgacgccggcatccgaaccctgaagatcaagttggaaatcgatgtgaacccgccggcgggttcgagctttgcttacacatacttcgattttccactcgacttcgagatctgtcatcaggacttgccgagcaactttgctctcaaactccatgccctactctgaggccctatctgaanggccggactggtatgacttcaactggtacatccggcaagccgctncccacttaccgcatctgcaaccgcctgatagatggaccctgcaggggcaacacctgccatcgatcgcnntggctggtggaccaactcaccggaaa

SEQ ID NO: 18268 - DNA, 594 bp, Zea mays
  Coding DNA Sequence Number=SeqID_3865
tgtgggccggcggtgtggcatcccagctcgcctcccccgccccccgctttgggcccagccgccccctcccctccccccaaatccctctccactccccgcaggcgccgccgatccccgcccgcggtgagcccctccctccccctctcctattctctctcccctccctcctccttcccccgcccgacggcgcccttcttgtgtcccggccgcgcctggccccgcccgcctcgagctcgccggctatggcgcccggctcccgtccgccccgccccagcgcgagcgaccccgcccctcccctcggcgtggccggccatggcggcgcggcgagccccgccccgctcgcgcgcgctcgccccagcccaccctcgcgctcaccggcgccctccccgccgcggccgtgccccgcctcggctcgcccgccccgagctcgtcccgccccggcctcgccggccatggcgcccgcgcggcgtgcccttgccccgccctgcgcgcgcgcccggcctcggccccgtcccgtccatggcacgtggccatggcgcgcccgcccgtgcccgcccgcccgccccggcatgtcctgctcgcatcgtgacggcc

SEQ ID NO: 18269 - DNA, 592 bp, Zea mays
  Coding DNA Sequence Number=SeqID_3866
cgtatctaccatcgcttatcatctgcgcctctacatttcttctctctctgctcctccggctccgccggatccatcctagacaggaatcgccatgtctagactcggtaggagcaccacttcaaatcgaacgacgacgctgcggcggccgagacctacccgcagcaggctggccccgcccgtaagaacggcttcatcgccatcgagaaccgcccctgcaaggctgtggaggtttctacctcccagactggcacgctatggccacgccaaatgccactcttgtcgccatagacatattcaatgggaaaaagcttgaagatattgttccttcatcactcaactgtgacattccgcatgcgaaccgcactgagtatcacctgattgatatttctgaggatgcatttgcgagccttcttacttcagatgggaacgctaacggtgatcttagactcccaactgatgagactcttgcgggccagattaaggaagggttcgaaagctgtcaaggatcttgttgcgactgtccagtctgccctgatggatgagcagatctgcgcgttgtaggatgttgtgcccaaccaacttccttggcttt

SEQ ID NO: 18270 - DNA, 348 bp, Zea mays
  Coding DNA Sequence Number=SeqID_3867
ccatttgtcaatagccgcacaggattgagcaggttgttattgttgaggaccatccatggtggcttatgtgtatgcatgggttgattagctgaagttggtgttggaaggaacatttttttgagtattttggtattaccatgctaggacaatagcggatttggacatttgtcaagagccgcacagattgacaagtccgtattggtggttacaagccatggtggcatatgtgtatgcttgggttgattagctgaagttggtgttgaaaggaacattttttgcacccatttggtatgccatgcttagtcaaaaaaaaaaaaaaaatggttatactgggggagatctgtcatg

SEQ ID NO: 18271 - DNA, 98 bp, Zea mays
  Coding DNA Sequence Number=SeqID_3868
gtgttgttgttatagatggcctttttcttggaggactgggagattgtgtatacttttctgggtttgtttttttcagctacacagaagagtttgacaag

SEQ ID NO: 18272 - DNA, 496 bp, Zea mays
  Coding DNA Sequence Number=SeqID_3869
caaaggcttgagtgtgctgtgaactggcgcaccggacagtgtacgaacccccattcccgtacaatcccaaagtagtcatccgtgaaaaatagcagtgtagcttaaaaaacatgtacccatgagtggtttgtgcttttgcccaaacccgtacccatcgggttagcgggtacccatgggttacccgcgggtttcatccaaagttttaaatagccggctaatagcggctatttagccagctatagcctttcaagaggtctggagctaagagatgcaccatttagcgctaaccaaacttagccgctaatagccttatttagcccgctaaacacacaacattagctcgatttagctgctaaacaaaaatcttttttaccgttcgaacctttgaaacattgaggcccaaaaacaaaccgtgggcagacccttttaacttaatgtttgttaggtagtggttaaataccttttacatgtgtcgttgaacgttgaatttgcatgt

SEQ ID NO: 18273 - DNA, 435 bp, Zea mays
  misc_feature (387)..(387): n is a, c, g, or t
  misc_feature (401)..(401): n is a, c, g, or t
  Coding DNA Sequence Number=SeqID_3870
agtcgcgccagtatggagaggcattgggtcgcaagctcgtcgatgcgagtctcgtcggcgtctacgtgctgtccgacggtttgcaagttaatggcagtgacctcgtcagcggattgacatccgtcgtcggagggtctgtgcgagtgagcggaggattggcgggagatggcgcccgtttccaggagacgcgcgtcggcgcggataccgcgccgcggcccatgaccattgccgcgatcggtttctatggtgcggcagtccgattcagttacggttgcggaggtggttgggacaccttcggcgtctcgcgcaggatcacgcgctcgagcggcaacgaattgtttgagctggatggcaaaccggctctcgatctgtacgagcgttatcttngcgaaaagcgcaangactgccgggaaccggcctgttgtatccgctgaa

SEQ ID NO: 18274 - DNA, 527 bp, Zea mays
  Coding DNA Sequence Number=SeqID_3871
agaacagattttcaggctctccagtcttacaggaaggatggctttcgtttttattcaagagattttcctagcagctacagcttcctttcacagggttttttttgctgtgaggcaacaatctgaagggcagcgagcggtgtacgcaatgcatctaggtcgacttgacgatgtcatccctggtgttgacggtgaagccccagagctccccgtacttctcgttgaagtcccagatgtccatggagttgtagccggagatctacatgatggagaggtcggcccgcgacaagctcatcgccgactacaactcccagatgtccatggagttgcggacgcgtgggcggacgcgtgggcggacgcgtgcaaaaacgcccctgtgaaaggaacctgtagctgctaggaaaatctcttgaataaaaggaaaccccccctccctgtaagcctgccccccctcaaaatttgttctaccctcggcccaggtaaacccaacatgttttgcagactgttgcttcccctttcggcatgaattg

SEQ ID NO: 18275 - DNA, 463 bp, Zea mays
  Coding DNA Sequence Number=SeqID_3872
aaccctagtcttcgcggcgtgacgacggagagagagagagattcagctctgcgttaaaggcaaaaaccttcagccatggcaaatggtaaaactgtgaaagacgtctcgccacatgacttcgtgaaggcttacgcttctcacctcaagcgatctggcaagatcgagcttccctcatggacagacattgtgaagaccggtaagctgaaggagcttgccccatacgatccagattggtactacatcagagctgcatctatggcaaggaaagtgtacctaaggggaggtcttggagttggtgctttccgtagaatctatggtggaagcaagagaaacggcagtcgcccaccacatttctgcaaaagcagcggtggcattgcccgtcacatcctccagcagttggagactatgaacattgttgagattgacaccaaaggaggaagaagaatcacttccagtgggcaaa

SEQ ID NO: 18276 - DNA, 496 bp, Zea mays
  misc_feature (43)..(43): n is a, c, g, or t
  misc_feature (53)..(53): n is a, c, g, or t
  misc_feature (71)..(71): n is a, c, g, or t
  misc_feature (80)..(80): n is a, c, g, or t
  misc_feature (85)..(85): n is a, c, g, or t
  misc_feature (117)..(117): n is a, c, g, or t
  misc_feature (143)..(143): n is a, c, g, or t
  misc_feature (203)..(203): n is a, c, g, or t
  Coding DNA Sequence Number=SeqID_3873
tcaacccattcccttggtagagtatacacgagcgacatgggancagcgatatngtgagctggaggggacgnagcagtgcnacttntcccgctccttcgtccactcaagtactatggntccgacccgaccttcgcgacagaagnaggaacaatctgcaactggacaccgtgccaagattgggaatcattctgcagcatgatgcntagatatagtctggactcagagccaaactcacttcagctcgaccgaaagacgtcattggcatcacgtcaaccttccggttgcacctgtccagcagcgtcatcagccaaacccagaaaacgatcatgccgacgaccacgatccatctactcgactcttgcgctggcagtactagcggcagcaccggtcgctgccgttcaggttcccttcaccaactgcctttccgattcataccgaaacaacgatccgactctactgcaatgggttcccctctacgccgatgccaagtttgata

SEQ ID NO: 18277 - DNA, 357 bp, Zea mays
  Coding DNA Sequence Number=SeqID_3874
ggcttcttaataaacccctctcgctctcttgtctcttccttacgacaacctctcctgctcttcgttttctctctacgacgataaaacccagatttgggttcaagcttccataactttaaacccctctcgcgatccaggttgctatcaaatacttgggagcccccagtattattgaataacacagcctgacaatgagtgtagtcgggtttgattttggaaacgagaattgccttgttgccgttgcgaggcacggagctatcggcgtcctgctccatcatgagtccaatcgtgaggctcctgccattctcggcttcggcgacaggcagcgcttcatcggcactgctggagctgcttcta

SEQ ID NO: 18278 - DNA, 327 bp, Zea mays
  Coding DNA Sequence Number=SeqID_3875
ggccgggccttgttccttcccagctccgcaggctgctcatcgccctccctccgcgcccccgatccagatccagatccaggggcttgtcatggcatccaaacgtatcctcaaggaattaaaggacttgcaaaaggaccctccaacatcatgcagtgcaggtcctgctggtgaggatatgttccactggcaggcaaccatcatgggtcctcctgatagtccatatgctggaggtgttttcttggtgaacattcatttcccgccagactaccccttcaagcctccaaagacgaagggcttccatccaaacatggacagcaacggaaagat

SEQ ID NO: 18279 - DNA, 343 bp, Zea mays
  Coding DNA Sequence Number=SeqID_3876
tacgcgggaaggcagtggtaccaacccagagtcgcgggggcttactcggcggagggcaaagtcaaggcatcgttccgcaggggattccgctggatcaaggccaagtgctccgagctcatccatggctgaacccggtacctcggtgaaattctattgtattggcatggtacaagatgcggctacaaagcgcgagagatggtctgtctggtgttatttcgctaattcgctctcaaaatgtggaagagaatttgttctgagattgtgtagagaactttgttgcccccctggttataggaaaagaacccgatggagatctgctgagattgcttgtcgctacctgcca

SEQ ID NO: 18280 - DNA, 50 bp, Zea mays
  Coding DNA Sequence Number=SeqID_3877
ggcgtgatgctaacttcgttaaatcctaacaccctctcttctgccatgga

SEQ ID NO: 18281 - DNA, 165 bp, Zea mays
  Coding DNA Sequence Number=SeqID_3878
gtcacactagaatgtaatacgtttcaagtactttggaccctgggctctaaaatatatgctgtgcatcctggggccttgctaggaagactaagaaccattttacctagaaaacgccgaagaaggtatatgagcaatttggacatctgaaatttttgttatggtgct

SEQ ID NO: 18282 - DNA, 122 bp, Zea mays
  misc_feature (54)..(54): n is a, c, g, or t
  Coding DNA Sequence Number=SeqID_3879
aatactgccaatcctgccgaggcgaggcgagccctggcccctgggtcaaaccancttcagagaccggctgctggttctccagttctccaccaaaccaagtaaccaaccaaccatgcgtccat

SEQ ID NO: 18283 - DNA, 243 bp, Zea mays
  Coding DNA Sequence Number=SeqID_3880
ccctcctgggctcggcttgctcggccccaaaacggcaagagccgacgccagcaaaccctcggattcgggagggaaggaaggcacgagcagcgcagctgcctacccgcagctaaccccaaacagcaacgtcgtagccgacgagagcctccgccacctacccaccaactcccgcccgtcgtcgccggggggggggttctcgtcgagcatctcgtgggcacctacctgggcaagccagagagagag

SEQ ID NO: 18284 - DNA, 578 bp, Zea mays
  Coding DNA Sequence Number=SeqID_3881
cctccatggttgagcgtgacattcagaccggcactgtcaggcagccggggagccatacgaggaatctgctgagggtgaagcgcgggattgatatggtcaaagtcctgtttgagcagatccttggtcacagagggcaactccctgaagggacgcggcgtcggtggcttatgctcaggtctttgctcctcaccatggctgggccataaggaaagcagttgctgctggaatgtatgcccttcccttccaagtcccagctcttgaagaaactgaatgaagatgaggaatcagcaaaggttcaaatgcagaactttgtcaggtcatcagctccagtaatctgctatgttgacgaccttttcacctcaaggaatttgggcatagattggtgaagaaaaatatggatacgtttgtttgatgtactaatccagtcagatggtgtgctgtgagctgggctcagaaaacctttttctggatccgtgtttccaagtcgtaaacaaatataactacttagggcctggtcggtttactcggaacgatgacctgaaacgtgtcgtagccggattgcttggataatttacata

SEQ ID NO: 18285 - DNA, 397 bp, Zea mays
  misc_feature (65)..(65): n is a, c, g, or t
  misc_feature (274)..(274): n is a, c, g, or t
  misc_feature (335)..(335): n is a, c, g, or t
  Coding DNA Sequence Number=SeqID_3882
tcaatttcttttactttcgttccataagcaaccatggcgcccgttgccaagaaaccagccgtganaaaggagaagaaggatgttaaggataagtccaagaatcctatgaaggatctccacattaggaaattgtgtttaaacatttgtgtaggagagtctggtgacaggcttactcgtgccgccaaggtacttgaacagttaactggtcaacagccagtgttctccaaagcccgttacactgtacgatcgttcggtattcgtcgtaatgaaaaantcgcagtccactgcacagtccgaggcgccaaagctgaagaaatcttggaacgaggactganagtacgggaatacgaattgagaagggataatttctctgcatctggtaactttggatttggta

SEQ ID NO: 18286 - DNA, 268 bp, Zea mays
  Coding DNA Sequence Number=SeqID_3883
aggatagccaggctgttccccccaaagaatgggcagcctgcaaactccaagccaaaaccaagggagtctgccctgaaacccccaggtcgcccgacatctacaggaggaagccaggcgacaggaggaggatctttagtgaaaccccctaagaggcggtagagaaataaagattccatcgtctaggatttgccatgttgatggctgatgctatgcgtctaaagccccctcggagattgtggtgccatgtaagggtatgtgacgtatgtca

SEQ ID NO: 18287 - DNA, 447 bp, Zea mays
  Coding DNA Sequence Number=SeqID_3884
atcatggcagccttccagggagagtgccattgcggcaacaccaagtggactgcgaagctcgagcaggaccaggggccggacatcctctgccactgcaacacctgcaagcagctctccggcggcacatacaccctcaaccagatcatccccaaggcgaacttgaagatcacccagggcgaggatctcgggaagtacacgtacaagggcgattcgggcaagggcgttccctgcttctcctgcaagaactgcaccgcacacgtgtaccacgcgcaggaggccatgggcgacgacaagatcgtgctgcggacgggcttgctggaggcggagttcaagcctgcggcggagatttactgcaaggatcggttggggtgggagaaggaggtagcgcatagctatgagactatgccggcttcgccgaggatgggctgtgacataccatattgaatg

SEQ ID NO: 18288 - DNA, 74 bp, Zea mays
  Coding DNA Sequence Number=SeqID_3885
actaaccttgtgttatccagttctggttgtaagtggtttatccgaggtccacgggacactcggacagatcctgt

SEQ ID NO: 18289 - DNA, 358 bp, Zea mays
  Coding DNA Sequence Number=SeqID_3886
tctgggaacactgtcgggacttgcagcagtgtgatgaatcagtctgagggtctcagaaatattaatacctttctcttatctccaggggtttctctggtggctcagatggtaaagaatctgcctgcaatgcaggagacccggatttgatccctggttggggatgatcccctggagaagggcatggcaacccactccagtgtttttacctggagaatctcctggacagagagcctagtgggttacagtctatggggtcacaaagacttggacatgactgagcgactaacactttttactttttcacttttatctccgggatgggcctgcctagccaaagcctgcctgctggttatccgct

SEQ ID NO: 18290 - DNA, 221 bp, Zea mays
  Coding DNA Sequence Number=SeqID_3887
gatttggtttgtgcgttattgtcttgctaccaatggtggcgcgtggttggcgactgccgtcctagtgaccaacatgaggaacttcccagctcagcagaggtgccgttgctggcattctgaaagggttctcgggtttaagtgctgctgtttacaccctaaatattacacccggagagtgctccgtgattctacctccatcaaacccttattgctctctctcg

SEQ ID NO: 18291 - DNA, 524 bp, Zea mays
  misc_feature (38)..(38): n is a, c, g, or t
  misc_feature (44)..(45): n is a, c, g, or t
  misc_feature (49)..(49): n is a, c, g, or t
  misc_feature (52)..(52): n is a, c, g, or t
  misc_feature (54)..(54): n is a, c, g, or t
  misc_feature (58)..(59): n is a, c, g, or t
  misc_feature (472)..(472): n is a, c, g, or t
  Coding DNA Sequence Number=SeqID_3888
acttatatagtatctaatctgtcaaaaaaaaaaaaaanaaaaanngctntantnccgnnattaacccgggttcccggaaaaccccttcccgaaaggggggggggggttcactctcctacttgccgggccgggccgcgacccttcacccccttcccccttccccccccctcttcggcactgagccgggggcgcggtgttttcctcctcccgcaaaattctctcgcgccatcccctccccccgcccccccctctcccccctgtatatttcacctccttccctctcacacccccaaagaccagctgtgttcgaattatctattttatctttttcttttctccctccccgacgcgcgcccccctctcatcgacctcaacctcgctactctgttgcggcccccttccgccccacccacatcgttctctgcgttatttcctgccctgactgccgcacacctgaggcattcctcacgcnctcctgaatatacaactttatccacgcataacataatcatcctctacggcgc

SEQ ID NO: 18292 - DNA, 357 bp, Zea mays
  Coding DNA Sequence Number=SeqID_3889
agatgtttggtaattcgtcctccgccaccggggagctctctcggagattatctcctgatgatgttccctgcgattacaactcctacgacccatgaagtctagaactacgcctatgatgaaagcatacccggcagggctcttccccagaagcacccgtgacctgcaagctgatcggagctctgctcgtccttgagcgcatggataactacgtcctgcagcctgaggtcggcaacaacaacgtccccaaggtgaacactaactaccgctgtttacatcgctgcacgcctcatgaggggtgtatcaggccacaggtctatttcgaagcaggccccgtgcgatgcaccgaatgccatcgag

SEQ ID NO: 18293 - DNA, 154 bp, Zea mays
  Coding DNA Sequence Number=SeqID_3890
ggccacagccgtcttatcggttcgacttattgctacttcatctataacgtcatcctcccccgtgccccccccgcatgaccccacggctcccccacattctggctacttagactttattgtcatagtttttcaacaaaagggtcagtttaagact

SEQ ID NO: 18294 - DNA, 421 bp, Zea mays
  Coding DNA Sequence Number=SeqID_3891
ccccaacattagactctcttcaatgagatttttgcaagcatggcaccggctttaatgggcttcacacgcacggcaccgccacgtgccaattgcaaacatggtactataatggtcgagactttaaagatactagaataaggcagcgccctatcgggcgctacacaacttgcctgatggagcaaataggaggttagatataataaaagacaaacacttcatttgacaactttttaaaagcggtattagacatacagatttggcgaataagacattttttactaactactgcctaaaatctcgccaaatagagtgttccttctactgatgccaagcacctagcaagaaggcttgtgcatctgcaggatgctgattcaaagtacaagccctctttatacagataccgaattggatatttcactca

SEQ ID NO: 18295 - DNA, 408 bp, Zea mays
  Coding DNA Sequence Number=SeqID_3892
tagggcgaacgcgaaatctaaaattagagagcgatggcgagtacagcagctgcgacgggaacgacgacggcgaagagaaaacctgtgtttgtgaaggttgagcagctgaagcctggaacgaccggtcacacattgactgtcaaggtcgttgacgccaatcctgtggttccggctgcgaggaaggctcgtccggggggttctatgggtcgtccgtctcagccgagtcgaatcgctgagtgtctcatcggagacgaaaccgggtgtattctcttcactgctcgtaacgatcaagttgatcttatgaagccgggggaaacagtgatagtgcgcaattcgaggatagacatgttcaagggtacaatgaggctaggggttgataaatggggacgcatcgaagccactgagcct

SEQ ID NO: 18296 - DNA, 370 bp, Zea mays
  Coding DNA Sequence Number=SeqID_3893
gaataccacatctaattaatacagtttatcacttattagttcatctgggaatgccttttgttttgcttacaaatgctagatcattcgagctaacaagcttaactcgagctggcttgtaacaaaccgagccaagatactagcttaacttgggacaaaactaaaacaagtcgagaacgagttgacgagccacaagtattttgtctctcgtggctcgaacctggccacataagccctcgccacacaaaatcctgctggaaagaagaggacgcgcaggggcacgcgcaccaagcctgccgctggggagtatgcgatgccaaggcagaggacgccggccgaactgatcacaactgccaaggccatttatccgatc

SEQ ID NO: 18297 - DNA, 43 bp, Zea mays
  Coding DNA Sequence Number=SeqID_3894
cggctcgagcacgatatttacttcacacgacgcgattgctttg

SEQ ID NO: 18298 - DNA, 281 bp, Zea mays
  Coding DNA Sequence Number=SeqID_3895
gcaaagttagtgatagtccatcatgatatgttatcatcgtatatactgtttatgcgtgggcacctcatggtttttgctttttttcaattattttttgtccttatatttgttctattctttttatcttatatagtaattatactagttaaattagtggatctggttctttttcggcatctgctccagtgtaccctgattttgtagacagttaggactcaaagagcgacttaatgattaacaaatcttattataggctgacatccacagtttttgtttcttct

SEQ ID NO: 18299 - DNA, 504 bp, Zea mays
  Coding DNA Sequence Number=SeqID_3896
atgatacatctttgtttccgtttcaaaaaaaaaaaaaaaaaagggcggcgaacaccatcgtcctcgtccctgtacctgtaggtcgacagccacaggcggtgccatctgtgacgacgacgtgcctgttgcggaggagcagacgtgtcggctggcatggttggaggaggtcccgcagcctaggaacctgagggttgtctgcttgccgttccgaggcccaacgatcttctagcctcatcaacagcccatccggcaggcagaccctgcttactatctctagctatgagggaggcatagttgatcaaaaaaaaatattgtctttttccttttggagaataggatcccgtgctgataaatgatgatgtttacagtatgtagtgttaagctactcctcctgcgtcactgagacaaaacgtattcagctcttcacaggtggacgacaaagccactggcttctgtactttctgtttctgcggatgaaccagatccccgccatagtcaaaaaaa

SEQ ID NO: 18300 - DNA, 567 bp, Zea mays
  Coding DNA Sequence Number=SeqID_3897
tgagtgcaacgatacctctctcgatacagcgattccgaaggcgcatcacaactgctcatcacagttcctggacagaggccaccgccctgaatgctatgttcttgctcaagcgacaagtccgctgtctgcacggtaccgggagggagctcctctcttactgtcgtactgtgttggctgacactgagaatacctcagatacctctgacttgctcgcacggacgctccaaaggaccagagcttctgatgaatgacgtgccgcgtgatcgctggaactgataggagcaggcagtcgtcttatgattcgaaagcgaaggacggatcgattcccttgatgtactgcagtcctgtgagcgtgcatctacaacttgtataagactccccgcgcggcgcgcgcgggatcctgtactgcagcatcactctgaagcctagctaaaaccaccagctcctgtaacttgatgccgggcgggtcttgtcatgtactgaaacctacaataacggtcgccgaaccccactctttgatgttcagttaacttgtcgcggtttacaagaggccgtgtgatttctgca

SEQ ID NO: 18301 - DNA, 461 bp, Zea mays
  Coding DNA Sequence Number=SeqID_3898
tatggcgcggaggtttcggccttttaccgcctgaccccggccttctcggcgctggccagctattcctacaaccatgccacctatcagcagacggtgcgcgacgggtcgggcaacctgctggccgaaaaggggcgctatgtcgtcgacacgccgcagaatatggtcaagggcgagctggtctatgacgacagccgcgtcttcggccgggtcggcgcggactatatgtcgaagcgctacttcacctatctgaacgatcagtcggtcgacgggcgcgtgctggtcgatgccagcatcgggtatcgtttccccaaggaatggggcggcttctcgatcgaaggcagcgtgaccaacctgaccgacaagcggtacatctcgaccatcggcaccaacggcttcaccgccagcggcgacaaccagacactactcgcgggcgcgccgcgccagtggttcgtgacgctgaa

SEQ ID NO: 18302 - DNA, 554 bp, Zea mays
  Coding DNA Sequence Number=SeqID_3899
taatgtactaggttgtctgactgaaaaaacaaaaaaaaaataccctagacctgaaagaaaaaaagaacaaaaggggcgcgccgctcgcgaatctaaaaactagtccgctgtgaattttgaataaatgtgttgctgttctatctaggcgcacttctatgccggcttggtccgctgctgctgctgctggccaccatgcctgggccgctgacatcgctggtgctgcttcgaagaggcggcctccaccgccagcggccggcagaagcgaagaaagacccgaacgtcagcggagtgcaggctaaagtgcttgctagcaggaagaggaaggaggccatgaaggaagctgtggccaagctgagggagaaaggtaagccggttgataagtgaaggccagaacccagtgacccttgatcaagaaatgtaacttattgttaaataatatactccctttattcttctaaagtaataagtcattaatttgaatagtctactcactttatgtgtacagatgagaataaaaatacaactattttgcttgtatgtattttgtcccagcc

SEQ ID NO: 18303 - DNA, 229 bp, Zea mays
  Coding DNA Sequence Number=SeqID_3900
gataagggttcagcgatccagatcctcaaaaattctcctttgagcagcacatcatttgctcgcaatttcagatgactctagcatccttcagtgagtgtggcagacctggtcttgtgtagctttcagattgctcaattcggcgagatcttccgaaagatccctgctttgctgttattgatgaagaattgtgagaaattaggtgtctctatttatggttctggcacctgct

SEQ ID NO: 18304 - DNA, 413 bp, Zea mays
  Coding DNA Sequence Number=SeqID_3901
gcccctgagcctgtgagggaacgcagaagagggtttccgtgccgcgccacacgaccccccccggcgggcgatggacaccgaccacggcggcgcgtcggccgcgggcatggacgaggcggaggcggccttcttcgcgcgcgggggccggcggtgctgctgcttcccctggcccgccgccgcctcctcctcctcctcccaccagcgggtcggcggcgccgcggcggcggcggcggcggcggcggaggagacctggtggcagcgcgcggtggacgcggtgctcaaggtgcgcgagtggtcggagctggtggccggcccgcggtggaagaccttcatccggcggttcggccgcagcggcccgcccgcgcggccgcaccaccaccacttcggcggccgcaagctcaactacgacgcgc

SEQ ID NO: 18305 - DNA, 416 bp, Zea mays
  misc_feature (282)..(282): n is a, c, g, or t
  misc_feature (285)..(285): n is a, c, g, or t
  misc_feature (319)..(319): n is a, c, g, or t
  misc_feature (325)..(325): n is a, c, g, or t
  misc_feature (327)..(327): n is a, c, g, or t
  misc_feature (333)..(333): n is a, c, g, or t
  misc_feature (344)..(344): n is a, c, g, or t
  misc_feature (347)..(347): n is a, c, g, or t
  misc_feature (353)..(353): n is a, c, g, or t
  misc_feature (359)..(359): n is a, c, g, or t
  misc_feature (379)..(379): n is a, c, g, or t
  misc_feature (391)..(391): n is a, c, g, or t
  Coding DNA Sequence Number=SeqID_3902
cgccgtcgctgtattcgcagccggtcggccgtgtcgtcgaggtgctcggcgagatcgacgaccccggcatggagatcgagatcgccgtgcgcaagtacgacgtgccgcaccgcttcagccccgacacgctggcgcagagcgccaagctgcccgagaagctgcgcgcggccgacctcaagcatcgcatcgacctgcgcgacgtgcccctcgtcacgatcgacggcgaggacgcgcgcgacttcgacgacgccgtctactgcgagcccttcaagcagggccgcngcnagaaggccgtcgagggctggcggctgctggtcgnatttgncncgtgtngcactacgtgnatnccgganaccggntgacgccaccctacaacgcngcgacttggctntttccgcgccgcgtatcctatctgc

SEQ ID NO: 18306 - DNA, 297 bp, Zea mays
  Coding DNA Sequence Number=SeqID_3903
gatcaaggcggaaaatattttcttccccgggtgagccatggcaaacccccattcggtttggtcccgcggggggccccaatcaactgggctccggcgggggggggcaatcaatccatgccctgtggtgcgcctgtaaaaaaaccttgggtttttaacttcacttcaagcccccatgtcccaggcccttttgtttttttagggtccttgggaggcccttttacccatagggctgtcctgttggacatggggtgatcatatgttgaaccccgggccatcctgggcccatgttagggtttt

SEQ ID NO: 18307 - DNA, 471 bp, Zea mays
  Coding DNA Sequence Number=SeqID_3904
tatgcacatgtgatcaagcccatccattagcagttactacccaagggtcacaccccttggggaaccatgtatacacttgtatataaactgctcctctgcaataaaggacaacagttctgtcattttgttacttctctcaaatctcgttaccactgaattccaacacgttatcagcactttgcctaccgtcgaagtctaatcggtcattgcgttcaaggagggcgagcgaccaattagtgcagatgtcccccgatgaagaagcaatacaggatactaaacatgatccattggatagggtaacaatattctgattctaccttccatggatgttgattcattttgcatgcttcgtggacttgtcgtcgttcttctgcctcttcaattacctgcaacactgcatcgccgctgtggtgaatgccgtatgatgtgtctcacgttgggcatgcataccacgagtggacctttgggcga

SEQ ID NO: 18308 - DNA, 438 bp, Zea mays
  misc_feature (237)..(237): n is a, c, g, or t
  misc_feature (318)..(318): n is a, c, g, or t
  misc_feature (364)..(364): n is a, c, g, or t
  misc_feature (390)..(391): n is a, c, g, or t
  misc_feature (394)..(394): n is a, c, g, or t
  Coding DNA Sequence Number=SeqID_3905
gaggttgataaggatgtgtactgcataccacaacaagcgcacactacctgcccatcaagagacttgtgcacattatcgatttaactcttactatgttgtctttccttttcatcctcaggatccatttttctggtatttgtcccaaaccatttctgataacatattttcactaactactggattttttgtttatcttgctttcatactttgctacctgcggcggactggtggtaaagngatcctggttccctttgtttccccaccaactggttttggtttgttttttcggcccttctcccttcgcggtcatgcttctgnttaccattactggttaatgctttttagttttctcatttctgctgtnaatttttttctttttgggttgcttgnnatnacctccatgttctcctgtttacggtcgtgttatggagcaggttt

SEQ ID NO: 18309 - DNA, 387 bp, Zea mays
  Coding DNA Sequence Number=SeqID_3906
aatcaaccaccgatgctacagacagatcagtgcgaaactcgaagttcagcagggcatcatatcgcgcgatgtgctactgtatactacacgaggacaatgtcttgggagctatattcagcctgtggaaggagctgagggctgcaacgtcctgggaggacgttgagaacctggtctggggagagctgaaccggtaccaggactctgcagttcgctcagcataactaaacaccagcaaaaaaaaactttctgaacatacgtgtatgttgttgttcctccgacgactgtaacttccaaataaaaaaaagtgtagggaaaataacgaaggctcgacacggcatgcccatattttcctaggcagcaggcaggtaattacctatggctggtgat

SEQ ID NO: 18310 - DNA, 473 bp, Zea mays
  Coding DNA Sequence Number=SeqID_3907
gtggtctccttgattatgttttattcaagatcttacagttgaccaacaattgactttttgagtcgttcttcagatggacgatccgaggccgcagcaggttgcagtgctccgtatcggacttaattcatggtctccttatcggtaaagtcttttcaggtgtgctaattggatatgtctgtgcgctttcgagaaaaaaaattggatatgtctgctcaagggatgggagtagctgcacttcacacacatagatgacactttaaccaaagtttggcttgctactaatttaagtgaatggaagagtagagtctttaactagcttgctattaccttttgtttaattagtgcttttgctctgtctctgaggtgatgtgaaataaaaattcaatctattttggcatagcagtgtagttttagtagcaccctagagttgtttttcttaataaccgtggtgagttttcatcttctcaacattg

SEQ ID NO: 18311 - DNA, 476 bp, Zea mays
  Coding DNA Sequence Number=SeqID_3908
agtggttctgtctttgctgtcgtagccgtgccccgttagctactaacgccaccaccattttgatctggccgaaggggggccgagggaaagaccgtgccaccgtatccgggttcatttatgggtcaaaaaataaggtcaaaaacacaagggaacacacaaaacgtaacgttacagctgtcgaggacaggactggcctggagtcctttccacaaaacaatggcgaccaccctaaaaacgaggtacacttacactgggtatgcaagggggggtgagggaaaacaagccggcccattacccatggtggaacaccaccgttataaaagaaacgaaagggtaactacctgctgggcagcctaaggctacacaaggctgtcagggtaaccacgattacaattttcaaagcaaatgcgagggattgtcctaaagacataacgcaacagaggcccatttggaaaacaagcttatgtgcaccccac

SEQ ID NO: 18312 - DNA, 328 bp, Zea mays
  Coding DNA Sequence Number=SeqID_3909
cttcttcgtcacagagacgtcaatggcggcttcgttctcactcacgagcttcatctcattcatctctccattcaaatcccagaccaaaccaaccccgcctcccaatctcactctccccgctccagcatccccccacagacggagaaacgatcgcgccgcggacgaggctcctccttccaacgcctcgctttcctccgagctcgcgtccgtgatatgcccgtcgctagcttactcgaacacgctcttcttcagcagctcggggtacaacgtgcaggtgttcgtggaggacaacgagtcggaggagaggctggtgaatcggtttaggagg

SEQ ID NO: 18313 - DNA, 403 bp, Zea mays
  misc_feature (330)..(330): n is a, c, g, or t
  misc_feature (332)..(332): n is a, c, g, or t
  misc_feature (336)..(336): n is a, c, g, or t
  misc_feature (340)..(340): n is a, c, g, or t
  misc_feature (366)..(367): n is a, c, g, or t
  Coding DNA Sequence Number=SeqID_3910
tgccagcctatgcagcgcccgagcgctcgcctttttgaccgcgtccgcctgccgcccctgccctgtactgtacccctccccccttcacagcgtcacacgcactttttgttctcgccgatccagtgccactacactacaatactgctgcgcgctagcggtagcgctcgcactcgcaccacgccaccgctggtgcctgcttctaacagtcctccccgcgctcgcattgcgattcgcgacctaccgcgagggtaccgggggggtggtgcgcgcgcgtgctcggtgatccgggaaagcgccccgagatggccgggggtggaggcggcggtgccncncccnatcncgacgactttacgccgcgcccccggnnggaccagctccctgggggctcctactgggtcacccg

SEQ ID NO: 18314 - DNA, 267 bp, Zea mays
  Coding DNA Sequence Number=SeqID_3911
tatttcttgatcttgtggctaagataaagtgcattggctgcagtttgatatctaatatatgggttctatgtctattttaactttagatttattatgtatgtgaataattcaatttaattttaaatttatcttttatccatcatactagcttaacatgttgttagacccttttcaccaagagaggctctaaacatggtcctattttaaatctatactactctataagacagtatcgtagacgttcacaatccgtgcaccacggttctg

SEQ ID NO: 18315 - DNA, 395 bp, Zea mays
  Coding DNA Sequence Number=SeqID_3912
ggccacagcttccagaaacgagcaacatcccaaagcccctagcatttcgtctctcgtcatccattgttgaacatgtcgaggagaaagaccagagagcccaaggaggaaactgtcactctcggacccgctgttcgtgacggagagcaagtgttcggtgttgttcacatctttgcttctttcaatgacactttcattcatgtgactgatctttcgggaagagaaactctcgttcgtatcaccggtgggatgaaggtgaaggcagaccgtgatgagtcctctccttatgctgctatgcttgctgctcaagatgttgctcaaagatgcaaggagcttggcattactgcgatgcacgtgaagctccgtgccactggaggaaacaaaaccaagactccagg

SEQ ID NO: 18316 - DNA, 403 bp, Zea mays
  Coding DNA Sequence Number=SeqID_3913
tgggtcttgaacaagctcactttcagtttttgcctttggaatccacttctaggccttggctttgaggcagcagagcctctaggtgtcctgctccaaggctgtgtccctgtccaggacaggcacccctagagtgagcctgcagaaccaagctgaaagcctcccaccctaggctttccattccagttctggggcctagattctgaacttggggtctttggtcatacccatctcaaaggaaccagactagctgaacctggggagctcccacctcacaactgctgcccatggggacctcccttgggcaggaggaatcctcagtctcaccccacccattcagctaccagaatctgggccacccccagcagtatttttatcttaaatgttacccattttgtgagttatg

SEQ ID NO: 18317 - DNA, 158 bp, Zea mays
  Coding DNA Sequence Number=SeqID_3914
gggtgatggcttagtcaatgatctgggtatctgcttccactgcctcggtctgcgtcggtgacatggaagatgggcgggatctggtggtcggatcttctgttgttttcaggacggctcgaatgggttatcttgcttcgtgtgacggttttgctgggaac

SEQ ID NO: 18318 - DNA, 428 bp, Zea mays
  misc_feature (47)..(47): n is a, c, g, or t
  misc_feature (81)..(81): n is a, c, g, or t
  misc_feature (278)..(278): n is a, c, g, or t
  Coding DNA Sequence Number=SeqID_3915
gactccagcacatcgcgaggtgttcattagtacggcaatgagggatntaagacctttttttgatccaatgaggattggatntaagggttcgaagtgctcgaaacgcctgacacttgcaggactccatagaaacgacagacactgcttctgtcagcaaagactgcgtatcccttgatatttttgcgatcagttgcttggcggtgaacattcacaaggaagtaacgacatgctgtcgcatgctgagccaaggtttagacttcatagcctaccaaaaaggntggtcagggatacgcagggccaacgccaagacgatttgttcactgctattccacaataaagacagacgattgcggcgtaaagacacccggactccaatggtaggctcaaattcctaacctgccttgaaatccaggccactattcagataa

SEQ ID NO: 18319 - DNA, 158 bp, Zea mays
  Coding DNA Sequence Number=SeqID_3916
catgaagtgaaggaatactctgtcattgttccgggcagcgatccactcacgcgtacactgtcgattctatctcctcatgtgttgagcgtgtctggctctctgtggatgcttttctcgtagcgccatgtattaaatcgagctaagctaggttaaccttg

SEQ ID NO: 18320 - DNA, 200 bp, Zea mays
  Coding DNA Sequence Number=SeqID_3917
atcttctcttcatctctatccctcacgcttctctctccctcctccgtgtgagattttttcagccacccagcgctcacaattctctccctgatatttcccagccgccgccgtacgtttgatttttcttcctgtgcttcccaagagctcccacgtatgcctctatctacaccagcatttcagccgctaaccgctgggtctat

SEQ ID NO: 18321 - DNA, 304 bp, Zea mays
  Coding DNA Sequence Number=SeqID_3918
attgttacagtatgcttgggctttgtgatcagggcgtgtatggaatgcaggtgcagtctgaaggaagcatgacccagctccgaaggtgtggtggagggagcttcggcttaacaggagaggcgatgatcaacaatggacccggcctaaaggagaaaagactggttagtcctcgccatctgactttatggtcattagtaaatgtcagggacgtaaacgtagttttgtccaggctgtgttctgtgcctataaatagatgcacagtagcacattactgttcatggtgacgtgtaatcactcatgcgtc

SEQ ID NO: 18322 - DNA, 137 bp, Zea mays
  Coding DNA Sequence Number=SeqID_3919
cgcagatcaaaactctactagcactgtactctatctcttctctactacaccttttaacgtgtgcatgtgtcgaataagctttgcttcaaggaccatttttttcaaaacatgccccccaggtggtgccgtttgtatca

SEQ ID NO: 18323 - DNA, 387 bp, Zea mays
  Coding DNA Sequence Number=SeqID_3920
tcgtctcgaggcacagcacgcaagagattgtctagcagctccagtccaaccgagcatcaaacaaaacatccgcagcatgatgagaggagaggaggatcaccggtcgcgaccaaattctcccagagacggtcggaaatgaggagccaagcgctgttcttcctcacgatcgcccttctcaccgtgctcgcgcgatccagcaacaggcaccaccaccaccacctctcccacgttcaaagcagaggtatgcaggaggcagcttcatgacgaggtcgagtaggggagctgacgagccgttgaaggacgacattcactcgcatagaccatcaccttgaaggtggagtcgtgtgacacattcgatactgtgataggccagatcctggacacgga

SEQ ID NO: 18324 - DNA, 541 bp, Zea mays
  Coding DNA Sequence Number=SeqID_3921
ggctgagatggctatgttaccaagcaaacgtctacttctcattgcttttcttttgctttgtttcatcaccatgacagctggagctagaaatttgagagagactactactagggatggagttgagaagggtcaaagtagtagtctgtttaagcctaacgatgaaggggcacaagacagcagtggtgacttggacacaatggactacacacctgcaaaaaagaatcctccaatccataattaaaatagtgttttttcttcttggaaaatttttgatagcaaaagcaaagcaccaatccatggtgcttaattactctgcaattctatctatgaccttcaatgtatagatatcgttggaactttgagaaagcactagtctagctgctaccaaatcatatatttagaactcacgtgtaaatagtttttgaagttatgagaatgtgaggggagtgtactgagaggaggagttttcaaagtttgaaaagcagcaccagattaccaaaaacagatgcttaatatatccactttgtcttattcttatgca

SEQ ID NO: 18325 - DNA, 490 bp, Zea mays
  Coding DNA Sequence Number=SeqID_3922
taggcgtccacagccgcacggttctgccatcacacgattcctccgcccgcgattcccctccccgcgcccgcagcccccgccgccgtcctcgcggccgcagccgagcacagccgccgcgcccgcaaatcacgcgactcccgcttccgaggggcctggcggttcgctgccagacggggtccaccgcagcgcccttcctcaagacggaggaggcccccgcagctgcggcgggggcaaggaatgcccaagcggggttcaccttcatcatgaagttcggcggctcgtcgctcacgtcagccgagcggatgcaggaggtggccggcctcatccttagcttcctcgacgagacgcccgtcgtcatcctctctgccatggggaagaccaccaataacctccgcctagccggagagaaggcggtgagctgcggcggaggaggggcgtccgaaatccctgagctcactgtcatcagggagctgcatcttaggacaattga

SEQ ID NO: 18326 - DNA, 545 bp, Zea mays
  Coding DNA Sequence Number=SeqID_3923
ttcggaatgttgcatgggatccaaatggaatacatatgggaatcgatgtcaactctattcaatccgtaagaactgtgcgatgggattgggcgaatggcgaagtagccaatgttttcataagctatgaagcttccaccaaatccttaactgcctctttggtttatccttcacttgaaaaaagttttatcttgagtgctattgtggatgtgaaggatgttcttccggagtgggtaagagttggtttctcagctaccacaggactagctgcaggctacgttcaaacaaatgatgttctctcctggtctttcgagtcaaacttgccaggtggtaacagtgctgcttcggtgaagaacgcgggtctttcaacctatgctgcatgatcccatgtggttatcggcgacagaagacaacgacaataagacctgcaacaatggttgttatcgtgttgtagcaactgtcacagtgcgcaactataaaatcctgtgtaatagttttattagtgactgttcctaaaataaataagatcggtcacttatgtttgtgtt

SEQ ID NO: 18327 - DNA, 512 bp, Zea mays
  Coding DNA Sequence Number=SeqID_3924
gttttatctcttttcgaagcaagcaagcatggaaacatgccggcatcacacaattctgtagcagccgcaccggctgtaacagcgagacatgtcttacaaaagttttttgtcaaccatgggggtctcaaattgatgacagtaccataggtagttcaagtgatcatttccttgcctgttgccatgttcaagccgagcaaataacactataaggggaaagtaagacgccaatataggattattggaagcgttggttataagctgaccagagcaaacggacatcggacttggttgcacattgaacaaagcttctggagatactcactcgttcatcacaggctggttctcgttggccttgggcctctgctcctttggtctatgctcctccattttcctcatgtcggcgccgcccttctggctgaggaaggaacggaagaggggggagttcacgtcgtagatcatgttctactccatccgccagccgccgcagaaagctagggtatcgacctctcctg

SEQ ID NO: 18328 - DNA, 509 bp, Zea mays
  misc_feature (346)..(347): n is a, c, g, or t
  Coding DNA Sequence Number=SeqID_3925
atagcatggtcttttggtggcatgatctttgcccttgtttactgcacagctggaatctcagggggtcacataaacccagctgtgacttttgggttgttcttggcgaggaaattatctttgactagggcactgttctacatggtgatgcagtgtctaggtgctatttgtggtgctggtgtggtgaaaggttttgagggaaaaacaaggtatggtgttttgaacggtggcgccaactttgttaaccctggttacaccaaagagtgatggtcttggtgctgagattgttggcactttcattcttgtctacaccgttttctcagccactgatgctaagcgtagcgcaagnnactctcacgtccccattttggcacctttgcctattgggttcgctgtgttcttggttcacttggctaccatccctatcactggaactggttttaaccctgctcgtagtcttggtgctgctatcatcttcaacaaggaccgtggctgggatgatcactggatct

SEQ ID NO: 18329 - DNA, 578 bp, Zea mays
  Coding DNA Sequence Number=SeqID_3926
ctaaatcgggcgatctgaaggaggaggaggcggcggcactccaaactttagcgacatggcaatgcggttggcggctgcggccacgttcgtgcggcgcctggtgccggcgcggcccaccagtacgcatcctggcggcggcatctacggcgcaaagcgggagggcagtgacgtgcgggcgcggcaggacaatgcaaaccaagcgcgcggaaacggttcaagggctcccttcggcaacgcacgcacccgtacccacagaagaagattgaccgcatcaaggaccgcgtcgaggtgccccgccccccaccctgtcgcctcccctcctaagggtttactgcaacagttgctcccccccctccgtttccaattagctgcaaccttgcctgcaacagtggctgctacttgttaacttgtttctcactgcagtgctgctagatatgttctgtcgaactgctgtacttcaactttgacccattggatatcctttttgtactgagtaactgatgtagttcaactttgaaccatgcaatatccattttggatggaagtgaaatatgtttcttcccatcattttgttatgt

SEQ ID NO: 18330 - DNA, 502 bp, Zea mays
  misc_feature (153)..(154): n is a, c, g, or t
  misc_feature (432)..(433): n is a, c, g, or t
  Coding DNA Sequence Number=SeqID_3927
tacaactcaccaacgtagttaacggggtaccatcccgtaaatctcttggtagagctctatatgctgcccctttccaaatctgggatagcaccacaggcaacgtggctagctttgtcacttccttctcctttatcattcaagcacctaacccanncacaacggcagatggtcttgccttctttcttgcaccagttgatactcagcccttagatcttggaggaatgctcggaattttcaaaaacggatatttcaataaatccaaccaacttgttgcagttgaattccacaccttttcaaatcgtcactgggatccaacaggtagacttttgggaatcaatgtcaactctatcgtgttcgtaaaaacagtgccgtggaattgggcaaatggcgaagtagccaatgttttcataagctatgaagcttccaccaaanncttaactgcctctttggtttatccttcacttgaaacaagtcttatcattcatgctattgcggatgcgaa

SEQ ID NO: 18331 - DNA, 389 bp, Zea mays
  Coding DNA Sequence Number=SeqID_3928
gagattgagatcttctcagttactaagaaggcctctgttggagagcaggaggcttggaggagggtattgcacgagctcctcctccgaaaagatcgtagcttcggtgcttttcgagagattacgcgttgtgattcccaaaccagatcctgctgtctacgcctttcaggagttcaaattcaattggcaacagcagtttcgccgtagatacccagatgagttcttggacattgctaagaacagagccaaaggtgaatatcaaatggactatgtacctgctcccagaatcactgaggctgacaagactaacgacaggaagtcattatacagagctcttgacaaaaagttgtatcttcttatcttcggcaagccctttggagctactagtgaca

SEQ ID NO: 18332 - DNA, 534 bp, Zea mays
  Coding DNA Sequence Number=SeqID_3929
aaggtttgccggtgcaggatgaccagccgttggacccgcagcagttgctcacgcgcatgcagatggtcaagcgcgtgtcgttgctcgacagccaggtgacattgcagccgttcgagcaagcgccgttgaccctgacctatgtgggcctgagcctgcataccggcaacacccgccaacgcctggatgcacgcctcaccctgccggacggccagcctttggcgctgagccttcgtagccgtattcgtgcaagcgcatggaaagagggcgaagtcgaagcctacctgagcctgcctcaaagtgactgggccaaatggattcccgccaggctgacccagcaatggaagctcactcagttcaaagccggtggcgagttctggctcaattggggcaaaggcaccgtccaaagtgccgtggtgcgcctcaactaccgcaagtaaagggcagttacgccgaccgcaaacctgtgcatatcgaaaacctcgcctgaccgctactgaacgcagtgacagtggccttaagggttgttcgattcat

SEQ ID NO: 18333 - DNA, 562 bp, Zea mays
  Coding DNA Sequence Number=SeqID_3930
gttgaacatagcacagcggtcacttaaccaagaagaaggggctctcgtacccgtattcgatcagcggcgcaagcgtcgccggagtgagtagataatggtaccggaattgttgatcatgaggaacctgaacaagccggggccgcggcccggaacgctatatcaccgaccctgtcgccggacttgtccgcatcggcaccgtcgccggggccgagcgccagcacaacggcgtccagcgcgcccagggccaggttcccgagctgcttgaccccaagatcgttccctcccgacgacgggaccttgtcctagtcatcgccggacgccctgcacgagatcctcgacggcctcctcgcgtgcttgggcggcgtcgccgtggccgtgcacaccggtctgctgctgcccgtgaggaaacactggagaggcgccggcgccagagccattgatggccagtcgatttttgtcagctctctcgcttcttcctctgttcaacgctagcttctacttctctcgtgtggtgatggccgggcgggcagggggggcgcaacaagaggcgtgtaaccggttt

SEQ ID NO: 18334 - DNA, 536 bp, Zea mays
  Coding DNA Sequence Number=SeqID_3931
gaagcttcagtactttggcgttgacaaggaccgcaactgggcggggggtatccggagtgtcaagtttcctcaggtaccttacaccttcttttcccgacggcaacgatgcaatgctgcccgggtaccaagatgcccatgacacccgcacctttatcccgaggaacaagtcggattacctcccgcccatcctcaccacatagagtgcacactgcaggcagcgccatggctgctctcctctctggcctcaccttggtgtccctgtgtttgtgtttgagccactggaggttcagattgcagcgttgatactatacccactccgtcgacatgatttagtcgttttggacggagggagtagacgttattgagtcataataaaatccagtgtgcccggtgggagactgggaggatagaaattatagttgttttttacgactgcttactgcttactgcatccagattgtgttgtcccttgtctggtgtaacttctgttgcttgctgcgttgcagtgccggggcccggatgtgactccagatttc

SEQ ID NO: 18335 - DNA, 178 bp, Zea mays
  Coding DNA Sequence Number=SeqID_3932
gctgctgtagcagatggactttttttctctctcagtgaaacactgtggagtctgcagcagcagcaaccttttctggctggcgaacaagctgtccatagggcttcacggccacttcgatgatgccgccggcgtacccatatctgacacatccgcatacaatggagttcccatgcgggcc

SEQ ID NO: 18336 - DNA, 504 bp, Zea mays
  Coding DNA Sequence Number=SeqID_3933
agacccttcgaccaggagtcaaattgaccctgtcagctctaatcgatgggaagaaacttcagtgcaggagggcacaaggtcggcctgggatttgaactggaagcttaatgtggttttgaggaaagcatcagctttgtccctggaggtgaagagaaatgaacccactatgttttggccttaaaattcttctgtgaaatttcagaagtgtgaactttttattcttccaaagaattgtactcctccccacactgaagcctagggtcccggtccaccctaagggaggtgcttgaaggcttcccggaagctgtcacgttcgtgccacgtttcagttcagttccgcagtgttactttctgtgtgttcctcagcgacggtgtagtgtcatgttccgaggagatgacccgaccctccagttgtccatcgcgtcctgcatgtcccacaccacttttccatgaccttgtaatattggtctctgtacggtagtagaatccttggttttgcatcag

SEQ ID NO: 18337 - DNA, 338 bp, Zea mays
  Coding DNA Sequence Number=SeqID_3934
ttcgaccgcttctacatttgtcagacctagcatcactaaagctaagccccctaagaaggctcctatagtgcctcgtgccttgcaacttctaccgctgagtgatatgatgttctttgcattcgtcatatggacaatcacctccttggctgcttggaacatgtttagtcatctttaggtcaggcacaaacctctccatgaagcagtacctaggctcttattagtgcttttggtatctagtctcctattagtgcttttggtgattaataacgacacaaaacgtactattgtgatttttttcagaggtgtagttttaaaaacacattggtcctgacttttgg

SEQ ID NO: 18338 - DNA, 218 bp, Zea mays
  Coding DNA Sequence Number=SeqID_3935
gaagcatgttatagatcactccctttaaatcctctgtcagggcaatagctaatatggatatcaagctagattttgttccaccatggttgatcaacttcatgtcaaggcaactaataggcagcgggcataagctgtatcaaaaggcagtcagtactgtggccagtcatgatggtgactacaggaaagctttgagaggatcactctacgccaggatccgt

SEQ ID NO: 18339 - DNA, 521 bp, Zea mays
  Coding DNA Sequence Number=SeqID_3936
ggacaaggactcaaaattggcctctttgatacctggcttgcagagactgggaagagaagaagatgaagaagggcagggtgatgatcaaagtgtggtttctgataataataataagccttatttgtctgaggcttgggatgttttggaccaaagggagatgggaaatcctttgttgaattggagggtaccagctaggggtaatgaaattgacatgaaagacaatcttaggttctgggctcacactgtggcatccattgtaagataagtaggaaaaaatttagatgcaaatcttgagtactttttgagttttgacactgttttctgattagaattggagtttcacttggataatctatgttgatctttaatgtaaacctatgttatctagattactgatatgaaacttcaattttaattagaaaaaaatgctagtgaaatgacatataatttttgtccatattgtccaaataacaattagcaatagaaagaaaagcaaaaaaggttttcatgtcttctgcaaa

SEQ ID NO: 18340 - DNA, 123 bp, Zea mays
  misc_feature (58)..(58): n is a, c, g, or t
  misc_feature (98)..(98): n is a, c, g, or t
  Coding DNA Sequence Number=SeqID_3937
gaataacttaattgggccaagcccataaatcctaacacatttcactatgtaccgaatngttaagcttcctcttctcccacaccaggcggaatcaccanagccggtccaggtagtagtccctgg

SEQ ID NO: 18341 - DNA, 394 bp, Zea mays
  Coding DNA Sequence Number=SeqID_3938
tttcttcatggttcgggtttggacattacaggatgattgggcagtgcagttcagagtaggtagatacggttctctaccctgtcgagtttgcctcctcaagacacggcccaaattgtgtatgcttcctgcgttgtcaccatctcgttcaccgaatgattttcggttataattgctgttccattgctttgttaacacacatgtttcattcgtcgtctgaatcctgcgtcgtctataaacatgcccgcctgccaatgcaacacctcgctgaactcgtgtccccaaacaacaagaaaatgggatctggctgagggtgccaaacaagatgtcttctgatgaccgagtgaaagacatgacacccaaatgattgactcccagactgggtatgactagacaa

SEQ ID NO: 18342 - DNA, 223 bp, Zea mays
  Coding DNA Sequence Number=SeqID_3939
tccgatcaatacaaggcatcaagccatttcagtttcctcctagtaccaccgtgtgtgcttcaagcctcaagtgctgtgtactactactactgctactatgtgtgtgtgtgagaaacactagtgagtgtgtgagtagtacgtgtgtgtgagtagttctgggctaacaacgtcgtctcggcatcccacatggcgcggtcctcgcgggactgcacgaacccgtcgc

SEQ ID NO: 18343 - DNA, 395 bp, Zea mays
  Coding DNA Sequence Number=SeqID_3940
aaacactttactgcagtgtgcgagatgatggcgagctcagtgacgctgcttctatggagtcttcttcttctcggaactctaagcgcgattcaggctaagaagtccaaggaaaacttaaaggagatcactcacaaggtttattttgatgttgagattgatgggaaagaagctggtcgtattgtcatgggtctatttggaaagacagtccctaaaactgcagagaatttccgagctttgtgcacaggggagaaaggaataggtaagaaagggaaggctctacattacaaggggagctcattccatagaatcataccaagctttatgctccagggaggcgatttcacccatggcaatggtatgggaggagagtctatctatggtgagacgtttgctga

SEQ ID NO: 18344 - DNA, 526 bp, Zea mays
  Coding DNA Sequence Number=SeqID_3941
gttcaaggccgggtcccagaatcttcagcgagggtgggctcgactacttgggcaacccaagcctggtccacgcccagagcatcctcgccatctgggccacccaagttatcctaatgggtggccgttgagggttatcgtattgctggtggcccccctcggtgaggtcactgacccaatctaccctggtggcagcttcgacccattggggccttgctgatgacccagaggcttttgctgagcttaaggtgaaggaactcaagaacgggcgattggccatggttctctatgtttggcttctttgttcaggccattgtcaccggtaagggtccattggagaacctcgccgatcaccttgcggaccctgtcaaccacaacgcctgggcctacgccaccaacttcgtccccggcaagtgagcatgaaagaaaaggatgacttgtggacttttgagagtttttagatttgtgtttggtggagtatatgttatttgcatgtacttcagataatgtgaattatcttgtgtatccc

SEQ ID NO: 18345 - DNA, 447 bp, Zea mays
  Coding DNA Sequence Number=SeqID_3942
tatgcatcctcagctggagccttcacatccccgctgatgaagcctgggacttatacaatggtgctgtatcaaactgagtacaaggtcgccacggcgagtgtaactgttacccgcggaagcacggcaaccaagaatatcgcggcgacaacagaaacaaagcagagtctatggaagattggagagttcgatgggcaaccatttgagtttcgaaatggagacaagattctgcgcatgcacccttcagatactcgaatgagcagctggggtcgttccacctacaccgttggatcttcgaacttgcgagacttcccgcttgcgctgttcaaggatgtgaatcaaccccaaaccattcgattttctctcggctccgcgccaggagcagcaaccctccgcatcgcgacaacattgagtcatgccggtgctagacctcaggtcaccgtcaacgga

SEQ ID NO: 18346 - DNA, 587 bp, Zea mays
  Coding DNA Sequence Number=SeqID_3943
gtatcagcctgattctttgcacaaaatagaatccttctgcatctgacacaatgctaatgttcatagcagatcactagtggttccatcatggacaagaaggcgaacattcgtaacatgtcagttattgcccatgtggaccacggcaaatctactttgactgactctctggtgtgcaaggctggtatcattgcttctgccagggctggtgagactcgttttacggacaccagaaaagatgaacaggagagatgcatcaccatcaaatcaactgccatctccctattctacgagctgtctgagaacgacttggcttttatcaagcaaagcaaagatggttctggctttcttataaacttgattgactcccctggccatgtggacttttcctctgaagtgactgctgctcttcgtgtcacagatggtgccttggttgtagtggactgtgtttctggcgtctgtgtgcagactggaacagtgcttcgtccagccattgctgagcgtatccgccccgtgttgatgatgaaacagatggatcgtgctcttttggagctgcagttggaacagaggagctctatcaaacttttcag

SEQ ID NO: 18347 - DNA, 138 bp, Zea mays
  Coding DNA Sequence Number=SeqID_3944
ctcgtgacagtcttggcacctggtagcgggattctcacagctcactagccccccccccccccatttacaaaactgtgctttgccttactgtgttcctattacttgcttggtttttgagggggttgacttttgcttgca

SEQ ID NO: 18348 - DNA, 393 bp, Zea mays
  Coding DNA Sequence Number=SeqID_3945
caggtatgtcgtatgccttcttacttgtatttgtaccaacaaattaatttgggatgggtgaccgaccggtaatttttctcgggtgcgatgagtgaggacaaagtgcgcacaaaagactcgtgttggtctgtggggacaatatatgatcctagagagctgccaggagtaagtatcgcgggtccgggagtggacaggtttcacaggcgtgtgtgggttaggggttcaagtatatggtgcatggcagctgtgggctcggagtggtcacatggcatggtatatgacgacactagacacatagacatggccaagaggggaggttcctggcttggggttgaacgacgaggacgtcagtcttctatgggggtggattgcgatatctcctggacccgggcg

SEQ ID NO: 18349 - DNA, 561 bp, Zea mays
  Coding DNA Sequence Number=SeqID_3946
cattaacatccccttagtgagtggataatgaactgaggtctggtcatttaactacacgttcagaaagattacaagcttaacagaacagcaagtgataaaggaaaccgttcgattgtttctgcggcgttatacaaagcaaaccacagtaatgcgttttcacagaacttgtcacaacaacatagaaagatcttttgataggccttttttttgttttttttttttttttataattttaacaacccggagtttaaaagactaatgaacaccactctgggcaggtcactgtcaattcaaaaagatacgttatccaaacaatatttcaggtgataaaggaaaccgccaatttgttctccttcgcccaatacaaagcaaaccacagtaatgcgtttccgcagaacttggcacaacaacctataaagacctaaagattggcccacgatatgaaagggctaaaatatttaagggctcaaacaaagaaggtaaaattccatgtcaaacccaggggcaggggaccggaacaaaagctgggccacaagttacccattgccttttttgactcat

SEQ ID NO: 18350 - DNA, 287 bp, Zea mays
  Coding DNA Sequence Number=SeqID_3947
agcacgggcgcctttcaacccataaggtgttcctggcctcacaaaccttggtcagaccagcgaggatctgtaggagtttctgcgttcaattttcatgtgttctcttcaggggggaagttatgtcagatctgagccgccatcgttccaaatgacctaaacctgagatacattgcgttttagatgactccaggttcacttaggttgtgcgcggctgtacaacgttgctttaaatcatttgtaattgattgccctgttttttcatgtaatggaagaggatatcatattca

SEQ ID NO: 18351 - DNA, 192 bp, Zea mays
  Coding DNA Sequence Number=SeqID_3948
atttacataatgttcattgactttataaatttactagtagaattagctagctaacaaatatctaactaactattaactaatttactaaaaaataactaataattaaactattagatatgttgtttaaatgtctccaactaattttaggctctaattattaactctagtgcattaaaataccctctaacagtc

SEQ ID NO: 18352 - DNA, 455 bp, Zea mays
  Coding DNA Sequence Number=SeqID_3949
tattaagcttctgtttgtacgccaagagttttcagctctgggtcatccttgcgtatgtgagccttctttcagcaacatggcttgagagctgaggtctggaactccagaggcgtcatcgctattccgtgctacccaaactcccccacaaagaggcgcccagcccgaagcatggatgcatcaacaaccccatacggcacatgctgccgatcccgtctcatccaatatgaccagtcgactgcaaaggttgacgaataacctcgtgggcgatttatttccgccaaacgaaaccccccccccccccccttcctcgttcaaaaaggcgggaaacggacatacgctcaatgttacccttcgcagcgccttgcatgatcccgacgtcacagggctatccctccctcccctcccaactcgccagggtgccaccctcctgccctcattctgggagcagcgtgaat

SEQ ID NO: 18353 - DNA, 323 bp, Zea mays
  Coding DNA Sequence Number=SeqID_3950
ggcctggccggaagttcgccaaggccatggttaagatgggcaaggtccaggtgctcaccggcgacgagggagagatcagggagaagtgcttcgccgtcaacccacactactagtcgtcaagtttagctaattaccccgcgaattatgtttgtttatacgttccatacatcaacattatgtagagtgtttttcgttctcttcaagggtgtgaaatcaaacaagtttatcaagtaacattctttgtgtttcaagatttctacagcagtaggtaccatgcatatatcgactttaataccgccccttgggcccttgttctcaaatgc

SEQ ID NO: 18354 - DNA, 523 bp, Zea mays
  Coding DNA Sequence Number=SeqID_3951
tgccagttgggcgttctgcaaatgccggcaatgccaaagccctgcagcgcccgtgtgggaagacatcacccagcgtgatggacatcggcatcgttctcggcgcgctgttggccgcgggcctggccgggcgttttgccccaagcctgaaaatcccggcacgttcgctggtggccgcagtgatcggtggtttgctgctgggctatggctcgcgcctggcctacggctgcaacatcggcgcgtacttcagcggcatcgcctccggcagcctgcatggctgggtgtggttggtggcagcgtttatcggtaacagcgtcggtgtgcgcctgcggccgttcttcttcgcaggcgagcgaccgcaggtggccttgagcggttgctgaaccccaacgacctataaggcaggcccatgatcagagaactgagaaccttcgtaagcgccgcccgccgtggcactttcgccgccgccgggcagcaggtggggctgacgcaatcggcggtgagtgcgcagatcaaacacctcgag

SEQ ID NO: 18355 - DNA, 262 bp, Zea mays
  misc_feature (228)..(228): n is a, c, g, or t
  Coding DNA Sequence Number=SeqID_3952
tttcgcccgtttctggcgtagtcgttgcggttgccgggatggcgaagatctcgccgtttgaagtcgtaaaacgcacctcggtaccggtgcttgttggtttggtgaaaaacaaactccattgtttttaaacggaaaatagtttgtttttttgttatcgagattgaggtggggattactgattgcaggttccgactacatcaccaacaaaggatttggttgatgtaagtngttgcatacctgggatgttcattactttggagta

SEQ ID NO: 18356 - DNA, 283 bp, Zea mays
  misc_feature (258)..(258): n is a, c, g, or t
  Coding DNA Sequence Number=SeqID_3953
gcaaatatgagtggtcgcaacgacggtggtggacaaggctcggcgccaagagggttgcatccgactggttcattcggtaaccttccaacttcaagaggacaagtcaagaataacttgataaaggacatcatctttggggcaactaatcctccaccaagaacttaatgattttcggttatcttcttgtattgttgttttttttttatcttttcaagttcccactgatcttgtaaaatattccgaaataacacctcctcntcatcattcctttagcaaaaaacaa

SEQ ID NO: 18357 - DNA, 348 bp, Zea mays
  Coding DNA Sequence Number=SeqID_3954
accctgtaggtttagagctcggacaccattgtcaatgtgaaggggaagattcagggcaaggaggggatccccccggaccaacagggtttgatttttgccggcaaacaactggaggatggccgccccctagcaggcttcaacatccaaaaggagggcccccccccccttgtgctccgtccccgtggtggtcagtaagtcatgggtcgtttaaacccccaatgggcctgggtcgtctggtgccccccctccaaaaggaggttgtcaaagaaactgcggttcgtgccatgagtcgggtcagtgttggtttaaaaaaggaccggttgtgttgtgtgtgcgtgctcccccgaa

SEQ ID NO: 18358 - DNA, 286 bp, Zea mays
  Coding DNA Sequence Number=SeqID_3955
aaaaaaaaagagcatagtcacctgcctatctatctagcgagagagagagaggaaagctagctagctagcatggagtgcggcagcaagaaggcagcaggcggtgtgttggcgctgctgcttctccagctggtgttagctccgacgacggcgacggcccgcctcctgcaggcggatacctccaccgtggttggcctggacatcatcgcgagggaccttggccatccagcgagaggcatcctctgtggcgaaacctgtgtcttcccaccatgctatacgcccgccatgg

SEQ ID NO: 18359 - DNA, 493 bp, Zea mays
  Coding DNA Sequence Number=SeqID_3956
gctgggggcagcatcattctgtccccccccctggtcatgactccccatgaagtcgaagaaatcataagccaattcggcgatgctttaaaggctacaaaggaacggattggagaacttaaatccaggaaaaattaacccatgctgctggttgtaacgcccccctgccatttaaaatgataattgattttttttatgggcgaaatgtttaaaatggctttggttaaggaaatgttttgttagcctcaagtaagtggggacatcccaacccctacaagcttgtgcctttaaaccaaaggataccagaagttggagtgctttttttaaggcttttgcgaatcccttaaagcgttaggacttttgtgaatgattttgtaaagtgtttgccaatatgtgccaaacataataacatgtgtaggttttgtgaatgattttgttgtggtgtctgttgatggtttatgtatgtggatccatccttgtgccatactaattaaat

SEQ ID NO: 18360 - DNA, 572 bp, Zea mays
  Coding DNA Sequence Number=SeqID_3957
gttgttttttgtactcttgcccaatgcgtgcggcacggccttcctgactcctttttttcttcatagctttgacaatactaaattacactttagcaacgaggaccgtcggcgagacaaaattaacaacactttgcctaacatttacactctagagtacgacaagtgccgaaattccagcagcttaaacagcgtaaagaagtgaatttttcacactttgtttaattgtgtcaggggatgctacgataacaacattttagagatgctttctaactaagggtttcttgttccgccgtaagacactccgcatggccccctatgggtttcatcagatcattactatcgaccaaatgacgactgtgctgttccaatgccatcttctgtttaaaattgatatccacatttctgtttgtcattacgatataacagttttcaaatccatagtattggttgttaccagtttttccatcagaaagcactcccgcccgcggagggaaggccgcttacccagtctcactcggaccctttcgggagggatagtgaccagttgaatccaatccaacagcatcagtgcg

SEQ ID NO: 18361 - DNA, 143 bp, Zea mays
  misc_feature (42)..(42): n is a, c, g, or t
  misc_feature (80)..(80): n is a, c, g, or t
  misc_feature (88)..(89): n is a, c, g, or t
  Coding DNA Sequence Number=SeqID_3958
gtcatagcttccttctattgagtgtcacgctagaaattcagnattcacttggcgcctgtcgttttaccaacccgtcgtgnactggggnnaaaaccctctggcctgttactctcaacttttaatcgcctcttgcagcacaatcc

SEQ ID NO: 18362 - DNA, 467 bp, Zea mays
  Coding DNA Sequence Number=SeqID_3959
agcaccacggtgttgatgccatgtccactgaggacttgaagaagctcaacaagaacaagaagctcatcaagaagcttgcgcgcaagtacgatgccttcatcgcttccgacgccctgatcaagcagatcccccgtctcctcggtcccggtctgtccaaggctggaaagttccccactcccgtctctcacgccgaggacctcgccaacaagatgaccgacgtcaagtccaccatcaagttccagttgaagaaggtgctctgcatgggtgtcgctgtcggcaacgtcggcatgaccgaggacgagctcatcggtaacatcatggttggccatcaactacctcgtctccctcctcaagaagggctggcagaacgtgggctccctgaccatcaaggccaccatgagcccccccaagcgcctgtactagacagttgtggtgtgggtcgctgtggtcgtcgcattgcgctgcgg

SEQ ID NO: 18363 - DNA, 589 bp, Zea mays
  Coding DNA Sequence Number=SeqID_3960
tcgaggtaccctttttatgattatgataaacttaccttccgtttttgtgcctttagtgggcctagtatttccggcaattgcaatggcttctttatttcttcatgttcaaaaaaacaagattttttagatatgagcagtaggaacaaatctcatatatttttttttagaataggaagcaattcgatgaattattcattcctaaaggtttacatcaaaatagtgctagttgatgaaagttacttcgtaaagaaagcagtgaaatacatttgcttagatttcttattaccttcaacaaaatataacaaaatatgagaaaagggagaaacaggaagacatgttttggatctcaaaagatacatgccacacagaagaaatacgggtagattttgtaacaggatgtcgaaaaccgattgatttcttctcggcctctatcagtctttttggttcattagggggtttattggttgcagcttccagttatgatggaatgaattacttatatttcatttcgtatgagtttgaccccgggctaatttcttttttgccacaaggggctacgataatggtctattcaaccatgtttctattt

SEQ ID NO: 18364 - DNA, 346 bp, Zea mays
  Coding DNA Sequence Number=SeqID_3961
gggtcgacgagcgatcatcaaggctcgtggcctaggccaatggcccacattgcacttggtgggtgcgttggcttaccatctccccaagtgggagagtggacgtcataatttgtgatagagggggtacgcgttcggcgcggcccctgcaggcccctgccaaatctaaaaatattaattttggtccttggtgccggttgctgtgcgcatgatgtcgcgcggccccttacaaatctggaaatattacttttggtctttgggtgcgcaggttgctgtgctatgcgtgtgtttttataagcgtttacttttggcaaaaaaaaaaaaaaaaaagcggccgcaggacgcgagc

SEQ ID NO: 18365 - DNA, 300 bp, Zea mays
  misc_feature (55)..(55): n is a, c, g, or t
  misc_feature (63)..(63): n is a, c, g, or t
  Coding DNA Sequence Number=SeqID_3962
tacaacaaccggatcaagcgttatggcgcgaccggatcgttcgacttccgcagcnagtcgttngatgccttcgcgcgggtgaaatacgccacctatctcaacaccaacacgatgaaccagaccgcgctccgcaacgagctgacgcgcggccagaccaatccgaatggcggttcctacaacgcggcgggcgtatacacgccgctgggcatcaatccggccagctatttccgtaccgaggacgtagagcaggaactgctgtcgacgcagatcggtgcgaagtggcatcatgacggcttcacc

SEQ ID NO: 18366 - DNA, 462 bp, Zea mays
  Coding DNA Sequence Number=SeqID_3963
ttggttttcttcttcgcttctgagaatgtctagcagctgtgggtgtggaagtagctgcaagtgcggcagtggctgcaactgcaacagctataccgagaagacaaccacagagactctggttatgggcgttgcacctgtgaagacccagatcgagggtgctgaaatgggtgttgctgctgagaacgagggttgcaagtgtggctcaaactgcacatgcgacccttgcaactgctagtgaggtgttgttgatcaaagcttgaagcagagaatatgtgtaacaaaagtccatactgaataagaattgtgtgtctgttttgtgtttggttcaatctacaccgtttaaagttttagaataaagtgaccattgttcatcttcagcagattctaatgttctaggatttgttgctggtgtcttgagccatggttgctttgtgtttggtttgtcttgtctaaagtttagct

SEQ ID NO: 18367 - DNA, 460 bp, Zea mays
  Coding DNA Sequence Number=SeqID_3964
cggcgtcgcaagaccatgacattaaaggaaatggtggtgctcggcacattccacatcaactcagaggtcgagaacgaatgacaccctgtaaaggtctgctactactcgccctatactgcgcagtacatttgactagggcgagcaactagttaaccgcgctgctggcgtagcaacggtctcacaggaaaaggggaggtggtaactgcttgattaacttccatcatgatcgtcactaccaggggcaagaggatgatgcaccaatgcacagaatccaaagtctttcgtggatctccaatcatccctgaagaaaggcagaaggagtatctacttgagtgttccatcaagacactcccctactacggagttcaaccataggttccaagaagcttgatttggagaaaggagtgggggtcgacactgcagaaacgagtactcgaacacactccacttggtttcttga

SEQ ID NO: 18368 - DNA, 521 bp, Zea mays
  Coding DNA Sequence Number=SeqID_3965
acttgccccatcaaaacataacagacacaaggtcattgaaaaaagaaaaaaccaaataagagtttcaagaatcaatactacaagatgagttcaacaaggagagcttggatggtggcagccagtgttggagttgtggaacccttgaaggatcagggaatctgcaggtggaatcatgcattaaagtcagctcaaaatcatgtcaaaaaccatgttagacctttctctcaagcaaagaagctttcttcctcttcttctatgatttccagcagtctaaaagagaagacaaagcagtcagaggaatcattgaggacagtcatgtacttaagctgctggggtcccaattagacgaggccatccaactatttttttttttaactcttttcttttaggctcctcttgtcccctaaggtagctctaatgaacagaaaagtttttggtatctacacctgtaagcactacaaattttctcctaacaaagttatgattgtcgctggaggtgcgtattaagattggctatgact

SEQ ID NO: 18369 - DNA, 391 bp, Zea mays
  Coding DNA Sequence Number=SeqID_3966
gagctcacttgtttttggccgccctttttttacgcatgaaacacgagaaaaaaaatattttgcgacgtgatccagtggacatccagtggggaaaaaggcagtcaaatgttccatatttctagtaatgttcccacaccattaaagagaataaaccgatgcattgttacacagcaaagaaaccatcaacaaacaaagagctggctatgatggactaatctgccagaggtaccaaaaggtacgaaaaaatttgtcccaatcacattggttgccctcgtgatctaactgataaaggtaccttgccagcctgtatgcttctccggtggtgtacatgcccagttgaataccccagcaattgtaacctgagtgatggtcagctggtgctcgcaagaac

SEQ ID NO: 18370 - DNA, 349 bp, Zea mays
  Coding DNA Sequence Number=SeqID_3967
ctcgtcttcaaggaaaggtttgagagaaaatgagtcgcggagctgcagccgttgccaagggaaagaagaagggagtgtccttctccattgactgctcgaagcctgtcgatgacaagatcatggagattgcttccctcgagaagttccttcaggagaggatcaaagtcggtggcaaagccggtgcccttggtgattccgtcacaatcacacgtgagaagaacaagatcactgttacctccgaaggccaattctccaagaggtatttgaagtacttgacgaagaagtacttgaagaagcacaatgtgagggattggcttagagtgattgcggctaacaaggaccgtaacct

SEQ ID NO: 18371 - DNA, 306 bp, Zea mays
  Coding DNA Sequence Number=SeqID_3968
taagctttattatttgacattcagtaggtcagtccaaactcatctacgtcttactcggggtgaggaggctgggccatgggcatctgtggccttttcaagttacaagtcagtaacagcagtccaaaggtagccaacacgtcttgagtttattgcatcattgtaaacaagaaatcttatctcctcctgaccagacacccaaaaggttataaaagaaatttaatttagatccaacttgaagacaggtactaaaagtttcaagcctcaccttgacattttttaaagactaagtgtgatcctctataaggc

SEQ ID NO: 18372 - DNA, 479 bp, Zea mays
  Coding DNA Sequence Number=SeqID_3969
gagactccaaactcgttcataaggggatgctgagtcttattataatatgttttacatcatcattttaactcaaacatcttttgcatcatatcattgcatcattcgacatcataccatcatgcatcattctgcatcaaccacgaagagaaaaagaagggaaatggttctctcatctgtagatgtgacttagctacgaagatatatttgggatttttgaaatcatggactaaaaatatgctacactcatcgtcataaataacacaaataaagggataatgctttgatttcagcaacagacattttacaacatttcgagaccttcggatgaaaagggattttctttacgaagcgtgaaaagaagggaaggtgttttttcgccatcagctccaaaacagtacgtacaattatttcacgctgcataaataaatatattacacaatgcaactgaacacaacacacacttgcctttacatatagcc

SEQ ID NO: 18373 - DNA, 470 bp, Zea mays
  Coding DNA Sequence Number=SeqID_3970
gcgacggtgaactgtgcggataacacgggggcgaagaacctttacatcatttcggtgaagggaatcaagggtttattgaaccgtctaccttcggcttgtgttggtgacatggtgatggccaccgtgaagaaggggaagcccgatctcaggaagaaggtcttgccagctgtcattgttcgccagcgcaagccttggcgccgaaaggacggtgtttacatgtacttcgaagataatgctggtgtcattgtgaatcccaagggtgaaatgaaaggttctgctattactggtccaattggtaaggagtgtgctgatttgtggccaaggattgcaagtgcggccaatgctatcgtatgagtgcgaattctagttcgatgatcttatgtttctgcttgtaggacttaaatttatctcagattttttttaaagctttaaagttgtctcggtttgttctttccttaacttatccgcaa

SEQ ID NO: 18374 - DNA, 268 bp, Zea mays
  Coding DNA Sequence Number=SeqID_3971
gggctgcagtagttccacatcacgacgcgaggggattgggcttccgattctgatcgcggagagttgtgctcgaaaagtaaggacaaggggtgagaggccaagtatcaagtgtgcgatttgaagacgaagaatttgagattgggctagttggtgagatgattcagtcttggatactgtcaacatgctctaatgtgaagacgatcgtgacagagcctcactcgtcagcattcaatacatcgcccaatgcacactgaatctcaaccaaagt

SEQ ID NO: 18375 - DNA, 461 bp, Zea mays
  misc_feature (31)..(31): n is a, c, g, or t
  misc_feature (39)..(39): n is a, c, g, or t
  Coding DNA Sequence Number=SeqID_3972
gcatggtttacagcagatgcagcggttacgncggccgtntatgccgtcgtcgaggacgaggccgccaccgacgcggcatacgcgctgcgcgacgctgccgaggccgagctgctccggacgcgtccgacgacgccggccggtcttgcggcgctcaccacctgggcccgcgggcggatgagctggctcaagagcagcggcagctcgcttgatggcgacaatctgtatgcgatcagtgcagcgatcgatgacgcgacgcacgggatgagtcgcctaaagccatggtcgtcaattgcgtcgccatcgattgcagcagccgctcctgcggaggatcccatcttcgcagcaatcgagaaacacgaggttctgatcgctccctacgttgccgcctgggaggcgcgcgggatgttcgacgactgcaacgtcgttgacgaagagcagaaggccgaactgctccgcctgaa

SEQ ID NO: 18376 - DNA, 88 bp, Zea mays
  misc_feature (30)..(30): n is a, c, g, or t
  Coding DNA Sequence Number=SeqID_3973
gaaccccggcacccacctgcaacagcagcngccggcaaccaacccaccggccccgggcaaacgaagcccgcagaccagcaacaacaac

SEQ ID NO: 18377 - DNA, 199 bp, Zea mays
  Coding DNA Sequence Number=SeqID_3974
tgcatgcctgcagggttcattggacgcactaaatgagattcttaaagaacctgtaccaatgaaccgcttcagaccaaatattttagtggatggatgcaacccatactcagaggacctgtggaaaaccataaagataaacaacctaacattcctaggtgtaaagttatgcaaccgttgcaaggtgccagcattatcaaga

SEQ ID NO: 18378 - DNA, 567 bp, Zea mays
  Coding DNA Sequence Number=SeqID_3975
agatgtccctgctcaatgacaagaggccaagatcaatcgttctcaacgacacgacgttgcgcgacggcgagcaagccccgggagtggcttttacgaccgcagaaaaggtgtccattgccggcgccttggcgcgggccggcattgtggagatcgaagccggtactcccgcgatgggcgaggaggagatcgccgccattcgcgccatcgtcgacgcagatctcccggccagcatcatcggctggtgccggatgcgaacggctgacgtcgacgcagccatccaggccggcgtctccatggtgaatgtctcgatcccagcctccgacgtgcagatcgcggccaagctcggcggcagccggcaagcggcgcttgaccaggtgcggcgtgtggtcggctatgcgcgcgacaaggggttggacgtcgcggtgggcggcgaggactcatcgcgggccgacgtcggcttccttgtcgagttgatcgcaaccgcgaaggctgcaggcgcgcgtcgtttccgcattgccgataccttgagcgtgctcgatcccgatgcgtcgtttacgttgttggccg

SEQ ID NO: 18379 - DNA, 384 bp, Zea mays
  Coding DNA Sequence Number=SeqID_3976
gggccaaaaggttgaggcaccacctgaggaaccgaaaaagagcacccatgtcccgaggaagcttaaaaagcccaaggagggaggtccccttgccccccccattgaggagcaatttgccagtggccggttgctggcatgcatttcttcccgccctggccagtgtggccgagctgatgggtacacccttgagggtaaagagcttgggttccccatgaagaagccccaaaggaaaaagggcaagagccctgtagcttagagcattcccatggattgcccggcccccaaatgtgggtcctgatggggcccttctttttggttaggggtcccaagtccagggcgttatcccatgttttccgccctgattaggcccctgttttctaaaag

SEQ ID NO: 18380 - DNA, 347 bp, Zea mays
  Coding DNA Sequence Number=SeqID_3977
agctcttgcatgtgtcctcgaggataaggatcagtgggaacgaagccggtggagctgctttacgtaacgtacagtacagctgaactgctccgtttccagtgaagatccactgatcttcttgatcgaatgccgtacgtagtggctcgattcagcaagcgatttgcctgatgcgtgcgttgttgttctttcctgctgtgtgttgatgattaggggatcttgtaataatcggcttggctgtatacggtgatcggtcctctcttgttctctagccaacgctagctgtgtacgctacgtacgtgggattattccggtcttccctactttcccaaacgacacacccatatttt

SEQ ID NO: 18381 - DNA, 415 bp, Zea mays
  Coding DNA Sequence Number=SeqID_3978
taggttttcattttagcggcgggcgaaggagcaggagaagaaggtcctatccatggcgactcaagcggccaaacaatccgtgcaatgcttcgggcgtaagaagacagcagtggctgttacccactgcaagcctggatgcggtatgatcaagctcaacggctccccgatcgagctgttcaacccagagatcctccgtttcaagatcttcgagcctgtcctcctcctcggcaagcaccgtttcgctggcgtcgacatgaggatccgcgtcaagggtggtggtcacacttcccaggtctacgccatccgtcagagtatcgccaaggcgctcgtggcgttctaccagaagtacgtggacgagcagtcgaagaaggaggtgaaggatatccttatccgttacgataggactctccttgtg

SEQ ID NO: 18382 - DNA, 228 bp, Zea mays
  Coding DNA Sequence Number=SeqID_3979
tgctgttatgcctcgctccctctgtgttcgatgaaatgtcgaactaggaatcgatgacctcgccttgtcctcgcgattgtggttggctagtatcgtcgcctgccccaccgtggtgctcgccaaaacacctgaacccgagtttcatcgtcgtccatgcgaatatcatgccagttcgatcatggtacgtgaattaaccacgtgatgcggagaacccgagccaagttgacc

SEQ ID NO: 18383 - DNA, 302 bp, Zea mays
  Coding DNA Sequence Number=SeqID_3980
gggcttcatagacatccagatcctcagtcatggggccaggattcaatacggatacacatgagcctgacaaggggagccacacatcacaccgctctcacttattattgaacacaattatacacccatgcagagaaaaccaagcgagtacaggaacacccctctctcgacgtagccggccccacgcccaccacctcttctccctcagtctcactcaccacaagcaacagcagcttccaagggccggagagggactcattattgggaaccatcaaattacacacgcatgcagtacagaataaaca

SEQ ID NO: 18384 - DNA, 159 bp, Zea mays
  misc_feature (31)..(31): n is a, c, g, or t
  misc_feature (37)..(37): n is a, c, g, or t
  misc_feature (40)..(40): n is a, c, g, or t
  misc_feature (47)..(47): n is a, c, g, or t
  misc_feature (49)..(49): n is a, c, g, or t
  misc_feature (54)..(54): n is a, c, g, or t
  misc_feature (57)..(58): n is a, c, g, or t
  misc_feature (70)..(70): n is a, c, g, or t
  misc_feature (73)..(73): n is a, c, g, or t
  misc_feature (78)..(78): n is a, c, g, or t
  misc_feature (88)..(89): n is a, c, g, or t
  misc_feature (94)..(94): n is a, c, g, or t
  misc_feature (103)..(103): n is a, c, g, or t
  misc_feature (107)..(107): n is a, c, g, or t
  Coding DNA Sequence Number=SeqID_3981
agcaacaggggcggccaacacagagccaccnagccgnggngaacccngncaccnacnngcaacagcagcngcnggcanccaacccacnngcgcnggcgaacgnagcngcagaccagcaacaacaacagcggcgacagggggtgccagagcgcaggcaac

SEQ ID NO: 18385 - DNA, 311 bp, Zea mays
  Coding DNA Sequence Number=SeqID_3982
gccgagtacgctctgaccgagaccatcctctgggaatccaccccctccccgttgattcccctctcggagttctctgaccctattatcgcgaggaaatatggaccacaagccgacatggaaaccttggagctcctgaacactacagctacccagaaggaaattatggtggctgtgagagtcctgcggcgagatccgcgtgagaagctctgtcaagttatccatgacacccccttgagctgcttggctatagcaagcaggggccttggcaaactcaagagggtgctcttacgaagcctcaccgattacgtcgt

SEQ ID NO: 18386 - DNA, 157 bp, Zea mays
  misc_feature (36)..(36): n is a, c, g, or t
  misc_feature (47)..(47): n is a, c, g, or t
  misc_feature (52)..(52): n is a, c, g, or t
  misc_feature (57)..(57): n is a, c, g, or t
  misc_feature (61)..(61): n is a, c, g, or t
  misc_feature (76)..(76): n is a, c, g, or t
  misc_feature (111)..(111): n is a, c, g, or t
  misc_feature (118)..(118): n is a, c, g, or t
  Coding DNA Sequence Number=SeqID_3983
aattaatcctcgtccctctcgcgcacagcgctccantttcttccacntcccnaaccntacnggcggcgcagcagcntcacaaccaccacccgaagaatggtgaattttctnaagcccnggcaaggccgtaatcctcctccagggcagattcgcgggc

SEQ ID NO: 18387 - DNA, 525 bp, Zea mays
  misc_feature (58)..(58): n is a, c, g, or t
  misc_feature (60)..(61): n is a, c, g, or t
  misc_feature (64)..(65): n is a, c, g, or t
  misc_feature (68)..(70): n is a, c, g, or t
  misc_feature (99)..(100): n is a, c, g, or t
  Coding DNA Sequence Number=SeqID_3984
agagagcaagcaatggcgacagcagggaaggtgatcaagtgccgagccgccctgcccngnnccnncgnnnaccccctgcgggaggggggggaggagganngtccagttaagattaacagctttcccctttctttcttttttctttttctattttttttcctacccacctctcctcctttctctttctttctacttcactcccctttttcttctttttttttttttttgtctttttcttctgtttggtttcatttctcgttttgttcttctttttttttttttttctttttatctctttcttctcttttttttttttttattttttttttttttgtatttctttattcatgatgttctcctccccctccccttcccccctcccccccctccccccccccttcctcccccctctttcccccctccccctgaccccccctcccccctcttcatcttctctcctccccctagatttctctcttctctcctctcccccttttcttttccctcttatctttcaccccttct

SEQ ID NO: 18388 - DNA, 490 bp, Zea mays
  Coding DNA Sequence Number=SeqID_3985
gccgggatgcaatgggaacaacgtcgagagattcgcgacttaacaatcataatggacaccggcatagatcccaaggactgccagctgcgtgcatgcgtatgcccatctgcgcttccacacgctctactacctgacatccatggcgttcaagtgagcgttgtcgctccacgtcccgaccgccatccacatacctacgagggtctgccacgctgccggacctcgtgcccgccctggccctgccagcacccgagctactgctactcggacgcctgatgcagctgcatcgctacgcttctcgtcttcgcaccagccgaccatgcgcatcaccgcctgaaaccgctgccctggctgctgctggagcctctgctactgggacgaccacacctaacagaaagacttcgtgctgcgacccctgcctccacactattggcagcgcctactaccactggccgactggcatgagaaggagcaggaagatcaccgccagctg

SEQ ID NO: 18389 - DNA, 527 bp, Zea mays
  misc_feature (439)..(439): n is a, c, g, or t
  Coding DNA Sequence Number=SeqID_3986
tcaacaacaatatccagaccttctctgagaatcaaatcaaacaggaagctcacagaagtccaaaattacagttataattcatctgtcacccttgaccccagtctgatccagccatgtttagaaacaattacgataacgattcggtgactttctcaccgcaaggccgtatcttccaggtggaatatgctcaagaagctgtcaaacagggttccgttgtggtcggattagttagcaagacacatgctgttctcgtggggttgaagcgaaacgcagaagaactctcgtcgtaccagaaaaaagtcatcgaaatcgactcacacatgggcatcgccattgccggcctctcctccgacgcccgggtcctttccaacttcatgaaacagcaatctctcggctcacgaatgacatacggccgcgccatccccctagaccggatcgncacccaaatcggtgatcgcgcacaaaccaacacacaacattacggcaaacgaccatacggtgttggcctcttagttgcgggtgtcgat

SEQ ID NO: 18390 - DNA, 475 bp, Zea mays
  Coding DNA Sequence Number=SeqID_3987
ggaggctgcaagatgtacccagacttgagctacacagatcaaacaaccactgagacccttgtattgggactggcacctgttaaggcccaattcgagggtgctgaaatgggtgttggagctgagaatggtggctgcaagtgtggagacaactgcacctgcgatccctgcaactgtaagtgaagtgaagagtgaaaaagcttcaagcagagatggatggtccttaaccaattagcatcaggaataataactatgattattatttgaagttaaattatgtgcctttatgtgttcgtcttagtgcactctggtgtttggtttacacacccttttagagtgttagaataaagtggccatgtcttatccttttgcaaattcaaatgttttggatttgtgatgggtgtatctaaccatggttgcttttgcttgcctgcgtttggttgcttctgtataaagttcggcttgtctgaattatcaa

SEQ ID NO: 18391 - DNA, 107 bp, Zea mays
  Coding DNA Sequence Number=SeqID_3988
ctgcagatcggttcgctctgacatatgaatacttctgccgctggcaccctgaaatggatcttgggcaaagaataaataaagatgcgatgggcaatcatcttctactg

SEQ ID NO: 18392 - DNA, 472 bp, Zea mays
  Coding DNA Sequence Number=SeqID_3989
acaagtatgcccacatgtgttttgaaatattggatggacacaaataccataatctagtcacttgcaccacgattaacaagctatggaggaacaacgaatatacaagtaaacatcatataagatagcctcaggatgcatcttctactaattaatcaagtccagctttcttcggtcacaaagaatttaattgttgggggaaaagatcatctcaatatggttttcgaggctcatgcatgcatctacgtgtgtcttagctatggcagtgaatgactatgaacctaaaatctattattggacgaggagtagccacaaaacagaaagataataattggctcctaatccaatgttgcgacgtaaatctaatccccgctattgcgtgactcactttataccaattggcaagttttttatgttcaacacaaaaaaaaacgcataagacagcccctcattttcttgctctcgtagcctttta

SEQ ID NO: 18393 - DNA, 422 bp, Zea mays
  Coding DNA Sequence Number=SeqID_3990
gagctccttttttacagctacaacccttccacaaagcttgatcaaatgcacctatggccagagttcattcaatcgctaggctgatcactcccacttcatctgaggcgttacagatggagagtgaagcgctggataccattgatatggccccaatttctgaggttatgaaggcaacatctcaccactttaagatttttgaacttagatccattgtgtaacaccctgaatttggggtataaaatttctttcctaatatccaccaaattcaggtgttacccgctttcttcccttcttttctactcattgctctaaacagtggagagttatttttgttttatataactataagcctagtaaaataaaaccctaagaaggtccctgtttgttgcatagcatggcggaatagcagtctccttggtatg

SEQ ID NO: 18394 - DNA, 447 bp, Zea mays
  Coding DNA Sequence Number=SeqID_3991
gaacatgccactattcatgcagcctccgcaaccaggtggcctcctttcatccctccccccccccgccccgcctcctcccgccgcgcctcgccccctcttccccggcgcccccccccccgggccgcccccttcgcccgccagctcctccacctccggctgcctcggcttggccggcggcactcagcaagcggcccgagcgcccgagcctccccacatcccggttcccatgccccccccccccccccgcggcctccttccccccactctcccacccgcccggccgcctccacccggacgactctcaccctcaacgctccccgacgtcttggaaccggcccgtcctccggtctgcatccccaccaccgctccgttgctttcgcgggtcgccggacgattagctccccacctccagtcctgcgccgcgttgctcgggcgacgtgcgtcccc

SEQ ID NO: 18395 - DNA, 543 bp, Zea mays
  Coding DNA Sequence Number=SeqID_3992
agcgtatttggttggctgcaatggaagatttgaagtcaaagggaatgcgatttgccaagcaggctcttctttctggatgctcggctggtggtctggctactattatacactgtgatgaattcagaggttttttcccagagactaccaaagtgaagtgtcttagtgatgcaggattatttcttgatgcgattgatgtctccaggggacataccatcaagaatttattcagtggtgttgtaaggctacagggagtgcaaaagaatctgccgcacttttgtactaatcaccttgatcccacttcgtgcttcttccctcagaatttgattgccggtattagaaccccactattcattcttaatacagcctatgactcatggcaggtccaaacaagcttagctccttcatcagcagatccccatggcttttggcatgattgtagattaaatcatgctaaatgtacttcttcacaaatccaatatttgcaaggattcaggaatcaaatgctgaatgctattaaaggcttctcaagatcacctcaaaatg

SEQ ID NO: 18396 - DNA, 491 bp, Zea mays
  Coding DNA Sequence Number=SeqID_3993
gatacaagcgccccgtgttgggtttttcggccattgccaaccgcccccgggtgttttccaaagcccctttttccccattaagacccgacggcccccttttcgggccccttgtttgaaaacccctccctttttggcctggccaaaaaaaaacccgcgccccccctcattcaggtcctgtaagcgctgtttccccgtgccctacgcccggacgggccgcccaaacaatggggtaatccggcgggtatgtgttttttggtttggggggggcgggcggggtatacgcggcccgtgcgccccctttggctttggctccaggggcgtcccgttgggtgttttttttttttgccaaaaaaaaaagggtttgggttggggtggtcccctggcccgccccccggggtttttttccccctttttttatcccttataaaggtgaaggtgaagggtccccgggttttatggcaaaaatgctccctgttctatttttgttatta

SEQ ID NO: 18397 - DNA, 449 bp, Zea mays
  Coding DNA Sequence Number=SeqID_3994
gttagggattcaccttcgttcttcgtgttgaatctctcattcctaatcctcttcccatagcctcagatctgaaactgtaacatggcttcaaagcgcttccttaaggaactcaaggacttgcagaaagacccacctacttcttgcagcgccggtcctgttgctgaagacatgttccattggcaagccacaattatgggtcctgctgatagtccatatgctggaggtgtatttctagttaccatccatttccctcctgattatcctttcaagccccctaaggttgcgtttaggactaaggcctttcacccaaatatcaatagccatcggtagcatttgtcttgatatcctgaaggaacaggggagccctgctctcaccatccctaaggcactcctttctatctgctcactgctgattgatccaaacccggatgacccacttgtacctgaga

SEQ ID NO: 18398 - DNA, 364 bp, Zea mays
  Coding DNA Sequence Number=SeqID_3995
attgtttcggcctaatacttattgatgtgttctatggcctgaagtctggtcccttctatagtgtcttttgttatttgagaatcagctttgtcttccagcctggtttaggattcatgaaacaattacaacagaaactaggtcgaaagcatcgcaaacctttacagactatatacatactccacctgacaataggattgagaataattgtcatggcgatgcagatttttgttcacggggtggtctggaagaaaggtgtatatctcaatagacttgtgcagatattcagatatgcaccacgtgaacaactaaccattcctgattttgtgttccagtcatcgtgttcgacgctttgtgtgtaaggcat

SEQ ID NO: 18399 - DNA, 507 bp, Zea mays
  misc_feature (385)..(385): n is a, c, g, or t
  misc_feature (478)..(478): n is a, c, g, or t
  Coding DNA Sequence Number=SeqID_3996
tcatgaacggaaacgagctctggtcggggacctcatatatgaatggctcggcgaagatcggcaccggtccgggtcgtgctcaattcaagcccttctcggattggtgagccctcaatcgatcacgctcggcttcgaggccttaccgtctcagtccctggcccaagcgatccacgccgagctctcccggctcctcgacgaggccgtccgcccgctgtgagccgccctagacgcgagtccaaacaaggcaaaaacgcaatagagttttcgcatgtagcctcgaaggtcgtagaaggccgatccgaatttgatacgatgcgcccagctcatgactaccgagatcgcgcacgacttcattcgagacatggtcgcggcagacgttgccgangcaaacacggcggcaaggtgtgcacgcgctttccgccgacccaacggctatttcacatcgggcacgcaagtcgactgcttaacttcggcttgnccaaaacacggaggcagtgtacttgccat

SEQ ID NO: 18400 - DNA, 551 bp, Zea mays
  Coding DNA Sequence Number=SeqID_3997
ttattggttggatgtgggcccaaaggatgcacttgaattctcagctatttgagacagccactctcttcatcacagtgcttgtggtagcatttatgctacaggatggcaccgcgaactccttgaaaggacttatgctgatcctatgttatctaatagttgctgccagtttctttgttcatgttgatccacaactcaagtgatggttgatgccgtagatgctgtaagtaatgcgtcaaaccccttttgaaccttgttactcctttcttgtggaggtgctactccatagccacgttcccccctgtttcaagcacgcatgctggcaaaaaaaaaagcgcgggaagatcacccattgtcggttcctctcatgaaccgcaaaaggaattcttgtattgtgtggacactgaggtgtactaggggtagtctcaatgtacacagacccaagaagtcccagcatgtcacattcgattaattggatgggtgagtccccctttgtgtttcgggttcccgttgtgatgcgggcagaggctttgatcccgcctgaggctaagatc

SEQ ID NO: 18401 - DNA, 499 bp, Zea mays
  Coding DNA Sequence Number=SeqID_3998
cgtccggcgcaaacagatcgggagagagagagagagagtgaaataaggtctccaccagcggcgtccgtttcgtcgtggggcgcgggtcaccggtggcgcgcagttttcgctggcgcgctaatctctggggcagggtatggcgcggatggagcctaggcggtcatcggtgctccctgcgtgagttcgtgacttcaccggggtccttgtgcgtgctcgccagagtcctggaaatctggcggagatgcgccgtcgtgtggaccgggaactagcgctgccttcctcgggagaagaacaggtggttcaagaggagccacataacgaggagttcgattcgatctaggtggcgtctcccagttgactttctggcaccaatgatggattttagttcgatttatatttatattttattttgtaagacttccgctatgtaataagtactctaattatattgtgacatttatctctatacactctgttattatatatgatgtcccccttg

SEQ ID NO: 18402 - DNA, 526 bp, Zea mays
  misc_feature (99)..(100): n is a, c, g, or t
  Coding DNA Sequence Number=SeqID_3999
ggtgcatggaaccaagctgcatgaatgtgatgactggcatggtgttggtgaatcggttaaacactggacttatgtcatagatggtgaggtacacacatnncacgagaccattgaatccgttgatgaacaaaacaaaacaatcaaattcaacctctttggtggagatatcaataagcactataagagctttaagctcatccttgaagtgactgagaagaatgatggcggtgctgctgttaaatggaccattgaatatgagaaaaaacatgaggattttgtgcctccaaatggctggatggacttcctgcacaaatgcactagagacattgataataaactcctctaatgcatagctccgcaagttatggagcaaacaataaatatatattgggtttggcttgaagataagtgctttgtttatataatatgtgtgaagtttgacatggaggataaggacgcagtcttgtgttctgttgatccttttcgtttgtatgcaaaaaggtattgtcggtgtcggtgatgtctt

SEQ ID NO: 18403 - DNA, 498 bp, Zea mays
  misc_feature (26)..(26): n is a, c, g, or t
  misc_feature (34)..(34): n is a, c, g, or t
  misc_feature (43)..(43): n is a, c, g, or t
  misc_feature (56)..(56): n is a, c, g, or t
  misc_feature (105)..(105): n is a, c, g, or t
  misc_feature (123)..(123): n is a, c, g, or t
  misc_feature (141)..(141): n is a, c, g, or t
  Coding DNA Sequence Number=SeqID_4000
agctttattttcaaacacagatcganccgtctcncgccttaangccgttaaacagnccaccggagtgctagggcgggcgccatggcatgaacgtgcaagggccgnttcggtcccacggcctcnctgcttcttcaccagctntttctcgcgaaggattgtctccatgccgaccaggacaacggcaccacgatcgacacgcagccgaccggcaatggcgaagacaccgcacccgcggcgggcctgatctcgcaatacgtcaaggatttctcgttcgagaacccgaacgcgccggcgatcttccagaacccgaacccgcccgcgatcgacgtgcaattcaacatcggcacagcgcaggtcggcgaggaagtccatgaagtcctgctcaagatcgacgtgaaggcagaggccgagggccagaccgcgttcatcgtcgacctgacctatgccggcctgttcggcctgcgcaacgtgccggccgatgcgatccagccgttcctg

SEQ ID NO: 18404 - DNA, 107 bp, Zea mays
  Coding DNA Sequence Number=SeqID_4001
cacactccaccttgtgctcaggctccgtggtggcatgcagatcttcgtcaagaccctcaccggcaagaccatcaccctgcgaggttgagtcctccggacaccattga

SEQ ID NO: 18405 - DNA, 576 bp, Zea mays
  misc_feature (30)..(30): n is a, c, g, or t
  misc_feature (36)..(36): n is a, c, g, or t
  misc_feature (39)..(39): n is a, c, g, or t
  misc_feature (56)..(56): n is a, c, g, or t
  misc_feature (71)..(73): n is a, c, g, or t
  Coding DNA Sequence Number=SeqID_4002
cacttaaagtggcttcggcggatatgaatnaaatcngcncaaccgctgtggttgcnggatctggttcagtnnngccgcggagtgtcgctaccaattgattgaggtgaaagggcccggggatcggttgcagacaaccaggtccggtggttgtcgttttgtgtgtcgcaggggatcccggtgagtgtgtgtcatgtgtcgtggatgcagcgaccgcatcagccgaagcgccggccgccgccgcgttcgcggtgcccgctgcgcgcgatgtgcccaatgcgcgtgatgagccaaatgcacgcgacgtgcccaatgcacgtactgcacccaacacgcgcaccccgggggcgctcatttgacctacgaagtcgccgttcgcaccttgtgcgaatttacggcgaagcgcggcaacctcgacatgcgcttcaccccgtcgccctcggccatggagggaatggccggccaccgcacgatcgcggcacgccggggcagctcattccagacggaactgacattggcgggcgactatggtttgcttcacgttcggggtcgcgcggatggctatgaccccgagcagaa

SEQ ID NO: 18406 - DNA, 513 bp, Zea mays
  Coding DNA Sequence Number=SeqID_4003
attgtgttggattggtcaggttgatcacgtgatgtgaaggacaagaactggattaatctcaaggtgatgcggatgatgaacctgaagatggataatctgaacgagtaccaaagcaaagaatggccgttaagcggacgtcgtctaacaaacactaacctagtgttattccaggtaccttcggactcggatcagaaccacaatatgaagaagtacaaagaatgcgaaggttggcacagagccgaagctatgcgcaggggaccttcggcatgatagcagaaaggggaaccgacttaaaagggaaaagactatttggacctcgatgtattactatagagtcattagcaaatgtaaagggcatgagtgtaattttacatgggctgcgtcctgtgcctataaatagatgaacagtgctcctgtactgttcacgctgacttgacatttgcttttgcgtcacgcttgtactcttaccttctttcaagccgaaggtacattgtaacttgttatcatttctat

SEQ ID NO: 18407 - DNA, 586 bp, Zea mays
  Coding DNA Sequence Number=SeqID_4004
ctgatagcctttaccctgttattagtggagcaagtatagttgcaaaggtcactagggatagagcactgcgaaactgggtgtttgatgaaacagctctgagtctgcacatgagaactagatcaggatatctaggagaccctgatactaagcggtggttagaagatcacaagcatctggtatttggcttcttcaaggacgcagtcgatgtgacatgggagtctgataaagttgatcaagaagagattgatagtggagacaccaagcgacaagtcaagcttttaagcctgggcttcactggtttcaaaaggaagaccgagaagattgaatcaaccggaaaaggctgttgcaaattcttccaggttcacaaacttgagttggtcaggaagttcccgtgatgtgtggtgtgctgattatgtagtacttactacttagtactatatttgttgtagaagctggagtgtatggttcggggcgtgatttgaaacatgttgaaattggttgtttagactggaattgaaatatgattgtattcccctattgctatttatgcccttatgccattacctacgcgctacagtagttactg

SEQ ID NO: 18408 - DNA, 444 bp, Zea mays
  misc_feature (219)..(219): n is a, c, g, or t
  misc_feature (230)..(231): n is a, c, g, or t
  misc_feature (267)..(267): n is a, c, g, or t
  misc_feature (345)..(345): n is a, c, g, or t
  misc_feature (376)..(376): n is a, c, g, or t
  misc_feature (410)..(410): n is a, c, g, or t
  Coding DNA Sequence Number=SeqID_4005
agcaatctcatcaccggttgtattcctttgatagtatgtcaccaaaaatgcttttagccagtatgaaagcttccttccctcacaaaggagcacaaataataaaccctataagattttaaaccgtggtaaatagtttcttttccaccattgaatcaagaaaccttaaagcttcttttagcaatttcattctgtagcaccattctatcatacaagtatatncatcctcactnnggggttaagttagcactctgcatccctacgagaaanctttttgcttcctccaatctgtcgactttgctccaaacatctaataaaacaatcgtaaacatagctggctgagctgcnctgaagctttaatcacttccctcccaaaaanttcctcgagaactttccatgtcaactattttccnataaactaatagaatccaccaactaagtcatggt

SEQ ID NO: 18409 - DNA, 293 bp, Zea mays
  Coding DNA Sequence Number=SeqID_4006
tcatcattaggataacattttcgtttcataaatagtcacatcatgttcattgattaagttaaggcaatagcaaaatgctaaccatgataacccaaaaggtaagcaaggacaaggtaaatagagagctagtcaatcctttggtttcaagtaatgtagtgcgggacagtgaatcacaaagtgcccggcccgtaataggtcagaggacacttgccttcacctggatgttgctcaggaaggtctccagcaacacactcgggaacctcagactgctcgttgttcttataagaaggccg

SEQ ID NO: 18410 - DNA, 150 bp, Zea mays
  Coding DNA Sequence Number=SeqID_4007
gagcgcccgagggatgtcgtcggacgggtttgactggtctcggtgagccaatggacatcacctggctgaaagcaacccacatgtcctctgctctgcattagttttcgctcccgcttagatttcacgattccggatttggtagtccccttg

SEQ ID NO: 18411 - DNA, 323 bp, Zea mays
  Coding DNA Sequence Number=SeqID_4008
gtggtctcgctctcgggcctcagcagccccacgcttgccagccgtcgcgaccttcccgctccgctacggggccaagttctgctacgagctccccgtcgatcggaaccgccgctacctcatccgccccacagtcttctacggcgcaacaacagcaacgacgtcctcttcgccgcctgcgcgtcgcccgccgacgccgccgccaagagcaacgccgtcgtcgggctcaagctcaacgacggagggcccggcctcatcggctccgggaagctggccttcggcggcggcgccggaggcggcggcaccaacaaggccgaccggtacaa

SEQ ID NO: 18412 - DNA, 351 bp, Zea mays
  Coding DNA Sequence Number=SeqID_4009
gaactaggtgaactctttccttagaaaagtaagtactataaaatggcatcactcaaagccgagaaacctgctgagaaatcttgttgctcacaaccatcagggcaggtcaagaaagtgcctgctaccaccaaacctagtgggagcactcccaaagctctagcctccaagtcagctccaaagaaaactgagcagaagcctcagcctaagaagaaggcaagcagcaataagtcgaaggtatctgactaatccataaggattctgttgtacggtgctcttccaaggagtttatccatagtactatagaatataccacttgcttttgttgcttcatcaccatgtaactccttgctg

SEQ ID NO: 18413 - DNA, 540 bp, Zea mays
  misc_feature (170)..(170): n is a, c, g, or t
  misc_feature (173)..(173): n is a, c, g, or t
  Coding DNA Sequence Number=SeqID_4010
acggcgttcgccatgctggacgtcaccacgcccagggtcttcgacaacgcctacttcaacaaccgccgctgcagcagatgaagggcctgctcgcctccgaccaggtgctcttcgccgaccgccgctcccgccccaccgtcaaccgcttcgccgccaaccagaccgccttnttngacgccttcgccaacgccatggccaagctcggccgcgtcggcgtcaagaccgccgccgacggcgaggtccgccgggtatgcaccagggtcaactagccctgcccagctccgggtgtgcacatgaaatgaagctagctagctgctagcctacctttagctagctcgttattactaggggcgccgggggttgggaaagaatgctcatgagtcatgtccatccatccatccatcacacggttcacaatgtactattgattcgttggtccaccgattcttttctttccttggtgattgttgtgtatgtagcagaagtaataattaaaaaaccatgtaacaagaagagggatgagctttgagctccacactt

SEQ ID NO: 18414 - DNA, 491 bp, Zea mays
  Coding DNA Sequence Number=SeqID_4011
gagaacatctcaatctcaattgaaatcttaaaatccaaaattttcccgagaaaaattaaagtttcctgagaaaatgtcaggtcgtgggaagggaggcaaaggattgggcaaaggaggagctaaacgtcacaggaaggttctgagagacaacatccaaggaatcactaagccggcgattcgatagattggctcgtagaggtggaatcaagcgtattagtggtttgatctacgaggagacacgtggcgttctcaagatctttttggagaatgtatatccgtgacgccgttacttacactgagcacgctcggaggaagacggtgactgctttggatgttgtttatgctcttaagagacaaggaagaactctctacggattcggcgggtagggtttttgattgttggttttttgtgtttcctacgtttattaaatatgttaattttcagaatttggcgttaacttcgaaaaaattaaagattggcctggccggtg

SEQ ID NO: 18415 - DNA, 545 bp, Zea mays
  misc_feature (422)..(422): n is a, c, g, or t
  misc_feature (486)..(486): n is a, c, g, or t
  misc_feature (492)..(492): n is a, c, g, or t
  misc_feature (514)..(514): n is a, c, g, or t
  Coding DNA Sequence Number=SeqID_4012
aaatcaccgggcagcccgtatggaagctgctgggcggtctgtccaatcgagtccgcgcttacgcgtcctccggcacgcttcgcgatcccggcgccacggccgaagccgctgagcgctacctggccgaaggctttccggctctgaagctgcgcttccaccgcggcgactggcgcgatgatgtcaaaacactcgaagccgtccgcgcacgcgtgggcaaccggctggagttgatggttgattgcaaccagggttggcgcatgtcctgggacacggaagcaccctggagcctgaaagacgcaatcgcggttgctcgcgagttggagcgcctcggggtttattggatggaagaaccgctgcaccgcgccgattacgagggcatgcgcgcgctgcggcgtccgtggatattcgaattgccggcggtnaaatacccggcaggcgcacgagctgcgtgagttgataaccgaggttgcgtggatgtctgcaccngatcancgcttgagcggataccggatgngggcaagccatcatggccaagacacacattg

SEQ ID NO: 18416 - DNA, 361 bp, Zea mays
  Coding DNA Sequence Number=SeqID_4013
tggttaatcggttcgttcttcaatctcccccaagggaatgcaccatcccctgtaggaccagtgggttagtaacccgccgaatttggttcccctgtgcccattgttgatcgtcttaacacgacacctggggtttggggttcaccgctcccgctccggccggagtacataggagggctagagtaggaccagccggtagatagactgatgctcatctgtagctagggaaccagagtctgtttgttcagatgtccgagtataaccccccccccacaatgcccattctagcgccccatggttgcaaattttcagttcccccccccccccccccctttcctttgggtctggttagggaatttttgtg

SEQ ID NO: 18417 - DNA, 463 bp, Zea mays
  Coding DNA Sequence Number=SeqID_4014
gaggcgcgacagactttgcattggaagcatggctattggcgatgctcctcatcggcgtggtgacaggcgtcgtcgcccagtggctcgtgcagcgcgacgccgtgagtggcaagacggaccccatcgcgttcggatggctcaaccccgccgtgcaggcggtcaaaaaaggcgactccttcgtcgtcgcctatgtgcttaccaagaccagccacgacggcttcatcgtggcttatgagggcacggttcagcagctcgcgctcgacgaagaccagtcgatcaagctggtcatcctcaacgacgtcgaccgtttcctggtcaaaatttctgagagcggcctagaccgggtcgacacaagctcgacgccgatcacccaattgcaggtgacagcggccgagattgcaaatgtggcactggaggtcgtgcaggcgccagctgcggatgttgaggccgtcgcacaagagga

SEQ ID NO: 18418 - DNA, 409 bp, Zea mays
  Coding DNA Sequence Number=SeqID_4015
tcaattaccttggaccttcctgttaataatccatgatataaccttccaccttgttccctcctccataaatcccatatatccatggaacctccaaccacctcccttccagaagaagtcccatggataccatccgcggcatccccaagcccttcctcatcgcccggctcggcaatatgcaccaggctgctttgccgcaccaggagtgcgctcgctgataatgttgtcgcggtcgatggcttccttttcgtcgcgctcgagctgctggtcaagaatcaccgccgttgtcatactcggtggattcaatgggggcttcgtctttgaggacggggatttcggattggccgatgcgggattggtaggagttctccattgcgttgccagtggggacttcggtggagctcatgatgat

SEQ ID NO: 18419 - DNA, 440 bp, Zea mays
  Coding DNA Sequence Number=SeqID_4016
gtgaagtggaacgactaaggtgtctgcagaagacatggaggcttcccgaatgaagagggatcccccatgacgatcctatgaaagattttctcaactgaaaagtgtggtagataactagatgttcatggcactgtatcacattggttgccccgtgccttgcatcagtgttgtgttactgtggggtggctacgcctgtcctaaggatatggccagcagaccgtgcatgtggcagtgtgtgttgcacttaaattatgatatgggaggggtaaggctggagatagcttaaccagagtggtggtggtgctgtgatctagtggcgggatgtaagaaactggctacaccttttacaagctgcgtgttggagatgtatggggctgtccgcgttggattgacgggagcagtgggaaccgctggagttgtgtgtccaaaatactgtaaaa

SEQ ID NO: 18420 - DNA, 142 bp, Zea mays
  Coding DNA Sequence Number=SeqID_4017
ggaaagtggcacctcacctacgttttccacgaggccaaataagcgcgccactaccggggtacgcgacaccgatcgattaacgagtaacggcattcttggcatggcctgggaaggaagctgaataaaattccccccgcattgg

SEQ ID NO: 18421 - DNA, 466 bp, Zea mays
  Coding DNA Sequence Number=SeqID_4018
tggtggcaacaagatcggacctgctctgcacggtctctggggccgcaagaccggttccgtcgagggttactcttacaccgatgccaacaagcagaagggtattgagtggaacgacgacactctcttcgagtacctcgagaaccccaagaagtacatccccggtaccaagatggccttcggtggcctgaagaaggctaaggaccgcaacgacctcattgcctacctcaaggactccaccaaataagcgactacaaatcgcgtgtaatgttacgactttcgatagatgggaaccgccaaggggcgactgtactatagatttttacacagcacttgttaagacatgccacgtgctttacccattcctatctcctctttatgcgtcttccgttccatacacttttttgcatacaacacaaccgtcttttgcacccaccaagaaagacatggcgttggtttgaagcggaaa

SEQ ID NO: 18422 - DNA, 330 bp, Zea mays
  Coding DNA Sequence Number=SeqID_4019
taactcgttgtgagtctagccccagagagaccgatatcacgtcgaaaggcgtggaacggggccgcagacagcgaacctcgtccttccgactgtttactggctgtggagccgctccgggtggcttggtagtgtggagtaggttcgagggatttctgggacaatacttcgacccaagggggggggagtggtcatcgcaactgtgttgcgaccgcgagtccgccctctcgcgcgggtagcttcaccacgcggagatctgagcgaggttacgcgtctcttgaagagcaaagttggtcaagtacctgggaggctcaagtctatgaagaaccggtg

SEQ ID NO: 18423 - DNA, 478 bp, Zea mays
  misc_feature (448)..(448): n is a, c, g, or t
  misc_feature (453)..(453): n is a, c, g, or t
  Coding DNA Sequence Number=SeqID_4020
attgctccacgtgatgacattcctgggtcgcagcacgtgatggggaccctgcgatcgggagacgacccaaagacgagcgtcaccaacaagaatggacgcttctgggacattggtaatctgtatgcgagcgacggcgcgattttcccgacgtcttctggttacaacccgacgatgaccatcgtcgcaatggccctcagagtgggcgccgccatgatcaacgagacgtccccagcgagcgtcatcacgtaagcattggacactacgcctccggtgtcacatcgacgaagccgaggctctcgtagagctcttccgcgggggtattgcctcgcgtcaccaccaacaggagcttgtcgaatcccaagtctgtgagcgcgtgcatgctctcgacaatcagactacgggcaagtcctcggcgcttcgctcgcgcggccgtcatcgtgaacgccancagangttttctttgtgcacatgaccacga

SEQ ID NO: 18424 - DNA, 386 bp, Zea mays
  Coding DNA Sequence Number=SeqID_4021
acgatgcatcggttgccccatcgatccccctatcaagagggaagcttctctctccctccggttccagaggaacgctacccgcccgcgcccgttgcctctgtgaaatctccccttcgcttggtgacagtgaaaccctccaccggtgctccgtgctcgcctccggtgatggagaagccgaagaccgtggcgcataggtacacggtgccgacgtcgcctccgtcgatgcggcgcagcagcctgatggtcacccacaccgcgtccccagaccgatgcggccgcgccggcgtcgaggaggaggccggattagcagtagctgccatggacagtaccgctgacggggtgcagtcaaatgagatgctagacaggctgaagcaccgcggtaggct

SEQ ID NO: 18425 - DNA, 355 bp, Zea mays
  Coding DNA Sequence Number=SeqID_4022
cgggcggagaatttcaagctcaagcaaaaaacacaaagcgcgttaaaccacactcaaaccatgcgccagccaacaaacagccctcctagtcccgaccagaactcgctcgtagccccgagaacccgacagcgcgagatgggtcccgagctgatgacagccaagatgaccgccaaggccgccgcggcggcggaggcggcggcgaagcctgccacgagggcgtacgtgacgttccttgcgggcgacgacgactactggaagggcgtggtggcactggccaaggggctgcgcaagggacgctcggcctaccccctgagggtgaccgtgctgcccgacgaggccgagtcccaccgacgca

SEQ ID NO: 18426 - DNA, 406 bp, Zea mays
  Coding DNA Sequence Number=SeqID_4023
tgacccatacccacgacaaaaactaaccctaggcatcgccccttccccgcctccgcccacgcgccatggctgcctaccccctggtctccagggaagcactcgccgcgcagagaggcgccattcgatcccggaaggtagtggcagcagcagcaactccttctcgttcgtgacgccttgttccacggtggcggcgcagcgggcaactggtaggctttcggcggcagacattgcaaactccctgaggtacaagctatatgactctacctccagtgcattccacaatgtcgtcccagctttggagggtttgcatctgagcggccatggttctggaggaagcgcatcaggcaccctgagcaatgcaggggttggctctccttccccatgtcctaaccaggctaagtccaaa

SEQ ID NO: 18427 - DNA, 323 bp, Zea mays
  Coding DNA Sequence Number=SeqID_4024
gttggtatatgctcttaatgttttttgtcccagaattctgaacatactctaatgggaattgctaccatgccgtccaccttgggaacactattgggcttccattgcgaatacaagacctgaacatccttcattgaataccacatcggggaaatgccaaattacgtacaataatgataaatccttggggaatatcacctgcctgccacagtgccccttcaccatgcaatcacaaactttaccactaattccacctgataccaaacattaagtatctatctatttccctgtgctataacaaacatctatggactttaaggtggaca

SEQ ID NO: 18428 - DNA, 537 bp, Zea mays
  misc_feature (44)..(44): n is a, c, g, or t
  misc_feature (74)..(74): n is a, c, g, or t
  misc_feature (136)..(136): n is a, c, g, or t
  misc_feature (142)..(142): n is a, c, g, or t
  misc_feature (200)..(201): n is a, c, g, or t
  misc_feature (232)..(234): n is a, c, g, or t
  misc_feature (239)..(240): n is a, c, g, or t
  misc_feature (251)..(251): n is a, c, g, or t
  misc_feature (266)..(266): n is a, c, g, or t
  misc_feature (269)..(269): n is a, c, g, or t
  misc_feature (353)..(353): n is a, c, g, or t
  Coding DNA Sequence Number=SeqID_4025
agcttcattgccttacaagtccatgtgcatagggtcctgctcgncaggtgtcccaccaaaaactccgccaccancggagtaaaggtaatctccggctcctgtgctgacttgtgtggggcattgtttgcccatgctntgcaanaccagctctcgggagcagtggcttcgttcccgatcaggtggcatgggttacatagtgnnaggttattcccccccccccgtgtaaaaaagnnnagttnngaatgcccccnatcagtcctctagtnatntgtgataaaaaaaagcaaacccacctccagagaccgcggtttagagagaaacccggcccttgtcgcagttctgatcaggccatnctccgcactcgcccccccgccaatcggcagtcttcctggcgatgctcgccgccggcgaagccaagggcggccgccgcaagcccagccggcgacgccggggtagaagggggctgtgtacgggaggacaacggatccaactgctacttcggcgtgtcgtcgttcttgaatcttgacctctcctatc

SEQ ID NO: 18429 - DNA, 432 bp, Zea mays
  Coding DNA Sequence Number=SeqID_4026
ataagtttacattccctctgaactcttcgcacaaatcgatttcaatggcgggccgcggcaaaactctcggatccggggctgtgaagaaggcaacctcgagaagtagcaaagccggtctccaattcccggtgggtcgtatcgctcgtttcctgaagaaaggcaagtacgccgaacgcgtcggagccggagctccggtctacttatcggccgttctcgaatacctcgccgcggaggtattggagttggctggtaacgcggcgagggataacaagaagacgaggattgttccgaggcacattcagctcgcggtgaggaacgacgaggagttgagtaaattgctgggagatgttacgattgctaacggaggagtgatgccgaatattcacaatcttcttcttcctaagaaggctggtgcttcatccaagccatctg

SEQ ID NO: 18430 - DNA, 551 bp, Zea mays
  Coding DNA Sequence Number=SeqID_4027
acgtcctctaggtttgcttgttggggtcaataaccataaaaaaacaactatttttggtgctgcacttctatatgatgagactactgagagctttatttggttgtttagaacctttctgaatgtgatgtctggaaagaaaccacaaactattttgacagatgaagacgcagccatggcaaaagcaatcaagatagttctacaaggaactcatcatagaatttgtgtatggcatatgaatcagaatgcatgcaagcctctccgcagttgttgaagattataagaaattcaatgttgaatttcagaaatgtatatatgatcaagaggaggagggatgggaaaatgcggggaaccaggagcgaaccacattcaaccttcaagggaatcaatggcttcaacgactttttgataaacgatatctgtgggcattagtatatggcagaaacacattctctgctgatatggtgtccactcaccgggatgaaagcctgtgattttagagcgacgcaaagtacaccaaagccgaaggcagcacatgcagctccaatagcttc

SEQ ID NO: 18431 - DNA, 376 bp, Zea mays
  Coding DNA Sequence Number=SeqID_4028
agacacccaagagcccagatatcaatacactcactgatgaccactcctaggccatcgagtatcacgccagtacaaggaaataattgcaggaccctaatatcgtaggcagcatttgcatgaacgcagagtgcaaaatcatagctgtgccggtggtttacccagatatctactttctcactgataagttccaggaggcttccttcaggcacgcccccacaagggaggcgtcgggggagcccaggcacgtggacagcgcctccacatgcggtctcctgatctcgctacggctgcggtcgcgtgagaaagccccgtggagcagccacgctgctgggacggtcgcttccttgtcgtgtacagcagctcaagaagcgtcagt

SEQ ID NO: 18432 - DNA, 389 bp, Zea mays
  misc_feature (42)..(42): n is a, c, g, or t
  misc_feature (56)..(56): n is a, c, g, or t
  misc_feature (63)..(63): n is a, c, g, or t
  misc_feature (65)..(65): n is a, c, g, or t
  misc_feature (67)..(67): n is a, c, g, or t
  misc_feature (84)..(84): n is a, c, g, or t
  misc_feature (93)..(93): n is a, c, g, or t
  misc_feature (106)..(106): n is a, c, g, or t
  misc_feature (116)..(116): n is a, c, g, or t
  misc_feature (119)..(119): n is a, c, g, or t
  misc_feature (124)..(125): n is a, c, g, or t
  misc_feature (129)..(129): n is a, c, g, or t
  misc_feature (134)..(134): n is a, c, g, or t
  misc_feature (142)..(142): n is a, c, g, or t
  misc_feature (151)..(151): n is a, c, g, or t
  misc_feature (154)..(154): n is a, c, g, or t
  misc_feature (161)..(161): n is a, c, g, or t
  misc_feature (200)..(200): n is a, c, g, or t
  misc_feature (245)..(245): n is a, c, g, or t
  misc_feature (248)..(248): n is a, c, g, or t
  misc_feature (251)..(251): n is a, c, g, or t
  misc_feature (270)..(270): n is a, c, g, or t
  misc_feature (278)..(278): n is a, c, g, or t
  misc_feature (286)..(287): n is a, c, g, or t
  misc_feature (317)..(317): n is a, c, g, or t
  misc_feature (319)..(320): n is a, c, g, or t
  misc_feature (329)..(329): n is a, c, g, or t
  misc_feature (344)..(344): n is a, c, g, or t
  Coding DNA Sequence Number=SeqID_4029
cgaggaagcaagaacaccacccgcccaggcagccaagagcangcagggggcgctcnccaagcncnangagcaagcgccacaagngcgacccanaaaccagggcacnggccaccagncangccanngggnaccangaacccangcacgcagnacngcaagangcaacaggggcccgccagcgggagggcgagaccgacccnggagccgcagcaacggggggccccaccgcaacagacgaagccagngangangccacacgagacgacgccnaacaaganggcaccannggagaagccgagcaagacggcaccaagggncnngccgagcangaagccgcaaacgangacgccacaaaggcaccgcgacgccgccccgcagaacaggccgca

SEQ ID NO: 18433 - DNA, 339 bp, Zea mays
  Coding DNA Sequence Number=SeqID_4030
cacgcgtccgatgcgagaatactgccgcactttgtgataatgggagggcaaacattgaatgcaagctgaaccatactattgacaagccagaagaggctaccattatagagatgcaggagccggtttccctgacctttgccctgcggtacatgaactccttcaccaaaggcgtcttcactggtccgagcaaagtcacgatcagcctgtcgtccgagcttccagtggtggtcgagtacaagatcgctgagatgggtttcattacattttacctggcccccaagatcgacgacgacgaggagatgaagccctgatggcctgtgacgacatcagtgctcatgc

SEQ ID NO: 18434 - DNA, 576 bp, Zea mays
  Coding DNA Sequence Number=SeqID_4031
agaacccgcatggatccaatcgcgagggcggcagctgcatcgtcccatcgtgccagcaaccgtagaccgtccaagccatctccgatcaccgtcgcgcgaacaccattcgggtctaaaggaaatggcagtcacgcgtggaggttgccttcctggcgcatgctgacgtccactgcggccatacctggcgcgaatgaaccgcaggaacgctctactgcaagagaatctgatacgaagtccaaggacaacaacgacaacaacgaccaggacaggctgcatgactaccacagaaacgaattaccggcactacttacggcctcatcgaggcccatcccacagagaaagactcaataggagcgcacggagaccgagaaacggatcctccagcgagttgacgagaacaggcagtgctaatgagcaggatcgaatgggcgatcatggagggtcgcccgcacgggatgaaaattctcgcaggtatatcttcgctgttcccgctctagctatggcactgctttgcgtaaacaactactccgaggatgcttgactgacacgcattacggcctgactgttttcctgtta

SEQ ID NO: 18435 - DNA, 600 bp, Zea mays
  Coding DNA Sequence Number=SeqID_4032
acaatggcacccagtgctgccctcttcatcgccctgagcctcctcctctccgccgtcgccgcccacggctgcggaagcacctattgccaaccgccggtcgtcgtgccgacaccacccatcgtcgttccgccgccataccatgaaggaggagggcacggccacggccacggcgggcagtgctccatcaacgtgctcaacctgagggtgtgcgccaacgttctcagcgaactgctcggcctcaagatcggcgttccggtgcacgaccaatgctgcccgctgctccaggggttggccgacctcgacgccgccgtctgcctctgtatcgccgtcagggccaacatcctcggcctccacctcaacgtgcctgtggacatcagcctcctcctcaaccactgcggcaagaagtgcccgtccggtttcacttgcccagcccattaacagaagtaccgttttgcatgggcgcccaataagatttgctttccgtacttcgttttcatgatgtgtggaactgttccactcccacattttaattgtgtaaccagtactactacagtatttatttatttttggcaaacaagcatgtactcttcatattgataa

SEQ ID NO: 18436 - DNA, 413 bp, Zea mays
  Coding DNA Sequence Number=SeqID_4033
tagcagcagcatacaaagctttgaattcaacagctaagttcatatccggtgcttttctttcttcctcaaaaccaaacatgtcaagctcatgtggcaactgcgactgtgctgacaagagccagtgcgggaagggaaacaactatggtgttaacattgtagagactgagaagagccacattgagactgttgtcatggatgttccagctgctgagcatgatgggtgcaagtgcggtactaactgcacttgtgtcaactgcacctgtggccattaaggaatatatgaaaatgtaattgccatgtgtatggcaatacaaaccccctaataatgtaatcttttactaaataaatgtgtgtgctgttatcgtacttcacgtctgtataagtgatacacaatcatttctagttcctgcata

SEQ ID NO: 18437 - DNA, 472 bp, Zea mays
  Coding DNA Sequence Number=SeqID_4034
caactcgttgcagtcagtgtgctaagaagattgcagtctttgccttgcctaaggaccaattaattgatcgttgctggaaatccagccatgttaatttacgtttatttcagaaacttagtttggatatggctaattgtttggtaacgtaataatttctacctactagccatattaggcgacttctacaatttctataatttatattagtgaatgcaactttttaaattaatttgatttcacctattgttttgtcttcatttggactaacgttcttctctgtaatatgtcattcaaaaatttggttggaactcctggatgtcttttagaccatttgacagagactaaaggtttttgccttacgaaaatcaagtatttggtatgttttcagttttcttattacggagcacattttggcttcagattggtttggagttccccatctgccttttagcctcacatcatgccgacatgg

SEQ ID NO: 18438 - DNA, 434 bp, Zea mays
  Coding DNA Sequence Number=SeqID_4035
ggatggggtatctgcatactacctgtggaactccaaactatgtagcacctgaggtgcttgctgataaaggttatgatggtatggctgcagatgtatggtcctgtggcataatcttatttgttcttatggctggatacttaccctttgatgatgcttggctgagatgcttgactacgacgaagagttcgaggccgagttccagcttttcgacgacgatgacgagtgcgaggccgagttccagcttctcgacgaccaccaaccatctcccgcagcttcgcctgaggccagcggctgcaagcggaagcctgcccttgctcctactgctggtgcccccgcttccacggatccggcgaccccgtgctccaggaagtacaggggcgtccggtaccgtcggtcaagcaggtgggccgcgccgatcaggtacccgcggcagg

SEQ ID NO: 18439 - DNA, 221 bp, Zea mays
  Coding DNA Sequence Number=SeqID_4036
gggctgaacgtggagtatgcaaactgaggaaatggatctgttggcgtcatttaggtttcagattgccacagataaggccagatgtcgattgtctagcactagatgtagtggcttctatattagtatgggagtcttctagtacttaaagagtaatcccatattcgaattgtatatgttctggttatatgttcgggcatttgtccatcttttggatcgtaaaa

SEQ ID NO: 18440 - DNA, 92 bp, Zea mays
  Coding DNA Sequence Number=SeqID_4037
gcgagatgtggcagaggtccacctcgccgaaggtgaagtacaacagcggtccggaggtccggtgcgcggcttgcgaggctgattttggcggt

SEQ ID NO: 18441 - DNA, 582 bp, Zea mays
  Coding DNA Sequence Number=SeqID_4038
gtgatttgtttcgattcaactggatagaagaatcagttgctgatttgatggagtcgcagcttgcttggcggacatagggtctgttgcatggattatggtttatgtgccagcgcccagtggtagacagtgtgattcaatgtgcttgctgttcatctgtccaaaactgctaaagtagcttctgaaaatggatgacatgctggacacttgctcactcggttcttgattttgattttgagaagttctgttcaatctccttgtcaaatttgaatgtgtatgcgtgcttggtctgtggaaaatatttccaaggaagagggttgaaatctcatgcatatacgcacagccttgaagcaggccatccaaacagcaccatggatcgttgtatagtcctggatcctacaagggacgccagcaaggtagcaaatttggtggcagtactacaagttggagttctgttggcagcatatttggtactatcgacttgagtggcaatcaacaaaggggcagcatgccatttggtagtcacaatggctctctggagtttatgaattagcaaaaccatgggccacgcgctacaaaatcgaa

SEQ ID NO: 18442 - DNA, 563 bp, Zea mays
  misc_feature (148)..(148): n is a, c, g, or t
  misc_feature (249)..(249): n is a, c, g, or t
  misc_feature (262)..(262): n is a, c, g, or t
  Coding DNA Sequence Number=SeqID_4039
aggctttacaactttatgcttccggctcggtatgttgtgtggaattgtgagcgggataacaatttcacacaggaaacagctatgaccatgattacgccaagctcgaaattaaccctcactaaagggaacaaaagctggagctccaccncggtggcggccgctctagaactagtggatcccccgggctgcaggaaatggccggcgcgctacctgctgcagcaccccggggtgatcgacgagctggccagngaacagctgttcnccgaacgctttgtcgccgccgacttcgagcacgagatggcactgcgcctggccgccctggagagcaccggcgaggacgacgacgaaaacctgctgaacctgctgcgccgcgcccaccatgcggaaaccttccgcaccctggcccgcgacgtggaaggggccatcacggtggagcaggtggccgacgacctcagcgccctggccgacagcgtgctgcgcgtgaccgcccagtggtgctggaagcgcctgaagcaacggccaccgcgacacccctaacttcgccatcattggctacggcaagg

SEQ ID NO: 18443 - DNA, 561 bp, Zea mays
  Coding DNA Sequence Number=SeqID_4040
tactaaccttgtgttgctttcctcaagtatcatggtatatgaaccccggtaaagtaactaaacatcattgttgttgcatttaacctgaagtttctattgaaggggaaacgagtaaaatgtacatggcaagttttcaagacagcggggagaactgttgttgtcatgagaccagcaaagcattcaagaagtccctctttttaaagtgttatctttagtgtcttctctttctgaaaattgttgctctttgtaaactcatctgtatgccattctcaaatttcagaacacatcatttcatggaagacatatatggttccttgtatactctttggaagtatgcaatccttagcctgctggtcaagagaaaatttttgtactatttttcctaaggcgtacaatggcaaatgctatgcccataaagtctgcccgagaaccggtaggcctcgtactcatccatatccatcagcaggttgaccgctgctttttggaatagcagtcatgccagttttttttggagatcttcttgtaactttcaaacttgagctatccgccaagtattacaaa

SEQ ID NO: 18444 - DNA, 587 bp, Zea mays
  Coding DNA Sequence Number=SeqID_4041
tgtgctaacattttgaccaccaccctatggttctttatgtagacagctgtttccggtgttcctggctttctccttggctgttgaagcattacatgcatttatgcaagatgaatcggagcacaagcatgtgccgtttgtgtctgctgtctccagtcgggtgggtagctgtctctgctgttactagtctttctccactgccttttcatgctgacaccttatcttctaaaaaactgtcttccaggcattatctgattgtttctgctgtcaccaatcttttggttaatttacttggtgtttggttcttccggaactacgctcgtgttaacataggtacgggaagcaacttatatcctgttgcttctggtgcaaatggagattttgtacttgtttccctgcaagggttgtaaattaaacagaattatgattggcagtttacaggaatgcagaggatatgaattaccactcggtctgtttgcatgtgttggcagattcaatacggaggtacatgcattcccaggcattgttggactcttcccttgtgcacattatacttttgtaccttgctggttgccacacgcgatattgat

SEQ ID NO: 18445 - DNA, 224 bp, Zea mays
  Coding DNA Sequence Number=SeqID_4042
tgtgaggcagccataaccccagcactttgtcatgcacttccaagcttcatacaggcacaagagaacagaactccaatccttttgtgcctgtatgaagctggcaggcatgacacagtccagcttttggactatcttctgtgaggcagccagcccagattggcaaactgaaaatgcaccagatatattacctatttgcttctacgcgtggactttattacgagtaa

SEQ ID NO: 18446 - DNA, 573 bp, Zea mays
  Coding DNA Sequence Number=SeqID_4043
ccgcaggcaacctttgggtagatggagcatagctttaatttagagagaagttaatgtagaaacgctcatatggatgttttaaaatcgagtgaaatagaggcgagtttttagatgtagatcaggtaagatcatcggtagcgaggaaattagggatggatatgggagggttggtacctgctgataggcatgttgagggggttgttgaaatgactttagatgccatccaaggatcgcaaaaaaaattatctgcaaaacgattatttgattggcatgccgcattatttcctacaggaagatcggggatgcaaaagataacggtaggtgcttggagagataacaaaaaagaagatcccatgcaggtagtttcgggagccatgggaaaagaaaaagtacattttcaagcgcccgatgccgatttgttggatggtgaaatgaaaaaatttatagcatggtttaatgaagaacaaacgatgaatggggtattgaaagcggcggtagcgcatctttggtttatcacgatacatccttttgatgatggtaatggtaggatagccagagctataagcgatttac

SEQ ID NO: 18447 - DNA, 440 bp, Zea mays
  Coding DNA Sequence Number=SeqID_4044
tgacgatcgtccccggaggttcccggcgcccgttcctggcctgtacgcgatcgccgagatcgcgattcgtttccgagcttcgagggatcgaagatcaagagttggcgaccaagtgatctggttcttcgagttctacgaggctgaagatcctgagcatctatttggtgaaggtaaagtagaaggtgtcgaggcggatctccaggagttccaagacatcgacgagttcgaggattaggctagcgacctcccccagtcagctgcctgtggtgggtttatttacgctgcctacgtttctattctgtgcactttgattttactatgtacatgactctagccttccatattattacctaccctttattgctcttccaagccttgcgctatgatgccctcttcctgcaatccccccgtctatgaaatattaccatgacagctccctc

SEQ ID NO: 18448 - DNA, 405 bp, Zea mays
  misc_feature (341)..(341): n is a, c, g, or t
  misc_feature (380)..(380): n is a, c, g, or t
  Coding DNA Sequence Number=SeqID_4045
ctgttggcgttggtggtgttttctcgtagtcaaatctctgtgcctaggttttggcatgatgattgaggcggtggtggttaccttccctcggatggtgtaattttacaggataagttcctcttgtttcgtctggctctgtcatctttactgattgttgatccaattgggatattgtggcacttccagagctagggcacctgcggttttttgtgaatcaacttgtttctgttgatattttatgattgtttatttaatcttaagttgcgtaggctgtatgtctataatgaataactatgttcagtggcggaggacgccagaaaatctaggtgttgctaacccancgacgaataaaaatttatgacacatgatcacataacatntcaactaatgctttcttcaagattt

SEQ ID NO: 18449 - DNA, 205 bp, Zea mays
  Coding DNA Sequence Number=SeqID_4046
tgaccttctgtgtgccgccaggctggttggcctacagaagcctgatggaggcgtacgccctatagccgtaggggacatcctctaccgcgtcgccctgaaggctctgttggcaactaatttccagcctggaatgctactgccgaaaccagctaggcgtgggaaaatcccaggagggtgcttgaaaactgcccattaacacatgccc

SEQ ID NO: 18450 - DNA, 344 bp, Zea mays
  misc_feature (34)..(34): n is a, c, g, or t
  misc_feature (102)..(102): n is a, c, g, or t
  misc_feature (113)..(113): n is a, c, g, or t
  misc_feature (120)..(120): n is a, c, g, or t
  misc_feature (144)..(144): n is a, c, g, or t
  misc_feature (218)..(218): n is a, c, g, or t
  misc_feature (227)..(227): n is a, c, g, or t
  misc_feature (264)..(264): n is a, c, g, or t
  misc_feature (278)..(278): n is a, c, g, or t
  Coding DNA Sequence Number=SeqID_4047
ggttatcggaacctcggaaagcagtttatcaggncccgttccccgttccccgtcctccatcctcagtcccagggtctccttctagttctgtcgttctctggncaagggatttnccgtgcnaggacgtacggtccccgaggatgnagactcgcaaccctgaccagccttccccggacccacgcgagcgggacaccgaggcagacgacgtctacaagggnggaagcganggcaaggtatactggtggagctttgggtacgttcagnatttcaattttggntttggcctggtttccaaggggagtttggcatcaagccgaatattggctggaaaacggatgatggct

SEQ ID NO: 18451 - DNA, 510 bp, Zea mays
  Coding DNA Sequence Number=SeqID_4048
gagtggccaaaatttattactattcaattatgaatattaagtgatttttgaccccacaattacacttagtattaaacgagaccgtaacttaggcgctcatgtacacaatagtcatcaacatatcagcaacaaacggtaagcagcgctagcaggaggcagagaagccgtcgtggttctaggagtaggtgccggcgtcgtagttcaggcactacccaggcggtccctaccccgacccccgccctgttcgccaccgccgcgccccccaccttcgccacgagcccctcacccccgacagcaggcgctccgcccccgccgctggcccggccgtgcccgccgctccgcccgtggaaccgcccgcccaaaccggcggcgcctccggtcttccggccttgcatcggcgccgtctcacaattctcagatccgtctgtcggtttgccactaactaactagcaaatcaagggctagctgcgctctgtgctgtatgctggagctgcaggtgtattttgatct

SEQ ID NO: 18452 - DNA, 367 bp, Zea mays
  Coding DNA Sequence Number=SeqID_4049
accagttcgcattctatgtggagcagaaggctctggagatatgggatgaccagaaccgtgaattgattctttcccgtatcaaggtccacttgaatgcactgaaaagatacacctatgggaagcatatcgtggcacgtggtgagaagcttatcgctgcaggagaacggctcattggtgccccatcctgttgctgagatggcaataaagctatatacaggcggcacaatatcacctgtacagacagacagggatagcgaggcctagctgtttaccattaccagtagtcggtcatattgatcgacggagaggttaaaaaaggctctcaaatcctctgatgcaataaaaggatagccgatggaagataaat

SEQ ID NO: 18453 - DNA, 314 bp, Zea mays
  Coding DNA Sequence Number=SeqID_4050
gtaatgttgctaggaatcagccaatcaggttcatgacctcatgggctgggaatcagttgttgcttgcttgttcagttttcactttgtgtcttttagtgatgcagtctttgtcttactcttgcttgtgtgcacgatgcacttgcttgttcagttttcatgcacttgcttagttgcttgttcagtttttctttctgcataaatttcatttttttatctgttgatttctgcttttgattccttatttaaactttgcagacaggaaatattggtcatatggagacagttctgcacagcgttttgagtgccagtatgag

SEQ ID NO: 18454 - DNA, 433 bp, Zea mays
  Coding DNA Sequence Number=SeqID_4051
atgcactgaggcttacgcgggataaaactaggttagtgtttgttagacgatgaccacttagcgatcagccttttgttctaacactcgctcagtctgtccatcttcatgttgatccaccagcatcaccatgtggagtatcccaccctttacatcatcttggggtcgactcagctctggtcctctgcattacatgattaactagcgtacctaatgagatgcataatgcacatgaatgaatatgagtataaatagcacaagatagataaagctactcgaagaagattaaacacttatggcaagacatcgcaaatccaataagaaaacactaggtgtcatatcacattaaaaatatagctatggcattcgaacttaaccagatccaatactaacagcacgcaacagtaaaccatgcataagcactttaccctcctta

SEQ ID NO: 18455 - DNA, 541 bp, Zea mays
  misc_feature (96)..(96): n is a, c, g, or t
  Coding DNA Sequence Number=SeqID_4052
tatcgtggcggtgtcatggcgatcaccgtggcgagtgtcgtggtaatgtcgtcgtgatgagtatcgtgatggtcatcacgatctactcgcacaacngcatggtcatcaacaagacgccgactagcccgagagcgatgaatactgcccgggattgcgaaatagagggacttgaaaagccacgacaggagccccgcggtcccggccgcgcccagcggcgctgacgagaacaggcccgccgcagcacagcaccgcgagcatgcgggcaattgcacctatggtgcgttcgttcatggtgccacgcctctccgggccggtccactcctgtggccgttcagaaacaaagtgcaccctgtagtacctacacgttcaagaggcttgcgttcacgatcgcaggagccatctccggaacgtcacgcgcgtctgcctgccgggaatagatcgccttcaaaacgctgaagagacgcgcgccgaagtgcccgaactaccttgcccaacgtatcggcgcgcgcgcatcgaacaacgcgtcgatgatgggacactt

SEQ ID NO: 18456 - DNA, 411 bp, Zea mays
  misc_feature (58)..(58): n is a, c, g, or t
  Coding DNA Sequence Number=SeqID_4053
tgcaggtaccggttcgtatttctgttatacccacgcggctaacactccggctggaggncagggcactgggctgtctagctctagatcctccgggcagccgcccgcgatcttggacgtatccatctggaaagtcacttttccaactccaagctgaacggatcttgtgcgttcacatgctggctgctcaatccagtgaaagcccgagtaacactgtgctgatccactggtatataacgacaagccccttcacggatgcttccactcgcaaattcttccaaacccgcagatactttggcctagaccctgaccaagtgacattcttccaacaaggcacacttccatgcccctctgccgatggtaggtcgatggtagatctattatggagacaccgtattgggtagcgaaggcttc

SEQ ID NO: 18457 - DNA, 347 bp, Zea mays
  Coding DNA Sequence Number=SeqID_4054
aggacagagacacattcctctgcttctttcttttcgtcacacccaatttttacaggcttcaccgctctctttttcatcttttttcccccattcacatgacaagcatcatcatcaagagccgtgaacgcgaacgagcgcggaaacgtgtcagaagagaagggacgacgggcaggagaggaggggtgaggggcggggacgagggacgcccgcgggccgccggcgtggcggggcagaaggcggcggggcgggcggcccaagcttccttgagttaattacatgatttgtttgaaggagaagtaacgactacgactcgcttagctcggtttcgatttctgagcggcgccggc

SEQ ID NO: 18458 - DNA, 378 bp, Zea mays
  misc_feature (31)..(31): n is a, c, g, or t
  misc_feature (33)..(34): n is a, c, g, or t
  misc_feature (52)..(52): n is a, c, g, or t
  misc_feature (69)..(69): n is a, c, g, or t
  misc_feature (78)..(79): n is a, c, g, or t
  misc_feature (95)..(95): n is a, c, g, or t
  misc_feature (106)..(106): n is a, c, g, or t
  misc_feature (115)..(115): n is a, c, g, or t
  misc_feature (148)..(148): n is a, c, g, or t
  misc_feature (150)..(151): n is a, c, g, or t
  misc_feature (161)..(162): n is a, c, g, or t
  misc_feature (245)..(246): n is a, c, g, or t
  misc_feature (301)..(302): n is a, c, g, or t
  misc_feature (351)..(352): n is a, c, g, or t
  Coding DNA Sequence Number=SeqID_4055
acatgccaacatagtagaatacgcgatggcncnntctgctcactctgtggcngtggagaggtcctcctncttcctttnncccaaaggaaagtccngcgaatggggnggcgccacncccaggccatgagccgcctgccgcgccccaggncnncgcccacccnngtctccatttggtcgtcgtccgcgcccttcccgcctaacgcctcgatgagaactcgtgaagaacccgcgaaaacgaaatcgcnngtcgcccggggcccggggcattccctgggggatggacgaagagtcgaacgcgacnngtgcgggaagcggctttggcgtccattcggggctggagaacacgggagnngccaaccgcggcaggcgtacccggca

SEQ ID NO: 18459 - DNA, 410 bp, Zea mays
  Coding DNA Sequence Number=SeqID_4056
gggcatcacccactgatcatacagcttggagagcactttgggatcgaccttgcactcgctgtcaccagcagtggcattgtcatccaaggtgacgttctgcccgaacgtcctagccttcttctctactctcttcttgaccttctcttccacagccttgaatgtcagcatatccatcagagaaatgctgtccttttcttttattagtcgactataatcttgaggagcgtctttgaacttcacctcagccacatatttacccatatgaattctttgtgatagaacctgcagacacgctaaatccagtgccactggttgggcatagctgccatcatccccatccacagtgaataacgggagccattcatccaaaaacattttcccgcatgcatcaatcccggtggccaattaaa

SEQ ID NO: 18460 - DNA, 77 bp, Zea mays
  Coding DNA Sequence Number=SeqID_4057
cagtccagatgcgttcgcgcgcgccgtcgcagctgatccatatagaccaatctggctcctcgggaagcactccttca

SEQ ID NO: 18461 - DNA, 406 bp, Zea mays
  Coding DNA Sequence Number=SeqID_4058
caaaaaaattgtcttgctgggaccaaaaaaccccccaaaacctggtcctgtggttccagttcccccttggttggcccccgtgcccccccttgggctaaggggaatttcaattaccctgcccaagccctcattatatttccaccctgtattgctggctttttcacccccgctgacaaaccctttttagggaacgcccgccaaaaccccatcgggaagcttgccaagtcccctttatgcaaaaatgtagcttaacctggaaaggttctctggttcccccgccggtttatagggtgttttttcccccaaaatcagtggccccatttcttttcgtggccaagtaatttttgggtgtttggctattcaaaccaaaggtttttctgtaataacttgcccaactgatggcccc

SEQ ID NO: 18462 - DNA, 407 bp, Zea mays
  Coding DNA Sequence Number=SeqID_4059
aaagtgcatcatctagacgcagtgtgggttcgatcctccgtgtctctctttggattttattttaggttgcctctcaggttgtagctggatctaggtatagggtacacacgtgtgcacgttctgcgtgtttcctacgcattaaaagtctaggtctccaaattccgttcctagtgtgtaatgggcgtgcacgcatgtgtacttgtggtgtgcagggattacattctcgttttatgatttctaaaaaccgttttgttgaccaaagtttgacttttatattttcaaattcgaaaccggaatacatcaaatcctgcatcggttttttgtttctcggtccatatcgagaacgagaaaatccatcgaattttgttgtttctcgatagtgaaggtgatccctagcggtatgtagt

SEQ ID NO: 18463 - DNA, 553 bp, Zea mays
  Coding DNA Sequence Number=SeqID_4060
cggaaacaggagacggcggctccttcagcgagcagaggctgattgataagctcaaaaggctcaacaactcagccgctagcatccagactctttcgcgttggtgcatttttcaccgcaagaaggccaaaagggttgtagacacatgggaaaaacagtttactagtgcaagggaggataagaaaatatcattcctatatctatcaaatgatatcctgcaaaacagtaaacgcaagggagcagactatgtggatgagttctggagggttctacctagatccctgaagcatgtctatgaaaaaggaggaggagaagggaagaatcaggtggcgagattgatatcaatctgggatgaccgtaaagtttttgggacccgtattgaaagtatgaaaaatggcattcttggtgacaaccctcctatattggataacaatgggaaatagtttaaatcctagctctaatcccacttcaaattctaaagctgcacggaagggattctggtacaatagtaaaaaaactcactgctggcgggatgccatgcaaagatcgtgtctgc

SEQ ID NO: 18464 - DNA, 452 bp, Zea mays
  Coding DNA Sequence Number=SeqID_4061
atcatcgccgatatcttcgttttctaatccagcaccatcatttttatccgatgtcagtactctaccatacagagcaatctccttctcttctttcctcctcttgcggtcttgtattttcttcttcctctccttctcctgcaaaatcttctgggccgcctttcttctctttttcttcctgcttgtggaacccagtcgcgaaagcccagagcgcatacttgtcgagggtaacagacagcgccttgttcttcagggaccgcttattgatatgctttggcaccatcaccgtcggcatgtgccccgccacgacgtcctcctcggactccgaagccgccatgtcctccccgtaatcctcctcttctgccgccgcctcctggcgcgccaagcctgcggagatcaagcgctctctctccctctctctggatctctctatctccgaaggcagagcgcgccga

SEQ ID NO: 18465 - DNA, 273 bp, Zea mays
  Coding DNA Sequence Number=SeqID_4062
agatgaagaatggtcgcccccttggagcttccaatatccaaaaggagagccccccccccctggtgctcggtcttcgcggtggttattaaccccccagtcgttaacgccgctcctgtatctgggttatcaagggtctccgccattgcccatggagggggctgtctttcaaagaatttgtatggtttgtgtcgtaagtcgtcactaacctggtttcatggcccagttgtgttctggttacccaaaactatggtgcgcccgcatatggtttaatca

SEQ ID NO: 18466 - DNA, 465 bp, Zea mays
  Coding DNA Sequence Number=SeqID_4063
aatatgtttagtttggtgcttcggtaatttctggatccgcgccacttgtggcctcactcgtatcgtaggccaacaccattgtatccacaccagtgtatccattacagacacactaggtgtagcatctaaaaaattcaaatctttaaaaatttctcaaactcgctctaaatttaaaatgaattttaaatttcgtttcaaaatgtttgtttgcgagttgatatcaacaataaaatatagtggtctatattatctccaaaatcctccttaaatatcctacaaatatttttccagtgatcccctctgattctttacagaaatactgaccaaatattcccccgatgattctccaaatattttcctcctaaaaaataccttcagaatcatttttaaagtccctacaaatattttctccataatcttcctcatgctcatacgtatacgtatgcctccggtgtcatacagtga

SEQ ID NO: 18467 - DNA, 283 bp, Zea mays
  Coding DNA Sequence Number=SeqID_4064
caggtgttccaactgtggaaagtgttgccccaaggacaaggccgattaagagatttatcgtaaaggaacattgttgagcagggctgctattagtagatgttcaagaagctagcgtgctacgaaggttacacgtctcccaaagctttacgctaagacgcagtactgtgtctcgtgtgctatccactctcacgttgtgagcgcccgatcccgcaccaaccgtagagttcgtaccccaccacctcgttttgccagacgcaaggaggatacacccaagcctgcacaa

SEQ ID NO: 18468 - DNA, 208 bp, Zea mays
  Coding DNA Sequence Number=SeqID_4065
agcagcagccgctcttctagatgcaaccttactacctcctccttcctacgacataatatcttctattatagcgcctactaacaatacattactcgccgttgtacaacaacgtgactactaaaaccatgctgtcaccacacaaattaatcttgtagcacatcatccttttttcagctggtgtaataataaagaagacgccaccaatcat

SEQ ID NO: 18469 - DNA, 115 bp, Zea mays
  Coding DNA Sequence Number=SeqID_4066
gtggcccggtcctggaccctccctgccgtcctgctctgaagtgagccagccaccgtcgcctacctcggggacatcgcccgaacgaccagagcctcttttccccaaaaatgaatag

SEQ ID NO: 18470 - DNA, 490 bp, Zea mays
  Coding DNA Sequence Number=SeqID_4067
acacaccaaagttatctacagcgagatatgctggactgcttttttctactatcgtgtggacataactgataatgaattcgcatccttggaatcgcattcccttgcttgtcgagatattggaccatttctttagcaatgcttgtgagctcgatttagtgtttaattttcccaaggtttacctgatactagatgaatttattcttgctgcggagctgccagaaccaagcaaaaaggccataattgagcgaatggctgaactggagaagctggaatgaccaacaccaggaagatgctgccgcgtgtgttgtattccaatttgtatgattcgtttcaggtgctttacatttgctgctcctggttcgctccggctgacagcgtgatgccccatgctgtccctcgaaagaatgctagtagtagctagccatgagtttggtgcccagttacattataaacgtaccctccaaaacataataatttccccgcagcaaaa

SEQ ID NO: 18471 - DNA, 365 bp, Zea mays
  Coding DNA Sequence Number=SeqID_4068
tatggcacaacatggtaccccccgtacgtgggcatcggaattcgttatcgagctttatttacaaggagcttgctttgccctggtttctcactatcttgaacgggcgtataagcccattgatgtagggggagggcaacttgtcatataaactctttgagggaggttctggatgatgttctaatctacaaatgtgttagaagatggccggatcctgcgtgactggcaggatttaccatttaaaaactatgcccccggagaatgagggagaattctatccgacttattacacgttctgatgccacatttgagaagagccagaactgaccacctaccaccctcttaagttagttaagcgaacacaagtt

SEQ ID NO: 18472 - DNA, 437 bp, Zea mays
  Coding DNA Sequence Number=SeqID_4069
aacctggctggcgtgaggatccaaaagatgatcctgtgttcaaagatgctgtgcaccatgctgtgaaatcgatacaagagaggtccaactcccggtatccctatgaacttctcgagatccttcgcgcccatgcacagggtgtgtgcagactttgcaagatttgacattctgatgacactgaagagaggcagcagggaagataagatcaaagctgtggcccataagagtctggaaggggtctttgtgctaaaccagcatcagccggccgagcatgatgagttcagcacctcagtgaactgacgaaactgtgtgagctgtagtatcgtacttcgtggtactactagtcatgagaggacgacccatccgcttttatctggatgtcatgtctggtcgacgcgtcgttgctggcttggcgttccgaaggcagcaggcatact

SEQ ID NO: 18473 - DNA, 350 bp, Zea mays
  Coding DNA Sequence Number=SeqID_4070
atttattatttacgcgtcggccttggaaaaaaatccacccgtgcagtttttaaaaagcgtttactccatccaaccaacttacttaattttcaacttaaaagttggcatgtaaaaaaattttgaggaatacgtccccttttttttttcctggcggttaccttaagcccccaagggcgaaatcaaccctttgatgttggtaaaggttccaccagttgttgttttgttaaaaggtttttttatgtcttcgctagcgccttcctggaacctaatctcgttcctgtaagatagttctcgcctctgtaagatcagctaatgcatgcgcaaagctagaaatggtccgcctcctccgt

SEQ ID NO: 18474 - DNA, 542 bp, Zea mays
  Coding DNA Sequence Number=SeqID_4071
tgaaaaattactgcgcccaggctgaaagctccgcgtgcgttgtgcacgtgccctcccccatctcctggtttcgcctgggcggcccaccggtgctgacccgcctcacttctccgcgtcgttcctttttgcccaacgcgctttactttcagttggcccctaatagttgaacaagcttttcctaagcacggtttcttatctatccactccattcacctcgacaggctcatttgcacccaactactttagttcggaaaacatcttcgcaaatttttaataataatgccacttccatcaattcgcggattgtcttcctttaacacaccaaacctctttcgaccctccatgcccctaaatcgccttcttgcggccttgcgactctcctgaagggaactagggcatatgattcccctggtctcctcaaccttcccttctattgtcttccacggctacactatccccgcaaattggcaataacaccttaacctttgctcaatcctccgtaaatgggtgttactcaaaaatttccatatttgcctcacgct

SEQ ID NO: 18475 - DNA, 42 bp, Zea mays
  Coding DNA Sequence Number=SeqID_4072
tgttatgacaaataaggcacgtattcttcgagcaacacaact

SEQ ID NO: 18476 - DNA, 374 bp, Zea mays
  Coding DNA Sequence Number=SeqID_4073
ctgagaggccgctcccctaggaatgggagcaggaccccggaggaggagccggttctcgccccaaagtttccgtcaacctatttaatcgttagtggtcagttttttagacgggaaaagagatcctttgggcccaaagacgaaggctttctgcagtgccctcgctaaagctgccctcaagtccaagtaggcaaatttgtccccttagtgtgtcccctgttgttttttttagtcgtcccctgctgtaggctttccggcggcggtcgtttgtgtggttggcatccgtggccatgcctgtgggggggtggccgccctttttgtgtgggtctgtcgtcgcgttggggtcgtcttttcgtgctccccgtgggttgttgtaa

SEQ ID NO: 18477 - DNA, 239 bp, Zea mays
  misc_feature (94)..(94): n is a, c, g, or t
  misc_feature (102)..(102): n is a, c, g, or t
  Coding DNA Sequence Number=SeqID_4074
actaccactttcatcgtcaaccggtacaattccaatttttttttcaataaatgtctggcagggcatcaggccaaaaagggcctacaacccctcntattctcntacactctgggcgaatccagcaacacacctgcacagcgacgtgcagcatttctgagtgagaatctatggacggagctggagtttcttttattcaaaacacagggggtagcaattgctctctgggtgtgtggtataat

SEQ ID NO: 18478 - DNA, 579 bp, Zea mays
  Coding DNA Sequence Number=SeqID_4075
ggctacagccgctagccttggccatggcggcggccagccatgccccgagctgccctccatgtacggtgacccccgccccttgcagtcctggccgctcgctcggtcgttcgccgcgccgatcgcccaggaaggtccgcgctgctctcgttgtcgccgaggctagtggccagatcgcgattcgtttccgagcttcgaggaatcgacggtcaagcattagcgaccaagtgatctggatcttcgagttctacaaagttgaagaccttgagcatctgtttggtgaaggttgcctttggtgcaatctatgctcaggtaaagaagaaggcgtcgaggcgaatctccaggagttccaggacttcgacgagttcgaggattaggctagcgacctcccccagtcaactgcctgtgttgggttgtttacgttggctacgtttcgattctgtgtactttgattcatattatgtaaatgactctagtttgtagtattattacttactctttattgttattcgaagcattgtgctatgatgagtcatttatgtaatcgttgtgtacgtgaatttctgatcctggcaagtatat

SEQ ID NO: 18479 - DNA, 318 bp, Zea mays
  Coding DNA Sequence Number=SeqID_4076
tgggagtgggatgctcgacgccagccgtcgcccgatggcggcggcgatctatcgatttttatcgccactcattgccgcgcgagccagagtgtgttgcgctgagatgtgatgtaatgtgatgcgcacctcccgttcttattttatcttttctaccatgagttcaaaatcgaatgcatttcggtccgtcgaaccatcgttctgtttctgttttgcccgcgttccataccttctcggaggtgaagagtcgaagccgagcgtgtgtgcctcctgccgtcttttgatctggctacgagttaaaaggcttgttcatcgtaatct

SEQ ID NO: 18480 - DNA, 527 bp, Zea mays
  misc_feature (481)..(481): n is a, c, g, or t
  Coding DNA Sequence Number=SeqID_4077
gactaagacatccttgacactgctgcctcgatgctacgctggactgtcaaactgtcaaaggtccaaatcgctggatcacgaacccagcatgacaccggctaacgcacccagtcgctgggccctgtcctgcgcttggtgtcgcttcccagcatctggccacaagcgaatccaaaaccattggacatgagcattgaaggagggttacagtgagcagaacttcacccccgaatgcaaccaccacagcgatctgtcagcgtgaggtaaatcgcactaaggaccgtcgagtctctgtttcattccacttacgagcgccgtcctgcgcttgcaagggaatgcttgtcgagcagctccgatgttggtgaatcgcctctcagtaaattcttcagcttcaggtaccttatttccgggtatgtgtatgaaatgatttccggaatgttatgactaacaacattgttgttggtcttcgattcgcctacatggnggctattccaaaccttaccccatcccatcgcaaggtgtttgtccag

SEQ ID NO: 18481 - DNA, 246 bp, Zea mays
  Coding DNA Sequence Number=SeqID_4078
acactggcattttggtaaccatagacgaataagaatgagggaaatctccaaacatgttccggtgatacagtccagctagaggaaattttgacatggaaagttaattatccttacaatacttatatcagcccaatctttagatgattcactccctggtcagcgatgtttacctggtcggctatgtagcagcgcctggtccacgcacggtgctgcgtccacggaagcctacggtcggcgtctggtcca

SEQ ID NO: 18482 - DNA, 438 bp, Zea mays
  Coding DNA Sequence Number=SeqID_4079
gatactcgagagtcgccggagtgtccttcccttcttctatcagctctgcttctccctttagaaattagggtttttgaggaagacgagtattcacttcttttcaccgtgaagcgatggcttctttgttcaaggagcaagcaaagctctcagcttatcgagatagaagattttcaggaacacaagaggagtttgatgaagcgttaagggcatctacaacggtttacattggcaatgtgtctttttacactactgaagaacagctttacgagcttttctctagagctggagaaatcaaaaagatcatcatgggtttggataagaacactaaaacaccttgtggcttttgtttcgtcctgttctactctagagaggatactgaagatgcagtcaagtatataagtgggactattctcgatgaccggcctattcgtgtggatt

SEQ ID NO: 18483 - DNA, 440 bp, Zea mays
  Coding DNA Sequence Number=SeqID_4080
ggccgggactaagtgccgctgctaattacaaaaaggcagctcaccacgcccccggccccgctccctcctgcagtcccgctccccaccccgccaccaccgacgctgggatgaaggccgtgccagccgacagcgccgcgcccccggtgccgatgccgatgccgatgccggcgaccaagatcaccattcccgtttccgcggtgggcggcgcggaggcggcgctcctcgggaaggggcggtacaaggtctgggccttggccgccatcgcgctcctcgcgctctggtccatgtccgccgcctccgtctcactccgctggtcctcctcgggtgacctcgcctccgtctacggggacctggacgtcccgctcgccgacgacctcgattcccttgagatggaggagagggagaaattattgttacaaatgtgccacccgcacacacaa

SEQ ID NO: 18484 - DNA, 119 bp, Zea mays
  Coding DNA Sequence Number=SeqID_4081
gatgatttcagtgctggtcgggctcactgatcttcccacccacgacgtgaaatgtttcaagcacatgccagactcctacttatctgatgcctctaggtgatgggtcagccacaaatgaa

SEQ ID NO: 18485 - DNA, 394 bp, Zea mays
  Coding DNA Sequence Number=SeqID_4082
tctcgatggcaattctctggtactgtctccgtctcctctccttccgcattctcgccgatatcaggaagcaggatgcaccagcagcggacgctccttctatggccgctcgcccattttctcccgcatccgcgatcttcatcgagggtatcttcatcgcgcagccctccctcggtgatatcttacgatctcagcgcatgtattctgcagactgacatagcgcacactgccgcctaccatactgcacaccaatctgcgccgcccgctggagctcctctctgcacataaatggcttgctattagatgaaggattggaagagcgtagccgttaatatgattccaagaaactctcgcgcctagggcatgatagctgtactctccgtaccgctgatctcat

SEQ ID NO: 18486 - DNA, 585 bp, Zea mays
  Coding DNA Sequence Number=SeqID_4083
ttgtttctttcaatcgggagtaacagagtgattgagggggcgaaaatgagtggagcgaaagggaagaagaagggggcaagcttcgtgatcgattgcgcgaagccggtggaagataagattatggatattgcttctcttgagaagtttcttcaggagaggattaaggttggtggcaaggctggtgcccttggtgattctgttaccgttacccgtgaaaagagcaagatcactgtcacctccgacagcaacttctctaaacggtatttgaaatacttaaccaagaagtacttgaaaaagcacaatgtgagggattggcttcgggtgattgcctccaacagggaccggaatatctatgagttgagatacttcaacattgctgagaatgagggtgaagaggaagactgaagatctatttctctgtcttgaggcattatccattaagtgtatttgttgtcgagtctcttttatctatgttgtttatccgacttttactggttcttcaaatattccctgtttttaatttggaaccaacgttataccctcgggaagttttataatttatagtcattattgcagaggttgccg

SEQ ID NO: 18487 - DNA, 579 bp, Zea mays
  Coding DNA Sequence Number=SeqID_4084
ccaacatgaaatcggggctcgctatccataactgccgtctggtgcccgaccagaagctcttccccgaccgcttcaagatcccctcgtacctgggccgaccctgtaacgagttctcgtgccgtcatctcatggagagcaccatcgccgactacatcacggccgagggctacatgccctgcaacggcgacttcggcatcaggacgcgtcttccaccccgagtacaacaaccgcggggcccggcgccggcaccagcaagagggtcaactggcccggcttccacgtcatcggacggaaggaggccgaaccgtttaccgccgggccgtttattgacggcgccatgtggctcaagtacaccggcgcgccgcacaaacttggtttcaagttttaaaggccgcatggcatggcatacatcacatcatatatagtgaggtggcaaacacgtttgggggggggggcacacatgtttgtgtgtatgtacaatccctgagacttgcaaacaaaggggtcggaaaacaggagggctgacatttgtaccttcaccatttgcattcctttggctgtttttacgcgcgcccaaaa

SEQ ID NO: 18488 - DNA, 331 bp, Zea mays
  Coding DNA Sequence Number=SeqID_4085
tcaagttttctagaatttagctgcttatatggtcatggaaagacttggttatgacgtgaacaggtgcagctgatgccaaacccttgatcttgtctgcgaaaatcgcgactcgcacggccacgaccatacgaacccaaagctaacagatgctgctgggcagaagtgggggcgaccctttgagaacctctatactttcgatatggaaaatcatatacagctcagttagtctgtctaacattcgagttcacttgctccaatacgaaaaatgcgatccaatgttcgtgcgatttctgtgtaaaactgttatacttttaactgtcctcaactatcc

SEQ ID NO: 18489 - DNA, 499 bp, Zea mays
  Coding DNA Sequence Number=SeqID_4086
gcaggactcgcttcggcggttctgatgttgctgtggactctgtagtctggcagtggaagagactagagagcacctatttctcttctgtccttttgcaaggcagtgctgggggattctttgcctagacccactgacacaagcttctgagaaattgtttccttgttcaaggagcagctacaatctgaattttttatggtggcaacaattcttatgagttgggaaatttgaacagtaaggagtaaaacaatctttgaacaactgcagatgagtatccaagattacagaatgttcttcaacaaggagaccttaatggtgccatggagtgaagccttgcttaagttctttgtttgatcgatggatctaaagtgtttgttttgttctttctttgctcattttctttgttttctaagcttgttcttccccttgctgtcgtatatagtctgtaactctttccttgtttcttgtactctacagattgaacgtatgtatcagtttactt

SEQ ID NO: 18490 - DNA, 451 bp, Zea mays
  Coding DNA Sequence Number=SeqID_4087
gaacgagccatcagcagcagttttgctatcctacctgcaccgcatcaccgacagttcttgcacagctacagctctgtagagggatagtagaggattcttatcatgcgttttgtattctgacctttgcttgttgtgagacccagtccacatgaagatgttttttttatttgttattgatactttcacgacatgaagcatacaattatatgcatcaaggttgtttgagaaagttcagcatgagaaagctgaccaaatgttgcgccagcgaaaaaaaaaaaaaaaaaagcggccaagcttactggcgtgtttagttcgtttcatggtcgggaggttggatggaatggaaaccacaatcaaggctgtagtagtgtgtagtaacgaggtacggagtatcgaggtagatacatcagatggtgtaagggagtacccagttgttagttcatggcttcaa

SEQ ID NO: 18491 - DNA, 224 bp, Zea mays
  Coding DNA Sequence Number=SeqID_4088
gagcctgggaaaggccatcttaacccttggaaagcgctgcgccaagtactacgaggccggtgcccgctttgccaagtggcgcgctgttctcaagattggccccaatgagccatcacagctttgcatcgatctgtacgctcgtcgtcttgctcgccatgccaacaacaaataaaaaaatgatctgctgccaattgttgagcctgattgcctggttgatggccctc

SEQ ID NO: 18492 - DNA, 477 bp, Zea mays
  Coding DNA Sequence Number=SeqID_4089
ggtggcccctttgtgtcttgacaaagtgggaacgacaggtcattggtcaatgtgtctcaaccagtggctgccccctggtgtgcagtgtatcatttaactgagattggcagttcagtatcctgaagcgcggcagttcagtcttgttcgatcttggtgaccctggcagggaagcctgggcgggcagttcagtccgctgtggcacaaaaccgcggaaatagcccgccgcaccaagtaggcccccgcttgccggaagctgtcagctccggcaccggctctggcgccagccgctctgacacgggcggggtaagagggggatcgggttagagtgtgacagcttttttgttcccgtgggcttggaagcctccccggctaccgcactgcaccacgggtgggactgtggcctgtgggagaggaggagaggagaggaaagggaaggcaaaggcatgtacttgtatagtactacgaacgtggcgggcg

SEQ ID NO: 18493 - DNA, 157 bp, Zea mays
  Coding DNA Sequence Number=SeqID_4090
aaggtggtgtacgaggtttcctgatgaatgtgcgtgattcactacagcacgacgaaataccggaggaccggtgcgctcgagccctgctgctgatggtcgcgctgaccttcctcttcgtcttcaccgacgtctacgccgtgatggacctgccctgcga

SEQ ID NO: 18494 - DNA, 278 bp, Zea mays
  Coding DNA Sequence Number=SeqID_4091
ccgggaacgccagcctagaaataagctcatcaactccaaatgggaaaactcgacaccaggaaggggctgatcgttgcccttgctctccgggggctcgttggaagggccgcctccagaaaaagcgggggttggggttgccaaaaaccaccgtttcatcaaccgcctccgttctatatgccgcctccgttttatctgccgccgaagaagaagccgaagccatggaaataccccactcaaccaccgaagttaagcccgggccagaagttcgaatcctgcgg

SEQ ID NO: 18495 - DNA, 310 bp, Zea mays
  Coding DNA Sequence Number=SeqID_4092
gtcatcgtctctgagagaacaacaaggactcaagttttttttcggaagttcatttaagacacaacatgtcgggtgatgaggctgctgctcccgttgttgttcctcccgttgctgagccagcggcaatcccagaggacatggacttgttgactgcattggagctgactcttaggaaagctcgtgctcatggtggtgttgttcgtggtctccacgagagcgctaagcttattgagaagcgtgttgctcagctctgtgtcttggctgaagactgcaaccagcccgattacgtcaagcttgttaaggctctctg

SEQ ID NO: 18496 - DNA, 422 bp, Zea mays
  Coding DNA Sequence Number=SeqID_4093
tccaaaaatttgcccaccctaatggggaaagggacccccccctgaacgggcccttaaaccccgggggggggggggtttccccccagggggcccgttacttttgccaggccctaagcccccgctcttttggttttttccctttcttttttccccagtttcgcgggtttcccccgaaaagtttaaaagggggggcccctttaagggtcccaattaagggttttagggcccctggccccaaaaaaatttgtttggggggggggtccacgaaggggcccatccccctgaaaaagggtttttccccctttggccgtgggggcccaggttttaaaaaggggcctttggtccaaaagggaaacaaccctaacccttttcggggttttttttttgatttaaaagggaatttgcccatttccgccctttgg

SEQ ID NO: 18497 - DNA, 599 bp, Zea mays
  Coding DNA Sequence Number=SeqID_4094
tggtgcataacctgcctctcgagttccaaaaggaccgcttgtgtaccccggggaactccacctccccgagctactacgacggccgctactggaccatgtggaagctgaccatgagcggctgcaacgacgccacccaggtgtacaaggagctgcaggaggacatcaaatcctacccggacgccttccaccgcgtgatcggcttctacaacatcaagcagacgcagtgcgacagcttcatcgcctacgagcccgcggttttggactaaaacgcccccgccggccgccccccgcccagatactagctagctacctcctgcaagatctagaagctagacacatgcaccgcctctgacgatcggatttgctgccagacaccgtaccctttgctcgcttggtctcttcttaccattgacctaatacacactcacttccccggccctgctacctgtgctatccagatctctctgctggatgagatgtatccattgttgcgagcatgaccatgcattggatacctctatacctgctacaaaactactgcaacggctatatatacttggcaggaggaacatgcgaatgcaagctccagctatcggata

SEQ ID NO: 18498 - DNA, 553 bp, Zea mays
  Coding DNA Sequence Number=SeqID_4095
ttctggcgcggtggtagttgaaaaggcggaagggattagagcaaggagagggatcggcgatgagcttcgcgaatctggagagcggggtcatcgagcttcgacaacgtcaggcagacgcagagcgtcagcttcatcgcctacaggcccccctgttttttttatagaccgtggctagatcgaccaatggccatgtctctgcctgttgatcggatcaccttcttgcattggttcctctctctctctccctccttttttttccctttatctcatcatttcttttctcctgcatgcaatggttccttttgcttccaacaattctcctgctgatgtatccagcatggcatcatccatctacaattacgtacgtagtgcaacgactgtcgattcgttgggtgaggaacatatatgtgaatgcaagctccggctaccatacatgtgtaatgtgtaatagatatatatacaaaactgccgaggcgccgacaatactttataactggtccttttatatatcgtcatctgtctatcataacttgttcagctcacatctacagaa

SEQ ID NO: 18499 - DNA, 533 bp, Zea mays
  Coding DNA Sequence Number=SeqID_4096
tgctactaaagtctcgagcgccttcgctggcaccagggagaagtgtgttggatgcagcaagacagtctatccaattgagagggttactgtgaacaacactatgtaccacaagagctgcttcaagtgctgccatggaggatgcaccatcagcccttctaactacatcgcgcacgagggtaagctctactgcaagcaccaccacgtccagctgatcaaggagaagggcaacttcagccagctcgagaatgaccacgagaagacatcgcaggctgggtcgctggaggacgacgaagaagaagagtattaattaatcgctgagcaaaaatacataccaccagaagaataattaatcttccttcttgcactatatatttctgtgtcatttcagtcctaccaatggagatcatgtgcgttcagagactacgatatcgttttcttgtatctgcatgtaaaccacgtctactaccctgattccaccatttgcattgatcagaaggtaatctagaccctgtttggaacttgtatggaagaga

SEQ ID NO: 18500 - DNA, 566 bp, Zea mays
  Coding DNA Sequence Number=SeqID_4097
cgtcccctctgtcaaggagttcgtcgagaggtacgaggcttcgacgcacaccaaagtttggtccgacatccgccaggagaggcgccgcgagctggagaaggtggccaagatgtgcgacctcttggagaaggaactgaggttcatgacggtggacgacggggagcggtacacggtgccgtcgctggcggcgctggagcacaacctggaggcggccatgcacagggtgcgctccgagaaggaccgcaagatcggcggcgagatgagctacctccagaacattatcagaggaagccacgaggagcgctacgggttgtgcgacaagctcgctcatgctcagactcgtaagcacacgattttgtgagctacagacgctcagaacgccccgagactgcacttaataagtatacatttcttgcaccataaaacgtagcgtcgtgtgagcaacttaaattacttgcgtacatttctttggctatatataagaacatttcttcatttgcttgcaccatacaaaacaaccgaagagatggttcatagcaggcaaaagaatcttcctgcgggcctgc

SEQ ID NO: 18501 - DNA, 526 bp, Zea mays
  Coding DNA Sequence Number=SeqID_4098
gagatcggtcccgatgcgatcctcaccccggacggtgaccgcctcgatctcgccaagacggtgccggccgtggcgcacgccaccatggccgccgagcaggtgacgcgggcattggtgggccgcaccgtcgccgacgtcgaacgcgacctgatcctggagacgctgaagcactgcctcggcaaccggacccatgccgccaacatcctcggcatctcgatccgcacgctgcgcaacaagctgaacgaatacgccgacggcggcatcccgattacgcctgcgggcacgccgggtgagtatccgcggatgccgatgatcggggcgtaaggctccagccgagatcgagaggatgcagatgcccgggcccagccccgggcatttttgttttgtgccctctggcgacagtctcgtagcccgcatgacgggaccgcgttacgtgactaggccgtgacgatgcgaggccctataccgctcgcgagaccacgcgaggaaccatatgtctgaagctcaatacggattggctggcgtc

SEQ ID NO: 18502 - DNA, 351 bp, Zea mays
  Coding DNA Sequence Number=SeqID_4099
ggcactatttccaccttcccttttgccttttgcgacgccccacaagaatcgttatttgatgcgtttacacgcctcgcggccggcggtggccgccacgcatgccgccagacaagcaggcgccgatggacgcgcggcaggacggggtaggcgcgggcaggtcatccggatggaacgggaggccgtcatccccatcctcaagcccaagctcgtcatgcgcctcgcgtatctacactagagcatgaagctgatcgcaacgagttcctgaagctgtgcaagaacgtggactacaccatccgggcctggtacctcctccagttcgaagacctcatggcaagccttcgatttgtcttt

SEQ ID NO: 18503 - DNA, 281 bp, Zea mays
  Coding DNA Sequence Number=SeqID_4100
gatggttaaccaagagcacagaattcgtggagattttgttaatgggtttcttttcttgaacattgtttcttgaacgacttagtgatcattgctggacagtgtttacgaagtattgagatatgagctactatgcaggcggattttctcaatgccgttcttatttaactgcattgtgaacagtctgtttcccattgatggtttcctattaccggtggctttatgtttgtctgcggtgtctgttatttacttccccttttggtttcttacatggtaattcttgt

SEQ ID NO: 18504 - DNA, 462 bp, Zea mays
  Coding DNA Sequence Number=SeqID_4101
aggactcgcggcgaagacgcctacgctacctccgcggcccccgcgcccgcccggcgatctcctgcaatccgcggctgaggcgccggcgatgccggctcccatgcccgacgcccaatacctgcgccaggtcgacagggcgcgccgccacctccgcgccctcatctccaacaagggatgcgccccgatcatgctccgcctcccatggcatgatgctggaacttatgacctgaagacaaaaactggtggtgcaggatggttcgatcacatatgaagaagagtacactcatggtctcgaatgctggtttaaagactgctatcgatctccttgagcctatcaaagcaaagaatccaaagataacatatgcacacctgtatcggcttgctggagtgtgtgtatttctagcgactgtgcgaccaactgtcgaacttattcctgtgagacgggatccgtcgatgagcccc

SEQ ID NO: 18505 - DNA, 381 bp, Zea mays
  Coding DNA Sequence Number=SeqID_4102
taactaacactcgtgacgatcccggtatacagaaacagagctattagcgctagtgatggaaacagtctcatgactcgtgaaaggtagcttctacctccctcatctattatatgatttcctggaagactgctagcaggcggcaagcttcccagatcctgttcacattgccgtatcctttcttgatcggcgctggccttgtcgatttacgggaggaacgcggacattgagctatattatagttggaatcttcatgctgaatcctcttacttaatccaacctgctgctatcttgccgaaggagagcctctcatctagcggcatgacaaatgatcgcaagacgttcttgtggctggcgccactgtgtgtcccaggttcacggtgc

SEQ ID NO: 18506 - DNA, 542 bp, Zea mays
  Coding DNA Sequence Number=SeqID_4103
aggaatgaatctgtacatagtgtactcgtggcccctggaacttgtttccgtgatagtaatttgcgtgagtacagtgttttcatattgcaatataatttatagtttggtgtattctggtatatatctgttaaccgtttaaaattgtaaaccttattaatgacaataatatatataattcgtttggtagatggtaaaacttgggatcatttttattttataattaatatttattattattagaattgccctattaacataattaattgggatgtttttatataatttatgattttataaattcgtctgaataaggggtttttgtttttggtctagaggaggtttttgattttactttttattaggattataagtaaaatttcattttaatttttaaccataataatattctataatatgttctatatgagttatataactagttttcaaattacctgataatttctgtttttttaagattattatgtaaatagaattgttttctagtatttatatattatccatatatatcatatctctagaaa

SEQ ID NO: 18507 - DNA, 472 bp, Zea mays
  Coding DNA Sequence Number=SeqID_4104
gggtttagggtctcacctgcgtagtcggagcacctaagtcgcctgagagcaccaccgcgaggaggaacaccaagaggatgtcagaatggggattaatcgattagggttcgggatgcgagtaagggaagaggatgagcgaagagatgaggaggagaagagaatcgagagtatagatgtccaaataagccgttgccggtagccgtcggtgggaggcggctgaggagagatttcgtcggccgctaggagcccaggagctggagccaggatgggataaggcttaaggtttcaagcggtgaggaatgagcgagtgcggggatgcgtggagtcgggggtggtgcggcattattatgtagcaggggaactaggccaacgtcgtgtcatgcctccctaatttctatgttggactaggccaaggatggtgtgccgtccttagagcccaagcacggcacgaccactgtgtcaggttttgccc

SEQ ID NO: 18508 - DNA, 221 bp, Zea mays
  Coding DNA Sequence Number=SeqID_4105
tgcagtccttagttcctcttgtgaagaggccagagcaccacagctctgagaaatgggatgccttgctgtaaagaaaccacatggacggagatggtcaggttgacgcgatgctcgacaagacgatctgtgcactgtcaaaagtgttcataggatcatcagggtccaccttcacgcaggacatcttccggctggggatcagtgtcgcgctgtgacgagtacct

SEQ ID NO: 18509 - DNA, 503 bp, Zea mays
  Coding DNA Sequence Number=SeqID_4106
ttcggcgggctcactgcgaatgatgtgttttcggaagttctgggcctgccgacgatctgggtcccgcactcctatcccggctgttcccagcatgcgcccaatgagcacatcctgctgccattgaccgaagaggccttgacggtgatggccgggctgttctgggatctcggcgaattacccaggccgcttgcctgagcccacaagcctgagccggcgtccagccgaaagtcacattctaatccgggccgagatgtgcttgcatccggccgcatcatcctgaaaggggagaaaaagtgaaacatttccgtcacatcggcatcgcgctcgtcgcgacctttgccgtcagccaggccggcgccgaggaactgaccggcacgctgaaaaacatcaaggacaccggcgccatcacgctcggtttccgcgattcctcgatcccgttctcctatctcgacgacaaccagaagcccgtcgggttcgcgatggacatctgctacaagatcgtc

SEQ ID NO: 18510 - DNA, 469 bp, Zea mays
  Coding DNA Sequence Number=SeqID_4107
aagcctcttgatgagcgggcgcttccacgttcacttcaggaatcttcggtctttgatatcagaaagggatttgaggacattttggatgcagcatatactgatgcccttaatcgttaagagatgttccaccgcagcatgctttctggcgttaaagccaagcttctgtagagaagagtacgacaaatggtccaccaatgcattctttcactcagcagggaggacaaacccttgatataagttgtttgcattatgacacttgtagccgttctgcaagtgggggcagtatcacctttggtctccctataattgcaaaaaaaaatggaaggtcaagcccagtgtcgtatctgtttcttcaaacgtagtgagtcgctcgatcctggcatcaagatcatgacctgtccgacctttgcccccagccagcgtgcctcgcactgacatgtacgcataaatgctgcttatgaacttcttt

SEQ ID NO: 18511 - DNA, 428 bp, Zea mays
  Coding DNA Sequence Number=SeqID_4108
attcggctcgaggtgacattgccgactgttgctcgccccagctagacgccgtgtacggggaggagctggtccgtgtggaccgcaccgtggctggcgcccttggcccccgctcgcctgagtccccggagactctgtgcgtcaccaccaggagggtgatttggctcagacgaagcggagaagggcaagggctacgcggtggacttcctcgccatctcgcttcacgctgtgtcgcgcgacctcgaggcgtacccctcgacctgtatctacactcagattgaggcagccgttagtacagaagaggaggctggggaatcaaatcctgaagcaaatgaactagagctatctagagtatctgaaatgaggctcatactagcggaccccggtcaactggatgcacttgttgatgtcctcttctcaacaagcacatc

SEQ ID NO: 18512 - DNA, 502 bp, Zea mays
  Coding DNA Sequence Number=SeqID_4109
cctggacacggctttctggaaactagagatataaacgggattcttaaaaaccagattgatagggtctcaatctcaacacatataaattagagaagattgagagagtttaaattcctagcaaatcaaaatccttccgattcccttccaattcataccgtcgtgcaaggtctaaaagagctaaggctgtccgcagtgaacgacttcaaatgcctactctaaaggtatagagtacgtatagagtgactgaacagctacagtgaagaacttcaaatcgcaccctacggtagagttcacgttctctcaccccagatgtagtgcagtacggagatcaactctatcttgcgtgtgcatgcgtggattggagggaggaaagagagagataggggtagcagttaaaaataataataataaatatggtagttggtatagggtagatatttagagtaaacatgactgcagagtattgttggatagagtagaaaacctcgctgaccaggatgaa

SEQ ID NO: 18513 - DNA, 480 bp, Zea mays
  Coding DNA Sequence Number=SeqID_4110
taaacatctgatcatattcctatatgtaattatgtattacaaattacaataaaaaaagaaggaggatttgaaatgcgagatttaaaaaacatatctctccgtggcaccagtggtaagtactttatggttcggggctttagcaggtctcttgatagagatcaatcgttttttcccggatgcattgatattcccctttttttcattctaattattggcacgggaagggatgaaaaagattagagatccaatcaaatatcagtgattaatccctcccttctttatttctttttttagaattagaatacgttagaaaaaataaaaagagaaagaataaagtggatttggcctcagtgcaactcggaatctggcccaagcttcaatggagttgaattaacaattcaattccatttctattaataatatagtgagactagaaatggaaatggctaaggcaggggcaccagaatatcatacaagata

SEQ ID NO: 18514 - DNA, 242 bp, Zea mays
  Coding DNA Sequence Number=SeqID_4111
agtccctcctaccttctgtctgaaacccgccccccgcccgcgccctcccgtccctcctcccctcccgcgacccctccgcctcccccccctccggctcctgctctggtgaggaggcgtggcgagagactgcgactgcgcgatggaggcgtcgtcgtcggcgttggcgctcgtggccgccgtgctcctcctctcctccccgctcgctgcgtcagatttctgcgtgtgccgttcggaccagccgc

SEQ ID NO: 18515 - DNA, 538 bp, Zea mays
  Coding DNA Sequence Number=SeqID_4112
gcgccagctctttcaatattgttgaacttcctggtgatcataccagcaccctcgaaaaccgaaagtggtggtgtctagcagtgtgtgcgaacttctggaatgcggagtctgcttgagtgccatgtatactcctattcatcagtgctttaatggtcatacgttgtgttccagatgcaaaccaagggttcatcattgtccaacttgtagttgtaggcatgaattgggcaacataaggtgccttgctctcgaaaaggtggccacatctcttgaactttcatgctagtaccagtgctttgggtgcccagacctcatgcatttatccttactacaacaagctgaagcatgagtcacaatgccaatataggcttaatagttgtccatattctgaatctgagtgcatagttgttggtggcattccaggtaaatcacttgaaagatgaccacaaagttgacatgcacaacgacagtaccttcaaccatcgctatgtaaagccaaaccctcatgaagttgagaatgccacttggatgcttacggtac

SEQ ID NO: 18516 - DNA, 399 bp, Zea mays
  Coding DNA Sequence Number=SeqID_4113
aaggccccctgcaaatgcctcaaaagcattacgggccggcttggcgggggggtcagcatggccaaacccgccaacattccccggcaagtggggggtttccgttggggtgcccatcagcccccccgttggttgccccaagatcaactgtttgatggaaccatagtggaggtagctccctcgttggatggcagggtacgtggccatcaacagcatccagttgtttttgtaacaaaaatgtcctaactacgtgtgtgtcatgcgtcagactggcccataataaaaaagtagttcatgccccccctagtgatccctttgtttagggtccccccgttcaaagttgttgttgtcttcgtgtccctctacgtgacatctgttagcccgttcgctaacaaaacagcc

SEQ ID NO: 18517 - DNA, 395 bp, Zea mays
  Coding DNA Sequence Number=SeqID_4114
ggccgtacaatatatatagctgcaggtttcgcttgtgactactgctgactactactgagtacgtactgacaatggcgtgcttgcagaggcgagagggcgttctgcagcgaggagtgccgctgccgccatatcctggcagaggaggacgatgacgacactacctcggtcggggtcgtggcagcggcagcggcagcggactgctccacccagctccgccatcaggcccttgctgccagcttcacgttctgaggtggtggccggccgagcgggcgggcgggtagaccaccgatcgttgactggtacggtgggcctgccaccggcggtttcaagcaacgatgtccatcaccttgagtcagatagcttgtccaaacacaccaagggatgggtgtcacgga

SEQ ID NO: 18518 - DNA, 181 bp, Zea mays
  misc_feature (71)..(71): n is a, c, g, or t
  misc_feature (78)..(78): n is a, c, g, or t
  misc_feature (84)..(84): n is a, c, g, or t
  Coding DNA Sequence Number=SeqID_4115
aaccctagctcgtgtggcggctgggcagcttactagcagacagtcatacggtggtgggtgacggccaacangagcttncgtcgnccccagcaaccttcctcgtcacccatcaggccatcatgtcggcgttgcgctacatcgccggttcgccaccatcacaggcacctggatggcttctgga

SEQ ID NO: 18519 - DNA, 489 bp, Zea mays
  Coding DNA Sequence Number=SeqID_4116
tttggtctcggaatcggaggctgccgcggcggcctcgacaagttcatgttgcgacatgtaaacgcctgcaccagcggagcttcgtcggggaccagcctccatcccggaggggtcttgcgcagcggccattgcagcggccgatagacgtcaaggacggtgagcagctgtttcctaacgtaaggtggaggaacctcaagaagaagcacgaacactcggcgaacaggtcaatgccgctgaggtatgagtaaaagaggagggtggtaagtacgtcgggaagggggcgaggttgcatgcaatgcctttatagcagggaccccagtgcgaagaagatatggatccttcgcttatccgcttagacctcttttcccaaggaggctggagcttcgtcgagctgctaaccccgcatggggttatctggggccccgcatgactctacccttgctctaagcttaatgttgcatgtcgcttctgaacctgactcaactgtga

SEQ ID NO: 18520 - DNA, 515 bp, Zea mays
  Coding DNA Sequence Number=SeqID_4117
gtcggatcaacatcatgcaggccattaaatttatatgagaataatgcacatcataatgatttaaactgagccatactgcaaaaataaaagaggtgatccttgacattattcccagcaccccacttctgtacccagaatagcaccaagctgaaggaaaccatggtggtagcatgagcaaactgaaatcccaccaccttgcaatagcgtcatggaatgctctgaaggagggccatggcactggtcgcagtacagcactgatgtcctgtcgtggttgaagcagccatggtggttttagtgcccaactgaaatataagtttgcacaacttatacaactcaaaacaaaatttggccagggaataggacgactcgtaccactcgccagcaaaatctctagtgacatgggtggtgccgatggttgccaatcagcacacttcattggatactcccacaaaatgacctcattaaaagacaacttttctagattggaatttacagcagtacctttagcctggcca

SEQ ID NO: 18521 - DNA, 556 bp, Zea mays
  misc_feature (431)..(431): n is a, c, g, or t
  Coding DNA Sequence Number=SeqID_4118
gaagagttgcctgaaagcgccgccacacagatgctcacacgcagagccgctgaccagcagctcgatttaactgatgcggcgaaggtggagagccttgccatcaacctactcatcgagggcggcgaaatagacacatttggaatgcttattgcccggagcaagcttcgctctgtcagcatcctttgcgaatatgtgtggttggctcaccagcttcaatgtggagagggccgaagggtgcccagaggcatgaatgaggtctgcaaggccatcgcttttggctgtgaaatgtcggcgcaagaattgatcgatatgcacaacaaaaatttgatgagagaggcgcattggactctctgtgatatgacgaaatatgacaagattgccatcttcaagaaccagactggagaggtaacctctcggacgttctttactgnatcctctccagcacctatggccctgcacatccaacccccctctctgtgacactacactcttactgccttaccttcccctggaagaaatgcttattggcctctttctcctacgtcgtcttattata

SEQ ID NO: 18522 - DNA, 518 bp, Zea mays
  Coding DNA Sequence Number=SeqID_4119
tgctgctgttcaagactgctttcttgacctcgggtttaagcttggatgaccccaacactttgggcaacgggatcccccgcatgttcaaactcggtttgagcatcaataaggacaagcttgttgaggcaaaggttaaaatgcctcagtttgaggacaacgttggtgaaagcaaaatggaggaggtcgattaagtgtcgcatcgcatgcttcccgtttattttatcccaagttaagctccctgtgaaagtttaattttcactattgttcgaggttttgggcaggttatgggttgtcctgcgggccaggcaaaaagttgggtttatttgttaggttccccctttttaacagttggtggttattattggtaagggtaaaaatgtagtccatgttttgcccattgggttgtgtgagattgggacagacagatcagggtcccccccctttttcttttgggggggcccatagtttgggaaggggtaaaaaaaaaagggttaggtttttaggcatgttgtagcaaa

SEQ ID NO: 18523 - DNA, 39 bp, Zea mays
  Coding DNA Sequence Number=SeqID_4120
ggtgttttttttgagcgacacatgcttccaagaacttgt

SEQ ID NO: 18524 - DNA, 263 bp, Zea mays
  Coding DNA Sequence Number=SeqID_4121
agtcttgtcttttgagcggcgccatctaagaaatttgccgagtgttccaatcgcaatcttagagacaatgtcgacggtcggagaacttgcttgcagctacgctgttatgatccttgaggacgagggcatttccatcacgtctgacaagattgcgactttggtcaaagccgctggtgtcgagatcgagccgtactggccaatgctattcgccaagatggccgagaagcgtaacgtcactgacctcatcatgactgtcggtgctg

SEQ ID NO: 18525 - DNA, 399 bp, Zea mays
  Coding DNA Sequence Number=SeqID_4122
catggagctcgctgcggcaaggacaggggcttagacctttatgcacaggagaagtgcgcctgaagaaacgcaggttacattatgaattacaaacaagggcttgtaataatgtgattgctcaaaacttatattcaatctgaagttcacttagttatcagctgatgtacaacaggcacttgttgatcttgggatatgctgaacgaggatccttgtacttcttacaaaaaaacacatcaatttgaagagaagtgaggacactgagttaaaacgaagtcatttttttgttgcagatatttgtaacatgtactactttgatcgttgctctatgcatttgcccatggcttcataacggagcatgccaatttgttccttgtaacttgcattggttcttattttcag

SEQ ID NO: 18526 - DNA, 81 bp, Zea mays
  Coding DNA Sequence Number=SeqID_4123
attgtgatcgctatggtatgacccgtgtcgtggtgacacccaccgatctacaaatcgatgttggtgtgtgtcgtagtcatc

SEQ ID NO: 18527 - DNA, 434 bp, Zea mays
  Coding DNA Sequence Number=SeqID_4124
gttgtcattgcagtatgtgatccgtaatttaggctttgatattaccatctgtcattcaatgatgtctgaaatgttctatagttacagtgcataaaatgctagcccttttttagcataaaaatgcatctgatgctggagctacataaaattgcacttgcatattgtactgttttattgtttgttttcttcactaatattttttatttcctgaaggatggttttcatggaaggaaattcaccccatcgagaagcaaatgttggctacattttttgatgggaaatcagagagacggacacccgagatatatttgggaatcagaaatttaatcatgaacaagtttcactgtaatcccgaagtgcatctggagtccaaagatttgtgtgagttgtcagttggggagatggatgctcgtctagtaatcttggagttcttg

SEQ ID NO: 18528 - DNA, 172 bp, Zea mays
  Coding DNA Sequence Number=SeqID_4125
aatgtcctctacgaccgacaaggcatcggcaggagaatgcgcgggcgctttttctgatgagggtacttgaagggctgatggacaggggttttttttttttttttttgagatctgagattcctttaatcagaagcacgtgcgtcccacagtgtgctcttcaagccccaaaaaa

SEQ ID NO: 18529 - DNA, 436 bp, Zea mays
  Coding DNA Sequence Number=SeqID_4126
atatccacaagatcaaggtcatcgaatactggacactagcagccaggctctctagaggcctgtaaatcgcgatgtgaaataccgctttgtaattgcagacataatctattacctttgctgcgtccagccactgaacgagacatatacatctgtatgttacttttcttgcacatagcatcttgttcaagtacgacaccgtgcacggccaatggaagcacagcgacatcaccctcaaagactccaagacgcttctcttcggccagacgccggtcaccgtctatgccatcaggaaccccgaggagatcccgtagggtgaggctggtgctgactatgtccaaaagtccaccggtgtcttcactgcctaggacatggctactgcacatctgaagggaggtgccaagaatgttggtatatctgccttaagcaaagatgcacc

SEQ ID NO: 18530 - DNA, 144 bp, Zea mays
  Coding DNA Sequence Number=SeqID_4127
accgtcccagacactgaggctactgagattggagagaccatgttgcagtatgggcttgaacctcaggagtatggccctgtcatcgacggtaggggaaaccctcaagcttggctacacttcttgttcaggtttgagctaggattg

SEQ ID NO: 18531 - DNA, 111 bp, Zea mays
  Coding DNA Sequence Number=SeqID_4128
ctagccatttttctcagaaagtggcttgaagagcatcccgggttcctgccgaacccgctctacatcgctggagattcatacggcggcatgatcattcctgctcttgcatta

SEQ ID NO: 18532 - DNA, 152 bp, Zea mays
  Coding DNA Sequence Number=SeqID_4129
atcgagtgacgaggacaccccttaattatttatacacaacttgcatttgttctagacccttttttttatgctgcatctatgtcgttccatattcaacagaaagtcccaatattatttccgttgtatatggtaattaccattgatatcatgca

SEQ ID NO: 18533 - DNA, 375 bp, Zea mays
  Coding DNA Sequence Number=SeqID_4130
cgattttgtcaagcccccggcgaagtccggaaagcccccccacccttggggctggggtaccacctcaaagtgccccccctgcaattgttgatcacatcgatcgccgcccatggatatgattatttcctatcaaccttggggtggtggttgaccaataataagcgaggccgagctggctcccaaacataggtattgtgtggtgtgtgtgaaaaaaaaaaaaaaccagagttcttcagtttgctatctctctctctgcatgtttggggccagtctttgtgctcatgtacgtgtgtccacatgcatgttggttgacccgattgggtctgctgtacccatatattaattggcccccggtgatatgatttgatcctatat

SEQ ID NO: 18534 - DNA, 438 bp, Zea mays
  Coding DNA Sequence Number=SeqID_4131
tgtctaccggcgcaccacgtcgttgctggtgcctaatgtataaggtggtccaataggtccggatatgaaatgtgattccaaattttggacgcgaataaatttcatgtcgggccaatgttgttgtgttcattgaaacaaactttttttttttttttggatcgtataattattacatgccaaaaaaaaaaaaaaaagggcggcccccgctttgtagaaccgcttccaaattttggaatcgaataatttcatgtcgggccaataatgttgttgtgttcattgaaacaaactctttttttggaatcgaataattattacatgtcaaaaaaaaaaaaacaaatttaaaaagtgggacaaaacacgcggcaaccgggggatccttttgcccgtgccgttcgttaatcccctccgccccccccttatacacatactactttaaat

SEQ ID NO: 18535 - DNA, 580 bp, Zea mays
  misc_feature (42)..(43): n is a, c, g, or t
  misc_feature (73)..(73): n is a, c, g, or t
  misc_feature (91)..(91): n is a, c, g, or t
  misc_feature (98)..(99): n is a, c, g, or t
  misc_feature (120)..(120): n is a, c, g, or t
  misc_feature (130)..(130): n is a, c, g, or t
  misc_feature (138)..(139): n is a, c, g, or t
  misc_feature (147)..(148): n is a, c, g, or t
  misc_feature (156)..(157): n is a, c, g, or t
  misc_feature (203)..(204): n is a, c, g, or t
  misc_feature (215)..(216): n is a, c, g, or t
  misc_feature (253)..(254): n is a, c, g, or t
  misc_feature (280)..(280): n is a, c, g, or t
  misc_feature (307)..(308): n is a, c, g, or t
  misc_feature (327)..(327): n is a, c, g, or t
  misc_feature (361)..(361): n is a, c, g, or t
  misc_feature (401)..(402): n is a, c, g, or t
  misc_feature (438)..(439): n is a, c, g, or t
  misc_feature (462)..(463): n is a, c, g, or t
  misc_feature (484)..(485): n is a, c, g, or t
  misc_feature (497)..(498): n is a, c, g, or t
  misc_feature (534)..(535): n is a, c, g, or t
  Coding DNA Sequence Number=SeqID_4132
ggcgaccacacgacgtgcggtgacaagcctgagtcaccacanntacacggtgtgcattagcacatcctgatgntcacactttagtggtatngctagcnntagtagaggggttgttaatanacgcaccatnaacgatanncgatgagnngccactcnncttgtttcgcattgctccatgattttcgtggtttgcgccggtgtgnngcgcatggcgnnccggggatgtgcgggatgagcgcctccgcggacaggnngtggcgctgaggccttggcgccatgncgtctcggcccgccgacgatcccgcanngtcgacgccgaccagcagnctgcttgcttccgccgtgcacccgccttcgggcnagagcccccatgctgccttttgtgcgccgtcgtttgctgnntccggcaccgcccagggcttgctgggaatcatagcnncggaggtcgccaaattaccatcnncccaagcgctttgcaacatgnngccgatcgcccnncgtcggctacccaagtgcggagattaccacgctgcnncctgactacatcgtcagcaagcccggccgtgtgcagtgttatgac

SEQ ID NO: 18536 - DNA, 324 bp, Zea mays
  Coding DNA Sequence Number=SeqID_4133
taaggaggttttcttggatcgaactgagcaagaggatgttcccacgttgatagatcggaaggataatgtttttatcatctcaaacccaaagtcaaaataccctgtgctgcagctggaccttaggttgatatcagatcttgttgttgttatcgtatccgctacatgtggtggaattgcctttgcttgccttgggcaaccggtgattacaggttatctacttgcatctataattgggccttagctttgtcaatgaaatggtgcaagttgaaatagcttggtgtgatatttctcttttgggcacgtgctcgggtgccgtttttgaga

SEQ ID NO: 18537 - DNA, 571 bp, Zea mays
  Coding DNA Sequence Number=SeqID_4134
actttgcagcttcagctatgaaaaaaacctacaatctgaggcttaaaccctccagccctcgcgccgccgcaccctgcaccaaccagcgccctgccgccgccgccgccggagaaggagaggaagcagccgcagccatgggtcgcgtccgcaccaagaccgtgaagaagacctcccgccaggtcatcgagaagtactattctcggatgaccctcgacttccacaccaacaagaaggtgctagaggaggtctccatcctccagtcgaagcgcctccgcaacaaggtggccggcttcaccacccatctgatgcgccgcatccagcgcggccccgtgcgcggcatctccctcaagctgcaggaggaggagcgtgagcgccgcatggacttcgtgccggagaagtcggcgctcgaggtcgacgagatccgcgtcgacaaggagaccatggacatgctggcgttcctcggcatggccgacctccctggggtcgagcgcgcccccgaggtcacctcctccgccgccccctaccgtcagccgttcattctaaaccccgcgttggcaaccgcgcctaggtt

SEQ ID NO: 18538 - DNA, 438 bp, Zea mays
  Coding DNA Sequence Number=SeqID_4135
aggaggcagggcgagatgaacaagaggtccttctagtacgactgggtgctctacaagctcgaggacgagcgcgagaggtgcatcagcattgacattgccctgtggaagcttgagaccaaccagcactactgcactgtgattgacgctcctgggcaccgtgacttcatcgagaacatgatcaccgtgacctcccaggctgattgtgtggcgctcatcatcgactccaccactggtggctttgaggccggtatcttcaaggacggtcagacccgtgagcacgcactccttggtttcactcttggtgagaggcagatgatctgctgctgcaacaagatggaggccaccaccgccaaggactcaaaggctcggtatgacgagatcgtgaaggaagtgtgttcctacctgaagaaggtgtggtaccagccggacaagatcccc

SEQ ID NO: 18539 - DNA, 69 bp, Zea mays
  Coding DNA Sequence Number=SeqID_4136
ctgctaggctgatgagtcatcgcgatcgcgtgctattattcatcctcgatgcatgtactagtgaattgt

SEQ ID NO: 18540 - DNA, 456 bp, Zea mays
  Coding DNA Sequence Number=SeqID_4137
atacacagcgtcaccgtgtcccatgtgagaacgaccttgaccagggccgtgtcttagacctttgctttggcgtgggacagactagaggattttttaaccacagcctgaaaattcgctcacacggggagtcaaatccaagacctgaagagtgctactcagaccacctaaccaactcggctagaggtcctttcgcagtttcgctggttggctaggtcaaagagttgataatttaatagcccaccccaacttgcttgggactaaattgttgatctagaaatttaaagatttaactagtgtagcttttgatctatttttatgatgggtatgaagttcccataacgccaccactaaatttcctagtctcatcccaggatctgcttggaaaaaaggaataattctttcttgtcaacaactccctgatataagcaattttatcattaaatatctgttgccttg

SEQ ID NO: 18541 - DNA, 470 bp, Zea mays
  Coding DNA Sequence Number=SeqID_4138
aatgttgccgacgacccggtgcatatcatgttcgcctataccaacagcggtgctgactgctgagaatatgctgatgtccaatccaagggttctggtagtggccgagaaggccgcagaggtggccatagtggttagtggaggagcacttcggggttggagaagaaggtggttgctattgggccaatccagtggcagagattatcatcgacgagggcgcaagagtggttcattcatacgtgcaacatcaatcatttgctgcagcacatactaaatggacagtcgccaagcaggtatgcacaacaaactgatgcaggccaagaaaccaagtgtcttatcctatcaccaaaggcacttgttaatgtcaaaccaaaccttcagattattgcagatgatgtgaagtgtactcatggtgctgccatcagtggtgagcttgatccgaatgagctctttctacttccaggcaagaggca

SEQ ID NO: 18542 - DNA, 404 bp, Zea mays
  Coding DNA Sequence Number=SeqID_4139
tgtctgcaggaattcggtctcgctcccacccacgaggcccacgccgccaccgccaccaccaccagcctctcccctcgccacgcgttccctccccgtgcatgaaaccctaaacctataccccacccccctccccgagccatcccctccccccgcggcgatggccaaggcgctgctctcctcctccctcctccccgcgctgccccgcgctgccggtggcagccggagcgctgccgcgaggccgctgctgctcccgccgctccggctgcggcgcggccggcgcgccgcctccgcgtgcgcgccgagggcgggcctgctgtcgggctcgactccgtcggcgggccccacctttaagccgcgcttgagcgcgcccaggcggggctatacacactcgctgacgcccgggt

SEQ ID NO: 18543 - DNA, 520 bp, Zea mays
  Coding DNA Sequence Number=SeqID_4140
atagtattctatcgcgcgaccctagacgaccatattgtcgccaagaagtccacagaagaagcctccccccaaaaaggctgagagcagcagcagtgcctctgaaaaggactccgagtccgaagaggaggttaagaaggtgcagccaaggaaggcgcctgctcccaccattgctacacaagagtctagcgatgatgacaccagcgatgaaacctctgaatctgacgaggaacctgcaaagaacgctgatgctaaagccttggctgcagttgcgaaaactggctcgaagacggtcaagcaacacagcggcagcgatgaggccagctctgaagatgagtcggttgacgacagcgctgctgaacctgcaaagaaggctgctgctaaacccttgggcgccgttgctaaaactgggtttgacgaagggcaagcgacgaaagcagcagcgatgggagcagcctctgatgatgagtcagacgatgatgtgaaccccgctgccccactaacgaaatcctctgcggctgtc

SEQ ID NO: 18544 - DNA, 357 bp, Zea mays
  Coding DNA Sequence Number=SeqID_4141
actgacctcaaccttaaagcctctagccatggcggattcttcctcctccactcttctctcccatcctttactctccactatccactcctccaaaaskggctgcttctctagtttttctctcctcaccggacgcactaacctccccttctctttctccagcctctccctctctctcaacaccaaaccccaccttaagaagtcttcatgcgtctcctccgttgcacagacttcggattgggctcagcaagacggggaggaaagcggagacgtgagcgcttcggtcgccgtcgaggagagcgagcctgaagcgtccctctcggaagaggaaggtggaggtggcgatttcccggagccacc

SEQ ID NO: 18545 - DNA, 455 bp, Zea mays
  Coding DNA Sequence Number=SeqID_4142
ggcattgtagcctctgttaagtcacgtatcgtgaccatcaaaggcccgcgtggtgtattgaagcgcaacttcaaacacttggcattggtaatccaaatggtttcaccacgtacactgaaggtcgaaaaatggtttggaaccaaaaaagaattggctgccgttcgaaccgtgtgctcacacatccaaaatatgattaaaggtgttacatatggattccaatacaaaatgcgtgctgtatatgcgcatttccccatcaactgcgttacatccgaaaacaacacagtcattgaaatccgtaatttcttgggtgaaaaatacattcgacgcgttcaaatggcaccaggcgtcaccgttgttaactcaacaaaacaaaaggatgaactgatcattgaaggcaatgatatcgaggctgtttcgggttcggctgcgctcatccaacattcaacaaccgtcaa

SEQ ID NO: 18546 - DNA, 567 bp, Zea mays
  Coding DNA Sequence Number=SeqID_4143
ttggtggtttgctattctcacgtgtggtttccttgtggtgttgttctgaggtctacttaacacttttgtcgtggttgtatggtgttgggattcactaggaggtctacttaacacttttgtcgtggttgtatggtgttgggattcactaggaatgcgatcgtagcgggtcgggctcttcatcaccaagaggaacacaaacagagctcaagtttttttattttgctctgcattatctactgcttctccatttgataagtaaccgatcaattttttgaatatttcgaggagtatttcgagcacatcggaggtgtaggagttggtgaacacccatgatctggagatgttgcagttggaagggtccgggaagatttatgcacagggagatgattatcacgagtacttcaagcgctcatttgaggaagacatcgctgcgcaagtgcctcaaggagtggaatgcaattgatcgaaacatgatatatttgacatattcatgatggatttttgtatttgatgtgtcgctttttcatctatcaatgtaattcttggacataacattgcgcacagtac

SEQ ID NO: 18547 - DNA, 441 bp, Zea mays
  Coding DNA Sequence Number=SeqID_4144
ttgggcgccgttgtcctagggttagggttgctggctggaaggggtgcggtatgaacagtacccacggtgaacagtagaggcaggaaagggggaaaattatgaactggtcttttgcgctttctttgctggagaggaacattagagcgatttccacactgatgggatgctattatgtgatttcatacgattcagaagcagtacaataactccccctcagagctgtcatactgctgcccctgcccctccagcgatgaatgctgatgcttgcagcatccattctaaggctttccaagattgactcaccaactatggcagtgagatcagcacgagccagttctacctatacatgctgaaccagtgcacgacgggtggtgcgtctgcctaagctgcctctggcgttattcatggattgtctttccgcgatgctatcttattaataac

SEQ ID NO: 18548 - DNA, 213 bp, Zea mays
  Coding DNA Sequence Number=SeqID_4145
gatcgcattcttgggcggcgagacaaactcagcgtcgacgacgagggcggagtgcgaacgactgcacggttggacgacgcagtcagatggcgtgtgcgcggcggaggcaacacatgggatcgactcctgtgggttggcactctagcggatggcggggccctaggcgtgctcctgcgattggcgagcagctggagcgaggcgtggtcaattttg

SEQ ID NO: 18549 - DNA, 472 bp, Zea mays
  Coding DNA Sequence Number=SeqID_4146
tgagccaggtgaccgtcatcttcaaggacggcacggatatctatttcgcacgccaactggtcaacgaacgaattcaacaggtcaaggaccagcttcccacaggcgtcgaaaccgggatggggccgatctcgaccggtcttggagagatctatctgttcacggtggaagccaagcccggcgcgcgcaaggccgggggcggagagtataccccgagcgacctgaggaccatccaggactggatcatcaaaccgcaattgcgcaacgtgccgggcgtcatcgaagtcaacaccatcggtggtttcgaacggcagttccaggtgctgccggatccggcgcagttgatggcctacaagctcaactttcgtgacgtaatgacggcgctggccgcgaacaacgccaacgtcggcgccggctacatcgaacgcaacggcgagcagtacctggtccggacgcccggtcaagtggctaacgt

SEQ ID NO: 18550 - DNA, 268 bp, Zea mays
  Coding DNA Sequence Number=SeqID_4147
gcaccagacggcagacgctgagctcctctgccaatctccgaacccgagaaaaccgtgagaatcccaagtgcccggccaacaactccgacctccgtgcaggcaatgccggtccaggatccctcctccttgccctccgctgcaggcggcggcgcgcgggccaagcgcacgtcgtcggcgccgatccggtcggctgactacgcgcacagccccacgcaccactgcgtcgcgctgcgggacgccacggggctgcagaccatcctcgcaggcc

SEQ ID NO: 18551 - DNA, 419 bp, Zea mays
  Coding DNA Sequence Number=SeqID_4148
ttctctcacgcgcagctttcttcttcctctgttcctggcgcaggaaacttcctccctccctgtgctgttcacggcgagcagccagcagggagctcagctcctccacttcttcccctcggccagccatggcgctcggcacccttgtagcagggacaacgcccttcctccctccctttttctgtccatggcgagcaggagttttttttccctcccatggccgacgacttccatctccatcagccgccatggccgagctccctgggagcacgccggcgcccctccctgcgagctctctgctccatctcctttcccaaccatggcgcccctgatctcctcctggccgcgacctcctctgctccctgcgctcgacgcccctgcagcagggcgctccttcttcctcggcgtgctgaagctttccc

SEQ ID NO: 18552 - DNA, 455 bp, Zea mays
  Coding DNA Sequence Number=SeqID_4149
gctttgcagatttggtgcatcgccaggggaggcccgcttttccccgccgttttccagccagtgcagaccgtggccgtccccgtcatggcttcccccatcctcggggaccagctttacccgggagggatcattggagctgtgctgatcgtcatcggcctttacttcgtgctgtggggcaaaagcccccaaaaaaagggccccaggaaccttttgcaggatcagctggcccagggagcaaacgttacccggcccctgctcggcggaaaagcttcggcgaaaaataaaaaaacagccccggccatgctggggtgatgatcgtttagtcgtctgtcaattggagcccagggtagtcctgttgcatttgggcccgtatgagtcgtgtgatttcccctgttccaatttggcaaccaaaaacaagtgtgcatgggttcccggtgtggaccagtgtgtaccca

SEQ ID NO: 18553 - DNA, 111 bp, Zea mays
  Coding DNA Sequence Number=SeqID_4150
atcatcttctctagtagaggaaaacagtacgagttttgcagtagttcgagcatgcttcggacactagacaggtaccagaagtgcaattacggagctccagagcccaatgtg

SEQ ID NO: 18554 - DNA, 328 bp, Zea mays
  Coding DNA Sequence Number=SeqID_4151
atatagctcaatgtcgacgttcctcacgtaaatctacaaggacagtgcggaataagagaggataaggcattgtgaacatgatctttgaagcttgccgcctatatagcagtcttccagaaaaccatataattgatgagggaggtagaagctacctttcacgacttcatgagatctggttttcattaactagtggctaatagactcttgtttctttataccctttatcgttaacagtgttagttttacttcttttcctgcactcaaccaccattaactctcatagtcggccatatggaacagcacaacgttgcactctaccgcgtgcgaa

SEQ ID NO: 18555 - DNA, 393 bp, Zea mays
  Coding DNA Sequence Number=SeqID_4152
gattctcataatcatcacctctttaaggaaggaagaaagatcaaagcttctataagtttttgaaaaagataacaagatgggtctcgtcagcttcttgattatggttgttctcgcagtaatgacatcacgtgtgaatggatacggtggcggttgggtaaacgcacacgccacattctacggcggtggtgatgcctccggcacaatgggaggtgcttgtgggtacggaaacctttatagccaagggtatggaaccaacacggcggcgctgagcacggctctgttcaacaacggattaagctgcggtgcttgcttcgagatacggtgccagaacgatggaaaatggtgtctccctggctcaatcgtcgtcacagcgactaacttttgcccgccgaa

SEQ ID NO: 18556 - DNA, 209 bp, Zea mays
  Coding DNA Sequence Number=SeqID_4153
gaccattacgcttgaggtggagtcatccgacaccatcgacaatgtgaaggcaaagatcccaggacaaggagggcattcccccggaccagcagcgtctcatcttcgctggcaagcagctggaggacggcaggacccttgctgactacaacatccagaaggagtccaccctccaccttgtgctgcgtcttcgaggaagcatgcagatcttt

SEQ ID NO: 18557 - DNA, 478 bp, Zea mays
  Coding DNA Sequence Number=SeqID_4154
atgaagcgccgcgtgatgatcgcgaaagcgctctcgcacgagccccagatcctcttcctcgacgagccgaccgccggcgtcgacgttgagttgcgcaagggcatgtgggaggtggtgcggacgcttcagcagtccggcgtcaccattatcctcacgacgcactacatcgaggaagccgaggagatggccgaccgcatcggcgtcatcaacaagggcgagatcgtgctggtcgaggacaaggcgaccttgatgcagaagctcggcaagaagcggctgacgctgcatttgcagggcaaggtcacctcgctcccggagagcctcagccaataccagctcgacctctgcgacagcggcgcgacgctggtctacgattacgacaccaagggcgaacgcaccggcatcaccagcctgctcagcgacctccgcaacgccggcatccgcttcaacgatctcgacacgacccaatcgtcgctcgagg

SEQ ID NO: 18558 - DNA, 90 bp, Zea mays
  Coding DNA Sequence Number=SeqID_4155
ttctgaactatttagactgtctccagcaacatcccctaaatttcgtcctctaaaggaatattccttgtcctttacaaaacactctaaaag

SEQ ID NO: 18559 - DNA, 316 bp, Zea mays
  Coding DNA Sequence Number=SeqID_4156
gatctttttttgcctgtcccctctcccatggggggggaccaattttgcccccttaagaattttggccccaagtaacttccttggctttggagggggacccctcctttttttcccctttaatcggaaaaaaagtgtttcccccaaggtttttttccgagcccttcccctggctttaggtggctttttttaaagcgtcccaggggtttttgggtgtgggccccccccgccttacccttatctgggggtcccttctggcccccggttttttaggctttccggtgcccccccccttctaggtttaattacccataagttg

SEQ ID NO: 18560 - DNA, 95 bp, Zea mays
  Coding DNA Sequence Number=SeqID_4157
tgcgcggacgcatgctcgtactcctgggccccaccacgctttattggcgacggcgttgccatcacgccgggtgagactacccgatcgatcgccca

SEQ ID NO: 18561 - DNA, 290 bp, Zea mays
  Coding DNA Sequence Number=SeqID_4158
tacccgcctgtcatgctgaaacttgactggttgaccgtctttccagctggggggtcatcccccggaggcccggcccccgccccgcctccagtactacatcaacgagtagggggacaaggtctacaccaccaagaaggagtcacctcttggggtgccgacgcagtctgctcacccagctcgcttctcaccagatgacaagtactctcgccagcgatacctgttgaagaagagatttggacttctgccaacgaaaccgcgacaaataaaaaagaccacagaatccaggaccg

SEQ ID NO: 18562 - DNA, 241 bp, Zea mays
  Coding DNA Sequence Number=SeqID_4159
gctgtaccttttgctctcagtttcctgaatcggctttgtatcccaggcttgccagaacgtcattgtgtagccactgttcatggcttgtaactgctatggggtatccgataaataattttgagcgagttatttcagtctgtatacgccgtgtttgtttttatggaattgtcatctgggaatgtacattttattttaccacaacattatatgtggctcatgaacctctgatgaggcctgtttg

SEQ ID NO: 18563 - DNA, 381 bp, Zea mays
  Coding DNA Sequence Number=SeqID_4160
aagtccgatgaaaaggtccgcaaagaacaaggaaagagccgacgagtacatccagaaaagaaaaggcaagacgacaagtatcgcgtagggcacaactttgtgcgccagtatatttagaacttagcaaaagttgccgaaccggactctcgattgattcaagaacgaaaataatgcgtacaaaccataatgaaagttaagagattaattctggtaaaaatacaatcgctcaggagcaaccaaaaaaagtgttttctgtgctgaggcactttgatgttccaaggaagttgacacggatcatgtccggtatgtcttttgacgattgagtatatggcattgagaggaatttcctgtccccctatcatcctgatatctttgtccttc

SEQ ID NO: 18564 - DNA, 441 bp, Zea mays
  misc_feature (400)..(400): n is a, c, g, or t
  Coding DNA Sequence Number=SeqID_4161
gccatgccggcgaagggttcgatttgggcgccccgaccatcatggtcggccgcccggtgaaatttgccggcggcaatcccaatgacgagctcgcgatgcagcgctaccgggccgcgttcgagcggctcggcgccggccatgcgcgctatgtctacgagccggtcggcgcggcgttctccttcgcgcgcagcctcgatcacgatgcgaccgtgctggtcgccgatttcggcggcggcaccagcgacttctccgtgatgcgcttctcgcgccagggcggcgtgctgcgcgccgagccgctgggccattccggcatcggcatcgccggcgacacgttcgactaccgcatcgtcgaccacatcgtgtcgccgcggtcggaagggcaccaactaccgtcgttcgnaaggtgctgcaatcccaatactattattcaacctcgcccct

SEQ ID NO: 18565 - DNA, 353 bp, Zea mays
  Coding DNA Sequence Number=SeqID_4162
tgccgccagtagctagagcgccaagccgctaccgaggtctcgcgccgccgccggggtctcgtgccgggccgccgcggcctcgcgtcgccgcctaagcagcgcccgcgccacgcattggagctcgtgcgcgagaagtcgtcaccgcctgatgccggccgtctgcgtcgggagcccacaccacgccttggagctcgtgcgcgaggagctgccaccgcttgaagccggacgtgcgcgaggcgccgtgggtcgagcccatgccgacgtgcgcgcccgcccacggccgtgggggccgcgccaaggggctcgccgatgtggccgcgggctgcgccgagcgcccgtttccgcaccgaggg

SEQ ID NO: 18566 - DNA, 439 bp, Zea mays
  Coding DNA Sequence Number=SeqID_4163
ttgagggacctaaccggcagtttattgaggccccgaaaacgaacaactgggacaacgtttggggaaactgagatcatgcctatgggtgcaacgagtttaatcatataaaaaaagtgcaagggctattacctatgggagtttgcctccctttttattcctcaaaaaaaagatttcggccagataccccctttggtggcaacttaggggaagctgttaaaaaaaaactgctgggcctctcttgctttttgcaactttgcttttatggacctgcgagggccatggcccatgacagtggtaggtttttctttaatcccaactgtaaggtttggttaaaaacggtttcccagtgcccttatatatatggaactgcttgctgctgttgtgaaatcagtgtggggatcgaatgtttgtatatctccatctgggtaaaaagtgtccc

SEQ ID NO: 18567 - DNA, 400 bp, Zea mays
  Coding DNA Sequence Number=SeqID_4164
tgtacacatcaacccgcggaaaacagcatcctccggcacgagaagcgactcgccaccagcagagcagctctccagctatcacgaggtgtcgagatccattagatgattagatccggcgctatagacggactgaggaaaagagaagggcaaattagtcagccgtatgaagtttaaaagctacgcgcgctgtcagaagcctattagatgaaaacgaatccaatccggcgagtggtgcacggtggcaataccaatctggcgacgaccagctgcgggatacaaggaggcgaagtcgcgtgacgagatgatcataatcataaactagctgaatgcccgtgcgttgctacggagtgaacatctttctcttggagttctagcatcgcacaacaatcttatctctctt

SEQ ID NO: 18568 - DNA, 310 bp, Zea mays
  Coding DNA Sequence Number=SeqID_4165
gttttgggtattgatttcttttgaggatcaagatttcaaaaacgttatcaagatttggtatttgggtattggtttcttcttagcatcaagattacaagaaaatgattaagatttgggttttgggtattggtttctttaaggatcaagatggcaatagagattacaagaaagtgatcaagatttgagatttgtttattggtttctttttaggatcaagattacaagaaagtgataaagatattggatttgggtattggtttctttttaggatcaagaatacaagaaaatgatcaagatatgggttttgagt

SEQ ID NO: 18569 - DNA, 516 bp, Zea mays
  Coding DNA Sequence Number=SeqID_4166
gataattaatcaagtaagacgaagaaaaagagttaagtcgacaccaagcgcgagctaatccgcaggatgatgccgatgaacgaactggaagatagataatctgaacgagtgccaagccaatggatgctcgtcaagtggtcgcctaacaaacactaacctagtgttacccaggttatagttttgtgctgctgttgatggtgttaagtgccggtgggctcggccttcttatataagtataccccatctttatcttcttattgaggatggtcatttgagctagcatatatttcaaacttataattttgtaaccactccgatcatgtacattgtaaaacttgatgtaacatgtaaaatttggtaataagatttccgctgtaaaattgttggtgtgtgatttgtgtttacttaatcccgcggttctggttgtaagtggtttatccgatgtccttggggcaatcgaacggatcctgttaagttatctggtgcacatgcatggtcgtctgaggtctttgggac

SEQ ID NO: 18570 - DNA, 411 bp, Zea mays
  Coding DNA Sequence Number=SeqID_4167
gtaggatacaggactctcttttacaatttgagtttttggcaggcgacaaacagatgggtctacgactacttccgcagttttctcctaaacacatttgctctgatgttgtttgtcaccataactggcgctgaaccgcgctggtggcaaggctggaaacaagggtgctgaagctgctcttacttccgtaagttacccttccagtcggaaatcctgatttcaaacaaacatagatgcattagcatgtgagaagcccaagttcccctgcagattgagatggcctctctgttccggcatcacttaggctgacactttgcatattctggtttctatacacgaggcaagacatcatttcttcctatcaagagtttcggctaatagagcttttctgccgtggttagtataatttatttt

SEQ ID NO: 18571 - DNA, 452 bp, Zea mays
  Coding DNA Sequence Number=SeqID_4168
aaggccaaggacaacatccagaagcgaccggcgcacgctttccgacgtgccgtttacttgcccgaggcaaagccgacgcaaaaatgggccaggcaaatcctgccaaacccggactgtgggacggggggatccaagtgggccaacccaggccggaagatggacaggcaaaccgcctctctctgttgggcccttatgccaacaacgctcccgtgaacgggggggggggcggtgactcccccaaaaaagggagcggtcccgccccaaatagtagtaatacagccccagaacccgaggggctggaggatgaaccctcgaacaaaccccaaaaagccagcggcgccggggacccaaaaggccaaaaggccaccagcgccggggacccggcaagcgaagcttgatctgtttgccagtcgttgttgtgcctgtcaccctgcgcttttgcccgttttgtg

SEQ ID NO: 18572 - DNA, 107 bp, Zea mays
  Coding DNA Sequence Number=SeqID_4169
ctctagtgtcgacctgcaggggcaaggcttgtcttgttcctgtgtttccttttctttttttaaccatgtggcttcattattattgtgaaatgcagctatgggatgcc

SEQ ID NO: 18573 - DNA, 558 bp, Zea mays
  Coding DNA Sequence Number=SeqID_4170
gaacgaccagtcaggaaacgcgatgtccagcgtggcctcactgccgcagtaccggaacaacggaggaggaggaggctggggctgggttcaaaggtgctggcgcaaacatcctccgcgctgtagctggtgctggtgtccttgctgggtacgacaagctccaggtggttgtcttcggcaagaagtacgggtctggtggtggctaaggatgtataatgatgatgacgacgaacaacaaacatgatgttttaggtgcctcctttaagtaaacatacgtacggaccctcgacaccattttaagttcgctctcgcagaggctggtgagtttgtagcgtggctgtgaccgcacctctttttatgtcagagattggaaataagtgacgttagaaattgctgtcttgctgcatcagttttttatactccgttttttgttttgcgcgtgcaaagggttgctcgaatgtatctatgtaggtttcggaatcccagcttactatgttttatgaaggtgtatgttctgtgacctttggcagcataacttcatcttttttgcgctacatgttt

SEQ ID NO: 18574 - DNA, 513 bp, Zea mays
  Coding DNA Sequence Number=SeqID_4171
cagatcatcgaggtcagcaaacagaccagccgagatatgaccatcatggaaaataattcatttaccccccacacacaagatcatgtagagccgctccatgatcaggaaatgcagaggcttagtggcatacaaatacgatctaaatgcgaacattctcatgaggctgatttgaacatctcgacgcagcaaatgaagctaatgccaaagcctgcggagacaacgtatgtggatgaacaaactgcaagagcttcacacaccctatcagagagcaacgcgacagctagctgtccagtgactgtacctgaaggaactcatcctgatcaaacaagtgatcaagtgggcaatcaatgcaagcatgaacccatgcatccatccaatgggttctgctgacccaaaatttggtagtagcgccacaccacagactttccctcataattatgcggcctttgctccaatgatgcagtgcaactgttaccaacattccttccgggagttgctcctctcatgcgagag

SEQ ID NO: 18575 - DNA, 171 bp, Zea mays
  Coding DNA Sequence Number=SeqID_4172
tttttccttgtacgactatcctttgctttatcagtttataaaaccctaaacccatattgcgcggaaccacagcggcatgcaaccatatcgggtcagattgctgcgaatgagagctggaaaaaacggccagaatggctctgctgctccgatcgtgtcagttggccagactca

SEQ ID NO: 18576 - DNA, 597 bp, Zea mays
  Coding DNA Sequence Number=SeqID_4173
gcgccaagggtgttctgtccaagtacaaggttctcgacttccacccctttgaccccgactccaagaaggtccaggatgttgtcgagtcccctcaaggcgagcgtatcatctgtgtcaagggtgccccactttttgtttctcaagaccgtcgaggaggaccaccccatccctgaggaagtcgattctggcgtacaaaatctgtgtggctgagtttagctacccgtggctgtccgatctcttggtgttgctcgcaagcgaggtgagggtgcttgggagattctcggaatcatgccctgctctgacccccctcgtcacgacactgcccgaactatcaacgaagccaagcgccttggtctctccatcatagatgcttactggtgacgctgtcggtattgcccgtgagacttctcgtcagctcggcctcggtaccaacgtttacaacgctgagcgccttggccttggcggtggtggtgacatgcccggttctgaggtttacgatttccttgaggctgccgatgctttcgctgaggctttcccccagcacaactacaacctccttgagattctccagcagcgcggttaccttgttgccatgac

SEQ ID NO: 18577 - DNA, 169 bp, Zea mays
  Coding DNA Sequence Number=SeqID_4174
gttctgaatgtgttctgtttgtttcttgcgtttctgtttatgggccttttttttttttttttttgagcctgtcagacaacctgtaggccaccccagccaggcaagcctgagcaaggaacgatcctctacagcaaccagagcaagcagtagagctgaactcctggccgtt

SEQ ID NO: 18578 - DNA, 375 bp, Zea mays
  Coding DNA Sequence Number=SeqID_4175
ttcacacaggcacagttagccaggtgaggcccttgagtttcctttatctggacccgtccgcccacgcgtccgcgcacgcgtgggccccttcttctcgagctgtagtcctagtccactacaaaggtgttggagtcctggtattcttgctggtgtgcatcctctctttcagccaccaagtttgttgtctagtgcatcgcgtgtcatggtgaccacgcccactcgagctcaccctcaccatggccagcattcgtcggaggttgtctcggtcatgtggtgccagttccctactcctcgtagaactcccagcaggaatgaagattcaagctgaagtggtgactgaagagaaatctactccggtgattgaagaggaatcta

SEQ ID NO: 18579 - DNA, 447 bp, Zea mays
  Coding DNA Sequence Number=SeqID_4176
tcaaagagggccagttccccggcggccgtggaggcggcggcggcggctacggtggtggccgtggaggcggcggttacggcggtggcgggccccgtgatggcggcgggggttacggcggtggcggcggcggttacggtggcggcggtggctacggtggtggtggtggcgggtacggcggtggcaaccgtgggggggggttcggcaactcccccgggaactggaggaacttaacggtggggcccgcccggccaagttatcctgtttgcccccgtgatgttttccctagtcccaaggggttatcttcgttcgtcccgtttggtgttgcccccctgggttttttattgcaaggtccctctgtgtcagttgttaatgctgggtttatccccgggtccagcagacccatgcctcaaccagcccgggttgtgggtcgatggaagctgttacccc

SEQ ID NO: 18580 - DNA, 367 bp, Zea mays
  Coding DNA Sequence Number=SeqID_4177
tcagttggttgcctcgtcagtaacacccgcggtccactagctcgagcatgcatctaatagtgcacaacgtttattatggcgaattctccaagacgctgagctgagccagcagaccggaacagatgggccgcgacggcaagggcgccggggcggggctggttgaatcgcttcagcccctttagggcgccctgcaaccggaagcccaaacctttactcgttccttcagggcatttctgaaagcccaagtccgaacctttattcggcggcaactagtacgtacgtacacatcttaacaaaccgacgtgtacaaggacactttggcaagtccacaaccaagtatactagcaaggacttactggactggact

SEQ ID NO: 18581 - DNA, 99 bp, Zea mays
  Coding DNA Sequence Number=SeqID_4178
cctcggattctcgggcaggaaactgcttctactttgatatttgtggatccgagcctgactcacctgtgaacgaagtcaagccccggtgaggaagcgaca

SEQ ID NO: 18582 - DNA, 523 bp, Zea mays
  Coding DNA Sequence Number=SeqID_4179
agtcaggttatgcacaggccttcatccaaggtgatcacaaagttcatcccggtcatgcagccccatggaggctatgtggtgagttgtagtacctggcctcccacaaacatgggagtattgtggtgcatctggcagccatactggccgtggttggagtttttccgttataagggcatacccagtcaattgccaagctttggcaagctcatggacgattattccatctccccaagataccctggcatgctttgtgttccatatggaaaaataggtgagtgtcacctcatgacgtcccatttaccggaaccagggcgggggtatatgacaccacccaaatagcaattccgttctgaatcctgccctgtcagcaaagctatgtggtctaggaagtatcccaagagcccgaatttcccagggtattgcaatggcgtgctatgagtctagcaatcccagatggatggcatagtccagttcatgagtagttcaacgaacgcgtggagggcgcccgctatacaggatccga

SEQ ID NO: 18583 - DNA, 582 bp, Zea mays
  misc_feature (218)..(220): n is a, c, g, or t
  misc_feature (223)..(224): n is a, c, g, or t
  Coding DNA Sequence Number=SeqID_4180
tattgcagcgcagatagagtccaaagacaggtgacaaaaggttttgatttccacactgtattcatttttttatgctgtttagattgtgttggttaattttaaaggagtaaggtgaagtggagtgaacgaaatgtacttagggggtagttgcattcccagtaaaaaatcaatgtgccttgcaaacaattggaatgaatgaatgatacacacatgattcnnngtnnaaaaaaaaaaaaaaaaaaaaaaaaaaaaaaaaaaaaaaaaaaaaaaagaaaaaaaaaaaaaaaaaaaactcgggggggggcccggaacccaattcgccctatctgggggggggtcccgatcccctgtcccccctttaacaacgcctttactgataaaacccgggcgtttcccaacttaatggcctggaaaaacctccccctttccccatttggcggattagagaaaaggcccccttcgatcgccgttcaaaaagttaagaggcctgaccgacgacgttacatgaaggggcaatctttagggaaatgccaatagaagtcgaaaatcgggcatattcacccaaggtcttaaacgcaactc

SEQ ID NO: 18584 - DNA, 249 bp, Zea mays
  Coding DNA Sequence Number=SeqID_4181
ctgcgcctgctgttggccttggttggctccgcctccgtcgccgccgagcttgccggcatcgaatggcggcttgcacgagcgtggattcgagttgggctgcgtctcgcgatcgcctccgagcgagtcgctcgggaacgtccccggcgggcatcccgccacggtgggcggcgtcacgctcagcgtgtcgctcaaattgaagaacccgttgtgaaagaccgtcgccgtcgccgtggtgccctgaccgagatc

SEQ ID NO: 18585 - DNA, 302 bp, Zea mays
  Coding DNA Sequence Number=SeqID_4182
gacggcgtgctgacgttcgtcggcccgcgcaccgcgctgcccggcgatccgcacgcgctggcgcgcgaggtgatcgaagccgacggctggatcacgcccggcctgatcgactgccacacccacctggtgttcgccggcgaccgcgcggcggagttcgagatgcgcctgcagggcgccagctacgaggtgatcgcgcgcgccggcggcggcatcctctcgaccgtgcgcgccacccgcgaggccgacgaggacgcgcttcttgcgcagtcgatcgcccgcgcgcggatgctggtggccgacgg

SEQ ID NO: 18586 - DNA, 432 bp, Zea mays
  Coding DNA Sequence Number=SeqID_4183
gggtctcgcgttcgcatcgtcttcctcctcctcgccttcctcttcgcgcgcgccgccgagccgatcgccgccgccgcacccgccggcagcaggcaccttacgaaggacgagcggtggatgaaccagcgcctcgaccacttctcccccaccgaccaccggcaattcaagcagcgctacttcgagttcctcgactaccatcgggcccccggcggcccggtcttcctgcgcatctgcggcgagtccgcctgcgacggcatccccaacgattacctggccgtgagttgcaactcgcatagcactcacacacctggacacctgcttccccgtaccccgtctcgtgctgatgaaccgcctgctctcaagtactcgacagcaattcctgtgattttcctttctgctctcaagtaccatgtacatcctgatcagtgggtt

SEQ ID NO: 18587 - DNA, 480 bp, Zea mays
  Coding DNA Sequence Number=SeqID_4184
attagatgccattagcttagcttcataggtagattctgtaggagcaggaatacatatagctctagataagcaatagggagattcctagtaattattagagatcctagcttagctatctatgagacatcaacgaaggcatgagtttagggatagtcctaggtagtgctaggatttaggtaggggaccttctatcatacagccttattttcatggtagatagccgaatacatgccaaggagtttgagatagagagagggatcctctatcttcctctaccactatcctgaatcactacatatctctttgagctctggctaccagttcatcagctatgtccataatcgaagactacctatatgtgctggcgatttagtctcttctgtctattcccacatggccacatggaaacgaaaaagatcttcatttgtgtaaataaatatctcactgcccatccatttggacacggttcggtggctcaaa

SEQ ID NO: 18588 - DNA, 362 bp, Zea mays
  Coding DNA Sequence Number=SeqID_4185
gggtggcattgtcagttgtcaactagctcttgtggtcttgtggggggcttgttcgctacgactttctgtggctttaatctgactgcggctttaatccggttgcggctacaacttctacagtattttatctctatagattgcagttgtagtactccgaacaactgcagctgctgcggttgtagagcagtcgaacaagcttgcccgctggcactaggtcagccatgacactacgagtcgttttttgggtcgtgttaggctgaaaatgacggggtcaatatgagatcatgcaaggccctatttggcaaggctctggcttcggcttccttgaaggagcagctcccataggagccagtgtatttttg

SEQ ID NO: 18589 - DNA, 585 bp, Zea mays
  Coding DNA Sequence Number=SeqID_4186
ggaggtcgagctggcttgcaccatcagatttgatcagatcattcacctgctcaccgatgccaaccccatccaggtcgtcgtcgacgcgatcatcaacagtggcccccgtgaggatgccacccgtattggttcggctggtgttgtgaggaggcatgccgtggatatctcacccctgaggagggtgaaccaggccatctacctcctcaccactggtgccagggagagtgctttccggaacatcaaaacaattgccgagtgccttgcagatgagctgatcaacgccgccaagggctcatccaacagttacgccatcaagaagaaggacgagattgagcgtgttgccaaggccaaccgttgaacagagcttgtatcctggtgcactctgcgctggaaacttttatgtcgctggcagtcgtatcggttcctattttaccaatgtttagagttttttgagacctatatgcggttttggttttcagtgcacaattaaaattactgagtatgagtattactgtagttgattgggaacagaaagtgcctggtttaccgaactccatttctcttgtcatttttctttattctgta

SEQ ID NO: 18590 - DNA, 427 bp, Zea mays
  Coding DNA Sequence Number=SeqID_4187
aacatcttctttcctctgtactcaagacttcaccaaccttttagattcgatatctgcgaaattttcttcttcaatcgacgatgagcaccggcgcaggaagcggcacgaccaaaggcggtagaggaaagccaaaggccaccaagtccgtctctcgatcctcgaaggccggtcttcagttccccgtcgggagaatcgccagattcctcaaggcagggaaatacgccgagcgtgtcggcgccggagctccggtctatctctccgccgttctcgagtacctcgccgctgaggtgttggagcttgctggaaacgcggcgagggataacaagaagacgcgtatcgtgccgaggcacattcagctcgcggtgaggaacgataaggagctgagtaagcttctgggagctgtgacgattgcgaacggtggcgtttt

SEQ ID NO: 18591 - DNA, 400 bp, Zea mays
  Coding DNA Sequence Number=SeqID_4188
actagttctccctcctgagaccatgaccgtagagaagtttaaaaacatcatggctgttgacaagaaggttgctgatggtctgttgagactcatccttctgaaaggaccactagggtgctgtgtatttacgggggattatgaggggaatgcactcgatgaaacccttcacgcattctgcgacaactgacccatcccagttttggacttcacttctgtatgctagtactaggccatgtatatccatcagagaaaagattgcggtgtacattatcttcactgcctcattggtatatttttgtcagaaataatggtatattcgtttatgtgctggtttgagtttgtagagaaccatggctaatcaactgcggtgcggtcagttgttctctactgataataaaga

SEQ ID NO: 18592 - DNA, 559 bp, Zea mays
  misc_feature (35)..(35): n is a, c, g, or t
  Coding DNA Sequence Number=SeqID_4189
ttgtctcgaaagtcgctttggcgtccgcctatccnccggagcacgccagcatgaagttgacggcggagggcgagctcttgcttcagcggtgccatcgtatcctgagcgaactcaaggccgccgagcatgagttgagcaccacactcgttatgcccaggggcaagttacgagtgagtgttccgatgatcggaaatctactcctgccacggattgcccgattcattgaattttatccaaatgtcgaagtcgagatcgatgtcaccgataggaaggtcgatctcatcgatgaaggctatgacgcggccattcggattggcgatacaatagacactcgaatcatgagcaggtcgctggggtgctttcgacaaatactggttgcttcaccgagctatgtggagcgctgtggccagcctgccaccgcacagcatctcctttcgcataccctccttctttatcgcttccccaacaccggaaaattcgagcaatggcccgtggcggactttcagaacgtcatcggctcgaccaatgtgtctaacgtcgtctgtaattcggtcgagat

SEQ ID NO: 18593 - DNA, 286 bp, Zea mays
  Coding DNA Sequence Number=SeqID_4190
tgcacgcccacacaaccaggaataaaactcgctgcctggctcctggtagccaaaggcgtcgccgcctgcacgaatggcccacttctcctggctcaccgagcttggcttcctattcctcaccttcaaatcaggcatggcgatttatcgggtcaaacgggacgcctgttccgtcgctttcggcggggatcttatctccaactagtggtcccggtccccctgctttgcgcactacgaggaggtggatccacaagctctcccaaaagagtcgcgaagatcaaggcttggt

SEQ ID NO: 18594 - DNA, 357 bp, Zea mays
  Coding DNA Sequence Number=SeqID_4191
gtacctcgacagctatatcctagttcttgcacatgtgcgagtttacgacttcctcctggcctgtaccaaaaatattgcgctgttgctcctcgtgcttcttgcttgcaagttgcttcagccactccgcttttttttgctcgaacgatcgactgctcgtcgggtcgggccacggccggtcgtcagtttgggtgtgtccactccactgtaaagctccccctcttgtttttttgggtactccctgcatgccaaaccccccccccgtgtactaggtgtggttcggagcagcaggttgtattacttacccccccctctgtgatgtaagaacgcgtgctgaaattatcatgttatggcatatgg

SEQ ID NO: 18595 - DNA, 446 bp, Zea mays
  Coding DNA Sequence Number=SeqID_4192
taacaaacatcacgttctccgttctctggcggcgttcttcttcttcttccccacgttatccttcttctttccctttcccacgctaccctctgctaacatctagtatcagtctaggcttcctggatctgtcgtgcgtcatcccgcagtgtccccgttcgtccactatgtagtcatccgacgccatcgttcgcaaggtgcttgacgcaatgcacctgatggaagtccgccttaccgagaagatgtcggtcgttgtgacatcgtcgagcgtcacgtggacacacgatgcaacgagctccacagccgcttcacagcgcgtggctacaccatccagtaggaagtggatgtggtggtctatgatgagttaagcgaccacgacggctatggcgcggcgcccttcgttatcaacggctctgacgagaagtccatctttgacgagggccccatat

SEQ ID NO: 18596 - DNA, 234 bp, Zea mays
  Coding DNA Sequence Number=SeqID_4193
gtaagcccggtttagatctcaagatcaaagcaggactgctgagcggctgaatctcaacggagcaagttggctaacatacgcacggcagctacaaatacttataggaataaataaaggtggtcaactgttggtttcatggtgttggagtacatcatctgtactgctcttatcctcatatatgatatatgaactctagttcatcacataatataaatctgttagagagccctgatt

SEQ ID NO: 18597 - DNA, 501 bp, Zea mays
  Coding DNA Sequence Number=SeqID_4194
acatgtggcgctcgcatgcgctctcccctttaacttttgcgcgtaggaggctaaagagggtgccgctgcagcgtttttggccccctacctagctacagtggtagcggagggggcaccgctgaacaaattctgaggtccagcggtgagcgtagtctagcaggcagcctccagaagccccagcccctatgtccgccactccgctaggtctccagtttagtctccatctccgtccggtcgtccaccactcaactcccactcttgcggtccgcagtccgaccaacagcaaggtaattaagttgatgtttttttattttagtgatctactcgttgatgcatattcaagtaatgaaaacatattgtatgcatattctatgaccttactgaaattctctttggtacgttatacccaactgcaaatcagttttataagggtttttgtgatataaaggatttaattgatagatggtgttgcagtagtgactctactattaaacaattcca

SEQ ID NO: 18598 - DNA, 264 bp, Zea mays
  Coding DNA Sequence Number=SeqID_4195
gggatgccaatagtgtgcccctatcgagtgcatatgggcttgctaagcatagagatggtcgctgggagtgggcaatggcccctggtgtgtctccatcacccagatatcaacatgcagctgtttttgtcaatgcacggcttcatgtctcaccttttattattcttaatataagatatgcacttctcttgcgtgttcgagaaaaaaatattgcatgtttttttgtgtgagcatccttgtattggattacatgcagaaggatggact

SEQ ID NO: 18599 - DNA, 251 bp, Zea mays
  Coding DNA Sequence Number=SeqID_4196
aattggagagtgtgttcccccaagatatattaatatctgatcctttccgtaaccctatcgcgaaaaaactatatgacgaatggctggggcaacctggttcaaagaatgcaaaaaagtatttgcccccagaatatcccccagtggtgaaaagtgtggcctcccagttacaaaactggtgaaaggtttcttgttgccctgggagttcctatgtttttcaaaagccaggagggccttgttaagcaaatattggt

SEQ ID NO: 18600 - DNA, 598 bp, Zea mays
  Coding DNA Sequence Number=SeqID_4197
gtcacacttggaagattttgttaaatcacgtttttgaggaccttcggaggacgaaggcccccaacaatcatcatatacggaataaaatcatagtatcatcattgtatctcatcatgttcattgattaaagtaaagcactagcatagaactaatcataataatcaattcccaaagggtaaacaaggacaggaaaacagaatactagtcaatccttaggttgatcatattatgcgggacaatgaattataaagtaaatgggacataatgggtcagaagacacttgccttcaccaaacagatgatcagggtcttcaatctcatagaactcgaagaactagatcatttggtcgccgaagcttgaccataaattcctcgaagcccgagaacagatcacgttctgtgaggagtagataacgggcacaacatggccgaaacacctcgaagatccttggccacggtgaggtggaaggatggctgctttggtcaccagataatggagtgtcacctgattaactagagagagctaacttggtggctggggagaagagctttggcttgcaacacagaccacagagacaccagaggaacaactagatttt

SEQ ID NO: 18601 - DNA, 482 bp, Zea mays
  Coding DNA Sequence Number=SeqID_4198
ttaggtctagagtaaccctgtcactcttcacaagtcattccagactcaggtgttttcgagctccctgacacatggggcagtccagtagagttctggggcaggtgaggtggtccttaggaggtcccctggagaagtgctttcattccttcactcccactgtttctcaggctaggtctcttctgtgttgggcagacatcctgggtctcttctcatggaggccagttttagtctcagggctggaaatatactataaaagaggtatcagatttaagtgagctcgtttatgtgaaaagggaagagctgaggagaaaggaattcatctcaaatttttccctctagacagtttcatatcccacattgtagaagtcatgtcccgggcgggttcctcggccagaggagaaaagcttgttgggggccgccgaccgccggggggggcccgggccccgccatgccccctgatagggaactccaattaaccggcg

SEQ ID NO: 18602 - DNA, 522 bp, Zea mays
  Coding DNA Sequence Number=SeqID_4199
atgtcatgagattcctgcagcgtgtgaggtgctgggagtatcgtcagcaaccttctattgtccgtgtcacaaggcctacttttccagacaaggctcgtcgtttgggttataaggccaagcagggttatgtggtttaccgtgttcgtgttcgaaggggtggccgcaagagaccagttcccaaaggtattgtttatgggaagccaacaaaccagggtgttactcaattgaaatttcagcgtagcaagaggtcagttgctgaggagcgagctggacggaagctgggtggcctcagggttctcaattcttactgggtgaacgaggactcaacttacaaatattatgagatcattatggtggatgtggccccccgtgctattagaaatgatccaaggatcaattggctctgccatccagtccacaaacacagggaactgcgtggcctcacttctgctgggaaaagcaacaggggtttgcggggcagaggacatctgtaccacaaaaatcgtccatcccgcagggcaa

SEQ ID NO: 18603 - DNA, 557 bp, Zea mays
  misc_feature (144)..(144): n is a, c, g, or t
  Coding DNA Sequence Number=SeqID_4200
tgaaattcgacgacgagcgcgcgacggtcgcgggcgtgatcgagaatcgactcttgatcgatatgccgctgcaaatcgacgcgagcatcaactacggccttcaggtgtggcgccccctgaaggtgagcgagtatcgctcggtcngactcgccctacaacctgtaccgccacaaggggctgccgccgacgccgatatgctcccctgagcgcgaagagcgtcgaggccgcgctgcacccgacggccacgacttcctatactacgtggcagatgcccgcggaaaaagcgtgttcgcggccgagtacgccgagcatttgaagaacgtgaagaagcgacgggacgcagtgaaggcccttaaggagcgccgctcgtgagttggcgttacgggacgatcgatcggacgaatgtcgcccgcatcctgcgcccgttcgcacccgtccggatcgaggaggcgatcgagcgtatcgatctcgacgcattgtgggcggcggggaagcggctcattttattggacgtcgataacaccctcgtgcgttggcacgcggaagagttctcgccg

SEQ ID NO: 18604 - DNA, 578 bp, Zea mays
  Coding DNA Sequence Number=SeqID_4201
gcctctggtcatcgtattaacttggatactcatgttctgaacacccgaaatgaaaagatagtgcgggttccatctgagaaacagcttgctcaaagtcatcgtgtaacaaatgttgcaggtcctgtttccaattcaaagcagttagcccatataggaccctctgctggtcttttggatccaaatggaccttcaaaaaagaggaaaaagccaaaagcatggtataaagaggaatatgcagacgtgtcagctggtgtgcagaagtatggtgaaggaaattgggaggatattttgcataaatgtaacttcgatgaatacagagaacgccatgatcaggttatatcgagtagatgggctgctgaagcgtccaggaggatcaagcaagcctgctagcactaaacacgcctctgttggattagagtaaagatcagcagccctcaaggcactttcattggctgtcggacctatgcgtggatcatatgcgctgagatcaggagcttatccacaaagcattcagcataagtctacagtgtttgctcataagatgccagaactaagattttgcagtaaccctttcaccg

SEQ ID NO: 18605 - DNA, 376 bp, Zea mays
  Coding DNA Sequence Number=SeqID_4202
atcccctgctctaaaccgcaagctgcgctccctctagctcgcccatggacgcacgctccatcttccccagcccctgctcatctcccccgcgcgcgcctgctccccatggccgccgcgccctgctacttctccatggccggatctccctcctctcccttccatggcgctcctcccctgctccttcggtgccgcgacttcttgctcggctccaagaactggcgcactcgtcatcggctcggcatctcctggagctcggccgcgacgcccggcgtcctgcctactcgtgctcacccctgtgtcaactccatcgtcgcactggtatcctgctcgcgagtttctcctgcgcactatggttctggccggtctcctcttccag

SEQ ID NO: 18606 - DNA, 296 bp, Zea mays
  Coding DNA Sequence Number=SeqID_4203
gtagtggtccgtttaacataggcagcccatttcataccagttgttgggggccttcgtcttcggaaggtcctcaaaaacatgatttaacaatgtcttccaagtgtgacatatgaacaggtaccttcggactcgggttaaaagcatacacgatgtgaaaagcatggtcgtgatgaagattggtgttgctccgacgctacgcaggttgaagcttcggctcaatggcggaaagggaagcttcggctcaggagcagaaaacggaacctacctaaagaggaaaagaccgatcagtcctttat

SEQ ID NO: 18607 - DNA, 560 bp, Zea mays
  Coding DNA Sequence Number=SeqID_4204
ttcctcgtacccaggagcctgtgggtggcggtccgctgcctgcccccccgcggggcgggcccccaagtctccggcccaccgcccattcccgaaattcccaagcacgcatcgagatctcttgaggcccctgctcctcgcctttgacgtgcacaacccccagtctcagatcacaccaccaccatggggagcataccggcggcggcggcggggccgggctcggtgcttggaggacctgccggaggacgcgctgcggggcgtcctcgtcctccttgcgccggacttatctacaaggaaccttctccaggggtcgagatgtggctctcgagagggtcaaccaactcgccgtgttgagcgaagcgtgctgtctgcgagatcgtctcctccatgagctgtagtgttattcatcactggaccggtgcgtagtgtttgagggagcttagtgagaaatgttctcttgctacgaacagacactttgacgaggtaagatctgtccagtcaatactgctggagatgtaggggtcgagaacgagcatggagaagctgcacacaggcatctcgag

SEQ ID NO: 18608 - DNA, 334 bp, Zea mays
  Coding DNA Sequence Number=SeqID_4205
ggtatgctttatgccttgatcctattatgcagctgacacagcttagtggaggcaatctctcagacgatcaactatacgcctcggtgaaaagtaccccacgatcaaacactccattttaagcaagcgaatctcaactatcataacctgatgactgggatgcttctgggatatcaggttacgtgtgacatgaagtcattcctttgactttgatgtatctgtcggtggtacggaatttttgcgaaagggtcctctagtgtagtggcccagacgtcctagcagcagttatgggtctcgggttcgagcccccttgagagcgaacttgggccttagctaa

SEQ ID NO: 18609 - DNA, 345 bp, Zea mays
  Coding DNA Sequence Number=SeqID_4206
gaaggcgaagtttcttccattcgaagaagatggctcttctctgtttcaatcctctcgctcccctctcttctcaaaggcttcaactttcgtccttcgcttcaccagttctcagccttaaacctaacaccgtcgagtctaagaacagagcctctctcggtgcttacaacttgagcagtggatatagaagagctgtgattgtgaaggcagctgcttctggagttgacggagctgagcccgagagcaatgaggaaccacctaagactgtcgtcgctgctgttccagttgataaactaccattggaatcgaaagaagctaaagagaagctactcctggaacagaggatga

SEQ ID NO: 18610 - DNA, 410 bp, Zea mays
  Coding DNA Sequence Number=SeqID_4207
taggtcaggaatacaagcaagccatggggacccctggcgacagctgggtgttcttcctgaaagaggcaaattggaaagaaaagaaggggaaagggtggggattgcgggaggtgatgagaaagggaagggaggagagtggggcagagaaggctggggatcttgggagaaatggatcaagaagaggaagaagaaaacttgtaaccccgagattttctgtatcctgagtcatttggaagaagaaagaagggggtgcagggtggggagactgaggcccaggggtatcccccttcacaggaggtgccctcagagggttcagtttccagccagctccccacctctcccccgccccgggcaaaactcaccttccagaaggttctgagagggtgagtggcggtcactggacactctct

SEQ ID NO: 18611 - DNA, 570 bp, Zea mays
  Coding DNA Sequence Number=SeqID_4208
gttctgcggagttgtgctggtaactccatgtggcatctctaatgactttatagtgtttatctatgtatactcctgtttagtttcattgaggtatattgtatcaatcgttgacccacccaagtccttatttaatttggttcggtttttggtgccaggaaacatgaacaatcttgtaaattgagaactcattgtctctctaggtccgtcacccgtcatgctacacgttgtctgtaactgttcttgccttgatacatatttgttgcactaaaaaaaaaaaaaaagggatgcttgttgcttggttgacgaatgggttagtacatcatattcccactcctaacttttttgtttgatttgtggaatggaacggattgatccatcaccacatcattccttataagctaataattagtataaccgcatgccactaaaattcatgggatgaacacatcatggaccacctcgcctctgtccccctccccccgactttagtgtacataggaatttgtggcatccctttcttccccagtgagattgcttatcattagtcaaagtgtcaaactagatccccgc

SEQ ID NO: 18612 - DNA, 365 bp, Zea mays
  Coding DNA Sequence Number=SeqID_4209
tcaaagctttcgctaccctactgtcctgtgctgcttatactcctataggggattgggttcctcgaggccggccgggctcgcccgccataagcaaatcacgccgaagtcgcgtccctgcatcctgacgaagttctcggcatcgtcgataggcgggagcaacattatcgcaccttgaaacgctcaccggtgtggggatggatcacgaatccacccctcatcgtggtcgggggttctgcgcgtctaccgccggtcaagaataggcaccgcaggatgaggcgcatgaaggatgtcgcgatgatgttcgtgagaggtctaggccgtcgtctcccggtcaactttggttgctagatcattgtcttcgtata

SEQ ID NO: 18613 - DNA, 35 bp, Zea mays
  Coding DNA Sequence Number=SeqID_4210
tcctcgcttgccacatgtatggctaccgccgccgc

SEQ ID NO: 18614 - DNA, 348 bp, Zea mays
  Coding DNA Sequence Number=SeqID_4211
aaccctaagcagagatcgaagccgaaggaaggcgatcccaatcctcctcgattcatctcttcgctccccaaaaccaatggctaccataccggttaaccctaagccgttcttgaacaatttgaccgggaagacggttatcgttaagctcaagtggggaatggaatacaaaggtttcctcgcctctgttgactcctacatgaacttgcagctgggaaacaccgaggagtatattgatggacagttgacaggaaaccttggagagatcttgatcagatgcaacaacgttttgtacgtccgaggtgtgccagaagatgaagaactcggggacgccgaacaagactagtctgt

SEQ ID NO: 18615 - DNA, 189 bp, Zea mays
  Coding DNA Sequence Number=SeqID_4212
gagtcatcaagccaggcatggttgtcacctttggtcctactggcctgaccactgaggtgaagtctgttgagatgcaccatgagtctctcctggaggcgcttcctggtgacaacgtcggcttcaacgtcaagaacgtggctgtcaggatctcaagcgtgggtatgtcgcttccactcacaggacgacctg

SEQ ID NO: 18616 - DNA, 525 bp, Zea mays
  Coding DNA Sequence Number=SeqID_4213
gtacttgatgcgcttgtcctgcgactggcggagcgtttccgcgagatcgcccgcatcgacgccatgagccggatcgtggctgatgtcgatcgcggtcaccacgccgttggcatcggggttgtgatcggatttgcgcatttggtgggactggtcgccgagcattccgtcgctcgatttgtcgcgaccgggcgccatctcgttgacctgcctcagcaggacttcaaggctcctggcgggcctccaatcgatgctcatacgcgcgctccaaatatctcaagtgagcacagctagccgtcggccagggtcggcatgtccgagcgtgaccgggtcgatcaaaaaattctgcgattgccacgaataaaatgtcgggtggcaatgcctatgcgtatcgcgtgatcagactgcctcgcaatctttcgttgtgcaagatggaatgtcacaaaatctcgaatttgcgcgcacgattgcgacaacggagtgcacagtcaatcgtgtcgttgttccaaaacggacaagcgccggctt

SEQ ID NO: 18617 - DNA, 481 bp, Zea mays
  misc_feature (441)..(441): n is a, c, g, or t
  misc_feature (453)..(453): n is a, c, g, or t
  Coding DNA Sequence Number=SeqID_4214
ttacctcggacgagagtatccgcttgggtatgactatttccgaccacgactgcatcgtgcattcatcgccaaggcagccgagcgcgatgaggagaagataaggaaggggattgagcaggctgagtttgtgaagaagggtgagttgcaagagctacgattgttgaaacgaggatgcaattgtaagcacatatgagagctaacaagaacgacagaaatcgaggcactgtaagtatggtcggatttacttatcataacgaccctttagaactttgctctacacatgacttttcacgtttgaataccttgcgcgtgtcatttttgccttatggccagaaaaggcgctgtattctgagaaccctcgcacaaagctgtgcaaagcgaatattcacaagaaagaatgttacacaatcccctccacctccctagtcaaagccaaagganggcagaagcganctgtctaccgttcactgatccttccgga

SEQ ID NO: 18618 - DNA, 348 bp, Zea mays
  Coding DNA Sequence Number=SeqID_4215
gaaccatttttattctcgtcgcgcaacaacaaatccagatcgaaaaaggaagaagagatcgaaatggcgttgagaagggtttacagtgaaatcagagggaagaaggtgacggagcttccaggctatatcaaatcgactttttcaatggagaccgtgaagacctctgtgaagagaggactcgataactacaacgaaaaatacattcagaccagctccggaaaccaagattgatccaaagtttggaagttatgctgacgagtggaagttattatgtttttgttctttcttttcataagaatgtcttttcatgtacggtaaaataatgtctcagaaactcaaaaatctttg

SEQ ID NO: 18619 - DNA, 444 bp, Zea mays
  Coding DNA Sequence Number=SeqID_4216
caaatgtggcggactccctaccgttcactattgtctcttccctccggcgccgccgccgccgtcgccgccttccgattcactcccgaagctgctgggtagtcagaaccctcttgtgttgtgtcttgtcgcgccgaccgagcatctccgctctggcaattgttcctcgaggtatgatgtgcggttcgatggtggcagcgactctgattagacggcgagggttcggtcggaagcggtgagagggcgaggggcacaggatgggacgacttcgtgatgaatcgggcaagggtttcagcggtcgttgacctgcccccaggtttcttcaagccaatccagccaccatcgctgccggtgccgttatcagcttatgcgacgaagcagttctggaaggctgagactacaacggaaagcccgctctctgatggagtggctcagcagacacgtact

SEQ ID NO: 18620 - DNA, 569 bp, Zea mays
  Coding DNA Sequence Number=SeqID_4217
gtgctcgataccatgtcgtcaaggatggcagcggtggcgatggctgcgttcctgttctgcgctctctttgcttggacgtcgtcggaagcggcacgcatggggcggacgggtagatgaggtcgttgttgttgccgccgctagagtctcgtcaatcgaggtggcagacgaagcggcggcaatgtggtctactgggagaggcaacgacagcatgcgcggcactcatctgtcggcgtgccgtcggcgcgaggtctcgcagtcgcttcacagccacagtgacggacggtcgctggccaaggttgcgcggctacaagcagagaggtgccctccggcccggaccctaaacaccacggcgacccgccacccacgtcggctgctccgacgacgagcccatagaaaggaagtaagacgagggagtaatgacgtggacgtgcatgtgcaggcgttgtagaaggcgtaggagtaataatgtacgcgcgcgcccctacgtacatgctgtgttgttgggtccttatttgcatgttggcttgtaccgtgtgcaatgtttcttgtattcgttcaaccggtagctt

SEQ ID NO: 18621 - DNA, 490 bp, Zea mays
  Coding DNA Sequence Number=SeqID_4218
gctgtgaacctttcccctgcggcatcagaagtcctcggaagcggccgtgtgacaatgaggaagactgttgccaagccaaagggtccatcaggcagcccatggtacggatccgaccgagtcaagtacttgggtccattctctggcgagtcacccagctaccttaccggagagttccccggagactacggatgggacaccgctggtctatccgctgaccccgagacattcgcaaggaaccgtgagctagaagttatccacagcaggtgggccatgctcggagccctaggctgcgtttccctgagctattggctaggacggagtgaagttcggagaagccggtttggtcaaggccggttcacagatcttcagcgactggaggattggactacttgggccaacccgagcttggtccacgctcagagcatcttggcccatttgggccactcaaagttaatcctgttgggagccggtgaaaggcttcagagtccca

SEQ ID NO: 18622 - DNA, 558 bp, Zea mays
  Coding DNA Sequence Number=SeqID_4219
tccgtgcccgttcgaatcggatagtgtcatggatctgttcgtcaggcggtgcctcagtggagatggtggatgccgacggtggtcccgttcgtggagccggtctgcgaccacattcgaagtcgatggaagaggaggggaggctcgggtggtggagggatcctatggtcagatttgtcccggaccgcagtagtgttggtggtcgccgtcgtcatgggcgggctgttgttgttggagggatggatctgttcgtcaggcggtgcctcagtggagatggtggatgccgacggtggtcccgttcgtggagccgtctgcgacaggtcaggtgaggggtaggtgaagtgggaaggctcgggtggtggagggatcctatggtcagatttgtcccggaccgcagtagtgttggtggtcgccgtcgtcatgggcgggctgttgttgttggaggctacggtccgatttgtcccggagcgcggcggtgtcgatggccgtcgtcgtcatgggcgggctgttgctgtcgtcgtagactggaagaatgcttgaatcgtcgaaaggaacaactgg

SEQ ID NO: 18623 - DNA, 380 bp, Zea mays
  Coding DNA Sequence Number=SeqID_4220
agccgcctccgattagattcttgtaacgccttctctttcccattaattttctcctttaatcagaccattaacatcgtcatcccacttgctgcattattaattcgagctcagagtcttcgttacctaaccgatttggtttcgtcgatcgactgcgactcgacttgggtttgtgctttcagtccgtaaaaaaacaagagctgatcggcatcatttattcagtattggggaggtgaaatccaatcccttcgcttcgcgccaggcttagcaacgcaagaggagaaacaggcccggttcaccataatgtagacctgagaacgtaggcaattgtagaaaattgattctttctctttgagtaaagtcatggcttctcaagcatgcct

SEQ ID NO: 18624 - DNA, 254 bp, Zea mays
  Coding DNA Sequence Number=SeqID_4221
ggaaccgtgaagctgcatgccctcttcgatgggtgtgcttcgtcgccaaatccacgccatggcccgtcctcgccgatgccggtaactcgacccaagagcaaaaccagtggggagcgcagggctcggggatgacgtacggtgcacgccgtgggggctaggatgcctaggtcatcggcaatttcacgacgggcatgagattttgccgctattcgttgtcgggctccacgctgttcgatttctgcagtgaggacacg

SEQ ID NO: 18625 - DNA, 312 bp, Zea mays
  Coding DNA Sequence Number=SeqID_4222
taagttcatgagacatcttgcagaagctgaaacggcttctaaagctgctactgccaacaagggtgatgcctagacccacgccttgaaggttgccaaggctgtgtagtctggggcagcctagtagaagaccaacaatatccgctcgtctgtgacatttcaccgccccacagacgcctagatgaaggcttgtgaccccaagtacccacgattcatcactaccgtgtggaacaagctggatcagcaccaaattctcaagtacccccttaccacacattcagcgatgaagacgattgacgataacaacactctgat

SEQ ID NO: 18626 - DNA, 308 bp, Zea mays
  Coding DNA Sequence Number=SeqID_4223
gaaaatgccagtatcagctccgtcgccgcctcgtcttcaatctccgttcatccaccgtccaatcaatgcaactccgtcttcttcccgttcactctccgcgaggaatctccgttcgccgtcaacgtcgtcttatccgcgaatcaaatcagaagtcgatacgaacacggtaatcgcaatctctgtaggcgtggcgagcgtcgcgttgggaatcggaatccctgtcttctacgagacgcagatcgacaacgccgctaagagagagaacactcaaccttgttttccttgcaatggcactggagctcagaagt

SEQ ID NO: 18627 - DNA, 552 bp, Zea mays
  misc_feature (414)..(414): n is a, c, g, or t
  Coding DNA Sequence Number=SeqID_4224
gatcatggtgatcctcctaacgatgccaggactcgacgcgctccgcaaaggcttgatcgccgtcacgcgcaacctcctgaagccgtttctctcgatcatccccttctgcctcttcctcctcatggacatctactggaagtacgagactcgtccctcctgcgacggcgactcgtgcaccccttccgagcacctccgtcaccagaagtcgatcatgaagtcccagaggaacgcgctcctgatcgcgtcggcgcttgtgttttactggattttgtattccgttacgaatcttgttgtgaggatcgagcagcttaaccagagggttgagaggcttaggaagagggagtaaagccgaggttgattcgtcgtcgtttcgggctctttgatgcgctgatttgaggttgtttcttcgttttnttatgtttgcttttatcttgtggagattgtaaggatctatgctatctcttatactttagttcaatcctctgtgtttagtctatgaatcttgtcatagttttctcacttgatgatactttgctctgttatcttggttag

SEQ ID NO: 18628 - DNA, 499 bp, Zea mays
  Coding DNA Sequence Number=SeqID_4225
cgaggcaacccctccgcgggattgtgccttacccagcctttttccttgtcgccggctccccatgtcgggggggttcaaggggttcctgaatagcccagtgggccccaaaacgacccccttttggggacccgtctcgaactggggcatcatcctcgcgagggtgggtgacccgaaaaagcctctttagatgatatccggcaacatgccaggagtgttgtgggtgtactttgcgctttttgtcaggttcgcgtggatggtgcgccctcggaactatttcctcatggtaacccccagctgcaacgagtgggttcagcttttccaactgtcgcgctgggttagggcccaggggttcctttaaaaaaaaaaaaaggagaggccccaaaacgaagattttccgccggcccggccctaaaccatagtttggccgaacaagcatggttctgcttcggccgtacaataatacaatgtactcggttgtcccccaaaggcaatattttat

SEQ ID NO: 18629 - DNA, 461 bp, Zea mays
  misc_feature (435)..(435): n is a, c, g, or t
  Coding DNA Sequence Number=SeqID_4226
aaacgcgctgatgggcgaaactgtcgcccgccgcggtttatgccgtgctccctgtccgcacggcccgcgagcccgaggtgcctcatgaatgctgttgttggtcccaggaaggtcaatgcgcaggaccgctgcttccacaatacggcaattgccgttgtcgcgctgctcggctgcgcgcccttagcctggtcacagactccagccgacaaggcgaccacttccaccgcggcggctcccgctgccgctcagcctaaaaagccagccgccgcagcggccgtcccggaggtgcatccgacgtgaaagctcccaccaacgcgaaagcacaagccagctacagcctcggcgtttcgatgggcgatcagctcatacctgggcctcagtcccgattaatcgcgaccgagcgcctgaccaagggctgcgtgatgcactcgccgnaaatggcatacggcaacgacaagaaa

SEQ ID NO: 18630 - DNA, 350 bp, Zea mays
  misc_feature (53)..(53): n is a, c, g, or t
  Coding DNA Sequence Number=SeqID_4227
ttcttccttcccctgtaatggcgcttccacacatactctcttcaccaccgtcnttcaacttcgttatctccgtctttcaaatcaaagccgcctctctcaccggcctttgctagtaatctccgacggtgcaagctcacctccttccgatgttcgtcttcctctttctccgagaagcatcacaacgcgaaccctccaaaacccgatgacgtcgtcgagcttcctctcttccctctccctctcgttctcttccccggcgcaatcctccctctccagatcttcgagttccgttaccgcatcatgatgcacactctcctcgagtccgacctccgcttcggcgtcgtttactccga

SEQ ID NO: 18631 - DNA, 459 bp, Zea mays
  Coding DNA Sequence Number=SeqID_4228
ggccggccgggatacaatttaactggataccacaaaagctcgccgcaggtgtatacatccttagcacaagcactggtctatgtttgcctcaccaagcggacatggggatgaacaacatgtcagcacagctacaccaggtgaagacggaggccaagccgaggaagatgcagcaagtgcgatggagcaaggcgccagggcacgaccacgtcgacacagacagagtaacgtgcgtgtgtgtgggccggagtgggccgtgtaagagccattgggctgggctgtaataggtgaggtataagtagcctcatcaccagagaacgaaccatcgatgaacaaaacactaatagtgtgtttggtttgaggaatgaagtgatccattttcttctcacttctcacttttttatttggtttgtggaatagaatgggttgatccatcatcacctcatttctcataagctaata

SEQ ID NO: 18632 - DNA, 535 bp, Zea mays
  Coding DNA Sequence Number=SeqID_4229
gagatggatccagacgcagtagcgaaggctttcgtggagcactactacaccaccttcgattcgaatcgtggaggattggtctctctttaccaagaaggatccatgctgaccttcgaagggcagaagatccagggctctcagaagcatcgtcgccaagctcaccagccttcctttccagcagtgcaaggcacaacatcaccaccgtcgattgccagccctctggtcccgccgccggcatgctcgtctttgtctccggtaatcttcagctcgcgggcgaacagcacgctctcaagttcagccagatgttccatttggtatcgaatcagggaaactactacgtgttcaacgacatattcaggttgaactatgcctgaggtatctagttgcagagactgatggatgtttggtgggttaattcatcttggtttttagtagaattgaagcttgttttgctgtctgtctttactttaatcaatggagagctctttgttaagtttggttgagataactctgtatgattcagccagcggttata

SEQ ID NO: 18633 - DNA, 128 bp, Zea mays
  Coding DNA Sequence Number=SeqID_4230
ggatcaggacggttcctcacacaaagcagctccaggagcagaaccagcagtatcacatcgactgtgctcaaaattcctgatgctgatttggtaagatgactttcattaatcttcagcatttgctgcat

SEQ ID NO: 18634 - DNA, 412 bp, Zea mays
  Coding DNA Sequence Number=SeqID_4231
gaatgagacttgtattatcctgcactagggtgctcgtacctaggggttacaagcacgtcgcgagagagggagagagagagagcctgttcgtttgctcgtcccccgcgccaacctcctctaggaaagccctggacctcccttttatagatgcaaggagagggtccagatgtacaatgggggtgtagctatgcgctaacgtgtccggcagagaggtgcctgagcccggtgtacatgccaacgtggctgtcagagaggtgcctgagccctgagtacgtgataatgtggccgtcgaagaaatgcgtgagccctgagtacgtgataacgtggccgtcgaagaagcgcctgagccctgtagaagcacaactggcggtgtggcaagggttctgctgacgttcccttgctttcgtaaggg

SEQ ID NO: 18635 - DNA, 514 bp, Zea mays
  misc_feature (40)..(40): n is a, c, g, or t
  misc_feature (64)..(64): n is a, c, g, or t
  misc_feature (68)..(68): n is a, c, g, or t
  Coding DNA Sequence Number=SeqID_4232
cgtgctcatcgcatgaccggattaccattattcttttgcnaatggctacacagctccggtttcnttcntcctgctattccctgggtcacaatcactcagatctcttagcttggggctttagtggctttgatccggggttgcgtgtaagagcgcggatttacttcgcatgtacgtggagattgctaagacacgctaggcgatagttcggagcagctaacacttgcgtagagtcacgatgatttcggtagtgaatgaattttgagggctgggcgcccggaatgaagtcgagatccacgcaattccatgctgggaggactgcgctgcttgatacatggatcccctcttgatcgtggaatcgtggctttcacgcccgaaaagcgacttcaagaccgaacccaaagctaaccgattgaccaaccaattctcgctccggtagctgatctaatctcgtattgagctcttctccgaggcgctgacgtgtaccaacagtttggaatatcatctcggtcggcat

SEQ ID NO: 18636 - DNA, 470 bp, Zea mays
  Coding DNA Sequence Number=SeqID_4233
aatgcttccatctaccgtatcgagatagatgatcttgacgaggaattcgatctcgatgaaaacccacaacagaaaatcggtaaacattgtcgaaaagggtttgcaacccacaaacacctaagagcatgtcaaagattcataaggagacaagctcgatctcctcgtgatgaagtcgtagatgacgtatccgatgaagaaaactcaggtcaacttctacagaactgttgccagcagttgaaacgggttgatgtcccatgcagatgcccatcactcaaatgggcattaaagcgtcagctacaaccatccattgagcttgaactcccaggacaacagcaacaagaacaagggcaaaaaggtcaaccaggccagcagggtaaaggacgtcaatggaaggttcagaagatgatcaaaacagcatctaacttaccttcaatctgtcagattccaccacagagttgtcctttcaaaca

SEQ ID NO: 18637 - DNA, 116 bp, Zea mays
  misc_feature (88)..(88): n is a, c, g, or t
  Coding DNA Sequence Number=SeqID_4234
ggccgccgaaaatggtgtacagtgctgttgtgttccctcttttacattccaaatattttagataggaaagtatattgtatcatttcanaattgatggaatggatggacccctcccc

SEQ ID NO: 18638 - DNA, 491 bp, Zea mays
  Coding DNA Sequence Number=SeqID_4235
gaacgcggcctttatcgtggtttcggccgggggcctggctcctttttatctcatgcgcctacggtgcctactgaaatcgttattgtggccatgttcttaggtcttcgccccgggcctatggctcaattcttcgcctggaaaccccgccagcctctgggggggctgcttcaaaaatggttcactacattcaggctggcactgacttctgccaaacaagggaggatgcttaccgattttctgagtatgactagaggcttcattaggcaagaattcaccctaggcatgtcagatcaatccacagctcctgtcgcgacgatgacaaaggaggcttgtttcagaggccacagctcagctcacagtcttcaggatagctgccaacctccttcgggccacctgctccaatgggccgacgcgcgcaggggcttcgttggaagatatgggtgatccgcccagggcaaatctaattgcttattctgttggtgctagacatg

SEQ ID NO: 18639 - DNA, 410 bp, Zea mays
  Coding DNA Sequence Number=SeqID_4236
cggatgaccagccaacccagaaatggacgagagaagcaaaggagtgtccaccaagcagagcataggcgagagaagcataggagcgtgggctacggacatggcgaggaagttgtggccaccgtaggcggagccggacgcgttgagtcgttgacgcagcatctacaccatcgcaggtggggctggccggacacagtggctgcgttgacgtgagtactcaccactggtccactgcagacgcgaaatcaagcaattaggagctcgggttgcggcggaactttgcgcggtgaagaggatgtttttcgcctccgcaagtttgggagtgctagatacgtaactgttggaggcttttttttcccttttttcctagaatctctactacttattaagtaagtaatagtagtctgccaaaa

SEQ ID NO: 18640 - DNA, 570 bp, Zea mays
  Coding DNA Sequence Number=SeqID_4237
tcaccctgagcgtggccttggcaagctcaggaagctatccaccaacgttaaagatgaaggagaaggtagcaagttactgaacttgtcgatgccctctacgccgacaaccccagtgactccaacgacaccaacaacccccttgtctgggcgtaaagctgacaacgtttggaggagtgtgttccatcctgggagtaactcagccacaaagaccattggtgctcaaatgtttgacaaaccactcccaaacactcccactgtctatgattggctctacagtggagagaccaggagcaagcaccgctaaggtggcagcgaactcccctgagtcgcatgtaaatagtgtccttatctgttgagcgcctgccacgtgtctgcatttgccatcacgtgtcgcgacttaactggtctgtggctgactgaattcgtgtttttggttagcatatgtgaatgtaaaatgcttaataattaatatgctttgtttgtactgaagttttgtaagccagatctgccgcgaactttggcttgggttaatctttctttcttttttatttttccctccagtaagtgatg

SEQ ID NO: 18641 - DNA, 68 bp, Zea mays
  Coding DNA Sequence Number=SeqID_4238
ttgtgttcctgcagctgtctcttgcgatttaagcgtttaattacgtacatagacgtgaatatacttaa

SEQ ID NO: 18642 - DNA, 419 bp, Zea mays
  Coding DNA Sequence Number=SeqID_4239
cccttcggactaagtaccacttctggaaatgggggagcgatgactgggatcaattggggtcaaggctccgtccactcaagggacacgatctcgcctcgcccgagcccagcctcgggcaaaggcagccgacccaggaggattcacgtctcgcccgaggggctcggactcagcctcgacctcggacgacggactccgcctcgcccaaccccagggctcggactcagcctcgacctcggatgacggactccacctcgcccgaccccagggctcggactcagcctcgacctcggaagatggactccgcctcacccgaccccagggctcggactcagcctcgacctcggacgacggtctccgcctcgcccgacccccgagcccggactcagcttcgacctcggacgacgaaccccgcctcgcct

SEQ ID NO: 18643 - DNA, 376 bp, Zea mays
  Coding DNA Sequence Number=SeqID_4240
gtctcactcgtgacgcctacataatggcggactttaagcctgtcggtgagctatttctggaggccattcaagattggtacaagaagccaatcacctatgtccaagattatgaagaagatgatgactcaactggtgaggccaaggttgtcgtcatcgacagggcctaggcggcaaaatccacctcatgaccttgggtcacttctactgaagcgccaattggttttgactacaaaacgtccaaggtagagttgatctttaatttgctcctaaaagagaagtagctccaagtgatctgccaatcacaagatcatgttgactcatgagctgaaaaggcaagtgttactacaagtggcgcaatatatgtcgcagagtgcaa

SEQ ID NO: 18644 - DNA, 261 bp, Zea mays
  misc_feature (203)..(203): n is a, c, g, or t
  misc_feature (212)..(212): n is a, c, g, or t
  misc_feature (215)..(215): n is a, c, g, or t
  misc_feature (225)..(225): n is a, c, g, or t
  misc_feature (235)..(235): n is a, c, g, or t
  Coding DNA Sequence Number=SeqID_4241
gcctcgtgttgtcagcacgcgcgcgcgccggctcggacgtccaggcgatctgcggcaaggtcggcggcttcgatcgctacggcaaccagttcggaccgctctccagttacttgcacattgcactcgtcgagggccgcgcgcgcagcgagtacaagttccccggcgtcggcacggtcgcgttcgtgcgcgacgcggacgcattnagctcgctngtnagcctgcatngctgatcagnaagtaggctgcgcgatctgctgacgg

SEQ ID NO: 18645 - DNA, 521 bp, Zea mays
  Coding DNA Sequence Number=SeqID_4242
ggctgcgccgtccagagatatcagtgacatgagcaacgtcttcgccaagttgcgcgagatcgcggatctcgcgctgctagcgcgggcggcgcggcggattcttggcgtaggctgccgatcatgcggctgaatacgaactggtcgcggatcgacgtccgccggggcgagcaagctcagcagacgttgaggattgttggcttatcggcgacgccatgacgcgccgatgtgtcaagtctggtctgctatcgaattgcttgtcggcaaagcgtcgctcgacttgaaactggccccacacatcatcgaggatatctccagaccaacgcccgcgaagctacgcacactccttgcgatcgcgaaatcggggaagtgcagcagaagccccccaaacgaggcgacatgcccgagtcgaccgcgaagctcacttgccgaggagattcgccaagacggactcgatgtgccctgccgatgggtccccgatgaatagtccgctcgaaacttcacgggatattccggtcacacac

SEQ ID NO: 18646 - DNA, 394 bp, Zea mays
  Coding DNA Sequence Number=SeqID_4243
gtcgatacgaatattgtcgttaacgaattttttgttggataccgtgtaaaacataattccacatatatcatatgtccgactcggtcttcgactcgtccctctccgcctcctacgtcgttgttctctgtgactcctcacgctgtcgagacctcgacgccgcggtgtgatgcaacgccatgggcgcctgcctctacgaggtggcctacggcgacggttcctacaccgtgggcgacttcgccaccgagacgttcacattgcggactccacccccatctacaacgtggacatcgggtgtgaccacgacaacgagggcctcttcgtcggcattgtcgggctgctggcgctcggcggcgggccgctctcgttccagtcccagtatacaaatgacacttat

SEQ ID NO: 18647 - DNA, 471 bp, Zea mays
  Coding DNA Sequence Number=SeqID_4244
gagcgcatactcgacgagaacggccgctatctttcggtggcgggcagcctggccgacctgctggcacggccgcgcggcagcaagacctccatcggcggaccggccgaggagcgcgtcgacgacctgcagcagctgatgtcgctggcagcccagggcgcgctcaagccggtgatcgaccgggtgtacggcttcgacgacctgccccaggcccatgcgcatgtggagacggggcgcaagcggggggccgtggtggtcagtctggcgcgggcctgatgttcatcggcatcaccgccgtgcaggtgaccacggccgggctttcaacgccttgatggctccgcaccgcgcgcaccttgccgctcatgccgccccgcagtagaagaggccggcgccatccgattcctgcagcccgggggatccactagttatagagcggccgccaccgcggtggagctcagttttgcaaccacatga

SEQ ID NO: 18648 - DNA, 220 bp, Zea mays
  Coding DNA Sequence Number=SeqID_4245
tacgcctcggtatcccaaccgggagttcgacctctgcgacgaagacatagaggaagggactacccgtgcccgaagcgatacccactgatcagtccgccgcggcctgcgaggccaacacaacgtatccctccacgctggtaccactgaaagggcaggcgttctacgagacatgaaccaagatgcgcgctccggcatgtaatactttgagggcggctgagaa

SEQ ID NO: 18649 - DNA, 555 bp, Zea mays
  Coding DNA Sequence Number=SeqID_4246
cataagacttcagcggctgctgcgacccttctgttctccgctcttgcgtcttgcgtgatcgccggcgggacttggagcgggcctttgcacgaatttatctgagggaagaacaaactatacaattcatcctgtctggagggtcgcctgatagtcttccccggtatctggacaaaatagccttagttctctatcaatttccaaggaccatgaactatcttcccagtctgcctgcttgcccattgttgtactacgcgcttctggagaccttgctacacaagaaaactttcccagcgctctttcaccttttccagaagggatgtctgcaatctggagaagcccatatatttgggtacgtcgagatcaatactctttctgatgatggattaagagaacgcattcgtggatacctcaagggagcttcagatgaacatctttctcagtgtttgcaggtactacaatatggtagtggctcctatgatagggatggaacgatttgagtgatctatattacgctagctctgagcatgatagcttcacaacaacaatggctcggga

SEQ ID NO: 18650 - DNA, 500 bp, Zea mays
  Coding DNA Sequence Number=SeqID_4247
aggcaacggtggatcaggctccaacggtggatcaggctccaacggtggatcaggctccaacggtggatccggctccaacggtggctctggttcctctggttccaacggcggctctggctctgagggctctggctccaagggcagctccggttccgagggttccggctccaagggcagctccggatctgagggctccggctccaagggcgagagcggctccagctgcgagggtgaccactgtgtccccgtcactgtcagcagcgctggcaagcaggccgtcagcgcccttgctctcctcgctgctgttgccgctcttctctaagcgacttgacacagcttgagtttctgatcttgaacctttgccttcctttctgggtttctctttgggaagatccgcaatacaaatggtggcattgtcttgtgccaccgactttgtagttagacttaatgcagtttcaattctaccggggttttgggaaatgccctatctgtagtcaact

SEQ ID NO: 18651 - DNA, 40 bp, Zea mays
  Coding DNA Sequence Number=SeqID_4248
ctgacgccgtcgcttcttcggatttaagctggcagggggg

SEQ ID NO: 18652 - DNA, 480 bp, Zea mays
  Coding DNA Sequence Number=SeqID_4249
caggcagctgactgtggtgaaacgctagcctaaaccacgaactcgccgaagtcctggcactcctggggatccgcctcgacgctttcttctttacctgagcatagattgcaccaaaggcaaccttcaccaaacagatgctcaggatcttcagccttgtagaactcgaagagtttgatctcttggtcgccgaagcttgactgtcgattcctcgaagctcagaaacgaatcgcgatcagagaagaaggctcgccggaggaagactgcgttggtgggttgcgctggctggccgcgccacaccggggatcggaagccgaggccggcggcctccatggctgcgcgccagggatgaggaaggagcagatacgctgggcacatggttgtcgggtcctcgcgtcgtgggagagacggtttgaaggggagaggagtgggggcgcgtgggacccgcggctaggcagaggccgggcgcggacactccgtgtg

SEQ ID NO: 18653 - DNA, 488 bp, Zea mays
  misc_feature (71)..(71): n is a, c, g, or t
  Coding DNA Sequence Number=SeqID_4250
tctcgtttggagatccccaccctgacagcaccccaaagacggcaaggaagataccccgcaagaaggtcaancacctccccggcaacgacatcttcaagggacacgccccgccagcttccccagagaagcatctgacgccccgcgatgctgaaggagctccctggaagccacattttcgcagatgggaaggaacccctccgcgagcgtgtggcgcggaacccgcaccccccctggcggtgagcgcagcctcgcgctgatttagcataacccgggactcagtgtccccccctagaggaggatttcccccagccccaggcagcaggctgttggatcctcagtttggtgtcttgttcctgatcaaggccccgcagtgaagggccccgttttactcccccccatgtttattacctgttggtgtgcgcatgtttgctttggctgtgagatccccaccccgtcctcctcaatcagcgcagtgtgtagtgtgcacg

SEQ ID NO: 18654 - DNA, 171 bp, Zea mays
  Coding DNA Sequence Number=SeqID_4251
tgttcgctgagctgctgacgtcgtttgtctattattttcagatcaagaaattacaggtgtgtttattggctgttgaaggttgtgctgctcttggccaattgttggagctgcaatattgtgtagctcacattttccaatcattatcaatttctcccaggacaagtcacaaca

SEQ ID NO: 18655 - DNA, 587 bp, Zea mays
  Coding DNA Sequence Number=SeqID_4252
tgcttccccaacaaggtggtcaactggcgcgaccgcgtcgagaaggacctcgacgaggtgctccagtcccacaacgtctactccaacgtctccaagggcgtcctcgccaagtccaaggacctcatcaggatcttcggcaccgacgacctcgtcgaaatctgcgtcgagattttggagaaaggggagctccaggtttctggcgaggagagggaggcgcagctgtccgcgcagttcagggacatcgccaccatcgtgatggagaagactatcagtactgagacccggcgcccctacaccatgaacatgatcgagcgcatcatgcacgagatacactttgccgtcgatccaaaccttacctccaaggaacaggcactgagagttattaagaagctaatcgagcacttaccctgaatacaagataaagcgggcaccctttgggcagtgcggttcactgcacctaagcccaatcttcctggccttatggggaagctcggcgggtgggatgctattgtctctttcaaaggatgagtcggccgctactcagccttctattgtaagtctactggttcttgttctctgtggttaaa

SEQ ID NO: 18656 - DNA, 516 bp, Zea mays
  Coding DNA Sequence Number=SeqID_4253
gctcaggcaagtccgtcgcgctgaacgcgctcgaggacgcaggctactactgcgtcgacaacctgccgccgcacgtgctccccgaactcgcccgctatcttgccgagggcggccagcatcggctcgcggtcgcgatcgatgcgcgttcgagcgcgtcgctcgatgaaatgcccggcctgatccgcgcgctgtcgctcgagcacgatgtccgcgtgctgttcctcaacgcaagcacgcaggcgctgatccagcgcttctccgaaacgcggcgccgccatccgctgtccggctcgccgtcgtcgctcgaggaagcgatcgagcgcgaacgcgatctcgtcgcgccgctcgccgaattcggtcaccagatcgatacgagcacgttgcgcgcgaacgtgttgcgcacgtgggtcaagcgcttcatcgagcagaagaacaacgacctgatggtgatgttcgaatcgttcggcttcaagcgcggcgtgccgctcgacgccgatctgatgttcgacgtgcgcg

SEQ ID NO: 18657 - DNA, 406 bp, Zea mays
  Coding DNA Sequence Number=SeqID_4254
caaaagctggactttagctacaaccccctgtgcgggccgctccccaaggggcccggggtcttcaagcccgggtgcaaaccgtacgggcccaaccagttccccaaagggacccccctcccgggctgccaggaccttgagtggagtgagttacccgggggccaaggttttttaaactctgctttgctttccctcgccggggtggttttcgcttcccgatcgtggtgtgtgtaaggaactaaggacgccggtgcctggtttaggcgtttagctataaacgaaagcccgttcggccgcgtgcttggtttagctacccggccggttgatcttgaccagttaagcgtgtacgaaacgacagccctgtgtacgtgtgtactgtctgttaaagtgtaaaatgtactgtctgtgt

SEQ ID NO: 18658 - DNA, 460 bp, Zea mays
  Coding DNA Sequence Number=SeqID_4255
tcccacttcctacgatcggatgaatccaggtagtctgtcaacacatcttccacttacatgcgggcccacttcttttctcaccacgagtggacccacacgtcatgctgttccttcggctattttcttctccggccgttcgtaactctcatctgcgcttactgaatcgccgccagcacgccaaccgaagcccgactgccccaaccctgccgcgaccccgacggtcgcgctcctacgcccgccgagtagcgccccgacccggccgaccacgcgcagcttcacacgttgcgcagccgcgaccccgcccgtacaccatcgctgtgcccagctcgccgtcgtgcctcgccggagacgtgcccgaaccccatccaagcctcgccgatcccgccgtgcctagccttcgccatcgcgtgctcgagggggggcccggtaccaagtcgcactatagcgagtcgtattacga

SEQ ID NO: 18659 - DNA, 248 bp, Zea mays
  misc_feature (47)..(47): n is a, c, g, or t
  misc_feature (85)..(85): n is a, c, g, or t
  misc_feature (182)..(182): n is a, c, g, or t
  misc_feature (187)..(187): n is a, c, g, or t
  misc_feature (219)..(219): n is a, c, g, or t
  Coding DNA Sequence Number=SeqID_4256
tgcgaaaaatgcacggccacttacgccaatgtcgcacctcctcgacnacgaaaccggtgccgtgactcgaggcaaccctgcgctnggcccaatagtgccaaaccaagcacatcggtcacagggtcagtcagccgcaaggaaaaggcgcgacgggtcgaattggcaaaagtggggccgggaanaaagngcggcggcaggcggggggaagagcagtcaaanttgttggtaggctcacggtcccttttggg

SEQ ID NO: 18660 - DNA, 268 bp, Zea mays
  Coding DNA Sequence Number=SeqID_4257
tttgcactccaatatacggtttgacctgcgcgtgcaatttggtgagcatcctcccgtaggttggtaacatgtatcgcttgccctttaagttcctgttcgtttttgagactgtaatatgctgcttcttttgcgccctttactgtgtgcttttttggtgacaggagccgttataagttgtttttgtgtaacattttagtctgctccatgcgtccatgccagtttctccttagatttggttctgttaaatccaagcactcgtttcactcag

SEQ ID NO: 18661 - DNA, 573 bp, Zea mays
  Coding DNA Sequence Number=SeqID_4258
ttggggcgctccgatccaaaagaggggggggccgctgctgacaaaaaaaatcgggaaaaagggggtcaagcagttcaagaggccccatctcgaccgctataagggccttaagccaagctggggcaggccaaagggtattgactcccgggttaggaggaagttcaagggatgccccttgatgcccaacattggttatggttttgacaaatcaaccaggccctacctccccaacaagttcaaaaagtttgtggtccccaacgtttttgagctggagttgctcatgatgcacaacaggacctactgcgctgaaattgctcacaacgtttcaaccaaaaagcgcaaggagatcgtggagcgtgctgcgcagctcgacattgtggtcacgaacaagctcgccaggctccccagccaggaggacgagtagtttggtttcttgtcataacggccaactggatgttgccattcccggctgtaggaaactactttgcttgtgttttgttagtactgaaaaccagagtccctcctacctttttgcaatcagtagctaataaaatgtggcagattcccctaaaa

SEQ ID NO: 18662 - DNA, 431 bp, Zea mays
  misc_feature (281)..(281): n is a, c, g, or t
  Coding DNA Sequence Number=SeqID_4259
gaaggaagggtgatattcataaaacatggtggtggccgggccaggatcaggatccgcgaacgatgacccgtcggagtcggacttaaggcacgtggaaacgcagatcttgtttgacctcttgataatgtgcgtcaatggagtggagcgagacaagcaggagtgtaagaagatcttctccgaggatgggtttcaggactacaggattataccgcttttgggcgttcgatccatcatcgagcttctatccctaattaaaatttctgtcccccctccaattgaanagctaagctcgccactcgcgacaagcttgttgtggctgggcgtgtggtggtgatcgaacgtgtgtttgccatggtcagggatccatgcatgctatatgtaataaaataacatccgctacatgaccgattaaatcggtataagatcaccaa

SEQ ID NO: 18663 - DNA, 330 bp, Zea mays
  Coding DNA Sequence Number=SeqID_4260
aatctcaaaacaccgatccatttctccggcgataaatcgacgatctcgatccgatggcgaaggaaccagttcgcgttctcgttaccggtgctgcaggacaaattggatacgctcttgtccctatgattgcaaggggtatcatgcttggtgctgaccagccagtgatcctccacatgttggatattccctttgctgctgaagctctcaacggtgtcaagatggagttgatcgatgctgctttccctcttctcaaaggtgttgttgctacaactgatgccgttgagggatgtactggagtcaacgttgctgttatggttggtggtttcccga

SEQ ID NO: 18664 - DNA, 478 bp, Zea mays
  Coding DNA Sequence Number=SeqID_4261
gtatttgcgatcatgggagggttcattcactgattcccgttatttactggttatacactacatgaaacatgagcaaaaatccattttggagtaatatttgctggtgttaatttaaccttcttccctcaacattttttaggcttagccggaatacctcgacgatactctgactacccagacgcttatacattatgaaataacatctcatctatcgggtccttaatttctcttgttgccgtaattatgataatattcattatctgagaagcatttgcagctaaacgagaagttacacttacagaattaacatcaaccaatattgagtgacttcacggctgcccacctccttaccatacctttgaagaaccagccttcgttcaaattcaaccatcaaataattagtcgaaaaaagagggaatcgaacccccatactctgatttcaagtcagttgcatcaccggtcaaccattttcttacta

SEQ ID NO: 18665 - DNA, 445 bp, Zea mays
  Coding DNA Sequence Number=SeqID_4262
tcaaccctagagtatcgagcagccgccgcaagagccgtaaggctcatttcacggcaccgtcgagcgtccggcgtgtgctgatgagtgcgcctctttcgacggatctccgatcaaagtacaacgtccggtcagtgccggtaaggaaggaggacgaggtgcaggtggtgcgtgggacctacaagggacgtgagggtaaggtgactcaggtgtaccgtcgcaagtgggtgatccacatcgagcgcatcacacgtgagaaggttaacggctccactgtcaatgttggcattaacccttccaaggttgttatcacaaagctcaggctcgacaaggatcgcaagtctcttctcgatcgcaaggccaagggtcgcgccgccgctgataaagagaagggcaccaagttcgcaccagaggacatcatgcagaccgtcgattagtctctttctct

SEQ ID NO: 18666 - DNA, 377 bp, Zea mays
  Coding DNA Sequence Number=SeqID_4263
ccaggagagggatacggctacggtcagggtggccagcggcagatgtatccaccctgtcgtcccggcaccaccggcggcgggccaaggatcggccgcgtgaggcttacgaaggcccgggagtacgccgccgggttgccgatgatgtgccggctgtcggagccccaggagtgcagcgtcttctccggcggcgaccagtactagctaccatggttaaaaaaaaagagagtgagtcggcgcgaggtgcaaggcgcagcatgtgtactgtgcgcgtgcaaatccagaatgacgtagttctgacgtgggctcgcattgtcgcgtgttcacaataatgataataactatgaggaataaatatgggaatgttgcccgataaaaaa

SEQ ID NO: 18667 - DNA, 461 bp, Zea mays
  Coding DNA Sequence Number=SeqID_4264
acaatatggatcaccccgcagcgcacccttgcgcagaaaattctcctcttactccaaacactccatatggcccaccaaagctcctggttcaagatatttgccgggatatctaccgttcatatcctgaatggaacatcatggggggggggtacttcatttcttttgtgggcgcatcctaggggatatctcggggaggacccacgaggaattcccaacaacctcatgccctatgtgcagcaaggtgcggctggtaggaggccagctctaacagggttatgaaatgactatgccacaagagatgggactgcggtaattcgtgctgcgtatgacgagcgcaattgtgctgatctgggataccattcagattgattaatcggatgcctttgaagctgggtattccaaatagaactgcgtgggcaattttctaggcaaaacggcaataagtgctgtggcagggccta

SEQ ID NO: 18668 - DNA, 264 bp, Zea mays
  Coding DNA Sequence Number=SeqID_4265
agaacaacttcacatacgctgaaacagcagcgggcagggaccggcaccaccagcgcaacgtggcgctcggacacatcgagcaccaccgcctcgccggcgtcgtcctcttcgcgggcctcggcgacgtgttcgatctccgcttcttcgacgagctcaggggaatcagcgcgttccgcgcgtggccgattgctacgatgcgggcgcgcgagaggtaggtggttgtcaggggcaacgcctcatcttcattacctgaatccgcctggt

SEQ ID NO: 18669 - DNA, 405 bp, Zea mays
  Coding DNA Sequence Number=SeqID_4266
tcgagtcgttttgctgctgcaacgatgtgggattccccgagaacccagaagctgggacgagcaacggaaggagaggcacaagatgtggagagccctctgatcccatggcttatttaccttgtcaggaaccaaaccgacagcgagaggctctcagctgcagcaatactcacaggactcttcaaagcgggccttggcacacaaggaacccgcgagacaagtcttggcctgctcgtcgtgccgattcttgttggcatgatctcaaggaatgacaaggacaaaccaaatagtgagcatgagaatgagcgcaggcgcattttggaaagagctccagccgttcttgcccaccttattgcggacagcgaagttcttcagaaagcggcgttcgactgcgatgccgtaactatc

SEQ ID NO: 18670 - DNA, 220 bp, Zea mays
  Coding DNA Sequence Number=SeqID_4267
ttggattcctaccagttttctcaatatttgtgtttgatgtgcacaatttcactggaatgcttctaacaattgtcttttctttgcaaactgtagttgagcaagttgctgactgagcaatagtggattaacgggacagcaacttcgcttcagtggtgtagtttgtaaaggttgctgactgctatagagagtacatgatatccattttttcccagcggtatta

SEQ ID NO: 18671 - DNA, 540 bp, Zea mays
  Coding DNA Sequence Number=SeqID_4268
gctcgaggtattccattcgcagtcgaccgggtcctcggagcgccggagatcacgatgaagttcattgctgcctacctgcttgctgttcttgctggtaactccagccccctcagctgagggacttgacagccattctggagtcagttggctgtgaagttgacaatgaaaggatggaactcctgctgtcccaactgagcggtaaggacattaccgagctcattgctgcgggcagggagaagtttgtttcagtcccatgtggcggtggcggtgtagctgttgcggcatctgcccctgctcctgggggagctgctcctgcagctgaggcgaaaaaagaaaagaaggtggaagagaaggaagaaagtgatgatgacatgggcttcaccctcttcgaataagctgcgcagtcatagagtattattttgggcagtggtcccagccgaaacccagagtcatgtttagattttacccttgttttgtgtggaaatttctggaaagacagcacctgtcttcatattttgtattcacccgtagattgctatg

SEQ ID NO: 18672 - DNA, 118 bp, Zea mays
  Coding DNA Sequence Number=SeqID_4269
gatataacctggagcagtcggccgtgctaacttgccccgggctgccctgtttgcagctcctgttgtgtttcctggtttcgacttcctgtcttcgtttgcccctactggacccagggca

SEQ ID NO: 18673 - DNA, 235 bp, Zea mays
  Coding DNA Sequence Number=SeqID_4270
ggccccgtcaacaccaaggcatgggcctacccccccaatttggtccccggcaattaagctccccggctatgctatgcaacttctttgtctttcggatcggaaagggtgtccgcccgtggatttatttatgctgccaaaggcatgtgtgtcttttgtttcccgttcccttgcataggccagtcgagattatgagttggcgttgtcccctaagatgacccctgtttgtcccaaaggg

SEQ ID NO: 18674 - DNA, 89 bp, Zea mays
  Coding DNA Sequence Number=SeqID_4271
ataaaaagtcttggcacatgtctcgcgtcttaccgggattgacccgccgcctctacgcccctccagtctcctctgtcatggccggcggc

SEQ ID NO: 18675 - DNA, 377 bp, Zea mays
  Coding DNA Sequence Number=SeqID_4272
tctctcatccccacaccaaaaccaaacacaatgccgcccaagttggacccgagcgcgatcgtcgacgtctacgtccgcgtcaccggaggcgaagtcggagccgccagctccctcgcccccaagatcggtcccctcggtctcgccccgaagaagatcggagaagacatcgccaaggaaaccgccaaggagtggaaaggcctccgcgtcaccgtcaagctaacggtccagaaccgtcaggcgaaggtcacggtggttccgtcagccgcggcgctcgtcatcaaggcgttgaaggagccggagagggaccggaagaaggtgaagaacatcaagcacaacgggaacatttcgtttgacgatgtgattgagatcgcgaggat

SEQ ID NO: 18676 - DNA, 453 bp, Zea mays
  Coding DNA Sequence Number=SeqID_4273
gttaagcccaagctttccttaattgccaaaaccaaaagttggaaaaacttgccccccaagtggccaaccaccgttaagtgggtggggtgttcaaaaaaggtgcctttcattccttgggttgaattttcaagggtaaagccaaaagcgaacgaaaaaattggtaagtacccccaaatcacggaattgaagcaagggaagccattctgtttggtttcgttgaaagtaatggttcttaattcttaattttcgaaaattttggtatttccattggttcaaatcccgcaaagcacccatgatttagaacgcccccgagagtgccctttccgcatcctcttttttatcagttagtacttggctcctgttgtctcactcggaggctccatgcttcttgctctatctgtatttccttagaagtgattctttacctgctcttatagtctttatagttccata

SEQ ID NO: 18677 - DNA, 146 bp, Zea mays
  Coding DNA Sequence Number=SeqID_4274
gctagccttaatatagaaaatgataaattgattacaaagactaaaaatgtttgtgtttgtgctatttttgttcttagtcatgaaaatgccatgttacatgctaagattgatgaactaaatgtgtgcaaaccctcaacttctagtgt

SEQ ID NO: 18678 - DNA, 102 bp, Zea mays
  misc_feature (43)..(43): n is a, c, g, or t
  misc_feature (51)..(52): n is a, c, g, or t
  misc_feature (55)..(55): n is a, c, g, or t
  Coding DNA Sequence Number=SeqID_4275
cattatgccgcgaggccgacaagctcttgggtagcttcattanaccacagnnccncccaccagaaacgggagggggcggcgaacacccaccccgcgcaagcc

SEQ ID NO: 18679 - DNA, 467 bp, Zea mays
  Coding DNA Sequence Number=SeqID_4276
gagttgttccattccagtcaaacaccccttccaaagaacagggtgggaaaacaaaaacactagctctgctctttccgcatccttgtcttctctcacttttcccagccaaaaaataccctgtgtatttaatcctgagatgtaatcttccccttttctgaccctggataaaatgcatagtttaacccaagggtagacataccacccacccttttctccatggtatggactgagtaataacagtcatcagttttctctctgtgccagagttcttcagggccaatggtgcctctggaaagaaggagacttcctctctgccctggatgacagagccttagcaaccagagtcagtcatgctagaggagaagtctttgagctccttggaccaagcaccagggctgagatgactctgcctagcatgacattctgccctcagaaacaaggaaagggctgttcttaggcccaggcct

SEQ ID NO: 18680 - DNA, 408 bp, Zea mays
  Coding DNA Sequence Number=SeqID_4277
ctagctactgcatactggaggagggcttcctccgacgtcggacatggggcaggttaagcacctgtgcctggccaagttcaagcagggtgtcgtggtgtgacgacgtgctcaagggcatgaccgacctcgaagccggaatggacacgagtcaatctttcgagtggggccaggacgtgatgaaccaggaaatgctgacgcagggattcatgtatgtcttgtcgctcacttcgcatccaccgtggacctcacggcatacatggcccacgacatgccacaccgccttggccgccaccatcatgcccgccatggacaaggtgctggtcgtcaacttaccccgtcgtggtcgccaagcctccgccgccggcatgacccgctagccgctctcggcaacaaacgagccactgaacg

SEQ ID NO: 18681 - DNA, 189 bp, Zea mays
  Coding DNA Sequence Number=SeqID_4278
ttggaagaaaaccattgacatgcatgaaaggctttccagctaaggctcgggtggtatatgttccagtgctggaagttggtagcgaagggcgcctagctcatgcttgcaaagtcataactgacgcgtttatcaaggcaggcctagtttttgaaagggacgtgagagaacatttgcataacaaaatcatag

SEQ ID NO: 18682 - DNA, 171 bp, Zea mays
  Coding DNA Sequence Number=SeqID_4279
ttcaacgtccgccactgtttcgttcattgtcggagcgaaatccgtggaatctgagtgaagaagaaacagagcacgtccgtcacttactagctgctgggtgaaaggattgaatcggctatcgtggtcgtttagtgccgatcgagtcaactttagtcatggtatgttaattga

SEQ ID NO: 18683 - DNA, 546 bp, Zea mays
  misc_feature (36)..(36): n is a, c, g, or t
  Coding DNA Sequence Number=SeqID_4280
gtaaaatccaccaacatattgcttgatgagaacctntgtggctaaagttgctgactttggcctttcaaggactggtcctcttgatcatcaaccatatgtcagcactggtgttaaaggcacttttgggtatcttgatcctgaatatttcaggtcacaacagctgacagaaaaatccgatgtctattcatttggggtagttcttctggaagtgttatgcgcaagaccacccattgacccgtcacttccaagggagcaggtgaacttggctgagtggggaatgctttgcaaaaacaaggggatgctcgaagagatcattgatccttccatcaagggccaaacagatcaaaattcactcagaaaattcagtgacacactagagaaatgcttacaagaagatggttctgatacgccaacaatgggagatgtgctgtgggacttggagtatgcgttgcaccttcagcgaggtgcaatacatagagagccacatgaggatagttctagcagtgcttctgcgtcacttcaattgcccaatattcggcgtcttcc

SEQ ID NO: 18684 - DNA, 427 bp, Zea mays
  misc_feature (79)..(79): n is a, c, g, or t
  Coding DNA Sequence Number=SeqID_4281
aaaaggccagcagcggaaaccaccagtgccaaaaaatggatcccttaagatggcccccctttttgttttttttttaagngtcatggaagacgcgcctttctctcagaacaacgccccgcccagcaaccatcgggcgtgcccacacaaacaagaacggcgcacaaggccaaggggttttcatgacacatgttacatgtaaacctcatccgagacacttttacgctggcgccgtagaagatttactcagggtgggcgattacgcaatcaatctaatagcccaaataatcctcctgtgaggtttggtacaactcggtgcatatgtaacatatgtagcggcgtctggaggatctagtacagggtatgtacactgagggatggagtatgtacaaacacggaagagggatgatccactggctgggaatagatt

SEQ ID NO: 18685 - DNA, 316 bp, Zea mays
  Coding DNA Sequence Number=SeqID_4282
ttgagctgggctattattccttcagcttacatcatatttgttttcttgatcagcttttatgatcctggaccgcatggaaattttagatattcaaagaatatgttacctgaggtcacagaggctgattttaggaagggttcacaggaagagtttgttttgactttaactatttcagtggttctcagttaagcgccaacatgcgttgatgatcattgcagatagtctttactataccaagttcaagcttcattgcagagtgagattctgtcttttattaattgtgccgagtcaaaccacacctacatttgaaatggac

SEQ ID NO: 18686 - DNA, 469 bp, Zea mays
  Coding DNA Sequence Number=SeqID_4283
atcagtaccatcgacactagacagtagcttcattggtactgtttccaggacagctcctttgaacaggtttcagaaccaaagggagggactcttaccaagctacaaaccacatcccaaacaaataagtatttttttttaaatttgaaaaggtacaagatgggcgcataccatggcaaagcattcaggtttttgtgtcatagccagtagacggaataacaatatttctcccagagattcaaagcagacaaatacaatcgaatatgctgacaggcctccttgcttgagcattcaaaactgtggtcacctgaaagacgtggacctgagcccttttcttcgatgacttcttggggggcttcttatggggcttaagcttatcctatttgaataacatgccgttcacgttcgctctctgcttttctatgttggcgtatgatacaaggtaacggccgcgtcgacgtcaaatatttga

SEQ ID NO: 18687 - DNA, 592 bp, Zea mays
  Coding DNA Sequence Number=SeqID_4284
ggccaaaccctggtgtatgcgccccccccccgggagctagttcgacttccccggggggtcgccctgcccgttaccctaggccccctccagtataaggtgttccatgtgtgccccctccgccccgtcgttccgggggttttgtttgcgcccgtcgggcttctggacatgtttaaccccgggggccccctttaggagttccacgtgatcaacaatgctggcggcaaggccatggctttcagggtttccgggtgcggtcggtttggcgcttactgctcccgggaaccggcgaggtgcctattggactcggcggaagtggagttcagcttcgatattgaccctggccttgtgtccgtcgactttccggtgccggaacaggaactatacctttggacgctggagattattatttaggtcgtgatgctgtgggccgaccccaacgcttgcctttccgggtgagcccttattagtcgggcgccattgtccttttttatgtgccccaaaaaaaaatgtattgtgggggtgttgtaaaattggcatggggagggttttttttgttatgtttttatctgtaaatcaaacgggctctgaatgt

SEQ ID NO: 18688 - DNA, 275 bp, Zea mays
  Coding DNA Sequence Number=SeqID_4285
agatagatgtgacatggacatgcttacatatattcatgcacacacatttattatcccttgatcgtagatgcgatcatgctttattcttcctcctccccgttactcctgctgcttttcaagttactcctcagttccattgccatccttatcagcaggaactaatggagcatgaactactggaggagttgcaagcgcaagtgctgcgacacatattcctagcgcaagaagcggaagcattgttgatgatttggtgaaccttgagattatggttgttc

SEQ ID NO: 18689 - DNA, 157 bp, Zea mays
  Coding DNA Sequence Number=SeqID_4286
actcctgctgctttttatcctcagttccaaagccatccttatcagatggagcattaactactggaagagttgcaaccgcaaatgctgcgacacatattagtgcaagaaccggaagcattgttgatgatttggtaaaccttgagattattattgttcg

SEQ ID NO: 18690 - DNA, 269 bp, Zea mays
  Coding DNA Sequence Number=SeqID_4287
ggactagagccaaaacctaagccagcgccacagcctgaaccaaaacccacgccgcaaccagatccgaaacctgaaccaaaaccaacaccacaaccaccctttccacagcccgagcctcaaccagatcccaaaccccaacccgaaccatccaagccagaccctcgaccagattctaaaccccaacccgaaccatccaagccagacccccagccagggcccaaacctacactagagccaaaacccttgaagccgaagccatcgtcgtctct

SEQ ID NO: 18691 - DNA, 143 bp, Zea mays
  Coding DNA Sequence Number=SeqID_4288
ttgttcaagcgggagcctgtgatgatcgaaggcctgcacggatttgggatcagcaaggcccgtcacttgtacgagaggatcaataagttcaaaggcgtgcactgatgaacctacatcttcgtcggccggacctgaccaaggaa

SEQ ID NO: 18692 - DNA, 320 bp, Zea mays
  Coding DNA Sequence Number=SeqID_4289
cgggctgttagggttattcgcttcataaaaatttaattttcccccccaccacggtgtagaaggctggccatttaaaagaagtcgcggcgcattttctagaggtgtccctttgtttttcttttgtatataaacttgggttttttttttccttttttttttggtttttttttttttttattttttttttttttttttttattctttttacccagttcaaactgttttcttgagacttgaacatataagctagggttgtatgcacaatcaaaatccgttgctgcattctgaatggctagcactggaaatgtatgttgtatgta

SEQ ID NO: 18693 - DNA, 173 bp, Zea mays
  misc_feature (28)..(28): n is a, c, g, or t
  misc_feature (45)..(45): n is a, c, g, or t
  misc_feature (50)..(50): n is a, c, g, or t
  misc_feature (52)..(52): n is a, c, g, or t
  misc_feature (56)..(56): n is a, c, g, or t
  misc_feature (65)..(65): n is a, c, g, or t
  misc_feature (78)..(78): n is a, c, g, or t
  misc_feature (82)..(83): n is a, c, g, or t
  misc_feature (97)..(97): n is a, c, g, or t
  misc_feature (138)..(138): n is a, c, g, or t
  Coding DNA Sequence Number=SeqID_4290
gtctactgctggcttttattgggacgcncattgatcgtatgatgnttgtncnacgncttcttagntactgctttgatnaaannttggtctgaactgntttggtctgtgctttaggattctgtttcattgggagaatcngatgcccttgattacttttatttatgcttttctga

SEQ ID NO: 18694 - DNA, 600 bp, Zea mays
  Coding DNA Sequence Number=SeqID_4291
ggtcactatcttctcccaaggtggacgttgctatagatatgggcaatccatttctcaatcttactcttgatggtttttggaagatcggaaccgttgcagccacacgttcagttgctgaggatacctatcatatcatccgaaagggaaatatttcaagtcacgattttaagaaaatgctgaagaagatgtgtaaagaaggtgcatattggggaactgttgctggtgtatatgttggattggaatatgggacagagaggatccgaggcaccagggactggaagaatgccatgattgggggtgcagtaacaggggctctggcatctgcagctagcaacaacaagaaagacaagattgcaatagatgccattacgggtgcagcagttgctactgctgcagaattcataaattaccttacctgaatgaatgaaaatgaatgtctttctgttcttgcatgttttgagaagggattgcccagtcagtctcttttgtcattatctgtatcggctatgtattgatattgaagcagttacttctaagatatgctggttatctagcattctgttaaacctatgttttgaataattatattggcccatcgtt

SEQ ID NO: 18695 - DNA, 538 bp, Zea mays
  Coding DNA Sequence Number=SeqID_4292
ttgcggcgacggtagaggaaaaatcagccgtggactctcttccgctcagcaggctctagcccctagcccctagccgccagtgtcatgcattcgtgctgaggctcaactgctgatccgtcttccaagctctggtgtcatccctgcgctctgacccaagatgtatctccagtactacatcaacgagaagggggccaaggtctacccccccaagaaggagtcgcctcttggggtgccgacgcagtctgctcacccagctcgcttctcacctgatgacaagtactctcgccaccggtacctgttgaagaagagatttggacttctgccaacgcagaagccagcacccgaggtccggagcctccacgtcaacttccaaccatggatgtgcagtttgtgtccctgcttgatgcttgttggttggaatgtagaataggtatctgaggaaagatatcaaaccctgctaggccctactactatgacatctcagcgcattcaggccctatatgtaatgctatgtgattgacaggtcttgtttttaaaa

SEQ ID NO: 18696 - DNA, 203 bp, Zea mays
  Coding DNA Sequence Number=SeqID_4293
aagcaaacgacgacgcactcgcatatacagagacgacgcgcttctacgcggacgtgctcggcttcgtgcccatccgccgccccggctctttcgacttcgacggcgcctggctgttcaactacgaaggattcgtaccttgcttgctttgctatggggccggggcggagtaaaaaatttctttactggacatgcgagagcatggt

SEQ ID NO: 18697 - DNA, 160 bp, Zea mays
  Coding DNA Sequence Number=SeqID_4294
gcaaaaatgcgagggttagctgattggatggttcaggcttgatgaataaactgagatactcaaggatcaattgctttctcaggattggcgcgttatgtgttgcacaagcatgtcttttttttacatatttatcataccttttgtatgattgtagtgttgc

SEQ ID NO: 18698 - DNA, 397 bp, Zea mays
  Coding DNA Sequence Number=SeqID_4295
ataatctttgtatcggtcgtctctctcttctcgatggttttatgtttctgtctgagaaatcgtcgtcgtcgttgctctccttctccaaatccgcccgtgaaatcgtcgtcgtcgttgctctccttcagttccggcttttaccatgattttcctcttatcgagaacatttgtttctctcacactcaaacctttttcttcttcctcgatttccatggcgaatctaaccaccaacgcgaaatcacgccttagaggcgtcgtattcgacatggacagaactctgacagttccggtcatcgatttcgccgcaatgtacaggtccgtcttaggtgaagacgagtacaagcgaatcaaagcagagaggagagccttactgaaatcgatattcttcaccacatcg

SEQ ID NO: 18699 - DNA, 276 bp, Zea mays
  Coding DNA Sequence Number=SeqID_4296
gaacttctcgtttttgttgcaggctgttgcaccaactatgaagcaggttgatcgtcccccgagaaatccgaagcgtgtaatcatcgagtcaagccaagagtgctttagcgtcgacaccccccggttgacagcaaccggagaccctcccaatgcctctcgtgacggcgatcgatcgcgccccccgaaagagacctgctgttctccagcaaagcacgaatcaactgcctagtggggatgataacgatgacttcatgcctcctaaaaagaagtccaatg

SEQ ID NO: 18700 - DNA, 514 bp, Zea mays
  Coding DNA Sequence Number=SeqID_4297
cttccctgttcttgtcgcggccgagccaccacttcaacagccgtagccctctccccctccattatttcagcgtctgaaacaaacccctggccaccatccacacttgtgctcggccctcctcgtgcggcgtcaactgatctgcgtagcggtgccggtccacagcagcgaaccccatcgatctacacggggctgccatcgttcccagcacgtcggcatcgagctccgctagtcgtcaatctgtgcagcgaacaacaacctcgcccttgtcgccgtcacgccttgcgtgtcgctcgtcggcaaagagccccgtttgatggcatgcatgcgcgacacgagtcggccaggttgttcgccttgaatgattgcgatttgttttactaacttattcggtcgatgatgtgcctgcgtgtttatatgcgtgtgaaaatatatttgtatgaatggacgcgtgtagagaaggtaatgaagtggaaaaaaaactcgagaatttttactttgataggaaatgtgcgat

SEQ ID NO: 18701 - DNA, 577 bp, Zea mays
  Coding DNA Sequence Number=SeqID_4298
ggagatttgacagagcggcttgctagggattctgacaagataatatttgagcgtctacagaaggagtttgaagctgcacgagcttctcaaactgaagagatatgtttagacggggaagagtggaatgatggtctactagctacaataagagagcgggtgcatatggaggcggacagaaaagcaatgcaaggggatgcggacatattagcatgtcccctggaaaaaattacatataaaattggaaacaaggtaatttgctgtttggaaggggcaagaatcggcgtacaatatgagacatcgtttgctggtgaaccttgtgagttttaccattgtgtgctggaaagaagtcatttcttgaaaagatgactgtccttgaacacacagttccatttttcctgccaatacgagaaatagaaaatgacctccattcatccaatgccatgaaactcctagatcctgttggagatctattgcaagccttttgtgaataaacgggaacaggtagattgcccatggtcgaactattaagggagctgtatggaaatcagattaaaagagctgtatcttagccttcccc

SEQ ID NO: 18702 - DNA, 198 bp, Zea mays
  Coding DNA Sequence Number=SeqID_4299
gtacaaaacaaagctgatggccgctgccatacggaacaagcaggacgtatttagccttgttagatgacccgcttatgtggggattcaagggttttccaacttcggatgcaaagcttggaaggtgggtgctgacagcagaagatatatgcttcaagaatgtagtcatgtcctacatgtttcgacttggtgagtgtatat

SEQ ID NO: 18703 - DNA, 115 bp, Zea mays
  Coding DNA Sequence Number=SeqID_4300
agaagctgcttccacagttggcttcctggctacccatgctgtagtccaggcgtgcctcagttctgtaaatatgatggacgggatgtgtattaattaacccacgcctgctgttttt

SEQ ID NO: 18704 - DNA, 566 bp, Zea mays
  misc_feature (541)..(541): n is a, c, g, or t
  Coding DNA Sequence Number=SeqID_4301
ggaacagatcattgcgctctacgacaccctgctgcgcatccggccgtcgcccgtgattgcgctgaacagggcgattgccgtggcgcagcatgccggacccgcggcagggctggcagcgattcgagcgatttccggcagcgagcgactcaacacctatccgttttatcccatggccctcggcgagttggaattgcagtgtggtcacctttgtagtgcgcgtctgcatttcacgacagccttggcactggcccgtaatccaaccgaacagcgcttcatggagagccggatcagcgcctgcaactcccaaagttgacgcctgacacgctccgcatagcaccatttgcgggcatagtcacgctaaagtttacgcgtttgtacatagactcgcctcgcaacattcgttcagcggggagatgtcatgttgactcgtatacgggtggacctgttcgcactcctgactgttgtgtagcctggccggcgcgcagaccgccgccgatctcacagcacgttacgtgtcaccgtattgtgtgctggctgacgnaacgaatacgccagtcagcggactc

SEQ ID NO: 18705 - DNA, 569 bp, Zea mays
  Coding DNA Sequence Number=SeqID_4302
gagcccgcgagagtgtttactttgacgttgtgttgtgaaaaaggtgaacactagagtaagacccaatttcgttagaaatattggccgaccaaaccaaaaaaaaaaaaaaaaaaaactcgagggggggcccggtacccaatttgagctctaataaggatcaaagccatttcaggatctgcaaagcctagtcagcaaattccatccgttaagagtctttgtgggcgacatggaacgtgggaggaaaatcctccacactctggtcctaatcctgaatgcttgctttcacgtgcatagtgaattcgatgtatacgtttagggttttcaggagattgttcccattgaatgctggaaatgtccttgttcttggagacaacgagcctgctgcgaaatggttagcgatgatcaatcaatccttaaacaaatcatcatcatcttctggaggaagacttagcccaaaaactccatcttttggcgctggatcgatgttctttgcgaaaccttctttgaagaagattagtgagagtttcagaacagagtgcaggagaaagctgaagatctgccaccgcagc

SEQ ID NO: 18706 - DNA, 562 bp, Zea mays
  Coding DNA Sequence Number=SeqID_4303
gtacaaattgggaattcaccaacctataaacttgaaaggaagcttggaaagggaggatttggacaagtatatgttggtcgacgaatttcggctcctcgtctcagggaccgtaaccctggttcaaatgctttagaggttgcactgaaatttgaacaccaaaccagcaaaggttgcaactttggagctccttatgagtggcaagtttacaacactcttagtggaaaccatggtgtcccacgggtacactacaaaggaaagcagggagagttttacatcatggttatggacatattgggaccaagcttatgggatggttggaataataattcccactcgatgtctggtgagatgggtgcatgcataggtataaaggcaatctccctactggaaaagatgccctctaaagggaatgtccttggggaggcgaagccggagaacttcctgtttgggccctctgggacccaaaaaaaaagaaggtttttcttggtgaccttgggatgggcaactaaggggaaaggatgttggtacgcggcatcctggctgaaacgaacccgaggaccgg

SEQ ID NO: 18707 - DNA, 299 bp, Zea mays
  Coding DNA Sequence Number=SeqID_4304
ggctcactcttgaattgggcaacttggacatttccatcgattcaattcaatacaacatcatataggctttacacatggatctggtgcctggtacaactggaatttatatggctctatttgaaccaaaccaatgtatatttcaaagagctcccaacaattgtttgttcccggactttaccatcggataaaatgctcaaagccccatcgccctggcagctggataaaatccgcccggtactgcggctagtgtcgacgaaattgctgtccaaccatcggatctgagaccatcgcctgcggga

SEQ ID NO: 18708 - DNA, 483 bp, Zea mays
  Coding DNA Sequence Number=SeqID_4305
gttgctgtcgatccttgtctcagttcttgatcaccatgtgtagcttcagttagttgtattgtgttcccttcctccaaaatcataacctggacacgcccaaatccattaatcaaggcactgaacacctgcagatcctccacttcaccgtggccagaacgcgaagaagaagtggaagtccctgaagcgaagacaacaccacctttggagtctcaggcagggtctcgtctctactttaacatctgcgggcctgagactaactcatctataaacaaaggtgaggaagcgacaaatttttgttgcttttgctccaaggtggtaccaaatgaagaaaaacaagactgaagtgcgggaggacttggtcctccacataggatcttttgcttaaacttatcgggaggagtttgtgcctcccttggtttgtataatattactactctgcactcacttttagttctggtctgtaatcaagtaactcaagcttac

SEQ ID NO: 18709 - DNA, 592 bp, Zea mays
  Coding DNA Sequence Number=SeqID_4306
ccaatccggctcatgggtgaagttttggtaagctactaaactctctgttttggtatttaacttcatgttattgtctgaaattatgatatattggtattttttctatgttgtttaaaattacgtttaagcaaagtttaaacgtttaaaagtcaaaacttcacccatgagcgtgtcaacattttatatttttaaaaccttgcacctacttagaagtggtccagttctcagtaggtattagattagctgatgcctttttgtttactctattagtttgaagctctgatgggttcacaggtttcatgaggtcgtttttcatattcttgtcacttttgctctgcacatatcagtgttctatggtatcattcgctgtgctattgagagctcactgcattatttataataggtgtagttagggcctaagcccattacacaaatacaacacattacaatagacattacacagtagctctaacaattaacattgtttattggtgcaagggtcccgaactttataatagtaatgatacctcagaacacatactagaacaattgtatattaagtagcatatggttcagagctatcttccagagc

SEQ ID NO: 18710 - DNA, 402 bp, Zea mays
  Coding DNA Sequence Number=SeqID_4307
tggcctgcattctctgcgccagcgacactggtacatccagagcacatgtgctacctctggagaggggttgtacgagggccttgactggctgtccaacaacattgccaacaaggcttgaagcatctcggcaggggcttctatggatctggataagctggatattcggactaatactgcctttacgtattataaactatatagtcttgacagataagtgtgggtgtttttggaaggataaagctctctatcaagagttttagctataattttccgcgcttctgttttggttttgtgcaaggtaaaccatgtctgactgtgctcgcccctgtctgagtcgttgtactatcccggcctgtccgtttttttttttgtctagagatgctttcagttttgaactgctag

SEQ ID NO: 18711 - DNA, 345 bp, Zea mays
  Coding DNA Sequence Number=SeqID_4308
caaaaggcatggattcattctcgtccttcttcgatgctcaaccaggaagcagaaactggagctataattctctcaagaacctccgtcagatctctccctccgtccagaatcatctcaagcgggtttatctcactctgtgttgtgcgctcgttgcgtctgcgtttggagcttacctccacgtgctctggaacatcggtggtattctcactaccattggatgctttggaagcatgatttggctgctctcctctcctccttatgagcaacaaaagaggctttcacttctgttcctgtctgctgttctcgaaggtgcttcagttggtcccttgatcaaactggcagttg

SEQ ID NO: 18712 - DNA, 301 bp, Zea mays
  Coding DNA Sequence Number=SeqID_4309
tttagagcaaacgaccccaggggcaaaagccaaaaaaaacggccttgaagggggggcccaggttaactttaatggcccgattaaaacggttaaacccccctgcccgatggggggacatgggggcaaccaaaccccgccccggccctcccaaaaagggacttcccctggggcccacttatggggggcaggggttgcgccggcgtgtttttccggttaacctctttaaacaccgacctgacagccggggccctgccaaggccgttaaaaccggccccggcctcggcctgggccgtgccccgaa

SEQ ID NO: 18713 - DNA, 452 bp, Zea mays
  Coding DNA Sequence Number=SeqID_4310
aaccgaggtctaatgctggatgagcaacgagtaccatcggatgttcccacgagtcttctcaacctttatggctcgactgatgaaggacaccgactactgaggaagagctcaaggctcccttccgtgtgtttgacaaggacctataacggatgcatcgcgggcgtcgacctccgccatgtcatgacaaatcttggcgtacaaactatctgatgaagagtgggacgagatgatccccgacgctgatagtcgatggtgatgggcacatcgactactacgaatgtatgacaaggacatgatgtgcaatggagctcgcatgaaccgtaatctgcatacgcagagaagattatgcgttgcatatctagtcaagatgcacctttttattccatcgacttctagtgaaacattctgctagatggagttgctgaatcaggcaatgtacttcctgcgttgtt

SEQ ID NO: 18714 - DNA, 433 bp, Zea mays
  Coding DNA Sequence Number=SeqID_4311
gatcgagcaatatcttccgccgagcaccgacgccgatgccgcgaagtcgctgtcggcactataccggtcacactgtacctcccttgttgagtgcatccgatactgcaaggagaagacattcttccacctctatacatctttccagggtaccctgacgatgcctgtgcacaagctcttcagccatcctgccctcgctccatggatcgaagggtgtgatctcgtcctgtaccagaacatgatgcgcatcatctccaagttgacgctgcaggtgctgcccaagccagtcctggacactttacgagctatttccgagcgtttgattcctcatatcaaggaatcattccagggtcagcctgccacgtcctgcgggccaaggaaactccagcgaccctctttgccggacttctttgaccgagcactgcgtgtaacttga

SEQ ID NO: 18715 - DNA, 395 bp, Zea mays
  Coding DNA Sequence Number=SeqID_4312
cgatcttggtttcctgaacctcatccctacgactcatgagcacctatctattgggacggctgatcgcgtcgctcagctaagctcccaccgtccactgaatgagctgcgagagacccaacgacaccgcgcacagtccaccaacactcatctggacccgtcaactgttcagtcaaaccttgagtatctggaaagtgcatcccgctggggtcgctttgaggaattgcagcattgtgtttatctgaatgcgttgcgccggcagcagcgaccgatatatgggaaaggccttgttcagatgctcacggttggagttgacaaaaggcttataagcccaagcccaaagtgccaaacatgtcatggatggtcgaaacacagcaccttatacgagcagatgtcct

SEQ ID NO: 18716 - DNA, 529 bp, Zea mays
  Coding DNA Sequence Number=SeqID_4313
tgccatccgtgctggatcctttctgtggtcaggtcaaccaagcagccaccaagggagcaccagaggtaccactcccaagaaccctgacataccgagcagaggaaggccagtctcatttaaaggctcaaccaaatcaactcctcgggcggagcagattatgcgcatgaggatgacgagtaaagtttggtcccatcaaagtagtgctatcttatgcgcccaccccgtctttgtgctatggcatttatcgctcccggtagtcgtgcaacatgccatttttgtttaagtttgtcgatgcgaccaaagttgtttctgttagtttggagctggagttctgaatatttacttttataatattaaaattggaccgagtcgaaaaaaaaaaaaaaaaataaaatcaagagttcgcacgaggtggcccggcgagcatgtgtcgtgccgccgtcgtcagagattcctagtcctagttgaggtcgaggagcttcagcagtcaccctcaccggacaaagtgagtcgaaagctgaaagtgaag

SEQ ID NO: 18717 - DNA, 383 bp, Zea mays
  Coding DNA Sequence Number=SeqID_4314
gtcggcagattatcggaccatttcagagattcaccgccatcattggacccatggctctggtaagtcaaatctcatggatgccatcagctttgtgttgggtgagaaaaccagcaacctgcgggtaaagaccctaagggacctgatccacggagctcctgtgggcaaaccagcagccaaccgagcctttgtcagcatggtctactctgaagagggtgctgaggaccgcacgtttgcccgtgtcattgttggaggttcctccgagtacaagatcaacaacatcgtggtcccgctacatgactacagtgaggagttagagaagttgggcatgctcatcagagctcgtaacttcctcgtcttccagggtgctgtggaatctattgcca

SEQ ID NO: 18718 - DNA, 504 bp, Zea mays
  Coding DNA Sequence Number=SeqID_4315
cccggcctgaatgttgcacgatagagtgaaactataagcaggagtagagagcagccgataggatctcaaatagagtgatagctacctggaatcctcacgagagagagaagatccaggcaggagaggagacgggcacgcggacaggagagatcactgaaatgacataagaggtgagcacgtattagtcacatagtcataagtatatgaaatgtgaataaatacatacacaaagagttaagacaaaaaaactgggtgatttggagaaacaggggtcaaacgctgcgataacgacattggaacgatgaattgttccataggaagtttgaaatttgaaaagaggcaagaaatgatgtggaattgagtcgatacttcatagattggtatctatgagtgagtatgagtgaagtgtgtgcttggtttgaaatttggaggagaaaatgaatttgtggcactcggctgagaaacaaacgctataaatgggaaatagtggaatacccgatccct

SEQ ID NO: 18719 - DNA, 419 bp, Zea mays
  Coding DNA Sequence Number=SeqID_4316
cattgcaaggaagattctccctaaggcaaggcatcggtgtgggtggctttcaaaaaatttaccggtgccccccaaagaaatggctccccccccccacatttttgcaaaaacagtggtgttgttgcacgcaacatcctgcagcagttgcaaattatgggcatcatcgatgtcgatcccaagggtggacccctcttccccaaccagggaaggggtgatttggcccaagtggctggaagggtccctgtttaagcgtgaccagggtcatctttggtttcaagggggtcatgtttgatggttgagaagactgcgccccatttgctccttttgggttgggattttcgggttcaggggcctttaaggttttttgcctcctagctagggcgcccccctttgttccccggggccctaatgtgatatca

SEQ ID NO: 18720 - DNA, 527 bp, Zea mays
  Coding DNA Sequence Number=SeqID_4317
gcgtggcgaggtgattcgtcaaattgacggtgtaaggaacgacatgaactgatgcgaaatccagtgtgcgcctctcagtttaggcttggcattgtttttccctctcaatcgatgtttaattcttcgtggtttttttgttttttttttgtttttgcttctttcctctcacctggtggagtcggcaaccagcactcaacacacggcagctgcgcttgcgcggtcaaggctccaggcaggcagtcgacggctcgcggcgggcagcagccgttcccgttcggcacccgtacctgtgtctcgcggctacctcgccggcgtctggcgacgaccacaaacactagaccgccaaggggatcggcgtttcagccgggagggctacgcgggcgtggcgtctagcggtggcgttcggtcggcggaccttaaggcgtggcgctgcgtgcagagcttcgctccgcatccatggcggtcaggggacccttggtcagcgacctcggggggggcctcatgagtcctggtagcgagtgctgttc

SEQ ID NO: 18721 - DNA, 159 bp, Zea mays
  misc_feature (57)..(57): n is a, c, g, or t
  misc_feature (61)..(62): n is a, c, g, or t
  misc_feature (65)..(65): n is a, c, g, or t
  misc_feature (69)..(69): n is a, c, g, or t
  misc_feature (83)..(83): n is a, c, g, or t
  Coding DNA Sequence Number=SeqID_4318
tcacgcttccgttcaattcgctcggttcagctcgtcgattcttgcctcagctcactncatnnctnggcntcgcgcggttcttnctcagaagatatccaccgttgtctctcagagttctcagaggcttcagactcttaccgttttcgctcataagggcta

SEQ ID NO: 18722 - DNA, 406 bp, Zea mays
  Coding DNA Sequence Number=SeqID_4319
ttacaacagctcaacgaatcacggggagcaacaaaacagcactgaaaatgtagttggcccgaggaaaaaactgggttctaaaaattctgccttaattcaacatacaatttacacataccactactgattgaccatgggtagcttcccaaaaaatgcaaaatcaagcttgcctgcagcaggtacacagggatatcatttccctggcccattactccaaataagttgggggctcaaatccttttagcgacgagggatcccttccatcacccgtttattacttagctaccacaaaaaccatgcttaaattttatattttctgggcccttctccccacattggcttaagccatatccgccccttttgactggaagacctccatgtccctgatatcccttttaaacacatt

SEQ ID NO: 18723 - DNA, 584 bp, Zea mays
  Coding DNA Sequence Number=SeqID_4320
cgtcgatgatgccagtagctgcagatgtcacagtaggctcgtatgggacggaactggaaatgtgtgtttggggaagcggataagagaagccttgcagaggatgtgaggtacggtttgagttcagggcagtggctgctaacattgaagatttgacgcctggaatgctaggtcgccgtcccggagaggccctcattgttaactttgcattcctgctgcaccaccttcctgatgaaagtgtctcaattatgaaccaaagggatcggcttctccgtatggtgaagggtctccgaccaaaactagtgacgttggtggagcaggacgcaaatactaacaccaccccattcccttccaggttccgggaggtctatgactactattcggcactttttgattcactggatgccacccttccaagggaaagcccagatagaatgaacgtggagcgccagtgcctcgcacgggaaatcgtcaacatcttagcttgtgaaggtcctgaccgtgtggaaaggtaaattcttaacagcactcttccatgagtcctggtctcatgcacgttgcaaactccaattaatgtttatacacca

SEQ ID NO: 18724 - DNA, 130 bp, Zea mays
  Coding DNA Sequence Number=SeqID_4321
tttgggtccggtgtccctcaaggatggagcaagtcttttctgctgagggctgccttggagctgagccccggattgccaaggagaaaaccttagcgaaacaagatggccccgagaaagacctgatacagga

SEQ ID NO: 18725 - DNA, 412 bp, Zea mays
  Coding DNA Sequence Number=SeqID_4322
tgggacgtctccttgtggagcgacccgcgcaactcgcgcaagggcggatacatcggcgatcccgccacgaccgccgacgtcgactcgacgaaggtgacaggatggaaggaccagccgctcgacggcggatcagacgtcacgttccagctcttgcagcgcggtaactacgtgctcggcccggcgatgggctcgctcgcggacatgtacgatcgcttcacgctcatcaacgggctcgcgatgaacaccgtgagccacccggacggcacgtacttctcctcgacgggtcgacacctcgccggaggtcgcccggttgccgcgagcatcgacaccatgctcgccaacgagatggtcacgcagcagaacatcttgccgagcgtgtcggtgaacttcccatcgacgttcatcggcaacg

SEQ ID NO: 18726 - DNA, 519 bp, Zea mays
  Coding DNA Sequence Number=SeqID_4323
gtaaggtgtaccgacaatgcccgtatgcccagccaggtcctctggatgcgccgcctccgagtcctccgccgacttttggtcaagtaccgtgccagcggagggcgcgtcgggccccccgaccccgcccggtaccacagcagcaacggtaacgccttcaagcacaagcgtgccctagttgagcacattcaccgtgccaaggctcagaaggcccgcgagaccgccctccaggaggagatggatgccaagcgtgcgaagaacaaggctgcccgtgagcgcaagcaggagcgtgcggcggcgaagcgaaatgccctccttgccgaggaataaatgtaagcctagtggacaacgacaacatttcggtcttaagaggaggctgcatacggagtctacgggttggatctttttttatgccctcctgacttcctctatcgcacaaggagttttttttttcccccccccccccccggggagggtctgaatgtatatgttgaatcggtattcaaactttctcaacatctc

SEQ ID NO: 18727 - DNA, 397 bp, Zea mays
  Coding DNA Sequence Number=SeqID_4324
tattttatgcgctgaatcccagaggaacccctggtggttggagccctatctttaagccaattgggatgtttcctttccctgggctgaaaagcgaccaagtcgctttcttggggccggaatcccccctttttttgccttttgatggggggatcagcatggccggtttgagcatgaggactgtgcccctttttgcaaatgccatacccgctgcagtttctcaactgaaatgaggatagtttcgcagctttcgtgaataaaacctgaatccccccccccaatgttttaagttcccagcccgtggtattttctggttgccctcctgtagtttgcgtcggaataaaaatgtttttttcctcttcgtggggcagttttgttctggtggattcataagggctct

SEQ ID NO: 18728 - DNA, 170 bp, Zea mays
  Coding DNA Sequence Number=SeqID_4325
ttctcgccagctatctccctggcgctcttcctcggctcccatgatcgagctcgtcctggcgctagccctctccagttctgtaacaccaacaccctcaagtcctatgctgacgcccctatatattttcctccctgttgtggcagctcctgctcgtccaggtacgctagctg

SEQ ID NO: 18729 - DNA, 141 bp, Zea mays
  Coding DNA Sequence Number=SeqID_4326
acgcaagtggaagacaaaggaatccagtcagaggtttaaccaaattaagagaaggtttagagatagaacagaggatagtgctagaacggggagaattaacattggaatgagcagagaaagtagagcagcacacacccgcct

SEQ ID NO: 18730 - DNA, 448 bp, Zea mays
  Coding DNA Sequence Number=SeqID_4327
ggagcgtgccgatttctattgaggagggaattgcagtgaagtcaacaatgcctaagcaaattcacgagattaaagacttcctcctcacagcacggaggaaggatgcacgctccgtgaaaatcaaaaggagcagagatgtggtcaagttcaaggtccgatgctccaagtacctctacaccctttgtgtgtttgatcctgagaaggctgataagttgaagcagtcacttcctccaggtttgagtgtgcaagacctttgagactctatccggtaaaaggtgaactgaagatcaagttttgctttgaagttgtgttttacatatatatttttgtcttttgttgcttagttgattattggcttatgattaccattatgaagggtccaacactgtttttgtagtcttgatgaagtttcaccgttatttagctaattgattagaccttctttaag

SEQ ID NO: 18731 - DNA, 207 bp, Zea mays
  Coding DNA Sequence Number=SeqID_4328
gtgagaagcgaaggaaccgcaagacgacggagcgcttcaggcgcagggaggataggcctgctggtgtacaaggaggcccccgccctggtcctggtgctgctgctccagctccagctccagcacctgttgctgctcgcccataggctttagcttttcgaccgtgttaagtcttctgcccactcagcttacggattgtcgcctatgggt

SEQ ID NO: 18732 - DNA, 499 bp, Zea mays
  misc_feature (453)..(453): n is a, c, g, or t
  Coding DNA Sequence Number=SeqID_4329
ttgcccatgagttctttgctgaggtagtcaaattgcatggtatccctcgctctatagtatctgatagagataggttgttcactagcacactttggcaagaattattcagtttgttgggcaccaagctaccactctcagtcggatggacaaactgagagggtcaaccaatgcctggaagtgtttttgaggtgtgctgtgcatgacaccccaaactatgtgtgaaatggttaccttcgtctgaactatggtataattcaagttaccacacatccttaaagtgttcaccattcaaagccttatatggggtggaaccttatatggggatgttgcctctactggatccgtaccataactcagaggcactggattcagcccgcgggacccgggatttcatttacatgcgcagcccgaagttttctttcgcctagacgtgtgtgactttttgggctgatngtttctgatttcgtgaaggttgcttcgtcctctgggtttacgcaaa

SEQ ID NO: 18733 - DNA, 313 bp, Zea mays
  Coding DNA Sequence Number=SeqID_4330
cacaactggtggctgtatcgagaagctaccgatgtaactttaacattggttcacgcccactatgatcacctgggacaacagagttaatacataaccccccctagcgagaaccgacaggaacgcgaagggattccaatttttcacagcaccacacgatttcctaacacctatggtggaacaaggcagcagatcacacataattaccgaaaggggcagcagcgaaagctcttactccgactagggaccctccgactttgttggcatgctgcggaccttcttgaacacaacctgaatcttggatagcatcatcggc

SEQ ID NO: 18734 - DNA, 313 bp, Zea mays
  Coding DNA Sequence Number=SeqID_4331
gacctctcaatagctccaaacggagctatagtgtgggaataataaatatatgaacagtaggttctttgagatctgaagctgtagatcaagattggattcagactgcttgtgccgaacaaacagtagtctgattataatccataattctgaggttccccaagaagaggcaccggctccagcaatgggtggcatgggtggaatggattactaagtcaagcacaccccacgatacaacaacattaaagcagagatttttctttggcggtgcaagttcatctttactgttctgtgttcgatgacgaggtggttatca

SEQ ID NO: 18735 - DNA, 216 bp, Zea mays
  Coding DNA Sequence Number=SeqID_4332
atctgcgtataaagtgtactagccagtctctcgtcagcagaacgcaacaaggatcggagcatcagcatcgcgacctgtgaacttgcctgcctgccaagtgccaaggccagcaacacaaggcagcggtcctcggtcgatggaccgcgcgacggacatggacgagaagcacgcgccgtcgccgtcacctgtccagaggagcctttccgccgtcaccta

SEQ ID NO: 18736 - DNA, 439 bp, Zea mays
  misc_feature (86)..(86): n is a, c, g, or t
  misc_feature (177)..(178): n is a, c, g, or t
  Coding DNA Sequence Number=SeqID_4333
agctgttggagctggcgaagaaactctaccaaaccaaactgcaccaaattctccggtccccgcctcagcgcctccgccatcgagancccacccgcccgtcccctcgcggctcgcgccagacggcccgaggcatggcgacgcggaaccgcacgccgctctactgcaataccgcgacgnnctgcggcacgtccgcgcaccggccggggcgacgtcgtcgtcctgcgggggcgggggagggggagggccggtgatcgagatggcctcgctgctgcgctccgaccggccctacgcgcccctcagcatcgaagacccctccgcctccagtagaggtgctgtgtcagtcgggctacccccaacctgggtggatgtttctgaagagatatctgcaaacatgcagagggcaaggacaaaaatgacggattggctaaggcacatgcca

SEQ ID NO: 18737 - DNA, 274 bp, Zea mays
  misc_feature (89)..(89): n is a, c, g, or t
  Coding DNA Sequence Number=SeqID_4334
ctccctgagcctaacctaaaaacagagagagagagcgaggagaaaatgaagacgatccttttcttccgagacgatggacatccccgagngcgtcagcatcaaggttcacgccaaggtgatcgaagtcgaaggaccccgcggcaagctcgttcgcgacttcaagcatctcaacctcgatttccagctcatcaaggacgccgagactgggaagaggaagctcaagatcgactcgtggttcggatctcgcaaatcaagtgcatccatcagaaccgct

SEQ ID NO: 18738 - DNA, 291 bp, Zea mays
  Coding DNA Sequence Number=SeqID_4335
aactttgtgttggtttatgaagctgtcctggcggacaatggcaggctgaaatatattgaacgcattgcggagagatttgttgatttgactatggaacataagggggagatgaaggttgtggtcaggacagttatttcactcaccaaggaggaggagaaagaactcaagggaaccttgcaggatatccttggggaaaacaaaactattttggttgaacaaaagattgactacagcatcatgggaggattagtgatttaatttgggcaaaaggtgctttatatttcaatcagg

SEQ ID NO: 18739 - DNA, 178 bp, Zea mays
  Coding DNA Sequence Number=SeqID_4336
tcagaaaatgtttaatacgaagctaattgctcttgatatgggtgcattgattgccggtgccaaatatcgtggagagtttgaggatagacccaaggctgttctcaaagaagttacagattctgatgggcagaccattcttttcattgatgagattcacaaagttgttggagcaggtaac

SEQ ID NO: 18740 - DNA, 429 bp, Zea mays
  misc_feature (39)..(40): n is a, c, g, or t
  misc_feature (196)..(196): n is a, c, g, or t
  Coding DNA Sequence Number=SeqID_4337
ggtctatcgctctcaagcagaatccaatgcggtattctnncggtaaattgatctccactggccagaaaacctctgctgttcagaaggttatcagtgccagagacgatcgagtgggagtgaggggctctggcgctaagtgtggcatgggcggcaatacggagaagcgggagattgtgggcaaaactggcaatttccntgacctacccagcggcgcggctcacgggtactcttcatgatgtgcggcgaatcggccgttcggatggcttcgctggtaacaagagctggaatgccgacgcattcctggtgatgttcgtagactgttagccgaggttagagatgcacagcgattggcgaaagcagtttccggcgatgctcgtgtttgcaacttgtgccgctctcgcggtatgcaattttgccttggccgccgat

SEQ ID NO: 18741 - DNA, 473 bp, Zea mays
  Coding DNA Sequence Number=SeqID_4338
tcgtcctccttgtaacggcatgatggcgtgcgactcggcgacggccggcgcgtcatggcggcgcggcgtcctggtctagcaatggagctgctgctgccttgccggtgctggaagtgcagagcaaacctgaagatattgcagtctctggaagaatctgtcaccgatcccgatgtgaagtacggctatgtcccgaagttgactcctgctattggcaagacgtacaacttcactgtagaggagcttgtgaagtgggaccagctgagcctgtcagctgccatgggaccagctgcagaagaactgcttgcttcagggctaaaggcggcccgggaccaagccccccccgttttgtgtgccctttgggaagatctggcccccccccaatgtttaacaacggcgttgagagcaatagcaatgtgatttgcctggcaggctcacaatgctgcgcggaagacgctttgcttcttctttttgga

SEQ ID NO: 18742 - DNA, 511 bp, Zea mays
  Coding DNA Sequence Number=SeqID_4339
tctcgtcgcgatggaaaccaccggaaaagtgaagaaggccttcggaggaaggaaagccggcggcccaaaaaccaaatcggtttcgaaatcgatcaaggccggtctccaattccccgtgggaagaatcactcgtttcctgaggaagggacggtacgcgcagagactcggtggtggagctccggtttacatggccgccgtcctcgagtacctcgccgccgaagttttggagcttgctggtaacgcggcgagagacaacaagaagtcgaggatcatcccgaggcatcttctcttggcgataaggaacgatgaggagctggggaagcttctgagtggagtcacgatcgctcacggtggagtcttgcctaacatcaactctgtgcttttgcctaagaagtctgctaagtcgaccgaggatgttgtgtccaagtcaccagccaagtctcccaagaaagcttaattgatactttcgtttgtatgcgttttgttgagtttcgtgaatgcatatgtagaa

SEQ ID NO: 18743 - DNA, 542 bp, Zea mays
  Coding DNA Sequence Number=SeqID_4340
ctggaaggaggcaccgtcgacaatccgcacgcgccaggccacaacaaccatgtccggcctcctccggtggcgtcccctagtcagcgtcgccatgcccgccgccttcacccttacgtgaatcgagcgcttcccattggtgatgaacccagattgtcccggccagggcacgctgcttcagatccagaacctatatgagagaagtcactcacgatcgcacatttaagggtccaaggagtgcaccaggtgaacagatgaataaatggagttgcttagatcatctaaagcccccctcgcctgatgatgcactgagaagtatttcctgaaaggctacggcagacaatactgcggcacgggggttgagagctagccttgacactatgctcatcggtactgcgtaagagattacttctgcaaacactggggagtagcgaatcgatgcagtggttgttggtggaggcgcagtaggatcagtggaccaacctggctgcggagctaagagtctctacggtgatggtgctttgcaccgttatctatcccagata

SEQ ID NO: 18744 - DNA, 397 bp, Zea mays
  Coding DNA Sequence Number=SeqID_4341
ttttttctctgagcttgaaagacgaagatgacggtggaagcagtgaaccctaaggcgtatccgttagctgattctcagttagcgataacgatcttggatcttgttcaacaggctacgaactacaagcagctcaagaagggagctaatgaagctaccaagacgttgaaccgtgggatctctgagttcgtcgtgatggctgctgatgctgagccgcttgagattcttctccaccttcctctccttgccgaagacaagaatgtgccgtatgtgtttgtaccgtcgaaacaagcgttgggaagagcatgtggagtgacaagacctgtgatcgcttgttcagttacatcgaacgaggcaagccagttgaagtcgcagattcaacagctcaaggatgctattg

SEQ ID NO: 18745 - DNA, 380 bp, Zea mays
  Coding DNA Sequence Number=SeqID_4342
gtcgtcgaggaggataaagacctaaaaggagataaaaggagaaatggttcagcgtcttgtataccgttcgcgtcacagctacgccaccaagtccaaccagcacaggatcgtcaaaaccccaggtggtaaattgacataccagaccactaagaagcgtgcaagtggacccaaatgccccgttaccggcaagcgtatccagggtatccctcacttgaggcctgctgagtacaagaggtctcgattatccagaaacaggaggaccgtgaaccgtgcttatggtggtgttttgtctgctttggctgttagggagagaatcgtccgtgctttccttgtggaagagcaaaagattgtgaagaaggtcttgaagctccaaaaggcca

SEQ ID NO: 18746 - DNA, 333 bp, Zea mays
  Coding DNA Sequence Number=SeqID_4343
tccctcggatgcaagatcgtaggcacctccggcgagttccgcggccggaagaggcacgccggcggcaagaagatgaagctgaagctgaagaaggcggcggcgtcggactcggacgactcgtccaccatcaccagcggcgggagcgacaagagcagcgtggtgcagagcttcaccccgtcgaccccgccggcgacgaccgccaacagcttccgcgccgggcaacggcgcaaggccgtgccgcaccggtcgccgttcggcagcctcgtggtggagttctaggcaaaaaggcgcgccgcccggtcccgatggacgctcaccgaaaaaacacacaca

SEQ ID NO: 18747 - DNA, 399 bp, Zea mays
  Coding DNA Sequence Number=SeqID_4344
agctgctcttcttcccttgtctgccccgttcctctctcggccccgtaccactgtccccaacacctcgcctaccgcattcgtccaccccactcttccgcgccgggatcggtaagtgtctctctctcccgcctcccctcctccctctcctccccaccgctgccccctgccccccgcccgggcctgcggtcccacccgcccccacctccgcaaacggggccatcccccgcagcccccgaacacacgcaccaaagaagacaacgcccccaaagggccccgagtacgccccgaccgccgcacggcgcccggccggccgggcccgctttccctcctcgcccccccccccccgcaccgcactccacccccctcccgctctcatctctgcgcgggcacatagaagat

SEQ ID NO: 18748 - DNA, 197 bp, Zea mays
  Coding DNA Sequence Number=SeqID_4345
tattactccaggcacggatcgggagttgctctgaattgactggaccatggccgcctaccatggccgtgaccaccatggtgaccaggagccagggacagctcgccgtcattgcaggccccgccggcggctttcctttggaagccacgagggtggcaagaccgtgggcctgtagctacctctgccgtcgatgttcgtca

SEQ ID NO: 18749 - DNA, 512 bp, Zea mays
  Coding DNA Sequence Number=SeqID_4346
gtctgggtctgggtcaatttcagctgcttttttcagccctaagtatgaccctaactatggccctaatatcagcccctaatctatactttaggctggaagttagggttatgttagggtcaaagttaggtttagggtagcgtaaagttaaatatatttattcaagacgttttcccttggattatagtaaaaagggttagggttaaataataatcagctaattgtaagctattttataagaatatatacttatctaaaaaaaattactttaacagaaattgaatcctagacttttaaaaaccttagcgttaaaaaagatataatataatactattatgctatagtatatctttactgatcttaggaaccttaagggtgtttattttaatctataatgcctctaatatagctatttttcccttttaaaaagcaaaggcctctcgttgaactgaaccctaaccttaagagttaagctataaaggcaatattaatatcctataatactgtgtcggcga

SEQ ID NO: 18750 - DNA, 85 bp, Zea mays
  Coding DNA Sequence Number=SeqID_4347
tcgagccggcactacacagatcgttcttcacggctttggttaggcagcaaatccgaatccagtttaaataaggagacaggctgtg

SEQ ID NO: 18751 - DNA, 298 bp, Zea mays
  Coding DNA Sequence Number=SeqID_4348
ttattattgagctatccctcatttgaactcttaaggaggcaccaccaatgatcgggtggctggttgaccgctgcaggcttggtcatagcacgttggttggatggctgccattgttgcccttgggagacggtgcccggcgctaggcgcagcgggccggcagctccgccacctctggggttgtatcacgaggggcctacggttcacaccagctggctgtttcattggacctagttgctgctgctgtctctgctcctgtttggccactgctgccacttcgtttcatggaaggaactgctgg

SEQ ID NO: 18752 - DNA, 368 bp, Zea mays
  Coding DNA Sequence Number=SeqID_4349
taccgaaatcgtgctctgaaattggtgcgaggggcacaaccagcgctggaagatccccccttggtgaacgaacgaaagaaactcctagcggggcccctaataaaaattttgcggggtggggcgatccccaaataaaaaaggcagggtgcgatgcatcggggttttttcgcctctcgagtggggtttgggttaaacacccagcccctgtgtggctagtgttccaacatttgtcaccccgcttgcgcaaggaagtgggggtgcctgccccaaaaaaagggcctggtcataggctgctgcattatgaatttctgatcatgtcttatgtctggcctttgacccccccatggatggggtctcattccctttct

SEQ ID NO: 18753 - DNA, 294 bp, Zea mays
  Coding DNA Sequence Number=SeqID_4350
agagagcgatcgtcgtggacgaattgtgtgtacacctacgacggatcctcagggatcattttagatgttcgccaaagcatcccacacatatgcatggccttcccgcgtggagatgtcaactggagcacgatgaattcgtcgccgaaggccgcactacgccgcggggccacgccacgtcgtcatcaagagtctgtggcataaaccacggtcaagaacaggtaccaccgaaggagaatgatgaagatgagttcaaagaggtctaggtcatcgtctcacagtcaactatgattgcag

SEQ ID NO: 18754 - DNA, 325 bp, Zea mays
  misc_feature (52)..(52): n is a, c, g, or t
  misc_feature (65)..(65): n is a, c, g, or t
  misc_feature (72)..(72): n is a, c, g, or t
  misc_feature (78)..(78): n is a, c, g, or t
  misc_feature (98)..(98): n is a, c, g, or t
  misc_feature (109)..(109): n is a, c, g, or t
  misc_feature (144)..(144): n is a, c, g, or t
  misc_feature (156)..(156): n is a, c, g, or t
  misc_feature (161)..(161): n is a, c, g, or t
  misc_feature (164)..(164): n is a, c, g, or t
  misc_feature (166)..(166): n is a, c, g, or t
  misc_feature (169)..(169): n is a, c, g, or t
  misc_feature (175)..(175): n is a, c, g, or t
  misc_feature (183)..(183): n is a, c, g, or t
  misc_feature (185)..(185): n is a, c, g, or t
  misc_feature (190)..(190): n is a, c, g, or t
  misc_feature (193)..(193): n is a, c, g, or t
  misc_feature (204)..(204): n is a, c, g, or t
  misc_feature (211)..(212): n is a, c, g, or t
  misc_feature (217)..(217): n is a, c, g, or t
  misc_feature (241)..(241): n is a, c, g, or t
  misc_feature (253)..(253): n is a, c, g, or t
  misc_feature (265)..(265): n is a, c, g, or t
  misc_feature (297)..(297): n is a, c, g, or t
  Coding DNA Sequence Number=SeqID_4351
atccgaggttggtcctccctagatttactaaaaaccgaaaccatttaatggnggggagaaatggngagttanacaaanaaactcctttgtaaaaagangtttgcccacngggagtccgtaatccattcaattcaagggggggcntgctttcccacncctgngancnagnttgggnatcttggngntgggnaanaaggatttccncctgccnntccantttttcttccttggggttaccacncattattacaanaactaaggcccncctcctggaaaccttctttcttattcctattncccgcctattgatgggggaatccccggt

SEQ ID NO: 18755 - DNA, 315 bp, Zea mays
  Coding DNA Sequence Number=SeqID_4352
tctcggccatttcgttgggataaaatgtaatatttatttttatcagtttaatatctagtatgcagaatatatgttaactttgatatcaaatttgtttttatgggtattttcttgtggggaggatccaccacattggtttaccgagccttcacatgtcgtgccgtccttcactgattgtgtgttgttgcttgtgctattatattcatatcaaagtatttgtggtttcaccctacgtttttttttgagtaagttctggtaggtgctctaccgtttcattgttagggagtttgtagatacatcccctggagagtggag

SEQ ID NO: 18756 - DNA, 460 bp, Zea mays
  Coding DNA Sequence Number=SeqID_4353
catggtgccctggtcatctgttcaacgtctaaggtggcccggcccctcccccccgcccccgccccgccgccccaagctggtgctgggcgccgcacgccgaccccgcacctcgtctggatccggcggcaacgggtgcgaagaaaataaaaccatttgggtcggtgacctccactactggatggatgaaaactacctacataactgcttcgggcccagcggcggcgtggtttcaataaaagttatccgcaataggcatacacgacagtcagaggcgtatggatttggtgagttcgtttctcatgcatctgcagagaacagctcttcagatattttaactggtcatgtgatgccaaacactgaccggccttttaaattgaactgggcattgtttagcgtgggtgaaatgcgttctgctgtggcttctgatgcctcggtttttgttggcgttcttgctgctgct

SEQ ID NO: 18757 - DNA, 414 bp, Zea mays
  Coding DNA Sequence Number=SeqID_4354
agttcaactttgttgcttcgtctctagcaggagagttttgtgcggctgccacttcgatttcaagtgtttgagctttgaaagatggtgagaatcagtgtgcttaacgatgctctgaagagtatgttcaatgcggagaagagaggcaagaggcaggtcatgatcaggccttcgtctaaggtcatcatcaagtttctcattgtcatgcagaaacacggttacattggcgagttcgagtacgttgatgaccacaggtctggtaagattgtcgttgagctcaatggaagactgaacaaatgtggtgtcatcagtccccgtttcgatgtcggagttaaggagatcgaaggttggaccgctcgtcttcttccttccagacagtttggctacattgttctcacaacctctgccggtatcatg

SEQ ID NO: 18758 - DNA, 458 bp, Zea mays
  Coding DNA Sequence Number=SeqID_4355
gacactatatatgacgaagcacacttttatcacaggcaggtgacgatcgtcaccaccctacagaatggtgagaggagatccaccagaaagtgataaaatctgatgaagctgaccaccattcctacaaatgcctggttgtggacaatgattgatagctgctccaagagggacgacatcaaacttctttttcaaattgagctcgcgatctagaacctcagagtatttagcctatcaaatcttcgcatcagagcaaacttcaatgagcatctctgcagaaaagtacctgaggcttgtgctcgtgtaggtgccgtcgactatgggtagaaggctttatggacacataatgttaatgggaaaaccccaacggatggggtctgctcattaactactgcgacatgctacagagcagagccactcgttggtgttattccataaacattatgtttcctcagccgatt

SEQ ID NO: 18759 - DNA, 423 bp, Zea mays
  Coding DNA Sequence Number=SeqID_4356
ccgggcttcgacgtagtggtgacctggcagaacctgacacgtccaacggtcctaatgaagatgtggataacagctgttagatacatcgcgatttggttcgctgcacctctcggtcaataggtgatggtgaaaacaagactacaaaagattgcacagacggtaagtttggtgatttttaaggcgaagaagttgtttatacaaacttagatacccgcctgtgccacgacactggtgaaggtggtgctcgtgctggcctggtcgtccggaatgcatacccccgcgccgccagcggtgcaagtggtggggataacatgtgttgctcatcttgaggcgagggtaggtctcagcctttttcaggcgtcgctcttgctgccaccactcctcctgatcgcacgggctgagctgttggtaatctctgaggaa

SEQ ID NO: 18760 - DNA, 383 bp, Zea mays
  Coding DNA Sequence Number=SeqID_4357
ggagcctcttccacaccaggttcgaagccaacaccaccgatgggaataaaccggtgagcgaggtgaacgtccgggtcctggcggcctgcgcgccgagcaagctcttggcgtcgctgccccggggctccacgggcgtggccgggctcgcgggctccggcctagcgctgccggcgcaggtggcgtccgcgcagaaggtcgccaacaggttcctcctctgcctccccaccggcggacttggcgtggccatcttcggcggcggcccgctcccgtggccgcaattcacacagtccatggactacaccccgctcgtcgccaagggaggtagccccgcgcactacatctccctcaagtccatcaaagtggagaacacccgcgtcccgcta

SEQ ID NO: 18761 - DNA, 587 bp, Zea mays
  Coding DNA Sequence Number=SeqID_4358
gatggttgatttcccaatttggtgccatgagtaattaaataatctgctggaaataatatctaccaatataaataaagcatccagccactgtaatctgcaatgctgataataatgccatgaagtagcactgcctaaacatctacaaagtactctcgtgtactttttatgtgtgtattcctatcacgaagttaataaactattttatcaaaaaaaaaaaaaaaaaaaaaaaaaaaaaaaaaaaaaaaaaaaaaaaaaaaaaaaaaatttttaaaaaaaaataaaaaaaaaaaaaaacgggggcccccccccactaaggactaaccaaaccggaaaaaaaacccaaacaatatctcaacgacgcccaacgtttcccttacagcaagatacctcacccttcgaacaccaaacggaaaaatatctttcatcacaaaataattcatccacccccaccccaaaaaaaattcaacccaaccgcaaccgttgtaaacctgggtccccacccatgaccaaccaccaccccctcattactggcccaaaattccccacctccataccaaataactccgttcccatattccactataaat

SEQ ID NO: 18762 - DNA, 512 bp, Zea mays
  Coding DNA Sequence Number=SeqID_4359
gtggtgcactgttcatccatcagagttgaccattgcgcgcagatagccattgctccactggtgcaccagacagtccggtgaattaaagcggagctgtgcctgggaaacccgaacttaagcacacactacacgggaatgtgtacaaccccatgggaaagcggacacgagaggtgctcacgagtgaataagagcggatgacacggtgatttgttttaccgaggttcggttcttgcaaacctactccccgttgaggtggtcacaaagaccgggtctctttcaaccctttccctctctcaaacagtcacttagaccgagtgagcttttctcttcaataaaatgggacactaagtccactacaaggaccaccacaacttggtgtctcttgttttgattacaagtgagttgaacacaagaaagaaggaagaagaaaagcaatccaagcgcaagagctcaaatgaacacaaatgtctctctctctagtcactaatttggttggagtgattccggacttg

SEQ ID NO: 18763 - DNA, 526 bp, Zea mays
  Coding DNA Sequence Number=SeqID_4360
aacgccggtagatccatgcccacgtcgcagccaatagatcccatgtccctactattgtctcctatccctggccctactttctctgtctagggtcagttcgtcgcggtcgtcgtgcagacccgccgcaaaaccagtcgttgaggtcagccagcgaacagattcgtccaagatccgtgcgatgtgccttactccaaccttcccttttccattcgatggcaaacaagggagatgcccttttgtgatttcttctctcagggggttgtcttttatgtaaacaacaaaaatgccaaagaactacccctctttcgtctttagtttgcccgcaaatcatcctcaacgggaaaggtcgtggaaaatcctaacctcaactctttaggatgacacatttccctcccttggttcctactcggggattactccaacccgaagctgggttacataagaaggggctccccctttgcccccagtaggtagatctcggcatgcctcctttcatctacctagattgaccactggcacaggctgg

SEQ ID NO: 18764 - DNA, 497 bp, Zea mays
  Coding DNA Sequence Number=SeqID_4361
gaaaatggtctattcttttatttcttagttgaatctggtttcctgggttttgagtctctgctatcctgtctctgtttaatattcagttctggtgtacgtgatacattttctttgaaacagggcgaaacttttgttccagagagcattgtcaggtttggaaagagaacagaaggcagagatggagttgtaacaataatggcggaagatgaacggatcaagtatcaaggtcttcatcatggatccagctacttggagcacctcaatttcttgtctgctataagggctcaaggtgcatccggaccatctgtgaacttaagtgacggcctactatctgttgccgtcggtgtggctgggcaattatcaatcgagcagggccggtttgtaaccatggaagaggtcttaggtttgtagcctggtgataatccaggcatcctaatgtactgtaaaaccttttgtgtattattaggtacatggacttaagagtgctgcggactgac

SEQ ID NO: 18765 - DNA, 427 bp, Zea mays
  misc_feature (72)..(72): n is a, c, g, or t
  misc_feature (170)..(170): n is a, c, g, or t
  Coding DNA Sequence Number=SeqID_4362
ggtgggtaaactgttccccactcatctgcaggtggagctggctcgaccacacagcctggtggctgcagcagntgagcggtgccagcaagtcacacaatcacaagggttctctctgcagtatcgtgatgtttgcctatagctggccccgaatgatttgttctttcagccancacgtttcaatccacgaacaaacccgcttcagggtttgttggctttctaacttgtgcgatctttctgtaaagccaatcattcacgattgctaacgtatgtgctttctgtaaccaaattgaaatcagttctatggtataaaaaaaaaaaaaaaaaaaaaaaaaaaagtactctgcgttgttaccactgctaaaaaggaagaacgataataggggatcaaagattaacgaacgcgtgcatgacaacgaaatagctactt

SEQ ID NO: 18766 - DNA, 541 bp, Zea mays
  Coding DNA Sequence Number=SeqID_4363
atggatcaccactacactgatatttatgctggctgcattcggaaactttgccacttatctaatgcaaaggaaaagtgatctgaatatatggaactttgatgtcagctatttcagtttggcagcatcagtcatgtatagttatgctatcattgtgcccgtcgtgttctttttcctgtttcagtattttggatcacgcccaagtcttgttcgattttggtgtatgtggggctattctctgtttatcttcatacctgcatctgtaagtattcgatttccatctgtttgtttcgttatttatatcactggcaagaatacacagacattcaattttaacatgatgtacattcataggaattttcagttctctaggttgcaattatatataacggtcctaaaaattgattcacttaatgtaaagaatccatgacgttatcatggttgtgagcgcttggaactcacttctgttcttgaagatgaatgttgccattatgctaacatgagctgccctcctattttgtctggttaaggtacttttgcttat

SEQ ID NO: 18767 - DNA, 589 bp, Zea mays
  Coding DNA Sequence Number=SeqID_4364
tcgacgtacgcgacctgccgatgctcaacaccgtacctcgatgacgaacggcggcacgcttcttgccgcccgccgccgagagcgatgcgagtcaaggtccgccacgccgactgcttcctcttcacctcgcccgaatacaagtactcgcatcaccagcccactgaagaacccccttgactgggcttctagaggagtgaactgctgggcagacaagccggccgccatcgtcagcgcggtaggcaacttcggcggcggcaggtccagcttccatctgcgccaggtacggggtgttcttggacatccatttcatcaacaagccggaactgttcgtcttcgccttcttcgagccggccaagtttttcgacagcgacgggaacctcatcgacgccgacaccagggagcgcctcaagcaggtgctcctgtcccttgaggccttcacgcgcaggctccagaactacaaggactgcagccgcacctcccgcggatcgccgggcctaataataactatctctacttccttccttcaaaccttcccttcctacttagaacaatgaggtagtcttagtccacaccaaagtatatgtgctcg

SEQ ID NO: 18768 - DNA, 211 bp, Zea mays
  misc_feature (26)..(26): n is a, c, g, or t
  misc_feature (101)..(101): n is a, c, g, or t
  misc_feature (107)..(107): n is a, c, g, or t
  misc_feature (138)..(138): n is a, c, g, or t
  misc_feature (170)..(170): n is a, c, g, or t
  misc_feature (172)..(172): n is a, c, g, or t
  misc_feature (176)..(176): n is a, c, g, or t
  Coding DNA Sequence Number=SeqID_4365
ccccattcccagtcatctccactctncagcagtcctcacgttccttctctctctcccccccgctttaggtttgcctgtgttgggtagagtcgtatagcgangagaanaggcttggtgcccagaaactggcatttcganttgggggagggggttaaattcggcgctggggnancatnggttctggaggcggacccaaatctggtaaaaatgg

SEQ ID NO: 18769 - DNA, 181 bp, Zea mays
  Coding DNA Sequence Number=SeqID_4366
agttcgcgcagacagccgccatcatggaggtcagcttttacatacttgatgaacagcttgagctcttgagcaaggtgctgaatgcaggggatgacatgattggtgttgagtgcttagaagaagattgtgatggcaaggttctatttgggagttcaagattctcaatctattggaattcaat

SEQ ID NO: 18770 - DNA, 252 bp, Zea mays
  Coding DNA Sequence Number=SeqID_4367
gggaggaaccaagaaccaaaatcaggaggctcaaaatcgtcaaaatcgacaacaacctccgggggctcatgatcaagggggccgggccagggaagcccggaaacctcctccgattaacgccggccaaaatcgtcggcaagaccatccccaaaacctagactttttttttaaggggggggaaggtgaagggttggggttggtaacctggttccaaccggaaggtattctttggccaatttcagttttgaacca

SEQ ID NO: 18771 - DNA, 395 bp, Zea mays
  Coding DNA Sequence Number=SeqID_4368
ttggtctcagagattgatgctgtcaagtcgtttgaatggggacaggatattgaaagcctagatgtgctgagacaaggtttcactcatgctttcttgatgacattcaacaagaaagaagacttcactgcatttcagagccacccaaatcatattgagttctcagcaacattttcagcagctattgagaagattgtggtgctggattttccttcgactcttgtcaaggcaccagcttgatcatgaagatatttcaagcaataaagattccatctttaaaagttaaatctgttgattgcatgtatgtgcttgtgtctccactatttatagtttggttatggattgttttgctattgcttctcgtgccatttgaatgggctctgtgacttatgaatgat

SEQ ID NO: 18772 - DNA, 350 bp, Zea mays
  Coding DNA Sequence Number=SeqID_4369
aaaagttgtttttgactcatgaccgggcaaatgttgttgagctcaaaaatatggagaaagaaatcgggaaacaagtaaatgccgctattggtaaagcaaaggaaagttctatgcctgaaacgtgggacctcctcccaaatgtttatacaaagggcttcagcgtggagtcatttgggccagccaggaaggggatgagagcttctctcccgtaggttggcagcataataaggcagcccccctaccatggtgtgaaagccaggaaaaataaattttgctgaaggcccccggcattattggaaaattttgtcgggaaatgaacctgtataaaaatgggttgtctggaggaacag

SEQ ID NO: 18773 - DNA, 388 bp, Zea mays
  Coding DNA Sequence Number=SeqID_4370
caccgcaatcgaattcccatttcgtctcagctcttcttctagccaccgtgcaatcaacctccgtcctatctccgccgtcgaagctccggagaaaatcgagaagatcggatcctgaaatctcatccctaaccctcgaagaagctcgtatcctcgtcgactatctccaagacaaattcggtgtctccccactctctttagcccccgcagcagcggcggttgctgctccagccgacggtggcgccggtggctgtagcggaggagccaacgccggcccctgcccgctctcttttgccccccccgccgcggcccgcgccgctccggccgacgctggcgcggccgctgctggggaagagcatgcacggttcactgcgggtctcaatcgactgca

SEQ ID NO: 18774 - DNA, 136 bp, Zea mays
  misc_feature (49)..(49): n is a, c, g, or t
  misc_feature (91)..(91): n is a, c, g, or t
  Coding DNA Sequence Number=SeqID_4371
atttgctaagccttgcactcacatagcatcattgcctcagctatttttnaagcagcagatctcatcccggtgaccaattcatttgcgtttnaggtagatcgtaattgcggaagcagacatggaagtctttagcggg

SEQ ID NO: 18775 - DNA, 346 bp, Zea mays
  Coding DNA Sequence Number=SeqID_4372
actattattcccctgttatgttgttatttgagcactgtgtgatgatgtcttcgtggagtctgagggaattgcaggagaggaccctgagcagcagcagcttggtgaaggttgtccacattgcaaccactgctcaggagaagacgaagtcgtggaaggagacttccaggagttccaagactacgacgagttttaggtgtgggttggcggcaacccccagtcagctgcttgtgaaggccttatctttactgcgtttcactagtactttgatttaactgttaagttgatgactatgtggatgtctatgactctgtgatgtaataagtccccactcttttatgaaattatc

SEQ ID NO: 18776 - DNA, 420 bp, Zea mays
  misc_feature (74)..(75): n is a, c, g, or t
  misc_feature (379)..(380): n is a, c, g, or t
  Coding DNA Sequence Number=SeqID_4373
atggcctgtgagatatgtttcaaaaattttagggatcacttattagcatactgatgtgggtttatatttttttnngcaacatttttttccctaacgtccccaataacaggttttggggaacattttcttagtggtctcttggagttgctcttagcggtacaattctttcaagtagaaagcaagaaggcaaaaatggaggggggaaacaccacatcatggtcctagctggaataaacagaatactagcctccaacaagtcggttccccccacaaagacgacggcggaagagaccaaattgcaagcaccacccaaagggctaactgacaggtaagcccaattcggtgcaagaaccccaaatttcagtgaagccagcacgcnnactgcacagggaaccgcaatcacaggacacgaaccaagga

SEQ ID NO: 18777 - DNA, 587 bp, Zea mays
  Coding DNA Sequence Number=SeqID_4374
cactatccctaccattggatttaatgttgagaccgtggagtacaaaaacatcagcttcactgtgtgggatgttggtggtcaggacaagatccgtccattgtggaggcactatttccagaacactcagggtcttatttttgtagttgatagcaatgatagagatcgagtggttgaggcaagggatgagttgcacaggatgttgaatgaggatgaactgaggggtgctgttttgcttgtttttgccaacaaacaagatcttcccaatgcgatgaatgctgcagaaatcactgacaagcttggactccattcacttcgccaacgccactggtatatccagagcacttgtgcaacttctggagagggtctctacgagggtctggactggctttctaacaacattgccagcaaggcgtgagacatttgaaaaattttggtgtgatctggtcatgtcatgcgagtctggtagttcttggagaaggatgcttttcctttcaagtgaatgttgtaatagcagaatgtttgttagaaatattaaccttttccgtgtaacttggttttgtatgattgcttaaatctgctaatacttt

SEQ ID NO: 18778 - DNA, 506 bp, Zea mays
  Coding DNA Sequence Number=SeqID_4375
gatgacatccaacgaaaacccaggttataaaggcttatacacaagtgtgtgaaatgaaattgcatcttcagttaacatctgagcaaaaatagggcttattgaataagagctatatgcctagtaatattagtcacctttgagcacatcactaataagctgcttgaacagtcaccttcgagcataccaccctgttactggcaattcttttggagcagcatctgaattagcatccttatgaaagaactaactagcttatgtggttaacgaaactactagttttataactctgcttacaatctagaactataaagctgatgtgtcgaacatggtctccaaagtaactcgatctatgaggcccttcagaaaaacaagattgccagtttttgtagctatgtcaacctcataatgaacccgaagatgcatcctcagtcctcaccaatgtcggccacggccaggtttctccttcacgacgtgccgcaccttggtgtccaggaacacgcgtagca

SEQ ID NO: 18779 - DNA, 192 bp, Zea mays
  Coding DNA Sequence Number=SeqID_4376
gctaacggttcagaatcgtcaggctaaggtcacggtggttccatctgctgcggcgcttgtcatcaaggccttgaaggagccggagagggaccgcaagaaggtgaagaacatcaagcacaatggtaacatttcgtttgatgatgtgattgagattgctaggatcatgaggcctagatctattgccaaggagct

SEQ ID NO: 18780 - DNA, 236 bp, Zea mays
  Coding DNA Sequence Number=SeqID_4377
gttcaagccctagcagtgagcgcaacaaaagcgttcattattcctcagtggacacttgctccacgcgccaaggcccacagttcctacctccagaagcttcaatgggattggagcatccaacagtgcaagcatataggctacagctagcgcgttcggcgagcagccttccagcaggccaatggcccatattgcagcgggcaatccttggcacatcatagccctgcaaaccatcgcaa

SEQ ID NO: 18781 - DNA, 345 bp, Zea mays
  misc_feature (105)..(105): n is a, c, g, or t
  misc_feature (165)..(165): n is a, c, g, or t
  misc_feature (219)..(219): n is a, c, g, or t
  misc_feature (225)..(225): n is a, c, g, or t
  misc_feature (237)..(237): n is a, c, g, or t
  misc_feature (247)..(247): n is a, c, g, or t
  misc_feature (267)..(267): n is a, c, g, or t
  misc_feature (270)..(270): n is a, c, g, or t
  misc_feature (295)..(295): n is a, c, g, or t
  misc_feature (311)..(311): n is a, c, g, or t
  Coding DNA Sequence Number=SeqID_4378
cactgggttacgctgccaaagacaacccgagcttactgtggtcatgagtacactgtgaagaacttaatattcatgctgacactggagccagagaatgagaagacnaaacagaaactggaatgggctgaaaagcagcgcgaagcgaatcaaccaacagtgccctcnactataggagatgagtttgagataaatactttcatgcgtgttgatctaccatanatacangcgaaattcagngtcaactctncagttgaagcaatgagagangtnaggaagaccaacgataattggagangttgaggacacccatngccgccactaatctgttgaaccagattcaaagtg

SEQ ID NO: 18782 - DNA, 547 bp, Zea mays
  Coding DNA Sequence Number=SeqID_4379
ctcggcagcctgtgagcagcaagctgtggctctgactctgcaggaggacagagcatccctgacgctttcaggggggccctcggcactggccctttgacctctccaaggtaccaggccccgaaggcagcccccaggtctgccggcgctgtacactgggccctggcaaaaacgcgtgcggtgccccgggccccgccgggctgccgccctgcacacagctgtcaccccgtgcagccccccccggcctgcccccccgcgccttcctcgggcccgccccccttcccccgtgccgcgcccccccgctcgcccccgcaggcggggtgggacccttgtgaccctggaaactcacaggaaggtggccgcaccacagcaaaagcccccctccatcaaacccccgggttctcccgagagcgaccatatactccgcctttgttgggtgatgggaccctcccatggagcacccttcacgggctgctactataaaaggggcacgcccccccacacgcggattttccgcccctactcatcgcctataagcagaagacccttg

SEQ ID NO: 18783 - DNA, 472 bp, Zea mays
  Coding DNA Sequence Number=SeqID_4380
ggattcccggattctccttgctcatgcgtacttctcctcagcgccgcccgcccagttctaggacccgcgcgccgcctggcctcgtcctcctcgttgcagactctcacgcccggtcccccacctcgtcgtggtcagccaccacgccggtgctcgcccgctcctggctgaccgtcgaccgagccgctcgccctgatcactgctcccagttcgtccatatctcacatcacgtccaacactacgctgctgctactcctatcccacacgcatagcactagcacctgacagatcgaagggatccacattctagctcttggagcatgctgccataggctacagctacggttattacattatagccggaagtgctccagctccaggactgattcaacagtttaaagaaggtactgctaccattgaagtcgatgctcttgatttgtgtatagtgatctggctgtgtttgttcgtgtgaatc

SEQ ID NO: 18784 - DNA, 357 bp, Zea mays
  Coding DNA Sequence Number=SeqID_4381
aaagggatgcgtgcacgggcttccattctcaaagttaaactatggggccagattggaaaacgattgtttacaaaacttgttccggaaaaaactctttacaacttgggtgcacggattacggacaaaggttatctagtcacgtattctgtaatcagagaaaggctaaaaatgctcatgatacgctgggtggagactgcacgggtcaaaccagttcgggtaccgcctgcatgtaatgacgtttgttttcaccattcatgccagtgaggagcttgattgcctctcttgcttgaaggccttttccaggaagaagggcattacaagctgcgccccgaggttggttcggccttaatatagaca

SEQ ID NO: 18785 - DNA, 183 bp, Zea mays
  Coding DNA Sequence Number=SeqID_4382
aaagtgtcttcacaatggttatcgtgaaatttctcggatagcacaaagaagctacgtttgatggattagtgcttagtatcctacaatgacttaattcagtatcctatatttccatgggtattggctgattacacctcttaaaagcttgatttcaacaaatcatcgacttttaaggatctttca

SEQ ID NO: 18786 - DNA, 290 bp, Zea mays
  Coding DNA Sequence Number=SeqID_4383
taactccaaattgaggcgttcctgtttctataattccgtttttttaccgtccatcaactagtaacactgtttagccatgaaacttgaattaaaattgttcattgaattaatctgttctatgtgctaaataacttcagaaatccataacttggtaaccgtaactccgaatttaatgattcttgtttccacgatttcgtagcaacatgtagattattattatgtattttgtctatatgtttggtgtgatgttaattttgcctataccatggttgcctgtattgctaccttta

SEQ ID NO: 18787 - DNA, 112 bp, Zea mays
  Coding DNA Sequence Number=SeqID_4384
tgcagtttgggtggcttctcctatcttacatgattcatataatcattctgtgtgcgggcagctgtggctcctccatttcctttcaaaggaaaatcctgtggccgcgatttta

SEQ ID NO: 18788 - DNA, 492 bp, Zea mays
  misc_feature (334)..(334): n is a, c, g, or t
  misc_feature (380)..(380): n is a, c, g, or t
  misc_feature (411)..(411): n is a, c, g, or t
  misc_feature (416)..(416): n is a, c, g, or t
  Coding DNA Sequence Number=SeqID_4385
gaaatgccagtgttgacgtcaaagtggataacgaaggacatttcaccggcagtcgtggaagctggtttgtgccgttacaagataatgatcgttatctcacctggagccagcttggtcttactcagcaggataatgggttggtgagcaatgtgggcgttgggcaacgctgggcgcgcggcaactggctggtgggttataacactttttatgacaacttgctggacgaaaatcttcagcgagcggctttggtgccgaagcgtggggcgaatatttgcgattatcggcaaacttttatcagccgtttgctgcatggcatgaacagacagccacgcangaacaacggatggcgcgcgggtccacctgcagctcggatgcgcatncgtctatcaacacctcataccatgcacctanacagntttggtgatcgtgttgattgttaactctggtcggtatccatccgcgcgttagttggataaatacaccctgtcctta

SEQ ID NO: 18789 - DNA, 343 bp, Zea mays
  Coding DNA Sequence Number=SeqID_4386
aagcccgtcccagaatacgttgccggacatggcacccgaagagcaaccgccggaaccggcgccaccccaaaacggggaaggaaaggccaactaggaggaagggacccccccccaatatatattatagagacacacacccactcccccattttcacactcaagttggggtttcccatttttcttttctttttctcaacgacttggttattcccccctttcatctatctccccgtaaactcggttttttgtccagctggctgtaagtgacccaaaacccttcgttacgtttaatgaggctcatgacaatggcgattttggcatggagttgtgttaccctcccgga

SEQ ID NO: 18790 - DNA, 447 bp, Zea mays
  Coding DNA Sequence Number=SeqID_4387
gatctcagatcccatcgctactgagaggaagaagcacactgcacgcagcgcaccgagtctagcagctaatcctacgacatggaccacctgccgctgacctcgcccgccgcgccagccgattgcggcgtcgctgctcccgtcgcacggcggcgggagggtgctcgacccgtacaagacggcgctggccaccgcggcctcgcccgcggcgtacgccgtgatggcgcgaagcatggcgcgcgagctgctgcccgacgagctgcgcgccgcggggcggtgccgcgcggcttccgcgcgcgcccggctcggtcgcggcgagaaggagcgcgcacaccttcgccatccgcgacctggtcgacaccggctacagggagaaccggctcatcaacgacgggcgcgcctacggggccctcgggaacgagcccaaggctgaccccacgtatctggctg

SEQ ID NO: 18791 - DNA, 555 bp, Zea mays
  Coding DNA Sequence Number=SeqID_4388
tcccagatggcgtcggtgaagtagcgcgagaagtttgtgtggcagtactcggccgtggcgacgaccgcagtgctgggcagctgcgtctaccagagccgcctcacgtcagtgacgaggtatatcgcgcgcagcactctgcgcggtatccgtaacgcgaggttatccctgttccattactcgggcgtttcggcgggcctcgccagatcatcgaacctgtcaggcggtgccgccggcaggtgtggcggattctcttgtcacgtcttcagcctcccagagagaagttttcttgtcagtcttggaaacagttttcaggacggcgtcaggcgtctcattgacgttcatggtgaccttctgttccatgatgtgtacgttgtaggacttgactccttccatcttgcccaggacatgtccaccttgagcacaacagtctgggccatagcgcgagaggggaggagggtcggggcggtccggcggtggtggtggaaatctcctgccggtgaaggcgaaggcgaaggcgagggaggacgggggaaagatatatctgagctcccggcc

SEQ ID NO: 18792 - DNA, 452 bp, Zea mays
  Coding DNA Sequence Number=SeqID_4389
gcatcggtgccatccgcgtaatatacgcggatggttaccagacgttttttcctcggagcctccgggctcactgcaccgctgcttgccggcgcaacgggaggcggctcttccgtgaacaaaccacttgttgtgtctacgtgggatttcggtgtgcctgcgaacaaggcggcgtgggttgttcttgccgccggcggcagatccgttgatgccgtggaagcgggcgtacgagtacccgaagcggacatgaagaatcacactgtcggccgcgcgggctaccccgatcgcgacggccatgtgacgctggatgcgagcatcatggacgagtttggaaattgtggtgccgtggcggcaatggagtttattgcgcatcctatctcggtggcccgtgctgtcatggacaagacaccgcacgtgcttctggtcggtgaaggtgccacccaattccggtggag

SEQ ID NO: 18793 - DNA, 301 bp, Zea mays
  Coding DNA Sequence Number=SeqID_4390
gtggaaggcccatgaacacctatgtggcattgggccttctgtcgtgagctggtcttggaccccccgctggatctcatgggctgggcctctcatgggtggtggagtcgctggccttgtttccgaggttgtgtttatcagccggactcctcgagcagcttcccaccgcgtgctactagaggggggataatgcaaataataaaaaggattgtgtatgatagagtttctcacgaatcttaataaagagtatggttctcgtttcctcgtgtgttcatcgctacatcgctttcgagggctgtgcttg

SEQ ID NO: 18794 - DNA, 417 bp, Zea mays
  Coding DNA Sequence Number=SeqID_4391
atttgcattcattcatatctttctttaattaatttttaaattaaatttatcttaagataaactgtccctacaattatagaaatattttcctgtagatggcgttgactttgtcgtcgtgtttcatcctttttagaaccagtacagatcctttgaggaatcctgaacctgggcttccaatccagacattgtagggtaagatgaatacggtgactcaattgaaggatgttgccaatccatagctttgcagggggcatgcgagctcatgtggtgcaaccttgaaccgggtaaaagtaaaccgccatattgagccgccatattgtggtggtgataatcatgcacagctctgtgatgatgttgactatactgatgataccaggcatcgcctggatggtagtgttccgagtacagatcggcggc

SEQ ID NO: 18795 - DNA, 445 bp, Zea mays
  Coding DNA Sequence Number=SeqID_4392
attgaatccgccacctagcttttttttcagcggcgatacgaagacgaaggagagggagctatctacacaagtgaagcaacaatggtgaagttcttgaagcagaacaaggcagtgatcctcctccaaggccgatacgccgggaagaaggcggtgatcatccgctccttcgacgacggaaaccgtgagcgtccttacggccactgcctcgtcgccggactcaagaagtacccgagcaaggtcatccgcaaggactcggcgaagaagacggccaagaaatctagggttaagtgtttcatcaaggtcgtcaactaccagcatttgatgcctacgcgttacaccctcgacgtggatctcaaggaagtcgcgaccctcgaggctctggcttcaaaggacaagaaggtcgctgctctcaaggaggcgaaggctaagctcgaggaacggttca

SEQ ID NO: 18796 - DNA, 503 bp, Zea mays
  Coding DNA Sequence Number=SeqID_4393
cggcatcatcatgcacggtgatctaccccaaggcgaagccctactacctctttgatggctacgaccacctttcgtcgcgggttgcctgtggtctcgctgggcttgcagctggcatggccatcggcattgtcggtgatgctggagtcagggcaaatgcgcaacagccaaagcttttcgtcggcatgatcctcatcctcattttcgcagaagcgcttgctctctatggtctaattgttggaattatcctttcgtctcgcgctggtcaatcccgggcggattaagtgcaccaccattctgtgattaccgcatcgtttattatgctattctgagaggattggaactctattcccttgtctagtttattcttgttaccatgtattaatgtaacaatctgtagctgatggaaggtgacttccagtcatgttttggttttggtggtgtcgagcagaggttatttatttttgggttaaggtcggagtcggacggatgctcttgggctaagt

SEQ ID NO: 18797 - DNA, 283 bp, Zea mays
  Coding DNA Sequence Number=SeqID_4394
acgcgcggtctactggcgactggcgagcagcgagcagcgagctagccgctagcgagctgactgctgcgagcagcgagctggcgagctgactgctgaggcctgaggcccgaccggcgagtcggcgaccgcgctggcgcctggcgagctgagcaggctgcacctgcaggcgagccgcgagcaggcagagcagagcggtgagccggtgagcactaagcagctattgggcgagcagagcagcgattagcacttagcagagcagcgagcagccggaaaaagatggata

SEQ ID NO: 18798 - DNA, 486 bp, Zea mays
  Coding DNA Sequence Number=SeqID_4395
caaggccggcgcctgcaacaaacggcgggggcggcggggaggagtaggagcccacggccacgacgacgacgcccgcgtacctgcggcaggtgtacccgccggtggtggagccggtggagatgcttttggccaggctgccggccgggcccagcccgaagggccccggtccctagcgtacgtacgtatcgtcgtattggccaagcattagcgaccagatggtggcgtacccccgtcgtacgtatggagcttttgtatagatattgtctctctgctagctgtgatgatagtataaatatgattgtactaaagtgctaattaagagcacgcccttatcccctagatatgattctttcatacctttgtcgtcgtcgtcgtccctagatcgacacgtactgctagctagtagctagtgtatatatatgttagcctgtgtaggcgcaaacgcgttggtgtgtcctttcttttaccctattctttcctctgagg

SEQ ID NO: 18799 - DNA, 336 bp, Zea mays
  Coding DNA Sequence Number=SeqID_4396
acacttctcggcctacattatctctcctcccctctttgaccgctgttgtgatctcttcgctaaaacctaacctaccttagaccgcgacggcttcgccgctcctcggagagatagacttgctcatcacagggtgtgcgatgggcaacaataacaagcgcggctataacgacttctgctactactgcgaccgcaagttcgactgccagaacatcctctgccagcaccagaaggacgagcacttcacgtggcacgtatgacacaagaagctctccaccgtctctggaatggccatacacgtcctccaggtacacaagggagtctgtgaccaaggttcct

SEQ ID NO: 18800 - DNA, 422 bp, Zea mays
  misc_feature (134)..(134): n is a, c, g, or t
  misc_feature (165)..(165): n is a, c, g, or t
  Coding DNA Sequence Number=SeqID_4397
acccaggaaacagttatcaccatgattacttatagcgcgcaattagccctccgtccaaggaacaaaaactaaaggttgagggacgcggacctcttattttttttttttttttttttttttttttttttaggggnctttttttttttttttttttagatgtagatnctcgacgcatggatttgctatggaaaatcccgaaacatgggaacagagggagacgtacgtacaacagcccgccgctgctcacaggcacactactagaccgacgatcgaacgcttcaacacacgacgaggatacaatttggcatcacaaaccgcgcacacccttgttattcatgcatggagccatgggctggtcgcgacgacgatcgacggcgacgccgcggcggccgctgggcgagtgagcgaatcagtggaagtgt

SEQ ID NO: 18801 - DNA, 525 bp, Zea mays
  misc_feature (316)..(316): n is a, c, g, or t
  Coding DNA Sequence Number=SeqID_4398
ttataccaaggccaagcatctgctcgagcaagagggcacaaaaccgatcgccatttctcccggcccggcatccaaccagctatctaccggcgtcggcgagcatccaaaattagatccagagacgcacgccaggtcgacgaaggagccagagccacgcttccgcggaagaggccattgggggagcgcacggccagacacgttcacgtcgccgatccgcatcgctggcaagtccggcggtcaattgggcgccaccagtgcctgactttcacgtggccctgggcccactaccagtgacatacaggttgtcctttactcntgcctcgctcagctcagctccgctcttcctctaaatcctttacgcaattctgcactggagtccaaacgcaacccaggcgctgagcttgactgggttccgacccagattattacaattgttaattgttattaggttggggaattgccaaaaattagggttggttaaaacccggtttaacaaaatttgcggaaaagccctttctttatcgt

SEQ ID NO: 18802 - DNA, 354 bp, Zea mays
  Coding DNA Sequence Number=SeqID_4399
gacgcagccgccttaagccgagcagccgccacgcacccgagcacccctgctccgcgccctacagcgccagtccaccgccaagatagcgatctggccccaaccgcgactctgagcagccccaccgaggaccgcgcaccttgcgcccaggcgcccagccacccgatccaaccacgcccagcctgcgctaggccgccgagcgcccaggacttgagcacacgacccgaccgccccgacttccccgcagccgagccacaaaccgacgcccgagccgaccgttcttctctgctctgcgttattgggaccttcattgcgtccgtttctcccccattactcatgaaccgacgccattgatgg

SEQ ID NO: 18803 - DNA, 367 bp, Zea mays
  Coding DNA Sequence Number=SeqID_4400
tttcatttcaaatcttcggcttgacagaaggtaaaagtcaaagtgtgacgcacgagtgaatacaagtcagcgtgaacagtacggtggtactgttcatctattcataggcacagagcatagcctgtgtaaaattacattcatgcccttcatgttgacaattgacttaaggacaatctatcccggccgggacaaccttttcccctttaagccggtttcattttccaccgctaagccgaagcttctccacacatagcttcagaactgattcatccttcttctgaaccacgcttttcatatcgtgtacagcttcatcccaatctctgaaggttcctatgaatatactacactgggaaaacatgtgagtcgt

SEQ ID NO: 18804 - DNA, 498 bp, Zea mays
  Coding DNA Sequence Number=SeqID_4401
aggcgacaacatcttcttgctctgatccacctctcgtccaacccgctaggccgtcgctgccgagagcgagcagaggcctccctcctccgacgaaggaggaagatgctcacgaagtttgaaactaagagcaactgggtcaagggcttcgccttccactcgtgtcgtcgatggatccagtctagcctccacagcagcgtcattcagatgcgggactaccgcatgggcaccgtcctcaaccgcttcgatgagcacgacgagcccatcaggggcatccacttccatgccacatagtcgctctatgtccgaaggtagtatcgctccccttcctgactggatcgtactcctagcccactagcgtcggtcttgagcccgcacggaggtgacttcttagccgagtcagttgctctacgtctattgcttccctttctcaagttatttctagatacaaattggtctccttgttgatgacaatatgatgacggttatttcttagaaaaa

SEQ ID NO: 18805 - DNA, 482 bp, Zea mays
  Coding DNA Sequence Number=SeqID_4402
ggaacttcacgatccgaaccaacgactcgtcgacccattaccgtcaagatgccttccgaagtttccgacatcaagcagttcatcgagatctgcaggcgcaaggatgccaagtccgcctgcataaagaagaacaagaaggtcaacaacatcaagttcaaggtccgatgctcaaccaacctgtacacccttgtccttaaggacaccgacaaggccgagaagctcaagcagagtctgcctccgggtcttaccatctccgacgttggcaagaagaaccccaagggcaagcgcaccgcataaacggatcgaaaggcatgaggaactgaggacggaagtgtgcaaggacatcaatgcacgatgcgcacgaagcatgaaggcatgggcggacggcgtcacaacggataaaccttgttcaatgacactacggaacccttcacattgggttaccaccaggaatgaaaaatgtcaaactcctccccgaatca

SEQ ID NO: 18806 - DNA, 300 bp, Zea mays
  Coding DNA Sequence Number=SeqID_4403
tgtcctctgtccaaccatatcatgtcgatgctcagcgaaagataaaatcataccatgtcgatgatcacaaaaaaaaaaaaaaaaaaaaaaaaaaaaaaaaaaaaaaaaaactcgagagggggcgccgggtaggggagaaggctaatcgatggtgaagatggaagagatgagagggttagggatagcaaatgggctagcgtaggtgcgaaggcggaaagggtgttaagagggcgaaagagtataggaagaaagggcaggagggcaagcgtaggaagggagaaccgttgtatggcgagtaga

SEQ ID NO: 18807 - DNA, 281 bp, Zea mays
  Coding DNA Sequence Number=SeqID_4404
tcctttcaaccacctatttaccttgaaccctgctgtttatttgcggcaccacctattccctttcagccggttaggttttgcctactttcatcaacaacaactttttccttttaaccaattggccgccctgaaccccgctgtttatttgcagcagcaaatttttctcccttttagccagctagttgcagcaagccgtgcttcttttttgacccagcaacagttgttgcctttttaccagcggtttggggctaaccccgcacccctttttcaattacaccaat

SEQ ID NO: 18808 - DNA, 233 bp, Zea mays
  Coding DNA Sequence Number=SeqID_4405
tggtttaacttatccttagtcttgttgaccatcttccagcacatggtctttgtcccagagctcaatgctaaagactcattggataacattgataatgatataatatagataggtcatgacagatagatccggcagagtcaaccatgcccatgggtgccttacaactgattcaaacggaaagatcctggggctgctcccgagagagattcactcaactactacttgcatttttt

SEQ ID NO: 18809 - DNA, 341 bp, Zea mays
  Coding DNA Sequence Number=SeqID_4406
atcctctcctgtacaccggtatcgggtccgccatcgagtacgccgtgtgcgcgctcaaggtgcaggtccctcgtggtcattggccacagctgctgcggtggcatcagggcgctcctctccctccaggacgacgcacctgacaccttatttttttccgaaaaatggctaaaatacaaaaaattcggccgaagcgatcgagacagcacaactacgtagagtattcatcttccttggatatatcagtaccaagtaatcaacaatttaaagcaaattaagctacgtatagctcaataataagatggctctccttccaaaccaaagggttagtttaggaacatcat

SEQ ID NO: 18810 - DNA, 446 bp, Zea mays
  Coding DNA Sequence Number=SeqID_4407
ggttaaaaatctccactcattcattttgatatctctctctcttttaaatcaaaactccaaaaaagaactatggaacgtaactccctcttaacggttgcattgctctgcattgtcgtcgccggtgtcggtggccagtctcctgcctcctctccaactagctctcccgccgctccttctgctccaactacttcccctgccaaccctcccgccgacaccagttcccgagagctctccaccgtctccttcacccaaggcttccgctccggtgagctctccaccggctccaacaccagaagcagttactcctcctgctccagtagccgctccagccgctgatgtaccggctccggctccaaaaaaagcataagaagtccaagaagcatcaagcaccggccccggctcctgaacttgacagtccacctgcaccaccgacagaagcttcccgg

SEQ ID NO: 18811 - DNA, 245 bp, Zea mays
  misc_feature (40)..(40): n is a, c, g, or t
  misc_feature (55)..(55): n is a, c, g, or t
  misc_feature (107)..(107): n is a, c, g, or t
  misc_feature (145)..(145): n is a, c, g, or t
  misc_feature (151)..(151): n is a, c, g, or t
  misc_feature (153)..(153): n is a, c, g, or t
  misc_feature (159)..(159): n is a, c, g, or t
  misc_feature (163)..(164): n is a, c, g, or t
  misc_feature (166)..(166): n is a, c, g, or t
  misc_feature (173)..(174): n is a, c, g, or t
  misc_feature (177)..(177): n is a, c, g, or t
  misc_feature (188)..(188): n is a, c, g, or t
  misc_feature (197)..(197): n is a, c, g, or t
  misc_feature (209)..(209): n is a, c, g, or t
  misc_feature (215)..(215): n is a, c, g, or t
  misc_feature (218)..(218): n is a, c, g, or t
  Coding DNA Sequence Number=SeqID_4408
tctaaatttggcgtaaagtcctctttagctaccgaagcangaacaaactgttccnaatgcagagcgctgaagagacgattgtagtgccgaaggtgcctacagtcganccaaccttatctaaagatgataatgcctaacagctacngtcggncnaaacantgannangccagannttntgagcccttcnacggaggcnaaactgacgaangtacanatngcttctgccgcgactcccaagaggaga

SEQ ID NO: 18812 - DNA, 308 bp, Zea mays
  Coding DNA Sequence Number=SeqID_4409
taaaatctttttgtctttcaaacagacactcaataaataaataaatgacaaattaagcttacaggaagagtatatatgtatatgtatatgaatctaattgtggtattgtgcgccgccattgtcttgtcactcatggttccttgaacataactttgtccgtaggatgaatcagagaacgaatacgagtcggtagaaaagaacacggttctacattaaacaaccttgcaatccaagctggtctcgttatatataccattgggatgctcgattgacgccgggtactgagtgcgagctgaccatgcctttga

SEQ ID NO: 18813 - DNA, 450 bp, Zea mays
  Coding DNA Sequence Number=SeqID_4410
ggtggttcttgacacacggatagatcagctatcacaatcgatcgaccacaaaatcgagtctgtgtatcccacgaacaacaacgacggttccggaattagccagctaattaattaaagttcactagtatatcttgcctccggcggtgccgccgccgctcgccgatgtggggtacgacctcgccgccgccgccgccgctcctgcgggggagtggggtggggaggagcagtagcggaggggaagggaggcggcggtcaaagctggtcacgtttctctggatcactcaaaacctcataggcttgtgcgagctccttgaacttctcggggtcaccgcccttgtcggggtggttcttgatagcagccttgcggtaggccttcttgagatcgtcctgggacgccgacttgggcaccccgaggatctcgtagtacttggtgttgtcgctcttcttcgg

SEQ ID NO: 18814 - DNA, 441 bp, Zea mays
  Coding DNA Sequence Number=SeqID_4411
ttttttattaaaggagcaccatcctttattatcaagtattcggtgtcgacaaaacagaagacggcatgagtggacagagttttttccgaccatccatttcttgagggggggccattgcaggcccttgggtgtcttatgagggagggctcggtttatttcagttggctttgcagaatactgataactagaaaaagtagtaggacctcaccttcgtgtattatgatgatgcacatacaattttctgagtagaatggatgttgaatcatagaactaatgaataatatgaacactcgccttcgccccaaaaaaatatgaaaacgggaccctgattgagaacatgataaaagaaggaaaagatgtcgctcggcaagtgactatgaagctagttcacgaagccatgattgcaaagtaaaaatgacttatttctggatcgccggaatt

SEQ ID NO: 18815 - DNA, 459 bp, Zea mays
  Coding DNA Sequence Number=SeqID_4412
aagttgcagcggatgcacctagtgaaccatctatgtggcatggcacacttgggtatctttgggcaaccttgatccttgtcgtcgactgaatggcactaatatttccagcagcgtgtccttggatgtcataaagactccttttcttttggcaaatcactatattctggttttgctctacatgcatctgctgcaaatagctccttttatgatggcttatctaaaggaataccatcatattctttttgtattgataaccggggtttaggagaaacacacatggtccctgattcatcagtgtataaagcttcgataaggctaccttggttggaaccgaatcgtcctggcatgcagactagagatgatcatttcagtagcaagcggcgagatttaagcatcaatgactctttgaagagcaattcttctttgcaaggggatagcatttcaaactctgatactgga

SEQ ID NO: 18816 - DNA, 170 bp, Zea mays
  Coding DNA Sequence Number=SeqID_4413
cagcagcatcagactctgaaggagagtgcagacggtgttttgatgttttgtgaacaaccctaacttatgtggtcctggcaccacaaaaccttgtcctgatgctcctcccttttctccacctcctccatacaaccctacaaccccgatgcaatcaccaggaagtagctctt

SEQ ID NO: 18817 - DNA, 274 bp, Zea mays
  Coding DNA Sequence Number=SeqID_4414
agctagctctaatctcccacctgtgttccattagctattatttgatcgatcttccaattgcatcctttctgcagggaggaagtgtacctcctgcttttaattctcggatgtcagcacttcctcatgaaccagctggcttctacaatgatcgtggtgcttcagtggacatacctcttgattcaacgaaggacctaagtaaaaaggagaaagaactgcaggcaaaggaagctgagctaaacaaacgggaaagggtaattcaggatcccttccagca

SEQ ID NO: 18818 - DNA, 580 bp, Zea mays
  misc_feature (357)..(357): n is a, c, g, or t
  Coding DNA Sequence Number=SeqID_4415
ctcgtcgtcggcgattcaggtgtggggaaatcttcattggcacgtctcattcttcatggttctgcgattgctcgaccgacccaaacaattggatgtacagttgatgtaaaacatattacttacggaagcccagggagttcatctaatagcgtcgtcggtgatgctgaaaggaacttctttgttgagctttggaatgtttcagggcacgatcgctacagagattgccgttcacttttttattcacaaattaatggtgtcatatttgtttatgacctatctcagaggaagacaaagacaaatttgagcaagtgggcagttgaggttgctgagtctgggaccttttcagctcctcttggngtctggtggtcccggtggccttccagttccttacctagttattgccaacaaagtggatattgctccaagagatggtagaagagtgagcagtggtaatcttgttgatgttgctcgtcaatgggttgaaaaacaaggtctgcttccatccagtgaagtgcttccacttgcagataactttcctggcaattctggtttgctcacggtaaagcttctctatagtcta

SEQ ID NO: 18819 - DNA, 458 bp, Zea mays
  Coding DNA Sequence Number=SeqID_4416
ccggcgcatacaagacggtggtgcagtggggcgacacggcggacacggccgggtcctggggcaggcccatgggcacgttcggctccgccacgttcgccgtcaactccatgttcttcgtggccaagaacatcaccttcaagcagaacacggcccctgtgccgcggcccggcgctctgggcaagcagggggtggcgctgcggatatcggcggacaacgcggcgttcgtggggtgcaacttcctgggcgcgcaggacacgctgtacgaccacctcggccgccactactaccgcgactgctacatcgagggctccgtcgacttcatcttcggcaacgcgctctccctctacgaggcgtgtaggttgtataggacacaggcactgttaaacccgggagcacccgcccattctgggactgggacaagacgccattccgcggcggcgggttcactgcatcacgtc

SEQ ID NO: 18820 - DNA, 165 bp, Zea mays
  Coding DNA Sequence Number=SeqID_4417
gtacgtacgtgtgcgcgcctgcgcggtaacaaaaaagctgtcaacaacctgtcttttttggcagggtaaaatcatgccaaatggcacaagagatagtacactggaacttcttctgggtgataatggatgggttgcccattatgaaaatggcatctgctattcact

SEQ ID NO: 18821 - DNA, 207 bp, Zea mays
  Coding DNA Sequence Number=SeqID_4418
gtctcttttattttgtcgtgcaccatgtataaaataaaactaaactaggttaaccttgatttgcgaataacgttttctgtttctaaaaaaaaaaaaaaaaaagcggctagtgccctctctgttattatggcctagttgcaaacaaagtgacagaaacattcattccgtggtgaatcatgaagaatgagcgccgactgctttctttac

SEQ ID NO: 18822 - DNA, 474 bp, Zea mays
  Coding DNA Sequence Number=SeqID_4419
tcactctcttttttctccggacacgctcgttcgttcgtgaaggcgccccttcctgccctcacatccgctcctccctccccggcaccgaccgaccccctcgtccgctcggctccctccccgatccccgccgccatggccgccgccgccgccgcgtcctcctcttcctcctccgaggttccgatcgccgcccgcacctgcgtctccgtcggcgaggtggcggtgggagcggtggctacaagcagcggcgaccgggtggcggcggattgcggggtgtgcgccatctgcctcgacaggatagcgctccaggagacggccctcgtcaagggttgcgaccacgcctactggttcgctgatatcccttaccccctacccctttctccagatgattacagcataacgtactttgatgcgcggtggaattacgattctttgtctaggttgttggttattccccacctccaatagcaatttaat

SEQ ID NO: 18823 - DNA, 424 bp, Zea mays
  Coding DNA Sequence Number=SeqID_4420
gaggttgagagcagcatatgaaaaataaagagagagagagaggatcgagtgacgatggagggtatggggcacctgctgctgttcgccttcctcttctggttctccaccttcatggtcgccccggtgatgaccgacgtcaccatggcggctctctgccccggccgcgacgagtgctccctcgccatctacctcaccgggctccagcaggcggtaacatatataagctacctacctggctcatagctagcgccgacgtctcttcatccttctcctccctggtagctgctttccccaaattcactgcgtcgtctgcatgcttgctcactgctgcgtcgtcgtgcgtgcccgtgcatgcatgcgcctatttttggtttggtttggtttccttcctcttcaataatggctttaataactagtgcactag

SEQ ID NO: 18824 - DNA, 403 bp, Zea mays
  Coding DNA Sequence Number=SeqID_4421
gtgccttctattttaaagaggtcctgactttcgatagtttaatcgcagcacggttgcatgtaacgcttaattgcacgtcagcttttgcctttggattagaattcctaatccttttcttttaaatagagttcgcatgtttacaataccaagcacttctacagcaaccacatgtaacttgaaaaagaagtattcttgcaatattgctgctccaaaatatcgattgtttctgggacctaggggacatcaggaacaagaaatggctattcccgcttgtcctcctcagcctcatcttctaagccgaaagcactgccgacaccagcattttctgtccttgtcaatttttaccatccctacttcaccatctcctttcgtcagagattgagattcctcatcgcaaagatat

SEQ ID NO: 18825 - DNA, 45 bp, Zea mays
  Coding DNA Sequence Number=SeqID_4422
taatgcgtggttttctggcctacgtggtgttctggttttgtgggt

SEQ ID NO: 18826 - DNA, 550 bp, Zea mays
  Coding DNA Sequence Number=SeqID_4423
attacaaatcaccaaatccgagcggtagctctcctaattaacgagacgtaagcacgacgggttgatctgtcttgtcccataccctttctaccactcaacaactgggccacccaccttagcgacccactccataccactacccaggcaacggatcctcttaagcccgccattgcttccctccgtcaagcggggttaacatcctctctctcccaccatctcaaaacgagacgccccccgacgggttgatccttccccaggctggcgtagttgggagttaattaccgcacggacaccctcttccaagatggacggggcggtaaggtggcgggcttacccccaccctcccaacccgtcaaaacggggggggggggggttccccctcagggggggggcccaattgccaagcggccccttgccgggggctgtggctttttcgctgaaacaggaaggccatggcgaggcgccccttgtccgccaggtgcagccgctccttttggcccccaggcaggtcccccggtcccggcgttgcttttcgccacggtgggcggtt

SEQ ID NO: 18827 - DNA, 565 bp, Zea mays
  Coding DNA Sequence Number=SeqID_4424
gcttctcgtatttcccgttgagagagggacaggtggggagaacggataacccaaccgagacgctgcaagttccccacggccggggcgggcttctcttgcgggaacatgaggaagctgctgttcatctccttcatcctctcgctgtccgctgcagcagttcacggtgaagacggcgcgtacattggcgtgaacattggcacggccatgtcgtcggtgccagcgccgacgcagatcaccacgctgctccggtcgcagaacatccgccacgtgcgcctctacgacgcggacccggcgatgctggcggcgctgtccaacaccggcatccgcgtcatcgtgtccgtgcccaacgagcagctgctggccatcggcaactcgaacgcgacggcggccaactgggtggcgcgcaacgtggccgcgcacttccccgccgtgaacatcacggccatcgccgtggggtccgaggtgctctcggcgcagccgagcgcggcgccgctgctcatgcccgccatgcgctacctccagaacgcgctggtggccgcggcgctggaccggtacatcaaggtct

SEQ ID NO: 18828 - DNA, 306 bp, Zea mays
  Coding DNA Sequence Number=SeqID_4425
gcgactcgtccgtttcttttttctgacagcaatgaaatcccattcttatgttaattacagtcttacgtcagggaggagaaagcagagggacccatccacagcagaagcagatggaagcactggagcagcaccaggcaagagatcgcattcacctcgcatggcgccaaccacagcgaaacaagagaggagagggggccacaacaactcactagactaccggacaggaaagaaccaaagctgctgcattcaagtgccaggtgccaaccgggacacggtggacgcatgctggtcctgggctcgagagct

SEQ ID NO: 18829 - DNA, 521 bp, Zea mays
  Coding DNA Sequence Number=SeqID_4426
ctggcatgaagcgaatctaccttttcatacgacttaccatcccacacataggtctgtctacatgtcactatctcccgatccaattgaaaacataccacagagtgcggtgtacacacaagctgtaaagaggggctgctactgctattagatagcgaagcgaaggaagtccaatgctatctagtaattgttctacctacctacctactattggatttgaaccaatgactcccgccgtatgaaagcaatactctaaccactgagttaagtagagcaatttatcaccacaaaagaagccccattacttcgatcgattatagattgaatacttttaataaagcagtaccgatccattattggtatgtttatgttatatagtaaacggatcaaagggatatcctctggcattagagaatattcatcttgacaagaaattatctatatgttaagatatctctgacaagggctatagctcagttcggtagagcaactcgtttacacgtgcgccaatgcttttcaaggga

SEQ ID NO: 18830 - DNA, 344 bp, Zea mays
  Coding DNA Sequence Number=SeqID_4427
cgcgcgtgggccttcttcttttcttcgtcctccctccgcgccgcgccggcgcctaccgcggtggcgctgcctgcggccaaggcgggcatcttgggccgtaccgccagcaggatgagcaggctgcgcgcgcaggccacctaccccgtgaagctgatcgcgccggagggggaggtggagctgcaggtgcccgacgacgtgcacatcctggaccagggcgaggaggacgacatcgacctgccctactcctgccgcgcggcgtcctgctcatcctgcgacaactctgtcgacagcatgatccagtgattgcttgatgagaagatccgtcctgaaaataagcacaacca

SEQ ID NO: 18831 - DNA, 479 bp, Zea mays
  Coding DNA Sequence Number=SeqID_4428
gcgtcaagtctaggtgcaaaaaagcgggaaacaaagcgaagttggggcggcgagacgcgagacgcgagacgcgagaaatggcggagccgcctttggccgccggctgcacgacaaactggaggagggaggcggatgagcggctgcggcgcctccactccctcctcttcggcgccgacgccgcactcgagcacggggacgccacggcggcgcaggcgctcgcgctccgcctcctcggtttcctcgactctcaggcgctagccgcaggtgctctcccccccgccccttccccccctattcgcccggttggtgcggacggccaccgctggggccagatagcccccccccgccggtcccggtttgcccccccgccgctccatacccccccagacgccgccaccacgcctgtccccccccgcccccccccccaaaaatagaaatataccgaccccccgccgccggccgccctttttgagccgacg

SEQ ID NO: 18832 - DNA, 465 bp, Zea mays
  Coding DNA Sequence Number=SeqID_4429
gttctggcaaagacactttcgattttgtaaaaccagttccaagctggaaaggtcatgaatccagctgaaagggcaggaacccgattgattgcttcgatggttatcaatcgatcactttaacgccagtaaaacatgggttcctgattgccaggggatttttatctggctagtcgatcctagtttcgtttgaagcatcccaattttgactagtgcgcccattgttttgccgcaatcagcttaaacagcttggttccatttatgtatctccccaaagtcatgtattcccgctcatcagtaaaggtgaaagtctcaaatgtatgctaatatgctatagcatgatattaaagcgttctgggttgtttattattagagtgaaacctgtagtcgctgagcttgtctcccattcttaagttatggagctggtttgcgggcaccaatcagacacacccatttcaaggttttctt

SEQ ID NO: 18833 - DNA, 266 bp, Zea mays
  misc_feature (70)..(71): n is a, c, g, or t
  Coding DNA Sequence Number=SeqID_4430
cggaaagactctgcccgcagcctcaccctgcactgcagccagcgacggcgcgagtccttgcgtgcgtctnncaccgtcccaccctcacgcgaagctctaatcaaacctctctcgtctttctccggccgggaaaagatccagacggcagcggcaccgcgccatctatttttgtggggtacctgcacggctgcacgcctgcacgcaggcatgacagacgatggtgccgaaagaggcgccatggctgcctaactcgtcgcagtcgttca

SEQ ID NO: 18834 - DNA, 365 bp, Zea mays
  Coding DNA Sequence Number=SeqID_4431
ggaaacctgtagacagccctgggataggagctacagctgtggttctccgtgactacgtgagagggatattggaggacggaactgcgtcggactgcttcgatcgaagcctgagggggtttgtcgaagctgagctggttcaagtgctccaactgggcctggtgtgcccttccaacaccccgtcaagccgacctagcatggcagaagtggtacagttcttggagtccgttagggttagctcttgaccttctgctggcgggacatagcagcagaatttggatgtttacagggaaaggatttttttatttttccacaaatgaaggtccccttctctttttttttaaaatttgggtctttactgtggcgca

SEQ ID NO: 18835 - DNA, 132 bp, Zea mays
  Coding DNA Sequence Number=SeqID_4432
ggaactatatattggattcctaattaatctggcattttctaagctaattgttttttttcccaatataccgtcgatggaactcccaaatgtatgtcacgccaaatgtgtgttttcatccgatggatgggatat

SEQ ID NO: 18836 - DNA, 555 bp, Zea mays
  Coding DNA Sequence Number=SeqID_4433
cagtctgtatttttaccaagcccagaggaactgaataagatgttaaaggacatggatgatgttgacatgctaacacttgttattcaagagatgagcaaggcatttcctagtttgatggacacacttctacatgagcgagatatgtatatgtcttcaacgttgttgaagtcggccagggaatattcttcagtggttgcagttgtgggaaaggggcatgtttctggaataaagaaaaattggcaacagccaattcaggtaaactgcttattagaattacctgatgctaaccaaggtccttcaaagctgaagattttggcatccattggagcattaaccggagtaataatagcatccggaatatatgtatggggtagaaagtaacagacgtgagtgcaatgtgttcaatgagcctttaaatctcgaaaaaaagtatttagtttatttacctataatctgtttcatttgttctaaatataaatagatgtaatttctgaaattgaaattaaacaaatgaaaggacaggtgcagcagataatgaaacatgtttttccccta

SEQ ID NO: 18837 - DNA, 596 bp, Zea mays
  misc_feature (285)..(285): n is a, c, g, or t
  Coding DNA Sequence Number=SeqID_4434
ttcggtttcatgaacgccattcagcaaggcagcaccatgtatgatgcaatggacctgttaaagaacgaacgtgatcgcttcaaaaaagttgtccagcatgcaagccatatggcagcagcagtgcagctgttcaatgatgtttacagtcgtattcacagtgctattcagaatgtcaacccctcagcagaaattgacctgttcaaggaggcttttgcccatgtttgaagtataacgcacaatggccagatggcatcggctgtggagtccggttctgtgacgcaacanatgcagatggaatgcctattgaagagatgaatgaagactatctctgtgccaaactacacttagtagatcttggctggatcagaacgggctaagagaactggttcagatggcctgcgcttcaaggaaggtgttcacatcaaccgaggacttctcgctctcggcaatgtcataagtgctcttggagatgagaaaaaaagaaaagaaggtgctcacgttccttatcgggacagcaagctcacccgtcttttgcaggactccctaggtggaaatagtaagactgtcatgataggtaatttatcttcacctgactt

SEQ ID NO: 18838 - DNA, 288 bp, Zea mays
  Coding DNA Sequence Number=SeqID_4435
ctggcgcatgtcccggtcgcagttcggatctccgtggcgccgcgtctttttctctgccccgcaatccatggcacccggttggagcttcttcctgcccggcgcgcgcccgcctccctgctctccgcgtcgcgccgagctgcctgctctggtgtccggctgagcttctccccgagcccggctctgccccaggtggccgcttgctccaatcgcacgcccctggtccaagctctgcgcgcgcggtcctctgccccctgcgcgcagccggtttctctgttcgccgcgaagtcc

SEQ ID NO: 18839 - DNA, 190 bp, Zea mays
  Coding DNA Sequence Number=SeqID_4436
aacaagttccctgctggatacctgcttcggtcactggcggacacctcgtccagccctggtggcgaatacagcaaggcacccagcgttagtgaagctagaagtttggaaagggatcaagtagagagcgacctaacatttgctggctttgcggtcttcaactgccctataaggggtgactctggtgctgttt

SEQ ID NO: 18840 - DNA, 98 bp, Zea mays
  Coding DNA Sequence Number=SeqID_4437
caggttcattttgctctctcgtagttacgactaggttttcttggacatcatccatactactaaaacgatcaggagacggcagtccatacttcaaaaaa

SEQ ID NO: 18841 - DNA, 359 bp, Zea mays
  Coding DNA Sequence Number=SeqID_4438
tcgtgacagagatcgtcctgcgcgacgtggtagaatcgagcaggtcctgtcgacgctgggggagaagatgaagcgggacgtggacgtcggcctagttgccgacttcaggaggtttagccgggagaaggcagcagcgttcagggccacgccgacgctgggcgtggaggcatcggacagagacgaagcctctgagtctgaatcctagcgtggtgtgtgtgtggtcagtggactgcagcttcccttggtctgtgcacagagagtagtgaacatgatacatttacatctggtttatgccgcgaacagatctgagaccagaacacccggaaacacggtggagtccggtccattgtggaggtaaa

SEQ ID NO: 18842 - DNA, 203 bp, Zea mays
  Coding DNA Sequence Number=SeqID_4439
tcacacccactgttgctgccactggcagctgcgggtactgcgggtacgcgctgaacctgagctcctcggcgcgggacacagagggcatcgagaccaagtaccgcaagcagatcaggaagggcgtcatcgccttcgtcgcggtcgacgagagccggttcacgctggcccacgagctcacctgcacgctacttctgctccgcctg

SEQ ID NO: 18843 - DNA, 498 bp, Zea mays
  Coding DNA Sequence Number=SeqID_4440
ctatctggcttgacaacgttttggcggaccgtgaaagagatcgttcccatttcattactatcagaaaaaggcactgtaaattaatttattttccggtttcttgttctttcctgcttttcttctctgggaggaagttgtagttgtagctgctgcaacgtgtttatatagaacgattttttcggcatcagtataaaatcaggttccttaaggcccgtataagcataatgcaaaaaaaaaaaaaaaaaaaaaaaaaaaaaaaaaaaaaaaaaaaaaaaaaaaaaaaaaaaaaagggaggacgataaaaaaaaaataagagtacataacacaaaaaaaaaagaaaaaaaaattttcaatggggggacatgaaataaacttcgttggccgccagattaacaccgttggactgaaaaaaccctgggttaacccacctaatagccctggggccctatcccattttcgtaaccaacagaaagaccgaataggtctccactgagccc

SEQ ID NO: 18844 - DNA, 318 bp, Zea mays
  Coding DNA Sequence Number=SeqID_4441
gatgactttgtttggcacgcgtttggctatcgggggtctcgtgaaggaagcgccatgggggcagccagtgcccagcgatccgcctgaatccacttatgtcgacccaaccattttgattgcacgtacagtgcgccttcacggcaagaacgcccaaggtaaagaagacagcagcaagtagccccccctctctcccgaagccgctgaaaagttccgccaagtcaaaactgaagtagaccctgttacaactttaatccttgtaactcattccaaagatttatttatccttgtaactttcaatcctacagcacccagtttttt

SEQ ID NO: 18845 - DNA, 392 bp, Zea mays
  Coding DNA Sequence Number=SeqID_4442
gggagcctatgatgagttgcagacttatttgcctacattgtttgagtaaaagagtgatagcatctgcaaagttctgaggctattcttttaaatcatactggaagactcatatttggttccaactataatgtgccatttcttttatttagtgtggatcttcaaggtccgttgctccaatcaaagctggattcgttgctcaagtcggtcgtcggaaggcatgagcatctatatgtggatgggtgttggggtcaataccaactcaacaatagttgattatttgttgactagagattctgcggcgcaatgttgagcaagatatatcaacgatgccctttgtctgcattcaaaggattcatctattgatgtcacaagcctatgaaaactggcgagtg

SEQ ID NO: 18846 - DNA, 537 bp, Zea mays
  Coding DNA Sequence Number=SeqID_4443
gggaactgttaaaaccagctagcaaagcattgccactaaatctcaaaaggaagcggcgtggtaaggagtttgttgtgtaagcctagatgtacttgagaaggcagattgctcagttgacaaagacgagctcggagagaagccgcagagcatttcgcgttgcgaagaggcatctctgagaatgagaggctgaaggcagagctgaaccacacactgtcctccatagacatgtacaaggagtacaagaagcacaaaaaacatgaaagttaagtcgaaaggaataaaacagctttagggctttaagtcgtcttatctattctggagatctttgcactcctctggtggatgggtgtaattttcagtttttatcatattacccaatggcttctatagtgcagtttttttgccatccgtgtaccgtttgtacacatggtacttcattgaaagaattgtttgatacaatctcatgagcttgagtcatgcaaatatgattgttggcattaacaatggtataaacatgtcgttatagttgatattctt

SEQ ID NO: 18847 - DNA, 475 bp, Zea mays
  Coding DNA Sequence Number=SeqID_4444
ctcggcttccagagatctctagcctccacgagcggcgcccgaccctttgattccactggcgggtcccctcggcatccactggtggtgcccgggtttctaggtgacagtcttagttgaggaacacacttgtacttccagtgctagaaggaagaccacgagtgctactagctctcgggcagcatcaaaggctggctacttctctgcacaggttgaggacatcacaaacactcacaacagacatgtagtgaagtcatatttgcatgagtgtacatgcctcgagtggcagcacaccggcaaaccttgcccacatgcattggccttgattataacacaggagagtgtggatgtggaattggaggattttgtgcatgagtactactcagtacagaggttcaaaaatgcatacaagagaataattgagccactgccagataggtctcaatggccacaagtggacccgccctatgtggttggt

SEQ ID NO: 18848 - DNA, 133 bp, Zea mays
  Coding DNA Sequence Number=SeqID_4445
ccccaggctgcgtcatggtgatgatcatactagtccaatgcaaaatccagggtttatttagtaccaccaaagcctgtgttactggcccttaattaataattaataaatgcgctgctgctatagccaggcttcc

SEQ ID NO: 18849 - DNA, 428 bp, Zea mays
  Coding DNA Sequence Number=SeqID_4446
gtagagcaaccatgatgacctccgccttcctgcgacatattttttctattatggcgccaaataaaaataaactgctcgccgttgtacaacaacgtgactactaaaacaaccctgtcaccacacatattaatcttgttgcacatcatccttttttcagctggtgtcataataaagaggagggcaccaatggtcgttcttaacaacagctgagcatgcttgatgaatgatgcgacccgtgctgcagcgcatcattaaccgcggctgttgtggttactcccagcatgaccactactatagtcagcagcctactagcggctgcttctgttgttttccttcccttctttgtcacgacggtcggcttttttccttaagatgttaataatgggctgcttcctggagggcgacttagtagtgctctacagctcctc

SEQ ID NO: 18850 - DNA, 504 bp, Zea mays
  Coding DNA Sequence Number=SeqID_4447
taactgtgcctagttttgctttggcactccattgttcatcgacttccgtgttctgagcaacatatcctggaactgtgtaggacaaggcaatcaaaattaacaagccagaccagggttcccaggccccagctgcccagcgatctgcatgctgcggttcataagcagacgcccgatagccataatcattggttattcgaccctatttatttcccgcttggctttcataggaagaatttgaggaagccccttatgatatactgctgatgcggttggactcttgtttgcttcccctcttcgaagcaagcccctcgttgctggtgacccagctattgcccttctggacatccgttggaacaacctctttcctccctacagtttacagtgtgtgatgggcgaattccatgccgttgggtttgccttatcgatccatgcatggattaacggatcgcccctgtgtggattgttgtgttttttttttcccatggtgctgttcccttagattga

SEQ ID NO: 18851 - DNA, 528 bp, Zea mays
  Coding DNA Sequence Number=SeqID_4448
gtttaccctaaacaactcttgataggaatcacaaatactcgatgataaatacaagttaaggattatttttgggctccaagctgcagctaccctccccatccccattctgattccaagaaaagcaccggtggccatgaggaggaagggcattgccaactggcacgctaagaagctagctaagcagcacagggtggaccttgccaaggttactagcaccgggacgtatgatcgaattacgccgacaggtattgaggggccaaagctctcaaaaccatgaaaaggcaaagaaggtgctccttatagtaaagccacattatggatttggtgagaagggtagaccaacagttggagaggaaggtgttgtgatgagcatcatcttgttctacatcatcactaatgaactggttgaacttttggttgctttggtgaatggaggcgacggcatgcagattgccatgtccggatgttatgcgggacctatgtttaatacacttgctggtttgggtacgttgttgctagattgatctg

SEQ ID NO: 18852 - DNA, 497 bp, Zea mays
  Coding DNA Sequence Number=SeqID_4449
ttttactgaaatgatgctgggaagagcaaaaaaacagaagtacagacgcagcaaagaagattacaattattctctagcgggctcctcgtgaggtctcctccccatcgccacgcccacgcgccgcacaccgcccgcccgctcgccccgcctccgatcccaaatcaatcggcctgaccctagcccgccgccggccgcccacgcccgcccgcctcggctcgtctcaaatcgggcgcccgaggggagcgaggcctcgatcgcggcggaccccgatgccccgcattccggcccctccggcgacgtcggcggcagcggaggcatgatccggtggggactcggcggacctgccagccatggacgccaccgcacgcccggccatcgtcatcgacaacggcacagggtaaccccgatccctccccctctcttcctcagcatttcgctggcgccactactgctttatcgccgcgcgatccccccgtatgctcggtggttctcgccgg

SEQ ID NO: 18853 - DNA, 534 bp, Zea mays
  Coding DNA Sequence Number=SeqID_4450
ggccatatccatgcttttctttttagtatgcgtacacaagggacatacacaaagcatggggctttaaacgcgccagcataggggccttttttttttttttttttcgttttttttttttttttttttttttttttttttttttttttttttttgaaaaaacatggggcaatgattatttctaggcattacaaacttgttcatacacgttcaatcgccaatgagccataatggatgggacccttacgggcttgcaagcagccaatcacatacgctggtccaaccaacctacccctaaatgaaaaaaaaaagctgcaagcatgggccattggtccaccacaaccacgataggggcagctgaattattgcggggttcagtcgaggaaattattcctatggcaggcaggaggcggggagatttcggatctcatgggctcatggccctgtcctttttcccacaggggtggacaggagcaacagcatcagtctactacatgggtggtgctccaccgttggacggccaggtcaccgcaatgg

SEQ ID NO: 18854 - DNA, 581 bp, Zea mays
  Coding DNA Sequence Number=SeqID_4451
ctcgggaagcgggagtgcatcaatggggatcagcggggctagctgcgagcacttcctggggcagctgagctcgagcgacagcgccagcgcaccgcaccagctgatgcagcgggagtgggactgcggcaccggcagcaggcgcgggtcgcggcgctggtccagtaagaagggcagggcgcggggacaccgccgcggcggcgggttctgcaggacggaggaggccgcgcggaagcgggtggtggtggtggtggaccagagctccggcgccaagcacgccatgatgtgggcgctcacccacgtcgccaacaggggcgacttcctcaccctgctccacgtcctgccgccgcacagcgggagcggcggcggcggccgcggtgctggggaggaggacgcctccgcgctcgccaactccctcggcgcgctttgcaaggcctgcaagcctgaggtgcgtgtgcgtgtactcactccttcactcgtgcgcagcttgtttcttctccaacgtgttccagaacaccacagcacgcctctgtccacagtaacgcatttttttgtttccgaacctgaactgaagaggcagatgt

SEQ ID NO: 18855 - DNA, 144 bp, Zea mays
  Coding DNA Sequence Number=SeqID_4452
gcctgcagcagtttattgcgccgggcagatacacggtgggcgctagggaggctgggcagcttggcttgctccggtgggccgcaccttgaccctcgtaggccggggccaggggcttggttgtctccaggtcaaagcggttcgtgc

SEQ ID NO: 18856 - DNA, 557 bp, Zea mays
  Coding DNA Sequence Number=SeqID_4453
gaaacctcctggtgatctcctctcgccctattaataccatgctgacgagccaatagcagaagcatcacacactaatcaacaagcaggaccagctagctagctcctctcactgctatcacccgcccagccatctcgctgaaagagaaaagcgcagccatgaagactactagctcgggcattgcagtcgtcctactggtggccatgctggcagtccattccgcgttggccgacatctcgtgctccgacgtgctcaacgacctgtcgccgtgcctgcccttcctgcagggcaaggcagccaaacccagcgagagcaacaaccagtgctgcgacggcgtgagggccctgtacgcggcggcggacaccaggcccgacaggcaggccacgtgccggtgcctcaaggcggcctacgttcaggtccacgctgtgctctccgcggcgcaggagctgcccggcgactgcggcctctcgctgtcctacaacatcaccccccgacatcgactgcgaaccggaatcgaatggacggaatactcgctgccgttaaccacaatcccactaca

SEQ ID NO: 18857 - DNA, 161 bp, Zea mays
  Coding DNA Sequence Number=SeqID_4454
caagggccaaattttccagcccacacgagctccacactccaattttttccggcgcaaagggttagggtttgctgtcggcgatgtctgatcggcagccgtctgaggaaccggaggagcaggtggacctggagggctgagtctctcacctgctggcggaggcg

SEQ ID NO: 18858 - DNA, 467 bp, Zea mays
  Coding DNA Sequence Number=SeqID_4455
aaggtgcatccttgaacgaggtaaattggtatttctccacaaaaatgcaagatccacacatccaacactgacaggtctaatagcttaggttccaaaagtacatgagtagcatgctctgctactgataaagaagcttgggtagttcaacccggcgttgccatgtatccaatcagacctcctagccggtcaaacctgggggaagagattgcttcaacttgtttcccttctacagcatcgaatgacgcgagagctgtgtactaagtacattggagccagtcgcatccttgaaacttgtacaacatcgcttagctccgtctgtgatcttctacatgagcgtggcatgccgttcctcactcagcggctgacggagggagagtcgctgtaatcgtcactagcatctgtcttcgtgcatcttgctcgctgggacactgggaactccgccgtagctctgtcttcgtagcggcgag

SEQ ID NO: 18859 - DNA, 187 bp, Zea mays
  Coding DNA Sequence Number=SeqID_4456
gcccgctgtactcgacctttttaagttagatgcttcttcaagaagtgtttcattgccatttacttctttggttgtagttgactgggttttgacctatttttcaggcctaaacattattttttgtcagaacagtatcatgtaatcatgttcttcttatcttttggaaagctttggaataattattttg

SEQ ID NO: 18860 - DNA, 293 bp, Zea mays
  Coding DNA Sequence Number=SeqID_4457
catttgcacaatggctagattaccaagattgggtaaagagaaacccacaacgcaagaagtatgacaaacaagttgttaatgtgcgcgctagtcgtgctggcaacaaacgaagagaggtggcactgacagctgactgtatggttaagagggtgggatgtactacgaacgtttcaggcagccatgcatcgcctatgtatgagaggcatttacggacgtatttgaaggcttacctcttgactgcattggcttgagtaagaaatattattgcctgcatggagggattatcgccatcc

SEQ ID NO: 18861 - DNA, 296 bp, Zea mays
  Coding DNA Sequence Number=SeqID_4458
taaaggacaactcatggcggctgttgggaggctcttccaagaagatgttaacaagctctaccacttgaactctgcctacgccctttctcatggaagttttgaggcatttgcacttcggttcagtatggttgccaggaccaggagaaggatttggtccagcaagccattccgtgctcggtggctgaatttccctgtggctgatcatctcccgggatggaaagttttgctaattcatctagctggaagagctactcttgttaaatcagtgctgacagccatcccggtgattgttggcc

SEQ ID NO: 18862 - DNA, 71 bp, Zea mays
  Coding DNA Sequence Number=SeqID_4459
tgctgagagcaaggtttgtttatttacacataaacacctcagatggtacttcagaaattgtccctgccact

SEQ ID NO: 18863 - DNA, 521 bp, Zea mays
  Coding DNA Sequence Number=SeqID_4460
aatggagagaaaaacaacagcctttctgttggatgttctgaagccaaacttgccagagcatgcttttcttcaaaccaaggttttggagatcaacttagtcgcttacccaaatgttgcagatgccattcttgcgaatggcatgttcagtcattatgaccgtcctcgtattgctcagctctgtgaaaaggctggattatacttgcgtgccctccagcattattcagagttgcctgatatcaagcgtgtcattgtaaatactcatgccattgagccccaggcacttgttgagttctttggcaccctttcaagggagtgggcactagagtgcatgaaggaccttctactggtaaatctgaggggaaatcttcagattgttgtgcaggctgcgaaagaatattctgagcagctaggggttgacgcgtgcatcaaattatttgagcaattcaaatcttatgagggcccgacagcaacgtttactttttcttgggatcctatctgagctccagcgaggacccagatat

SEQ ID NO: 18864 - DNA, 225 bp, Zea mays
  Coding DNA Sequence Number=SeqID_4461
aatggatgtgtgtgtccgccgcccctgtagacttcctctaaaaattgtgcgcccgttcttctgctttcctgtgctcggcaacgccccggttcgcctcgacgccgccagccgtggtcccatccacctctgcgcaagtaacagcaagaagctgattgtgtggtagaggattcgaatacgttcgaggacgaccccgcagatactttttgacaagagggtgatgccgga

SEQ ID NO: 18865 - DNA, 306 bp, Zea mays
  Coding DNA Sequence Number=SeqID_4462
aatgcatgcgtgctgcactcctgctccacctacattcgtacacagcacactcccaaaaccagagccacgccggtcggcacaccgtcgcctgctttgactagcctcgccgccgcagcgacagccatggccaccgctgcccactccctccacctccctggtccgacgccttctaaatcctctacccccttctcccaccgcctccctgtcccttgccacctccgcccgcaacgccggcgcctggccgactcgtcctccgacctcacctgcttccccgaaccgactaccgtcccgaacggcgtctacgtg

SEQ ID NO: 18866 - DNA, 520 bp, Zea mays
  Coding DNA Sequence Number=SeqID_4463
gggcacgtcggcacgtctacgagctcacgcttcttaggctgtccgcagcgcatgccgcgctcttccccctccccttgcactgttatctgatttctcctgacttggggatcccttcgcttttctccaacctccaggctttggtggatggaatggtcggccaactgaagtcgcagggtgcttccatcccggaggtggcttcatctcttgagcgttggaatccggtgttgcttcggggtcgtgtatctgagttggaggcaactaatgctgggatgactcggcagatcacagttcttgaagaaaaacattcccaagatcaagctgaaatggctcgacgatgcgctgacttcgaggagaagtattctcagagtcagatcgagttgagtcaggtctctgcggctttggatgatgccaacgctctgagttcttctcttcatgctcagcttgactctgagaaggaagaaaaacgcatccttgctgcttctcgcgacaacctggacagattgtaccgagattccagcaa

SEQ ID NO: 18867 - DNA, 324 bp, Zea mays
  Coding DNA Sequence Number=SeqID_4464
gcgatctagtacctctcctgctctgcctcctcctgcttgccggcgccgccgacgccgcgccgctgctcgtaggcgtttttcccaaaggcacttcagcttgtccagaaggcaagttttactgcagaaatatcggagatacccctcgattgttgttctctgcgtttgcgaatgacaaaatttgcgattggggtgatggaagtgaggagggcgaatgtggtttccattgccagaacacctgtcgaagtgtaatggatactgctgaggctgatggcggtggtggcgacctcgcagttacacaggtagagtctgctgatgattttatga

SEQ ID NO: 18868 - DNA, 574 bp, Zea mays
  Coding DNA Sequence Number=SeqID_4465
agtcctatggtgtcttctatgccgcacacctaggagcagtttgtgccctcttcttcaagctttggttgtctagccatcccctgctcccttcgttctcctgcgctcggcctcctttcagctgcgacgccggccaccgtctaagctcgccaagcatccaccgctgctcggccagggcgccgttccccttcgcactcgtcgtgggcgctgcctgtcgtgcccctctgctacctccacgcccaagctccactccatggctgcacctcccctccatggcttcttccagctggagctcgccgtcgtccctggtgaatgcccgagctcctctccatcgtctctagctcgccatggtacagcgccactgtcgaatccggtctccagcacgccatggcgtttgtcgaagctcgccggtgaagtctgtcgctatcctctggtcctagctcgccctgcactcgtccatggctgctgtcacaccgagctccctccacctgccatccctctgctcaggccatcgagccgctccagactgtgctcctagtcttcttcctcgccgggctggatcttccccaatcctctg

SEQ ID NO: 18869 - DNA, 312 bp, Zea mays
  Coding DNA Sequence Number=SeqID_4466
ccgtctgcgagcaagacggcgctggcgcccgaggaggtggtggcgcggatgcccgtggcgcccggcgaccccgccgccgcggcggtcatggcgcaccgcatgctccgtctgtatcgctactacgacgatttacggtgccagatggaggaccgaaacggacggtacgagcgccgatactctgccgcgcccgtatgcaagtggctcacccccaactaggcacggcgtgtccatgggcgctctagcgctcatgaaccacgacaaggtcctgatggagagctggtactatatcatggacgccggtgcttgacggac

SEQ ID NO: 18870 - DNA, 428 bp, Zea mays
  Coding DNA Sequence Number=SeqID_4467
aacactattgtcgtgaacgcgaagaagaagtggaagtgactgaagaaaagacatcaccacctttggaatctcaggcagagacttggctctacttcgacatctgcgagtccgagcctgactcacctactaacaaagagaacgatctggttgaggagcccgaggagctcgcaggagaagcccctgagcagcagtcggttggtggaggttgtcaacattgcaaccactgctcaggagaagatgaagccgtggaaggagacttccaggagttccaagattacgacgagctctaggcgtgggttagcggcaacccccagtcggctgcctgtgaaggccgcggctatctacgtttcttttccgcactttgatttattgtaagaactatatggacgtctcagacgtatgatgtaaccgattatctcccttttaat

SEQ ID NO: 18871 - DNA, 367 bp, Zea mays
  Coding DNA Sequence Number=SeqID_4468
ccggaagtctcctcgtctgtcgtttcactcgtctgtcgtctccacctcgccccccacctccgaccccaagcgacccaagccagggttgcaccccacccccgcccccgcccctctatccaatccgatggagggcggcgactcgtccggcgccggcgccggcggcgccgtggccgcggcggccaagtggcggagcgacgcgtcgcgggcgttccagtactacctggacctcgacgcctcacgctacggggcggtggctcggcacgttcgccgccgcgaacatctacgcgctgcgggtctacatggtgcagggcttctacatcgtcacctacgggctcgggatctaccttctcaatcttctcatggtttt

SEQ ID NO: 18872 - DNA, 215 bp, Zea mays
  Coding DNA Sequence Number=SeqID_4469
aacaactgcccagcgcggcgcgacgccaagtgcgtcgcccgcttcctcggccgcttctccttccagccgctgcgacagaacccgctcctcgggccctcctccgccacgtgagtataatatccggtgctgtctatatatgtgattagatcagatcacatctcatgccctgtacttttgattgatcgtgtctgtctctgcaggctcaccaagatggg

SEQ ID NO: 18873 - DNA, 206 bp, Zea mays
  Coding DNA Sequence Number=SeqID_4470
tgcatgcctgccagagtggtcatcctcaccaaaggtgacaataattttggggatgaccgactattatatgcacatggccagctttggctccagcaacaccacattatggggcgtgcggtgggctaccttccatatgttggctgggttacaattatcatgactgagaaaccatttattaaggtatgctcattcttgtctaaatattg

SEQ ID NO: 18874 - DNA, 397 bp, Zea mays
  Coding DNA Sequence Number=SeqID_4471
atccactctggcaaggtacccatgatgtccaatatcaagcttagcatatgttcttctttcccctgatggctcgagtgggatcaatgtactctgcggtgctgttcatcggggtcatgaattgtacctcagttcagccagtggtggccgtggagcggacagtcttttaccgtcaaagagctgccggcatgtactcagctttcccatatgcatttggccaggttgtcattgagctcccatacgcactggctcaggatatcttatacgctgtcatagtgtactccatgatcgggttcgagtggacggttgctaagttcttctggtacctcttctttgggtacttcacgctgctctacttcacattctatggaatgatgaccgtcgggctgacgcctaacta

SEQ ID NO: 18875 - DNA, 374 bp, Zea mays
  Coding DNA Sequence Number=SeqID_4472
tgttccagtgccactacagctacaacgcttgcgggctcggctctgacggcacagacaggctagtgaatctagttcaagaaatccggccaggaagagctcgcgcgccggagggcccagcctgttcggcgcgaagatcaccggcggtgggtccggcggctcggtctgcgtgatggggaagaactgcctgaaaagcagcgaggagatactcgagatccagaagaggtacaaagcggcgactgggtacctcccgactgttttcgacggctcgtctcccggcgccggcaagtttgggtacctgaagattcgacgccggtccacgtcgccgtctgattgaagaagaagaagaagaaggaagatctctacgcccaagatgc

SEQ ID NO: 18876 - DNA, 451 bp, Zea mays
  Coding DNA Sequence Number=SeqID_4473
cgcctcctacataatgctcggaattcggctcgagggaaggaggggtgttcaatggcgttgcggaatggtggtggtggtggtggagcctgtcccgcggcggttgtgctggtggctgcggccgtcgcggcgctgctgggcgccaggggtggccggcggcgagcgaccaagttcgaccacgtggtgcagcccagctgggccaacgaccacgtggtgtacgacggcgacctcctcaagctccgcctcgactccagctccggcggagggttcgtgtcaaggaccaagttcctgtacggcaaggccagcgccgacctcaagctctgtgccgggggactaccgccggcgtcgtcactgggtgtctatctgacagccggtcgcggggacatgcaccaccagttcgacttcgcagttcactgggcaagcgatcacaacggaccagcatcatccgttccta

SEQ ID NO: 18877 - DNA, 317 bp, Zea mays
  Coding DNA Sequence Number=SeqID_4474
aaaactcccatctcgcggcggaaagagaaagagagagagaggagaggtgcgagctggtgagatggatcggttggaggagcggaacattaagaagggggagagggagatggaggaggcgcgcaaggaagaggagcggaaggaggaggcgggggacaggaatacccaggagccgcagcaaggtcaaggcctcagcctctcactcgccaacggcagcgacagcggcaggtctgcaatgttgccgagtgagaggctgaggcctagccttgcgcttgctgatataacttgccagcattcagttagtggtttgccagtttgtg

SEQ ID NO: 18878 - DNA, 551 bp, Zea mays
  Coding DNA Sequence Number=SeqID_4475
atttctctcttacacacaccttagtgaaacttttgtttccatgttagcgcagtttgctcctgtcgttgtggagatggatggatcataagctaatgaagccagattccatgcagagaagtcagcagttgttcagcgtttctaccttttggtcggtacattatgccatgcacagtagtactagagaactgatgttttacgctgatcttgctgttagaatcttacgctgtctacttattatgatctaggtacagtggtgcgctgacttgtatgaagttttactgcttgtgctgacattgaatatacgtgctaattatcgactgggtttccacttgactggttaaagaggtaaataattaagcctcgcttggttagggcatgttattgcatctttatggaaaatgcctaaaactaagggctagttgggaaattccattttcccaagttatttttattttcccgttttcccttaggaaaaacagttcccaaaatagccctatagaggagggactttcaaccatctttttacttggcatcgaacatacccggaggaa

SEQ ID NO: 18879 - DNA, 455 bp, Zea mays
  Coding DNA Sequence Number=SeqID_4476
aaaccagcgccgaatattcgctttggtcgtcttctcatctgccccaccgtccgggcttgaccaggatttctctcggtttgcggtacttttattgccccaggtcgatgtgaagcgggcactctcgcgggaggagcagcaggcctccaaggccgcgaaccctagcggtggaaggaactcggggggcggaggaggcggcggtggcggcagcgatgcaagtggtgctcggacgaagaagatctttgtgggcgggctgccctctactctgactgaggatgggttccggcagtacttcgagacctttggcatagttactgacgtagttgtcatgtatgaccagaacacacagcgcccacgtggtttcgggttcatcacctttgattcggaggacgcggttgaccgcgtgctgcagggtcccaggagcatccacacctctagtcgcgcgcagatgctacaac

SEQ ID NO: 18880 - DNA, 366 bp, Zea mays
  Coding DNA Sequence Number=SeqID_4477
acccgtccgttggagcaccataaggtgccccagcaccatctggcagagcagttggttaacccccgggaggagggccggcccctgttccggcctaagggggaaagactacttcaggactgccctttctttccgtggccggttcaaccaactcgttcgcttaaaagccaagggtttggggccggacttggggctttacggcctaaaggcgaccaccagggtcttaaagggcggcttaaacccgacgccggtgttccagggcagcaggggccctttcgccaggtccttgctgttccagttttacttttgcgcgggggggaacggaccgttaatggactgccccgggccgaagaagtccacctgttccag

SEQ ID NO: 18881 - DNA, 123 bp, Zea mays
  Coding DNA Sequence Number=SeqID_4478
taatctcagatgtttctcctaatcgaagcgatgaaaaacaagagaggtgcagtccagtatctgatcttgagtcatcctgcataagagttggcaggccggacggtataagggatgcgatcatac

SEQ ID NO: 18882 - DNA, 473 bp, Zea mays
  Coding DNA Sequence Number=SeqID_4479
aactctttttcatcattcatattagttagagtaattataacatttgcttttcacttattcattcacttgaacacaacaaaaatctataacttaaataaattatatgctagatctatctcatattatataataatataaaatggtagaaaaagtattagcataactcggaaacgaaaaatacgaaaacgatcgaaaaactagctaaatcgttttcgtaccgtttctaatcggttcccgaacaattcgaaaatgatagagaaaaaacagtattcgaaacgggacggtacgggaatttcccatcccgttttcatccctgcagtcctctattgattctccatccaataccaaacatgggctcgagtgcaacggcagagcgacgcttaagggcagcagtggcaagccactatatcaaaccctttctcataaaaaataaatttaatatcgaagtaagcatatagcttacatatcagata

SEQ ID NO: 18883 - DNA, 74 bp, Zea mays
  Coding DNA Sequence Number=SeqID_4480
agagaccagaagttgggttcaaaatagagagctaggccggatcccgaaaggctcctctggtctggatcaccgga

SEQ ID NO: 18884 - DNA, 388 bp, Zea mays
  Coding DNA Sequence Number=SeqID_4481
gttcactccccaaatcccagactctcaccgcttccctcgtctcctcagtcctcccccgccatggtcacggacaagtccaacctcccacagcagcagcagcctcctccctccgcttcctcagcaccctcctcgctcaagtccctcaacaaggcctcctacaagatctccaagcagtcgtcttccgcctctcccgctcccgttcccgcctccaccatgcgagcgccttccccgccgccgccggctccccgcccacctcctcctctcccgcagccgccgcaggcctcctccgtccctgccgaccacccgcctccccagccccccgtgtacaacatcgacaagtccgacttccgcgacgtcgtgcagaagctcacaggctcgccgtcccacc

SEQ ID NO: 18885 - DNA, 488 bp, Zea mays
  Coding DNA Sequence Number=SeqID_4482
gacgcgtgggaggaatcccttttatcggatgaagacgaagctagcagcgtgatattccccaagcgctcgataaattgcctgaatcggaaaatcgctaccggtctcgtggattcatgttggctgtgtaaacggtacgttgattaaccacaagatgcggagaacttgagtcaagtcgaccccaagcgtggactactccgcatggtgaagctgatggaccaacctgaagatggttaaatcaagcgaatgttcggttgagggatactcgtcaagcggacgtcatctaacaaacactaacatagtgtttattccaggtcatagttttgtgctgctgattatggtgttaagtgccggtgggcacggccttcttataagtctaagtaacccttctatacttcttaatgagaatggtcccttgagctagcatatatttcaaacttatacttttgcaatcgcgccaatattataatgataaaattttgtaccctgta

SEQ ID NO: 18886 - DNA, 275 bp, Zea mays
  Coding DNA Sequence Number=SeqID_4483
gatgtgtttcggatgaggcctatagccccagtagatttatacagatcaatacgtgattcacaacttattggcctgtcaggatacacaaaggagttttcaataggaaagttaatatgccgaatgaagatcgcactgaagaggttaaagtgttaacttatattgattgtcaaacttccacggaatgatgtcctactaacagcaacatgggttattaataaggtctgtagtttcaaagtatgatatggcatcataattgtttggctatcagcactaag

SEQ ID NO: 18887 - DNA, 599 bp, Zea mays
  Coding DNA Sequence Number=SeqID_4484
ggagcgccgctgtttcttccccaatccatggacagacaacttcatcgccttatagccgtgtggtcacgaggatctgaagaatcaccctggtaactggaatctcaagtgccaggagaagaacaggtgattcaggaggagccacgtatcgaggagtatgatctgatctaggtggcgtttctcagttgacattggcgccgacgatccttagttcattttatatttattcttttattttgtaataagtcttccgctatgtattaaatactctgatgatttatgacatttatctctatacactctgttattatatatgttgtcttctttggcgcatgtatgagatgcacccggctttgtcctttaaaaccgggtgtgacaccctgcgcctcaagaaccgcaatccccagaggcagaaagagatactggaggccaagcgccagcgcgtgtccgcactagccaaagtgcggcagatgatacgcgtcgaagagcagaaggtcccaggacttcgagcaggagatcgcgctgatgcagcgcgaaggccacctcggcctccagcacgggccacccctgcagcagcgcgcacaactcgaagacacgcgcga

SEQ ID NO: 18888 - DNA, 432 bp, Zea mays
  Coding DNA Sequence Number=SeqID_4485
atttcactctcctaagtcgctggtcgccggccggactcggatatgaccggaccaccgggtcatttccccttaacacacagcgatggcctcgcttcacagttgtcccgatctgcgccgccccccgtggagatcgtgaagaacaactatggggacatcaagggttcggaacccctccctccccttccttgtccgcgagtgctccggtggccagccccagctctgggcgcgctaccatatggctgcggagagatgcgtgaacttggatggtactgacggaagcacaaattgataaaaagatgtaagagcttgccaaagccgccgagtctcttaaaaccaaatagttttgcaactctatcctgccatgtttaacgttcccaaataaatgatgccatatgtgtgagcaattgttactctatcggtatctgcatttgt

SEQ ID NO: 18889 - DNA, 216 bp, Zea mays
  Coding DNA Sequence Number=SeqID_4486
ctttgggacgccagtactggtgccacaggagcatctgcgcagcagccgcgccgagcgatttccgactggctcttcgagtgtaaaggaggaagagaataagaagtccagggctgagaggtttgggcttgcctcgccctcttcttcagatgaggaagctaagaaaaaggcccggttggaacgatttggtcagagcgcaatgtcgacaaggtcgaaaaa

SEQ ID NO: 18890 - DNA, 465 bp, Zea mays
  Coding DNA Sequence Number=SeqID_4487
aaatgacaacactgacgacttatatgatcagccatctttcaccgacagaggcacattatcatccacaaaagaaataagggcaagacatatggttcctggtgctttaattattacggggggggggagtggagagctcaaggccaggaggggggtagagggagccgaggcgtagcgaaagttgggggccgtcggagagtcggcattggggatctaacccgcgcgccggggcggagcggaagaaggccgagggcggcggccggcggccaacgctcgtccaggaggaccagcagcacgcgcccgcggggccccgcgtcgcggcccttcacagcctcgagcgcgagaggggacgagaaggcagcggcgaggggggggatgtggcgccacgtcgccatagttgggcggatctcggggcgcgggggtgtggcggggcagccagcagcgacggaggcagcaacgcgggatgta

SEQ ID NO: 18891 - DNA, 528 bp, Zea mays
  Coding DNA Sequence Number=SeqID_4488
atgttcccctcgtaatatcagatggaggagactctgagcagttcctagatgaggagcgtcagggaccacctttgggaggacagcaatctcaaccctctgctggtgatgggaaccaggatgatggccctcagcagggaccaccccaacaaggaggccagcagcaacaaggtccaccacctcctcagggaaagccacaaggaccaccccaacagggaggccatccccctcctcctcaaggaaggccacaaggaccaccccaacagggaggccatccctgtcctcctcgaggaaggccacaaggaccaccccaacagggaggccatcagcaaggtcctcccccacctcctcctggaaagccccagggaccaccctccccaaggggggccgccccacaaggacctccacagggggcagtcctccctcagtaatctaggattcacatgacgaagtgaaataagaagaaaaacagttgtttccaatggccgttgaaacatgggatgcatggctctaaacttcagtataccaaaa

SEQ ID NO: 18892 - DNA, 299 bp, Zea mays
  Coding DNA Sequence Number=SeqID_4489
agcgagattttactcgttgccatctcaaatcctaggttactccagatattgcctatacccaaccaagcctggcaagtggtctagctgaacttcattgaagggttgccccgatccggtacaactaactgtatccttgtggtggttgatacgttcagtaagtatgcccatttcatcggcttgcttcatccattcactgccgttaaagtgcctcaagacttcatggcaaacgtatacaaacttcgtggacctcacgctctggtatcagatagagaccgtatcttcaccagccatatttggca

SEQ ID NO: 18893 - DNA, 294 bp, Zea mays
  Coding DNA Sequence Number=SeqID_4490
cacccctagggtcagagctctggtagcccgctgatcgatcctcacgtcctcctcttaaaagatttggatggtagatccctgaattgagatgcggctcgagagcaacttaatgtagggcacctccattggcagagtgctgtcgatgctatcactgctcctgaaccttcttactgctaattattcaggtgcgggcatctcgaattacagcatgctcatggacgtaatacttccatctggaataaggcctcgaccacggaggctgtgcggtccattggtccctcgagatcacttgca

SEQ ID NO: 18894 - DNA, 146 bp, Zea mays
  misc_feature (61)..(61): n is a, c, g, or t
  misc_feature (107)..(107): n is a, c, g, or t
  misc_feature (112)..(112): n is a, c, g, or t
  Coding DNA Sequence Number=SeqID_4491
aaggaggaggacaccacaaggaaggccgaggagccaccacaaggaagggaggagggggagnaccacaagaaagggacggcgggaggccacaagggaaggcttccgtnggagnaagatcaaggacaagaatcaccggcgagaccggg

SEQ ID NO: 18895 - DNA, 515 bp, Zea mays
  Coding DNA Sequence Number=SeqID_4492
actgaatcaggccagatatctcccactgcagacactagaaccatctatgggaacttcctccgcgaacaacatcccaagggcatacacacacggcccacacatttatttcatggaccactagtgaaatcggatttgcctcatagcatacaggtgacatggcaattccgttaaagacctcagatctcagattcgctcgatataatacttgaaccctcctggtcaactttggctccaaggacttacctgatgatcatagttcaacatgagggtacacttgtgctaccagacaagctaagagctgcgttctgctacatgaccttgcgtatcaccctgtctacctgaggcaaatccttctcaccttgtgccaatgaatcaagatgtagctgtttgctgatgcacttttagtacgacttcacgttgcaagtccatatgagccctccatgctgccagtgtcgaaacctgccctgccccggtcggagtggaacctgtagcttcaagatgaggacctggtccca

SEQ ID NO: 18896 - DNA, 430 bp, Zea mays
  misc_feature (228)..(228): n is a, c, g, or t
  Coding DNA Sequence Number=SeqID_4493
acctccacctaaacagcgtagcaagaggtgccgcgcggaggtctcccggctgcgcgcgaatgcttgccgcgaacatcgccggaagggaccgacatgtcgggaatcggagcgcggatcacgggtacgctctacggccgcgccgaacccgcaggaacggcggcgtcgtgcactggtccgcgtcgcacgtgcggctgcacgcctgctgcttgctcgcgtcgtcgccggcgnactggacgccgacgttgagcgcggcggcgggcggcgagaagagggacgcgcagacaagggtgccggcgaccaccgtgagccgccaggaactgccgcgctccatcgtcctcacgggagctctagaacgaattagtctctctctcccaccgcgcgccggcacgcactagctctctctggtctagtctggtctgtcgtgacggca

SEQ ID NO: 18897 - DNA, 81 bp, Zea mays
  Coding DNA Sequence Number=SeqID_4494
actgttgtgctagaggtggtggtgacggtggtgacacttgaaacatgttccataaaggtcactgatacaaagagaatggtg

SEQ ID NO: 18898 - DNA, 549 bp, Zea mays
  Coding DNA Sequence Number=SeqID_4495
accgcctgtcctggagaggtttcgagcgatatacatcctatcctatcagatctagctctcgcccgcgtctcgattgggcgcgcagctcttccattgcgtcgcccagctcatccatggagtactccagcttgttggcaagagcgaggagcgccttcttgcgctcttcgcccccgcacaaggcgatcacacggccgaggtcaatgcacaggaaggcggcctttagccggatgtccctcccaacaaggtcccacgagccctcgtcgtccgtgtccaggtccgcctccatcgccgagaagagctcgacagcgcagcctgatccggcagagacaccccttctgctcgaggcctttagccggaggtccctcccaacaaggtcccacgagctgctctcgtcggccgtgtccaggtcctcctccatcgccgagaagagctcgacagcgcagctcctgatccggcaaagacaccccttctgctccatctcgtgctccaccatcgcccgctctgtgtacgcgagggagatcaaggcctgtggcaagtagttatgggata

SEQ ID NO: 18899 - DNA, 263 bp, Zea mays
  misc_feature (180)..(180): n is a, c, g, or t
  Coding DNA Sequence Number=SeqID_4496
gacccactagcccaaaaccgtagcgcccgccgccgtcgttgcgagctccccatcttcctccgtcaaccatggcgacccagatcagaaagaagaagaagttcgtcagcggacggcgtgttctacgccgagctcaatgagatgctgacgcgggaggctcgcggaggacggctactccggggngtgggaggtgcgcgtcacaccgaggcggcacggagatcatcatccgcgccacgcgcaacgcagaacgtgttcgggcgagaagg

SEQ ID NO: 18900 - DNA, 392 bp, Zea mays
  misc_feature (88)..(88): n is a, c, g, or t
  Coding DNA Sequence Number=SeqID_4497
aataatgctagcgatttgctatgttttcttctcgagaaattgggtatttcattgcactgggagtcaaaaaaaaaaaaaaaaagcttanccgattcccctcctattcctctgagttgagagtgcattttatctaagaaactacttccagctcctccttactattactattatgttagaaattgtttgttgtaagataagagatatgttagggcttcttcagtttcctctcaatctatatggattgtaggggattaggtgggattaaatccatagcaagttaaaatccttcatattttttttcaatctcttccaattcataagacatagaaataaccgaggaatgccttattgtttttgcacgagaatttgggtatttatttgtcctttgagga

SEQ ID NO: 18901 - DNA, 510 bp, Zea mays
  Coding DNA Sequence Number=SeqID_4498
gtacctgtatcacccgatgatctttcaaacaacacacgtgctatctatgcggcatactgaggaacaaaatgtccgggtactgcaactgcatgaactcaagctactggtgatatgcctgcgacgtcagcaaaaactttctcctcactctcaatgacaacgattacctccattcaaccatatggctacactgaatcactgctgcttatgttgaagcaaccacagctacgtagcatgaaatctaactatgtactgcatcactctcatcagcaccgatttcctgcattgtatgcaattctaccgctacgtgaactccctctgacttgatctccactcttgaataatattaccctttgcgaaagtatctacaaccactatcgcttgctgctagacatatatgcgattgcgtccgttctatccgcacccggtgtctaagcacggaacgaccgttctactcgaacagcagctgtgctctgttcaactcgtgtagacatactcgactaccttatacgg

SEQ ID NO: 18902 - DNA, 585 bp, Zea mays
  Coding DNA Sequence Number=SeqID_4499
tcgccacttgacacacctctggtggccctcaagacccccacaatctccctccaacgcccccccggctaacaaaaatcccgccgacgtctcccttattctaacccactatatcatcttttgtctccccccggaaaacaacccccactatcggctctcccgtctccttcatcccagcacatactcccggcctctccccatgtctatccaccgcccaacagttgtatctaccaacaatatctcccacctcgcctcgaaacacaacccccgtccttccttaccacgcgtctggcagcgtaaccttaaaagatatctttctccacgccatcaaaaacattcttacgttaaccctcactccgcgggagcgtgctatcgccgcgaaccacatcacacccccctcttcaatacaacgcctcttcctccttccttcacatcagctctgtcaaaacttgagataagtctctttttctatacatcatcacccacaacactctcttggtttctctccctataaccgccacccgcccatccctatctcttctatcctctgttccgctcgaccccaaaccaacctaatacataacgcac

SEQ ID NO: 18903 - DNA, 527 bp, Zea mays
  Coding DNA Sequence Number=SeqID_4500
tgcgccacggcatccagctgctgaacagaacagcgggtggcagtggcaaggcatcgatcggcggcatgctttcgtcgggcctctacctcaacgacctcgttgcccgctcaggcgccatcgacgtgtccgtttactaccgcctcgcgtcggagcacaagctgcccgctgcgtacgacgacgcgtgggcagcgctgcggtgggcggtgacgctcggcgaggacctgtggctgctggagcacgccgacctgtccggcgtgttcctggtgggctgcagcgccggcgccaacatcgtgcacgacacggcccgtgcgagcctccgccgccggcgtggccatccgcgggctcgccttagtgcccccgtacttcactggtagggaggccatgggcggcgagacggtgttcggccccgagatccggtcgtccatggaccggacttggcgagacgacgttcgtggacgacgcggcgcgcaaggcctccgcgcgtgctggcaaccagagtaccgcggactgtgtcgttggcctttcgc

SEQ ID NO: 18904 - DNA, 273 bp, Zea mays
  misc_feature (26)..(26): n is a, c, g, or t
  misc_feature (59)..(59): n is a, c, g, or t
  misc_feature (69)..(69): n is a, c, g, or t
  misc_feature (86)..(86): n is a, c, g, or t
  misc_feature (115)..(115): n is a, c, g, or t
  misc_feature (162)..(162): n is a, c, g, or t
  misc_feature (165)..(165): n is a, c, g, or t
  Coding DNA Sequence Number=SeqID_4501
agggaagaaatcaaaccctctcaagntctcaatctcatatctcctcccctcaccctcgnccctgaccanaaccccaacatctctcncctgcgtatgcacattgcaactaacatanaccaccctcctcggcccaaacctcctcaattgatccaagaaatccgnatngcaccctttcctcggcggatctagtaccacaactgtctcatcggcaggatactctactgatttgaagagatcacctgcgtcgggggcgatgaaggtgcaacgctcggg

SEQ ID NO: 18905 - DNA, 166 bp, Zea mays
  Coding DNA Sequence Number=SeqID_4502
aacagctcgtccagtagtaccatttgcaattgcattgcctcacctcatccccacctcacctctcctctcctctcctcgggctcacttcacaagttcacatcacgaaacaggagcgtcataaagacatgggcgtcgcagggtagcctcagaccagtgacgcagcggc

SEQ ID NO: 18906 - DNA, 381 bp, Zea mays
  Coding DNA Sequence Number=SeqID_4503
ggacgcgaaggaagacgccgctcacgatcgggaaggtcttcagccggctcttcacccagatcgacatcctgatcctcatgcacatcctcaacgccggccacaaaaccaccattctatacaagctcatgctcggcacatcgtcaccaccatccccaccatcatcttcaatgttgaaactgatgattacactaacattagcttcactgtctgcgacgctgactgtcatgacaagatcaaacctatgagcaggcattacttgcagaacacccagcgtctcatccattgtgtgaacagcaatgaccgcaaccgtgaccgtgaacccagagatgaactccacaagatgctgcacgaggatcagctacatgatgctctgctgcttgc

SEQ ID NO: 18907 - DNA, 375 bp, Zea mays
  Coding DNA Sequence Number=SeqID_4504
ttttttaacaacaaatccctgcatttaaattttaaatccggcacgaaacggacatgaccgggagccctttacacagatgaacatgaaccccaggagcgaccatggatcgataatggggggggcagttgacaggatcttatttaaaccctgctattaattatatttatacccctcgggggcgtcgtccttttaacttttgggccccattcccgggccgggcgggccggtttaattgcagttgcaacaggagcacccccagttggggccccaattgcaggtgttgcaatcccaacccccccccttgggggcccccttaaaacccccggcgctggccttgggggtcggcccaaggaggaccatggtttttattctgtt

SEQ ID NO: 18908 - DNA, 570 bp, Zea mays
  Coding DNA Sequence Number=SeqID_4505
gtcctactccaaaaagcaccttgaggggcaacccgggtgcgcggtcggacccgaaacaccgacaattcccacgacacgatcatctttggagatgagaaccaagacaagataaaggggttaggtaagatagcgattactacagagcattcaatttctaatgtctttttggtggaatcgcttggttacaatttacatttcgttagccagttatgtcacatgttctataatcgtttatttacaaatgttgatgtaactatttttagaagaagtgatggttcattggcttttaaaggtgtattagatgaaaagctttatttggttgattttaacaaaaagaatgtcgatctaggtgcatgtttaattgctaagactaacatgggctggttgtggcatcgtcatctaacacatgttgcgatgaagaactttcataagcttctaaagggagaacatgtgttaggactaactgatgtctgttttgagatagacagaccttgtgcagcatgccagacatgaaagtaggtgggaacaagtcatccaagcaagaacattaagactagaatcacaaacctg

SEQ ID NO: 18909 - DNA, 453 bp, Zea mays
  misc_feature (76)..(76): n is a, c, g, or t
  misc_feature (85)..(85): n is a, c, g, or t
  misc_feature (89)..(89): n is a, c, g, or t
  misc_feature (91)..(91): n is a, c, g, or t
  misc_feature (150)..(150): n is a, c, g, or t
  misc_feature (179)..(179): n is a, c, g, or t
  misc_feature (228)..(228): n is a, c, g, or t
  misc_feature (250)..(250): n is a, c, g, or t
  misc_feature (265)..(265): n is a, c, g, or t
  misc_feature (273)..(273): n is a, c, g, or t
  misc_feature (276)..(277): n is a, c, g, or t
  misc_feature (286)..(286): n is a, c, g, or t
  misc_feature (291)..(291): n is a, c, g, or t
  misc_feature (301)..(301): n is a, c, g, or t
  misc_feature (315)..(315): n is a, c, g, or t
  misc_feature (347)..(348): n is a, c, g, or t
  misc_feature (359)..(361): n is a, c, g, or t
  misc_feature (364)..(364): n is a, c, g, or t
  misc_feature (377)..(377): n is a, c, g, or t
  misc_feature (380)..(380): n is a, c, g, or t
  misc_feature (388)..(388): n is a, c, g, or t
  misc_feature (394)..(394): n is a, c, g, or t
  misc_feature (399)..(399): n is a, c, g, or t
  misc_feature (420)..(420): n is a, c, g, or t
  misc_feature (423)..(423): n is a, c, g, or t
  Coding DNA Sequence Number=SeqID_4506
tatctctcttgtccgtgcgcatcggattttggaaaccattgatgcagacctcaatccatctctaacaccactgatntatctactnaggncntctctaacaatacttgtaattttgtttctttttgcttcttccgtcactatatctatggncgctgagtcttctaaccctcgcaccgtcnaagagatcttcaaggattttagcggccgccgctccggttttctttgagntctctccgaaaatgttgacaanttctactctttatgngatcccgnaannggagaatcngtggntggacggganacccgaatgggacntggcgaagtgaatcttaccagactggaggaanngccctccggannnatnccctgaagctcanccncctttggnaaatcncatcnccccttataacatggttatgncanccgttaaaagattgggcctcctctctctaa

SEQ ID NO: 18910 - DNA, 506 bp, Zea mays
  Coding DNA Sequence Number=SeqID_4507
tgcttctactcacgctcgtgcatacccgcaggcgtgctgcgctgtttcaagttccgtttcgggatcaagggactgtggggaggcatgattgggggtaccctcatccaaacacttgctttgatctggatcacgttaaggactgactggaacaaggaggtcgaggaagcgcggaaaagattggataagtgggacgacacaaggcagcctcttctcgcaagcaaggagtgatggatgatggtacaggagtggatgaagaagattcagtaggcttctgctagctgatccagtctgaaatcatcttgtagtcgccaccgctaactgcaattcagggatgtactgttagaacactcacaggttgttgcgtaccttcgaccggagcgggtgtgcggagattctccgtaacaggccggtgtatagcggcaaagtgatagcgatttggtccgggcgccttccctgacgccgaggcttccagatgagcggaagcaggcatcccctcttcgatcgaa

SEQ ID NO: 18911 - DNA, 135 bp, Zea mays
  Coding DNA Sequence Number=SeqID_4508
gggcgttgttgcttgttagaatatcgtaatatccttccattttgtttcctgtgtcatgacggttctattacctctttaatgggccacagaccggtctgtcatcgctaatattagatcgatgacagatagttccag

SEQ ID NO: 18912 - DNA, 310 bp, Zea mays
  misc_feature (139)..(139): n is a, c, g, or t
  Coding DNA Sequence Number=SeqID_4509
tccagttgtacacttgtccaagctcaatggggaagagagagaccaaaccatggctctaatcaatgaagcttgtgagaattggggcttctttgagatagtgaaccatggattaccacatgaccttaatggacaagatcgnagaagatgactaaggaccattacacgacatgccaagaaccaccgttccatgtcacgcgcaggccccaaggttgggattaccttgtgtcggtagtcgccgatctcgagtcggcatgcgcgtcccgcggtcgtcccccccctctggccattctctggcccatttcagctgtgg

SEQ ID NO: 18913 - DNA, 310 bp, Zea mays
  Coding DNA Sequence Number=SeqID_4510
caggagcataggaccgcgcgctagtgagggctggagatggggaaggcatctgcaaactccaggaggagctctagcttccaggtcggacgccagggagcttcggccatggcgacgagcttggggagatggggaaaaccggcccgccagcgagccggagcacgggaggcacgaccatggctggagcaggagcggtcggccgagcagcttgcaggggagttccatggctaggaccagggacgtgggagctagagctgcatggcagggagatgggcgcagggaaaatctcggctagggagatccgcgcccagat

SEQ ID NO: 18914 - DNA, 586 bp, Zea mays
  Coding DNA Sequence Number=SeqID_4511
ggaatgttatcattgctgcttatgatctttatagcaatgaatggttggctaatagatatcaaattcgagagtcatggattccagcattttttatggatatacctcttgcaggagtcctcagaactacttcaaggtctgaaagctcaaattcattcttcaatcgctttatccaccgaaagttatgtttcgttgagttttggcttagatttgatacggccttggaatgccaacgacatgaggagttaaaggccgatcatattagtatacatactacacccatcttacataccccatgggctgtggagaaacaagcaagcatattgtacacgcataatgtgttcaacatatttcaaaaagaagtgattgctgctagagaccattgctctgttctaggtactacacaacaagaggctattaagttagttttaattaatgatgggtcgataagggatagagtggttgagtggtgcgcatcaaataattttggtcgttgctcgtgcaaattattcgaaaagatgggaattccatgtcgccatattatattaacattaagaggtgaaaagctatatgagctacctacatctta

SEQ ID NO: 18915 - DNA, 168 bp, Zea mays
  misc_feature (116)..(116): n is a, c, g, or t
  misc_feature (143)..(143): n is a, c, g, or t
  Coding DNA Sequence Number=SeqID_4512
gcggcggaaacttccgtgcggttcttggcggattgaacgcctactcgagctgcgccggcggttgtttcagccgtccttagatataccctgcttcctcccgggcaaatccaagttgnccaaatgccgacattagtgaagtcggngctccccgtagtgctcctcgggttg

SEQ ID NO: 18916 - DNA, 224 bp, Zea mays
  Coding DNA Sequence Number=SeqID_4513
atcaacctgactggcgtgttcctgtgcgcccaggccgccggccgccgcatggtgcccaagggcgagggctgcatcatcaacctggcctcgatgtacggcgtggtggccgcgcccgaccgcgccgcctattgcgccaccaagggcgcggtggtgctgctgaccgagaccctggcggtggaatggggcccggcgggcgtgcgcgtgaacgcgctggcgcccggcta

SEQ ID NO: 18917 - DNA, 320 bp, Zea mays
  Coding DNA Sequence Number=SeqID_4514
tttcttataaaggatcccgccagggggggaatttgcttaagcctacctttggttaaagccttgtttttaacattttcttgggggaaaaagggcctccaattggttttttgtgatttttagcaatcctccttgtggggtttttttagggaaaaacagttagttaaatttaaagtttcctttctattgctagtgaaggtatcttataactagccattattgtttgtgcagggacaagagggtgaggctatagttgaggaaacaaagaagagtaaccatgtgcagaggaagattgagaagccccagcaggatcgtgcactcga

SEQ ID NO: 18918 - DNA, 484 bp, Zea mays
  Coding DNA Sequence Number=SeqID_4515
tgcgccccgtctggccatggcgcgacacggctccggctcgccggcgcgcgaccgtggcccggtgcccctcggcgctgcccccggcgcggcgccctccccgcgtggctcgcccggcccggttcgccggccatggcggctcgcccccgcccggccccgacgcgccctccccctcgcgttcgctcgccctggcggcctgctcgtgcggcctgcccgcggcggcccggcgtgctcgccccgcccgtccccggtcccggccacggcgcccgcccgtccccagcgcggcctcggcggtgcgagcggagccccggcgcggcgcgtgcacgcacggtgcccccggcgagctcgccgcacccacggctcgcagccgtggcgctcggcccggcgtcctcggctcgcccgcccctgcgcagcgcggccccggcccagcgcggcttcggctcgcgcggccgtggtgcccctgcgtagcgtggctcggccccgacgt

SEQ ID NO: 18919 - DNA, 459 bp, Zea mays
  Coding DNA Sequence Number=SeqID_4516
gacgctcttcatcacttagctagtttgtcttacattacttgtaataatgacacgcatgccatttgtcacgcatgtcaactcggtcgtcatgtgtgccttcctttctctacttcctagtctcgtgctctacacaattttgaccttgtgcactgcgatctttggacctcaccaattcctagtgtttccggttataaatactatctcgtcattcttgatgactgctcccactacttgtggacattccccctacgcctcaaatccgacacgtttcccaccattgcccacttcttctcctttgtcgccacgcaatttggcactaccattaaaaacttccaatgtgacaacagttgtgagttcgacaattcccacactcgaaccttctttctttcacatggtgtccaccttcggatgtcgtgtccctacacctcccaacaaaatggtcgcgctgaacgtgtccta

SEQ ID NO: 18920 - DNA, 500 bp, Zea mays
  Coding DNA Sequence Number=SeqID_4517
cgcgcctcggctcggccgcccctgtgctcggccccctccggcgagctgccccgccccttccccgccctcgcctcggcctcgtccggcgagccgcccccgtccccagcctcggccgccccctcgccggccccgccacgccccggctcggccgcccccggcgagcccgccccgtgccccggctcggccaccccccggcgagcccgcccaccccgtgccccggctcggccaccccccggcgacccgcccgcccccatgctcggccgcctctccggcgagccgccccgcctgtccccggccatggcgcccgcgcccggctcggccgcccccgccgcgctcgtccccggcgagccccgcgcccggcccggctttcctcgtcgtcgcccgtgttcgcccgcccgccccggcgtgccgccggcacccccccagacgccccgtctaccccccccccccccgtatccaccaaacccccccatccccagcttgtcagcattggaaccact

SEQ ID NO: 18921 - DNA, 516 bp, Zea mays
  Coding DNA Sequence Number=SeqID_4518
tttgacccaataaaggcccaaattgcctttataaacgggggagggatgagaaaaggccccccacccccttccaaggcaaaaaaagcccccccttggggcctaaccgggtggggaccccccccgatcaaaaacttgatactttgaaacccttgggccccccgggggtgggtgggggcaaaaacccaaacccattttgaacaacccccccccaaaaaaaacccaaaaaaaaggggggcaaatgtttgtccactttgtttgcctcggagggctaggccccaccgattttaaaataaaaaaaaaggccccaacgtggggcccaaaagacccacccccccaaacttccaaaagggggttcccccatttcaaaagccttaattatccctggggaaggaattaaaaaaaaaggtggctggggggttaaagcggcccatagttttgagaaaataaagggttccttcttcttccgcgaagggaggggcccacccccccccttcccaataagaacctgaaaggact

SEQ ID NO: 18922 - DNA, 569 bp, Zea mays
  Coding DNA Sequence Number=SeqID_4519
aaacgcgggattctcaagcctcctggcgttacgctgccctatagctaccagtttccttcttgcagtatcacgatgaaccttctgaccgggcttttcgcgccttcgcgtgaggcgatgacgctccctggcgagctagtggccgtgggcatcgtaggcgcgcgcgagctagaggacctccacctcgatgtgcacgagcttcatgcacaggcgttgctcgacttattaatgcgtctggccgcgcagccttgccgcgtccagatccagcagcaaccccaccgcatttcatttcagttactcgtttcattagggcaggagctccacctcgtccacgctcttgtttgtgctcgcggccgaatcacgagccgacaccgcgtccccgccggagataaacaaaaccatcgggtcgcctgtcgactgggtctggatgggatggacttgactccgatcgtgctcaaggggagggggagagatagagcttgacttgcgggaggacgggatcgggaggtaccagccgccaccgtgtccgcccgatggttggttttttcagttgctgggctctctgctgatgt

SEQ ID NO: 18923 - DNA, 361 bp, Zea mays
  Coding DNA Sequence Number=SeqID_4520
gccggctgcagtaagcaaccgccagccaccaacgcacacagcaggcaggaaccgagagccacgcacgtcgcgagcgagcaggagagggacgaacgagctggtacccaatcaaggaagggcaagtcgggcgggggcaggatcagaaagaaccatcaattgggggggggatctagcgttagtaaatcaagcgtcggggggaaaaaaaaaaataattaaggaggtggtactaagtactgctgataaacatcataaggtggcggcaccaacacaacaggaggacgctgcacgctgcggaggggagatcgtagaggcgaccatcgtcgaggagggggggggaggtgtgtgctgcttattggttgat

SEQ ID NO: 18924 - DNA, 386 bp, Zea mays
  Coding DNA Sequence Number=SeqID_4521
gatttgtgctacaaaagctacgggataatcaactctacgccaaatacagtaaatgcgagttctggattgacgaagtgccaatccttggacatatcatttctaatggtgggatatcagtggatcctgctaaagtcaaggagatagtggagtgcagtatacccagtacaattactgaagtctggagtttcttgggacttgcaggctattatcggtgatttattgaaggattttctaagctagctaagccattgacctcactgcttgtcggagatgagcggttgccttcttcttctataaatagagcgcttgcttcactggtgtcttcacatatctctctaccgcttgttgcttactctcctcctttttattctcttctactccaccat

SEQ ID NO: 18925 - DNA, 555 bp, Zea mays
  Coding DNA Sequence Number=SeqID_4522
attattgatagacaacctgcgcggggagtggtgttaactcagcagagacaggcaaagaagagcacccatacattgaggtgacctgggcacgcggccagaagattgtcatgggtgtttaagggagggccaaactaggggctcggggagacgaaggttcgattggagaatgacgcttcagcatggttagtggggaaggcacgtggactcgccgccacgttactgtggtccttctcggtggcctacttcagctttcatcctcaccttcatcggtgttgcagtccaggacgcacgtgtcgctggacatgcatcatctggctggccctcctcgccttcatgtggctggtcatcaacctccacccgaaccaccgggcgcgcgtcgtccgggtgctcttctccttcaaccgcgacaactgaaattaaacaaataaagctgctctttgcctgcttattagtatttcctatcccctttggagttagcagagtggattgaaagtgctacttagtattaacgtgaacatatggttgataaatatttacgccgtgccaggagtgatg

SEQ ID NO: 18926 - DNA, 252 bp, Zea mays
  misc_feature (40)..(40): n is a, c, g, or t
  misc_feature (74)..(74): n is a, c, g, or t
  misc_feature (118)..(118): n is a, c, g, or t
  Coding DNA Sequence Number=SeqID_4523
gataggtaggagagagcggcagccagcaacagagggcggncatggcaatgcccaccttccacctcgcccccganctgccgcccgtgtcccgcctctgcctcgggaccatgacgatggnggagcaaagagggccgccggaatcgctccgcctcctcgacgccgccttcgacgccggcgtcaacttcttcgactccgccgagatgtacccggggccgcagcgcgcggaaacgcacgggcgcagcgaggagctcg

SEQ ID NO: 18927 - DNA, 263 bp, Zea mays
  misc_feature (60)..(60): n is a, c, g, or t
  misc_feature (63)..(63): n is a, c, g, or t
  misc_feature (90)..(90): n is a, c, g, or t
  misc_feature (110)..(110): n is a, c, g, or t
  misc_feature (133)..(133): n is a, c, g, or t
  misc_feature (137)..(137): n is a, c, g, or t
  misc_feature (139)..(139): n is a, c, g, or t
  misc_feature (174)..(174): n is a, c, g, or t
  misc_feature (194)..(194): n is a, c, g, or t
  misc_feature (211)..(211): n is a, c, g, or t
  Coding DNA Sequence Number=SeqID_4524
cacacagcccaacaaaggagcgcggggggccctccttccttcctcccacttctctcgcgnggnggtcgcttacctcgcctcgcattccgntcgagcaggggagcggcagngcagaagggagggaattaaggcnagangntcatcgagagattccgcgtcgagagcccccacggngcggtacgggcccggacggnagatcgaggcggagaancggggacggacaacaatggagctgggggacgaggccaaaggacggcggccct

SEQ ID NO: 18928 - DNA, 594 bp, Zea mays
  Coding DNA Sequence Number=SeqID_4525
gagctccctccaaactgaccatagacaacgaaaagcaatttgataaccaagacttctgagaattttgtgcctcaataggtacacgcgcagtcttcgcattagtttaccatccatagtctaacggagttgtggaatgacaaaacgataaaacctttacgtcaatcaaagagagattgctcaaagacaaaagggcaagtgggcgtaacaattacatgaagtgctatgggtactaaacacaacagatcccatgcgacaggttttactccatttcaatggatgtatggagtcaaagcaatgactccgtaggaactcaaatatggctcaccctggtctgaccccagcatgaccccaaaaatcgatgagctaacagcaaaaaaaaaactcctcgacggagaccatgtttaggccctcaacgcattgaacaaatatcaaacaacaacaaaatcttggagagacattataaggacagcaagaacagaatccaagggaaaactcgaaccaaagttggaaggaccattcttaatcaagaagaagacatctccgaactcctataggcttgcaagccaaacaggcgaagaccttgaacattcttgg

SEQ ID NO: 18929 - DNA, 592 bp, Zea mays
  Coding DNA Sequence Number=SeqID_4526
gctgaaatcctgtgttatgcccattttcacccttgcagtactcataactccctgattgctctcctgaaggcgacagatgaattgcatcattttatatatttttcagtactatttgcgcatggaattgcttcctcagcttcctgtatactgatatgtctgtcgatggaatacttactttccaacaactataatcttcagagctactgtagaacactaaggcgtctcttttttaaatgcgttctgggaacattattcataatgagagatgcttcccaatatcaggtgattttttttttcctccccgttccgctttgtgtgtgattctttcatgactgcgcaatacttacagaagctatgacatcttctctttcccgtgagaaacctgatgcccacatactgcctaattaacctattttccatttttttcctatatataacttttttttccttatcgactccgtaccaccatcagaggtatttgcccggcacccaattctccctattatgggtcgtattagacaggttaactggtcgaacatttaaaccgactacactgagcataccctgttagtacccaacttcatcgccttta

SEQ ID NO: 18930 - DNA, 481 bp, Zea mays
  misc_feature (421)..(421): n is a, c, g, or t
  Coding DNA Sequence Number=SeqID_4527
tattgatgttctccgcgtttcacgagccaagaagattgttgacaacaattatgataaactaccaatgcgtggtcgtgtaaaagattattctcccaactgttggaaagcacttggtggtcttcttatagcacatgcccttgaaacctgtaaagcctataaagtatactctgttttcaaggcttaacatctttctatcaacctaaacagtaggtgcattcatgtaacatctcacattatttgaaggagactgttcgcgatacatttacatttgtcagtgtcagtccaaaaggcctcaagcttctctcatactgctgacaagatagatgcagctcccctgccatctcagctgactgcaatatatgattgagctataggatcccggtagttcactcctatagaaggtgttatgaatcttgctccnacattataagctgatgattcttctgacgctactacctacctctatcactgactcttgaat

SEQ ID NO: 18931 - DNA, 545 bp, Zea mays
  Coding DNA Sequence Number=SeqID_4528
gcgctacatcaagaaggcccggttcgctcagggcgtgggcacggcgcaccccgatctggctccgccgccgttctggagtacctgctagccgaggttctggagttgtcagggcaaccgccgaaagtccacaagaagacgcgcatcctattggcgtcacgttcttctggcgatccgcaacgacgaggagctaggcaagttgctggtcggtgtcaccatcacgctcggtggcgtcctcaccagcatccactgcgtgctcctgcccaagaaggcggcggagaaggcggccatcggcggcagcaaggagcgcaagtcccccaagaagggcgccaagtcccacaagaaggcttagaaagtagggtcttcatttgcgctgtgcgctgtagcactgttcgcgtctagatctgtcgatgggacgtgtcattctgtagtatcgtccaggggtcttacagcatgttcgtcttcggtgggaagatcttcagcagtcagagcacgtagagttctaaaataaacccatgttctgtttctcgttggcgattcggcaataa

SEQ ID NO: 18932 - DNA, 556 bp, Zea mays
  misc_feature (102)..(103): n is a, c, g, or t
  Coding DNA Sequence Number=SeqID_4529
acgttttatgttcctgttgtgcgattaaatatgcgtgatcccttgggtgcagcgccatgccgacatctttcgatggttcctttgcagatcgaccatgggacnngtgtgtatgcaaggttctgcatatgataagatatgtaatgtgctcagctccttagcaggtccaagaattgaagccgcaatcagggcatcagcaatgcaaagagaactgacttggttagagggtagagtcagccgagattcagtcgctttctaactggctcacatgtatggaagtgttgtagcatccctcccatccacaaatatcccactgcattgtatctggtaattgctgcctaaatgctaccatattatatcccatcctcccaccatcaaaatatctatatgcccttcttctctacatccacaccagatcaaaacataatctactaacactcagctcatcacctatcactatacatcaatccaatcacactttccaccccatatccgttccatccatactcaatcactatcccctaagcccaaaaaagtggcttctatgctttaactatca

SEQ ID NO: 18933 - DNA, 353 bp, Zea mays
  Coding DNA Sequence Number=SeqID_4530
tttgtttattagtgtccagtcatctagatccagtgaccagtgtgttgttttggtcataactcacaaggaactagagtgcagggacataattttttattatatggaacatattgtgcttcaaatttgagctaatgaccgtaattaatgttgttgagtacttgagtgtacaggctcgcgagccgagccgagccggctcacgagcctatatcgagccgagccgagcctcatcatcgagctcaagaagtgaccgagccgagcctggctcggctcgccattccaccgagcctcaccgagccggctcggctcgtttccagccctacccttagccatgtgtaatccttcgcgtcgtcacg

SEQ ID NO: 18934 - DNA, 513 bp, Zea mays
  Coding DNA Sequence Number=SeqID_4531
ggatccgcatgcctctgcgtttgagtcgccggatccacccgccctctctccatggcggcgccttcctgcccgcaggtttacaacatcggtcgggtctgcgcctctctgcctcacaaagccgccatggccgcggagcttcctcccaccggcgctctcttccctaaccgcccccctcttgggcatcgtgatcctttcactcttcttgctcgcggtcgggctccgtcgcgtcgccttatagcccacccctctctccatggcggccccttcctcgctggccctcgccgacactgaccaagatgccgaccactttctcccccgcactcccttctccgtcacagccgtcgccgtgagcctaagtagccacacgcgggcgtcgccgtcgctggcagagctaacaggcggacatcgctgctgctggtcgggcgcgcgtgcggacgctgccaccatggggttacctggcacactagccgccgccacagccagacgcgctagtagccactgtctcttatccat

SEQ ID NO: 18935 - DNA, 277 bp, Zea mays
  Coding DNA Sequence Number=SeqID_4532
gtgcaatccagataaggcgctcctcgcaccatgacgttgtgaggccgcccgcacattgaggcaatccttgatgtcagcgatgtgcaaacttatgtaatcactattgcaacgcctgcactcctgaatgagcggccataaatggccagcccctactgtccccccctgccaggccccccacatcatcaacacgtggcctgcgaaaatatgtaaaccgtatggctaattcccccccccccccgctttccggcgccccttgacatggcctgtcctgacgagc

SEQ ID NO: 18936 - DNA, 515 bp, Zea mays
  Coding DNA Sequence Number=SeqID_4533
gtatttgaactgctactgtcagattattattgtaagattcttgtttttttatttgttgatgtcatgatttatttgtttgatgcttaaaggtctgatccgactgagaacgatagtgtagagggtctcaggccaaatgcacggggccctggtcttgttaccttcggggtcagtatcatctgttattcagctgctttttagctggttcccatggtttatgatcttgacaccaccacagatttgacacatgacccctctgtctattgttctcatattttgtatttttatttcccttcgtgaacactcaaaaataactcacacatcaccgtcgacataattttccatgtcgtagcattagtaatcgttcctatctcactctattctccatcctccatttcatcatattccatcatttcgccatgccaccctctaccccccctagatcgccttcgcatccgtatcgttatatccgattccctcctctccctattatatattcacttactccttttatcttt

SEQ ID NO: 18937 - DNA, 400 bp, Zea mays
  Coding DNA Sequence Number=SeqID_4534
gaaggtgatgatggtcccaaggcaaacgactggcgatcatgtatggcggtttgatgctacaggcggcatgctggaatagaggaggggagggagccaaggcaagcagagcgcagataggagtccaaggaagctcagagggtgcgcgacgtcccttttaaaggcgaggcacgacaggctcctagcaggaacatggccagacattagtggacgtgggcggctgctgcagatcttagatcacgtcagccagctgcagcaggtggcagagcgactttggacggacgtttttggaattttccttttagaattggaacctggtcactgtagaatatatcttccttgatgtacactttacaaatcttttacatggcttgaggtgattcgtgcactggttagagagtta

SEQ ID NO: 18938 - DNA, 161 bp, Zea mays
  Coding DNA Sequence Number=SeqID_4535
cggctatctccttttgcttctggatggtaacatggcacatcctggtggtatgaaataatgcttcgaacgacgaaggtctttaaccattaacaattatgttgtcttgttcttgatttatagcatttaagaacaagtgaccaacagctcccaagtggaacaag

SEQ ID NO: 18939 - DNA, 216 bp, Zea mays
  misc_feature (34)..(34): n is a, c, g, or t
  misc_feature (45)..(46): n is a, c, g, or t
  misc_feature (53)..(53): n is a, c, g, or t
  misc_feature (58)..(58): n is a, c, g, or t
  misc_feature (61)..(61): n is a, c, g, or t
  misc_feature (76)..(76): n is a, c, g, or t
  misc_feature (82)..(82): n is a, c, g, or t
  misc_feature (88)..(88): n is a, c, g, or t
  misc_feature (104)..(104): n is a, c, g, or t
  misc_feature (123)..(123): n is a, c, g, or t
  misc_feature (126)..(126): n is a, c, g, or t
  misc_feature (129)..(129): n is a, c, g, or t
  misc_feature (142)..(142): n is a, c, g, or t
  misc_feature (147)..(147): n is a, c, g, or t
  misc_feature (155)..(155): n is a, c, g, or t
  misc_feature (163)..(163): n is a, c, g, or t
  Coding DNA Sequence Number=SeqID_4536
aagggccgctcaccgcgacaattatgcccgcacngatgctgaagnntcgtcanagatnacnttcttcgccccgcanctttcngaaagngcgcgtccttggggtntgtgagaacccacattctncanccntacaggagccaanaggcnatcacagntggtatcntacctttattcacccttgttcctccaacaatcatcagcccttattacatcagg

SEQ ID NO: 18940 - DNA, 584 bp, Zea mays
  Coding DNA Sequence Number=SeqID_4537
gctctgactgtagatcttggtcacttatcattgaacacgtagttggtatagataaagcgcaaacactgaagctgagagcactggttcaaaacaagattatgcttatttttgtggacagtggcagcacacataattttgtcaacactgcatttgtgcacaagtgtggtctacgttcagtacatattccaccacttcaagtcaaagtagcaagtggtgaaacctggtgactaaccagtctgttccacagatggaatggtggacacaaggttatacattccatatagatatgatggtgttagacttaggtctttttgacgccatacttggctatgattggcttgatcctcttagtctgatggtctgtcactggaatcagagaactttggattttcattataaaggataagttgtgcatttgcagggtatattacctccacaacagtctctatagagtgttacttctcagaagctaatcaaatgggctattggcaatgatataggagccttggtgatggtggaaattttatcagactcacataactcagccattgtaagaattacaattatgcccctcataagggatt

SEQ ID NO: 18941 - DNA, 434 bp, Zea mays
  Coding DNA Sequence Number=SeqID_4538
gctcaaaccttcgaggtgactgcatccccgttcgtatcatcgctggaaaatccactccccaaccctaagcctctcaagcctcctgttctacggccattagagccatggcgaagcaggcgtgcagatgcgaatgcaacaacatcagtggaggatgatgcctcactcaggacctcttccgtgcttgacacctccccatagggcagcacatctccaacggcgaggaagaggaaggacacagaagccaatgctacgctcagctctcctcaaccaaaggtacgtatgtagcactagcaacttgcatacttgcagcagacaccactatagttccttctgtgacaatgtcttctcaaatttggtagatctatgatttccttgtaaagaggagggcaacgacaatggcttggtagatgagccgattttttagcgatagttag

SEQ ID NO: 18942 - DNA, 544 bp, Zea mays
  Coding DNA Sequence Number=SeqID_4539
catctggtcgatgcgcacagcgtgcgcttctatgccccggattccgagcaggccggcctgctggcgcgccagcaggaaatcgaaaacctgcagcgcgagatcaaggcccagcagctcatcaccgaccaggcccgcgccgccgtcgcccgcgccgaggtcgcctggcagcaggtcagccaggccatcgcgccggcccgccagcgggtcgccgaagtcacccgccgggtgcacgacatccagctggagcactcgcgcctgcagcagcaggccgagcagtccggccagcacgcctcgcgcctgcgccaggacctcgaagagatctcggcgcacgaagaagacctgcgcgccacccgcgaagaggccgaagcccgcttcgaggcgctcgacgaggaactggccgagcaccagtcgcgcttcgccgacgcggaaatggacggcgagaccctggccgcccaggccgaggccgcccgcacccgcctgcgcgagctcgaacgcgccgcccaggaagccgaattcgccgagcgcggcatccaggtccgcatca

SEQ ID NO: 18943 - DNA, 559 bp, Zea mays
  Coding DNA Sequence Number=SeqID_4540
cccatggtggcattagagggaagaagaggagagtaaacaacagcaagagatgtgaaaaagccggagaggcaaaagcactatttatagaagaagaaggcaaccgctcacctcctaccacggccatggaacaatttcaaaatcgacccaaagatcgggggcttgtgggggacagatatcccctgggtccaccagaaggataaaagacctcacgaaaggcccaaaggccccataattcctcatggccaaggaaaagaaggtgagtgctcgagattcccccaagtactctacttcttgtgatgaggattctagtgatgatgaagtagattactctagcttgttcaaaggattagatagagctaaagtagaaaagattaatgaactaattgatgctttaaatgaaaaggatagacttttagaaaaacaagaggatattttgtatgaagagcatgataaatttgttagtgtgcaaaaatctcttgctttagagattaaaaggaatgaaatgctatcttctgaattatctgcttgccatgatactgtgtctctagaggaagcaaat

SEQ ID NO: 18944 - DNA, 320 bp, Zea mays
  Coding DNA Sequence Number=SeqID_4541
gtaaaatacagaaccagtcaatcatatttttgttcatgttttaccaaagaaaaaaaatcctctacaataaatattacattatgtataaaaaaattacaagtcatgaataacgcctataacaatatccatatccctgcttgtggggcttagctcatctaggtatctccatccatgacaaacatgttacttgagttctaattctagaatactcggggggggggcctacgcagctgactcgaggggggtcccggtacccaattccccctataaagagccgcattacaattcactggccgccattttacaacggcctgactgga

SEQ ID NO: 18945 - DNA, 204 bp, Zea mays
  misc_feature (58)..(58): n is a, c, g, or t
  misc_feature (113)..(113): n is a, c, g, or t
  misc_feature (131)..(131): n is a, c, g, or t
  misc_feature (133)..(133): n is a, c, g, or t
  misc_feature (136)..(136): n is a, c, g, or t
  misc_feature (146)..(146): n is a, c, g, or t
  misc_feature (159)..(159): n is a, c, g, or t
  Coding DNA Sequence Number=SeqID_4542
ggtatcccccttggtcaagaagcgtcaccgggcagcaagatcctccggcatcctcaangggcccatggggctggcaccagaaaatcccccgagggacctgtacttcttcatcnaaaaaaaggggggggggngnatnaaggaagcanccttggagagggnaacagggaaggacaaagacttctaaattcagggttcattttttgg

SEQ ID NO: 18946 - DNA, 372 bp, Zea mays
  Coding DNA Sequence Number=SeqID_4543
gccccgccgagatgttacagcttggactttgtggacaagtaattgtgaatggtgttgcagctgcggggtttgggctttcctggggttcttcttaagtcaaagaagagcaagatcaggctcatcctcgttcccctcctcagggagaagatgacgggcatgatgattatgtttttgctgttggagataacctcacatctcgctataagatgaaatggaaaatgggagctaattgatttgggatggtatgatcttcagaattcagtctaaaaactcaaatacgatttgctggattggcattgtagcatctgctgttgcatagctttgttttcaatatacattataccctttgtagcacagtgattgtagtgttgc

SEQ ID NO: 18947 - DNA, 343 bp, Zea mays
  Coding DNA Sequence Number=SeqID_4544
tggtgtaaaaagtacccactgccgctgcaactcatctatagcattagcagcatctttgtagtgcagaaaaaccgtgttcagacatttttttccagaattttatatatcgggcccccaaaaagaaggctgcgcgtgacgctaagtctaccttatgcctctgcaatgcaaccagattatcagcagagtttttgtaaacccgcatttaagtgtggcgagatgcagttcctaacttgtattctgaagggggaactccggagagatcggcaagtcctgattaaaaaaaaaaaaaaagggggatgattgcacagtgctctggaaatgaggatttttcttgtggcgagat

SEQ ID NO: 18948 - DNA, 503 bp, Zea mays
  Coding DNA Sequence Number=SeqID_4545
tactctgactcttggacgcggacagccaccagttcagcgatcatatgccaaaccatagccaaccccgccacccccgcctgctcaggacagttccctccgtccatgaattatccccccctttgctcgccgttaaatggaccatgttaaaatcccggggtttcgagtaacggtccgccaccaaacccgcatcaagaatactttacttgccccacgttttttatggagaaaagaaactgtgtcgttattacccataatgcgggaattggcccctacgaaaccttctcacaccaccgccgtagtccgatattggtcatctggggcacaactcccacgcctcacataccacttaacaagttctcccctttctgcccgttattatacccctcacccctgccccaaataccttctttatcaaacggcccctcgccccacataaaccttcctttgcccaaattcacctgctgattcatgaactcacccaggcacgcgtacaatgtgcggaa

SEQ ID NO: 18949 - DNA, 498 bp, Zea mays
  Coding DNA Sequence Number=SeqID_4546
tcccagagatccttcgagcttgagagcgactattgccctgctctgtacaaaggtccctggtccactcattacaaccgggcacgctggctcctcttcacatcacacaaaaagttccctatgtcatttccatcagtcatcggcctggtagcagaacacgctggtgacaaaacgatttgctcaacccaagcgaaacgcgccagtgccaagcgcgactgcggtggatctccattgagtgaaggatattggaatggagagccttgtatctggattgcaccagcaatgattttcctaaaagcgaagaaacagcgatcacttccccttgcagctctagtcaaaagctgcagcaggattcatttccttggtgggaagatacacgagctggtgccgacaaaagccacatgtacccgaagattgacattcaccaccaccaatccgtccatcacgaatttcccaaagtgctgggattcagacgatttgaaaggcgctcgtggcactggc

SEQ ID NO: 18950 - DNA, 251 bp, Zea mays
  Coding DNA Sequence Number=SeqID_4547
taggcaattctgaaaactgcaacatacaagatggtttgagtacaccctagagttaagctgttcagcaggaaaaaacaactcggatatcctgaaacgagcgtacagtctaatggcagaaaaaaaaaaaaagatccagccaagcacatgcctagagtgggtcatcatctttcactttctttcacagcatctgcccagatgcactctttcagttcagaaatcaccaaaaaaatccctagaagaattcaaactct

SEQ ID NO: 18951 - DNA, 121 bp, Zea mays
  misc_feature (39)..(39): n is a, c, g, or t
  misc_feature (57)..(57): n is a, c, g, or t
  misc_feature (60)..(60): n is a, c, g, or t
  Coding DNA Sequence Number=SeqID_4548
ttccaaagctccacttccgacgagaaccgccacacctcnaatctcgaaggaattttntgnggggacccccttctgacgggacccatgggagagggctcccccggcgatcgccaggaaggtc

SEQ ID NO: 18952 - DNA, 418 bp, Zea mays
  Coding DNA Sequence Number=SeqID_4549
ggagcccgccttgagagtagccccgccgccgagccgccccgccgtgaatcgccccctccggtgcctctgccccgacccagaccctaccggagaactccccgcgccctccccgacctccccgaccactcggattgccccagagccccgccagtcgcccgtgcccctcgtctccggcgagccctccgccgcggggacgagcgccgtcgccccagctagcccgatccagcggcccaggcccactgcccccctcaccccgtctctctgcccgctaggccccacttgtcagctcgcccgcgcgcccgcgctgtccgcccggtcccgcttgccagtcgcccgcgcccgcgctgtccgcccggccccgcctgtcagccgctcccgccgccgcgcgcccgcgcgcccgcccgcaggatctaatcct

SEQ ID NO: 18953 - DNA, 569 bp, Zea mays
  Coding DNA Sequence Number=SeqID_4550
actcttcactgtcattgtcgtatcatgacgcgaagttacgtcggtaggtagcaagtgagtcgagatcacatctatagcttgcgctagtacgttaatctagttcagcatgctcgagtagcatgcagcgatgcattcgtgtagcatgaaaaacagttttataaagagacttctcacgctctcaatgatttatcgggtcagaacaacatgatgtgatgtcttgcgatcctcaattgcatctgaagcatctgagatcgactgggcacatgtcgccacaggtcatagaaagacgcaaaaacagatcttttgttacgcgtgagaatgaaaaggcgaggcttgtcgcttgatgcaaagggcagcctagcacaccgacatttgaatcgcgcaagctctggtgtctgtgcttcacttcagttgaccagaaggctccaaaaacagaagagacgcgtggcccaagtcagaaccccggtcaaaattcctccttgcgcggaaggaaatggtagttcgtggggggttatccctcgtggtccggggttgtagaacaatatgcatattctcattccagggacgga

SEQ ID NO: 18954 - DNA, 567 bp, Zea mays
  Coding DNA Sequence Number=SeqID_4551
aaggagtagattgacgcgcccatttaatgtgaatttttacacaatagtggggatttggatttgggcatcccgcccatgcaggttttttatctttttgtatttgtgtgaggaaaggatttctttcatgactcaattacctggtgaaaggggcgattaaatctatgggccttcagacagtgtcccccacggtcttcgtcagtcaatctcctttaaaggcaccgaaagaaaagattaaaattattactaatcagagacgatttcagccttggcacagcatcggcattggtattcagattgttcaagtgttaagcatgttattcataagggagttacgctatatacaccatctaactcaagttatatgatatacgatacatcaagtatgcggtccaacctaagcaagtatacgtcctcatgtcctcgcatctcaatgtgaagagaatggctctgcacgtcttcttggttgttcaggggcatgtactgagccatgatgacacggatctcggagtccagtgtacgtccggatcctgtacttgtaccaagcatatcctgcaattcagtgctgca

SEQ ID NO: 18955 - DNA, 529 bp, Zea mays
  Coding DNA Sequence Number=SeqID_4552
gactaagctgcgagacccagggtcattacagtcgcatcgtcgtaaatagcgtacactgagcgcgattgatacggctcattattgggagaggtgggtatcggggcagacgtccgaggtaggacggatagatacaatcttatgctttcagcatccagggagatggattgtaagattacgaatatcccgatgcgagtggtcatatcagtcgctagaccgcgctagcaggtttagtgtgaggcaacatcacataatagattatcgatgataagagtcggcccagtgcctgtgcgaatactattcaggtccacctcgggaccagccatcgtctttctgggctctggatgcaggctgatatagcaggggtttatgatcagtgaaagttacagcgagcgtcatccacattattcatagggtgtcggtagggtacatgatctgacattagaagggaggtgcgatatcagtgccctgtcatgttatactctcgtcaggcatgggtggcaaattgagagagctagtccagcacagtgaa

SEQ ID NO: 18956 - DNA, 102 bp, Zea mays
  misc_feature (65)..(65): n is a, c, g, or t
  Coding DNA Sequence Number=SeqID_4553
agtatgtattgctcgagttggccccttgtctttgttcgggcatgtcgccgggtgctccgttcgtnctctccggtttggctcccttgctgtttttggggtata

SEQ ID NO: 18957 - DNA, 201 bp, Zea mays
  Coding DNA Sequence Number=SeqID_4554
tttttaggaatagtactctcagaatagttcacaaaaaatggactgaatacagctagggaagtttcaaaataggatgacagatgaaaacgatttctttgagggtgaacaccaaacaagctccatgatagacctgcttagctgttctgctttcaatgaggtagtgtattgtcatttctttctatttcgacaacatcttacaaa

SEQ ID NO: 18958 - DNA, 488 bp, Zea mays
  Coding DNA Sequence Number=SeqID_4555
gagcattttcagttagccatattttcagttagcattttcagttagccagttcagttagcattttcagttagccagttcagttcagttatttgtgttcatattacatcttatgatccaagggattcttttgccaactttgatttagagaagttaattgagctatcatatttttatgatgctgattttagtaattatgaacgtacatgccttatggaccaacttctcttattcattgatgaggttagaaatgatgatggatttagagattgtaatgatcttggacaccttgctataaagatggttaaaacagatagacacatatgtttcagtttagtgtatcgtcttgttgagcttgcttaatcttgccagtggcaactgcaactgttgagagggccttttctactatgaagattatcaagactggaagaagaaaataaaatgggtgatgaatggatgaataacaacatgctatgctatattgagcggga

SEQ ID NO: 18959 - DNA, 589 bp, Zea mays
  Coding DNA Sequence Number=SeqID_4556
atcgcgctctgtcatcgaggacgctcgcatctccatccgacgtccactgtcattgcctgaagctataccacatttcaagcacctgacactagagtgcctctctgaaaggaatacagtgcacgggtcaactcaagctcactcacagagatactatgcattggctgtagaccaccccagatataattgattgaatgctgctaacaacaaaatacgtcagcaatgactaattgagtatcaccaagcttgttaactatcgtaaacctgcatgctgtagagtatgcacagtgataacacctgctatcggagcatcgtccattatatattctatgcccacagcttttacagttcatagtgaagtgtctattgccatgtacgtagattacatactatggaaaacccatggcattatatgaccacatgatttaccgcacaacattgccatgtcacccttggaaaagttattaagattttgttcgggagggttccacaaccccctccggaggacctgcaaaatttaaggttctgtgacagcaaaactttttaaaagttcctatgcaatacccggtttggaccacacgcacatattttt

SEQ ID NO: 18960 - DNA, 502 bp, Zea mays
  Coding DNA Sequence Number=SeqID_4557
aaaccgcgacggtgtttatgagccggactttgagaagctggagaggctgaaattggcagagattaagcactcgaggctcgcaatggttgccatgttgatcttttactttgaggccgggcaggggaaaacgcctctcggtgctcttggtttgtgagaaaacggcatgatgtttttgattctgtagatacaatttctcttccaaaaacctaatgtttctcttcttcaatgtgacatttgggaaaagatcaaaaaagaaaaaaaaaaaaaaaaaaaactcgagggggggcccggtacccaccccgcctccttaataccagtgcaggtccgaaccccggcggcaccaaataaatacacttgaccccaccacactagcctctccctttaaaatagtatgtgcccctatctctctttgacaccaccctctccctccccacaacacctacctaccacaacacaaaactcctactaaatataacacccacctttacatcttatctctata

SEQ ID NO: 18961 - DNA, 49 bp, Zea mays
  Coding DNA Sequence Number=SeqID_4558
tccagccaagactctctcggacgcccatcgtgctccgtccgcctgtcga

SEQ ID NO: 18962 - DNA, 267 bp, Zea mays
  misc_feature (60)..(60): n is a, c, g, or t
  misc_feature (69)..(69): n is a, c, g, or t
  misc_feature (82)..(82): n is a, c, g, or t
  misc_feature (85)..(85): n is a, c, g, or t
  misc_feature (184)..(184): n is a, c, g, or t
  misc_feature (197)..(197): n is a, c, g, or t
  misc_feature (234)..(234): n is a, c, g, or t
  Coding DNA Sequence Number=SeqID_4559
gggagctccaccgcgggtgggcgggccgcctctagaaactaggtgggatccccccggggnctggcaggnaattcgggcacgnagnctcacctagttccccccccccccccccccgggaacaatgggggaggggaatattccccccattttatggtggaaataattgggaaggggggcttcccantttccggtattcnttccccgggaaattcttaccaatggacaaacccaggncccccctccatgggctaatcctgggctggggaa

SEQ ID NO: 18963 - DNA, 276 bp, Zea mays
  Coding DNA Sequence Number=SeqID_4560
ggctcacgcggcgtctccgagaatgctgccgatatcgtcatggatctcgctgcaaggtgccagacaccaccgtgcgatgtcttgaaagtctatctaagtgtaccccatgtcgacagatatgactgatcgaagcccaggtcacaagatcaggtttcttcaccgactctagcatcctcacccatgtttatcgggtgcaaggggtccattcgcttactaggctcgccctttgttctcttccagccatccatcgctgcaacgccccgactcaagagataa

SEQ ID NO: 18964 - DNA, 572 bp, Zea mays
  Coding DNA Sequence Number=SeqID_4561
gtgcttttggtgacatccggtttaagacaaagaagaatgatatgtaaagaagggtgttgatgaaggaagatggtccgagaagttggtttccagaatcgagtttaaaggggacatggttgtggcgactccagatatcttgcaagtacctctggcgtctgatgtggaattcattattttagcttctgatgggttatgggcctacatgaagaactcagacgtggttagttattttagggatcagctccgggaacatgggaatgtgcagcttgcttgtgaatctcttgcccaagtagctttggaccggcgatctcaggacaacgttagcatcattattgttgatctagttagaacggagtggaagaatttcctctcgcagcgacaaaacgtagtggttgaactggttcaggctgcaacgactatcggtttagtttctgttggcatatgagaaatcttcacatctatcttaagggaaatgagcgagagagagagagagagagagagagagagagagagagagagacctacctcagtgcaatatctttttttcgcatcagctgaagatacctcgcaaa

SEQ ID NO: 18965 - DNA, 66 bp, Zea mays
  Coding DNA Sequence Number=SeqID_4562
tctagttctaggcagaacgtcgagtggggtctcgagcgaatcgcgacttatcctttcttgacttca

SEQ ID NO: 18966 - DNA, 241 bp, Zea mays
  misc_feature (143)..(143): n is a, c, g, or t
  misc_feature (192)..(192): n is a, c, g, or t
  Coding DNA Sequence Number=SeqID_4563
gaaggataatttcctgtacctgggcccaagaattggaatccaccagtcccattttttgagggattcggtagcccccttccatctttagctagagttctttacaatggcagttactttcatcacttggccggcttgtttctctntaccattttggtaacgggaggccagcccagccagagggaaaccaaggantgctatgctcagacgtcaaaatttctgcccggtccagtgagtcagtgca

SEQ ID NO: 18967 - DNA, 521 bp, Zea mays
  Coding DNA Sequence Number=SeqID_4564
aatattatcctctaaagcatcctttaactatacgagaacgatcctccatctttatacatggaacccatgacgtccaaatagcttgtaacccctagagtacatttccatttataatataaaaataataaatattgtaaatattgtgcaatacaaatgataggtattgtaaatacactagtgcgttacgcgcgcaggcgcgcgcgtgttgtcttttttttacaagcttattttatttcaaatagcaagtatctaagaacacttgctgaaatttcaacaattttttttaattccaatagcagtagtaatataaacttagattacaatacatagcaagttggattaaagtagcatacttcagtgtccaacaatatagggcatgtaaagtttgcataaccaagcatagttataggaaggcttcaacagtaaatttatatgtacacaaaagtctattgaccaaaagtgatgaagcctttcttacataaacacacacttctacgaaggcttcaacatcaggtttcaaa

SEQ ID NO: 18968 - DNA, 574 bp, Zea mays
  Coding DNA Sequence Number=SeqID_4565
tcgctggcagaactctggtataactcggcacatcattctgctattggtttggctccattcaaggctctttatggtacagacattaatatgggtattcttcctcagtaacaggatgtaacacctgctgacaatgtgttatggtcactagatcggtgagggattggagaggggtatcgatgggcaagaacgtcggccaggggcctttgcccacggtcgagcaagaggagggtttctcccttctaattcttgcctactttatttcccatccattaattacataaataggccagctggctgcccttatctagctagagatccttatctccttaaaattctcctaaaaactctcaagaactagtaactgataaccttcctatataatctcaactaatcttctaatcttatctctaactatccttatctaatcctccttggagggcccatggctgctgctgccgcagccccctccgtgggcctccttaggccctgacacctgctgattcccactggaattgaacagtggtaggtaggatggaaaccactgatcccagccactgggctatcaccctgttct

SEQ ID NO: 18969 - DNA, 453 bp, Zea mays
  Coding DNA Sequence Number=SeqID_4566
tggaccttttttcccacattttcaggagccagccaaaagctggggctcttgggctttcttaacctcaaagggaaaatttaccggaatcgcatgcggtgtgccaactccaaacctttcaggtggttggccttaagtcgtgccagtctcccaagaaaacttttgctgaagaagtcaatgctgctttcagagatgcagctgagaaaagagcttaaaggtatccttgacgtctgtgatgagcctcttgtctctgttgacttcaggtgctctgatgtatcctccactattgattcttccctcacaatggttatgggagatgatatggttaaagtgattgcttggtatgacaatgaatggggttactcacagagagtcgttgatttggctgacattgttgccaataactggaagtgaagactcaacaacctcttgatgtctgctccattattttttact

SEQ ID NO: 18970 - DNA, 569 bp, Zea mays
  Coding DNA Sequence Number=SeqID_4567
cacggtcattggtacggttggaacacccgaaaaagctgaagccgctgctcaatacggctgcgactacgtcattaactatggcgaggaaaacttcgccgagcgcgtgcgtgaaatcacccagggcgaaggttgtgacgttgtgtatgacggtgttgggaaggccacgttccctgcttcgcttgactgccttaaacccatgggatgcttcgtgagtttcggcgtttcatcaggccctatcgaatcattcaacatcatgatgctggcggagaaaggatctttgtacgccacctggccggtcctgacgcaataccttgccaagcgagaggacatactctcgatgagtcaggagctcttcgacgtaattggcagtggtgcggtggccattcgcattcatgacaggttgccgcttgccgaagcagcaacggcgcatcgattgatcgaatcgcggaagatcgtgggaggcaccgttcttttaccgtgagccggtacgatttccactggaatgtagagactgaggaataccgctacccggccggcaacgcccttgcgcagcgaatggcgagcttttt

SEQ ID NO: 18971 - DNA, 274 bp, Zea mays
  Coding DNA Sequence Number=SeqID_4568
ttttttgcaaagacagctgccaaccatacatgcaaatgcaagcgggtatcggaagtcaaccaaatgaatatgaatccattggtctcgttgaatctggtaactacatccttaatggcggacagcatcaccgcgttgagccgctgctcgccgaacaagggccaggccaccatgggcacgccgtgcaccaggctctcgagcgtggagttccacccacagtgcgttaggaacccgccggtggcgccgtgggccagcacttgtgtatgcggcgcccacg

SEQ ID NO: 18972 - DNA, 426 bp, Zea mays
  Coding DNA Sequence Number=SeqID_4569
gcgcttgaccgttattcctagagaatcacaggccatgggtaaggacagtattctcttccatgctacgtccactagatcgtctctaccatgtatacccctcactacaggactgggcatgcattgtctgcacgatacgtgccacatcacgatgctcagcgatacgaattgactggatgatagaatttgcacgcttacatgataacagctggcagagctaactactgatatccatggcatgctcatgggaccagacaggaatgctcttgcctcatggcccggcatttccccgccctggtccttcgccgccctctttcgtgccggcgtggactgcccacccctccccgcccccctgttctctccttgagcggatgggtggcagcgcctcgcccccctgccctgtagtactggtgcgatagcatcggcttc

SEQ ID NO: 18973 - DNA, 419 bp, Zea mays
  Coding DNA Sequence Number=SeqID_4570
gttgtgtcgtgctgatctcgccatgtctcgacacatcgctgagccaccctgagctctttgagatggaaaagaatgacccatggcttgccgtcgatggcatgaaagtgctcatgccgtatctttctggtggtcttcccatggacgatccacgtgtgagccctctccacggcgagatagagggactgccgccggtgatgatgcttgctggcacacacgatatgatctgctcagatgctcggcgattaagtgcgaaatatcaagggaaggggacagatcgcggagtgcctggaagctttcacaatgacaagcttacgtacattgagtatccggagatgatccatgtctatccgctgctgccgcacgctgaaggcgcagaggctcgtggcttcattatggacttcattagacaacatatcgca

SEQ ID NO: 18974 - DNA, 562 bp, Zea mays
  Coding DNA Sequence Number=SeqID_4571
tgccctagctaacacatttcatcgaccccacatgcgtctaccaccatcgtgggcggattgctccatcggtccccgatgccccatcggcccatttttgtgccgagctggcggagtaccacccagtcaccatccaccatgatcttagccaagttcacccgatggggactggccgctcgattagagttctctaccccgtcgactagctagtcctaacgatcgatactcctccagatgcctcccccgttccctcctccattcacactaccctcgtcgatccctgttagcatcatgctatggaggaggagtacgcggccctgctagccaaccacacctgggacctggtgccacgttcaccaggcacaacatggctaccgacaagtggatcttccatcacaagctgacctcggatggttcactcgatccctacaagtcccattaggtcctttggggcttcacccagcaccccagagtggactacaacgacatcttcaaccccgtcgtcaagtttgtcgccattcaggttgtcctctcccttgccttctcctaggattgggtggtccat

SEQ ID NO: 18975 - DNA, 592 bp, Zea mays
  Coding DNA Sequence Number=SeqID_4572
taccgactgtcgctcgtctcacgacagccgcttcccccgggagctacaccccctttttaaacgcgatgctctctcccgccaaagctccccctcgccgcccccgccaccccttttgcctcccacccgccccttcccgctgttttcgctgcctcgccgcggaccaccaggttctgattgcccgggtgctaaccccccaccctcgccgctgttcctccagcccagcacccgccccctgtgtccccgtgtcagctgccccttccctgaggagtcctcgctgtcgccgggcgcggccgcccccgccccaccgttgaagctcaccacccccatgtcaacctccctcccctcagctccaccacgccgccctccggcaccctggcaccacaccccgattgccgccccccttgccacccccgccccacccattaccccccagtgacgttcccccccatccgcccccagctcccccgttgccgatgcgggcctcctcagcctcgctcccctcccacttggcacctccaaggcatccgcttcccccggggatggcgacagcgtccccgcctgggaaggacggattcttactagaacggagctc

SEQ ID NO: 18976 - DNA, 464 bp, Zea mays
  Coding DNA Sequence Number=SeqID_4573
ttcatgctcgtctcgttgcttatcactgggcgcacgctatgtcccctttccatcttcttcccatggcaacgaggagcgcggagccatttcccatggagccagcgcctctccctagtgtgttcttccacccccagcagcaggagtggccccatgcatggagtccctcctctccctggttggatgagcgtagcaccttcttcctccctctctcttccccacacctgcgtctcgcctcgcagccgcccggatcgccaccgtccttcgtgtcagcctcgtcgtgccctaccgtcgacgtcgttcgcttcctcgacgcgcccgccgttcatgctcgtctcgctgtccaccagggcgcgttcttatattatacggtctacgccaccgctcatctatcatcatctaccacatgaatactctttccccctgcgcaaacctcaacaacgtgcgtttagatagacgcctctccg

SEQ ID NO: 18977 - DNA, 549 bp, Zea mays
  Coding DNA Sequence Number=SeqID_4574
gaaacttgtatcatcacttcactagtacagcttacgctagtttgtattgtaaaaaatgtatgtcatatatgcctggcgatggacggacagctaacccagtccttaaactacgatccattgaaaattaattgtttcatacatctgtatttttattttattatatgcaactcccacgcagctctaatatgttagatggctcttaaataagaaatcaagtggcaactgtacactttctaccagtagattatcaatatatatagaaaaataggatacaatactgcatactcagaaatattgagtacaattttaaaacgcacacagtactctcggctggaactcacacgagtctggtctcttgcaaacctcaacctcgcatccaattttttttgacaatgttaagtacatttagagttgaccgatccggctaccaaaattttcgctgctacggtagcatacatgcgtacgccgtgcacagtagtagttggtatggtacgtgatgagcactcgaagcaagcacgcgcacgcacactgtttcggtcttggcgaagt

SEQ ID NO: 18978 - DNA, 303 bp, Zea mays
  Coding DNA Sequence Number=SeqID_4575
gttgttgatgatgcccacaaagcggggctagaaatctatgctgctgattttgcagcgcactgctctccctccccgccccgccgcctcgctccattactcgcctctccttcctccgctcccctccgccccggcgccgtccttggtgcgccggctcatcgccctgcgtctccctacgcggcggtggcggccttcagcaaccgggacgaccgcccgagcctcctcccttctccgctccgcggccctcctgctcctcctgccgctgccctccctcgccgccccggccgccctgatgggctccccgtg

SEQ ID NO: 18979 - DNA, 185 bp, Zea mays
  Coding DNA Sequence Number=SeqID_4576
tttatgaccctgtagtttagagaaaggtagccccaaaatatagagtgctataatcgccccctatccctccctccgtttctcacagaatggcctttaggggtgtcaggttgatcaaaactcacgtaaatttcaggctaaataacaaattctttttatgccgttttacattccaggcgtaccgaaca

SEQ ID NO: 18980 - DNA, 446 bp, Zea mays
  Coding DNA Sequence Number=SeqID_4577
aatttttggaaaggcaattctgtggggccttttttgtttttcccccactggggaaaaggggaatttttcccaagccctttaattgggttacccccggggttttcccatccccccgtttttaaaacccggcccctgaacgcccgttaatcgactcccttttgggggaaatgggttccgggcccccccccaaaaataacgggtttaaaaaaccttttttttttttttccggggttttttttttttttctttttttttttttttttttttttttttaaaaaaaattttttttttttttctttcttcttcttcctgttaaaatggagtcgctgagctttagatagtacagtaaacatatgtacatcaaacatgtcgtcattgtcactacggttacatccgggggcaagctagggtccagtatatcacctatgtccagtcccgacatgttg

SEQ ID NO: 18981 - DNA, 593 bp, Zea mays
  Coding DNA Sequence Number=SeqID_4578
gcttgaaattcgttcttaatacctccccttcccgctcccctctccctccctccttacctgcactacccgctactttccccacccctctgcctcgctattcatctcttcccgccccccatatccctccccccgccatctctcacaccgcctcttccccactcacctcacccctctctcttccaccactccaatcctcatccctacacccccattacacctccatacccccaccctcccctctatttattttacaacttccactctacagtacgaacatccatcctactccaaactcttgatatatttcatccccgcacccttcgaaacctttcatgtatacagccacagccacttccactcccgtaattctctcgccatcccactattgctatacctcctctcagaccggcccgctcccacctccctcttcctataccacgtacgtatcctatatctcttctccatacatcttccctctcacttatctgtcaataccccccagacgatccaaactaacccatcgaagttactctacttactctcgtacccgcgtctctcacccacctactcctgtgctatcagaacccctctga

SEQ ID NO: 18982 - DNA, 166 bp, Zea mays
  Coding DNA Sequence Number=SeqID_4579
aggacgacttcctcaaccggaagcgcctgggcttttccggcatgaacattgcggtggccggcgagaagatcgtggccggcctgggcgacatcgcgctcgatgacttctatggccgcatcctgttgaacgcccagggccgcctgaacgtcatggacctggtggccgc

SEQ ID NO: 18983 - DNA, 491 bp, Zea mays
  Coding DNA Sequence Number=SeqID_4580
atgcctgactcattttcatgcggcttgaattgcttattgaatacttgcgactgttcagcgagcgtggtaggaagtgaacggtcactcccggcctctataaatagcctgcttgcaccgttgttctcatcacttatccttcgatcatctattgcttttcttctaactccctcttctcctccatctgaccatgggcaaggacaaaaacggtcaaggttcgccccatcgctcaggaaacaagcgaaagcacgaaccaagtcttccatcggaggacatcagcgactctgagtacacggaggaggaggtttccttcgattccgaggggtcgtcggtctatgcttcccccggcgtcgtccgatgactcggacgactcccaagggatagccgccgaggtgtggacgtacatccggtccatcgagcgcgccaggctcaaaggctcggatgagtcagaggtctcctcgaacgaggagaactcttccgactcgtccggagga

SEQ ID NO: 18984 - DNA, 362 bp, Zea mays
  Coding DNA Sequence Number=SeqID_4581
aagcgccccgcgcatagtttgagcgaacagtacgagaagaaacgcgcacaggatgagaaggctaacagagaccaggatgcagcagttcaggcgaagagggaacaccgggagaagtccgaggcaaagcggagggaactgagggagaagatgttcaagaagacgagatctggccagcctgtgatgagataccggatcgagcatctcttggagacggcactgagcaaataacacgatgcccccctcatgttcgcacattttgtagttcggctgccccatcgacggcttggtggcagccggcggtgtcgccttttcaggtcgcgcacatggacggtctaactgcgccaggcagttaagaccaacaa

SEQ ID NO: 18985 - DNA, 273 bp, Zea mays
  Coding DNA Sequence Number=SeqID_4582
catacgaccttccaatggtggcattccacggcattgcagccctgcaagggttctctgagccgtaaaggtttcagatacataagggctacggttgcagaagaaatctatagtcacctccgacttgcaattaatgttgaatgattgctaagaacatatcccaagatcaccccctaaatcttcctttggtcttcctccgttagtctcacggcgggtcctcgatccgctcacgaggttgacgcgaagctatccaaatgttgctttactcttcctcgt

SEQ ID NO: 18986 - DNA, 119 bp, Zea mays
  Coding DNA Sequence Number=SeqID_4583
gccccggctcggccgtcccgcgccggccccgtcccgctacgccccgacctcggtcggccccgcctcgccgtgccccgtgccccgtgctcggcccgctccggcgagccgccccgcccctt

SEQ ID NO: 18987 - DNA, 211 bp, Zea mays
  Coding DNA Sequence Number=SeqID_4584
gagggttcacatgaaaggcactaacaggagtatctgaacttctattttcttggcaaacgtgaagtctcgaatgaagttccgcatacaggcaattctaatgagaactctgcagcgcgtttgccccggaaattcaggttacacatgatctatgtgcactcaaaagggatgatttattgccttgagtatgttctcatcggatctgaagttacga

SEQ ID NO: 18988 - DNA, 293 bp, Zea mays
  Coding DNA Sequence Number=SeqID_4585
actcctcctcattcgtccagagttcccactcgctattgacactttaagatacctggttctttattttcttctctccgagctaagcaacccttcaatttcgcatattcagtgcccattaactgcagtctgctggaaattctctctctggtatattgccttgcaccgctcaagctcttccctgcagatccgtaacagcccaaacattagcatcaacttttttttgtttattgtaaagtaatatgaagcacaagggttctcctgtgtcagtcaatcggttacactgtttaaacaca

SEQ ID NO: 18989 - DNA, 594 bp, Zea mays
  Coding DNA Sequence Number=SeqID_4586
cccctttgggctcaattggcccatgccgccccccccctttatttttcccaaaaccccccaatccctctccctctctctcattttccctctctctcccctagcgccgcccctacccccctgccctagcgccgcccctgccccgtcgccgatcggccgccccgctcggccgccccgccccgtccccgtcgccggtgagccccctccccctccccctctcctccctctcccatcccccctcccctttcccctcgccgctcggcgccatggccgccgccatggccggctcggccagcccccggccgtgccccccagccggcgcgccccctagccgcccagccgtccgcccgcccggccccttggccgcctggccgccctggccccggccggccttggccgcgccccggccgtgccccccagccggcgtgccctcggccgcccgcctggccgccctggccgcgcgctcgcctggccgcttggccggctcggccgcctggccagcccgacccccccgtgcgctcgcctggccgccggttcaaccgggccggctcagccgccccgccgcccagctcgccgcccagccggccggttcaaccg

SEQ ID NO: 18990 - DNA, 577 bp, Zea mays
  Coding DNA Sequence Number=SeqID_4587
gaggcaaagcggtagccccattcgtaacgggccgaatgcaccgcacgcagcaggcgtcgtaggacgtccgccgcgcaaagccatcaaggaagcagctggcctccaaggcagcgcgcgaatttgccccggcggccgtcgaagagaagaagcccctccgttatcaccacggccccgtcgcactccgtgagctccgcaattgccagaagagcccggagctgctgatccgcaagccgccgttccagcgcatggtgcgtgagctcccccaggccttcaaggtcgacctgcggttccagagctccgccgtcgccgcgctacagtaggcgtccgagtcctacctcgtcgggctcttagagggcaccaacctgtgcggcattcacgccaagggtgtcgccatcatggccaagggcatccagctcgcccaccgtatccgtgcggagagggcccaggcatcgtgtccggtggaggtggatagtagtagtcaccgtttttgtcatcactgtctgtctagaagttgtagagatgtgcccgcttctctaattgcggtcatccgtcacatcatgatgcagctgggtcttcc

SEQ ID NO: 18991 - DNA, 581 bp, Zea mays
  Coding DNA Sequence Number=SeqID_4588
tggttcttctgcacgcaggtcgcgcctgcggctgcgccgacgagcccgaggaggagatcagtggcaagacgaagcccacccaggtgagaggaaaaaaaagatctggagaaggtaggactggatccacacttggaggccctagatccagacaaccactgactggatgcccctaatgctgctaatgcggggggagcaacgccgatggggccatgggggagcggggcgcgactgggggagcggggcacggctgccatttctccacgcgatttgtggcgatctcgccgatccgtctcacgtcgcgcaaggaaagggggagcggggcacgcgggcaggcatggatggaagccggcgctgctgggggagcggggcgcggctaggggagcgggggatggaaggagcggcggcggcgcggctggggcggctgcgggcgggcgcggagggagcgcgggagggatgcgcggctgcgggatgcgggcggcagaacgtggatcccggccggccattatcgtttggtagctggaacattttattacagaatgctctatttatatcgatctcagacaatttctgggacctcttga

SEQ ID NO: 18992 - DNA, 306 bp, Zea mays
  misc_feature (57)..(57): n is a, c, g, or t
  misc_feature (63)..(63): n is a, c, g, or t
  misc_feature (65)..(65): n is a, c, g, or t
  misc_feature (86)..(87): n is a, c, g, or t
  misc_feature (107)..(107): n is a, c, g, or t
  misc_feature (116)..(116): n is a, c, g, or t
  misc_feature (119)..(119): n is a, c, g, or t
  misc_feature (126)..(126): n is a, c, g, or t
  misc_feature (130)..(130): n is a, c, g, or t
  misc_feature (156)..(156): n is a, c, g, or t
  misc_feature (161)..(161): n is a, c, g, or t
  misc_feature (168)..(168): n is a, c, g, or t
  misc_feature (187)..(187): n is a, c, g, or t
  misc_feature (195)..(195): n is a, c, g, or t
  misc_feature (201)..(201): n is a, c, g, or t
  misc_feature (207)..(207): n is a, c, g, or t
  misc_feature (212)..(213): n is a, c, g, or t
  Coding DNA Sequence Number=SeqID_4589
tattgtatggtagtgcgctgactcgtcggacggtcgacagccaacagggagaaaggncaaggncnagggcagtgtaccagttcgtnnacaagtacggccgcgaacgncgacggatncantccaatntacnacgaggatgactggtctcccaccggngacgnctacgtnggtggaaccactgggcttntgatctgngccgtnaccctngctgnnatcctcggcggcggcgccctcctcgtctacaacaccagcgccctctccggctaaggatatccaatgcatgcgcttcttgcgattcgtcatgta

SEQ ID NO: 18993 - DNA, 352 bp, Zea mays
  Coding DNA Sequence Number=SeqID_4590
attcattttatataatccagtcaaggtgtttgtttactcagattatttggatggattaattaaactcatatcattcagcacaaaactatgaaaatatgaaaacatgatgttatccagactgacgatatcagttttcagatttgaacatgatgcctagcttgttgtatggatcacattcagtttttagcatgtcttggatgaagtgaatttgggggggggggggggggactagggagttctctctctctctctctttcctggaaccccggggatccccttagtttcaaacgggccccgccccggggggggagccccatttttcgtcctcttcagggagggttggttccaagct

SEQ ID NO: 18994 - DNA, 409 bp, Zea mays
  Coding DNA Sequence Number=SeqID_4591
gaatttccgggtcgaacaagagcgtgccgggccagaagcccgtggtgggcgtgaccaatggcgtgccggtggtcaacatcgcgccgccttcggccggcggcgtctcgaacaaccgctacacccagttcaacgtcggcccttcgggcgtggtgctgaacaacagcggcgcggccagccagacgcagctggcggggcaggtcgcgggcaacccgatgctgggcaaccagcgcgccgccaccatcctgaaccaggtgacggcgcccaacccgtcgcagctgatgggcatgctggaagtggcgggcaaccgggccaacgtcatcgtcgccaaccccgccggcatcacctgcaacggctgcggcttcctgaacgccaaccgcgccacgctgaccaccggcaagccggtcatcgg

SEQ ID NO: 18995 - DNA, 465 bp, Zea mays
  Coding DNA Sequence Number=SeqID_4592
ctgaagatcattccgcggtaaccaagcttctgccaccgctagctggcaaattggcgcccccagtccctcgaacagctactctatacgggctgacaattaacatccccagtactccaccagcgttgacgcctgcaccgaccacgggcgacgcatacgctcatgcattatctcgtggggctgtacctgggagacacagcgagcgatagtgagacggacaccgctcatgaaagacacgagctctctaaagatggcaaatctccgcctagccaggaacccacaccgaggccgcaacaagtgttcacctcctccgcaacttgggggcggtgctgctgggtgtgtggtgcttatgggactaggtggtcaatcggttctgtcatgtcctggggcttctgtcccggacgggtcacgttgttcggttggggctgcgggggacccaaaggtcccactgcggcctcatgaaaatgg

SEQ ID NO: 18996 - DNA, 338 bp, Zea mays
  Coding DNA Sequence Number=SeqID_4593
tagctgcatggcgtggcgatgtaatgtaattcttcagacattgctagtcctcaggttggtgcagcataagagtatagaaaaagcacgcatattgtggtgactaggaaagcaatatttaccaaaagagtgaattatgttgaatggggttcagagctccaaaaatcatgggacgataatcaggtaagagaagggttgatgaaaggtgtcatgggtttcaatttttagcaggaagcgtttcttgaattccttcgtcaattattatgcttcaatctaggccaaggttcagcgtcttacgtctgcttcaccactataggaccctaggtcttatggctgctata

SEQ ID NO: 18997 - DNA, 485 bp, Zea mays
  Coding DNA Sequence Number=SeqID_4594
ggaatggcaatctgtcaggtcctattcgctagtacgtcagctggcgacaggaggatgtatatcaagccgattaagttgtgtcacgtcaggttttaagcagtctcgacgtagtaagacgacgtccagtgagcgagcgtaataggtctcacgatagtgcgaatcgagtcacggatctcccatcgcggtcgctcggtatcgatcagctttcatagaactgtatcagacgggggcccgcgcctggtgtattatgcatatcagggacaggcattatctaggcaaggatagcccaggagcaaaggggcacagtatgcggggggtctgtatcaccatcatcacatctcattttgagcaatctgtgagcatagggcatccctagcaggtcggtgctgccactttattagtgtcttctatgcgagaagcaagctcatcatccatgcgcggtctgttacaggtccttcctcgagagagccctgatctgtggtatc

SEQ ID NO: 18998 - DNA, 531 bp, Zea mays
  misc_feature (260)..(261): n is a, c, g, or t
  misc_feature (263)..(263): n is a, c, g, or t
  misc_feature (267)..(267): n is a, c, g, or t
  misc_feature (270)..(270): n is a, c, g, or t
  Coding DNA Sequence Number=SeqID_4595
gatccaatcagcagcgatgagtgttcgtttgttattttgattgcgagaactgaaatatgcagcaaggaacgaaaccagacctaggaggacatattaactcatttttaatgatctacacgcatgcgaggatagatatctacacctaacaagttgatacatatttacagtccacagagcctgaactcctaaagcacaaagctaatatagtgtttctgtctccactgagatgcaagttacatgctcgagaatcctgctttagnngnaganccnaatctcacgagacgtttattttagtggtgctctcagcccagattcgcacaggacacaacaggttacagcaaactagtgtgttaattatatcttccttccgtcacccgctattaaaaaaaataatccgactttatatattccgtctcctataattaaaactaatcctctcctgatagcgcatactcctatcaacttttcatccttaccaaaccccttaacccccatttgatccgtatgataccctatcatttaccgataccc

SEQ ID NO: 18999 - DNA, 445 bp, Zea mays
  Coding DNA Sequence Number=SeqID_4596
atgacagggcctgcagaacagatcccgcacagccttgcgcctttcatgaccggcccggcctgtgttggtgaagcccttcctcccgatggcctagatccaccagtggactaccgtgaggatggtgtgaccccttttttggtgatctcttgagtccgtttagaaatggtaaaatgctaacaaatgtggcaattattgtggctctatcaccggtcttcttaactggcttctgcttgtcgtcctcatgtcaccagaactgaagactagtgggactgatgtcttcgcgggtgcttcccttattttcactacgattgattgtgggtcaaggcggtgtttttacgataaacttgtcttgtaggttgtctctatcgcctgtccccttaatcgcctgcggctgaccgccctttcgtcttctgccccttttgtcctaagtcctcctgtagtgttc

SEQ ID NO: 19000 - DNA, 514 bp, Zea mays
  Coding DNA Sequence Number=SeqID_4597
aaaactggggcatcggcgcccgccacccccccctttcccctctttgcttgcgcgccggcgctcccccgactcttccgcttggttgggtttgcccctttttctgggccagggttctcctctccttctcccccctcttttccgccccctctcaatgcccctgctgcggtccccctcccccccgtttgccccccttgttcccccttttcggccggtgctcttcctcgcgcggtcttttcctctggggcccccccccctgtctcacctcttcaatacccccctttcttcgcggcggcgcccctcatcgcggcgccggtttttccccccccccccccttggcccccttcgtcccccctccggggcccccattgtctcttctctggctccccccccccctttggacacttcgattttgttggttttatgaacccaagcttttgtcccccccccctttttacctccccccttcttttttggggcccgggcccggccggacagtcccgggcacaggaaattt

SEQ ID NO: 19001 - DNA, 268 bp, Zea mays
  Coding DNA Sequence Number=SeqID_4598
ctggttttttataatttggtctgctttccccccccggggtggttttcgcttcccgatcgtggggtgggtaaggaactaaggaccccggtgcctggtttaggcgtttagctataaacgaaagcccgttcggccgcgtgcctggtttaactacccggccggttgatttttacccctttaacgtgttcgaaaccccacctgtgtacgtgtgtcctgtttgctgaagtgtgaaatgtcctgtgtgtatttggtatggatccccccggcctat

SEQ ID NO: 19002 - DNA, 570 bp, Zea mays
  Coding DNA Sequence Number=SeqID_4599
cgctgcaggcttgcgcgcgcgcctagccacctcccccatgcgctccgcgtctccccagctgcgtcgcgacccagcgccaccgcgtggcccatccctgcgccccagcgcgccccagccgctgtgcgcgtccgcagcccacctagcgcgcgccccagctctccccacgcccgcgtcccggcccctgcccgcgagctcgctcggctcggtggccagcggcctgccagcgcggcggcgcggccaaccaacccgcgcctcgccttgctgcgcaacggctcgccgccatcgtgctcggtcgttcccaagcgccgatgaagaaaaagccgccatcgcgagtcgctcgacgtcgcgccgcgcgtccctcgatgtcgcgccgcgcgtccctcgatgtcgcgccgcgcgtccctcgacgtcgcgcagcgcgtccgcccgtcgtctgtcccctggcctgtgtgcccaggttgcgccttgcctctacgtcgttgctgcatcccgccgccgtccgtcacaactcgccttgttgcgcagcggttcgccgcgtcgtcgccgttcaccacccgtcgtgagctcggc

SEQ ID NO: 19003 - DNA, 538 bp, Zea mays
  Coding DNA Sequence Number=SeqID_4600
tttacaagaacccagctttgctcatgcacaaattgaatataatagctaagcttcgttacattcatcaattgtggctggtccatttcacacataagcaaaccctattagcaacatccaagggtaatacatattaaaaataaatgcaaaataaattttttacaaagaaatcattatcagcacttgtctacagtgcttaatgacttactctgttcttcagccgctgctctaaccttcagaaagagcgttgcgagaccgggctccgacagcgagggccaaccacgaggcgtggccggcgccgcgcgaccgcaaaccggccgtccagcaccgcgcccgtcccgcgccacgacggcctcccggccggcgaacggcgcggccgccgtcctgcggaggaagcgggcggaccgggcaggggaaggcgaggcaagggaaggcagtggcgctccgaggacgcggcccgtgaggggggcggagcggaccgcgcgacctcacggcgacgacaacggcggcggctgtgcgggacaaatacgccattttctct

SEQ ID NO: 19004 - DNA, 534 bp, Zea mays
  Coding DNA Sequence Number=SeqID_4601
aaaattcgattgatcaggcctacagattcttgtggaaatctaagttaccacaaaaaatcaaagtcttcatttggcttgtgataagaaataaaattcttacaaaagataacctgaaaaaaattggcatggttctagtgagtgctgtttttgtggtggtctggaatcgattgagcatttgttttttaaatgttctattgctagatttgtttggagattgatccaaattgccttaaatcttgatttcattccaaaaagcattggggaactttgtgacagatggctgaacaaatctaaagacagaatctcaaaatttaatgatatttggatgtggagctatgttttgggctatttggagaaccagaaatgacctcattgatcatagtgctctaaacaatagttacatagacaaggttctagcagaaacttattttggtggtttcactgaatgttattgtttgaggaaaaacaatgtgaagtacatttcaagaatctatgatcaaggatgcttggaagcatgtcaagggcaccaaactt

SEQ ID NO: 19005 - DNA, 545 bp, Zea mays
  Coding DNA Sequence Number=SeqID_4602
gccattttggtgacctctccacctactctccccacccacccctacccgccgctctcacgccgtctttggcccctcctctcacgatcttcaccgctcccccccctgccgccgttcttccgttcagtcccgtccctctaacctccctctcgtggctcgttactacccacttagctcctcaactacactctgctagacacggctcgtcaacccgcctggcaaatacactccaatccctccgcctccatcatttgcttttctctcccgtccgcgctcgttctttcgccccttcctcacgggccggttccttcacttccacatctcatctcccacccgctctatgcctcgttgctctgttcctccacgacatcccttcccgcgcctactcactccatacaagtcacctaacagaatgtcgcccgacactgtctcctcgccacactcaccgctatacacagcgtctcgcgaccgcaccctgccccttcgtgtcctattcacttaccgcctgcctttacggcctaccactcctcgattctaacactccagct

SEQ ID NO: 19006 - DNA, 263 bp, Zea mays
  misc_feature (117)..(117): n is a, c, g, or t
  misc_feature (133)..(133): n is a, c, g, or t
  misc_feature (173)..(173): n is a, c, g, or t
  misc_feature (223)..(223): n is a, c, g, or t
  misc_feature (234)..(234): n is a, c, g, or t
  misc_feature (237)..(237): n is a, c, g, or t
  Coding DNA Sequence Number=SeqID_4603
cactgagaaccgcagagacaggcgtcttcgtactcgcctatctccgcgactcaaagctttccccaattcccccccttctcccatttctcaccaccgccgccgctccccccgttcaanaaacccatgagggagngcatctcgatccacatcgggccaggctgggtatccaggtncggaaacgcgggctggggagctgtactggcctcgaagcatgggcattcangctggatgggncanatggccggtggaccagaacatttggg

SEQ ID NO: 19007 - DNA, 396 bp, Zea mays
  Coding DNA Sequence Number=SeqID_4604
tcggcctcgacatcaactaaatcgaacatggccccgggataccaccaccacttcacctccgccgcccactacggctccgccgcggtgaaaccctacccctcccccactccccccaacggccccaagccgcggacccgcgagcaaacccccaggacgtttcgccgacaccgggctaggccctgtccccgtgcccctgccccggcggcagccaaggacccgaccgccttgagcgacgatttaatcacctggcgccgcgccgcctggcgcggtggcgggcgccgacccccaccgggccgaagcggcagctcctgcggccgaagaccgtggacgccgtgcggggcctggtgcgctggcgggcacgcttctcccaggggctcatgggcgtgctgctgcgct

SEQ ID NO: 19008 - DNA, 599 bp, Zea mays
  Coding DNA Sequence Number=SeqID_4605
agtgccctgtatgccgtacacagcaccgaagtcagtggtgcgagttagccgcgcccagcccaaaatggttccgacggccgtgtcttttgcatgttcgttgccggagaaggacacaacgaagacatgggcatccgcaccaggcgtcagtccgagaagggcgagagaatgcgagtgtcttcccagccccgcgtcaacgagcgtcggtcggctcgcggctgcgaccgtgggcggggcagtagattggggtggaagaacatgacgaaggcgcctttggcccattaggcccatgtaggagccgcgcctcctctccccaccctgctgccaccttccttctacctcctctccctgctcacagtcgccgccgcccctggtctccagccgcgccctcctctcatttctctctcctccccttccctcccaacgcgcagccgccaggagcaccgcgcacccgcgccgaccacccagccccaaccgtgccccggcaaccctgaccgacaccgcccgaccccgcgacccggccttcccgcgcctgcgcagcagcgccaggagtcgcgaccccgagcgccccttctcctctataaaatccgacgccgtgcctg

SEQ ID NO: 19009 - DNA, 285 bp, Zea mays
  Coding DNA Sequence Number=SeqID_4606
ggattactgtccatgaaccgaggtttgggtgatgttgtctacgtggagctgccagaagttggcgtcagtgtatccctttggaagaacaccagtgctgtcgagagcgtgaaggcgaccagcgatatcaattcgccagtgtccgggagtgtgtggttgcgatgaacagctattcaccgatgtctggagaggtggttgaagtgaacgagaaactcagtgacaagcctagattgttgaatacaacaacagttggtaatggatggcttattaaggatcaagctcatcact

SEQ ID NO: 19010 - DNA, 463 bp, Zea mays
  Coding DNA Sequence Number=SeqID_4607
gattttctcccaaagccgattaaagtttggggtaccccccagggtttttcccaagtcacggccgtttttaaaaacggcgggccaggtgaattgtaaataccactcactaataagggcgaaatgggttcccgggccccccctcgaggagcgccaggggggagcctcaacaacctcaacaacaggaaggggggaaggtggagccttcccgtgcgttgacagagaggtcaacgtcatcttcggcggacacagggtcggcaagaaagcaaaagacaacaaaagctcaacgatcgtcagatactgatggcggccaccggtcctcccgccccgtaccgatggtccgaacactcgatcaccttcactcgagcagatcagtggctcaactttgatcacccgggcaagtacccgctcctcgtcgatccggtgatctgagaaagccgggtgaaaaaggtcctggtggacgagg

SEQ ID NO: 19011 - DNA, 574 bp, Zea mays
  Coding DNA Sequence Number=SeqID_4608
gaggtgagctgtcacagccttttcaggctcttcttcctggcatccaccttcttcttctcggctgggattatgacgacaagcgccccgtccttcttgtgtgccgatgatggtcctacagaaggatcagaaggagcagcgttctgatcctgtatgcccaaagaactttggacgaggtggatgcaaaaactactgctggcgccgatgagatgttcttgctcggaacggtgttggtgctcctgcccaacgattaaagctgtggctgacccaacaaatggcctccccctccttgaacttgttactaatgattaaggcgcatgaaacgccccgaggaaaaaccccttagctaggcggggcaatacctccctcgcaaatttttcaaagcaaaatatttttcccagcgtcggtccattaaagggaaacattccggaagaaatggcctccaaacaaaaaaggcttccctaccaaccaagaaaaaactgggcctcacaaccaaaaaaaaaggcccccccagtcttttttttcaagggtggcccacaaaattccccccccaactaagtcgctaatggctcggaat

SEQ ID NO: 19012 - DNA, 470 bp, Zea mays
  Coding DNA Sequence Number=SeqID_4609
accctgatcttcagtcatcccccttggccgacgtcctccccattttctacaggtacgctagctgaaaatcgtgcgaagcgaagggtgtggatcaaagcaacccacaagacgatgtcgaccgatgatcctgaagctagatggactaagcgggtgtcagaataaaagttgatcgtcaaatggccatcatctaacaacactaacatagtgttatcccaggtacgctagatgattatgcgagctgaaggacatggatcagagcgaaccataagatggtattggtggattaatcttgtggatgcatcaagccagcaacagaatggaagatgctcaccaagtggtcgtcaattaagttaacaacactaacgtagtgtttatcccaggttgtaattttgttctgttgtggatggtgctaagtgccggtgggctcggccttcttctataagtatatcccgtctttagtttctctattg

SEQ ID NO: 19013 - DNA, 93 bp, Zea mays
  Coding DNA Sequence Number=SeqID_4610
tgcgtgctcctcaggccgcccatgtcgaccgcaccagatcagtactcgtcggtggcagtggtactagttggcggacgtatgcatctagtctgc

SEQ ID NO: 19014 - DNA, 336 bp, Zea mays
  Coding DNA Sequence Number=SeqID_4611
gcgctggccggcaattgcatggcctgccacaccgcgcgcggcggcaaggcctatgccggcggcacgcccatcccgacgccgttcggcacgatctacggacccaacatcacgcccgacgagaagaccggcatcggcgcctggagcgcggacgatttctggcaggcgctgcacaacggcaagtcgcgcgacggcacgctgctgtacccggccttcccgtacaccgaatacacccgcgtgacgcgggcggacgccgatgcgctgttcgcctacctgcgcacgatcacgccggtgaaccagcccagccgcgcgcccgatctcgatttcccgtacgaccag

SEQ ID NO: 19015 - DNA, 566 bp, Zea mays
  Coding DNA Sequence Number=SeqID_4612
actaggtgattagcgggcatccattgggtatctcgaagcacccctcgtaccacgacacactgccagccggcgttgctcgttttgctctgcctgcaatccgccccgcacggactgtactgtacctatacacctatatactacgacgtgcacctgtactacgacgtgctgctgtaccatactaataccagtgcgctgctgctcccttgccttcttgcttgcaccagccactcccgctttttttgctcgaacgatctactgctcgcgtcgcgtcatcccaccacctccatatccgcctattagataccacactcagtcgactcccggacccttctcttcggtgacaacacggtcaccgtctttgacatcatctaccctgtaagaaatcacatattttttacgccgatcccccccatgtcgtgtagtccaccgaggtcttcactgaccaggacaagaataaagaacatctcaaggttggtgcccacaaggttgttatctctgccccaagcaaagatgcacccatgtttgttgttcgattctatgcagacaactacacctcggatgttaac

SEQ ID NO: 19016 - DNA, 553 bp, Zea mays
  Coding DNA Sequence Number=SeqID_4613
atcccaaatcaactttacgcagtatcccagtataacagctacgaagtagtactactcctacacgggcttccccgcgggtcccaccattaagcagtcaagctcggcgttgcggaggcccagcgcggcgcggaacacgccgccgacggcgtcagacaggcggtccagccgcggcgcgagctcctcggtgcgcctcccaacctcctgcgccgccgggcgcacggctcccctcgccgtccggcccccgaggcccccccccgcacccgccgcccgcacggccccgccccccgcccggcaccgtcgccggcccccgacccccccgcccctgccgccccaccgcaccttgacgccgcccgcccgcgcccggcccccctcccccccccccccaaggccgcgggcccccgcgccccgcccccccccccccggaacgggcaccctgcccgccccccccgccgccgtccctcacggtgttcacctgcactatgaatcccattttcccgccccccccccttccttctaaagataaatggcgccttcccgaggtatattctaggga

SEQ ID NO: 19017 - DNA, 330 bp, Zea mays
  Coding DNA Sequence Number=SeqID_4614
aggcgactggaactgctgtcactccttgcaaatggtggcgataaggcgtgctgcggattccgtccgatcatcgctgtttcgggcttcgcgtacctccccggtggcgtgtgtgtgtcgagcatggggcggccggtgtcgtacgagcaggcggtggcgtggaaggtcctgagcgacgacgacaccccgcactgccttgccttcatgttcgtgaactggtccttcgtgtgagaaccggggggcgtagtagtcagtagagccaagtcgcctagcgtttgcggctctgttgtttgaactctgtaccccatgtaccgcccattttgcctgtgtcca

SEQ ID NO: 19018 - DNA, 540 bp, Zea mays
  Coding DNA Sequence Number=SeqID_4615
gaacacccgaagaagcatcacaataaggaagggccatgttatctaacagtcgtaatggtaggtcttcacatgaccaccttcgcctatgtcaacaggtggataagtttggaatttgaatatgaaagactaaagaaagatgccagcatttaccataatcttcatgagcagcttcagctgtcatcgtgatacaatctgatggaggagagcaaccgatgaagcggagaagaaaatccgtgaagcagccttcgccaaaggggtacgcgataccgctttcgaggacctgctggctgtggagaagaaggatgacgccttctggcgtcgtcacgggaagctgaggtcgatctcggacagcatgtaggcagcgagacagcagactaggcgatcgcactgactgtcatcgtcgttgccagtctaagactccaggaactagaaactgaatttgtcccttggtgagaacttgtgtgtgttgaaaccatggacggtgtgatcgtgctcgtcaagctcttgggcctccccctgtgccttgaactcttgagtcat

SEQ ID NO: 19019 - DNA, 573 bp, Zea mays
  misc_feature (449)..(449): n is a, c, g, or t
  misc_feature (523)..(523): n is a, c, g, or t
  misc_feature (534)..(534): n is a, c, g, or t
  Coding DNA Sequence Number=SeqID_4616
atcctaatcgatactgaaaaccaaaaggtaaaagaagcaagatctgccgcggctccattttctggtcgcctcctccgccactgccatctccctcctctgtcctccgtaccactcgtcttcgtctagccgccgaccgccaccaccatggcacccggcctctacaccgacatcggcaagaagaccagagatctgctgtacaaggactacaacacgcaccagaagttctgcctcaccacctcctcccccaatggcgtcgcaatcacagccgcaggaacaaggaaaaatgagtccatctttggtgagcttcacacccagattaagaacaagaaattggacagttgatgtcaaagcaaactcagaatcagatcttttaacacatcactggtttgaatggagtcggtactccagggctaaatcattatcaaatttggttgtcccgaaccagaagnccagggaaagctttgaatcccatacctaatgaaaaaatgctggggggaaaggcaaacggtccggcttaattccnatctatggggnaaccctttctggggggccttgggaagcaagacttctcac

SEQ ID NO: 19020 - DNA, 429 bp, Zea mays
  Coding DNA Sequence Number=SeqID_4617
ccaaaatacgattcggaggcttaatgggaaaaaaattttggccccccaaaaataaaacaaaaaaacgtgggggggcaaaaaaggggggtgcccgctttttttttggggagcctcccccgccccttttttaaggaaaaaccccccccccccaaaagtaaaaaaacccccccccccccgggttggatttttttttataatgggggacggggggtttttttttttctttcacgggggggcccttttttttttgcccaaaaccgccccccctcgttgtgcccctcccccgccgctccccctgtgttgttgccaacggggaaaaaaactttggggtgggtttaaaaaagttttttataagtggggggttatagggaaaatataccaccccccccctggtttttggaacaaattgcccccagatatattttaata

SEQ ID NO: 19021 - DNA, 411 bp, Zea mays
  Coding DNA Sequence Number=SeqID_4618
aatcatatcggcctctggaaagctagtgacgctgcctatccgcaagcacaggtccgtctcgccgatatggatggtgatggccgtgctgacttcatcggcttatctcctaatggagacgtgcgcatctggcgcaacggttgggtcaaggacaagcctgagtacttccaggccctgggcctacgtttcccgggccagaacaaaggtgatctccgcggcgtacgcttcgaggatatcaatggcgatggtcgtgatgactggatgtgggtttcgaataccggcgctacatctaccttcacaaactctcgcagctgcgccaggggcaagttaggcgatggcctgaacattgcctggcgagaagcattcaatgggaacgccaacagcggcccgactcatcttggaggcttcggcgac

SEQ ID NO: 19022 - DNA, 283 bp, Zea mays
  Coding DNA Sequence Number=SeqID_4619
gggccctcccccctgattgattggaaagggggttggaggaaaaaaaaaaaaaaccccccccctttgtttccaaaaaaaaaagttgttaggaaacacccccccgggaaaattgtttttattgggattggaacccgccaaacctgaaaagggaaaacggctttctattaaaaaagggggaaaaaagctataccgaactatttttccaaaagggcccaggcctaaaaacccaaggcgggataagggggggttggccccaagtccaaaatttaggatcccttggttg

SEQ ID NO: 19023 - DNA, 302 bp, Zea mays
  Coding DNA Sequence Number=SeqID_4620
ggacgtaaacattctttttatacattaggcccgtcgggtcccttccaaatacacacagtcaggacattttacactttaacaaacaggacacacctccccagggctgtcgtttcgtacacctttaactggttaaaaaaaaccggccccgtaattaaaccaagcacccggccctacctgcttttttttttagctaaacccctaaaccaggcccccgcgtccttattttcttacacacacccaaatcgggaaacgaaaaacccccctaagtggttaaagccacttggaatgtaaaaacttccctg

SEQ ID NO: 19024 - DNA, 368 bp, Zea mays
  Coding DNA Sequence Number=SeqID_4621
ttctcaaggccccattccagggcttttggaaccttcttccatttggccagtttggtttttttggaacccaaaaaaaacccgggggcggaaacgaaaaataacttttttaaaacgtccaagaaaaaccccccccttccaatacaaaggtttttttactgccaaatttgttgtggggccagtgcccctctttgggtgggggtccttatataaggtttccaaaggaggtccgggtgccaaatttttaactgcttttgggggtttttccggccacccccggtttttaaaaatttggaaaaaatttttttccctccaagaaaccaatttccaagggttcccttggggttgaacaaataccgccgttaaaattg

SEQ ID NO: 19025 - DNA, 263 bp, Zea mays
  Coding DNA Sequence Number=SeqID_4622
gggaatcggaacaccggtatgctgaagcaacacttttccagatcatgaatgcctttgagaaaaaccatttttacttcccacaagagttccacctttgttcacttcaaaatgttcaaaacttgcttttcagcctttgaaaccggttcaaccggacctgaaaccggttcaaccggttttgggactgttcctcttccatccctgctctgacctgtctaacagtcagagctgtcagaaaaattcatggcagatatttttgggaaacc

SEQ ID NO: 19026 - DNA, 525 bp, Zea mays
  Coding DNA Sequence Number=SeqID_4623
ccgagcagcggacacaatcttggatctactccgaccgtttcccctaagttaattgcacggatggcgacctactctgccctgcccacgggaacagcggaggcatcggatagaatcgcatgttccccgtgatctacggcggtttagttcaatctacaaggtcggggagtttgagaagagcttagggatgctagatcgagcatcagcgcaacatgagttgacctgaatcggggccggccgcggtgagctcgatcccacggtgcttcagaacatagttggggaaaatttgaaattggagcacccgtttgcaggattgggggtgaatctgaacggtggggaaacctgatgaaggtgccgagctaacggcgggttcgatttatagctcccaagaaatgggggggcttccaattgaggaagtgccccgggggccgcccggaaaaaaggaggggaagcttcaatccgggggaaaagggggttttccccggggggaagggaaccccgggggatccccgcggatatggaaacccg

SEQ ID NO: 19027 - DNA, 406 bp, Zea mays
  misc_feature (53)..(53): n is a, c, g, or t
  misc_feature (58)..(58): n is a, c, g, or t
  misc_feature (63)..(63): n is a, c, g, or t
  misc_feature (71)..(71): n is a, c, g, or t
  misc_feature (73)..(73): n is a, c, g, or t
  misc_feature (77)..(77): n is a, c, g, or t
  misc_feature (84)..(84): n is a, c, g, or t
  misc_feature (96)..(96): n is a, c, g, or t
  misc_feature (114)..(114): n is a, c, g, or t
  misc_feature (126)..(126): n is a, c, g, or t
  misc_feature (176)..(176): n is a, c, g, or t
  misc_feature (185)..(185): n is a, c, g, or t
  misc_feature (207)..(207): n is a, c, g, or t
  misc_feature (252)..(252): n is a, c, g, or t
  misc_feature (291)..(291): n is a, c, g, or t
  misc_feature (331)..(331): n is a, c, g, or t
  misc_feature (338)..(338): n is a, c, g, or t
  misc_feature (341)..(341): n is a, c, g, or t
  misc_feature (368)..(368): n is a, c, g, or t
  misc_feature (375)..(375): n is a, c, g, or t
  Coding DNA Sequence Number=SeqID_4624
caaattaaccatttggccccagtagccagggggctccatttggattatccttncccantccanctaagggncncccncgttttntccaccaaagtngcgtccctcatttcaaanccaaatgttttngactttggaagttccgccagccaagaagccaagcggatgcccccgctggncattcccanccaggaagggaaccccaaaagnttaacagcttccatggcttactgaaatcccatccatccacgtttnctgtttcaggaactggtgcgttgctggatccgttttacnttaaaacagaaaagaaaagcctttgcgaaagtggaatggncgctagnctncaagagaaggagaagcatccaggcccnccccagnttcctcgaactctgtcgggacagggaaagaa

SEQ ID NO: 19028 - DNA, 565 bp, Zea mays
  Coding DNA Sequence Number=SeqID_4625
acctgacctgagctggggcaaaaaaggccaatttaagttttttcggcccccgcccggaaaaagcccggttctgatctaataccacccccaggggaaaacccccccggggccgattttttttggtttttaacccttttttttggaacaaaacttacccaaaaaccccgggaaaacttcagttttaaaacccctagctcggggtcagggccaatgacgccaagctcttacggggcaacggcgtttaggtttgacgggaaacccaacgtgccccctagctcggcaccaaaaattttcccccccccccccgccgttatcctcttcccgccgggtccccgccgttttgggttaccccggcgccaaaacccgggggggggggccccccctttcccctttctagaagcccctacaaaatttgggaggcccaggccaccgctatttttggggatcccccaacaggatgaaaatctgaatctcaacccttaggacatcactccaaggatgaaaattttcggaaaggaggggccgacatatgttttcctagccagggccatacggaaatgttttt

SEQ ID NO: 19029 - DNA, 542 bp, Zea mays
  Coding DNA Sequence Number=SeqID_4626
gtcccgtgtcctagcgtgaacacacaccacttgcccgagagtcgaaggtgccaagccaacgcaggtgcagatggcggccgagcaccacctcccgccggagcacgcggaccaccacagaggcgggaggaagggggtccacgccgacgacctgaagccgcgctggtggcgccgcagcccccggtacagctactactacggcgggggcgagggcgggggcgcggtccgcgccctctgcttcgccgtcctcgtcctgctcctggccgcggggatcaccctgctggtgctctacgtcgtgtaccgcccgtcccaccccaccttcgccgtcacctcggccgccgtgctggcgctgtacaacgccaccgccaacgtcgccgtgttcgccggcgctgcctccgtgctggtagccgtgctggccgccgcggtcctgtttatgctggtgctgctcttcggtcgcgttcggtttgtgcatgaacctttccacctggcggcggtcctcgtattttttggtctgagccccactctctcctacctgcttgactggg

SEQ ID NO: 19030 - DNA, 442 bp, Zea mays
  misc_feature (396)..(396): n is a, c, g, or t
  Coding DNA Sequence Number=SeqID_4627
ccatgggttgttcgcccaggtcaagcccacgctgaacagaatcatgccgagagaaaacaggaaatatcctatccagtccagagccttgagcttatcccgtgtggtcagagatacttcaagaggccgtgggggtggtttgaagaggcagaaaacggcgaggaagttgaccgcaaagagccctataccaatataccagatgattcggaagccttcgtcgctctgttttgtgagagcgaagccgacgaggagtgtaaagattcctgcgaaggaattcataatgttgaccccggcttgcgcgagtggtcgccagcgcctgggcagaatttcagatgcgacggtgtagagcaatgaagtcgatcccgatcctacaccggccatcaatgacccagcaattgncatggtcatagaaagtcgctcggctgatccaagattgacccaacaa

SEQ ID NO: 19031 - DNA, 177 bp, Zea mays
  Coding DNA Sequence Number=SeqID_4628
atgtgcatagcattgtttcatattatgagtgtggtatgttttatcgtcactttccaaagccccagtataattaatcaaaaaccagcttttgctagtgtttcaagcgaagaaatagcagctactatcactttagtgtcggaatcaccaactcagtcaatcaaccgaagaattagcagg

SEQ ID NO: 19032 - DNA, 526 bp, Zea mays
  Coding DNA Sequence Number=SeqID_4629
tgcgcattgctctcgcggaaattgccgccagcgccgtccaactggagctgcaagccagcggtggcaaggcctacctgactgcccacggcagcggtttcgcccggcgttggcgcgagtcggcgtttgtgccgatcgtgaccccgagcttggtgcagttgcgcaccgagttgaaccgtcaggccaatctatgagccaggcggtactgcatgcccagggaatttgcctgggctatgggggcaactcggtgctggaagggttcgacctgcaattgcagcccggcgaagtggtgtcgatcctcggccccagcggcgttggcaagtccagcctgctgcgggtgcttgccggtttgcaggcgccccagggcggcagcattcacctgctgggcgagccgttgaatggcccgcatccgcgggtggcggtggcgttccaggaccccggcctgttgccgtggttgagcctggaaaagaacgtcgccttcggcctggactttgccctgcgaccgccacctcggtcctgaagaacgacg

SEQ ID NO: 19033 - DNA, 368 bp, Zea mays
  Coding DNA Sequence Number=SeqID_4630
gcaccgaggaaaaaccaccatttatatatgtacatacacagctcttactaaagtgtgacgagaagagatgattaaggattaaaagaaaaaaaagaaaagaaaatcaacctactcccataggaccatcacaactgtagctggcgacgccggaggggggcaaaagcatgcgccggctaccgtcaggagggaccgcaccgcgcgcggggatgctgggaacggcttcccgagtaaaggatcggaccgggccgtgttccgcgagttcgtgtttcgtctgaccgatcgtgcaggagttgggacgccaccggcagcacgcgaatacctgggccggctccccgtgggccgctggacctttctaccactgcacgtgc

SEQ ID NO: 19034 - DNA, 565 bp, Zea mays
  Coding DNA Sequence Number=SeqID_4631
gtaacaatttacaataaccagccattacattgcatttgcttctttcttttaaaaaaaaaaaaaaaaaaagaaaaaaaaaaaaaaaaaaaactcgagggggggcccggtacccattcgccctatagggagccgaataacattcctctgggccgtcgttttacatcgtctcggactggaccctcccggggggttacccaaacttaacccccttttggagaaatttccccctttctcccggttggggaaaataaccaaaaaaggcccccccccgaattccccttttcaaaaaatttggccaacccttaaattgggaaaaggggccaaatttgaaaacgctttaaaatttttttgttaaaaatctccggcgtaaaatattttttgtaaaaaccccccttcttttttttttccccaaaaagggccaaaattctcgacaaattccctttttaatactcaaaaaaataaccccccgaaaaaggggtgcgaggggttttcccccccttgtgggaaaaaaaaatcccccttttttaaaaaaagggggcatccctccactcgcaaagggagaaaa

SEQ ID NO: 19035 - DNA, 498 bp, Zea mays
  Coding DNA Sequence Number=SeqID_4632
cagttatatgacaacttccctccttaactgcgaaagtacctctagtgtaatggttaaggctttcgagtagcacctccaggtcccgggtttgatccgctcggggagagagaatttctggcttggttaaaaaaatcccctaattgtgccccgcccgctcccgggttacgtcctgcgcgccaccctccggctgagccgttgcagagtgggcggtgacggcccgctagtgatggggggccaaggtttggggattttctcggccgggaccatgttttttgtctcttttatataatatcgggagggcggtctttccctccccggccgagttcttttcccctccttaactctacacaatattggctatataaaataaatatcagaaaatgcttccatcaccaattacttaatggggattggggacaaatcactcctaacataatgagataccataaagtcaagtgagctgatcgaggtaataagtgacaaaaatcagccaacccc

SEQ ID NO: 19036 - DNA, 457 bp, Zea mays
  Coding DNA Sequence Number=SeqID_4633
tcaggatcggcggtccggccaagactaaggtgaagaccgaccacgcctcggtgccgttcgaagaccaatgctccatcctcgagaaggaggccgtgaacgtgtcccttgagaacctcaagacgtacccgttcgtcaaggaaggggtggagaaagggaccctcaagctggtcggcggccactacgacttcgtcaatggaaagttcgagacatgggagccctaagccgcgcgcggccggccaaattaacagccgcagcaaggcttcatcatataactccaacaaggctacaccatatatacatgcatattatatacaaacgctcccgaacctatttgccgcgtggagtacttatttgccgctatatactagctttacacataccgggattgaccgtcccggggagaacaactttactggtgataagcaatacctgcggtgctttggctttctaacgcggg

SEQ ID NO: 19037 - DNA, 498 bp, Zea mays
  Coding DNA Sequence Number=SeqID_4634
ggcccacatcatcgcgcacgaaatgggcgtgcagctgcgccagacctccggccccgtgctggaacgcccgggcgacctggccgcgctgctgaccaacctggaaaagaacgacgtcctgttcatcgatgaaatccatcgcctgtcgcccgtggtcgaggaaatcctctatccggcgctcgaggatttccagatcgacatcctgatcggcgagggcccggccgctcgcagcgtcaagctcgacctgcagccgttcaccctggtcggcgccaccacccgcgccggcatgctgaccaatccgctgcgcgaccgcttcggcatcgtttcgcggctggagttctacaacgccgacgacctcggccgcatcgtcacccgcagcgccggcctgctcaatgccggcatcacgcctgacggcgccgccgaagtggcgcgccgcgcccgcggcacgccgcgtatcgccaaccgcctgctgcggcgcgtgcgcgactacgccgaggtcaa

SEQ ID NO: 19038 - DNA, 346 bp, Zea mays
  Coding DNA Sequence Number=SeqID_4635
gaccgcaccgctgcagaggagaccacgcctgtgttcttggttcacccggcccgaacgacatcgaccggatccagcgcggggccggggatcgacctggtcctagatggagctggcggtccttggtgggaagggattactgggggaaacttttgtccccgagtccctgatcctcccccagggcatccatgcgctctgcgacgacccagagctggaggacggggggatcttggccacgctacggagcctttccaacgaaaggggccgtggcggtttcgcccaaacccggcggctggtaaccccacctggtgggcccccggattttccaaaggcaccctaactggaaggt

SEQ ID NO: 19039 - DNA, 377 bp, Zea mays
  Coding DNA Sequence Number=SeqID_4636
gatgtaacagttggcgacaccacacctgcgtacacaaaacacgactcagtccctcagaaagagaaggaaaaaaagtcaaatacaccgagaaaatcgcagaagaagaggatgaagacagtgagtatagcacactcgcccccagtgtggggcatcatggagacgatgacaatcatgttgacgcagggaggggatgttggatcttatggggtgcggaggagtgggaggtgggagcatatcaagagccttttaacacgtatgagtattatcacaatgagtctagctcaatacgcgtgtgttgtgagagaggtggacctctgtgtcgctggaaaactgtaaaagagcttgtattttagtattgtgaaattcgcttgtttttt

SEQ ID NO: 19040 - DNA, 110 bp, Zea mays
  misc_feature (84)..(84): n is a, c, g, or t
  Coding DNA Sequence Number=SeqID_4637
aagaggagtggttgcgccctcgcccaacggctcgcccggccccgtgccgcttgttggcttgcgcccttgtgcggggtggagtgnttgtccgctggttttgtgcccatcgc

SEQ ID NO: 19041 - DNA, 102 bp, Zea mays
  Coding DNA Sequence Number=SeqID_4638
aatttcttagggatatgttttggtggaggaggattattcagatttttcggaaggtaaggaagtatcaacattcccacttccctgtttgactccattatagag

SEQ ID NO: 19042 - DNA, 598 bp, Zea mays
  misc_feature (573)..(573): n is a, c, g, or t
  Coding DNA Sequence Number=SeqID_4639
gccaaaaccggggaccacactgataaaagggtaaagggggtgcccgtacccccaggggttcgatgggagaaacgaactaactgatggggaatttaaaaaacgggcgggctttagggtcccaaggggggtgggtgtttcccttcccccagggggtttgtcccccggaccccccaggataaatttggcgccaaggggcaatccccgggggaaaatgaacccccaattttattttctagttggttcaaagggccaaaaaaaagtggggccctttttgggttgccaaaaaaacctttggggagaggggtttcccccccctttaaagccccaaaaatggtttgaagaggaaaaaaactcctttcgagaaaaatggtttttttttaaaaaggctcatccgcaatttccccatgcaaaaaaagggaacggagttcgccccctgaacaattccttttttttgaaaaaaggcccccacagccaggggggaaatggtaaggaaaaaaaccttaaggggtcccttctttttttttaaaaaaatgggaaacaaaaagaacggcgccggggatataaatttaaaancgcgcttccgattccttcccacgaa

SEQ ID NO: 19043 - DNA, 182 bp, Zea mays
  Coding DNA Sequence Number=SeqID_4640
tcgacgacactcttgaccagatttctcaacgcctagatgctcctctgactcctagactggtagtgcccatagacgtgaagaagcagccatgggagcagaaggttcctctccacaaccgctggcatccagacatccctcccgttgctgatgtaaccgaaggggaactggacggcatagcgctc

SEQ ID NO: 19044 - DNA, 319 bp, Zea mays
  Coding DNA Sequence Number=SeqID_4641
gtccccgtgctcaccggccatggcgcccgccctccccgcgcccgctcggcctcgcccttggcgcccgcgcggcgtccctgaccccgccccgcgctcgccagccccgaccgcgcccgaccccgttcgcccgtccccggcactcgccgaccccgtcccgcccgcgcgcgtttccccgcccggcctcggccccgtcccggccatggcgcggccatggcggcccgccgtgatccacggtgccctcgctcgcccgtgctcgcccgccccggcgtgcttgcccgcccgccccgacgtgtcctgctcgcgtcgtgacggccccggc

SEQ ID NO: 19045 - DNA, 210 bp, Zea mays
  misc_feature (56)..(56): n is a, c, g, or t
  Coding DNA Sequence Number=SeqID_4642
tttactgggctctgcatgtaaacgtaaacgcaaagggcagtgaaagtagtattggntgttcatagttcttattttagaacctgcaagttcagttttagtttctaatgggttttaactgcacccaaaggtatggcagcatgttcatctgatgcagcttctgccattctgcatactgccgccattgaagatagcctaaagcatttcctccag

SEQ ID NO: 19046 - DNA, 305 bp, Zea mays
  Coding DNA Sequence Number=SeqID_4643
aagttcgtcgcgcgccccctgtatttctctgtggccgacgctcagctcctagctctggcgcgtgtccctctgctcagctccggccgcgagcagctccctggtgcttggacccggctcagcgcgctccctgttcccatcaccgcgtgcgcattctccctgcccaatcgccccctttcttcatctccctcccgcgcgcctcggggctcgcccctgccgctgcttggacggcgccgcccggctctggtcaaagaccctccccggcccaccccgccgctcgcatgcctgtcgtgctcgtgcctttcccc

SEQ ID NO: 19047 - DNA, 83 bp, Zea mays
  Coding DNA Sequence Number=SeqID_4644
tggtatgagtgcctgtgagacttttttatcactaatggcttcaaagtcggaaaagttggttctactctctgaaagggaattag

SEQ ID NO: 19048 - DNA, 426 bp, Zea mays
  Coding DNA Sequence Number=SeqID_4645
tgcggtctgttctttgacaccaccgaagggatgtccgacaacaattgcagcttttcttctgtcgggagaaccggagggtggttcgtacaggtggcctgcaagcttgatgttgcggctatcaaatgtgacatttcgtggaatcgtcatgatgttcaggccaggtaatgtcattggtagagactatttagtatagggaatcggcaaggagcaattgctgagacacagctggctatttatgtaggggctgaaagcccgacagtagcctatccgcggatatgtccgggctattccggggcatcttgccgctctctgacactctcggcaagcttgcaacaagtcactgatagacaggataaataacatgagtctaccacgccgtcttccaagctgcttatgagcgccatccaccccgaagggatccgaaat

SEQ ID NO: 19049 - DNA, 498 bp, Zea mays
  Coding DNA Sequence Number=SeqID_4646
gggatagtttctcggagccatctatatggagatgtgatgggaggagcgatccagccaacgtagagtggggatggtgatcagcatggcaaatgcgtctatcgcggcaatcagggtctcagtcatatcagatgagggcgcgggtgtaggtgcttgcatgtggcaggcatgacaccgtctaaggcaggattctgttgtctcggcccttggatggatcaccatcggaacaaccaccaacatatgcctcaggtagggaatacggttaaagtttttgagacatcaaatgcaatggtggcgagggatcctcctcagcggacgcaattgatccatgcgatgatgagatggcaagagtgcattcttctattcttccagagaatatttcatgtgaagcatgagacagaacaggttcctacaaaaaatcgaatgttctgaatatcacctgtacaaatgtgagcaaaggaatactgtatattcgaaagtatgtcagtgcagtgtttcgga

SEQ ID NO: 19050 - DNA, 210 bp, Zea mays
  misc_feature (136)..(136): n is a, c, g, or t
  misc_feature (175)..(175): n is a, c, g, or t
  misc_feature (184)..(184): n is a, c, g, or t
  Coding DNA Sequence Number=SeqID_4647
cctcgccgcaaaaaccctaatggtgtctggtgacgcctttaagtaagatggacattaaggcctttcgcccgcggtgccgtcgaagcctggggcggctgagtttcctaatgcccgccccgctggtacgagaccgtcnttctgcggctgtagcctcaaattccttggggaaaggggnttgttgggngtaatctgggcctggcgggatcagct

SEQ ID NO: 19051 - DNA, 283 bp, Zea mays
  Coding DNA Sequence Number=SeqID_4648
gtacatcctctattcttccctggatatgaatacctatcccccacagttggtgttatggtctttagaagaagtgatggtccagttgtctttaaaggtgtgttaaagggaaagttttatctagtagattttttgaacgataaaaccaaacttgacgcatgcttaattgtaaaaaccaatatagcctagttgtggcatcgcggacttgctcatgttggaatgaagaaccttcgtaagcttctaaaggacaaacacgttttagaactaactaatgtttgatttgaga

SEQ ID NO: 19052 - DNA, 415 bp, Zea mays
  Coding DNA Sequence Number=SeqID_4649
gtgtcgcaacagcatgctatccgttactcattactgcattattgcagctcactcagtacacggcaccatatccagattatatgcaagatagctaagtgcttcagttccatcgagcagtctctgcaggtttaaaatatcctcgggaatcgggatcctcccacgctcgcgcttagtagcaatcctggcttatgattccctgagtacgctgggctgatacttaccgagcgcgatatgagccccttcacaggaatgtggaaacggaactccttgatcgagccgactacctcagataacgatctcaagcggcgctgaccccgcggccgcgtctccgatgagctcgatcacgtcatccagcaccttcccggcgtccacccacgcctcagcatccgcatagacctcattcctgtccgcaagc

SEQ ID NO: 19053 - DNA, 320 bp, Zea mays
  misc_feature (29)..(29): n is a, c, g, or t
  misc_feature (177)..(178): n is a, c, g, or t
  misc_feature (185)..(185): n is a, c, g, or t
  Coding DNA Sequence Number=SeqID_4650
ttgggctggttggaccatgcgcttagctnctaaggagatgggagcaggttcccgccccccagcagtgccaagatgtggggaatggccccacccctggggcagcgcgagatatctcccctctttttccggcggcggaggagccactccgggggggatcgcgtgcgcatgttcgcgttnntcgtatncgatgacgattatgcatagctacacatttgaatcagctgcgcgagactgctagaatcagttagaaagtgggtggcattcatcaagaagtcattcgattagaatgttctagctactggtcttgtgcgaattcctgc

SEQ ID NO: 19054 - DNA, 380 bp, Zea mays
  Coding DNA Sequence Number=SeqID_4651
atgtccttctccaacaacgaacaagtatgcccgccgattcccttcccttccgattactgaatcatcctcctagatgccctctttgtgaccaagagcctgaaaccatcaaccatttttgggtttcttgtagcttttccagattatattggtacatcactcttcggaaatttgggctccacattcttgcccctctccaagatgacacaaacttcctgcggtggtggaaacgtattgctgatattgtgtcagatatgatcaagaagggggtaaattcacttttgattctgggagcctggatgatctggaagttcagaaacagagtggtgtttgacgggtctccccccaatatcactacaatcttagaggccactgctgagaaa

SEQ ID NO: 19055 - DNA, 592 bp, Zea mays
  Coding DNA Sequence Number=SeqID_4652
gtgtcaggaatatttcgctcctcagccccctcatcgttgagaagcttggctccgcgggcaggctggtccactgatactaccacatccagaacaacatccaataaatgaattccatcctctcatgcatttgggtccggggatcatactgaaacatcagcaataacaaatggaacgatccgcctccgcgctaattttgtggcgaggaacgcattgagagagtccgtgagaatcatgaccaggaaatagcttacccccgaggcccctgtagtttttgtcaggagcgttctgacaatctacctgcgtgttcattttgacaatttcagtttagcaactgttctgcgtaacatctccttaacatgtctgcacaggttattcttcctgaacatttaattctgccattgccagttacatgtctattgcgggctctggaactgggccagcgaatcctccaatgcaccatggtgttgcaccagcacttagaagctctcgattcccgagaggatggaggcggcgcgcgtaaagacgcttactagacgccgccaccggaggaagccggacatggctgtggtgtcctggtgcgtgcggattatca

SEQ ID NO: 19056 - DNA, 425 bp, Zea mays
  Coding DNA Sequence Number=SeqID_4653
aaagggccccgccacacagatatgccccctcttctcacaaatatttttgccctaacacccagaaaagggggcgcaaagggcggcataaattgttgataagcggtggtaaaatattatttttgtgggaagaacaccaccccccgcgcaacaacatatcttcttgcgacacaaaccacacaccttatttctttatttactaccaatttagacgccccaaacgacgcccacacccacaacctctccctctacattcaccccgacacattatacacccacccccaccacatcccgccgggcggacggcgcgctctctccccttagtcggtgtgaaaaataaccccctcctcccctcttaaacaacacacgggggccgtcttccccaccacacacgccccgcgggaacataatctctcctctttatatgg

SEQ ID NO: 19057 - DNA, 260 bp, Zea mays
  Coding DNA Sequence Number=SeqID_4654
gtgcgccgtgcttgcaccaggcttgttccctgcctcgggtagcgaatggggcggagggggaggccctcatgggtccccgcccccgggggagctcaggtctgttctcgccggggcccaatcccgggccctccgagtggtgcctccacttcatgttatctttctgaatgtagtgtcgggcgcagaagcttcgcagtataggaattggctcatcgaagtcgatatctgctgtggggtcgagcttttttcgtggtcgggtgtcg

SEQ ID NO: 19058 - DNA, 389 bp, Zea mays
  misc_feature (26)..(26): n is a, c, g, or t
  misc_feature (72)..(72): n is a, c, g, or t
  misc_feature (179)..(179): n is a, c, g, or t
  misc_feature (192)..(192): n is a, c, g, or t
  misc_feature (202)..(202): n is a, c, g, or t
  misc_feature (219)..(219): n is a, c, g, or t
  misc_feature (285)..(285): n is a, c, g, or t
  misc_feature (313)..(313): n is a, c, g, or t
  misc_feature (318)..(318): n is a, c, g, or t
  misc_feature (334)..(334): n is a, c, g, or t
  misc_feature (347)..(347): n is a, c, g, or t
  misc_feature (350)..(350): n is a, c, g, or t
  Coding DNA Sequence Number=SeqID_4655
ttaacctgtgagactgtctctgcggncgaagcgagaatctccgatcagcgatgaatgcccccgaccgatacnaacgattcgtcgtccctgaaggcaccaaaaaggtttcgtatgagagggacacgaagatcatcaacgctgcttccttcacgattgagagggaagaccataccattggnaacatcgtccgcntgcaacttcnccgcgacgagaatgtgntgtttgctggataccaacttcctcatcctctcaagtacaagatcatagtcagggattcacaccacnagccagtcttctccaatgcaagcatacnaatcngagctatcaatgaccntgacaaggagctngantttctcaagagccaatttggaggtatttgccaacccaag

SEQ ID NO: 19059 - DNA, 231 bp, Zea mays
  Coding DNA Sequence Number=SeqID_4656
agggtcccaggtaaaagccatcgcgcagcattcagcgttatacaaactacaaactgcccaacactgtcaacgcttttaagcacatctaaactcttggccatagtccttcacaagtgcgacaggggggctctagtttcaaacacaaaagcccgtaaaattagcggcacatatttgtttcctttgccaaaaaaaagggaagccgggaaaggactctcccccaggaatacatca

SEQ ID NO: 19060 - DNA, 560 bp, Zea mays
  Coding DNA Sequence Number=SeqID_4657
taatccgctccttagaccatgatgggggaaaattgaaggacatacaaacctcgagatctacataactgagttctataaggagatttttggtgaacctttggatatcaacatatcccttgatgaggaaaacattcagaatattccacatgcctcgccctcggaaaatgaaatcctaacatctccattcacaattgaggaggtaaaagaagctattttcggaatggaaaaaataaagcactagggccggatggcttttctacggaattctataaaaaattctgggaaacaatcaaaggtgatattatactcatgttcaaagacctgtaccatggtaatttacctatatttagtttgaattttggcgtgataaccctaatacccaaaatctaagaggccaatgtcatacaactgtatagacctatttgcctacttaatgtgagtttcaagattttcacaaaagtatcaatgaatagactgaatatggtggccaacaaagtgataaacccaactcaaatagccttcatgcgtggacggaacatcctggaggtgtcgtcatacta

SEQ ID NO: 19061 - DNA, 356 bp, Zea mays
  Coding DNA Sequence Number=SeqID_4658
tacaagaaataagtcccgcgcgcgcctgtgcctcctcctcgccactgaccccgggggcccgcttgtctggctgcgttttcttctccccgtcgctggcgaatgggacctgggcgccagatccgtcctcaacgaaatcgccgagaatggcggactgatgcgcggagctgttggagtcttccgtgatcctcgcagtagagctagcaacgaccaattccacggagccctagtccatataatggcttgcctggtcgcttcggcgccgttgggagattccggttgggcttcacagcgcgccgccatcggtccactcctcggcgaactctcggcgtgcgtctacgtcggcaacagagaagagc

SEQ ID NO: 19062 - DNA, 290 bp, Zea mays
  misc_feature (53)..(53): n is a, c, g, or t
  misc_feature (128)..(128): n is a, c, g, or t
  misc_feature (155)..(155): n is a, c, g, or t
  misc_feature (179)..(179): n is a, c, g, or t
  misc_feature (202)..(202): n is a, c, g, or t
  misc_feature (242)..(242): n is a, c, g, or t
  misc_feature (257)..(257): n is a, c, g, or t
  misc_feature (263)..(263): n is a, c, g, or t
  misc_feature (265)..(265): n is a, c, g, or t
  Coding DNA Sequence Number=SeqID_4659
cagtccccgaatccgaaagcttggtggcctcggtaaccattttcgattcaatnggcgccgaacgtcgaaagctggtcgacgggcatcaagcgggggcttcgcgggtcgcacagttacccatcggcggnggggctgtggggccataagggcccaanaaacggggggcggccttccccaanggccgacaaggccggccggccgncgggggaaacccaagttctaccctgggccgaacgacgtcnaaggccccggggttnccaggnancccgcaaggcctaagcctaacaagg

SEQ ID NO: 19063 - DNA, 355 bp, Zea mays
  Coding DNA Sequence Number=SeqID_4660
ggccgcaacccgctagtcgtatagctagtccaagggcgccccgagatcgaaggttcggaaagcatcaaccaggcggagggtgccaaaaggaccaaggcggcgtggggtggagagcgccggggccaaccacgcccgggaaagcctcaaggagaccgccaacgacccgctcgaaaagtactgcaaggccaacccgggctccgaggagtgccgcatcacgacaacaagctatagtggtagctatatagggcgtggatctccggccgtggaatgtactctcgatcggcgggtcctacgtggaactctcttcgttcaagccagagcagcaccctctcgtatgatatgatccaccgctggg

SEQ ID NO: 19064 - DNA, 430 bp, Zea mays
  misc_feature (28)..(28): n is a, c, g, or t
  misc_feature (33)..(33): n is a, c, g, or t
  misc_feature (40)..(41): n is a, c, g, or t
  misc_feature (45)..(45): n is a, c, g, or t
  misc_feature (55)..(56): n is a, c, g, or t
  misc_feature (87)..(87): n is a, c, g, or t
  misc_feature (89)..(89): n is a, c, g, or t
  misc_feature (96)..(96): n is a, c, g, or t
  misc_feature (98)..(98): n is a, c, g, or t
  misc_feature (113)..(113): n is a, c, g, or t
  misc_feature (124)..(124): n is a, c, g, or t
  misc_feature (133)..(133): n is a, c, g, or t
  misc_feature (155)..(155): n is a, c, g, or t
  misc_feature (168)..(168): n is a, c, g, or t
  misc_feature (171)..(171): n is a, c, g, or t
  misc_feature (174)..(174): n is a, c, g, or t
  misc_feature (179)..(179): n is a, c, g, or t
  misc_feature (194)..(194): n is a, c, g, or t
  misc_feature (201)..(201): n is a, c, g, or t
  misc_feature (225)..(225): n is a, c, g, or t
  misc_feature (227)..(227): n is a, c, g, or t
  misc_feature (236)..(236): n is a, c, g, or t
  misc_feature (242)..(243): n is a, c, g, or t
  misc_feature (256)..(256): n is a, c, g, or t
  misc_feature (269)..(269): n is a, c, g, or t
  misc_feature (279)..(279): n is a, c, g, or t
  misc_feature (284)..(284): n is a, c, g, or t
  misc_feature (294)..(294): n is a, c, g, or t
  misc_feature (310)..(310): n is a, c, g, or t
  misc_feature (319)..(319): n is a, c, g, or t
  misc_feature (339)..(339): n is a, c, g, or t
  misc_feature (349)..(349): n is a, c, g, or t
  misc_feature (402)..(402): n is a, c, g, or t
  Coding DNA Sequence Number=SeqID_4661
accgagagaggataccaaggcactccgnttcgnggatgcnnatcnattccattcnnttccatactaaggctaggcacaagcgaaccntncccatgntngtccgacggcagcgncgtggtgacgntgtacggcngcaacggcgcgtcagctgctgnagccgtctcagcngcncangtcgncgactttctccgtcnaggtggngctgacgcagatgctccggggcgncntcatcatgnacgtgnngacccccgagcangcgcgcctcgcgnaggaggccgncgcgngcgccgtgangacgctggagctgctntccccgccnacatccgcgcgtagggcgangtgtcgcgcntgtcggacccgggcctcatccagcgacatcaagcgcgccgtcaccatcccggncatgttccaggtccgcatcgagcacttc

SEQ ID NO: 19065 - DNA, 88 bp, Zea mays
  Coding DNA Sequence Number=SeqID_4662
gctccatctggctttggtccccccacccgcaggcagcgagcgacagcgaacggcgaagggatggccaagggccaggtccgtttggcga

SEQ ID NO: 19066 - DNA, 275 bp, Zea mays
  Coding DNA Sequence Number=SeqID_4663
aaagatcagcaagccaacacgcggacacgacgctttcctcgattgcttccaccgtattgtggaaggctcctctccagattccactctcgtcttcttctgcggctcgggctcggctggcttggcttcctcagccacttcattcaccttgggcgcttcgaccggaggtacctacgacttgaccttctcagccggggcatttgcagccacctaggccttgggctccttcgccgtagacttcgacttaggctctcctttggccggatcctttgtctagg

SEQ ID NO: 19067 - DNA, 555 bp, Zea mays
  Coding DNA Sequence Number=SeqID_4664
atatttctactatactttcccatccatacatagaccgctgatgcactactgctacgaccgctccgacttcatgtctgtgtcttcgcataccgagaggcaccaccacctaaaacttgttctatgtcgacctgcaccattatggtcccatgctctcatgcccgcatggacactgctgatgatagggcacatcgcctatcctgttggccacgacgcgtcgttatctgcggagctgtacaagcctaatctgtcctaagcgctcatagacaacttgtcaccgattgggccattcaccgttcccagctcactcattataactgcaccctgctccaaagcttgacacctaggacatggagattactctgcctcacccatgagagcttttcccttgatgcatactcttggagtcccctatgcatgcgagcttactatcccagtactgcagagctgactacatgaaacttgaggggtgccccccttccatcacctgctgcgccgcccccccgctcttgacggcctgctcctgcggacccagtgggatctctgccgtcgcttatg

SEQ ID NO: 19068 - DNA, 237 bp, Zea mays
  misc_feature (138)..(138): n is a, c, g, or t
  misc_feature (174)..(175): n is a, c, g, or t
  misc_feature (186)..(186): n is a, c, g, or t
  misc_feature (188)..(188): n is a, c, g, or t
  misc_feature (208)..(208): n is a, c, g, or t
  Coding DNA Sequence Number=SeqID_4665
ttggtgagaaggaggattcccgattgagctaaatggtttaagggtagcagaagtttttgaggccttcctctggttgggtatctttagatgatatcccattttggtacgtttgggttttgggcacaagttgtgggagancagctgggtagccggcagcccccccttctgttttcnncaacaaaaaananttgattttcttgagccaatnttatctatcgagacgtttcaatttcaaaa

SEQ ID NO: 19069 - DNA, 579 bp, Zea mays
  Coding DNA Sequence Number=SeqID_4666
cgatccctcgatccaagaaagtcaggtcaagaaagctctggtggatgggggcagtgtaacacctcaggtgttacttaggaacacaccaggccctcaggatcccgatactaacctcattaagtcgaatacccctttcttcggcatcgaactgactggagagtacccgttggggcatctctacatgccggtgaccttcggcgctctagacaactaccgaaccgagttcctgtgtttcgaggtagctcgattggagtgtggatataacaccatcattgggaggccgggactggtcaagttcatggccatcccacactacccttacatgatagtcaagatgccaagacctcaaggcatcatccctgcccgggctgacttctaaggagtggcagaatgctatcgggggccatacagacgaccctcaccgctagacccttagtagcaccacgacaaccaacaacgaacgctgacacgtcaccaaggatgacctcacaatcccaacgaaagaagcgtcctctaccaccaccatgcggccagtcgaataaaccaagaaagccaacctcgacttctcagatgaacaca

SEQ ID NO: 19070 - DNA, 333 bp, Zea mays
  Coding DNA Sequence Number=SeqID_4667
tcgctggtgccggaccattggcgcaggtacagggcccggacgtgggcaacggacctggcggcgcaacccgcgccgccgttggtgggcgggcccgacgacggggaccggcggctcagacactacgcggccatgttcatgtcgctacggccgcatgaccacctagagtgagcactgatgagcaggagggagggaccatcctaggctcctagctgtgccggccgcgtcatggtgactgtacagtgtgcacttaatagtatattgctgccagcttttgcgtgagtgaattagtggttccgaattgtcatttaaagagggccaataaaatggagaaat

SEQ ID NO: 19071 - DNA, 206 bp, Zea mays
  misc_feature (41)..(41): n is a, c, g, or t
  misc_feature (46)..(46): n is a, c, g, or t
  misc_feature (52)..(52): n is a, c, g, or t
  misc_feature (57)..(57): n is a, c, g, or t
  misc_feature (60)..(60): n is a, c, g, or t
  misc_feature (72)..(72): n is a, c, g, or t
  misc_feature (76)..(76): n is a, c, g, or t
  misc_feature (81)..(81): n is a, c, g, or t
  misc_feature (86)..(86): n is a, c, g, or t
  misc_feature (106)..(106): n is a, c, g, or t
  misc_feature (110)..(110): n is a, c, g, or t
  misc_feature (134)..(134): n is a, c, g, or t
  misc_feature (144)..(144): n is a, c, g, or t
  Coding DNA Sequence Number=SeqID_4668
aagaacgggttcatcgtcatcaaaaaccgcccctgcaaggntgtgnaggtgntctanctnttttgactggcnatcngggcnatgtnaaatggctgtttgttgcccncccncctattcaacggggaaaaagctcnaaaaatattngttccttcgtcacacaactgtgatattccgcatgggaaccgcactgagtaccacctgattga

SEQ ID NO: 19072 - DNA, 442 bp, Zea mays
  Coding DNA Sequence Number=SeqID_4669
ttttctccaaaggacaaagccacagagtcctcttctccaagccgcgttcctactccctctccctgctgatctcgcagcggccgtcgaggctcctcccagcctccagctccactcgtcggacgccggccactctcttccctacgcggcgctcgacccccacgctcagagcccaggtgagcaggcgcccggggccgcacgagcagccctccgctgggctccctccactatgcacggtctgcactggtaacttttccccatggccatcggctcctcatcagcatgccctgctcctctcctctctgctcaacgcagcagactggccgagtttgcccaggcctccatcgctgtcggactccatcgcgcagcaggtgttcgacaaaaagtccagtcccaggattccgactcagcctccaccctgccgtcgttgaaggtccgtatatgg

SEQ ID NO: 19073 - DNA, 186 bp, Zea mays
  misc_feature (128)..(128): n is a, c, g, or t
  Coding DNA Sequence Number=SeqID_4670
cgccaaggtccttgagactgcaggagtggcatcaagaagggccagtgaggagctcatcttacaagggaaggtgtctgtcaatggttcagtctgtacttctcctcagagcaaagttgacatctcaaagngattctatattcgttgacagggatgacgcatttctcatagaagttcgcttcaaatgca

SEQ ID NO: 19074 - DNA, 500 bp, Zea mays
  Coding DNA Sequence Number=SeqID_4671
aacaaggcctgtaaacgctgcaattgatacaaaacgttgaaccgccacacaccgctacggtcaagtaaatatggcgcgccccagacggcgctgccgactacttatttgtgacccgagggcacttcttgtctacatccaaagagctgttcacagcaaaggcggccaccggtattgaaggtctggacgacattcttgccggggggctttcccgtagccacttgttcctgctggaaggtgaacccggcaccggtaaaaccaccgtggccctgcatttcctccagtctggggcaaaaaacggcgaacgatcgctgtacatcaccctgtcggaaaccgagcgcgagttgcgtcagggtgccaagtcccatggctgggacctggacgaacacattcacatctttgaactgaccccgccggaaagcctgctcaacgccgagcaccagcaaagcctcctgtattcctcgaccttgagctgggcgaagcactcgccagatcttcgaagt

SEQ ID NO: 19075 - DNA, 361 bp, Zea mays
  Coding DNA Sequence Number=SeqID_4672
tcgcgattcgcgatactgtgcaggtggcacgcacgagcggtcaacaaatgtgtgatcgagcccgagcacgatggatctatctatcgcactggtttttttttgcattgctctgcctccgtgtaaagaaagatgtggcgcacgcgacaaacgtctttgacagcctgatctgtctgatggtggtaggtggaatctgcgctcacagccagaaggtgacagcgccaaaagccagggaatccacgcgggccgcgccgcggcattttggcgcagctctgatctgctcaccacggcgcggcgcggcgcggcgcgacgcgacagacagctcacaggagtttcgtcgcactggaacacttggccgcagcag

SEQ ID NO: 19076 - DNA, 247 bp, Zea mays
  Coding DNA Sequence Number=SeqID_4673
ttatcctccgagtagaggaacattttcgccgagggcaatttcaggggggaagggggggggaacccttccaaagtttgggggcgggggccctttggttaacaaaaaaatgtttggattttccaagaattttagcatgtttttttcgtgggttttccccttgaatttccccttttttgttttgggggccggttccctgggggttcaattctatgaaggcccacaggctttgtgccagctgcaagaattc

SEQ ID NO: 19077 - DNA, 598 bp, Zea mays
  Coding DNA Sequence Number=SeqID_4674
cgccgcagacgagacaagcgaaggagaaaatcgaacctgaggcataagccggcgaggcggccgggcgcgcggccgctggccgtgatcgaggcgcacggcctcctcacactcgcggaacgcttctgctaggcgcccgagcccgatgagacgtcggcggctgcggctgccgcggcacgcgccgccggcccgccgccgcgccacggcccgcccccggtcgccccgcgccgccgcgcggcgcccccgcccgttcgctcgatccccccccgcgtccgcgcctcccgcccaccgccctgggccgccgcccctcgcgcgggcccggcccggccccgccgcgccccgccgcctccggcacgccccgccccgcccgggaaccccctggccccgcccgcccttgcccccccccctcgccgccccccgcccgcgcccgggcggcgcccccgccccccctggccgccacccgcgccagactcccccgccgacgcgccccggctggcgttggttgtcgcccccccccccccccgcccccggcatccacgaacctgcatccgggggccgggcccgagcgcgcctttcctcatgtgcgatctagccagcaagc

SEQ ID NO: 19078 - DNA, 497 bp, Zea mays
  Coding DNA Sequence Number=SeqID_4675
ttgtctggacatcttatgttccagttttgtgaccgcaaaaaaaaaaaaaaaaaaaaaaaaaaaaaaaaaaaaaaaaaaaaaaaaaaaaaaaaaaaaaaaaaaaaaaaaaaaaaaaaaaaaaaaaaaaaaaaaaaaaaaaaaaaaaaaaaaaaaaaaaaagggggggccgtttttaagaggatccaagtttacttccccgtccttgcaacgtaaaagttttttttaagggcccccaaaattaaattaactggccgtggtttaaaaacgtcggaactggaaaaaccttggggttcccaaattaaatcgctttgaaaaaaatccccttttccccagttggggtaataccaaaaaggcccgcaccaatcgcctttccaaaaatttgcccaccctaaatggcaaatggaaccccccttgtagcggcccattaagcccggggggtgtgggggttacccccaaggtgaccgttaaatttgcaagcgccttaacgcccgttcttt

SEQ ID NO: 19079 - DNA, 417 bp, Zea mays
  Coding DNA Sequence Number=SeqID_4676
atcaattcacaccactccctttttttacaaacaaaaaaactcaaagagaaaaatatgtggggtctaaagaagttggcgcgtgttgtcttggcgcgtgtgagcgtgggggctccacacacataacgcgcggctctgtgctgtggcaccgtgagcgtctacgtggcaccgcatattgtctctctggcacagggtgcgggccccttcccaaagggtgcttgcagcggcgttactagtctaaacaacctggcccgtacaaccccagaccgtcagcaagcttgccgttgccttttggaggcgcctaacgcctcccctcttctaccacggtgcccgtgcagctgctcttcctaagacgtgtgtagtcaacactccttacatgatcagaaaaaccaacaactgcaacggtataagaggagcggc

SEQ ID NO: 19080 - DNA, 184 bp, Zea mays
  Coding DNA Sequence Number=SeqID_4677
acgccagaaaatacaaaccagtcgaaaaaatatatgaaaaactgacgaaaaatggtttctcggtcgagaaaaccggtctccgactggttcagattgtggaggcttttaatcataaaccaataccatcaattctgcaggtcattttcagagatactcactggtttagatttggagacttctacag

SEQ ID NO: 19081 - DNA, 498 bp, Zea mays
  Coding DNA Sequence Number=SeqID_4678
aaaaactcgtgctcgagagagatcgcatcttggctgcccacccaagcttccctttcgttcctcctcgccccagcgacgcggtactcccgtagaccgaggaaggtaacccaccactgataggcacgcacaggagcaggaagccggagaccaagatgtaccacggagctcagcggggatgacacggtccccttcttcgggttcctcggcgccgtcgccggcctcgatcttctcatgtatgggcgcagcggacggcaccgctaagagcggcgccagggcgacgacgatgggtgtgatgaggccggagatcgtcatgaagtccatcgcgaccgtgatcatggctggggtgctcgctatctacgggctcatcatcgccgtcatcatcatgactgggatcaaccccgaggccaagccctactacctttttgatggctacgatcacctttcggccgtcctcgacggcgccctggctgggcccccggttgggatgggcatcggaat

SEQ ID NO: 19082 - DNA, 227 bp, Zea mays
  Coding DNA Sequence Number=SeqID_4679
caaagcttttataagattgatgccttctataggttaactgcacaacgatggactgttccatttgttgacatgtgattttacagtcaccattttatgctgctgattttcatgggttgcagcgatttgttcctgtgccacaactattttctatgatcgaattaccatcgtttttacgacgaaaatagccttactggataacaaaatgagacaccgatacacaaaaaact

SEQ ID NO: 19083 - DNA, 394 bp, Zea mays
  Coding DNA Sequence Number=SeqID_4680
agcccaacctgccacttaaggagtagcgcatctggtggtgcaacggccaggggtactaccttactgatgagcccagggtgcacttcgttttacaactcaaccaagagtcatcagtactcggtatgtcgcgcgcgttcgacgactactatatcgagaaccgtgtcatcatcttgacgcaggaggtgacgcagaggaggaccgataacaatgaccagttcgtcatcctcgccaccgttggggtaacttttattgtaacaaaggcatcaaccggatcgaagctagaaaccgaaggcaggaaaagagaaaagctccggagctcctggttcaggatgatgtcgatgcagagagtaaggggctggaagccatccagaggcacatgaagatacaaaagcag

SEQ ID NO: 19084 - DNA, 413 bp, Zea mays
  misc_feature (118)..(118): n is a, c, g, or t
  misc_feature (199)..(199): n is a, c, g, or t
  misc_feature (210)..(210): n is a, c, g, or t
  misc_feature (219)..(219): n is a, c, g, or t
  misc_feature (225)..(225): n is a, c, g, or t
  misc_feature (231)..(231): n is a, c, g, or t
  misc_feature (253)..(253): n is a, c, g, or t
  misc_feature (317)..(317): n is a, c, g, or t
  misc_feature (332)..(332): n is a, c, g, or t
  misc_feature (339)..(339): n is a, c, g, or t
  misc_feature (351)..(351): n is a, c, g, or t
  misc_feature (363)..(363): n is a, c, g, or t
  misc_feature (379)..(379): n is a, c, g, or t
  misc_feature (383)..(383): n is a, c, g, or t
  Coding DNA Sequence Number=SeqID_4681
taagtgctcgggaggcataagcaattactctgttgtcttgcattaagacacatcccatccagtactggaagcatcacaataaacctccaagggcttgggggttgtcaggttgagctanccccgggggggtggtggcatgtcgccgccctgaggggttggtatcttatctttccccccttctgcgcccattttttctacntccccctcttncttatgttnaaactnctggcnctggaccttctcccgcccccanccccggccaccatacccctcctaacctatcccccccgcctacccccccccctcaaccccccacntttccctcccttttnggggtanacccccctttcnttctttaccttnttcttttccccaaccntctnccctggcaaaatgtcgctttctatccccct

SEQ ID NO: 19085 - DNA, 524 bp, Zea mays
  Coding DNA Sequence Number=SeqID_4682
cccttcccagattggtgtgattctccgtgactctcacggtatccctcaggtcaagagtgttactggaagcaagatcttgaggatactcaaagctcatggccttgctcctgagatccctgaggatctgtaccatctaattaagaaggctgttgccatccgtaaacatctcgagggggggcccggtacccacccccctcttccccctctattgagtgggatccccagcccggctcttgcccccccccgtgcgctttcctacaccctgccggttccccccctctaatgcccttccggccgtcatccccccttttgggaaggttggggaaaaaactggaaggggggcccggaacccgttaggcccctttcctaaacaggttgggctaatcttggaattgggcccacagcgcacaattgctaaacgcaccatgatgttcgagattaatctttgaaccccaccatcttgagttttattaacatcataattattttcttaaataatccaagagtatttttatacgctacac

SEQ ID NO: 19086 - DNA, 577 bp, Zea mays
  Coding DNA Sequence Number=SeqID_4683
gacccgcccaaggatgtcgaaaacaataaggacgaatggcaaaccatacctatgtaatctactaaaaataaactcatggcaacgcacgggtacatacctagtggtcttctaatttgccacgatgattcttgctaaatccatgaagtgacattttgtttttgtttttagacgcttttatttgtgtaaagttacattgttgcatataaatcctacaaatacaatgttattaagtctttgagatattcgattgaactttattatgtatttcttttcatgtgcattttttgcatgctttctataattattcatagaatgtagaggagatgtacccgaaaatgttgaaatctgttgaaggtgagatcatgcctctaaatgcctggttgtggtctatgatcgatagctgctccaatgaggatgacatcaaacttccttttcaaattttgcagaaactcagagtatttgtaagttcccttcatattcctcatacaggtagaatatttcattttatatttgtgtaccaagttatattaccattatgactgtatatgattttgttgtatcatcatctctcttgtgg

SEQ ID NO: 19087 - DNA, 247 bp, Zea mays
  Coding DNA Sequence Number=SeqID_4684
acggccgcggcgcaccccgtctcctccgccctcgccgccctctccaactcgatcctcaccacccacaccaccctggaggactctgatgccgccttcgtcgtcggtcgtggggccctcgatgtcgtccgccctacctaccccgaccttgaccgccctacctgcccgatcctgtcctcgttcactgctcccctggggtccgccggcgccccgtccctgggcctggctggatccctgaccgtcctcctgc

SEQ ID NO: 19088 - DNA, 510 bp, Zea mays
  Coding DNA Sequence Number=SeqID_4685
ttgatccggccccatcccaatttatcttttttgtcgccacctgtacaaagtccattcctacccccccccccccccccgtgtgagggggagaaaatcaatgtccccccgccgtcgtcttcctacgccccgcaaggaggggccgcagaagttccccgatccgctggttgacgcaaccttcagattccccgatcaagctctgaattcccccgagagcaatttcgcaccggtcgatgagactggcgaagccatagagatacaccagagccagatccgaggggcgataccggacggtttccccgagggggtgtacatcagaaacggttccaacccgctctttggcgccctccattccacgtcctcggtcctgggacagtccagggagatctgggtcgagggggaggacatgctccacgccgtctacttcaccaaaagcagcggagggcatctatggtgagactcctacggccgccgatagggacgaaagagaagatgagcatgaaacggcgcggg

SEQ ID NO: 19089 - DNA, 142 bp, Zea mays
  Coding DNA Sequence Number=SeqID_4686
tccctcccgcatcagcagccaaacgccaccgagctcccggcctccgcagccaggaacatcctcctttctcccgagctcctactcctccacgtacgctcggagcttaccataggacgccagacgccagtcgccagccatgaag

SEQ ID NO: 19090 - DNA, 454 bp, Zea mays
  misc_feature (34)..(47): n is a, c, g, or t
  Coding DNA Sequence Number=SeqID_4687
gtctcccccccgaggaaagtgcagaggaagaagnnnnnnnnnnnnnntcgtcgctgcttctcgctcccgcgaccttcgtctctcgtttggtcgcacccgctggggagaggaatcaattcgtagcctaccggaatgggggccccagttcttctcgccggtgaccgggttccggccgaccctctcccttaccagggggttggcccctagcgtcctctgcgctgcaccacgggcgcggcgcctctgtgccagtttcaggggggcggaccttgggggccagtccttttggctgtgcggcgggtacagaggatcccccgcccggatgcctgtggctcccccagggtggttggccagtggtccgagacccttgccgccccttccggggcgacacaacctactggcgcagcgcgggcttcccttcgcctcccgtgacagcttccacgatttccgcggtttt

SEQ ID NO: 19091 - DNA, 323 bp, Zea mays
  misc_feature (31)..(31): n is a, c, g, or t
  misc_feature (34)..(34): n is a, c, g, or t
  misc_feature (38)..(39): n is a, c, g, or t
  misc_feature (117)..(117): n is a, c, g, or t
  Coding DNA Sequence Number=SeqID_4688
acatatatttgcacttgggggaaacaaatgntantcannttttgagggccttcagaaggcgaaggtccccaacagtagcccctcgcagtattaatttgttaagataacgaatttagnctgcgacatgaacgaaggccttaggccgaaggtccgaaaaaacaccttccctttgctagaatagcaacagtcaatgacagacggggcccttcaatttggagcgtactgggtgtataaataggaacttacatcgactgcacttgatacactgcttgtgccatttgccttattttctcaatttcatagctcttgctcactaacgcttt

SEQ ID NO: 19092 - DNA, 228 bp, Zea mays
  Coding DNA Sequence Number=SeqID_4689
ttcgaatgcgacgtcatgtgcagggaacagataattcaaagtacttttctgatgcaccgtccgccaggggaaaatttttctacgtttattcgttcgttcataggaccaaaatttagacaacccaagaatgagtgggcagaaactcgaaggttttgcttatcaagccgagtatgggaagagacacattacggacgcacatggatgtcataacgtcctttaaagcaacca

SEQ ID NO: 19093 - DNA, 290 bp, Zea mays
  Coding DNA Sequence Number=SeqID_4690
agcttgaacgtatccatggccctttccaccaagccaccggcggacaggacgcgccccgcgccgttcttatcgatctcccgccccgcaccaccgattctctcgcatctgctccgcgcggtcaccttctccccccggatgcctgcgtctttggccgacctggcgccggaactagctcggcgtagggtcatgacaccgacgggcctgagtgcatcgattccgttctcgttgtgcgcgccggcccacctgagcaccccgctgcgcttcatggtttcctactgggtctttcgtcg

SEQ ID NO: 19094 - DNA, 529 bp, Zea mays
  Coding DNA Sequence Number=SeqID_4691
atgggtctgctgatcaagtatggttgatcatcgaagaggatccctccacgacgacaggcgtccatacaccgacgacacgtgcatcaagcaggccctcaaggttcagaagaaatgccctacttgcaggaaggggctgaaaatgaatagtgttcatcgtatttaccttccgaacggttctagttaagctgagcagctttacatatctgatggcttgtaactttgggggcaattagcttaacctctgttatccgatacatgctgactggctttgtcaaagaaacttctggtaacgtaaggctgtgcaatgtactgtgaggatcaggaattcttagcctgaacagcagatagatgtttcatcccagtctgtattatttatcggcatcaccaggagttcatcatgagaacttcctgactagggaagtcgatatcagcctcagttttactctcttattgcatccatggttcccagaatgtgttgttttgttaggatgtgaccatcggatggtgcatatgaccgtgtaaaacatta

SEQ ID NO: 19095 - DNA, 517 bp, Zea mays
  Coding DNA Sequence Number=SeqID_4692
gcaaagaatctatccaattccccactttcgacctctctctcaccattgatttaaatccttaaccttcgacagatgcgctaattggagagacatagtgacgacactactccgaacgcgcccggtccacacacgccgccccccgccacaaaaaatggacgcccggagtaacttcccaacaggacagcctactcaaacttcccaaacttcttggcaagggagatataaaagggccttcccaccaacaaactagaactatccacttgcgaggaggacgcccaaagcctcccacgagctcccagcccacaccccccctccacccaacactaatcggatggcgcgggcaaaaacaccattccaacagatcagcctccccgagtgccccacacccatccctaaatccactcgacgcgtctcttgcaatgaccccctagaccccacccttttgcatcccccccaagggcaaccgaatggactccccactcttaatgccgcaacggccacagctcacgctaaatat

SEQ ID NO: 19096 - DNA, 517 bp, Zea mays
  Coding DNA Sequence Number=SeqID_4693
gcggctcgagggacatcttggacccggcggcaggaggggcaggccgcgtgggcggccggccgcctggcgaggcaggcggcgcggagggcgtgcgcgcaccggcgcaccccccgcgcgtgcccgcgcccatcgaactccgccccgcagacagggaggtccgccgtctggtcccctgctccacgcggccaagcgtgggtagcgcatggtggggatcctccgccgcctgacgtccggacgccccccctggcgccgtcgaccgcgggcgcgccgcccgcgcccccggcgccgcaccgccccacgccgccgcggcggcggacgtcgacgagcgggcaccgcagcgaggcgagcacgacgaccacgtcgtggtcctcgggcccgtccggcctggtcccccacctgagcttcctcgctccgctgtgcatcctcggcgctcgcgccgctggcaccactgttggctcacggcgccgcttatcgggggaggggaggaggctgacagaaagtgcgtgggtgcctgtgg

SEQ ID NO: 19097 - DNA, 559 bp, Zea mays
  misc_feature (245)..(245): n is a, c, g, or t
  Coding DNA Sequence Number=SeqID_4694
tctactttgatcatggcaagcctggaccatcaactaaaatccccaagtcctctaatactccctgtcaaggatgctggcacaccattggcggagtcagaaggcatcgatctaagtaaggacgtggtcccatctgccactgagagagacatctacactggagacaagttggaaattgtagtcattaacaagggcggtactatgcgcgagtatttcgaccctgagaaagattaagccaccacttcagntgtgctgcagctgtcatttgctttgaacttttttcccagactggggagttatgtgctaaggtggtgcttcataggacactgggtttacttgatatgtgaagtacggatgtaccagatccggggagttttttttctgtgaaacaaatgtttggaaaaaaaaaaaaaaaaagttatcgatccgccaccccgggggggggcccgtacccatttcccctataggggccaataccccggcccctggcccctttttaaaggggggaggagaaaaccggggtaccaaattaatcccttgggcacaccccttttccagtggg

SEQ ID NO: 19098 - DNA, 535 bp, Zea mays
  misc_feature (71)..(71): n is a, c, g, or t
  misc_feature (284)..(284): n is a, c, g, or t
  misc_feature (360)..(360): n is a, c, g, or t
  misc_feature (479)..(479): n is a, c, g, or t
  Coding DNA Sequence Number=SeqID_4695
gaaattatatggacagagcgcggtaggaagtcagatgttacacttcggtatgcagacagagagattttgtngggaaggggtcggagtaggaagaagcgggagttttttgttcttgggaggcgacggatgtttgggggtcgggggtgattagtggaagaggtgtgattataggagagggggagcatacgttcgctgaggttgggtcacggcagttgtgagaagatggagttattagagggagcagaggaaattcttgttgtttttatttagaagaagacatggtnggtgagaaaagagagttttaggggagacgaggagggtgagcgagaacagatagtagagttgaaacaggagggccanggagaaagaagagagcgagagagtattagtttttgtgaggcgatgtggcgatagggagtggtattaattggtgtgtatgatttgggagcggatatagtaggtcggattaatggaggagnggagaacttctgttgtattgtagaagatagtaaatcatgagaggatgtttgagcgg

SEQ ID NO: 19099 - DNA, 248 bp, Zea mays
  Coding DNA Sequence Number=SeqID_4696
tcatcaggccgttgttgcgggacgataccatggtaactgacccaattttggttggtattcgtgtaggaggattcttctctggaacaggagggtgtgattcaccaggtttagattccaatgttgatggaggggctagcagtttggggcctggtgggatctggtcagttgtgataaccggatgcctggaaggttctgtaaattctgtatactagtgtatttagcttaccccaatttgattaagtgtctgt

SEQ ID NO: 19100 - DNA, 363 bp, Zea mays
  Coding DNA Sequence Number=SeqID_4697
actcgccaaaaattgaatctacttgatagatgcaagccatccctcccggatgaataaaattccatgtgtggttattttacaaaaggcacccgaactgacccgggaacataaaagggatcaggtaaactgcctaacgcctaactaaaattatagtataatattggatagattcaattcaaagggcaaaattactcgccaaaaatgaaactacttgataaatgcaagctgtccctaccctaaggcaatgtttttgtgtacaggtacaacaaaatttaaaaattaaaaaaaaaacaatctatctggctggccctggatcttaaaaacctgcaggaccgctggtaatgacaggaattccctcaattt

SEQ ID NO: 19101 - DNA, 232 bp, Zea mays
  misc_feature (26)..(27): n is a, c, g, or t
  misc_feature (30)..(30): n is a, c, g, or t
  misc_feature (32)..(34): n is a, c, g, or t
  misc_feature (37)..(38): n is a, c, g, or t
  misc_feature (70)..(70): n is a, c, g, or t
  misc_feature (87)..(87): n is a, c, g, or t
  misc_feature (94)..(94): n is a, c, g, or t
  misc_feature (98)..(98): n is a, c, g, or t
  misc_feature (103)..(103): n is a, c, g, or t
  misc_feature (106)..(106): n is a, c, g, or t
  misc_feature (116)..(116): n is a, c, g, or t
  misc_feature (136)..(136): n is a, c, g, or t
  misc_feature (196)..(196): n is a, c, g, or t
  Coding DNA Sequence Number=SeqID_4698
cagccgcgccctttcatcaggcctgnntgncnnntgnngcctatggcggcgttgccctccgtctctgcgncgctgcccctccgctcncgaacgngcgntcttngcntggcagcagnaggtgggtccaaggggcggncgatcgctggaagcttcgtcagccgcgtcctcgccgtcaaggtcgcctcgccgaggaggnccgtgcacgcctcggcgtacgacagaacctggaggt

SEQ ID NO: 19102 - DNA, 456 bp, Zea mays
  Coding DNA Sequence Number=SeqID_4699
ggtcatgtaactcttttgtctaagaaccttctaacatgtctagggtccctagggaggtgattaagcatcatctaatggtcctccccaatgcatggattgttcggtagaagatgtagaggcagtccatagagtgtcagtagttcatctgcctcgagatcgacaaacttctccatgccgacttcatatatgaagtataatacaccaagtggttgtccaaccccatagttgttctgaaggcttggggcaagcttcggatgtgcatcaactacaccaaactcaataaggcatgccccaaaggtttataccatctccctcgcatagatcaaatagaagactctacttctaagtatgaacttttatatttcctagatgcatactccaatttccaccaatagtatagctacagaagatgtggtgaaaacatcttttataactccttagggtttgtgttgctat

SEQ ID NO: 19103 - DNA, 338 bp, Zea mays
  Coding DNA Sequence Number=SeqID_4700
gcaggagcatgtcgttagcaactcatgtgagttagcagcatgcaatggagcttgtagattatcaggtcagccaatggaccagtcgagtttgtctcaggtaagcaatcggagccatcaaacagatagtactatctcgcaatgtcacgtcagcaggccatgtcaatcatcagtggagtgtattgtgagcatcttttattgtgcaatcggcatcttgtctttggtgcacagaagtagccgatgcttggtggcgggagagaacgatgcgcaaaacaatcaacgttcccagcatgtttctccatctgaaaacagacatcattgtttttgtcgatactcagtgt

SEQ ID NO: 19104 - DNA, 281 bp, Zea mays
  Coding DNA Sequence Number=SeqID_4701
gtgtgaatgattactttacgtagacaacgagcagtctacattatactttgttcaaaacagatacaaggctgttttgtggagatgatctcggtcttccgaaaagcctgctgctcccttttcggttacaagatagtgatgaatgatcaacagcagtcaaatggaatccctgtaacacgctttattctgtagtcagtttatgcccaaagcgacgttgaaaatcttgagtttgactatgaatcgagaaacaataatatcgtggtcgacatcttcataaggaggat

SEQ ID NO: 19105 - DNA, 501 bp, Zea mays
  misc_feature (145)..(146): n is a, c, g, or t
  misc_feature (432)..(432): n is a, c, g, or t
  Coding DNA Sequence Number=SeqID_4702
gtggcattgcactatacctggtaaagctgggactgattgggaaggtggattctttccattaacgatgcacttcagtgaggattatccgagcaaacctccgaaatgtaaatttccacaagggtttttccaccctaatgtctatccnntctggaactgtctgtctctctatccttaacgaggattatggatggagaccagccatcaccgtgaagcagaattcttggttggtattcaggatttacttgacacaccgaatcccgctgaccctggcacagacagatggttatcatccttttctgtcaggattccagttgagtacaagaaaagggggaagctgcagtccaagcagtatccctgctcttgtctaaaacctcaaaaaagagaacgcaccaaaactgatgacaagctctgaatatttttctcgtcttgggncattaaaggtttagatggcatttgggtgattgaaaactccctcattttggcaccttaagacactggaaa

SEQ ID NO: 19106 - DNA, 378 bp, Zea mays
  Coding DNA Sequence Number=SeqID_4703
ccggagtgacttctctattcactagggtctaggtatgtaacagcaaactagaaatgcaatgctttgtcaaagccatgggcaacagacacacttgattctgaaaacacttagtagcgctgatctgttaagtgaattgctcatctcacatagtcggcggatgaggaacacatacggcatggcagtggcctcgggcacgccgggagagcgaacgtcaagcgtaggatgccgcacctagcggtggagcaggaggactgccgggaaaggcacccccggctgcccgcgcacccacgctttaatcggagactccgtcaccaagcgtcggctcgatcagaggccgcgggaggctccgcggcgaggccgtggcagataccgcaaaca

SEQ ID NO: 19107 - DNA, 234 bp, Zea mays
  Coding DNA Sequence Number=SeqID_4704
gaagattttcagatccttcttttattttggtggttgtgtacctaatccatttcgtactcgccttgaccctaacaatgtaggaagcactagtctgcaccaaagattggatagctggagcaagaaaaaggttataaaactgaaccttatgtttatttacaatttacttattcattagttcaatgcccttttactaatgcactactggatctttagattcccaggttccaaggctaa

SEQ ID NO: 19108 - DNA, 500 bp, Zea mays
  Coding DNA Sequence Number=SeqID_4705
gggactatcgcatatcatccgggaagctgtgcatcaattggggagtacatagcgagagtcagatatcacgcatgagagatggcacattcggtcatacgcgatgctcatgggtagagcatcctgagacgtgagcaagacaggggctacgagtgcttccctatagcagatccgcggtcaaagatgtcttctgctaccggaaatcgacaccctcactcgagatagctcatggcatatcaggtagcacatcgaccgcgagtcgatttctctctggtctgaagaagtcacagttcagcagtggctttctcaatctcgcatcctatattcgggctacgcgcggcggagagtacatcgtatctgtgacctttctccatcaagttcacggtaacgtttggtgtatgagcgggatttgccgcgtctcgtgggcatcatcgttctaccagtaagagtccgttcttcatcatgtcggtttcctcgggaacacagccgtaggcgcttttgga

SEQ ID NO: 19109 - DNA, 414 bp, Zea mays
  Coding DNA Sequence Number=SeqID_4706
tgaggagcaaaagggagggttcccatttttctttaaaaagggtgggctccttccccatcctgttttgtcatggaagagtggaagaatttttcttttcccgggagggggggaaaccccctgggtttttggggaacccaggattttcatttttgcctttcaaaccctccaacgggtggggccctttttcgatccctgaaaaactgggcgccctttccaaggggtttaactcgtcccttggcctcggccgatttccttaaaaaaaaagtttttttttggggtatccccaaagggtttggcgcccccatattttttgggggggggtttggttttataacttttaaaacccttgatgttagctgcttttttcccaaggggcttttttttcccccgccctaatttacgtcctttatgtct

SEQ ID NO: 19110 - DNA, 434 bp, Zea mays
  Coding DNA Sequence Number=SeqID_4707
ctatcgttcacgagcttcaccaaggcaccatccccgtcgactgtatgcttagcacgccaggacctcctctgagctcttctctgaccggcggctcctctgcgcctaggcgtggagcttcctccctcgctgcgctctctccagatcctggtcggccgagcgcgcagccgcctttcctctccctgctcggacggcgcgcgccccttcctctgccgcgccggagtttcctctgctcgccgcgcccggctggaactcctggctcgcccctccgctcgccatggcggtttcctctgctggcagctgagctggtgacgcgcctctgctcctcccggctctcagcgctctcgtcctttcccctgcgcgcagctcaccgagctctcccttcccatggcgcgtcggctccctgctcggcttctattcctccagcgcgcgaagct

SEQ ID NO: 19111 - DNA, 186 bp, Zea mays
  Coding DNA Sequence Number=SeqID_4708
gtcgtgccttgctcgcgtcgtgtcggcccctgcgtggcctcgagcttggcccagcgtgcctatggcgcgcagctttgagctcggctagcgctcggccccgacatgcgcacgactagtccgtggcgtgtgcgtgcggcctcgcgcgcgtgcccgcgtagtgcgcgtgccttggcacgacccgtcgtg

SEQ ID NO: 19112 - DNA, 388 bp, Zea mays
  Coding DNA Sequence Number=SeqID_4709
caaggttcgatatctgtcaatgtacggagtatattagacaatgccgcctatcatttcatcgtgcacctattttcaggctgttcgactgtgatgggaggaccggtttgcaacaaggggtccgtgatggggatggacgggagcgccccgtagcgcggcaccctcaggcggttccggggagcatgggtgcccgaggcatcactgacgggccaccttcacttggtgaggtcttctgaaacgacatctagggtgctaaggcctccccaccgccaacaaataaaagtcggggcgcacagtgtctgcatccaattcgcacttacctcaggccaccttcggccgtggcgcaataagctatattgtttgaaagctactcatgatttgtctatgttcc

SEQ ID NO: 19113 - DNA, 593 bp, Zea mays
  Coding DNA Sequence Number=SeqID_4710
aagagatctgtgctgaccacttcatgcccacgcatacgtaccttcttctccagcaattggtaatgtctaggaatactgatactgcacgtccactcgttcaagggaacatatttttcctgttaacgcacactgtcctcctctactagtacaagatctaataccagttcatggttccacatggaccccgggtttgccgcaaagacgatagtctcatcttatacattgacaccgcctgatctgactgaccaagatatcggcaaaccgaacatcacccacattgactgaccaattgcaatgcgccgtgtccaaatgaacaatcactcaagaggagtgccatattttatcagcacctggcttcattgaaggaacccacctctccttgctccctatggcaaacactgacctggaatcaattgctacaatctgctctcctacatcctcggagcccttcccctgctatgtcgacagatacttctttttttgccaaaactgtgcgcttcctgatgcatcatcaccaaccgatcccacctgatcaccagttgctatgctctgacaactagagctctaattaactcccgcactgtctattgatg

SEQ ID NO: 19114 - DNA, 436 bp, Zea mays
  Coding DNA Sequence Number=SeqID_4711
tcattgttggcccagtccccaatgtcaaaaggatcccgggggttccagcaatgaaggtttctgcccttaggttcccggaaacaacaagggccaggattgtcaatgctgggggggagggcctcacatttgaccagcttgctttttgtgccccccttggggagaacccggtcctttttaggggccccaaaaatgcccgtgaggcagtgaggccctttggcaaggctcctggagtgccgcccaccccccccaaaccgtatgtgcgccccaaggaaagaaagttcaaaaaggctcgtggcagaaggaacacccgtggattcaaggtttaaaacaaattgtggccccccgggttgccatcagcatagggcaaccgttgtgtttgacccgcccccagtaattagtaatccctttgttcccaaattagtagcccaatttgttg

SEQ ID NO: 19115 - DNA, 347 bp, Zea mays
  Coding DNA Sequence Number=SeqID_4712
ctgcacatattattgagcccagatactgacatagaacggacaatagtgtacccccaatggcagcccaaatgttttgcccccttatgctccttggcctttctgcaagtgctgctacggcgacaattttcccagaatgctcacgagctcctatagcttcccttcttcccccgtacctcttcaccagcggtgtcttcggaatgtgaaagcccaattcttcaaccctataggatccaacaggaaatcgcagctggtgatcttacctttatcacccttgttcctcccacaatcatcagccctattactgcagtgaccttggtggcgtttattggttcgaaacttctaggaca

SEQ ID NO: 19116 - DNA, 129 bp, Zea mays
  Coding DNA Sequence Number=SeqID_4713
aaggcagacacacatgccaccacaacttcaagcatccaagatttctgagtatcacattcattacaagagctctagcattcactcctagacacaattcaaaaaaatcaaagactctctaagtggttgttg

SEQ ID NO: 19117 - DNA, 567 bp, Zea mays
  Coding DNA Sequence Number=SeqID_4714
aggtgtcctacggtgctatcaagaagaggatgttctgcaagtacagctgtcgtggcgtcgcacttgatgccattcttgtcatgttcactcgaggaccttgttcagcttttaagagcgcagacgtcaggaggaggttccagaggggtttgagagtggtagagcatgtcggtcatcaagaaggtgggcaaggagacaaaagtatgctcctgtcgtgagtaattcagagccagtgaaatagcatctggcgcatcatggtccaggtcgccgagatgattgggagcattgttggtgtatccaggggcaagacgttccattcaggttgagatccagcttgcgatgattgtgcagcatcagtcagagttcttcatttcgtgcaacgcggtcacgctcgggtggcccgttaggggtgcccctcactctaggcgggttatccctgtcaggagcgtggtcatgcacatccgtggcctggcaagggtgttcagtgacatgccctgtcagcggttgtgggagatgggggcaaggaacattatctaagtccaaggtttggtttgcaccttctacagggta

SEQ ID NO: 19118 - DNA, 271 bp, Zea mays
  misc_feature (31)..(31): n is a, c, g, or t
  misc_feature (37)..(37): n is a, c, g, or t
  misc_feature (46)..(46): n is a, c, g, or t
  misc_feature (61)..(61): n is a, c, g, or t
  misc_feature (65)..(65): n is a, c, g, or t
  misc_feature (72)..(72): n is a, c, g, or t
  misc_feature (83)..(83): n is a, c, g, or t
  misc_feature (87)..(87): n is a, c, g, or t
  misc_feature (92)..(92): n is a, c, g, or t
  misc_feature (94)..(94): n is a, c, g, or t
  misc_feature (97)..(98): n is a, c, g, or t
  misc_feature (101)..(102): n is a, c, g, or t
  misc_feature (117)..(117): n is a, c, g, or t
  misc_feature (126)..(126): n is a, c, g, or t
  misc_feature (128)..(129): n is a, c, g, or t
  misc_feature (131)..(133): n is a, c, g, or t
  misc_feature (135)..(136): n is a, c, g, or t
  misc_feature (141)..(141): n is a, c, g, or t
  misc_feature (152)..(152): n is a, c, g, or t
  misc_feature (155)..(157): n is a, c, g, or t
  misc_feature (161)..(161): n is a, c, g, or t
  misc_feature (165)..(166): n is a, c, g, or t
  misc_feature (170)..(171): n is a, c, g, or t
  misc_feature (176)..(176): n is a, c, g, or t
  misc_feature (180)..(180): n is a, c, g, or t
  misc_feature (194)..(194): n is a, c, g, or t
  misc_feature (199)..(199): n is a, c, g, or t
  misc_feature (215)..(216): n is a, c, g, or t
  misc_feature (218)..(218): n is a, c, g, or t
  misc_feature (225)..(225): n is a, c, g, or t
  misc_feature (233)..(233): n is a, c, g, or t
  Coding DNA Sequence Number=SeqID_4715
ttacttgcctcaggctcgccattggtgaccntgaacncatgtgtgnagaactgtatgatgnaacnggtcttngtgagctatgntganaagancnatnntgnngctgaggcagctganggtcttacngnntnnnannatgcnagcggtgatgncannnatgntganngctnncatgntgtngccattgatgatgncgagnatgatgtcaccaatgnncntgccgangatgatgncgcaaatgattgatgccacaatgtcacttgcgacgccg

SEQ ID NO: 19119 - DNA, 245 bp, Zea mays
  Coding DNA Sequence Number=SeqID_4716
tcgcggatccgaagtccgagtcaatcggcgaagagctcttgcagaaggggcagcagtgggtcaaccgaatcaacttcacatgcccgatctaggggccaatgtaaattgtcatgtgcaggagagaaatgatcgcatcttgtagctagcctgcatccttcctctctgcggcagctctggttttccttctgcgctgcttggtcttctcgctgcagcttctgctgccgatttacagttagtccactcag

SEQ ID NO: 19120 - DNA, 514 bp, Zea mays
  Coding DNA Sequence Number=SeqID_4717
gggtatgacaccctttatccgccaaacccgccgggaacaccccccccaaaagagaacacccctctcccctcttttgcggcgccaaaaactcttgtctccccccaaaaaaaaccccgaaaacatttgggagacaaaacaccccctattgcccccccgccctttcttttgagaaacgcggcgggaacaacacaccaatcctgggggagacccctcctgttttttaaaaaaaaaaaccaatcccccccccccctcccgggcggcgcacaccctccgtacaaaataaggtgacgttttcgggaaagtcacccgcccccccacttataagaaagacgttcacactccccgccaccacctctcccttcatcccacatcttccttatgaatccctcccccccgtgggggtgagaataacaaatatctttttcctttgtattagaacgctccccccctcccccacgaatgtcctttgccgccgccccccccgccggtgagagtatatttgcgcccaacccca

SEQ ID NO: 19121 - DNA, 255 bp, Zea mays
  misc_feature (55)..(55): n is a, c, g, or t
  misc_feature (193)..(194): n is a, c, g, or t
  misc_feature (196)..(196): n is a, c, g, or t
  misc_feature (199)..(199): n is a, c, g, or t
  misc_feature (214)..(215): n is a, c, g, or t
  misc_feature (217)..(220): n is a, c, g, or t
  misc_feature (222)..(223): n is a, c, g, or t
  Coding DNA Sequence Number=SeqID_4718
ctcgtttatcggaggcgagcgagcccatgcaacgtcgtattgctgagtgaccaangaaagatgggagttaattaatattcatccgccgggcgaaccagattttaaacccggaggggatgtaattaatttatatctcgataactatagaacatgcggggggggggggggggcccccaaagaagaaagaaatagnngnctnccctcaaagggacanngnnnngnnaaaagcttatcgaacggcgaccccctgaaggg

SEQ ID NO: 19122 - DNA, 307 bp, Zea mays
  Coding DNA Sequence Number=SeqID_4719
ttcgatctgaaaaggccagtttgagtgggtaaaaggcttaaactccagcgaaaccccgccgattattacccatcctgggtccttaatgggcgggaccgcatttttttccccccccccaccaggggggggggggggcggcctcaccccctctctcgccgctcgacggcgcccgccccccgccctgtccccccgcctctctccgccgcccacccgccccccctaccccgctccgccgcccgccgtgggcacctccggccccccgccccccgcatccggcgctacggctccggtgcgtccagccctacgc

SEQ ID NO: 19123 - DNA, 454 bp, Zea mays
  Coding DNA Sequence Number=SeqID_4720
aaagtgtcatggtggagtacgcattgggagagggctcaagtcttgcggtatcaaggtatgcttgatgtaagagacggcgtcgtttcgacggaggagtggatgaagactatgaactggtcaggattgggaatgttctcgacggcggagaggcgtgtgtggaaggatgaagacggtgtggtcgctggttatgttcagagatgggggaatttgtgccacgtggcggttacaggagctggtcattttgttccgacagataaagctgtgaattcaagggatatgattgaaggttgggttttggggaaaggattgttcggtggtaaagatgtgaagcagacaacttcgtcgagcttataccattcggtctaaatattgtgtgcttgtacttagttctgtaagattcaattcagattctaatggggtctggatttagcatttgttacgtcatgtggaaaag

SEQ ID NO: 19124 - DNA, 315 bp, Zea mays
  Coding DNA Sequence Number=SeqID_4721
gaagaccttgtgaacggggctcagctggacgtccacgaatcaataatcctttctccgtcgtcgtcgtcttcaccaccggtagtacaaagtgggtgctctgcttgtgctcgtgtatttctaccgcccgcgcgtctaactagccgtggagacaaaaggtggtcgtaagtttgtacgggctgttgtcataacagcagacgagctcctctactctagttctagtagaaattaaggtcgtcgaaacaaagtcacctagctgcgtacctttgtatatatataccggccgcgcgtgtgtatatctgtgctgtgtgcaagcca

SEQ ID NO: 19125 - DNA, 230 bp, Zea mays
  misc_feature (31)..(31): n is a, c, g, or t
  misc_feature (43)..(45): n is a, c, g, or t
  misc_feature (50)..(50): n is a, c, g, or t
  misc_feature (53)..(53): n is a, c, g, or t
  misc_feature (55)..(55): n is a, c, g, or t
  misc_feature (57)..(57): n is a, c, g, or t
  misc_feature (62)..(62): n is a, c, g, or t
  misc_feature (66)..(66): n is a, c, g, or t
  misc_feature (75)..(75): n is a, c, g, or t
  misc_feature (81)..(81): n is a, c, g, or t
  misc_feature (93)..(93): n is a, c, g, or t
  misc_feature (99)..(100): n is a, c, g, or t
  misc_feature (106)..(106): n is a, c, g, or t
  misc_feature (125)..(125): n is a, c, g, or t
  misc_feature (127)..(127): n is a, c, g, or t
  misc_feature (153)..(153): n is a, c, g, or t
  misc_feature (176)..(176): n is a, c, g, or t
  misc_feature (180)..(180): n is a, c, g, or t
  misc_feature (189)..(189): n is a, c, g, or t
  Coding DNA Sequence Number=SeqID_4722
atgtgcccagatctgcaggtgttcaagttcntgaggagttttnnntgcanggngnanggtangganaccttctcntggaanaactactactgntatctnnccttanatgggattgagcacctacncnactacctgaacctcccgtctgagatngtgcctgccacggctcaagaagnctgncaagaacancgtggccgcccatttgggcttctgggcctcctggtgaccgc

SEQ ID NO: 19126 - DNA, 284 bp, Zea mays
  misc_feature (117)..(117): n is a, c, g, or t
  Coding DNA Sequence Number=SeqID_4723
agaaaatctggttggtagcttgagttctgactcccaactgtgaagagtcagagatggcttatgccagccccgggactgatgatacgtcgacagatctagatactgacgagaagaatncacatggtacttactgttcttttgtttttttagatggtcagtgcattactacagttttttgttttttttgaataactcatgatgagtcatgagtagaacttgaaagtgttgtttatccattcagatgatgttctcgtgtcgacagaggcagattaagtaacgttact

SEQ ID NO: 19127 - DNA, 230 bp, Zea mays
  Coding DNA Sequence Number=SeqID_4724
ttgtaatggtactcactatcgggttaatggggtagcgggccccccccagaggttaagagctttgaaagcttcatgtgaaattattttaatgaatcgcagatcggtacatggccaccacacactggtcaaaatcccaatagccacattcaaatttatccttatccatgcagaggcacaaccgaatcacagttcttcgtagatgggagcaggaacattttttgggacagctc

SEQ ID NO: 19128 - DNA, 573 bp, Zea mays
  Coding DNA Sequence Number=SeqID_4725
gggtttaaacccactattgaatgcaggttaatcaggcttgagccggaaattatttgcagaggggcccagtgtgtgtaaggtttaatcgtgcaccagattccgttcaatcgccaaatggcagaggtttggttaaggcacaggggcccaggtttctgaggagggaagaagttcgatgattttgcacctttttggtgcaggagactcaagatgatgaagaagggctgcttaagagcgtatttcaactttcaaagcttatggcaacaagaaacaaatctgggaagtcatcagttttacttaatgtgaaggcatgggtcgatgagactgacatagccaagctcgaggaagctgttaggagtgtccagatggaagggcttgtgtggggcgcattcaatcttgtcccagttggatatggtatcaagaagctgcaaatcatgatggccatcgtcgtcggccttgttctctgtcggcactttcagtgagggcggtttgggccatgagccagtgaacgagtacgtgcagagttgcgacatagttgccttcgacaagatttaggcgtggcttacgatcagtcct

SEQ ID NO: 19129 - DNA, 429 bp, Zea mays
  Coding DNA Sequence Number=SeqID_4726
tcgtttttacaggaccaataataagtaactaccaccgccaccacaactactgcatctggttggcgatctgtaacctccattgtcctagggtgtgtgccagccagtgtgcgtgtgcctgattcgctctctctccccacgatgtggtgctgtattctgtgtatggtcttggtttagctgtgctgctgtagcccggagagggtaggctagctgttgtgtagtgaaggcacgcagaaggctgagccggtccgtttgccctgtgtgttctgggggaagtctgtcaggttttgcattagcggggatgcaggaggcgcgggacggggacgtcagtataccgggtgcggttgcgttgcggtgggctgggttggatgataaacaacgcgtcgaatgagcctgtgacatctgtttgctggcttgtttgcatgccgcaga

SEQ ID NO: 19130 - DNA, 197 bp, Zea mays
  Coding DNA Sequence Number=SeqID_4727
aagctagtctcttggtcggctcccaagtgaggctacagcacccgtgtcgtcgacctgatccgacacatgttcaagacgcagtagagaaagatatttctgcctccctatcgtgggtcgtcgccaatggcctttggtcgcagaccatctttcctgcttgtatatgctgaaaataaatgtcatcaggtgcccctggacac

SEQ ID NO: 19131 - DNA, 150 bp, Zea mays
  Coding DNA Sequence Number=SeqID_4728
gatggtttgcgctgaactaagtcccttatcttttagtacaaaatttcgttcatatccccccatatatgtactagtcaataagtactggtcgttgttcggcgtgctttagcaaatttacggcgagaaaaacacccccatggatcgaattgc

SEQ ID NO: 19132 - DNA, 258 bp, Zea mays
  misc_feature (26)..(26): n is a, c, g, or t
  misc_feature (29)..(29): n is a, c, g, or t
  misc_feature (34)..(34): n is a, c, g, or t
  misc_feature (55)..(55): n is a, c, g, or t
  misc_feature (77)..(77): n is a, c, g, or t
  misc_feature (83)..(83): n is a, c, g, or t
  misc_feature (88)..(88): n is a, c, g, or t
  misc_feature (91)..(91): n is a, c, g, or t
  misc_feature (107)..(107): n is a, c, g, or t
  misc_feature (112)..(112): n is a, c, g, or t
  misc_feature (114)..(114): n is a, c, g, or t
  misc_feature (119)..(119): n is a, c, g, or t
  misc_feature (137)..(137): n is a, c, g, or t
  misc_feature (168)..(168): n is a, c, g, or t
  misc_feature (192)..(192): n is a, c, g, or t
  Coding DNA Sequence Number=SeqID_4729
cgaaggcccaatcgcgggtgaggcancanccccngttcttggggagcctatgganttgatgactgctctgcaggtcnggatgnagaanccnagtgctcatgacgggncttgngnagggnctccgcgaggatgtcaangccatcgagaagaacgccgctcagctttgcntgcttgctgaggactgtgaacagncagattacgtccagttggtgaaggcactctgcgctgagcacaatggtcacctggtcactggtcctg

SEQ ID NO: 19133 - DNA, 575 bp, Zea mays
  Coding DNA Sequence Number=SeqID_4730
ttgtcacagatcgtgtcgctggttttttctaaggggtttggctttggtaaggtatgtttggttgaaagatgctactaaagggaatagaaggaatggatggaagatttctggatggatgggttattttcggcggatatgctggatccagcccaccgctgcagatgggaggggcaactctgcaggcacaacaatcatggggcactcgttctggttcctggggctcacagtagatgaagggacaatcattgtacctggctgtgcgtctgacagcgtatcagtcagccatcgcagtctacatttagatcatagctaccatggtgttgtcccaggtgtgaacacccttgcctgattcaatattcttgtcgtgttggactggtcgtttacggcctccacatggagaagcagtaggggaaccttatatggaccgagcaggtattactgtcagcatgcaacagcttcggaccagtgctaataatgtcttctcgtcccttttatttgaattgtcgtaagccttatcagctgctgatggcatgtggtgctcttgtgctaccggataaaggctcgtagctcggaat

SEQ ID NO: 19134 - DNA, 584 bp, Zea mays
  Coding DNA Sequence Number=SeqID_4731
agatgggtatggtgctacgctctcaggctcctacgtccagcatgcgcatctatggccgatggattctagtatgatttggcagcgtcaatatcctctaaggtagccggttagctatcatcatatataggaatgtgggcgtgttccactgtacctgttctcctggtagtcaaccacaggtgcagattactcccataatctcaaaatggatgagctcgagcgacatgtgtcctgcactcttagagatcaggtagcaagaatatgtgcttcctgggaccatgagacgctagagcctgacatctaggaggcctcatctcacatgtcagatgtggttctcctgcgattcaagtacccttgtccgttggtcaagggtcctttaaagaaagcaatagagaggttcttggaagctaaatgcagagttgatgccaggttcagaagcaagggctaccttgtactagtggattcattcacgaaggtcactaaaatggcaatgtgtttttagcatcatagatagagcgcaataatatttgatatggatctagatgaacatactcagggtaccaagctattgaacagcctcgggccaa

SEQ ID NO: 19135 - DNA, 506 bp, Zea mays
  Coding DNA Sequence Number=SeqID_4732
gagaacctttatttttagcacttagatagtgactgctgtggggaactcccttggcgagcacccactgtctatgtccaccatccttcactacatccaccaactgcatcttgatgacaccaccacattcactggttccatcatcgtctctctctcctgccaaactcacattcgggctgcacatgcgtccacggcttaagggtttctccaaaacatgtatcgcgcgaggttccgcgagaacttatagcgaggacttacggcgtcgcgagtgcagttgttcacagcactgctttccacgacaattatgacgaacacctactacgcgtctatgttgaggagttgcatgcaagactcgcctaccagaattgcgtcccagatgacttggcgcgatcacatgcaggcagccgaagctggtagggcaagatgctgtggtatgacctcatgctacctgctgcagctgcttggggctacgaggatgatgtgctgcatctatgcatagctaccggaat

SEQ ID NO: 19136 - DNA, 170 bp, Zea mays
  Coding DNA Sequence Number=SeqID_4733
ttggtggtgtacaatcacgcgtccgatgttttcgctctccttacaggatatcatgattctttactctgctgtgcgcatacgtaagggtctgcactacaatccctacttccctggtggtgttgcaaccatgccgatcacgcttaatgatggactttgttgagtatgaagat

SEQ ID NO: 19137 - DNA, 502 bp, Zea mays
  Coding DNA Sequence Number=SeqID_4734
ccaaaagttttcatgctcaggcaaaatacagaagaaatctgataatccaattacttgatgaccaagaaaatgcagtagatacacgtaatgaaaaggcaaagttgatttagctttctttcagtaagagattgggtacaaacacctttccaggcctaaactttgacatgaatttgtttatcaatgatcaagttgacctctctagcttactggagagttataataagaaaaagattgatgtaattatcaaaactttgccttccaacaaagtctctggtcctaatggttttaatactgattctataaaacaaatgttggccaattatttgtgaggatgtttataggttatgtgaatctttctactctgaacatgtttttctcaaagaggttcaaactacttaaatcttgagtacaagatgaatcgcccatacccactggtggaaatggttataggagtgtctcccatgtcttgaatcagcccaaacttcccacaaactcattcaag

SEQ ID NO: 19138 - DNA, 557 bp, Zea mays
  Coding DNA Sequence Number=SeqID_4735
ttaagatcatcttgaccgtcgtacatcctaaggtggcaggaggcgctcatgttggcgtcgctcatcgacgacgagaagaaacttggcgactgccagttcgacctctggaagcagtcctacgtgaccgcatgtgtcgctgtgtatgacaagctccggctgtccagagcgactacagcatgttgtccatcgccaagcagggggatctcatggttgtcgccaacgtcggcaactctcgggttgttctgggcaccgcatccgacgacggtgtcatcacgccgttcagctcatcgtccatctgaaacccaacctgccactagaggagtagcgcattaggtagtgcaacggccaggtgtactacctcgctgatgagcccgggtgcacttcatctggtagcccagcgaagagtcattggtactcgtcatgtcgcgcgtgttcgatgactactatatcaaggattatggcgtcgtctcggcaacgaaggtgacgcggaagaggatcgatagcaatgaacagtaattctctttgcaaacacacacagtgtgggacctgctctccaa

SEQ ID NO: 19139 - DNA, 460 bp, Zea mays
  Coding DNA Sequence Number=SeqID_4736
ggttcccgccatgtttgttgggtgccttcccagcaaaaaagggccaggtggggccaggaggttccagggttcgtgcagaagtcgtttatcatgcgcagcaagctgcttcgggctttaaattggggaaaggttttggggctggtgcccaggaggttgccttcgtggccggggtgggcggcgccgctgagggggtggccttcgatgtcgcacagcaggtggtcatggacgtacgcgtggcgcgacatcttggctggtcgctcttcctcctgctccggctacggcttcgcgtcttctgctggggtctggttggttcgcacgcggtgtctcggttggacggctggaacgggggtgctggggaatatatcggttgcgtagtttgggcgactagcctgggggcgacaggacgtgccgccgtggaatatggaaccctatatttcctccacttctcttttccaatttt

SEQ ID NO: 19140 - DNA, 425 bp, Zea mays
  misc_feature (198)..(198): n is a, c, g, or t
  Coding DNA Sequence Number=SeqID_4737
agtccagatctaattgcctccctttcatctgaaataacacggtgataccctggtttgcgtcctactaccacctggaaaagaaacattcaggcactgcttgttgaactgagttgtctcacagcatgtcgagaaatgaaagcacgctaatctttcgggtccagcactcgctggatcccaaacgactatcaagaaccgttncaacaactacggcatggccagggcctttgtcagcatgaatgccgtccaagtccttcgtcacattctctgtgacgttgaccccagggatttgaaaaacaccaaagttggctatccttggggctcagcactgaaggccagaggttttgggcctcaagaattattttcgattcatgggatggaaaaaacatgggctgggaacacctttcgcggcccattttggatttgaa

SEQ ID NO: 19141 - DNA, 88 bp, Zea mays
  Coding DNA Sequence Number=SeqID_4738
ttggcaaaccccagtttattgggtgatgctattcgtgtagtaggtggattcccgtagagaagcaaaaaagtctcagggatccaagtgg

SEQ ID NO: 19142 - DNA, 389 bp, Zea mays
  misc_feature (110)..(110): n is a, c, g, or t
  Coding DNA Sequence Number=SeqID_4739
gtcggccccgccaaggccggcaagatcagctccgaggagtttgtggcgatgatgaagaccggttcggcctggagaaaggcgtcccggccctcctcgagagggaggttcancagcctcagcatgaagcttataaaggacgggtcggtaaagttgggtgtcgagtgaaaaccgccccgaccctcgttcttgtgtgtgtgtgtgtgtggtgtgtgtgcatgtagttttaggcccttggccccctaaccagaagaactgtaggcctttttttttggtcccctcgtgactgttgcgtggaaattttaaataggtggaagtggaaccctccgatttgtcttgctacctgtgtaattagctatcccagtctcgctgccaggccctgggccaaaaaa

SEQ ID NO: 19143 - DNA, 368 bp, Zea mays
  Coding DNA Sequence Number=SeqID_4740
tctccatcctcgtttagctgtcaatcatccacagcaacaccatgtcagtagcagggttcttgcttttccagggtcccagccctatgatagtgcgatacgtgtacgccgtactctttctactggccaacttgtgtgcgtggctcatgcgagagaaccgcatatcatattacatatcgcagcggggcaacgcccgctgtcacggtgaccggggctgcttagcgccgggggtcacggtgaccagggctgtctcgcggctcagagtgtgctgacaattagccctgtgtattagtaaatctttcccagcctcctctactactataaacaacttctctcccatccaagacagaaaaaattaacggcgctgcggg

SEQ ID NO: 19144 - DNA, 311 bp, Zea mays
  Coding DNA Sequence Number=SeqID_4741
ggcgcagccgctgaaggtcttcgacacggtggaggcggacgaccggcgcaagcacggcgacaggccctgccgctgacgacgctccggcaagaggttcgccgggcgtgggggctggcgcacgcacgagaagaatcgcggtaagctcttagtctgcgtcttccgctccgacttcaagcacaaacagtagctcaaggatcacgttcgctccttcggcagcggccacgacctcgtcgattagcgaccgtctatgtataggatgaggtggcggaccagtagacgacgataacgacggagttacgacgacctgcaga

SEQ ID NO: 19145 - DNA, 136 bp, Zea mays
  Coding DNA Sequence Number=SeqID_4742
ccccggtatatatgattgttggaatatgactctaactccatcttgttcgtctatataaatagacttcccttacatattggacatcacatcacataatatatctgtttttctatgagttttttcctctatgttaggg

SEQ ID NO: 19146 - DNA, 544 bp, Zea mays
  Coding DNA Sequence Number=SeqID_4743
tcgcaatctagagcgcctcgagcaagctcgggccatcctagcgggctttcggaatcgtctcgacaatcggcgctacgttatcgttttgttaactcggagggggtttgagccagtgctgaatgtagcgctatcagcagcggtgatcggtagaggggggctccctcgccacagggtgaatggggagccctgaaatgaatttttattctatgtgttgagttttgggaatatttattccataaatagccctctcaaaacaataattcgaaggaacccggctatgcgcgaactcggaatcggcctgattggcacaggctttatggggcgtgcccacgctctggcattcaataacgcacgggcggtgtttgaactgccggtgaagctcacactggccgccctggccgatgccgataccgaacgcgcgacacgctgcgccgcggactgggggtttgcccaggcccatggcgactggcagcagttgatcgacgatcccaaggtcgatgtcgtcgccatcacgacccctaaccatttgcacttcccgatggcc

SEQ ID NO: 19147 - DNA, 419 bp, Zea mays
  Coding DNA Sequence Number=SeqID_4744
ggcggcttttggagttttggaacatgtatcttcgttgagcccattacggatgcgcccagggcttgcttaaccctagtgtctttattaatacgccgacgcatccttgctgagaggcgcatcgttagatacgcggagactctggtctcgagcggtgtgcgggcttggggtaggttggagctgggctcacgcttgacggggttgttcccggtcgtcggccggttcggggcgcgtgcgggacagtgtgtgggggacggcgtgcgcctatgcgctaccgtcccggcggggtgttggtggggccgtcatcgtatggtcggcgcgcggcgccgcgtcgtggagactggggggtgccagtgaggtcgacagggtagcgacgagttgtctgcttgtgcggtttgacgggagggtttggcgcgcaggct

SEQ ID NO: 19148 - DNA, 561 bp, Zea mays
  Coding DNA Sequence Number=SeqID_4745
ggaagtttgctgcttcatgttccttctccacaagttcagcttatagggctctctttcaaggatctgtggagtttggaccgagtgatagggtatggaagtcatgggcacctagaaagtgcaaatttttcatttggttaattgagcatgacaaatgttggacaattgatagacttgacaggcaaggtcttgaccatccggagaggtgcttgctatgtgatcagactgctgaatcaatcaatcatttgctagtcgaatgcatctttgccaaacaattctggtttgaattattgaagattggatgctggcaaggcctctgtccccaataggatgaccattccttcgagtcatggtggatgagtcatgagttgtagttccagagtgattgaggcggcaaggaaagacttcaactctttggttattttaggagcttggattatctggaagcataggaacaggtgtgtgttcgatggctgcaacccaagcctggttgtggaccttcaggcagctagagaggaggctctcctttggtctctatcagagatcaaagctttgtctttcctt

SEQ ID NO: 19149 - DNA, 361 bp, Zea mays
  Coding DNA Sequence Number=SeqID_4746
gagagcgcccgccaaagcaaggtcactaggcgggttgaggctgagtcgaaatgactaactgatcctggcacgtacacttgcaaatgatttgtttgtatgccaaatttatattgatgatatcatatttgggtctactaacgaatctacatatgaagagtttagtaggatcatgactcagaaattcgagatgtctatgatgggggagttgaagtatttcttaggatttcaagtaaagcaactccaagagggcacagggggcggcctcggcccctgcgcgcgtcgttctggcccttggcgtggttcgcgtggccttggcgtggcctcgcgcttccccgtttaccgctagcgcgcatttaggaaa

SEQ ID NO: 19150 - DNA, 146 bp, Zea mays
  misc_feature (40)..(40): n is a, c, g, or t
  Coding DNA Sequence Number=SeqID_4747
tatccaaccgaatccagcggcggcggcggcggcggcggcntatggcggcggttattgaacgccgaatggtggaggtggtcgacttcgaccttagacgacgacgacctcatggcggaaggatggccggggccggattccagcgccgg

SEQ ID NO: 19151 - DNA, 53 bp, Zea mays
  Coding DNA Sequence Number=SeqID_4748
gggcccctgtcattctccattccatcaacgccaactatctgcgagttcatgga

SEQ ID NO: 19152 - DNA, 293 bp, Zea mays
  Coding DNA Sequence Number=SeqID_4749
gaaacacggaattctgaagatctattcacaactatttataataaattttcatatgaagatatcggagccactccgctctcattttgttagaatgccaaacatccaaaaatggaatggagcaactgtattcttacactgttctcaaccaaatggagcatgctctcggagtttgtgtttggttagtgggttgatgcaggttggaacgagttcaagccacaacaagcccacgtttggttcaaaatgcttgtgggttaggttggttttggcaatcacaggttctcgaatgggaatgt

SEQ ID NO: 19153 - DNA, 600 bp, Zea mays
  Coding DNA Sequence Number=SeqID_4750
gcagaccattgtcagtcgcaaatatgttaaaaataaatctatcatttctgagaaaaaaacctactgattctcacttatggaaaggtatcctctcagttcgagacaaattttataatttttgcaaaaaaaatattggcaatggaaagagcacaagtttctggaaaaacatctggtgtggctctgaaaaaatggcggacaagtaccctaacttgtttgagttcgcttatgataaggatatcacagttcataaagtcatctccccgaactttcaggcgcttattttcagaagaagattaactggtgttttaggtgacgcttataatgacctcattacccaatgtagtgatgtcttgctttctgaggaagaagataattctgtgtggctgttgggtggtaaaagtttttcagttaattctttgtacaaagaaatgaagagttctcagattgctattccttcgaattttttgtggaaaaccagattaccacataaaattaaagtgtttttgtggctggtcagatataagaagattcttacaaaggataatctgtttaaaagacactagcaagggaaccttgattgtgttttctgtggacttctgg

SEQ ID NO: 19154 - DNA, 328 bp, Zea mays
  Coding DNA Sequence Number=SeqID_4751
tcgatcgaccactctctatatatagtgtttttttttttttacaccaccgctaactctttcattttgggtcttgatctctcctcctgatgaggctcaggagacatggccttccttttgctaatattattattgttgttattgttactgttattgctgttgttgttgatgacattgtcattgtttgaatctatggaactgttagcagattctttttcacaagaattgtcaagcgatttcagaaagtacggctgaagcttatccaaatccgataactgaagaggcttcaatagaaactcttgtgccccttcttctaagcacctatcaacaa

SEQ ID NO: 19155 - DNA, 584 bp, Zea mays
  Coding DNA Sequence Number=SeqID_4752
agtgatgttgggacatgcttcgaaataggagcgataactgatgagataaacaaacttaatcctttgtcttccattttttttctttgtttctctcgtattattaatccttttgtagcctgtggctattggcaccttgtcaaacatcttctctccgtttcccctgaattgttatgcctggttaatgttacttatttttagtaccaccatccacaaaaaatctaaggaatataggatcctggttaagttgcggaaaaaaaaaaaaaaaaaagcggcctttggagtgcagcattggggaagttgagaccccgaactacggtagcccagacgaaatgttcagcaaggattttaatccttgcctgaccaattactttggcgaatgaaacattgctgtctatttccggctgactgtgcggggttggaggtaaaggtaaggtcgttggtggatattgtggttctggaagggtacaacatcgcggagctgctggtgatatacgaggcggagtccggggtccgcagcctcgtgctcggatccccctcccacttatactcattgtttttaacatgtacaatttaagtgcctcaat

SEQ ID NO: 19156 - DNA, 257 bp, Zea mays
  Coding DNA Sequence Number=SeqID_4753
ggaagagataacatctacagcatccttgcaactgtggcagatggcattgcagggggtgcaccactggaggactatagtcaggggcatagaagagggggttgccatccccggtcggtgtgcgcctatcgatgaggagcaagcctccggggtcgtccgccatctcgcttgggcaccgcaccctctggcgtggcttctgcatcgtgtcagggtcctgcgaccacgccgggttgtcactgtgggtgctggtcgcggtgaat

SEQ ID NO: 19157 - DNA, 441 bp, Zea mays
  Coding DNA Sequence Number=SeqID_4754
agattatacgacatccaactacgatgtaaattttggagcatgctctgaagaaaattttggagtatgcatacactggtttggtcactgtagatgatgccattgttaagcctgtgaaaacacttgcaaagtattgccactttaaatgatgaagtggcaagtcttaatgcccaacttaagacttgcaaagatgactttgacaaattaaaatttgctagggatgcctacaccattgatagacatccctgaattaaggatgggcttggctttcgaagggaagccaagaacttaacaagtcaaagggcttccattctaaacaaggagaaagggaaggctcctatggctagtaagatatgaggaatcgtgaattggcttgaccatattactatcagcgccagatatataaaaaaacctgtcatctttactcctgtcttggatcgccga

SEQ ID NO: 19158 - DNA, 586 bp, Zea mays
  Coding DNA Sequence Number=SeqID_4755
gatgagctgctagaggctcctgataacagtgatagcattgtgattaagaagggcttgatctttaaggacttgcctacacttagaaggtggctacaggaatattctgtgaagtgtaagatatcattcaaggtaagacattcgtatgcacatcgacgttacacagttctgtgcgaggtgtcggattgtaattggagggtatgtgcccgcaagcagaaggcaactggaaaattataggtgcacacacttgtgcccagatggagctgaactctaagcaccgacagttcacatctaccctcattgcgaaaaggcttttggtgaaattgaagggtcaaccaaatttgaaggtgaagtcaattatgaccatgacttgggagttgttcggttacaggataaagtatgggaaagcatggagggcaaagaaatgggcatggaagatgatatatggggattgggaggagggttacaagaagttctcagtgttgttcaatgcaatgaaagcaaaaaaacccagacatgcattatgagtacatccctaaacccaacgaatggaggaatgtcagagtgatattcttctgcgctttttggt

SEQ ID NO: 19159 - DNA, 495 bp, Zea mays
  Coding DNA Sequence Number=SeqID_4756
gggacattagatctccgacaatcatgctcgagacggttgcctcacatgacttgtggatctggcatgcttttttagggtgacgacattgaatgataatgtgaatgtgctcaacctgacatgcttaaggatgaagcacaaaatgtgaacttcacggtgaatgaccatgagtacaaccaagggtactacattgtcgataacatataccctctgtgtttggtgttcatgaagacgattccactcccatagactccaaagtagtgagtgttcattgtgtgccaggagagcaaatggaagaacatgtacatggtatttgtggtgcttaaggctcgatttcatattctcacaaccttaggtcgttctttctttcagtaggtactcggtgtgatcatgtgtgcatatatcattatgcatactaatgatcattgaggatgagcgtggaggaccatacgaagtggacgatctcgtccaaatacggctagctgtgtttactctacg

SEQ ID NO: 19160 - DNA, 448 bp, Zea mays
  Coding DNA Sequence Number=SeqID_4757
gggccgtgccattgtttctgcccgcccggccgaagcgcccagtcgggcccctcccccgctccctgtccaacggcgggagttactgaatcctttgcaagcgactcaaaacccgacggggctaagtaggtggcaaaggggcggatttgccccgatccccctgtcctccagccccgcgtcgccagaccctgtccaagggaacgggcttggcggaatcaccggggaaaaaagaccctgttgagcttgactttagtcccactgagaaaataggccggaagccccccggtggagtcctctcgttaggtcgtcgggcttagattaggttagctagcttgcctttaataaaaaaaaaatggtggttgtcggcgtcggcttcggcggtttgcttttttttccttcagtgcgtcggtcggtttaaagtttgtcccgtgtcccgtccttgaactgcagt

SEQ ID NO: 19161 - DNA, 228 bp, Zea mays
  misc_feature (32)..(32): n is a, c, g, or t
  misc_feature (41)..(41): n is a, c, g, or t
  misc_feature (43)..(43): n is a, c, g, or t
  misc_feature (46)..(46): n is a, c, g, or t
  misc_feature (48)..(48): n is a, c, g, or t
  misc_feature (53)..(53): n is a, c, g, or t
  misc_feature (58)..(58): n is a, c, g, or t
  misc_feature (62)..(62): n is a, c, g, or t
  misc_feature (65)..(65): n is a, c, g, or t
  misc_feature (69)..(69): n is a, c, g, or t
  misc_feature (73)..(73): n is a, c, g, or t
  misc_feature (87)..(87): n is a, c, g, or t
  misc_feature (91)..(91): n is a, c, g, or t
  misc_feature (98)..(98): n is a, c, g, or t
  misc_feature (103)..(103): n is a, c, g, or t
  misc_feature (114)..(114): n is a, c, g, or t
  misc_feature (118)..(118): n is a, c, g, or t
  misc_feature (120)..(120): n is a, c, g, or t
  misc_feature (125)..(125): n is a, c, g, or t
  misc_feature (128)..(128): n is a, c, g, or t
  misc_feature (131)..(131): n is a, c, g, or t
  misc_feature (135)..(136): n is a, c, g, or t
  misc_feature (148)..(149): n is a, c, g, or t
  misc_feature (162)..(162): n is a, c, g, or t
  misc_feature (167)..(167): n is a, c, g, or t
  misc_feature (203)..(203): n is a, c, g, or t
  Coding DNA Sequence Number=SeqID_4758
cagcatgcttcttcaccggggtggctgctccntcacccggngnggngngctgnttctncgangangggnaggnctgcgggggacgcnacgnggaggantgtgncggatgcgacncggngnactancgntcngacnnatgccgggaganntgaatatccagcnatagnatccatattgggtagaagagggcatcgcatacaagnatcttacgggcgttagcattgaccg

SEQ ID NO: 19162 - DNA, 521 bp, Zea mays
  Coding DNA Sequence Number=SeqID_4759
gttttatgtgactgcgttgcaccacagctgtgcttcccattgtgacatttggaactactaagcttatgcaaatggtgcacttcgtccttttacctgatgctatgatccttttttacttctgttggtctttgttctagcatttgcttgccgtatagatagctctggtgatcatttttcccagcggtttttagcaaagtgtattaatccctttattcgaaatgataaacttttctgttgcataggggtatcaccacttattctcatgcttctccactcttccccccctcatgttctccccccctgcttctggcaataagccatcctctcgggaatctagctccccgcctgtatgccacacttgctcaacacccgaccaagccttttaaacccggcctcttaaaatatggctgtgcggcaaaaccacccacactctgatggcacccctctgtcaaaacgcttccctccaaggccatccgaaaactaggcaccctccccttggcacggcgcgcaaaataaacacg

SEQ ID NO: 19163 - DNA, 359 bp, Zea mays
  Coding DNA Sequence Number=SeqID_4760
ggtcatggtcatggctcgcagcttagctctgctaaaatactggaatgcacaacgactaataacttctgatagcagaaactatttctattgaaaacaggattccggcttggattatatacccataaagaaacagcatcggcgaattctccgttacagtattattcaggtacacttgaccgcagttcatggcctatggatttgagtctggccaacaaacaagaacgaaacagcagagccattcatccattattacaaactctcatacggaaacctaacccgatatttacatgccactggaacaagcaaaattggatttagtgcttgctactgattctgcagacgttcgtcatcatggcccg

SEQ ID NO: 19164 - DNA, 171 bp, Zea mays
  Coding DNA Sequence Number=SeqID_4761
actagctacgaactatagcaggcgaagcgaagctggccgggcaacaatctgagatgcactgcccccaaatgcccgtcgacaagcttgcctctagctagctagattatcgcgctgccgcttcgtgactacctctagtctgttgtactcatgatacgatcgacaaggccagtg

SEQ ID NO: 19165 - DNA, 399 bp, Zea mays
  Coding DNA Sequence Number=SeqID_4762
gcaaacaaagcttgtggtggaagatatttgccgggatatctaccgtgcagatcctgaatgggagatcattggacggaggtacttcaatccttttggggcgtatcctaggggatatcttggggaggacccacgaggaattcccaacaatcttatgccctatgtgcatcaagttgcgggtggtaggaggccagctctaacagggttaggaaatgactatgcaacaagagatgggactggggtaattctgatgcgtatgatgtgcgtaattgtgattttttgggataccattcaaattgattaatctgatgcgtttgaagctgggtattccaaataaaactgctggcaattttctgggaaaatttaataatgctgggggggactaggactaacaagaggtat

SEQ ID NO: 19166 - DNA, 507 bp, Zea mays
  Coding DNA Sequence Number=SeqID_4763
ttttagcagtgcctggccggacgctgtgttgtacgcccgcgctggccatggctttgccagcgccacgccgggaacgccggaggatgcacgcacgtgagtctacgccgcgccaggggccgatgtgcccacgccggtaccggcctcgctgccaccggggctggggctgcgcgctgccgtggccacgccaggctagacgccggggaagccgcgcgcctggccggctgctcagccggccaaccgctagggccacgtgcccgtcttggccgtgtgccgcgcctctgcaccggagcccgcgcgtcgtcaaggctgcagcgtcgtggggccgcacacccgtaccctgtcaaggccgctgcacccgcgacaggcagctgtgccgccaagcgaggggccgcgcgccggcgctcgtgcaccgagcagccgaggccgtcgcgggcccgcaccgggcaagtggaacggcgtcgagaggccgcacgcccacctccaccgcgcccgcgtgacgtcgggagt

SEQ ID NO: 19167 - DNA, 256 bp, Zea mays
  Coding DNA Sequence Number=SeqID_4764
gtctcttgcttctaagagccggaggccgcgttggcgtgcgcagcgcggggtcgctttccccggccgcggtggcgcctacaatggacacccagaaggacgttcaacctccaaagcagcagccaatgatatatatctgtggagagtgtcacaccgaaaatgaaataaaatccagggatccaatcagatgcagagaatgtggatacagaataatgtacaagaaaaggactaagagattggtggtttttgatgctcgatg

SEQ ID NO: 19168 - DNA, 599 bp, Zea mays
  Coding DNA Sequence Number=SeqID_4765
acgtattttctcaccatcaacctgtccgcatactccacttctgctatggtacacaactgtagacaatgctgcgtcgacaccagagaatgatcccatcccaaccatagaacctacttatgcttccacaactcccaaaagagatcattctactctgtccttctgacaactctccctcgcacagtgattgcgactttcatcgaagccttccttccatatcgctcaacaagataccgccggatgcatactaacataagatcccatcctgcggtactgccaccccacctgccgacatcccacatccctcccgggtcgcccccctcgtcctgcgttgcccacccctcactccctggtcctgtggccacccgcaccctgacgcagaccttggaccacccgctttccgctcccctccgtcgggcaccttccctgcccaccggcgccgtggccccctcgtcatcgcttcacaacccctccgagtgccaccctcccccccgcctctctcactgcccctgcccccggcctcacttacgccacagttacaatctgccgcatcgatactaccaaaatatccgatgctgaagtgatgatcaccctccattttt

SEQ ID NO: 19169 - DNA, 372 bp, Zea mays
  Coding DNA Sequence Number=SeqID_4766
agccaggagcccaggagccatcactccgtcagctccctgtgggctgcggggagcaccctgcgacctgcatccctgcctgcctcatctgcgattagccggccaggggagggcaatctgcggcggatcaacccatggcccatccgcatgcggcacgcggcatgccggccaggggagcgagacgcccagacccagtgccgtcggctgcgcgtcaggcgtcagccaccagctggccagaagcagtgctgtgcgtcaatggctcaacgcccagtgctacgcgttagccatccaagggagcagccgctgtccgctgcgagcattgccgggctgccggctgcagtgttgagtgttgtctgttgcagtgctgtgcgtgcc

SEQ ID NO: 19170 - DNA, 478 bp, Zea mays
  Coding DNA Sequence Number=SeqID_4767
gccttgtaaagggttgccaaaagcttgaccgaaaggagttcaccaaggtggaagcggggacggcaaaagggttggtcgtaatgggtttggtgggttttttggtaaagttaattttcattcccatcaaaaaaattatggtgggttccggttaggctaagggggcgactagaatgggagtagtgcgatacttttgaaagcaagggaaagcgaggattttggtttttggaaaagaattgttaatgacttttttttccggttgtgtttttggagtaaatcgttgaacgacaaggcttcagaatgtctggatgtggattttgagtagaccttgaacccttgataaaacacccagttttggaaaaaaagttccattttgttgttccataaagcaatttttgttgctgtcaacagctctctcggcgatggtaagcccgatttgggggtttaatgttttagaaaatctgaccccaactgtagactg

SEQ ID NO: 19171 - DNA, 446 bp, Zea mays
  Coding DNA Sequence Number=SeqID_4768
tttcctctctagatcttcgagtcgactgcggatcaaggagcaggcaggaaaggaatccataggaccagtgcaagcacgaacgaagaaggaagaagaacaggggagcacacagggaagcttcaagggagagggagaagaagatgcccgaacacgaggttgcggtaagcgaaactagacacatgcaccctcccctctgttttatgctcaagagaaggaagcctaggcggcgcttggaaggtgtgcccacacaaaccgctcaaaaaagattcatcccttcgggggaacgatgcctcggaaacagggtggaagactgtgtgttttgcaggaaaacaaccgcatcggacggaccgccaagagagcacacaactggaagggcactggtaacaggcatgaggttagccacccaatcatgccacctgtgtgcgatacagcaaatgggccaattc

SEQ ID NO: 19172 - DNA, 522 bp, Zea mays
  Coding DNA Sequence Number=SeqID_4769
gttggagcttatttgcggtcgtagttgttgcttcctatgttatattcttctgcgatcatcggtacaaattttatgcttaggaggtgctcaaaggtcatagacgcctcgtggcggacatgctaatcagtgggaccgaggagttcgaagataagggggccctgcatacaaatgagtcacggcggcaagcaggcgaatcagcaatggaacatattgtcgcggcgtccattggtgatgaagtctacttgtgcaatgagggcatagttcaggacaatgggcttgcttggttggtagcaagcaactcgtcttattagttaaggttcccggagcaatcatgtagcaagtagtaggtatctattgcttgcaaagcatggaaatggcatccttgtttgtaaatgttctggagaagtgcacgtacatgtaagctagtaggtagcacgtgcgagcggtgggcagcttgagggctcgcattgtcgcatcccgcacagacactagtaaggacgccatttggctatttgcccatta

SEQ ID NO: 19173 - DNA, 270 bp, Zea mays
  Coding DNA Sequence Number=SeqID_4770
tccaaccatctaagcattcactactcctcattcaatataagagcaatacacaacactccaagacacaaatcaaagcctccgatcaaatcaaaaagtcacacatttctgtgagcattactcttttgtttcctctattgagccatacagggtagaggatgcattaagagattcagattgggtggtggctatgcaagaggagctcaacaacttcacgaggaatgaggtatgacatttggttccacgtcctaatcaaaattttgtaggtactga

SEQ ID NO: 19174 - DNA, 239 bp, Zea mays
  Coding DNA Sequence Number=SeqID_4771
ttctgcctttccacctgttgggaaggcgcttaacggtgcgggccctggttcggctttttcgccagtcggccaaagggggactgggggatgggcgactaggtggggtaaagggcgaggggttttccccgagtctccccgttgtaaaagggcgcaccagtgaatccaatcaaggcgacctaatagaagagccaaggagttgcattcacgcgatccgtaaagttggttcctttagatcctct

SEQ ID NO: 19175 - DNA, 357 bp, Zea mays
  Coding DNA Sequence Number=SeqID_4772
ctgcggtcgcgtatcccgacgtctgactgcgtcatccagacgcacagggaggaccgacctgtactaggcacgagcccagtccccgcgtaacggatcaacgttccagaccccagggaagccttgtatagagactgtgcacttccatagctcccattcggattcgatcttgagttcttgacactgattcgcacttgtgcttttgtccttgcaggtagctggaactagtagtgcattctttaatcgttattgttcaagtgtaggttgctttggtttgattcgtcccctgttttgctctctggatatctcggtacctgccaaccgctgtatcgaaatcaacggtagcttggtgaccatgca

SEQ ID NO: 19176 - DNA, 420 bp, Zea mays
  Coding DNA Sequence Number=SeqID_4773
aatattttgagcaagtgtgtcaggcaaggaaggataaagggcttattaagaatacgattccaacgaagagagcagcactaagctattcagagggtgaaagtgctcctttcagctcattcaagaggcgatggcagtctcttatgggggaaaatgaaggcaaaatcaaggaaaaaaaagggtgatgtcatgtttgacttcctgcctttggagctctcagcgagatgcagtttttgcaatgctttaagcccgtacgtgctgtgcttagtttcttgggcacgtgagttgaatcccccaagggctggtggctttgtagtgtaagttatgcaccgatgccatagattagttattataaaccctaaatgaggtatgtatgcgcatcctgtattgtagggctgtaaattcggactccccaattgcaac

SEQ ID NO: 19177 - DNA, 66 bp, Zea mays
  misc_feature (32)..(32): n is a, c, g, or t
  Coding DNA Sequence Number=SeqID_4774
agcggcgatttccatttcatctcagaattcanacggtgttgttgtctagggcaagaggggtttctt

SEQ ID NO: 19178 - DNA, 524 bp, Zea mays
  Coding DNA Sequence Number=SeqID_4775
gacgactggcgttcagggatcatatatggacggcaatcgcctatggtgcaccatcgcatgtcaagaaacagcgcgttacatggcatggtctgtgcctagacgatcctcttgtatcagagcaaagacggcggcttatcatagcagtcatggtgttacgacactcatgtggggcagattctcggacgggatagagtcctgatcagtagtttggttagaacgggagtatgattagaacgggcgtatcagtagatcattagaggcaggcgaataccaggagcattggagtaagaaaatggggaaagggtatagatgggaaagaagtataaatgtgcatgaggtatcatatctccatcggtagtacgtccacttcagtccaatgtccggcagacgtctaattttggcaggctaagaatgcatgatcggtaagtggtgctttaaaaatgggttagttaagacataagaggtacaaaagaaattcgtgggcaataaaatcatatacgctttgagccaatacgcggttaaaa

SEQ ID NO: 19179 - DNA, 502 bp, Zea mays
  misc_feature (443)..(443): n is a, c, g, or t
  misc_feature (451)..(451): n is a, c, g, or t
  Coding DNA Sequence Number=SeqID_4776
gaggattgcccgtggcatattctgggccgtaggcaaccccaagggaagcctgttttggtgacagtgttacttgatgaacaataaggtacctcaaaagctagatgacagaccaattcacctactattgaatgtgtcgcatcaatggctaatcagctgttaaagaaatcagcaatgggaactaaagatgctgatatgtgaaatcagctagtatttattagtagcatatctgagatgtgaactgaaccactattagtagcatgtatctgagatgtgaactcgaccactattagtagcatgtatctgagatgtgaactcatgcgctattatgtatctaagaaagtttgagatggctacttgcctttgcctaaaaaaaaaaaaaaaaagcgggcctttatgtatctgagaaaaaaaaaaaaaaaaaaaaaaaggggggggggggcatncacccaancttataggcctccactagtgcatggggggaggagccttcaacaaccaattg

SEQ ID NO: 19180 - DNA, 490 bp, Zea mays
  Coding DNA Sequence Number=SeqID_4777
acgacgtactgtccgtcaccgatagaaagtagagcccgctatgactaaacgagtgatccaactcacattagttgcagtaccgctctactgccccctattccccccctccaacctgtctcgccccctgctgcattgtttcgtccggccccccccgcccgctaaatccctaatcgtgaggtctcccgctgcctcgtcccccctctcgttgcgcccggtccctcggctggcccgtcccgacccttccccctcgaacgcgcgcgggcgcccttcctcgtattcagggcggggggcacggggcctcctcccccgcagatgcccggcgcaacgccgccccccgcatcaagccccccccccccccgcagcgccataggctccccgcccccgacgtcccgctcaatgcgcgcccctctggtcccgcgcgtgtgttccccagccgcccccccccccttccgtgtgttctccccctgaaaagctcccaccttccgattcc

SEQ ID NO: 19181 - DNA, 524 bp, Zea mays
  Coding DNA Sequence Number=SeqID_4778
gatgtcaccgtttcatacactttatggaaggagttgtagaactccgttgcactgggatcaacctagagagagacaagtgttcagcccgacatttttctcgaagccaaagagaatatcaagatggtttgagagaatatgaggatatcacagtcaaggcagcgaagttatgcagacacaagaagaagagagctgagttttgaagtgggagattatgtctacctaaaggtatcacctatcagagaagttaaaaggttcggagtcaaagtcaagctagcacctcgttttgttgggtcgtattaaattctagcaaagcatggagaagtggcataccagctcagcttaccggaaagtttgtcagtggtgcatgatgtcttccatgtgtctcatttgaagaagtgtctgtgagtgccagaagatcagttgccaatggagggcctacaggtccaagaagacctgacatacatagagaagtcaacgcagattctagagactgcacacagagtcactcagaggaacaccatcag

SEQ ID NO: 19182 - DNA, 466 bp, Zea mays
  Coding DNA Sequence Number=SeqID_4779
cgaaggtggatattaatgacaatgttgaagcatgtcagaaggcctttaatactatgtgtgccttcattggtacaagggatttaattcaagagcacatagccttcagggtatggccacttgtggagaattgggaaatgccgaaggatactgttgttgaacccagtgaaggtggcctagttcgattaaagtatactttcagattcagggagaagttatgagcctgatgatgactggttgaaatgtattgaagctaccagtgatgagctgcttgggacatattcccgggccaaagatgatgccctttccgcagccttcgggggccgagggaagaaaagattgaacatggtatttgatgcgattggcttcgtataccctggttaccgctacccgctacgagggccagggggatgcgcttgcagtaggggttacaagcgttcgcgagaaagagaggatgagcctgttcgtc

SEQ ID NO: 19183 - DNA, 329 bp, Zea mays
  Coding DNA Sequence Number=SeqID_4780
atgctcctcatcttgtcggtacctattcttgaccttaaacttgagatcccacatacttcaccaaactggtcttcgggtgagtcgtaacctcgctgctactcgtatcaatacatacagatagacaaggcgaaaataaacataacagaacaccaaacataagatcacccatagtaagcatattctacgcgatgctacgagagcgcaagcacgagaatgtccacattctgagatacatcgtcctagaagagcaccccatgccttgtaaccaataatccatgctccaccagtcacaaaggccaccactggacagggcctactattatcgtgta

SEQ ID NO: 19184 - DNA, 392 bp, Zea mays
  Coding DNA Sequence Number=SeqID_4781
tagaacagcgaaaccttattcagtttacaattgcatgtcaaccatatatggatcgatgcatacatttgcactacgtcgtactatgatggttggcagcagcactgccggagatgaagacggccagaaccaggccgtttatagcagaaagcaccggcgtcgttgaagcctgatgatgcgcagaaactctggtgcttcacccaacaacagaagccagtggtggtctagaagcacgtcgccgccgccagtcgctgccgaagcgccggtccatgttgacggcggccatcgtcgctcacatgatgcagaaaggacggggaagacgttgaagtgatcaacagaagaaccaagagaggagctacaaattctgtgatgatgcatctcatgagttgtgccat

SEQ ID NO: 19185 - DNA, 406 bp, Zea mays
  Coding DNA Sequence Number=SeqID_4782
actctgtactacctgatgaaatgaatgactatgtcgagtgcaaggttgataggaagagcacatcaaggacttgtcagtttctgggaagatccctggtgtcttggagttcaaagaaacaaacttccgttgccctatccatcgccgaggccgagtatgttgccgcgagttagtgttgtgcgcaactactttagatgatcaaacactctgggactttggctacaatttgagcaaagtcccattcctatgtgataatgagagtgcaatacacttgatagataatcccgttgaacacaaccacaccaagcacgtagacatccgacatcactttctgcgagatcaccagcaaaagggagatatcgatgtttgccacattagtaccgatcaccggctagccaatattctttac

SEQ ID NO: 19186 - DNA, 575 bp, Zea mays
  Coding DNA Sequence Number=SeqID_4783
tcgactccggtggacattcagggcacggtctccatcaatgtgggccctctagtagctaatccagccagctgtcggagtcttatcgaggccctgtagtacctcatcttcacacgccccgacatcgcctacgtcgtccatcaggtatgccattatatgtacgccccgcgggagccacatctcactgctacgaagcggatccttcggtacctctgtggcaccaccaactttgacattctcctttgtcaatctgtgaccatcaaccttgctatctacaccgacgctgattggggtggttgtcccgacacctatcggcccacttcccgtttcgttgttttccttggcaacaaccttggattctggtttttgaaaagacagctcgatgtctcccactccagcggtgaggccgaggctgagtaccgcgatgtggccaacggtgtcgccgaggcagcgtggcttcatcagctactctaggactacactgcccgctgacgcggagcacccttatctatattgtgataatgtcagtgccatgtgcctctctgaaagggaaataggcttacaacgctaatcccggc

SEQ ID NO: 19187 - DNA, 571 bp, Zea mays
  misc_feature (104)..(104): n is a, c, g, or t
  misc_feature (138)..(138): n is a, c, g, or t
  misc_feature (205)..(206): n is a, c, g, or t
  misc_feature (228)..(228): n is a, c, g, or t
  misc_feature (248)..(248): n is a, c, g, or t
  Coding DNA Sequence Number=SeqID_4784
agagaagcttcccagttctcttttccgggtggaagtggagcatagaagtgtggggtggagtcttaactaagtattttcttggcggggctctgactttctggtcntcatcggcgttctctttcctccctgttcgtcctngtgggtttgtgttcatctgaaggcatctggttgcctaagagctctctcctctcgatcctgtcgatcnntattaatccccctgccctaagnccagcctccccttttatagntggaagaaagggtcggccagcggtggcttccctgagaaggagccgcaaggcaagggtaaaactagtgttttaccccgtgtagagtcacacatacttgtggagcccgggctaactggatgtcttgtatttaccatggcgaatgacatgggggcggtaatggtcccaagcgtcatcactgtggctacgccgacccctggcctcgttagcctggggatcgatgtaggccattgtaatgccctgtgggaggtctgcatactcaggcctagtccgataggccataagtgcatcgtaggctttaatgtgacgcagttcgaggactttgt

SEQ ID NO: 19188 - DNA, 486 bp, Zea mays
  Coding DNA Sequence Number=SeqID_4785
gcccggccctgatctgatacaagcacacaagctagggcggaatcccagatcgaagcagcatctgcacaaggaatcgagattctcccctccggattcaccattttcacctacactagacataggatccagtgattcggtatgcatcagctcgttctcgatcgttccatgaaactactataattgtcgtcgctctcctcctcacctcgcgtgcatcgttgtggaatcagtaattcatcagcatctgtacaataccatgtggctgggcagagtatgtattgtcagtacgagttagttatttcatcaaaaatggaataaacataaatattccagcttctatgtctgggattcataaaaaaaaaaaaaaaaaaaaccagttatcttcatgaaaaaatgtgactacacttcttgaaatgtgagaacagcttgcacacgtggtgaacttggcgcgtttcttctgaagttgctagcttcatcattaggtcggaa

SEQ ID NO: 19189 - DNA, 248 bp, Zea mays
  Coding DNA Sequence Number=SeqID_4786
gggctaacagatcaacctagggttcaggaaaaaacttttaattggagtggcagcaatgttttggtctatttggttgtgccgcaatgatgtggcctttaattttaaaccaataccatcaattttgcaggttcttttcagggggatgtattggctcagactctggagattattgcagaaacaagaagctcaccaagagattcttgtggtatgtcaatccttagagatggtggcaatggagatccttgcaa

SEQ ID NO: 19190 - DNA, 519 bp, Zea mays
  Coding DNA Sequence Number=SeqID_4787
gccgtcgccgcaactgggctacgaatcgctgttccgcgaagacctggtgctggtggccgccgccgaccaccagccgcccctgcccgcccgcgtggccgtggccggcctgggcgcctatccgctggtgctgcccagcctgcccaacgccatccgcaccctggtcgagagcatctgccgcgcccagggcgtgcggctgcaggtcgcggccgaggtggacgcggtgcagaccatcgtggaactggcggcccagggcgacgcctacgccatcctgccgcgctcggccgcgcgcgggccggcggccgaacacgcgctgtcgctcagcgacatcgtgtcgccgcggatcaccaacaacctgctgctggccagcgcccgccatcgccccgccacccggctgggcatggtcaccggcgacctgatccgccatgtgaacctgggcgcgcttgaagcgccggaccccgcgctggtcgttacgccgaatgcccccgcgctcctacgcgcggctgtgatcgacgttgtctc

SEQ ID NO: 19191 - DNA, 229 bp, Zea mays
  misc_feature (52)..(52): n is a, c, g, or t
  misc_feature (61)..(62): n is a, c, g, or t
  misc_feature (64)..(65): n is a, c, g, or t
  misc_feature (70)..(70): n is a, c, g, or t
  misc_feature (76)..(76): n is a, c, g, or t
  misc_feature (80)..(81): n is a, c, g, or t
  misc_feature (85)..(85): n is a, c, g, or t
  misc_feature (93)..(93): n is a, c, g, or t
  misc_feature (97)..(97): n is a, c, g, or t
  misc_feature (99)..(99): n is a, c, g, or t
  misc_feature (101)..(101): n is a, c, g, or t
  misc_feature (109)..(109): n is a, c, g, or t
  misc_feature (127)..(127): n is a, c, g, or t
  misc_feature (131)..(132): n is a, c, g, or t
  misc_feature (136)..(136): n is a, c, g, or t
  misc_feature (152)..(152): n is a, c, g, or t
  misc_feature (156)..(156): n is a, c, g, or t
  misc_feature (162)..(162): n is a, c, g, or t
  misc_feature (168)..(168): n is a, c, g, or t
  Coding DNA Sequence Number=SeqID_4788
aggaggagcacgattgaattgaagaggaagagaggatcatgcaggagttctnctccatctnntnntgagnattttnttgnntaangcgtaggngttnangntgcagagnatgtcgagtacatttctncttnntcgntgaaggtggttgttgntcancaaggngagtgngaggtagcaggacgtcctccttcactctcgtaataaggctgcccagacacagtcatgattt

SEQ ID NO: 19192 - DNA, 469 bp, Zea mays
  Coding DNA Sequence Number=SeqID_4789
atgggttccatatctgttctccttccggtgctccgataatcccagcgttcagtgtgatgccgtgaagactatagtatgccacaacctgaatgatgtgcagcgtttggtctttgccgagaattttgtttgccctttcccagagctcctgttcaagaggcttgcctccccggacaagtcgcatagccaagtcaaatgcaacactttctttctcagttaagccatctggcttgatcccatcggtgattgacttcatttggtccgcactcagaagttgcttgctagcaatgatccttgagtgcgagtaggtgaggaagccgccgaaggaaccggtaaagtatccttgtgttgccatgatggccacctcagttgggccaggctccagtgcagggaggctcaggacctcactgtttagccgcatagtgtgtgttgagtactggggggggtgtacatcattatcgacaagggtccc

SEQ ID NO: 19193 - DNA, 596 bp, Zea mays
  misc_feature (546)..(549): n is a, c, g, or t
  misc_feature (551)..(552): n is a, c, g, or t
  Coding DNA Sequence Number=SeqID_4790
tccctattgggacctggctcgctcacacagcatatggcagaggtcagctctgcatggagccagcaacaagtgaagcaacatctatatcaagccgtggccctccaccaggggggcgcaacaccaaggctgccggtgttgggaatgttgctgtgaggccattacctgccctcaaggaaaacgtgaagcgggtcatgttctactgctaagactgatgctattaaggcagggctaccttttattattacagtatatcgtgaagactagagtattttttttccatgtacttgatgatgctgagctaccttttattatgtcgtacgatatatatgggtggtattgtatactggttacagtaactttagttgtgtgttccatcgtgctagtctctagctggtgggcgggtggtgttacgtgaaaaacattctcctctaaaattcaacaaaaaaaaaaaaaaaaaaaaaaataaaaagaaaaaaaaaaaaaaaaaaaaaggagggaggaaaaaaaaaaaaaaagggaaggaaaagaaaaaggaaaaaaaaaaannnnanngggggggggcgcttaaaaggatcaaaatttaacgccccgtgctt

SEQ ID NO: 19194 - DNA, 576 bp, Zea mays
  Coding DNA Sequence Number=SeqID_4791
gtcgccataggagcggcaaccaattcaagcgatgttgtcttcttcgcgcgtctactctgccattcaaggtacgcagactgcgatccatttccgagcttcgaggaatcgacagtcaagcttcgacgaccaagggatcgaactcttcgagttctacaaggctgaagaccctgagcatctgtttggtgaaggcaagtgtcctctgacctattatgtcccatttactttataattcactgtcccgcataccatgaacaacctaaggattgactagctttctatttaccctatccttgattaccttttgggttactatggttagattcatgctaatgctttactttaatcaatgaacatgatgtgaacacttatgatacgatgttgttattattattactatgttgggctggtgatactttagggggctcgagcggtttctcgagtgcctctccgtaaggacctattcgttggatgaccgcccgagaaaacagtgaaccatgagggtggtatgggactcccttagctgaataattagaggaactgtggtgtagttcgccttcgtcgtcgtgccgcaatggg

SEQ ID NO: 19195 - DNA, 462 bp, Zea mays
  Coding DNA Sequence Number=SeqID_4792
gttgttgtggtatgagttggctcttggttctcgatgttcttgctgttgtattgattgtgatctcctgcgttctctggtgtttttttgttcgcattctttatttcactttgatctaaaatacaaggactttttgatattaccaatcctctgaagaaagttgttcacgttaggggacagcttctcaggatagtgaagactcttggtatccagctgcagtcatgtgacagagatatgcaggcagttagaaaggccattattgctggttcattttctaatccatgtcatctggaggaatccacccaaatcggaatgtataaaacaattaggacattacaagaagtttatattcatccatcttcaggtctctttagggtcaatccaaagggggttgcctccccagcctcctcgtctcacctggcaagcattatatgcggcacgttattgccattggccctttttgcc

SEQ ID NO: 19196 - DNA, 454 bp, Zea mays
  Coding DNA Sequence Number=SeqID_4793
atcaaagaacaacctcgaaaccatggatccagattccgaccaccctcacctccccacaatcaaaatccaccaccctccttcccctcgccactccccccaccaccaccaccaccactcctcctccaccccctcctccgccgccaccccaactcccaccgccggcgcccgccgcaaaatcggcgtcgccatcgacctctcctgcgaaagcgccttcgccgtccgctgggccgcggaccactacatccgccccggagacgccgccgtcctcctccacgtctccccgacctccgtcctctacggcgcccgattccgcatctggggaaaatttacgggggcgccggtcgggccgccgggctaacggagaaagggcggccacggcagtgggacagtggcaaacgggcgtgcgggggccgacgctcgggtaggtggggatggatatcataaccccgccacc

SEQ ID NO: 19197 - DNA, 512 bp, Zea mays
  Coding DNA Sequence Number=SeqID_4794
aacatgacctagacgggttttcaaggggggggtgttggggcgtgtggccgtttagcctactaccaaaggtggccggtgccagaaggcagctcctcaggctggcggggcggtgacacagaggcctggcaaaaaacgcatgtggaacctggagcggcgactggcaagcgtcagaaagagacagctttcagtccgaggaagatcccccgtcctacagggcctcatctcttcttaccatagacagattcccagagaggtgaccctggtctctggagtcaggaggccggtgtccaggagagtcgctcatcaaccccgggtgcaagagtaagaaaccaactggtggcgtggacttcgatgagacctgaaggtgcagcacaagcgtggccccgcggggagtcctcctatgaggggagaggcagtctttgaggcccccatcagagaccccccgccaccacctccacctgcctgtcctgggccaggactaacacagctcctcaaatcgttgcgcgtcaaaa

SEQ ID NO: 19198 - DNA, 166 bp, Zea mays
  misc_feature (85)..(85): n is a, c, g, or t
  misc_feature (91)..(91): n is a, c, g, or t
  misc_feature (131)..(131): n is a, c, g, or t
  misc_feature (135)..(135): n is a, c, g, or t
  Coding DNA Sequence Number=SeqID_4795
agaagagagccgatcgaccgagagctagcacgcggatggtgaggtcttccaagatgatggtggcggcagctctgctgggcttggncctggncgtgtcgaccgccgaggcgaggaacatcaagaccacgacnacgnagaagaaggacgacgccggtggtgcagccgc

SEQ ID NO: 19199 - DNA, 569 bp, Zea mays
  Coding DNA Sequence Number=SeqID_4796
ttatttcctagcagcacacacgacgactcatttgaacagctatctacggccatgcccgcttcgttcttgacgcaacaacagtatgatgctcacctaccagcatactgaggataaccccgcccccctattgacaactgcgacaggtgctgcccttgtgcccaacttgttttgacaaacccaacaaccttctatccaacaacactgccattggcttatgcacctcttttatatagcgcattagttgatcttcgataatgtgctaacttggctgatgaacgtggactccatactaacaatgagctcttcttcctcctcaaaaccgacaccctgtatcctgaacgcctacctctgggtatgccccgactgccaattctcccgatagagatccgcaatacccacggtctctgcacgcactatgacaagctgctaactgtatataccctgatgctatccctatgaatccccttgctcgaatcctgctttaccgacttggccgactaccgaacactgctcgcttcgatagctcttaccactattgactacgctgtatggcgatcgcaactcgtact

SEQ ID NO: 19200 - DNA, 420 bp, Zea mays
  Coding DNA Sequence Number=SeqID_4797
gaaagagcgatctaacccggccggcatcccatactggaggtgatcgggccgtttggagaatcttttgtccttagttcgattcccgtggtggcgatctttcattgggtcatccatcctccgtgtcgcttggccgtgataggttgacgcgatggcgctgggatgttgcttctgcgcgaccggcatttgcttctgttattgggttgggtgcaggttcaggttgcgatgcagccatcatcgcgcagcagggctggaatgctgataacgagcccccattcacaaggttcgtgcagatacgaccacacgtccttccagaaggctcacggaaggttgctgtccacggagacctccctggtcaggtatgcagcaatccgcgaacgtacggagtatggcatgatgacaaggttgtgatgcccaggcgcc

SEQ ID NO: 19201 - DNA, 570 bp, Zea mays
  Coding DNA Sequence Number=SeqID_4798
aggacattcagcgatcatgttcccctcgggcaacatccattctaggagccttctctacctctgtcccagcaacataattcctcaatttgaaccttcctaaagtggcccaagatcatccctttgaatatttcgaccgagaccatcattcctctgcccccatctctctgtcgtcaccaccaaaccctatgtcctttcccccaccctccccaaaacccctactcccgtatttcaacatatgaataggcgcctccgtgtccattcaatttcagcctccggcaaaatattcttgatggcacatcgggcccaactccccacaaccccctgggaaaattaaaaaacttgtagctaaggccacacgtgcgccccgaaccgaaaactcgaaacaacctgggcttgcgcctggaaaacctcattttgcggccccagaatggcttgcccccacaaaaaatctccccaggggggggtttccccctgcttcatccacacttggcacaccaccaaagattcgcattttgccccccggtattacaccccaccaatatttcaaaatttcatctccgccgcatataa

SEQ ID NO: 19202 - DNA, 592 bp, Zea mays
  Coding DNA Sequence Number=SeqID_4799
gagactttctggtgtcagtattcttgatggtttttcaccaacgatggcattgagcacctacgcaagtacctgaacctctcgtctgagatcgttcctgtcacgctcaagaagtctcccaagtcgcctggggggtcatttgggtctggccctcctggtggccgaccaaggggcccaggccgttttgatggcgacagaacaaggtttggtgacagggatgggtgacgtggtggtcctcgtggtgctcctggtgactctggtggcgataagagtggagctcctaatgatttccagacatacattcaggaggcctgtctttgggcgtgttgccgacagcgagttcggcacggtcccaacctatttttccatggagtgaagcaggccttgttttggacatggtgtttcccttcgcatgtgccctttagttttgaaggacagttattatgtgctagtaataatgctcggatcgtccagtggtgacatatgcaaaaatgttctgtcgttatacattggttccagtattatatcttcccaaaactcttgggttttcaagttgttactttttcagtgatattcgagtattccgtacctgcgt

SEQ ID NO: 19203 - DNA, 291 bp, Zea mays
  misc_feature (177)..(177): n is a, c, g, or t
  misc_feature (236)..(236): n is a, c, g, or t
  misc_feature (261)..(261): n is a, c, g, or t
  Coding DNA Sequence Number=SeqID_4800
gccaagcatcaacatcgtctacgactggcagagcttccgcaggcttgaccaggacagccagtggacggacatctatgggcgccagaccactcgtctcacggacagtaccaaggcgcccttctgcagactctgaagcggcaagagatagcggctcccaagatgaggcggcttcatcancagcatcgcccaaagaagatcctccaatactttcgccgcagcccaaagccccgattgcngctaagaccagtgccatggaacggntgacagcggcatcgtcaacatacaccggca

SEQ ID NO: 19204 - DNA, 307 bp, Zea mays
  misc_feature (34)..(34): n is a, c, g, or t
  misc_feature (89)..(89): n is a, c, g, or t
  misc_feature (91)..(91): n is a, c, g, or t
  misc_feature (96)..(96): n is a, c, g, or t
  misc_feature (117)..(117): n is a, c, g, or t
  misc_feature (127)..(127): n is a, c, g, or t
  misc_feature (150)..(150): n is a, c, g, or t
  misc_feature (162)..(162): n is a, c, g, or t
  misc_feature (173)..(173): n is a, c, g, or t
  misc_feature (177)..(177): n is a, c, g, or t
  misc_feature (189)..(189): n is a, c, g, or t
  misc_feature (191)..(191): n is a, c, g, or t
  misc_feature (194)..(194): n is a, c, g, or t
  misc_feature (198)..(198): n is a, c, g, or t
  misc_feature (201)..(201): n is a, c, g, or t
  misc_feature (221)..(221): n is a, c, g, or t
  misc_feature (228)..(228): n is a, c, g, or t
  misc_feature (245)..(245): n is a, c, g, or t
  misc_feature (249)..(249): n is a, c, g, or t
  misc_feature (254)..(254): n is a, c, g, or t
  misc_feature (281)..(281): n is a, c, g, or t
  Coding DNA Sequence Number=SeqID_4801
agcctcctcatgctgtgcaaccttgctccccatntgctcagcctcagcatgtagattcccgcgaagggagcgcgctcccggctctatcnanggacngagtcgccggcctcgtcgtcnagctcctcgncctcttcttcgacgccggggccncggttgcagganccggcctcgangccngagaggcactcnanagncagngcntacccagggacggagcttcntcctcgngcgatcgatcggttcantggnggacnatgggcatccccttccctcggcttgcnactatgaaggatggtggcccaaggcc

SEQ ID NO: 19205 - DNA, 329 bp, Zea mays
  Coding DNA Sequence Number=SeqID_4802
cccattttcacaaggggttccatggttttccaatcgtccctactcccttacttcccggaaaattttaggcggttttgatggccccccaagccggaaaagaaacccgcggcgaagaaagttgccgagaaggacaccttggagaaggcggcttcggcggagaaagcccccccggggaagaaggccaaggcggagaagcggctacctgcgggcaagtccgccggcaaggagggcggcgacaagaaggggaggaagaaggcgaagaagagcgtggagaggtaattttgataggttacattatgttaagttatagtggtcgtgtttttctgtta

SEQ ID NO: 19206 - DNA, 361 bp, Zea mays
  Coding DNA Sequence Number=SeqID_4803
ttttttcatacattaggccgatcgggtcgagaccagatacacagcacactccaccagacaggacacgtacacaggtgtcatttcgtacacgcttaactgctcaaagatcaaccgcgcgggggcggggctaaacttattagccccgccaccacgcggccggacctttttttggctttgggtaaaccaggcaccgggccggcgtccttggaaattgggacacaaaaaaaacccccgcgagggaaaacaaaccaaagtttaaaaaaccatgggccccgggttacttacttcaggtcctgggattccgcgagggggggccctttgctgcaatgggtgggcgcgtacgggttgcacccctgcttga

SEQ ID NO: 19207 - DNA, 446 bp, Zea mays
  Coding DNA Sequence Number=SeqID_4804
ttttttaaagcataataccacaaatttaataagtattagtagtaattacattatcggagtttcaaaaataataaccataaatttttaatgcagsggaataactaacggayaaaaccgamtaacamggcyaagcctgaccacactacttctcctggtcctctcctgcayaagcaataacccactcyaccgtrtatcccggmggcatggatgaaggccaagtcacaccatcaaccaaatcaaggaggtkcctttaatttaacacttaaatagtgtttgctgggcggaggtactcscttggcyagcatccactggtcaagtccatcattcttcaggtcgtccaccaactgcaccttgmggttggcaccacatcactggctcggmcatcatctctcggmcctggctgactcgtgtckcbcatgtrtgcatgctgtccacagcttggggct

SEQ ID NO: 19208 - DNA, 344 bp, Zea mays
  misc_feature (249)..(249): n is a, c, g, or t
  Coding DNA Sequence Number=SeqID_4805
agttactcctaatactgcgaaccgcagccttctgattctgctgctcatgtactgggagcacattattactgaacgttaaatgtaccattcacgcccatttcatgtctgctcgtgagataaaagtaaatttgggaaataaccccgggcctttgacgatagagcatacgttcgcgacaacatcccactgagatgtacacgcacagctacgtgcactgttagagctcagcaaatcgtaccatcgtcatgcgnaggaacaaaaagtttatccttacgtccaacgctcaaggggtgatcaccggaacccttttccccctaaagtgatcccaaattaatggcctacccgg

SEQ ID NO: 19209 - DNA, 432 bp, Zea mays
  misc_feature (351)..(351): n is a, c, g, or t
  Coding DNA Sequence Number=SeqID_4806
atgctgattttgagcgatcgtccctgcggctggacattttatcctatttgaatcgtcggtcgttcagacttatgcggaggttatgagttgaagggaatcatatcctgccaagccaagggtatcacttaaggttcggtgactgaacaagaaccctgagcctagcagtcatggtggctatcgcacgccatcccctgtccctgatccgcatgtggaactagatgctgattttgagggatcattgagaagacaggatagctcatcatttttccaccggcgatcattccagaaccttagtcggagtttaagggtttcaggaaatgatatgttctcacaaccaagattggaccgtangtttagtgtgtgtgacccagttaacattggaggccgaccaagtgattttgatggaaatttcagtgtatcggatcaccagcg

SEQ ID NO: 19210 - DNA, 187 bp, Zea mays
  Coding DNA Sequence Number=SeqID_4807
tcccgccagaaaaaaccacattaaggaacagaaaggggaccgcgcagggggtgggaaaccccgaattaagggggggggggccctcccgtaaaacaacccccggaacgaaaattgccccgcggaggagaaggaccaaaacctcgtggggggaaacctgaagagaggcccaaatatggaactttcggag

SEQ ID NO: 19211 - DNA, 336 bp, Zea mays
  misc_feature (95)..(95): n is a, c, g, or t
  misc_feature (201)..(201): n is a, c, g, or t
  misc_feature (210)..(210): n is a, c, g, or t
  misc_feature (260)..(260): n is a, c, g, or t
  misc_feature (269)..(269): n is a, c, g, or t
  misc_feature (273)..(273): n is a, c, g, or t
  misc_feature (279)..(279): n is a, c, g, or t
  misc_feature (301)..(301): n is a, c, g, or t
  Coding DNA Sequence Number=SeqID_4808
ggtttgaagctagttggatggtaaagatctccaggactctggacagggagtatctgctttctgttttgatactaccgattaattgtattgactgnataattattttcatttttgctttaagatatgtttgattagtaatgcttttgattgggaaaatcgatttggtcatacgagacttctggcactgacatggtgtatccncccttttgnttttaaaaatgttttagttgggggttctcatcattcagcctgcaggtttntgggattcncccnaaaaanctcccccctggcacagaaaaantttccctccttaactcccaaaccaatcccataatg

SEQ ID NO: 19212 - DNA, 545 bp, Zea mays
  Coding DNA Sequence Number=SeqID_4809
tccccagatcgccaggagcaatagaacgcaataatagagcgaaaagagcgctaaccaccgttttatctgtgcgccctcgctcctccacagaggcctagtcgcgccgcgtccacgccccatttcggcgctaacaggctgtccgctgacctccgcgtctaccctcccaacccccaggagggcgagcacccccttatttaggtcagccccgagctcgaggtccatcgatgtacttacctcctagagtgcttcatgcaataccagagcaagttagtgactctcagacctacgctgggacatgtctgacgctcttatgtgcaacgctctagtcatctcgctatcctgccgtcccccctatgctgatggaatctagtcctagtcgcgcgcgccgttctgtggaatgctggtcacaacggtgcgcagggactcaggagtctctcttctctcacggtcggccgcccctaccgacaccccgtcctacagatcagtacacgcagacccctacgccgcttctgtggtccgctgattgatgggcaactctccgcagc

SEQ ID NO: 19213 - DNA, 526 bp, Zea mays
  Coding DNA Sequence Number=SeqID_4810
tttctttcctttcttctgatgctgttgttgttggtgtccctgctcctctctcgggatcacttctattatttgttagagccttttaccttccattcactcacttcatggggtgctcatggcttcgtctgcttaagaggaaaggagacccctgttttctgcttaatattcacagcccgatggcaccatggccaggagagaacctgggcacttgtaagaagcaggatttgtaaggcggcagctcaagggcagttggtgtaaacagagaccaggccacccgatgagggctgcccgttgctgttcaatgaatgctgccaccgagggctggttctgcagaagcaaaagaaaccccagcctcctttgtcattgtgggaaatgcaaaggggctattcagcaggttgtgctcctccaaccccgctttcttggaaaccattaacactggccccctattgctccaggaagaccaggttccctcttttcatcttcccccggagttgaaccccctggtttggtacttgcggtagaccct

SEQ ID NO: 19214 - DNA, 292 bp, Zea mays
  Coding DNA Sequence Number=SeqID_4811
accaccagatctgtttgcggctggatggtttgtgtgtagcgttgttcattattgatccgacggggacacacaaggctgcgctatggcccttgccaccgcgatcggtgaggggcatggtcgcccatgccgactgagcgtgcaagtgggcctatgcccatgtctcggcccgtcagctgggccccgccaggtctgttcacgccatggttgattctgttacaaaatattgtcatatattggtcatgtgatcaaccctcttccccgacgatctcttccctgacaattttcttccaaa

SEQ ID NO: 19215 - DNA, 406 bp, Zea mays
  Coding DNA Sequence Number=SeqID_4812
aggatcacctccctgccaattcaatcaccagcgcacgcacgtcctgctcctccacgtaccctcgcacgtgtgacctgatggccgccgctccccccatctgggcccggcttccagcatcgcgttgcgctccctggtgctgagcctcccctccctcagcgccggcagccgccctctcacccagctcctcgccgatgacccagtacccgttctcgcgcgcgcccttcctctacgcagctcgccagcgccggctgtctttgccggggccgcgtcccaacgccgcgggctcgccccggcccctggcactcgtctactacctccggtgctgtgctgtgccctggtggccgctgtcgctgctccctacgctcgcggctccctgaacgcttctcctccagctagaccagaccag

SEQ ID NO: 19216 - DNA, 366 bp, Zea mays
  Coding DNA Sequence Number=SeqID_4813
ttacttcttgattttctttcccctgttttctttttttttattttattttttgtttgctttggtttcgtggttttttcatcttttttatcttttattgttagttggtttttagtggtattccgatgtacttattatcgtgacattttcgcgctcggagttcggtgctgccattgtgagtgatggcggtctctggtggtagtactcgagccgaatttttctcgctgctgctaataacgattcctgctggtcgttggatcgacggccgcgatcagtacgcccttagcttatgcttgtgatctcaaaaatgaggttagaggttgatgatcggatccaggaattggatgtctgcaactcgagagaatgtat

SEQ ID NO: 19217 - DNA, 591 bp, Zea mays
  Coding DNA Sequence Number=SeqID_4814
gtaactctcggcaagcgatcttggttgcccacacaaagccattggggctctcgataaggcaatccatcctattccgtcgcgactccagcggtgaggccctggaaggttattctggagcaggattatatgataggtcaccgatggatgaggaggacgaggttgtacttgattatgcaacagagcctcttatactggaccgtggattccgaacctcaatcctctcaagcatagcacgtgctggccgtgccatcggggagttatatggttctcctcacgacgtcgagggcgtactgaaggatggaaaactgtatgtcgtccagacaggtcccctggatgtagtgacgtatgcgtctattagacagctcaataagcactgttgtcctcttctatggttgggacatatgggcgttatggcatgcatagttgtctgcctagatgtgccacgcgtgtcctcgtatgtatatgtatgaatgctggcacaagcattggtcctgtaccgtagtttgtacatttcactgtctccagtaattaagtgtgctcttacgcctgggagtctatgaaaatgggcgtgtgggcttattgggtaatcaa

SEQ ID NO: 19218 - DNA, 400 bp, Zea mays
  Coding DNA Sequence Number=SeqID_4815
gattcgtgtttccagtcgactacatgtgatatttattagactatctgaatggtttacattagtttgatgctcgacaaaatgttcgaacaagtcatcgatttcgtgggtttaagtcggatttaatggatggtaagttggttcgttattacagtcgactaggtttaatatttattagattgcctgagtcgttaaagtgaggattccggtagtcatccatgttgctgatcccttgctttatagtagttattacgttctatgtggtttgcttgggtttagattttcgaaatatttaatagaagtacggtatttaacgtgtaatcaacgaaaaacccggcgtattcgttaatcaatgtagtaaatctgagctaaatttattattggcactcaagttgttagccga

SEQ ID NO: 19219 - DNA, 578 bp, Zea mays
  Coding DNA Sequence Number=SeqID_4816
gatgatgatcccgtacttgtggtaggcggggtgaaagcgagtcagagtgtgagcgctcagcgcttcagaaatatgccaagcttgctgcctactttggagactttgagaacgtctcgatatgtaagactagtccttgtttgtcgtacatttcggccgtcctcaaacgaggtgcttgatcgtagaagagaccaattaaccacggtttcgggcgtaagagcggtgtcttcctcaatatcggcgataccatggagataatccgtgtagaggctatctgtggtgataagcagactacgaggctcttgtaagatgcgccatgctggttcagggtccaaagcgccgtcttctttactccgatggagattcaggcataggctggatccgagactcacagtgcagacgactggccagtatgcagcgccgtcctacgtaggatgagcacaagactacagtgtcggggacgctacagacatgaacttaacttatgcggcatgattccgatgcctggaggatattcattgataaggacatggtttggccgttgatgtggactctgttggaaaacgtggtccccattgtca

SEQ ID NO: 19220 - DNA, 223 bp, Zea mays
  Coding DNA Sequence Number=SeqID_4817
agaccatttgtctgcctttgtaacagggaggggggggggtgtgatgggcaccggctccctgctggagatcgcggtcaagccgcgacgagcgtggggggaggctttttttacgggccgcaggactcgcccccgctcctgggaactctttgatgagccctggtagtacaaggagagcgtcctccctgctgctcgtcgcagcgacgatcagcatcctgaggctggg

SEQ ID NO: 19221 - DNA, 311 bp, Zea mays
  Coding DNA Sequence Number=SeqID_4818
atactagtaatgctacactggcagcatttccgtaatacttccttcaaaacttgaaaatcactccaactattattaaacaaaatcgataaatatagaagaccctgtttatggagaggagcaaatattaatggaaagaaaccatcaatggcagcatggaaactagtaacaagaccaaaaagcgaaggagacttgggtgtgctcaacatttcggtacataatgaggcattcttaatgaagaatctgcataaattctttaacaggcacaacatccctcgggttcagttactctggatcccatatcactccaaaaa

SEQ ID NO: 19222 - DNA, 360 bp, Zea mays
  Coding DNA Sequence Number=SeqID_4819
gaggtgcagaaaatggaaacaactttttgacctgcaaccggggttcattcttacccttccagttttggactttttagaacaaaccccggcgggaagggcttcttctcatttgggccttcccacccagaggcccggaaatgatgggtcggtttgtcagatcctttccaccccggggccgggaaatgtgagttgctttagttcccaagagaggggttctgtttagccagatggtttgaagccttggccattggccaggcttgttaaatagatttgggggtttttgttttaaatccccctgaaggggggggggggccccaaggatgccggtcaaggggtatttggatcgggctccgtttttat

SEQ ID NO: 19223 - DNA, 313 bp, Zea mays
  Coding DNA Sequence Number=SeqID_4820
aagatgaacccgctcgtctccgtgctccacctctacgacgtcgtcaacacgcccggggtcaccgccgacgtcagccacatggacacccagcgccgtggtgcgtggcttcattggccaacaacagcttgaggcagcactaacagggaatggatctttgtcatcatccctgccggcctcccaagaaaaccaggaatgacaagggatgatcggttcacaaaaatgctgggaacgttcgctccaactgtgaaagcgttgccaagagctggcctaatgttattgggaatttgatcagcaaccctgtggaactcaaccg

SEQ ID NO: 19224 - DNA, 477 bp, Zea mays
  Coding DNA Sequence Number=SeqID_4821
gaattttcactggtatttgctaggtattgaaaaatcactcctgtatgaattaggaatttttaccctcggtctcattcctattggacaatgttgataagatccgacatattaaaggatttatttgtacagggactttatgatgtttgtcgtcctatgatgtctgctggggatcttcacaaggctgtagcagaagcaggattcaaggtcaaagcagttgccgtcccctccgaactgaagtcaggcaccgatgtaaactgagagacttgctccgcaaatcagccggcgaaaggcaacctgcacctctatctgatcatggaactcagaggcccataataattacatagctgtgtaacggttagcactgtgccgttaaacaatgtcattgtcaccatcgactatgttgtttgtttgctcgctggagtgtatgaggaattgaagttagacctggtctgtatagccagttgtgccagggcaaca

SEQ ID NO: 19225 - DNA, 595 bp, Zea mays
  Coding DNA Sequence Number=SeqID_4822
gtattagcatcgatcaggcaggattacagaaacgaaacccccttggcgacccacacatcaccaaggaaggaacgaaggaaggaacaacagacgatcacataattaggggaaccgggaggagtaaatagataagtaagacaacgagtagttaatgattaatcgggtgaaccaaacacgatgttcccatcccaggattcccggactcccgcgcgggacatcgacacagccgcagagaaagatgcgcttaagtaacaatcctagaaaatgcacgcccccacccacatcgatggatttgtatgccccagcacacccgccgggaccaagagtgcaggggccccggtccttcgccgcgcactcggctgccattcacgccgtggaggggcgtcgctagggcgcttgtccaacagtctggtgtaggatgcggcgtaacaggctccgctgcaacggccagacagctttcaggtcgccctcatcaactaaagtgcaccgcgcgtgatggtggaatatcgaccgccggcggggtctgcacccagcgatatacgcgcacgcatacgtccgcagcctcgtccccaataatgtcgcttgcccaccgatt

SEQ ID NO: 19226 - DNA, 415 bp, Zea mays
  Coding DNA Sequence Number=SeqID_4823
ggttgtgcgctctcttgtcggcaccggagagaaagcaaggggtagtgggcgtcgtcgccggcggcaagccttcggatgtgcgtcgagctccacatcgtttatatcgaatccacccagggggagattgaagcccctttgtctgggaatttcgcggggaagcaagcggttggtgatttggtggtgaaggaggctatggggtcgtcgtcgaaggtggtgcggccggaggaggtgctggagtcgctgaagaacgacggcagcatcgacgcgctccgcatgaagatcatcgcccagctcaaggccaatgtgcgtgcacgcctcccttcctcccccattcccctcctattcctctgaagggggcaggggttgtatctgccgggcgagtgccgcctcgtggttagacttgatcttctacggg

SEQ ID NO: 19227 - DNA, 501 bp, Zea mays
  Coding DNA Sequence Number=SeqID_4824
ggccgttcagggtcgtccaaagcaagagtggtcgccgacgctgcccgcgaaagcggacctcggtcggaagctcccggggcgtcgagatccacagagaccctccccccccgccacgcgttgattcatcgccccgcgagccgcaacagtatccttgggaatgcccttcggtccggggctttttccattctttatgattcccggccgccgcattctctctcttttcccccttcagccagccgaacagcccgtggtcactggaccggaacctgggctcccccggaaaagggctccttaacaaaatgagctccggccttgccgcaggtactggcgccccgactccgggggcatatgccgcggaaactgtccaacctttctccgccagaggggcctccccacggacgagcccctcccaggcggggctcccagctaccctctggataccggacgtttcccgaaggaccgacctccctcttgactgtcgggcgctcactcaagcctaac

SEQ ID NO: 19228 - DNA, 225 bp, Zea mays
  Coding DNA Sequence Number=SeqID_4825
gcgaggcagcctgagagaaagaggtggaaatcccgcggccttcgtgtttgtcccgcgcccaggtcgggtgcgctggcagtggggggttacaagcgtccaggcgggatggagcgagcgtcctcgcgcgagcgcccgtcgcgtgcgttttccccgcgtggccaaccctctgtgagatggccctcgcccggacccgagagacaccctgacccgtcgtgagtgccgcag

SEQ ID NO: 19229 - DNA, 57 bp, Zea mays
  Coding DNA Sequence Number=SeqID_4826
attactatgcccatttgggtttgaaggaatgcagatgctacataccaaagggtgcat

SEQ ID NO: 19230 - DNA, 575 bp, Zea mays
  Coding DNA Sequence Number=SeqID_4827
gtgaagagcatagtccacgtgctaagggacacgcgacctggctcggaatggaaacccttgaatcctggttagctccggagagaggataccagctttctgggagagatcatattagtccctaggagaattctcactaggcccaagtggtcgtcagtgtctcgcgtgtcccctgcgaaacctcgtattctatccaaaccatgattagcgggtcagcgactcagatcgaccattcagtcgcaactatctagtcatgttagcccccaccccctcgccccccccgcccccgacgcggctttcgcctcgactctccctcccccccctgccccctctcctcccgccccccgttcccgcctcccccccccgcgccccctcgcccctctcctcccccgcccccccgcccccccgcgtcgctaccctccccctccctctttcgcccccactcctcgcccctcccacctctttatcgcctatatctaccaattactatatcaccctccttcatctccactgcctactattctctccctataccccacccccccctcctcctttttctttttatctccctcatttca

SEQ ID NO: 19231 - DNA, 390 bp, Zea mays
  Coding DNA Sequence Number=SeqID_4828
ttttccgttcctttgtccagtacagataaccgttcggggatccgtgccctgcccccaattgaaactggctggttggggcgttactcggttcggtccccatcgtttccagtactatattatgctttactccccctagactggggctgtttctactagtttcctccccccaagtacgggggaacggaacagctattttttttcggcggccttgggaggggaggtgtttccggtccccgtgccgttccagttgtatcgtgatcatggtcctgggagttgttgcatccggggggccctttttaggtcaggcgtcgtgttcaatgtttttggggtcaggctggcatttcatcccgggggtgcccctgattgcgagccggcaaccaaaaagccaaa

SEQ ID NO: 19232 - DNA, 383 bp, Zea mays
  Coding DNA Sequence Number=SeqID_4829
tgcattgaggttataagtgggaaatgaagttgactggcaataagagggtgggataggtgaaaatgttttgatgccatggtatgggtagctaggtacacatctagtctaaaggattttcttaaaactggaaaaagctaaaacttgtttttaggctcagctagtgcttttggcaaaccaaaggcctcatccaaacagctgcatgtctagaggtagagtagtagactcctcacaccgggtaagtctaactgagtattagtattctcagccttgcttgtggcataattttttgcaggtgctccttaggttgatttgttgatggtgtgacttggccttcgtccctgccaccgggatagacggtcgagtgggttatttctttctcagga

SEQ ID NO: 19233 - DNA, 404 bp, Zea mays
  Coding DNA Sequence Number=SeqID_4830
gagtcaccacctcgcccggccttgggctcggaccgaccacgagggctcgagcgctcctccaacggccacgacatcacatgaacagggcaccaaaacctctccggctgccacgacggcatgtacttagggcactagctcctctctgctagacacgttagcacactgctacatctcctattgtacacctgggccctctccttacgcctataaaaggaaggcccagggcactcgtacgggagggttgggcgcgcggggaggacgggacggcgcgtgcgggcctctcgctccgtcccacgtggacgcttgtaaccccctactgcaagcgcacccgacctgggcgcaggacaaacacgaaggccgtgggtttcccctttacgcctgtctccttttttcccttcgtgctc

SEQ ID NO: 19234 - DNA, 421 bp, Zea mays
  Coding DNA Sequence Number=SeqID_4831
tgtaactgtggaaggccactttcccccctttccacgctttcccacctttccattctttggcacccaacgccatcccacccccttttggggggatattattattttccccccccaagaactcgggttgttggggctcccccctccccctttgttgttccgggccccccccccttggggggaagccccccaattcttttctttggcccgggccccccgggaacccctttcattcctgctcctttccccccaatcccgggaacatgggtttttgggggaacccccccccccttaatatggggctttcttggaggggggggaacttttgggggggcttttggtccagtcagttttcccagtacctttccggggtttgttccccccatgaccttttttcgggcaatttgaagggccctatagtttt

SEQ ID NO: 19235 - DNA, 117 bp, Zea mays
  Coding DNA Sequence Number=SeqID_4832
acaacggcacctagttcactggcagaaagttcctggacttctacgaggaccaccacatccgggtggactgggccgccgtagctcaccccatgacgaatgcgcaggaactcccctcgg

SEQ ID NO: 19236 - DNA, 494 bp, Zea mays
  Coding DNA Sequence Number=SeqID_4833
ctgcagtaacctccctctgttttcaaaataattgaaattctaggattgtcaggtcaaactttaaaaagtttgaccaagtctgtgaaaaaaggggctaatatctaaaatacattccgtacgcaatttaatggcgcaaattgggtgttgctgatgttgatatgttattgtgtaagcttggtcaaaattaataaagtttgacctagaacaaaactagaacttccattattctgaaacggagggaacaattttattctgataccgttctattcagtcatttctagccttggagtgcatcatgacatgatcatacaaaaggcagcaattccaactcaaaagaagaagaagaagcaaagtctaatcttgtttgttcaaattttgaggaatattcgaactctgttcccaggaaaggaaatactgcactttattctcgactttatttgaggtaaaaaaaattatcttctcgaatttgataccgccaaagcaatctgataccg

SEQ ID NO: 19237 - DNA, 373 bp, Zea mays
  Coding DNA Sequence Number=SeqID_4834
cggcgtcggctctccaacaggcttccctgccttcctctctttcgagcccccctggttttcgtctgtaagcttgccggcagccatcttccccaagtgctggcgcatgggagctatgtcccctctgtccagaaaatgcagagctcgagcacacctctctactcccatccatggtgccccaaatctccagccggagctccgaaggccgcctccctggcgtacctcgccagcagcagggatcctttccctctcccatggcgcgcaggccgcgagctcccccacgcgcgttcccttccccaggcgctggtgagctcgtcgtcgcccatggcgcccccttctccacggcgtcggtagcagggagcactagctcatactt

SEQ ID NO: 19238 - DNA, 219 bp, Zea mays
  Coding DNA Sequence Number=SeqID_4835
agtacattaaaaccaagaccagcttgtctgactgtctcatcgatcgtcaatgcaagtctgtccatgcgcacgggtctgaacaccgtagccacgagcgcgagccccacggtagccgcagccgccggctcgccagcagggcaagccgtgttcaatcaaagctcaaccaggcacccgcgacatctgatccagctaagcagcgagccagcacgacagaagggc

SEQ ID NO: 19239 - DNA, 293 bp, Zea mays
  misc_feature (148)..(148): n is a, c, g, or t
  misc_feature (170)..(170): n is a, c, g, or t
  Coding DNA Sequence Number=SeqID_4836
gctataaacagttttctctctggcaggattgaagtggagctcttttttccctaaatcattttttattttagatgcaaccaaaaacattgtgtccacccctctaaaagtaattggctgattttcgtaaaaaaaaaaaaaaaaagaaggnggtaccctcccgtatttttccnccgctcgtccaattttttttcaacctgcacccccgaggggggccccgaccccacttcccccaaaaggggtcttataacgccgccctggcgccattatttacacaagtggcagggaacaccccg

SEQ ID NO: 19240 - DNA, 511 bp, Zea mays
  Coding DNA Sequence Number=SeqID_4837
ccagggagaaagttgcgggctctacgagggaggcgcaaccaaggaacaaggacttctggctgggtgattgagccccaaatttttctaggcaggttccccaatcgtcgccaaagcggatcaaggtcccgccctgtcgcgttatttcttcacggaccgcaagtgggtccagattcatgaaactaaggctggtccgggtcttagcggtgcaattcgatgcagagacacttgaagaagcattggcttctaaccccgcagagttgaaattcgataagcctgagaaatggacagctccatgccccaaatacgagcctggatggtgggaggccttcttacctccaatgtccagcaacggcacggcttagagatgaactccaggccgcgtggtgtaagatttcttccatgtaagtgatgattgtaagttttggtttatgctattgtgtatgtagtccgtgagtttatgagagtagagttagctacattagttgcagagattgctctacttttcgataat

SEQ ID NO: 19241 - DNA, 146 bp, Zea mays
  misc_feature (27)..(28): n is a, c, g, or t
  misc_feature (33)..(33): n is a, c, g, or t
  misc_feature (44)..(44): n is a, c, g, or t
  misc_feature (52)..(52): n is a, c, g, or t
  misc_feature (56)..(56): n is a, c, g, or t
  misc_feature (100)..(100): n is a, c, g, or t
  misc_feature (107)..(107): n is a, c, g, or t
  misc_feature (117)..(117): n is a, c, g, or t
  Coding DNA Sequence Number=SeqID_4838
tttctcagtatagctctcatgcagctnnctgcngtcgcctgccntcaggggntgtnttccgtcgatgctcatcggatatttatagccttccgcttcttcncccatanttttgtatcnatgatagcgttcagtatgtgagaacccag

SEQ ID NO: 19242 - DNA, 166 bp, Zea mays
  misc_feature (47)..(47): n is a, c, g, or t
  misc_feature (68)..(68): n is a, c, g, or t
  misc_feature (117)..(117): n is a, c, g, or t
  Coding DNA Sequence Number=SeqID_4839
ccgccgccggagagggccccagcacgctcctccgcttcctctacttngtgggagccggagtaatctgnaccaagggcatcaacacctatcgcggactacgagcagcaagaaggagtncaccgccgccctcgccgccgccgaaataaggggttggttgctggccgcg

SEQ ID NO: 19243 - DNA, 340 bp, Zea mays
  Coding DNA Sequence Number=SeqID_4840
aattcgggattgacgacagccactccaagccatcttgcacattaatcagtactctgaaccctacgtaattacatacccccattccaaattataagacgtttggcttatttagatacatagcctttatgcacttaggtatatatcactgttcatgtacatggccgtttagcccgtgtacaaaccgtgtaaacgctacacaatggcttaccgtgttcgtttaatcagccatttgcctcgtttaatccgtttaatcaccatttagtctgtatggctgtttgccctgaataaatagacaaacggtacatgatcatttaaacgtttaggctaacattggtctata

SEQ ID NO: 19244 - DNA, 462 bp, Zea mays
  misc_feature (402)..(402): n is a, c, g, or t
  Coding DNA Sequence Number=SeqID_4841
gatgaaattgaagctgaggccgatctttgcttcgatcttcttgctcagaagcttaatgagatcatctttacatattataagagctgtgcagcaagtactcttcttgatagttcatttacatatgcatgcgatgatggtgacaagtattttgtcaaacctttgcgattcgacgcgattttcaagttaaggagagtaatggttttagggaggacaattgatctaagaagcagtgtaacaacgcagagtatgaacaaaatattcagggaaaatattgactttctacttgagcgctttgaaaatggagatctttgtgcggtgaacaccgtttctgcattcgagacattgccacaaagagtcacctaaccaacttccaggcaatgtgcagaatgtactcttgtatgnggggttatatgttatgttgccccccccccgtatattatgtaacacccatcaaccgtggat

SEQ ID NO: 19245 - DNA, 585 bp, Zea mays
  Coding DNA Sequence Number=SeqID_4842
ttttccggtgaaagattgatgggcgatgccacagcctgaagacgaagaggatgtaaagaaaaaaactcgccaactaagggcttgttcggttattcctaaaaaaaaaaaaaaaaaaaaaaaaaaaaaaaaaaaaaaaaaaacaaataataaaaaaaaaaacacaattatcaaaacctctatacaatccatacaaatatacaaaacacataataaaggggtgcgccccctcccgaggcccaaacttttatcttctctgtgcatccccacttctcttcgcctcttatcccgcgcacctcgcccatgtttttgctctctcttttcacatcgttcgcatttcgttcacactcatgctctcttcccgtttactttcccttccttttccccccccgttctcctctccattcccacccccctcaccgttcccgcccctttccctcctccaaaacacttcgtccaattcgttccccaccttttcgcgcacttctctggggcgttttcgtccccgtcttagttctctcccttccccccattactttaccttctcttttcctcgtgtttctttgcgacacctattcttcctttttt

SEQ ID NO: 19246 - DNA, 502 bp, Zea mays
  Coding DNA Sequence Number=SeqID_4843
atctgtgtgcagatatctttatgttttagtgtttctgtttctgttcctgtttctaagctcaccgctgtttctttgtctttgtagatcccagtaacttatgctgggggtgtgtcaacaatggatgacctagagaggataaagaaggcaggcaaaagtcgagtagatgtaactgttgggagtgctctagatatatttggaggagatttaccctacaaagatgttgtcctttggcacaagaagcaaagtatggttggccaagtgtcaaggaacatgtggtagcgatcagtattgccagaatttattgtgtatcgctcgctaaaagcatatttattttcattacaaaacttcattttttgtgttggcctaataaaggatgactttcaaggtgttatcagcgatcgtggcgctgtagtgtaaatggtcttccattcttatcgtagtcctctattttaaattttactcaacaaatattgtcaaaaaaaatttgtgtcattgccgtgtt

SEQ ID NO: 19247 - DNA, 444 bp, Zea mays
  Coding DNA Sequence Number=SeqID_4844
gtccccgaggcgattcggtgaattcgaagctcgtacgacgggatcctgttgagttttgacaatgcggggctacgggtacgagaccaatggtaaccaccaggaagtggaagatgagtacggagatgagtactatgatcaagatgagtatgatgaggaaggttcgggtgctggggatgagtattttgaggaggaagagcctactgagggacaaaaggagatcctagaattgagagaacgattaaaagggcagattattcgaaagccaaagactgctgcttcctgcacagctggcggatcgtctgtctttactaataccttcaagcgagtgggctaatttggcttctttcttttgggcatggaggttagagtgcagagtgagtacgggagatataaggtaatagggtattgtgtatggcggagagctagggatactgggttcgggaa

SEQ ID NO: 19248 - DNA, 509 bp, Zea mays
  Coding DNA Sequence Number=SeqID_4845
gaccagctgtcaaaggcactaacatttcccagattgtccaagttctataattcattaggaagaaagaaaacctgcatcttccagctgtatttgctgctcgtattgcagcacaatcaaaccgtaatctgagacgtgtgatactgttttttcagacttgcaaagtgcaacagtaatctgagacgatgaggactggaacttgggtggtttgggtatattcactcccttaaccacccgcactacgagcacaagatacgccttggatcaaaagctatttttcatctggaagctttcgtggccaagttcatgagcatttgcaaggagttcctggtggctacatttggctgagcaaaacgtcgagctacacaattagggttgtcccccccgaagccaagagaggatgccaggggctatcgcattgtatcggtataggtttgtactaatctcggcaacgactagcatctgcttgcacgtagacgttcgtgacgacatgatcagacgtcattacgatt

SEQ ID NO: 19249 - DNA, 501 bp, Zea mays
  Coding DNA Sequence Number=SeqID_4846
cttatcaaactcatttctcattacccaaattgtaacaaccggcttctattctatataatttatgcccaacagaactttgtataaccatctttttaaaaaacgtgctgatccttgttcatgggcaataaggctcaaagttgccattggagctgctaggggcttgtcatttttacatgatgccgaaaaccaagtcatatatcgtgatttcaaggcatcaaacattcttctcgatcaggaattcaacgcaaaactttcagattttggcttggcaaaagctggtccaactggggataaaacccatgtatccacacaagtcatgggtactcatggatatgcagctccagagtacattgcaacaggttagatatttttccctcgcgtgcgtactgatgaaatattggggtagtgttgtgcattactctggtttgtgtcttcagcttttaaagggagatgtcaataatacttcctagtcctagtactgcaacaactaaggatacctga

SEQ ID NO: 19250 - DNA, 165 bp, Zea mays
  Coding DNA Sequence Number=SeqID_4847
atcagatgcttaccttgcacaaagaatgttgaggaggcacacttgtttcaagcattcttttagatctttcagttcagaatttattttatacgtgaataacataccactcatgttcctgatgacaatacaaaccttttttttctgttttttccagagggtccggag

SEQ ID NO: 19251 - DNA, 553 bp, Zea mays
  Coding DNA Sequence Number=SeqID_4848
taagttttggcatttaggtcctggaatctgaatgcacaaatgtaaaaaccttatagaaaagggcacaagcacacatgcatcttgctgatcttgatttggcggaggcagacatcaagaaagctctagataaactacagatccagacatgttaatcatatgtactactgaagttggcttaatgaaatcttttgagaataacttgcctatttaacttgtgtcctttttgatggtggcgttgtttgttagctacaaaatcatcaatcaaagattgtaattatatcaaaaaaaaaaaaaaaaaaaaaaaaaaaaaaaaaaaaaaaaaaaaaaaaaaaaaaaaaaaaaaaaaaaaaaaaaaaaaaaaaaaaaaaaaaaaaaaaaaaaacccttaaggaaaaataaagaaaaaaaaaaataaaacctggggccccgttggagcataaccccacatagggccaaatttttccaatattccaactccctttaaagttgccgtggcctacttttaaaggggcccaatctgccaaaaccgtggcgtaacaaaatttatgggccg

SEQ ID NO: 19252 - DNA, 248 bp, Zea mays
  Coding DNA Sequence Number=SeqID_4849
tcaactgggagatgggcaacctgcagcaggggtactgacgagtgacgacaccactgcgcatgcaagagctagcccgccagagagctaaggcagcgcagcgcgcggcgcctgaatctgatgaagcacagccggggactgggggcattcgattggtggattattaagcaacgagcgagcttaactagatagccgtcgtcagctagctacattggtattttccttttctttttattaactcgcgacgcagg

SEQ ID NO: 19253 - DNA, 458 bp, Zea mays
  Coding DNA Sequence Number=SeqID_4850
agaacggcggcaggcgtggtttccaggaacgacgagaccggaacctcaaggtcgccggggaaggaccgggaggactcgcccagggacctcccggctatcctcctgaacaaggacctcgaacccgagcgcatggtggcggaggcccatatgtgggccctcatggagcgcatggtgccagaggccaatatattgatcggccgggagcgcatggtggccgaggccaacatttggggcaagaattggccctgccaccggcgccctgaaaatgggcaaggcagcctggtctccccccctagtaggaaccgctagggggctggggcaacccctccccacatttcttcccaggttgtcgggtgtttcctttcaggcctatttttggtttcgcgggggcttcgggcagggccatgggcagggccagggaaggttggatggtccttttagggcagcgtcgtgctgga

SEQ ID NO: 19254 - DNA, 105 bp, Zea mays
  Coding DNA Sequence Number=SeqID_4851
cgcgacatctcgtgtactcgcgctctccgtgtccacgacctcgacccactgctgtaagattattcctagggctcgtgcatgcttgcacattacgctgtattttta

SEQ ID NO: 19255 - DNA, 417 bp, Zea mays
  Coding DNA Sequence Number=SeqID_4852
aaactacatgggtcttgcaggacaagattaagatagtcgccatcgatctcgctgacaggccagcgtggtacaaggagaaggtttatccagaaaacaaggtgccttctctggagcacgacaaccaggtgaaaggtgagagcttggatctggctcaagtacattgacagcaacttcgaaggcccatcgttgctccccgaggatcctgcaaagcagcagttcgctgaggagctgctcgcatacactgacgcattcaacaaagcattttactcatgttctagtcgccccggggaagatgtgtctgaggaagctgtcgctgctttggataaaatagaagacgccctcgggaaattcaacgagggtccattctcccttggtcagttcagtctggtatgtcactggacactaggaatcctcctc

SEQ ID NO: 19256 - DNA, 542 bp, Zea mays
  Coding DNA Sequence Number=SeqID_4853
ttacccttaaattacagctagctgggagcgtgatcgagggtgtgcttcggccttcgggaggcggcgttgcatgcatcctggcttttgcgagaggcggtgccagaagatgaggaggaggttgaggaatggaattcttccctctccctccacggtctctgcagtcccctagtgatgtctgaacgtgctgttgatttctctgtaattttgtttttttctttttttttctttgtcgtcccgtagttgcgagaggcgcgacgtgactgatgtcgcatgccaatgtatcaagctgtgtgtgtgtgtgtgtgtctttgtaccacgcaatcctttcatataaatgaattgcggctatgttcatcattgcggtgtgcaaaattatagcataaaactgttgctaaggattgaaaatgggggtgctttttatgatatctaaatttacttatgcgtgcattcaacgtgttagtttttttttggtgtcacctaaatatgaattacttggatttggttttacatattgttgtatgtggaatcttttgctttgtcta

SEQ ID NO: 19257 - DNA, 281 bp, Zea mays
  Coding DNA Sequence Number=SeqID_4854
acctgcgcggcgagggtaacgacaaataatacctgtgttttttgtcgcacagcaactggttctaaagatgtttttactgtttcaggtggctttgggagacaatggagggttcacctgggcctttctttgggggtgggggggccctgggggcaacctttctaaaagaccaccgtgtgaatatgtggacggactatgcctatgaaaaggggcggatgtcctgtaagcgctgtggaagttggaaaggcggggttaaccccatgtaggccgtatttaccccgtat

SEQ ID NO: 19258 - DNA, 329 bp, Zea mays
  Coding DNA Sequence Number=SeqID_4855
tgggcccgaagctgtacgagaccgtgaagggcaagctgtcgctgggggcgaggatcctgcgggcgggcggcgtggggaaggtgttccggcgctggttctcctcccccgtcggcgggggcggcgagcggctgctcagggcgtcgcagtgctacctgtcgaccacggccggcccgatcgccggcatgctgttcgtgtccaccgagaagggtgcgttccggaacgaccgctcgcttgggcttgccctgaccttttccgcccgcggggggaggggcagcggcacgaagacggtgctgcgggtgccgtacaaagggttcatccccctgcgcagg

SEQ ID NO: 19259 - DNA, 336 bp, Zea mays
  Coding DNA Sequence Number=SeqID_4856
ggagcccttttcttgagggtcattcgggagtacataaatagacctgaggttgtccaaagaaaacatgtatttctcgcttacataaagctagtctacttaatacgttacacccgaatctatacgaggaccgaaaagaaatttccaaagatacaagcttttgaaaagagtccacgacccaagaagatgatgtggttgcagtgatcacccagcgagcacgggatcctgggtggttcagggctaccccctacaagggttgatcatttaagctaattcttgttcgtcgggaaaggcctggttgcaaaattccctcatgttagagcctcatgaaacgtgctt

SEQ ID NO: 19260 - DNA, 576 bp, Zea mays
  Coding DNA Sequence Number=SeqID_4857
tgtggacttgagatgctcttgcaagtacacgctttgtggctggaatagtggacttctttaagatattttttaagaagcagaagcagctctcacggcgctggggtgcccatggaggacaagaactggccgcctttcttcccaatcatccaccatgatattgccaacgagataccagcaaacgctcagaagttgcagtatcttgcgtttgcgagctggcttggtattgtgctttgcctcttttggaattttattgctgtcatagtctgttggatcagagggggagattctaaactatttttcctggctaccatctatggtatgcttggcatccctttgtcctacttgatgtggtatagacctctgtaccgagcaatgaggtatatgcctattggttgatgcttcgtgccataaatattgattaatatacactatgtcataatgctaacattatgtatttcatttcctctcaactgaaaatgtgtaacatttttagtaggtgatagaacagtatcgatactttggcgtctggtcctactgaagtaaagtaggatgcatgttttgcaagatgtgtttagc

SEQ ID NO: 19261 - DNA, 458 bp, Zea mays
  Coding DNA Sequence Number=SeqID_4858
cggctcgaggagtgggtcatcattttttctctccatggtggtggtgctctttgggggggtttctttatattacggggggtaacatatgcaccaactaccctactgtggttatacaatcttgtcgtcattagcccgatcatgtgtcctaccgtcgatgccatctgtttccgatgataggtctggtattctttttcatgatcttgacattccattctgcgcggtgatatggatggatgatgggactagatatgcacttgaattctcaactgctcgagacagatactatgtgtatctctgttctcgtggtggcattcatgctacaggaaggcacatcaaactattttaaaggtcttatgctcatcttatgctacctcatagttgctgcaagcttttttgtccatgtcgaccctgatgcaagtaagtatcttgtttattggtttcttagatgcacgagagca

SEQ ID NO: 19262 - DNA, 68 bp, Zea mays
  Coding DNA Sequence Number=SeqID_4859
ctaggagggccagtctctacccattgcacttagcattgtacctgatcaagttattcactcttttggtt

SEQ ID NO: 19263 - DNA, 166 bp, Zea mays
  Coding DNA Sequence Number=SeqID_4860
cagatcgacgtggtcatcgacacggggaaccccttcctgaaccgcaccgtcgacggcttcctcaagatcggcgccgtcggcgcctgcaaggtggcggccgaggagaccttcgactgcctccacaggggtgcgcgggcgaggcctgaatatctcgcatccactctgg

SEQ ID NO: 19264 - DNA, 437 bp, Zea mays
  Coding DNA Sequence Number=SeqID_4861
gaatttttcattctaaattaactggaaatgttacttgtgaaatatatggtttttgtaaggcggaaaaaaaaaaaaagaggtagccaacggaagttgtttttgagaccaaaacacggggtcctgacgagcgtagttcttatttcggtaaagttgtggttcaaagaggacttccgcagagagcatctgtaactattgtttctaattgagatggttctcaatcagagggaaaaaataaaaaaaaaaaaaaaaaaaaaaaaaaaaaaaaaaaaaaaaaaaaaaaaaaaaaaaaacgggcggcctctaaaaaagatccatttttaataacgcggcctaccaaatttatatctcctatattaatacaacctaaatacattaaacaacccttttttaaacaacctcataattggaaaaaccctgtccttttccaacataattat

SEQ ID NO: 19265 - DNA, 111 bp, Zea mays
  Coding DNA Sequence Number=SeqID_4862
acgcgttcgtgcgaatgtcttcctgggagagtgcgcgtgctacatgctgacgccttgaacttggttcaaggtggactcactgctggcagcaccggtttttgaaactagctg

SEQ ID NO: 19266 - DNA, 599 bp, Zea mays
  Coding DNA Sequence Number=SeqID_4863
tgttctgcaccggtctgcagggcagggagccggaggaggaggaggggagctggcgagccgggcgaaggcggcggcgcgcgcgtggccgtgctgtgacagctgcggcgggtgcaccagatcggagccgccgcggtgccagtgcctggacgcggcgccccgcgggtgccacccggcctgcagggactgcgtcaagtccagcctcagcgccgacccgccggtgtaccagtgcatggaccgcgtccccaacttctgccagcgccgctgcaccgccgccgccgccgccgcggcgcactgaccgaccgcgcggggcagccgagccagccgacgactggtttctgcttgcagcttggtattattgacccagcaacctttttgcccacccacccacccgctcgcccgcccgccggcgaatcatggcgtctggagcctttgaagccagccgtggattaggatttttgtttgtttgtgtttgtgtagactgtaactgtaaagacacccccccactctgtaatctggtgagcgagcaaccaatccgagcttacgttgtccgtctgtggtgtggtgtccttcttcttcttcttgtgttctgttttctttcg

SEQ ID NO: 19267 - DNA, 429 bp, Zea mays
  Coding DNA Sequence Number=SeqID_4864
ccccattgcttcaaatcaaaaaccattcaaaccgtcttcaccggactggtggaaaggctatcaaacttacgaggcatggccaggatttgggtacatttcacttgtgatgggcttacccatgaatattgagttgctttgtagtgttgaaagacagctaattcgatggctggccccccctacccacgaatcaccagttcattcatatggcatgtgaggtaccttgatgtttctttgactgttaaaagcattgtctggtacagttcataaattggatccctatgtatggtaaataaaaaaactgaatgcactttgattccctgttacactgggttgatgctgaaatcctccccaaagctaaagtgtacgttccaccaactgcaacagcgtccaatgaacgtggtggcaaatttcaacacactggtggtgcta

SEQ ID NO: 19268 - DNA, 389 bp, Zea mays
  Coding DNA Sequence Number=SeqID_4865
aggagaccatttgaagccctcgtgttaaatgaagttgacaagctctcaacgacaagcccagcattccctccgtcaggactatggagaagtatagctcatcatgcagactgatcctttgctggagcggctcctcaaaagtgacagaggctgtcagatcccgtaatcccccaatgtgcgagttaacgcacccagtgaagatcagatggcccacgttatagaattcattggcaagaaagaaaacctgattctttcaactggatttgctgctcggaacgctgcacaatcaaaccgtaatctgacacatgcgatactgatccctgagacttgcaaagatcaacaatacccatttacctcaaactccgccggcgcctactcttgattgcgagcac

SEQ ID NO: 19269 - DNA, 437 bp, Zea mays
  Coding DNA Sequence Number=SeqID_4866
gctagggtgcctatactgaaggttattgatcgtggcacaggggtcgaatgtgatatttcggttgaaaacaaagatggcatgacaaggtcaatgatcattaaatttgtttcctcacttgatgaaaggtttcagatactaagttacttggttaagttctgggctaaggtacatgatctgaataccccaagacacctaactatgagctccatgtcaattatttcactagttgctttccatttgcagtgcagacccggcatcctccaatattgcctgcgttctctgacttgttaaaagatgggttagattgcgaaagcattgagaggaatgctttacggtttagggattttgggagtagaaataaagaatctgtcgctgaactgtttgtatcattgataagtaaactattgtcagcagagcgtctcatgggagcatgggct

SEQ ID NO: 19270 - DNA, 242 bp, Zea mays
  misc_feature (209)..(209): n is a, c, g, or t
  Coding DNA Sequence Number=SeqID_4867
gagggcgtggtgaggccgtaccggaccgtgccgatcggcccggacgggctatatatctggggctgctgcttctattattttcttctccaaagtaaagcgcatcgtcgttcaattatagtcgtcgcgtacgtacgtacgtacgtgtgtcggtgtgggcgcctttagtgttgcggatttgcactatatacggagagcgagaaggacagatncagcaatgtattggcgtgtgtgttgatctatgc

SEQ ID NO: 19271 - DNA, 561 bp, Zea mays
  Coding DNA Sequence Number=SeqID_4868
gatgacagcccattattgttcttgttcttattaccagccagtctaaggaaaactgacccaatctggatctatgcaagttgaagatcactgacattcagagcttcagacaacctgaattacccatcaatggcccgagcctatgcagctggccgcgctgggggcaccatgacaggagtcctgagcgctgctaatgagaacgccgtggagttgttcattgacgagaagtatgagctacctggacatacttttttttgcatatcgacttttacctgctttgttctagataaatcgttgcatatttttcatgtcatcctttgatttggtttgccaaacattctgcaaattctaaggccagatacgctatgctaatttgctgcaatgaaaagaaaactttggaccaaccaaagccccatggacaatctactgtgctttgctttagaaaagcgagctggaacgagaatgtatgtccttaaagataatatattctcaagcaccttttgggcctacgttacggattagagcagctatataatcttgatttagactacctttttcctgatt

SEQ ID NO: 19272 - DNA, 138 bp, Zea mays
  Coding DNA Sequence Number=SeqID_4869
gccgccggcatgtcaacgaactggtcgtccgatgacgctcgccgccgacgatgaagaagaacaggaaggatatcggaagagcaggttcacacaaagagacgcagtcacgcaacaaacaacttcatgacaggatgatct

SEQ ID NO: 19273 - DNA, 574 bp, Zea mays
  misc_feature (49)..(49): n is a, c, g, or t
  Coding DNA Sequence Number=SeqID_4870
aattcttctatctgtttaaacaccttccacaagactttaacagctcctnactatgcgcccggtgttatataaggggcgcgaaataatatctaaaacattttgtcttcaataaaacaaaaactagtacagttctctattagcgtgtcatttctcgcatgaccgacatatttccaggactcgggcttgagtatgacatgtcggggctgacacgggatacgatggatagtcataggctcatagcacttgctggacaccaaggctatgacaagcaaaatgctcttgttggagaattattccttaattacttctgtgaaggaaagtatattggtgacaagcatgattttgctggacgctgcaagaacaggtgggcatagaaggggccgaggaactgcttcaagaccctaccaaaggagtcgatgaggtatgtttgccagttacaaattctgctcctggagccatgtttctgtcatgacagggctcacagatcctttttgctaccaaaaggttcaggaagagctcaagaagaactcatcggacatctccggggtcccacattttgtggtatgaggattta

SEQ ID NO: 19274 - DNA, 224 bp, Zea mays
  Coding DNA Sequence Number=SeqID_4871
cccagcgtccgcagttaacggagaagtagaccgactcataatttgaaagccatttcaaaaacaaggagctgctgaacctcctggatgagccgagtcatattttttttgtgcacctaactagcttttgaaccttgcagactcgtatcttcagagaggaatcacccagtcaattggactcatctttcccccccctgggtatacaatatttccgttgtagcgagcgg

SEQ ID NO: 19275 - DNA, 111 bp, Zea mays
  Coding DNA Sequence Number=SeqID_4872
attcggctcgtggtgattctctgggatggtaatcactcataagcattgttaacttatggttccggtaaggtatatgttgtccatcagaagataacaatccttatgagtgat

SEQ ID NO: 19276 - DNA, 438 bp, Zea mays
  Coding DNA Sequence Number=SeqID_4873
gcacgcggcgttgctgtgattacagggcaccattaatctgctatacgggcatagtgatccctgtaccactgctgacgatgaggaacccaagcggcaagctacgacatactgtgagaaggagaggccatgaatcttctaatggagcaggcaggaggccagtccttcacaggcaaagaacgggctcttgatctggtcccaaccaagatccacgacaggtccccgatattcctcggaagctacgacgacgtggaggagatcaaagcgttgtacgccgagcaggcgaagtcgagctccccttcatccttagtgaggggggaaatcgacttttcctgccttaatttgctgctggtaaccggagccagactttccgtttccgtttcccttggtgtccccgtaagtgttaatgacattcagtgcactatgtatagcccctaaggg

SEQ ID NO: 19277 - DNA, 577 bp, Zea mays
  misc_feature (542)..(542): n is a, c, g, or t
  misc_feature (549)..(549): n is a, c, g, or t
  Coding DNA Sequence Number=SeqID_4874
ttttttgtgtgtccctttattgccggggcggtcacgttcgtacgtacagaaacaatagcgagtgatagatttggatggatccccgcacgcgcccgcagacgtcacctaatataatgaacaatgcgggggcggccggaatcaatgaatcatcagtaacggagtagaagtcatatcatgtcagggaagaaacgatacagcgggacacacacgcacgcatggggatagatcactgcgtgccgacgagctgcacgcctcggacggcgagcgcggcgagcgggccgatggcgagggagttgatgtaggtgcagggctcggtgtaggaggatgttgccgcgacttgtccacgatagcctgtccttctatgtcgggcctcgccgacagatggcgtccgagtgagcatcgttatggggttgggctttgtcgggcgctcatcctagtccccgaatgctgaggcccgctagttgacggtccgtgaccgggggtcagcaacgggggatggatgaactgcggatggtacgaccccgcgtccccgggattggtgnccgaagncccaaaaaagtaggaagctgtgccgcgg

SEQ ID NO: 19278 - DNA, 462 bp, Zea mays
  Coding DNA Sequence Number=SeqID_4875
gagggttccattctagttttcgtgcaacccagagtggactttcactcaatatcgatgtgtccaccacaatgatagtgaaacctggtcctgtcattgactttctgattgccaatcagaaagttaatgatccaagcatgattgattgggcaaaggccaagcgctcactgaagaacttaaggataaaaacaagtccggcgaaccaagaacagaagattgttggtctcagcgacaggccttgccgtgagcaattattcacactgaaacataaaaatggtgaatctgaagagatcactgtttttgattactttgtaaagaaccgtggcataaagctggaatattctggtgatcttccttgtatcaatgtgggaaaaccaaagcgtccaacttattttccagttgagttatgcagtcttcttcctttgcaacggtacactaaagcattgagcacacttcaaagatcat

SEQ ID NO: 19279 - DNA, 453 bp, Zea mays
  Coding DNA Sequence Number=SeqID_4876
aaaccccagttgtataggaatagcattccaagacgaacccaacggcccgaacatggataccggaccacttaaattaacaccggaaacaagttacagcaatagaccccggggcccggcttctaacaaacctaaacttcggtgaacaagcccaacaggacaggggatgcgttacaagaaacccaaaaaaacattggggggggcccctttccaagaaatcggggatacaaagtttttggggaacttggacaaaaacatgcctaaaatattccccacctttctaaaatggacccccttgggattcccttaaggcctcgaatccaaaggaagggaaaatttttttcgaggaccccttggaaaggccaaaagttttaaaaaactggcccgcaaaagccttaaggggggcaaggaaaacccttttgcccggaaaggaaaagagtacctttcaagccccag

SEQ ID NO: 19280 - DNA, 52 bp, Zea mays
  Coding DNA Sequence Number=SeqID_4877
ttccccccttgcctttagtgcttggcccattttctgttttccttgtggggat

SEQ ID NO: 19281 - DNA, 479 bp, Zea mays
  Coding DNA Sequence Number=SeqID_4878
taaaattcaatatattggcaccctaaattaaaaccactgaacttttttttgcggggcccctccttaaaaaaccctgtttttacccatccccgttgggaaggaggaatttcttttttgggcccccgtaattatattgggggggcgcttttttaaaacccctttggggaaaaaaacacagggcccccccaaaaaataaatactctccaaaaaaaccccccttttttacggcggggggtggaaagagaaaaaggggcagcgccactagccccccttaaacagaggcggtaccccctgggtggtatagggtaccccccccttttttccccataaaaaacgccacggggggggggggggttccccaaaggggaggcttttttttattggccccccttaaaccgcataaccggggcttgttttcaagatttcctttttagggctttggggttttttccccgcaaatttatttttagaggccgctt

SEQ ID NO: 19282 - DNA, 416 bp, Zea mays
  Coding DNA Sequence Number=SeqID_4879
gagcacgaaaccgtaccttcttcggtgccgaagactttctacaaccagcttcccgactggagcatgctccttgcggccatcaccaccatcttcttggccgcagagaagcagtggacgatgcttgactggaagcctaggaggcctgacatgctcactgacacgtttgggtttggccggatcatacatgatgggctcatgttcaggcagaacttctccattaggtcctatgagattggggcagataggacggcatctatagagacgctgatgaaccatttgcaggaaacggcactcaatcatgtgaagaccgctgggctgctaggtgatggatttggctccacacagagatgagtaaacgaaacttgttctgggtggttagccaaatgcaggccatcatcgagcgtattcatgctggg

SEQ ID NO: 19283 - DNA, 492 bp, Zea mays
  Coding DNA Sequence Number=SeqID_4880
tatgctatcgtttaccttgctcaaatgaaaccattgatcaaccccatgctgagcggtgagtgatctctcctctgcattaaaaagaatgaaagctaggcctgatgtaccattattcagtctgtgaacttcctattcatttgcgcccacctgatgaaataaataaactgccatgtgaaattttttttcaagtaattaatactcatataccatattacattttctgtcatactatagtctataatacaagtaaccaatcccattaaaggttgctgactgctttctagagaaaaaaatccatttttccctagcagtattaagcatgggatgtgctctaggattggcttatccacatactaagttggaccacaattaatcaaaactacatcattgtgctcgataggaaattttgtgctttcctttttacatatagatcatgtctataggtctcagaaaacttcatcaaatgtactcttgtttcacctacatggaaac

SEQ ID NO: 19284 - DNA, 397 bp, Zea mays
  Coding DNA Sequence Number=SeqID_4881
ggcctttctaatggcatcaagttcatacaacagaacttggtagaattgtccctcactgacgccatccctgtagaatatgatcctctttggtttctgtccagttgccctcccattcccatgtactgtgggatgagaacaactttacggctgatgggttgcaaactctcaccaacaacttgtgttacacgtatgctaggtgcactcgctcagtatcgattgttcctcctgcatattatgctcacctggcagctttccgagttcgtttttacatggagccggatacctctgccagtggtgtttatggcgagtggtgttacgacaaaccgtgccccaggaggggcacgcaaccccagggctggtgttggaaatgtttccgtgaggcctttaccggccttca

SEQ ID NO: 19285 - DNA, 132 bp, Zea mays
  Coding DNA Sequence Number=SeqID_4882
ccgcccttaagacaggtactgatgtctctctctctctctcttactctcccctcgattttagatttgcctgaaggacgaatcgtagtgagctcacgttggtgtgtttttctccgccagatccggtgctcaagg

SEQ ID NO: 19286 - DNA, 463 bp, Zea mays
  Coding DNA Sequence Number=SeqID_4883
ctccggtgtatagagagggcctcgcgctccgctcctccctgcacctcatccccttcccctgctccccctcacacgacgtgcggcggtgcgaggaccggccctggcaccagcgcccccggtgcctggagcagtgcagggaggaggagcgggagaagcggcaagagcggagcaggcacgaggccgacgatcgtagcggcgagggctcgtcggaggatgagcgcgagcgcgagcaggagaaggaggagaagcagaaggaccggcggctgtacgtgttcgaccggcgcagcttccgtcgcgtggtccggagcgagcaggggtccctgagggtgctccggccgttcgacaaggtgtccaggctcttccgcggcatccgggactaccgcgtggcggtcctggaggcgaacccgcgctcgttcgtggtgcccatccacaccgatgcgcatttggagataaaatcccagct

SEQ ID NO: 19287 - DNA, 483 bp, Zea mays
  Coding DNA Sequence Number=SeqID_4884
gtccgggaaccataatcgcgttctaaagactgggagggaagctcctccgccatgcccctgtcctctactcaaatccggcggcggcggacagggcaaccgccactgctgctgggatccgtgcgtcagcggtaactaccggcgagcagcgaacctggagataactccctgcagcaaggagatggacggactcgcccaaactgctcgtaggtcggatgctagcggccacggatccgccatgcggcggggtcaaccatgtcgtcgactccatagccgaagagcccgttgctgaggatcttggtgagcagcaggttgaagtagctgagcaggagctcattgaaggagaagagcaggtggttcaggaggagccacaaggcgaggagtatgatctgatctaggtggcgtttctcagttgacattggcgccgacgatccttagttcgttttatattcattattttagtttgtagtaagtcttctgctatgt

SEQ ID NO: 19288 - DNA, 516 bp, Zea mays
  Coding DNA Sequence Number=SeqID_4885
accatggaatggagcgttcgcccttggtttgtccaaggggacctatctgtcctagcttcaattgaggcagtaatgtaattctgctgcaagttcacctctcagtccagtacttcagtcaatagaccatattaagatggtgaaatatgaaaactggtagcttgcatctgttcaatgttatgttttaatcaacgctgaatttaatatttgtcaagtttgaactttgacacctactttttctggtttccttgccactgcgaggccatggaagcgaccaaatttatatatgtttgatgcgggttgtccatggttgccaaaaaaaaaaaaaaaaaaaagcaacacgttcgcggccaggatccacaggatgctcaagctcggcctcaacatcgacgaggacgctgctgccgacgaggacgccgacatgcccgcgcttgacgagggcgccgccgaggagagcaagatggaggaggtcgactgaggtgtccttctttcctatatatgcaagttctcagcgatgag

SEQ ID NO: 19289 - DNA, 534 bp, Zea mays
  Coding DNA Sequence Number=SeqID_4886
atttattcctatcctgcacggcgtggggtctctctgtagcctgtgcggatcacatgcgatccattcgtgttcaaataaaacccggtcgaaatttgaattggaactgccagcctcgctcactcactgtcactggcatggcaggtgtgggtgtttacgctcagcctactcggcctcatccccctcgccgagcgtgtcagcttcctcaccgagtaagcccctctctctctctctctctctcttcagctttttttaattaatttgccttatcttcttcaatcatgagtgtttttatgttctctttgtcgttcgttcctgcaggcagatcgcgatatacaccggccccaccggtaagtcacggacgtcgtcagttcaagctgtgttttttttccaagcctaacgctagcttctgctgctgttctgctgctgcatggcgcgtgtgcagtgggcggcggcggcacgtgaggtcatctgcagtctgcttcttggctacgtgcagtatgactgcgtgagagcatcgagcatagattccatgat

SEQ ID NO: 19290 - DNA, 334 bp, Zea mays
  Coding DNA Sequence Number=SeqID_4887
tgaagcggttctaccgttgtgcgaccgggcgagttcactgcgcggacgtgggccccgaggcgacgctgctgataaaaccccgggggggcgcaattacagctcgggcacgttcccgctagatgtggcccgcaagcaaatgcaagtgggccctgtcggctggaggttcgtataccagaacgtccttcacggtatatagtgcatccccatgaaggagggcaccaaccgcctgtaccgaggtctcggccctagctacatcaagctcatgcccgccgccgtcatcatcttcatgtgctacgaggcttgcaagaagatccttttttacaatgaggttgat

SEQ ID NO: 19291 - DNA, 525 bp, Zea mays
  Coding DNA Sequence Number=SeqID_4888
gcagtgccgagcgtacaccgagaaggtcgcgctctcgccggtcaagtctggaggacgagctgctcagaatgcgtcgtcagcattgagagaagtcatgggctcctacacaaatgcaatccgccgtcgtctacgtctcgaccaacgcgtgaggttacgagccacctgaagaacaagttggtagctggaatctcaagtcccaggtcaagaacaggtaccgcaggatgaggcgcttggaggatgctgcgatgtgttcgtgagaggtctaggtcgtcgtctcccagtcaactttgggttgctggaccgttgtctccatataatgtaataatttatttactttgtacagaactccgattatatagtaaagatgtgacattcgatccaaaaaaaaaaaaaaaaatttgcggactaggaacaatgccctgccgtgcgccgcatcggccacttcgatgtgtgcgaacccctgtcttcggccggcgtcgcgctgcctaggcgcatgccccagccattaccacgaagacgcctgcc

SEQ ID NO: 19292 - DNA, 562 bp, Zea mays
  Coding DNA Sequence Number=SeqID_4889
ttcccctcttgatttcgtcttctctcctccctgcctctaccttattataggtgaagagatgcttgtcaaggagcaaatcaagtgtgagggtccacccggttcacgcttctaaggtaggagggtggctggtcgtccctgtagcgggttgccctctcatatgcgtcggatgatgttttccttctagatcggcccccagcgccggcaaccggcgatatgggcggggtagttccaatgtgtagaggccggtggcgtgcttgctccgctcctcgtcgtgggcgttcatgtcgcggttgcagcttgatcatcgtcgtgctcgtcgccttcgccggcgtatcctaggtcgttggcgccgcggagggcgagcgcgctgcctctcctcgtcggagaggcgctcgctgatgcgggcgttctggtcgcccgcgtgcttcttcagcacgcgcctcagcaggctgtccgccgccggccgccgccgacgcgtggtgcgagggcctggagcagcgccccggcaaggagcgctagggtcacgccgcggggtcccatggtcgcgcatcagtagccgagg

SEQ ID NO: 19293 - DNA, 377 bp, Zea mays
  Coding DNA Sequence Number=SeqID_4890
cttacttttgaaggcttttaagcagtgatcgcaagaaatctaggaagcatgctcatgtagctcattcagatagtgaaaaccggcacaaaagacataaaaaggaccgagatagtagtagaagaaatggagcacatgagctggaagatggtgaacttggagaggatggggagatctattagtctttctgtttgctaccgagattgtcagtaattacttccccttgtcatgttctccattgctcttatttttcttacttttgactttttattagtgctttggcgtaacaatcactagtgttatagttatttagttccatacattctgaaatatttccttaaatatctacatttcttcaataccaattgtcgtttctttaa

SEQ ID NO: 19294 - DNA, 596 bp, Zea mays
  Coding DNA Sequence Number=SeqID_4891
agggcaagaccgttgtcctcggctggaccggcggcatgagcgtccaggcccagtagcacctccccgataggcgcagccgcggaggccaaactcgcagggaccatctgtggcagcaggggtacagcgagatggggaagatgggcggtctgagcaccacggacgagtccggcgtggagcgcgccggcagggagggcgccaacatcgacgagtccaagttcaccaagtagtcctatcgacatgtgcgtgcgcgtacgcagcgttcgtagctgtctgcgtagtgtaccttggccgctagctagtgctactctctactttggagtagctgactgattataatgtagctagcagcatgcatgtaggcgatcatacgtacgtacgtacatgcacgtacgtgtgtgcgttatcatgtatgcttccagaagggtatcctagcttaatcagtcacgtcgtcaagtcgtcaatatggcaggttcgcgtcagggctttgtagtttgatagcctgtttcacgactcctcaataatcaagtagtgtaatgaaagtttggcggttcacaaaaaaaaaaaaagaacctacggtaaaagaaccacgccgtgct

SEQ ID NO: 19295 - DNA, 370 bp, Zea mays
  Coding DNA Sequence Number=SeqID_4892
ttttcggccgttgccgagagctcgttccgacccaccgccgatggcgacggcaatgggcgcgatggccgccacctgcatggcctagatcccggccgccgttacgttccccggtgatctcggagtaggacgaccccgagcggttgtaccagggtggacaaacggtgggagaatgatgggtgctaccccgatcgcccggaggccgttcctgttacctggaatcattctgggagactcggggtggcgacaaccgctcctacctacacagaaatgccacaatgctcacaacaacatcctgtgtccaccgtcagccgatggatatcaatgcccaactatgcaatcctacatggcacatgaggccatacaagcaagc

SEQ ID NO: 19296 - DNA, 599 bp, Zea mays
  misc_feature (219)..(219): n is a, c, g, or t
  Coding DNA Sequence Number=SeqID_4893
aatgcctaatcatgtgtatatgtgtgtgcttatgcgtgtgatttttttgtggaggagaaacacctgaggcagttgggtggagaagaataaagaaagctctcgcgcatcacacacctagcgctcgacggaatgattgagttttaatcgtcgtcgtttcctttatttggtttagtatggtgcgctagttgatcacgtgatgcggaagtcaagctgagtcgnccgcgagatgctgttaagcgtgtgtttcttcgcaagggatgctgatgaatgaacttgaagatttgcatgatcggatcaagcgctaggatgtgagatgctcgccaagtggatgtcaattaacaacactaacatagtgtttatcgcaggattataagtttgttctgttgtggatgctgctaagtgccagtggtctcgaccttcttatataagtatatcccatctttagcttctttattgaggattgtcacttaagctagcatgtattttaaaacctgtaaatattttatacattttacattgtaattcttttgaatcactttcttttgtaatcactccgataattgtctaatgtaaacttattgtatctatgatatcatttt

SEQ ID NO: 19297 - DNA, 562 bp, Zea mays
  Coding DNA Sequence Number=SeqID_4894
tacttcgagaaagtgaagcgggttaagatcctatccatcatccctggtgctgcgctgccattgcggttgcgtgcgtgctcgccgcaatcgaacctttgctgtataggggttcccgattttcgtcgaatgtaatgtatgatgctactttttgcgcttcaatataaaaatctatggcccgccccgggccccaaaaaaaaaaaaaaaaaaaaaaaaaaaaaaaaaaaaaaaaaaaaaaaaaaaaaaaaaaaaaaaaaaaaaaaaaaaaaaaaaaaaaaaaaaaaaaaaaaaaaaaaaaaaaaaaaaaaaaaaaaaaaaaaaaaaaaaaaaaaaaaaaaaaaaaaaaaaaggccccaatgcaaatttaacctttataaaaaaaggaaaacccccggggggggcccagtccccaacaccttttataataagggggacccccgggggggggccggtaaccaatttgccctaaagggacggggaaaaacggggggtaaccggccacatttttccaccgatggggggggaaaaccccggggggccccgaatttaaaaggccagcaccaat

SEQ ID NO: 19298 - DNA, 311 bp, Zea mays
  Coding DNA Sequence Number=SeqID_4895
tatggagtttgcatatcgacaaaaaaaaaaaaaaaaaaaaaaaaaaaaaaagggtcatcctcctccgcgcgaaaggcggcgcgccgcggtgccatgcgacacgggggacgccctcaacgccatggcgatccctcgacagtcaccgcctcggcaaagatctcgacgcggaggacgggatcttaggcgcttgtggttgtccccttccttgtgtctgcagcctgcagcctgtactaggtttacctttttttttcagtgtggaagggaaatatgattctttgtaagtccgagttgctgatgaactgatcttgtga

SEQ ID NO: 19299 - DNA, 309 bp, Zea mays
  Coding DNA Sequence Number=SeqID_4896
ttcatgccccttcgacttttggtttgtcatcgctgagtttcccctagatctagggaagaaagggcggatctcatgtgtgtgggcgtcctactcgagggtggaagaatcctgggcacatgtagggcggatcgcacctatttctcgcacaggcccctctaaccgagcagcaagccaagcaagaacacctgccactcccccctctcggcatgcaattgctggctcgatgacacgctagtggcctctctcaaatcctaaccttacttgcctccttggttctttcttgtgcttcatgtagctcttgcaacatcc

SEQ ID NO: 19300 - DNA, 582 bp, Zea mays
  Coding DNA Sequence Number=SeqID_4897
gcacccgcgaacttggcgggccgctcggcgctgcacaccaagccggggatggccgccgcgcttgcgagctcgccgcttgttcacctaactacctcccgcctccgcctccccaggccccaggcctccgcttccagttcgggtccagtctgctcgatcggcgtgtgcttgggatggaggctcaaggtcgggtggagagccctgaggcggcgcgaccggcttcgatgcttctccaccgacgggggcggcggggaggagggggaaaagcgtggcgaggaggaggcatcggcaacggcggcggcatccccggcctcggttccagcggagacacaggtgggcgctggggaggagctggcgtccgagcggagtcggtcaggggagcttttcttcctcgtcctcgtcgtccgggactcctggtgtatcaagtgagccaccgctgttgagttttagtgttgataatatcgatacagttaaaactgttggaacttctaggcccagaaaaggttgatccaggtgatgtcacagcaatttaaggaaaaactttttggttatacgacatttttggttgacagagagaagaacctt

SEQ ID NO: 19301 - DNA, 316 bp, Zea mays
  Coding DNA Sequence Number=SeqID_4898
gttgaacatgtcctcccttgcttgtgactttgtcgtcgctagaacccctcactagattcgtgtcatcgccagctcgctccaaaaatgatctcgtcgtcgttccgtgagtcatcaagaaatctcgaaaattgggtgaagacgaagctagcagcattgtatttcccaagtgctcgacacaagagctgaaccagaatccttgccgtgttcacggatagcgcgtcagatttagaatggtacgttaattaatcacgtgatacggaagacgatccaagtcaaccccaagtgcggccggactactccgcctgaagatactgat

SEQ ID NO: 19302 - DNA, 494 bp, Zea mays
  Coding DNA Sequence Number=SeqID_4899
gtcttcagattaatccatcagcttcatcctgcggattagtccacccgttaggtcatcttggggtcgactcagctttatttgtccacatcacgtggtcaataaacatacctaaatgatttgcataatgcacatgaatgcatagcactgacttcattccacaactaaaattcctcgcataaaaatgccgatagcgcctaccggcaaagcactaaaattactaaacaaataaatctagcttaccagcatcaaacgggactcaatacttgcgagtatgctgataaatcctggctcgagcttgtcgttgaacatctgacgggggggggggggttcactttcttctccataccttccggggatttctctcaaaccagcgacgatcgacgaggattgcgaacatgacgagagggggaaaactatttatcacaataactttttttaccccgcaaacaggatttaaaacagccatatgaagtagtgttgagatcttccgcccc

SEQ ID NO: 19303 - DNA, 470 bp, Zea mays
  Coding DNA Sequence Number=SeqID_4900
aagcggaggaagcagcgacgcgcacgaggacgacctggtgatgccgggcttccggttccaccccacggaggaggagctcatcgagttctacctccggcggaaggtggagggcaagcgcttcaacgtcgagctcatcaccttcctcgacctctaccgctacgacccatgggagctcccagcaatggccgcgattggggagaaggagtggtacttctacgtgccgagggaccgcaagtaccgcaacggcgacaggcccaaccgggtgacggcgtcgggctactggaaggccacgggcgccgaccgcaccatcaaggcggacaacagccgccccatcgggctcaagaagacgctcgtcttctactccggcaaggcgcccaagggcgtccgcagcagctggatcatgaacgagtaccgccttccgcccgacgacaccgaccgctaccacaagaccgaaatatccttttgccgcg

SEQ ID NO: 19304 - DNA, 539 bp, Zea mays
  Coding DNA Sequence Number=SeqID_4901
gagcattcaggatcgcacagctggagctagcattcctcaacgactacttctacacaagataccccatcctgttctggcgtggcttcccgctcctctgtgcttggcaccccctgctcaccatcgctctcatcgcgtggcttgcaagggacatccacaagctctacgaacccagggaaggagagactgcccacgtcattaagggtgtcaatgttgacatcaccatcacatggatattcatgggcattatcgttctgaaggagctgtggaagatggtcacctacatcttgtcggactggaccaaggtgatgctgctgtgcgagtacacttcgcggaggagcatcggccggtggtgtatgtgtatcccattcccacaacgtatgtgcgagttcttggttcgggtcctgtgcacgccaagatgtacgatcgtgcaccgttggcacaacaaggttggccagtacgaattcctccagtcatttggttacgatccttggaacgttccctactatctaagcctgggcctgctgccgaaggagaccaaa

SEQ ID NO: 19305 - DNA, 240 bp, Zea mays
  Coding DNA Sequence Number=SeqID_4902
ggcatttgatctaaattcactgtcagttctcctaattggacgactgttatgcgggttaggatctgcaagagcagtgaaccgtcgctatatcagtgactgtgtgcctctcaagatgaggctacaagcctctgccgggttcgttagtgctagcgctcttggcatggcatgacaaactccgggacgttggcccgtgtagtctaaaatcccccgatacttgctaccggtttattcggcacggac

SEQ ID NO: 19306 - DNA, 284 bp, Zea mays
  Coding DNA Sequence Number=SeqID_4903
gagactgccaccaacactggccaggttacggagaagatcggcggcgccttctcctgcgactctgccatcggttcccagttcgacgcttccaaggacggtatcgccggacaggtcgagaaggctgtcgacggccccagcagacctgctactcagaagaagtaaacacctcacactcaccttcacactcaaacctttcacgacgatggatgcctttttcacgacacgaatcaaccagagatatgatgagcactgtatcataaaagccggaagcattgctcaatggc

SEQ ID NO: 19307 - DNA, 264 bp, Zea mays
  Coding DNA Sequence Number=SeqID_4904
ctaagctactaggtgttcgtgctggattacatcccaggttaaggcttgcagaattcttgatcatctacagcataacagaagaatttatacctgctacagagaagattggaggcgagtgtgtttacaacattcggggagtcctacatcaacaatctaatcaattcctttattatcatcataatgttctgattacaaaaatcaacttagatctacatcaataaactttcgttgctatccatgtttctgaccaatttcaatcaatct

SEQ ID NO: 19308 - DNA, 464 bp, Zea mays
  Coding DNA Sequence Number=SeqID_4905
ggtgaacaacaaatgcacttccatgttccaacatttgtttctcccttaagaactggaaattgtcttaatggtggcgctgccaattagctggtattgctgctagtcatcagtcatcaacctctgcatcatcagctctaccacggcaggggcatcgacggtgacagcaaccttcacggtgggcatgccactccaggctgtgatctctccgtacctcggccgcgaccacgcttcaatttgaaatacctcgccatcaaccctggacaaatctttatcttccacccatatatgagaacgtgtgacaatgtttaacattgaaccgaggacgttggtgacgaagtagtcccggccaagcctacaatcgtgggcggcgccccgacctaccgcacctcgatccgtagtgaccgtctgaaccatggacgacgcctgcgatcctcaggccgtctccccatggacaaagcttcgat

SEQ ID NO: 19309 - DNA, 497 bp, Zea mays
  Coding DNA Sequence Number=SeqID_4906
tctcttctctttttcacgggagggatgacgatgccgctcgcgcgcgacgccgcatcactccctcgccactcgcgcgcccgggctccttcccgccacgctcacgacgatgccgtccccgacgtcctatcttctcctgaatccctccaaaccctcctccttccgccgactctcggccccgcgcctgagccggtttcatgtctcctgcgacacgccacggggcggcgggaggagtggcggcgggaggcgcgaggtcatccccgccggtgccagcaaggccaagaaacagatcgtattcttcgatgccgccccgccggtgtcccaggagggcgggggcgccgtggagaaggcggggagcgagaagcttacccaggtgggcagcggcaacgcagcgctggcgttgttgaggagggcaaccaagaggacgctctcggtgctgtccaacctcccgctcgccatctccgagatgttcgccattgctgccctcatggctctaggaa

SEQ ID NO: 19310 - DNA, 152 bp, Zea mays
  Coding DNA Sequence Number=SeqID_4907
gaattccggctacgactcacgcgtacaggctaggttaaccttgattattggtctttacacggtacaagtgatcaagggacggggctacaaaacacgaagcagagagtgccagttcatgctgatggatcagcttcccggaataaaccgatgta

SEQ ID NO: 19311 - DNA, 277 bp, Zea mays
  Coding DNA Sequence Number=SeqID_4908
ttctcgaattgttgagacccggtggtggcagaccattcacaccacatatgcatcctgctgattataacgggtggtttgagaagtactcccaatccagaaaaaggctatggaaggattcctgctgtgggcaaccagcatacaagcaaccatatcaatggacatatggaagaaagcctttaaggaagcgtcagaactgctttgcctagtaagggcagctggtcatgagtgtggatgtttgcctatgttaaccaagtttgtcatgtagcagtgcatagct

SEQ ID NO: 19312 - DNA, 553 bp, Zea mays
  Coding DNA Sequence Number=SeqID_4909
tgagcataggctgactggaccccaacaccaagttgacaaggacagccccaaggacagccccgtaccagatggaggaggactgaaggacggaaagcatgagaacggctccagcacgactgagccctggggcataggccgtgcttgaacgggggcacccgggcggggcaaccatctctagacctggcaacacggattttaaaggcgaaaagcttttctgctgtgctcccagcaaataacgtccactcaccaggtgtacaggaggtcagtgatcatccctctacccagctaccctattcacccccgccaccctcacagccccagcattcttctccatcacaatcttattcctctccctcgtctcaggcaacagcagattacccttcttctgattttcacaaaccatcccccaattattcaactcccggctacacaagcacagatttccctaccaatgaggtccacagaccaccttccaattattccccacctccttacacaaggacagatcgcccttccaatgacggctacaatcctcacagcaattggtaaccag

SEQ ID NO: 19313 - DNA, 375 bp, Zea mays
  Coding DNA Sequence Number=SeqID_4910
ggaagatgctatcttcacgacccacaatggttagctggggagatgttgacaaagttcctccatatgaatctatttgcaagcggctacgataagtaccccctacacaatggcctcgggttgactttgaaggatccttccgttgaaaactaaacaatcgcttgtatgaagtgccctagctcatgaactgcttttctttggggggcattcaatctagtgagcttaggatttcagcagctacgtgcaggcgtaactgttccatagttgattacgaagactggcgaccatttttttggccctcgtctccgactatggatagcatgagtattctgctggcctgaattcccggtgtaaacggcttctgaaattttgaatcat

SEQ ID NO: 19314 - DNA, 463 bp, Zea mays
  Coding DNA Sequence Number=SeqID_4911
atccgtgtcccctgcgttctagggtggtcgtcccgcgttgttgccgtcgagattgcgatctgttcccgagcttcgaggaatcgacggacaagcttcagcgaccaagagatcgaactcttcgagttctacgaggctgaagattctgagcatctgtttggtgaaggttgcctttggtgcaatctatgctcaggtaaggaagaaggtgtcgaggtggatctccaggagttccaagaattcgacgagttcgaggattaggctagcgacctcccccagtcagctgcctgtggtgggttgtttacgttggctacgtttcggttctgtgtactttgatttatattatgtaaatggctctagtctgtaatattattacttactctttattgtaattcgaagcattgtgctatgatgagtcatttatgtaatcgcggtgtacgtgaatttcgtgatcctggcacatacatgg

SEQ ID NO: 19315 - DNA, 584 bp, Zea mays
  Coding DNA Sequence Number=SeqID_4912
aaaggaggtgcacatttcgccgagcaagaacaaaaactctgggtctgcttcaaaggaattggcaagcgtaatttcttcggattgcaaggcaaagagttctgattgtaagggtagtgatgatagtgcaggaatgaagaagaacgcagcaaagaaaactgagaaggtgctgtcgtcggttcttgtgaagccttcaccagaagacaaggaaagagaaagagctgttaataaggttagtaagaagcctaacaaggttggcaataatataccaggtttcacgagtgcaggtgtgagattggcagcctttcctgggcctggtgtgaagaaagtgaaaaagattgtcatcaagaagattgttaggaagattggtgccaaagataaacaaactagtagttcaaccgtcccagaaaaggacatcattgatgctaatgtaaatgcctctgaaaaagaagaagctaatgcaaatgtttttgagaaagaagaaggtgagatcacaacatcatcttttgagaaggatgctatttctgcacacaatttggtcagtactagtgatacagctggagttgttaacagtgtggaggtccaaa

SEQ ID NO: 19316 - DNA, 470 bp, Zea mays
  Coding DNA Sequence Number=SeqID_4913
acaggcaggaccgtggcaaggccttcgacgaggtactggaggaacgccgcagcgaccagctcgcggcgatgctcaagacagcggtgtggtgcttgacgtcgccggagaagcacttcgcggaggtgatccggaggtccatcgtcgggctcggtacggatgaagaatccctgacgagggtgatcgtttcgcgcgccgagatcgacatgaagaaggtgaaggacgagtacaaggtcaggtaccgcacgacggttaccagcgacgtcaacggcgacacttccggatactacaattccatcttgctcactctagcgggctatctgattctggcggcccgctcactgggactcgatgccggcccgatgtccggttttgatccggctaaagttaacgccgcgttcttcagcgaaaataactggcaggtcaacttactgatcaacctcggctatggcgaagccagcaaactgcatccg

SEQ ID NO: 19317 - DNA, 552 bp, Zea mays
  Coding DNA Sequence Number=SeqID_4914
gccacggtacctaatctcgatgcacctcatacctagcacttcaagatcgactggagggggccttgcacggtcggcagctgcttgtcgcgccactaccacatgttcttcacctgcccggcttacttcatcagcttccgcaccagctacggctacctgctctctggcaccgcacacggcctcaggctccagaccaccacgtactgcccgattgtggactacactctagcgagcgagaggtccatcaccgccgaaaccgcccgacctccacgtgctctgctacagccgcgccgtctatgtacgccacaccttgtcatgtcgcatactgcatagcggtaacaaatgaactgatacacaagttggaataaaaagaatatgaacaagtgtgaggtgatttactgagggttaaccagtggatcgctgtgattacatatatgtttgttggtttgcgtcgcgatctttgttcagttcaacgtacagtttgttcattactataaatgctgaaaaagttcatgtagttttagggggagacgctttttgtctttctttgtgccg

SEQ ID NO: 19318 - DNA, 231 bp, Zea mays
  Coding DNA Sequence Number=SeqID_4915
gtggactaaactgctggcggaccatgcgcccaacgctacgaacgaggcgaagatcgagaactacttcgggcgctaaatcggccgcgacaccagcatgagcatctacctgagcctgtacgaagttcggagggcaggcatggggactctcacagatgctgctggagaagacactggtcatttgcctggaaagttgcaccggacgatcagactaccggtaacagtaatggaagc

SEQ ID NO: 19319 - DNA, 388 bp, Zea mays
  Coding DNA Sequence Number=SeqID_4916
gtctatgtagtgcaacccttatttttgtcttctaataccatcacaacgcatgtggagtaaaccaagcttttatacgcttcatgcttgcaaaactttacttcttattctaatgaactgctggtttgtgatgaagttttgtttagggttcagggtttggcattgtgtataaaggttgtgtttaattgctcaccccttattttgtccaccttcactggatgatatacaatagtatggtcctttcccaagaccctctagttcagaaccatgaaatgctcctgaatctccttatccaagacatcttttggtaactaccacactgcaggttgttggagcattgcctaatttggaacaaatggctcaaaagtttaccataaaccgctggagaatg

SEQ ID NO: 19320 - DNA, 466 bp, Zea mays
  Coding DNA Sequence Number=SeqID_4917
ttttttctctcagaccagttggagaaagacgcgatccaacatatttcttcccttgtatgcctgccaattctgaacacgtaccaactcaacccttgttcatcgatcttgcagcactgcaggatgtacagggctaagagagctgcttcgctcagagcgaagcgccggcgccttggcaagtacgagctcggacgcaccatcggcgaagggacatttgccaaggtccgggtcgccaagaacatggacactggggatcatgtcgccatcaagatcctcgacaaggccaaggttcacaagaacaaactagccgagcagattaggagggaaatctgtacgatgaagctaatacagcatcccaatgttgttcgcctgtacgaggtgatgggaagtaaagcaaggatttacattgtgctggaattcgttatgggtggagagctccacgatatcattgtaagccatgggagactga

SEQ ID NO: 19321 - DNA, 109 bp, Zea mays
  Coding DNA Sequence Number=SeqID_4918
ctgcatgttccacattggattgcataaatctcatcagtgtgaatttgcattttcatttgtggcaataaatgctctgacaaagtcttcttgttgcagaattgccttgaag

SEQ ID NO: 19322 - DNA, 372 bp, Zea mays
  Coding DNA Sequence Number=SeqID_4919
aggcgctgctacacgagccacacaacgaggagactgattctatctaggcggcgtatgccaatagacttttattgcgacgaaggatgctactgtaaaagctatgctagtatcatagtaccatgataagtcgcatagaaggacacgcgtaatgtagatcagaatagctctcgatatatatgtgtgcacatcttatctcttcataaagcaaaggtatgcggtactaccgatcttcataatatttctagcctcaaagttacattgacttgcagactcaaacaagattgaaaagatcgataagtcctataggctcccagactcccttgcaacaaggactccagctccaatgagatgcgtcagctccacaacagaagg

SEQ ID NO: 19323 - DNA, 514 bp, Zea mays
  Coding DNA Sequence Number=SeqID_4920
catgcctgcagcatactgactgtccctcctctacctccttcggcccgctttcgctcctcatcagtaggaagctcgccgacctgggctacaagagaagcgccaagaagtgcaaggagaagttcgagaacgtgcacaagtactacaagcgcacaaaggaaggccgcaccggcaggcaggacggcaagagctaccgcttcttcgacgagctggaggccttgcacgcagccgcgccgcagccacagccgccgctacagaagcagcagcagcagttgccgccagcgagcaccaccgcaccaccgttgcacgccttcgccacgccagtatccgcgccgccgccgataagttcaatgccaccgccgacggggccgatgcagccagcgcccatatcgtcggcggcaccggcggtgcaggtccaggcaatcgtggagctgcccggggcccaccagcccctcaacctgctgcaaggcttcagcttctcttccatgtcggaatcggagtccgaggacgatgacat

SEQ ID NO: 19324 - DNA, 440 bp, Zea mays
  Coding DNA Sequence Number=SeqID_4921
gggcgaaaccatatagtagatctagccatgccatgtccattgggctgcctgcaacccgtttgccggtgcccctgcccgtggtctttatcattttaccaaccccgaggctttgcttttaaaccagaggctccatttgtgtgccgccttgttttactagaattccttttttttattttgccctttttcccttttcccccccagtttttatccttatcctggcattgtacaaataatttttccagtgcttgtagcttgtggacttgggttgtccaacatgtcatgaatacaaactgagtttgcttcaaaaaaaaaaaaaaaaaagggcggcccgcccttttttttttttttttttttttttttttttttttttttttttttttttttttttttttttttggaacgaacttatcatacagttccatttcatcactagtggacca

SEQ ID NO: 19325 - DNA, 491 bp, Zea mays
  Coding DNA Sequence Number=SeqID_4922
gcccgcaggtctcggttccgtaataccgggcccccccaacccttccggcagccaccagaggatctgatttctattccggtgtttgctgccatcaaatcaaaggtcacggttaacctgaccaaccatgcttctcctgagacccgatctacaccaggtcaaccttgggttagaggatgggacgacttaaggaagggcaaagatggacccaagtttgggaaatcagggataacctgctggaaatggggatgacggctttccatcctaaataatagctgcccgcccaccccaccccccaatatgcttgtttggtgatggtgtagaataaagtgaactgccaccggcatgtgtgaagttggttaaatcgtagaatcacctggtaactatggatggtactcctgatgtttgcctggcaattccagccttccaggtatcgtctatagaaaaaaaaacccggattaaaattcaaaacctttggaggataacaaacacag

SEQ ID NO: 19326 - DNA, 310 bp, Zea mays
  Coding DNA Sequence Number=SeqID_4923
attggtttctaatgcaaccacccgctggaccccccaatgaggggtttgcaaaagaaaaatggggttgggtttgggggccgatggccgggtcccaactttttatggcccaatcttggtggggaaaccttaaggaaccccaaccgggaagcggggggttaccaaacccccgggggtttttggttaaccttcggaacctgccccaataacaccaccgaaatctatcagggggtgggtttcaccatggccacccaaacggtggcaggtacctttttctttgtctggccggcaggcttattgaccaactgggcgc

SEQ ID NO: 19327 - DNA, 462 bp, Zea mays
  Coding DNA Sequence Number=SeqID_4924
aaaatcctttaatcggtgaatccagtttggggagctatcattcaaccccaataacttttctcttgccaaccttggaaaatggggacgcaaagaaacatgaccccttgctggtcagtcacctccatccacaactactcgagagagataccctttggggggtgaaactttgccccaagatttgctcaatttggcatgagcttcagcgtagcactcgaaaaaatgttgttcctgagtcctttggcatatattttgtagcagtagcgtctttgaaatgaaggaagtccctcaacacaagcactaagcattcagttaggcagaacttaaggaagatgagtcgtctcgtcttttctttcgagtggcacttgaaagtagctggttgtcaaaaactatgaagccaaagtgatgagtgttccaagagagttgttccaccccagggcgctacccaggctccagtctttaggg

SEQ ID NO: 19328 - DNA, 364 bp, Zea mays
  misc_feature (258)..(258): n is a, c, g, or t
  misc_feature (274)..(274): n is a, c, g, or t
  Coding DNA Sequence Number=SeqID_4925
atggtgccgtgcgatcgatggtcacggaagttgcaaggatagctggtgtgctgctgttggggcagagtagaacacaatgcttccatccaacaaatatcggtgatccttttctagttttttaataaggatgcataataagtaagagaattgatgcagaatccagatattcgcaagagttgcgacggcaaactaggattcgagttcgagggatttttgcagggatgcttttttttctcttttttttgagctgagtccagntagaaaccggccggantagagtgggcattgatcttgcgaactgtaacgattgacgtgggttctgtaaagagaaataaaagaaatgtcatttagctgtttttcttaa

SEQ ID NO: 19329 - DNA, 261 bp, Zea mays
  Coding DNA Sequence Number=SeqID_4926
ctagacctaaaagtagatccactacactagaaaccaaaggactacctggcagagtgatctaacactcactctaaaccagctggtaacctaacaactgatagagggacctgacaaacactgccagccttaatactatcagtgcgctgcctcccttttccacaaaaagaagcttatccagtccctgtggatctcttgccctatgtcatccttgcaagcggataacactagtcccttggcactggtctactgcgggtctctatg

SEQ ID NO: 19330 - DNA, 473 bp, Zea mays
  Coding DNA Sequence Number=SeqID_4927
atcccctcgccgcataggagagttcggcaccggcccatcctcgccgcttgaccgcgtccttgcccggtaccgcccccgccgtgaggtctcgtacgtcgccgctgtgcggcattaatgccggcgctgtggcacctcaccggcgctcgccgagctccgccgctccccttccctcgggcgccggcctcagccaccaccctcctcccctcgcccgagctcaattcgcgaagcgtcgccgtcttctccctctctggtgagccctcccccccctcttctccctcccgacggcgatcctcgccgtggagctccgccacctccccgtaggcagccccctcccgacctcctctggccaaattaagcccacctctaggtccgccatcccctccccgtgctaagacacctgcgcattgtccggcggccgaatcctccccgcggacggccggttcgccccacccgtcaaccgttggcgctgtctc

SEQ ID NO: 19331 - DNA, 214 bp, Zea mays
  Coding DNA Sequence Number=SeqID_4928
ggcccttccttcttgcaagggcccaaaggccccgcttttttggttttttccctttttttttgggcagggtcgcgggtttcccccgaaaaactttaaaagggggggcccctttgggggtccaaaaaaggggtttacggggcccttgcccccaaaaaacatggaaaggggggaggggttcaacgggggggccatatcccctgtaaaaaggagttat

SEQ ID NO: 19332 - DNA, 438 bp, Zea mays
  Coding DNA Sequence Number=SeqID_4929
gttggtcttttaagatggcattacatgatagaaaggggaatgaggatgtgagagtttttgtgaaggttgatggaaaagagttttggattggaaaactatcagttgacaaataccctcagtgtaaaactagtttggtattcgagaaggagttccggatcgttcggctcgaggaacgggaacgtggtacgttgcggtacgctactaaaactaggatttaacactactggaacgagatcgttcccacgttcccggaacggaacgaacgttcccggaacgaggaacgtggccaagttcccggttcccggttactaaggtttgagttactacacacctctagatcttcgcagcaaccacaacaactcttccgaatcttcgaccaatgctgcaaatcagagtggtcgtggaggtcctagccggtttggacgaggtactcatgga

SEQ ID NO: 19333 - DNA, 520 bp, Zea mays
  Coding DNA Sequence Number=SeqID_4930
gatcacacacttcacacagcaatggctgctctggctgccgtggtcgtcctcgcgcttgcaacggtcgtcgccggcgcagtttcggcgccgtccaggagtccggtcatctacattttcggggactccatgtcggacgtgggaaacaacaactatctcctcctctccctcgccaagtgcaactacccctggtacggcatcgactacaagaacggctaccccaccgggaggttcactaatggcaggaccatcggagacatcatggccgccaagtttggctccccgcccccggtgccgttcctctccctgtacatgaccgacgacgaggtcctcgccggcgtcaacttcgcgtccggcggcgctgggctcctcaacgagacgggcatttactttgtccagtatctatcgttcgacagccagatatcgtccttcgagcagatcaaggacgcgatgatcgccaagatcggcaagaaggctgccgaggagaccgtcaatggtgcgatcttccaaatcgggctcggaa

SEQ ID NO: 19334 - DNA, 501 bp, Zea mays
  Coding DNA Sequence Number=SeqID_4931
ggcaccccattgctgcgttggcttggcagaacagcttagccagcttgctgcgccatcaggcagccgaaacgcagcgtccccgcaaatggcgggccgccgtctggtgacgctgacgctgctggcggccgcgttcctggccgccgccccgggcggcgcaggcacgaaaccatcggcgaagttcgagctgatccacccggcgcaagcgcccgtgggaccaggtgacgcgcatggaccacgagcccacggcattcatctccttcgaacgacgtccccccccgacggaagtgggcccggtccaagccccaaccccaagcagtcgcccggccagagaagtccttcaccatggccgtttcccctcggggggggaaaccggggacaggagaaagaaccttcctgcccctttccgtcggggcccaccccccgcccggcacctttcctccttcttggacctaaaaccggccaagccccccttaaccctggagtacacgagggccccacgga

SEQ ID NO: 19335 - DNA, 277 bp, Zea mays
  Coding DNA Sequence Number=SeqID_4932
cacgtccatatacatttctatctattaataaatcatcccaaccctagttagggtttaggtttcctctcctaacaaaaagatttgcatgctttgctagacatgctgaagttaaactttgacatctaaagttaaattatgatatatcagtgcttacaagaataacaaggcagcatcactgaaaactatgcatttacatgtactttatgctgaagaataacaaggtccccatagttttaaattgtcagcacaaccatggctcttgtgtgtggcataacac

SEQ ID NO: 19336 - DNA, 426 bp, Zea mays
  Coding DNA Sequence Number=SeqID_4933
gcaaaacggttcattggagtaaaatgagggtcggggaaaaagaggcccaaatgcaaaagatgtggtcagtttggtccccaaatggggccatgtaatgacccagtatatgagtgaaaggcgccgcccccaaatgctccaaagcctaagagggttagccagaggaaaaaaaaggtggtggtggtaaaagatgatccattgtcagggcctgccccatcaagtccagtgtgcaacaaagagacccagaggggaaccaaaagcaagtagtgttccttaagttactcattatactgaggttctgtaaagtgccaagaaggggggaaataggttttgtatagacatgttttatagtgtaggacagagtgcaagtttgttttcttgttgaacaatgtggaatggggtcctctagtgtggcccagaaaagaaaaa

SEQ ID NO: 19337 - DNA, 317 bp, Zea mays
  Coding DNA Sequence Number=SeqID_4934
cccacgcgttcggatagaaaagttgagttctaggatgaatgccaatgtgtggatggaaaaggccaagggagctgcgcagtactgagggagctcggacaagaatattgctgaattcgtcgccaagtattcatcaactcatgcttatctctgttcaagttttcattctcttgctccaacaacttacatcttttcgccatcttctggtatgcgcgcgaggtttcgaggatctgaagaatcaccctggtaactggaatctcaagtgccaggagaagaacatgtggttcaagaggagccacacatatgaggagttcaattcg

SEQ ID NO: 19338 - DNA, 286 bp, Zea mays
  Coding DNA Sequence Number=SeqID_4935
catcagaccaaaagcagatgaagaagacgtgcagaatgtcgacatggcgtccgcgtcaaatgtggcggacgcgtgtgaaaacgcgtgggggcatgcaaatgaagatacatttgtctctcatgaacaagcaagggtacaagccgaagatgttgatgctccaggatcttcttcccaagtggttaacaggagaaactcatcactacttcaagctcatcctcaaaaccaaatcattaggagtccttcacaaggggttatcactcgatcccatagacatgcttcttttatt

SEQ ID NO: 19339 - DNA, 136 bp, Zea mays
  Coding DNA Sequence Number=SeqID_4936
caccgaagaagtcgccgtctgcaataaggttcggcatattgttttgactaaaatgctctacccctctgatgggactgctggtgctgctgggcccatgatgggtatcacaacagaggctaagtccatttttgacttg

SEQ ID NO: 19340 - DNA, 567 bp, Zea mays
  misc_feature (78)..(78): n is a, c, g, or t
  Coding DNA Sequence Number=SeqID_4937
gtcctgcgcgcagagctgttcctgtcgcgtccttagcagactcgcaccctccgtggtatgtctgctcgtctattctgncggcctgtacggacacggggtctcacttgagtcgcgctgccgttggacgtgacgcaacacaggggttggctctctgctctgtccagctcgtcgagtccctagaatctgtcatagtcggtgcccaacatcttcgtgtcgcccttcgtgtgctgtgacaccccattgctcctcgtcgtcaattcacgccgcgtccgcgacgtgtccgtcgattccgacgatctatcttccagttgcgcgccacttgtgttgagctccgaagccccctatcgtgctcgaccctggaggcctctaactcgtcaacatcccttgcgtcgtcgaaaaatcccgagagtttggataaagcaacaaatcctgtgtggtgctcaccacgtgctcgacgtaatggcagaatcagaaatcgtagttgtgctcgtggccttgaaaaacgctttttttaaaaagaagctatcgtcgctctcgcttttcgttttagtatttctatcggctagt

SEQ ID NO: 19341 - DNA, 212 bp, Zea mays
  Coding DNA Sequence Number=SeqID_4938
tataggatacccctgtcatatacacaaaggagagccttttaaacaatgtcttggctgctattcctccaaagcttacaagtgaggagtggtcagctgcattgccaagggcattagttgctggtttcgtgaaaacagataaagacttccaaacaaaaataagaactatggaaagccatcgcatgcgtgtaggtgctcttgcatggagttctttg

SEQ ID NO: 19342 - DNA, 397 bp, Zea mays
  Coding DNA Sequence Number=SeqID_4939
ttgtgtttcttcaggcaatgggccgtgcgcacggcgcttctccatcgcagccattagtttcctcaaggggacgggggggaatgtcaatctatcggcgcagcgcgaatcgcctatccacgcctgtttggtctggccaaagaaaataggggaacagtcctcagggcagcacgagcgtcaggggtccaacttccaaggctctctcatataccgtaagctggggctctagcaggtgcatccgccctttcaccaccagatcagccgcctacacaatgaatggagtcccactagatgtcttagccttcgaattgagcacctgaggtttgtgataacagttcccgtcagtgaatcatcgaccgagatgccgtacgcacgaacctgcagtttgcctcgagccgaa

SEQ ID NO: 19343 - DNA, 342 bp, Zea mays
  Coding DNA Sequence Number=SeqID_4940
tcgtgcagtggatcagtggaaatcatgtatgttagtgtcaacgacgaggatgaggccacagatcatacatacactagttgcatcatcttgggtacgtggcatcctgtgctgtacgggaaggggagaacgttgctatctggccgtgctgtttcgcggcacgtaacaacaactgttttgtgtgttataatttgtggagaagtgtcttgcctttttatattatcatatatttttttttataatctttatatttctattttattttattcggttttttctattttggtatttatatcctttcttaattttttattctaatttattatttttcatttcgttattctt

SEQ ID NO: 19344 - DNA, 321 bp, Zea mays
  Coding DNA Sequence Number=SeqID_4941
ggctgtattaactaaaacccactcaatccatgtagattgcgagccaaacgaactaatctctaacatgttattagaacgaagtattactacaaacttacattacatagcaaagctcggataacgggttccctctaacatgaccataacttaacatggggatatatatagcaggtcccaatggaataaatagaattctttaccggcactcctaagagctttcagatgccgacaccactttggccacctggaccagcatgaaaccttctccggcaatcggttgggttcctatgcagccaggaacccacctctcgggatctggga

SEQ ID NO: 19345 - DNA, 455 bp, Zea mays
  Coding DNA Sequence Number=SeqID_4942
agggacagcatatcacaattataacccttaacaaaaagggcccgttaaaggttctgctccaactggtaatggcccaagcaatgtgattaacaacacaaccagcatgccccccggcagaaacaacagcttcaagtcggtgagcagcagtccagctgctgctaccggtggcattgcggtgaactcgaaggtcgacgactccttccatcaactggaggacctcgacctcgacggcttgatcacaaacgaactgatggagagcgggttgttcggcgccggacaagggtggtgagcatgtcccaccacgcctcacactactacccgagctccttcacggaaagcgccaagcaacaatataagctttgccacccttctctttcgggagtttttgtgttgacagtttcagatgatcgtgccataaacagtaggtaaggtagcgagttgttttcctccggagt

SEQ ID NO: 19346 - DNA, 169 bp, Zea mays
  Coding DNA Sequence Number=SeqID_4943
agttccaggccgcttcgaaccaggtgaattttgtctaacagaaatagaggctatttgatcgggctactgggacgttatatgataacagtcgatgggctgaaacagaagccccacggattcgggaatttcatatgtcagcacggtgccaacgcaagctaaaatttccctt

SEQ ID NO: 19347 - DNA, 345 bp, Zea mays
  Coding DNA Sequence Number=SeqID_4944
gctcgcttgcgagcgttttcaaaacgggtggggcagcatgatggacccggaagtcgaatggattcccttgaagacaacggtagccgcagacataatcaccccatgcaccactgcgctgctccagtggtacgagcgctcaggcctaacggggggcagcttctatacctccgaacataggcggcttctgtgattctttgcgatcacctctcagccgtgtgaagcacctccgaggacgtcgccctaacgtgttcagagagaacacctcgccaaccagcgtgcgctcagaccgatgtttgcatcaagcgtgactccacgtgggggggccattcctcagacgtcatcagc

SEQ ID NO: 19348 - DNA, 352 bp, Zea mays
  Coding DNA Sequence Number=SeqID_4945
aatggccatgagtctctctacgtgaattggccgctttattagttcagctggtactcccgcttgtcccggtgcaaaattgattctcagggcatcgcacttaatattagttggctgcccctttatgcatcccaggcttttacgcttgttggcttccggtttgtatgatgtgtgggattttgacgccgcaacacaaggcgagcagagtttcagcatgccccgagtcaactcagcttggcctcaaagttcgagtatgtttgttcacatcagggctcatagcctagcgtaatacacttctcgcaaggcaaacagaagcatggccgtgcagcccacagtgcccgagcttctgtaaaat

SEQ ID NO: 19349 - DNA, 415 bp, Zea mays
  Coding DNA Sequence Number=SeqID_4946
agcagatgtacctggcacgtcctttgctttcatatatacagcctcactcgatcgatcagtgactgctggtgttcagacgacatcccaaaacaaatgccggcgttggttaaggcgagcaaactccggcaatgcgacgtcaccggcgacggcgtcgaggtggtaccggtgccgctgctgccacgggcaggcgcatttgcatgatccatcatccatccaccgcctactctcctaccgtatattttgattgtatcttgtttcttttctctctctaaaaataataaaggagagcatgcatcatcagtttccattggcgtaaaaattattttctttagacgagggagcgtaacaacacaaatcacctgccaacactcaatgtaacgccccctcgaaaacacattgtgattttatttagcta

SEQ ID NO: 19350 - DNA, 313 bp, Zea mays
  Coding DNA Sequence Number=SeqID_4947
gtaccgcttcgatgcccaacatggtgtggcggctggcggtctggcgggcccggcgtgatacggcaccccctcctcccgcccccttatgcaagctggcaatcagaaactccgatcaacaccgcacgcgcggcacgccagtgtcgtcttcgcaaccatgaactccatcgagcctttcaaccggctggtgaggctggcggcccgcgccttctacgacgtctccatgaagggcgacaaccagcccaagacttcccgcggggacaaccgcggcatggccgtcgtcgtcctggacgcgctcaccagtcagcaaaaaacg

SEQ ID NO: 19351 - DNA, 561 bp, Zea mays
  misc_feature (455)..(455): n is a, c, g, or t
  Coding DNA Sequence Number=SeqID_4948
gtgtatagcactcggcggtcaagtcttcattctgctccaagcaactggtacctctcgagaacaaattttcctcccttgtatttatgactcctgtcacgtgcagcctagtatttccatccatcaatctgtccgcatccacctcaaaatatatcagaaacggaatacatccctgtgatcgtcatccggtcttctttctctccaacggttacattgtcagcattatggaagaggtaatcctttccgttctctcaatggaagctctaggtgatgatgttgtcgctgacggagaagagcgtcgcacaacgctagcagcagtacatgtttgcgtgctcgtagtagacctcaagaggcgcagcatcagcacgggaagtgtatctgcatcaggtgaatcgttttgttgtgtcactgacggtgttactgctaggtggcagtcgagttgctggtcagcacggctncagttggggtagtcgtcgttcggagggggtgtgactaagcttgagaggaaggagtccatcggcgatcgctgtcggttgtcctgccttatcgtctgtctgcttggag

SEQ ID NO: 19352 - DNA, 502 bp, Zea mays
  Coding DNA Sequence Number=SeqID_4949
aagattgaatgctgtctatgttccagataccgtactttgacgataacattggttttcctacaggagttcaagatcgcagtcctgcccattctgccgtgacaacctgaagaagacctgtcctagtgacctgtggatctatgttgaggaccaagatgtggtcgacatggagacggtgtcgagcgagaacctcagacggctgttcatgtacataagcaagctgcctctgattgtcccagacgtcatcttcagcgtgtatgattcccaaatcaaatgacttccgacgcgaccttcccgactgaccttcagccagtgcccagctccagttaatcttctttccccatgtcctccgttttcatgctttgctcaagctttgggaagtgcctgagctgttttggaaccgcaagccttccggtggtgctttagaaacttgtttagtgcctgctttaatcctttatcatatgcagcctctttgtagatatctttcttggctcagttaataggg

SEQ ID NO: 19353 - DNA, 228 bp, Zea mays
  Coding DNA Sequence Number=SeqID_4950
ttggcgaagatttggtttccaaagaatccaaaagccccggggaatgtcccttatgtgggccctttaatataggacccacctgatgttttcataatcctggaacaggaaatgtaccccttcacatttctactagagtcgatgttcttcgtaggccattgtggcctggtttgcacatttactgggcatgtatttgtttatattctgacatcccgttattgagctaaaaaa

SEQ ID NO: 19354 - DNA, 407 bp, Zea mays
  Coding DNA Sequence Number=SeqID_4951
gaacaccaccaaacggaagaacagacccgccaaccgaccgcaagggacaccaagcaccagcgagaaccggaacgacgcggccagcgcggagaccgagccccgggcccgcgcccgcgcccgcggcgacgaaggcggaggcgatgaacagcgccagcacggcggccgaggagacggcgaaggtggggtgggacgggcggaacacgacgtagagcaccagcagggtgatccccgcggccaggagcaggacgaggacggcgcagcagagggcgcggaccgcgcccccgccctcgcccccgccgtagtagtagctgtaccgggggctgcggcgccaccagcgcggcttcaggtcgtcggcgtggacccccttcctcccgcctctgtggtggtccgcgtgcaccggcgggagg

SEQ ID NO: 19355 - DNA, 337 bp, Zea mays
  Coding DNA Sequence Number=SeqID_4952
gacggcaatggatcctacatacttcagaaccttggcagttcagaaactgggtcaaagaaagcaagaaaagctaaatactcaatagcactacaatatcttgttcttgaagagaccagcacctaaaaattctgcatttttctattacagttcagttcccaacagagatcataggacccgacagttagttttatgcttttagcatactgagtgtaacaacaatttccttttttatggttctcgtagctgcacttgagttagttgtatatgtaagtttgcacctctagctgatatgggtgttttgcatttgcaccaatccacaactgggtttgatatgcta

SEQ ID NO: 19356 - DNA, 543 bp, Zea mays
  Coding DNA Sequence Number=SeqID_4953
tcttcggaggcgtgcaggaacaggaaagaagctccgcttatgtgatcagagacatggaggctgctgtgttcaggtccatgcttcgcttcatctatactgacatggcgccagagctcgacggtgcccaggagcctgacgcggcggcggccatggctaagcacctactggtagctgctgacaggtatgggctgaaccggctgaagctgatgtgtgaatgcaagctctctggtggcatcgacataggcacagcggctgcgacgttggctctcgccgagcagcacaactgctcactactcaaagccaagtgtcttgagttcgtcactaagtcgcctgagactcttgatgctgtcttggcaactgatggctacgcgcatctggtggcaaggtgccccttggtgctgactgaactagtgagggctgcgtgtggaaggaagatctgagctcgcgatgatggttttcgttgacagtcttagtattactactatcttcctcatgcatgtaacgagttgcttcgtttctcgtattatggttatggtttccctt

SEQ ID NO: 19357 - DNA, 276 bp, Zea mays
  Coding DNA Sequence Number=SeqID_4954
agacgctcaagctaccagacgactccgtggacggctacgtcctcagctttcgcaaccctgagatgaacgcagggatccctggtttggattttccccacaatgctgaaatgaacttcggttttcgcggagatattctctgggattcatggtagttcagctgatttttgtgttggaactttggtataatgcttgaggtaggtgacactctgggctttcatatatatgacatttgacaagttgaaaagttgcctggctgtgttttactatcaatgttgt

SEQ ID NO: 19358 - DNA, 407 bp, Zea mays
  Coding DNA Sequence Number=SeqID_4955
gtagcaacattagagtgttccgccggtccgctcacacctccagctcactctttagttcaacattggtgtgattttcgatttgtaaaactaatcagtaatcaccacatggtcaagattttgtagtatcagatagttttttctcaatacatggggctctatgcatggaagcttatgaaaaaaaaaaaaaaaaaaaaaaaaaaaaaaaaaaaaaaaaaaaaaaaaaaaaaaaaaaaaaaaaaaaaaaaaaaaaggccccctgcccctaaccctttgggggagatttccaccactgtgggggccgtttataggggacccgacctgggcacaaagttgggcgaaatcagggccataggtgttccctgggaaaaattgttatgcgctaacattcccacacaatataggagccg

SEQ ID NO: 19359 - DNA, 452 bp, Zea mays
  Coding DNA Sequence Number=SeqID_4956
gagaccaaagatgacgggcgatccttcagcgtggcgccacctttcaaggaagggccagcgtgtcggatcaagctaaagagagggaggggcatgagaaatttccagagggagatagttcctgggctccttctagggaggcaggagatatgcgaggacctgaaagctataggttacgaggcaaagaaggctcggtctaggaaacctcgcaagggtccaggtgcgtcttcggctcgacccaggccgcgcaagcgtggagctgccaagcactgaccaggagcatctgtgcgttccgtggcagggcgccatggggcaggcgagatccagaaagaggagagagttcgttctaaccatgtgaatatccattcgcgtgtatcaagcctagtttcaaactcccggtttgctagtggatatttagttgggggttggatatcctaattctttcaccttttctc

SEQ ID NO: 19360 - DNA, 580 bp, Zea mays
  Coding DNA Sequence Number=SeqID_4957
ccttaaagctccagtcggcagtgatgggctgatggcttcaccacgacaccaccccaccctaccatgtctagtcactatacatggtctacctgatgcatgattgtatcaacatgtatacatgtagtaatagcctaatgcttcttttccttctaacactggtcagagtatcattggaactgcaagtaatagcctaatggtgtgtttggtttgtggagtcactctatgcttcatgaggtgatgcatcataagttcatttcatcaattttggtggaatcaacccactcctcatgtatatactaattattagcttatgaggaatggggtggtgatggatcaacccattctattccacaaaccaaataaaaaagtgaggagtgagaagaagatggattacttcattcctcacaccaaacacactatttatcacttcacatgttctgctgctacccatcagggcaagctggggagtgtaacttcatcaaaggagagaaagctgacccgtccattatccacatgagcatacttcagaggaatgcctctgaaatcacgtgcactgcttccaattcaaccttgagggcgg

SEQ ID NO: 19361 - DNA, 565 bp, Zea mays
  misc_feature (145)..(145): n is a, c, g, or t
  Coding DNA Sequence Number=SeqID_4958
tggtcgagtacttctttgggagtgatgggaatgaacctctacactttgacaagttttctaaaattttgaaggaattgcatgatgagattattcaactggagttcagtcattatgatgtcaagtcgtctaaaacaataccagcaanaggattttgcattgtccatggttgcttctgctgacatgaaccatatcaacaaactgcttgatagagttgatagtttggtcaaggagccagatctgaaggacatacgcatcacctttgaggagtttaaggcatttgctgatttgcgacgaagattggagccactgtcgatggctatctttgcttacggtaaattgaatgggttattgacgaaggaggatctaaaacgtgcagcgcaacatgcgcagaaggtaatcaccaagcagtgcattgctgatcgttacaacggacttcactgtatgtcgtcttggtggccgaagcttgactagcagtaacagctgtaattgtaaatcgtgtcctctgtagccctaggactgagtgatatacattgttattctcacgtgtaaattaaaccccatatgg

SEQ ID NO: 19362 - DNA, 558 bp, Zea mays
  Coding DNA Sequence Number=SeqID_4959
gcacgtactcatgcagttcgcggaggccgaggacacacggcgcaccatgtgggccgacggccacgtcaaggcgatccaccagaaaatctggcgggcgctcgagatcgactgggatgttgcctcctctgcaatttcagcacaactgggcagatttgtgaatgcttggcaagtccagcgtattgcctacccttctatttgcggcggccttggagatttatgttacccactgccactgatggagtcggaaagccaggtcatggccatgatattggagcagatgccaccgcgtacaagtgcttctcctcccaacaacccgccgcgtccaggtccaggccaaaaagtgaacaccataatgctcttcggcgccacaatccacgttgtgcagagtgataccgacgatgatggttatgaacagctgaatcgagatcctcctcctaatgctgctggtggtggtgatgatatggatcatgacagtgctgaaaatatataaactctgattctgtaatccatccattgcttgaaaatttgcaattgcatcgtgtggaactaagcagctgt

SEQ ID NO: 19363 - DNA, 44 bp, Zea mays
  Coding DNA Sequence Number=SeqID_4960
tttaccaaaatataaccgctcccattttgggtggccctctttgg

SEQ ID NO: 19364 - DNA, 208 bp, Zea mays
  Coding DNA Sequence Number=SeqID_4961
ggcggctcggctcctgactccactgcaggcagctgctgccgttcctcctcctctggctcttcaccaagcggagagtaatggcgccacggcggcagctgccgacgacggcctcgtgatgactcaggaaggtgacgctgacgccacgagcaatggcaacgacgacgacgagatctcctccgtctcagagtcagagacgatgacgggcgca

SEQ ID NO: 19365 - DNA, 40 bp, Zea mays
  Coding DNA Sequence Number=SeqID_4962
cccttcgcagccgaccgagccgacggcgacaaacgccact

SEQ ID NO: 19366 - DNA, 43 bp, Zea mays
  Coding DNA Sequence Number=SeqID_4963
gcatcacctcgttctactaaaaaaactgtgcaggtcattgagc

SEQ ID NO: 19367 - DNA, 320 bp, Zea mays
  misc_feature (216)..(216): n is a, c, g, or t
  misc_feature (259)..(259): n is a, c, g, or t
  misc_feature (263)..(263): n is a, c, g, or t
  misc_feature (265)..(265): n is a, c, g, or t
  misc_feature (273)..(273): n is a, c, g, or t
  misc_feature (275)..(275): n is a, c, g, or t
  Coding DNA Sequence Number=SeqID_4964
caagtggcttgagatccgcgatgagaagcgcgagcctattggggacagcaagatccacgtgaagcttcagtacttcgacgtcggcaaggaccgcaactgggcgaggggtgtccggagcaccaagtaccccggtgttccttacaccttcttctcgcagaggcaggggtgtaaggttactctgtaccaggacgcgcatgttggggcccacttctttgncaggatcccgctcgatgatggcaagaactgcgattttttcagnttantnggggatancnttgatgccaggagcaggggggagcatcgagttaaagtcactggct

SEQ ID NO: 19368 - DNA, 345 bp, Zea mays
  Coding DNA Sequence Number=SeqID_4965
actacttcaatcatcccctattactgcttttgttacgaaagacaaaaaaacaaaacaaaacaaaagtcagctcaggcgaagaacagatggctcgtaccaagcaaaccgctcgtaagtccaccggaggtaaagctccaaggaagcaacttgctactaaggctgctcgtaaatctgcaccaaactactggtggagtcaagaaaccacatcgttaccgtccctggaactgttgctctccgtgaaatccgtaagtaccagaagagtactgagttgcttatcagggaaaatggccttttcagaggctagtcccgggagattgctccaagattttcaagactggttttggg

SEQ ID NO: 19369 - DNA, 338 bp, Zea mays
  misc_feature (186)..(186): n is a, c, g, or t
  misc_feature (231)..(231): n is a, c, g, or t
  misc_feature (233)..(233): n is a, c, g, or t
  misc_feature (248)..(248): n is a, c, g, or t
  misc_feature (277)..(277): n is a, c, g, or t
  misc_feature (284)..(284): n is a, c, g, or t
  misc_feature (293)..(293): n is a, c, g, or t
  misc_feature (303)..(303): n is a, c, g, or t
  Coding DNA Sequence Number=SeqID_4966
aggagatcccgcgtgaacatccatggaagtataagagggagaccccgctcggacaccctcgggggctgggccatagtttgcgctacccacttgagccggatcatctccggaagtaccctcgggggctgggcagtggtttgcgctttccacccgagccgagtcatccccggcaacatccttggaggntgggtaagtgtcaacaccatccttgaggaccaagttctctgcagnangcccgcctctaaggntgagggtcccctcatgttacttccatggnaccaaanacgatccanggtcaggttntcctgaccctcaaagaccggcgctctaaggccctg

SEQ ID NO: 19370 - DNA, 382 bp, Zea mays
  misc_feature (26)..(26): n is a, c, g, or t
  misc_feature (28)..(28): n is a, c, g, or t
  misc_feature (35)..(35): n is a, c, g, or t
  misc_feature (37)..(37): n is a, c, g, or t
  misc_feature (44)..(44): n is a, c, g, or t
  misc_feature (51)..(51): n is a, c, g, or t
  misc_feature (65)..(65): n is a, c, g, or t
  misc_feature (78)..(78): n is a, c, g, or t
  misc_feature (81)..(81): n is a, c, g, or t
  misc_feature (83)..(83): n is a, c, g, or t
  misc_feature (104)..(104): n is a, c, g, or t
  misc_feature (126)..(126): n is a, c, g, or t
  misc_feature (140)..(140): n is a, c, g, or t
  misc_feature (143)..(143): n is a, c, g, or t
  misc_feature (174)..(174): n is a, c, g, or t
  misc_feature (192)..(192): n is a, c, g, or t
  misc_feature (202)..(202): n is a, c, g, or t
  misc_feature (205)..(205): n is a, c, g, or t
  misc_feature (237)..(237): n is a, c, g, or t
  misc_feature (280)..(280): n is a, c, g, or t
  misc_feature (288)..(288): n is a, c, g, or t
  misc_feature (339)..(339): n is a, c, g, or t
  misc_feature (341)..(341): n is a, c, g, or t
  misc_feature (356)..(356): n is a, c, g, or t
  Coding DNA Sequence Number=SeqID_4967
tctattcccaacgctctagctcgtgnantaattgngnagcctgncgtctanccctgctccggcgngaagtcctgatgntanangcaaggcctgatgcttctggntgtttttgtcttaaataaagangctagtatgcatgnggntatgtgagggctattgcatctgatttagtgntgcacatttaagtaatgntgatgattgnttnaagcaattttttacttgggctttatattctanattatgtaaccgcctaaccgggtgaaactaatgagatacatgntgatttgntaaatcataaatatatttatattggataatctggtacctaaggggcttagngnctatccttaacaaanatttttttatacttgattctattggg

SEQ ID NO: 19371 - DNA, 347 bp, Zea mays
  misc_feature (33)..(34): n is a, c, g, or t
  misc_feature (55)..(55): n is a, c, g, or t
  misc_feature (100)..(100): n is a, c, g, or t
  misc_feature (113)..(113): n is a, c, g, or t
  misc_feature (118)..(119): n is a, c, g, or t
  misc_feature (127)..(127): n is a, c, g, or t
  misc_feature (147)..(147): n is a, c, g, or t
  misc_feature (169)..(169): n is a, c, g, or t
  misc_feature (179)..(179): n is a, c, g, or t
  misc_feature (213)..(214): n is a, c, g, or t
  misc_feature (231)..(231): n is a, c, g, or t
  misc_feature (243)..(243): n is a, c, g, or t
  misc_feature (246)..(246): n is a, c, g, or t
  misc_feature (248)..(249): n is a, c, g, or t
  misc_feature (255)..(255): n is a, c, g, or t
  misc_feature (268)..(268): n is a, c, g, or t
  misc_feature (274)..(274): n is a, c, g, or t
  misc_feature (276)..(277): n is a, c, g, or t
  misc_feature (307)..(307): n is a, c, g, or t
  misc_feature (310)..(310): n is a, c, g, or t
  misc_feature (316)..(316): n is a, c, g, or t
  misc_feature (322)..(322): n is a, c, g, or t
  Coding DNA Sequence Number=SeqID_4968
caagaagagcattaagcaagcgagtcacgctgnnttagaagcacaaggtggagcncaaggtgaaggagcaccaccgcaagaagctgtaaggaggatcaanaatttggccaagngcggnnagaggagnaaggtcgagaaggatcccgntatccccaacgagtggcccttnaaggagcaanagctcaaggggctcgaggcccaatttgtgaaggnnctccaggagtttttagntcaagaagcagnttntnnaagganaggggttcaaaanaggaangnntgattgtttgaggacgaagaaattggtaanttnggcatntggatnttccgcacagggaaagagagtttgc

SEQ ID NO: 19372 - DNA, 259 bp, Zea mays
  misc_feature (66)..(66): n is a, c, g, or t
  Coding DNA Sequence Number=SeqID_4969
ggcttgttgaaggagagcttgcaaagaagcttcatccagacacgaataaaggtgatgcggatgcanaaccgaagtttcaagaggttcagcgagcttatgagttctttaggaacattttcagggatagggattttggaagccgtgatattaaggttgcacttgaactatcatttatggaagcagttcaaggatgcagcaaaacgatcaacttccaaaacgtctgtcacgtgcgaaacctgcaatgggagccggcgtgcct

SEQ ID NO: 19373 - DNA, 169 bp, Zea mays
  misc_feature (28)..(28): n is a, c, g, or t
  misc_feature (36)..(38): n is a, c, g, or t
  misc_feature (44)..(44): n is a, c, g, or t
  misc_feature (46)..(46): n is a, c, g, or t
  misc_feature (49)..(49): n is a, c, g, or t
  misc_feature (56)..(56): n is a, c, g, or t
  misc_feature (73)..(73): n is a, c, g, or t
  misc_feature (81)..(81): n is a, c, g, or t
  misc_feature (121)..(121): n is a, c, g, or t
  misc_feature (125)..(125): n is a, c, g, or t
  Coding DNA Sequence Number=SeqID_4970
tcacccatcgcgaactgacccgaccctnccgagggnnncgggcntntcntctccgnctccgcctcccgccgantgcctccnacccatcacaagcgcagagaagacatggctctcacacgantagnctgccacttctacagagtgtggcttatggtgtgcttccaacggg

SEQ ID NO: 19374 - DNA, 164 bp, Zea mays
  Coding DNA Sequence Number=SeqID_4971
agtttgaagctagaggtgtcagaaaagttccccagggataactggcttgtggcagccaagcgttcataacgacgttgctttttgatccttcgatgtcggctcttcctatcattgtgaagcagaattccccaagtgttggattgttccagcagtggtgacaacgc

SEQ ID NO: 19375 - DNA, 352 bp, Zea mays
  misc_feature (33)..(33): n is a, c, g, or t
  misc_feature (44)..(44): n is a, c, g, or t
  misc_feature (71)..(71): n is a, c, g, or t
  misc_feature (78)..(78): n is a, c, g, or t
  misc_feature (90)..(90): n is a, c, g, or t
  misc_feature (113)..(113): n is a, c, g, or t
  misc_feature (137)..(137): n is a, c, g, or t
  misc_feature (153)..(153): n is a, c, g, or t
  misc_feature (162)..(162): n is a, c, g, or t
  misc_feature (175)..(175): n is a, c, g, or t
  misc_feature (191)..(191): n is a, c, g, or t
  misc_feature (248)..(248): n is a, c, g, or t
  misc_feature (256)..(256): n is a, c, g, or t
  misc_feature (291)..(291): n is a, c, g, or t
  misc_feature (308)..(308): n is a, c, g, or t
  Coding DNA Sequence Number=SeqID_4972
tccacgtcggggaatcggtcttaagtcggagantacctgggtgnataaagatcgagccaactcccccgaancctattnctaagacaaagntaaattcaactaacttgacatgngtccgaaggttacacaacaagtgnacagaaaacagaaagnttcgacttnagtaaaaaaattnaatagcagaatgatgnaatagcaatgaatgaaatgataacttctcaccaactcatctgtttatatagccctanaggtgaanaaggtgaacctccttaacgcgcatactgagtgatnggtggaccggcaaaggncgtatatttttattcgttttttaataacaagctaagggaacgtg

SEQ ID NO: 19376 - DNA, 173 bp, Zea mays
  misc_feature (58)..(58): n is a, c, g, or t
  misc_feature (73)..(73): n is a, c, g, or t
  misc_feature (89)..(89): n is a, c, g, or t
  misc_feature (106)..(106): n is a, c, g, or t
  Coding DNA Sequence Number=SeqID_4973
tgaatctggccgtcacgcgggaagcttccgattcaaaacactctctacatggcattgntgttgtacaactacnacactatacgacgagncttcaaggcttccgcgnctttcttcctcttttggagaatcgcttcttctttcctccaatcgatggttcacggcttctctctgca

SEQ ID NO: 19377 - DNA, 450 bp, Zea mays
  Coding DNA Sequence Number=SeqID_4974
tggtccaacctcctacaatctgtgccgctctccgcaattgacacgctggcactgaccacctcactcaaccccaagaacgccatcatcgtcatcacctgctatgtctcaaacactcaactgccttctagtgctgccttgacagatccgttatgccatcatagcctgttttgcagcacatttcagatcgtccagctctgcaagtgccgtgccaatactcgatcgagcttccacaccaccacgtcttcaaccccaatccagctacccaacccctggtttaaacacagaaaggatccatggaaagcagggctctctctcttcctcagtaatcaggtccaatgatcgattctggactctggtctcgctctcgggtcgatcccccccccccccggagatttaattctataggcaaaagacatcatcgatggggccttggagcaatggcagtagcaa

SEQ ID NO: 19378 - DNA, 374 bp, Zea mays
  misc_feature (197)..(197): n is a, c, g, or t
  misc_feature (284)..(284): n is a, c, g, or t
  misc_feature (297)..(297): n is a, c, g, or t
  misc_feature (308)..(308): n is a, c, g, or t
  misc_feature (322)..(322): n is a, c, g, or t
  misc_feature (345)..(345): n is a, c, g, or t
  misc_feature (349)..(349): n is a, c, g, or t
  Coding DNA Sequence Number=SeqID_4975
cgcccaacagctggctccggcgggtcgccttccttctcgtcctcatcctcttccgtcgcgacctccccatcccagcccgacgatatctcctttaccctcagctccttcctccgccccgaggacggcgtcatcgccgaaccctagagagggccgggggacggacaccgtagatagccatggttgttgctgttgagggnaacgacttcgtccacgacgacgaggaggagaccgccccatcagctccctctttcggcgcccaggctaggcgcgccccgcagtcccgnctgcctcgcaggncactgctccgncaagaggaggattncgaggcagacttcgaggagttcnaggngaaggccggcgactcggagttccaa

SEQ ID NO: 19379 - DNA, 229 bp, Zea mays
  misc_feature (28)..(28): n is a, c, g, or t
  misc_feature (33)..(33): n is a, c, g, or t
  misc_feature (36)..(37): n is a, c, g, or t
  misc_feature (57)..(57): n is a, c, g, or t
  misc_feature (63)..(63): n is a, c, g, or t
  misc_feature (68)..(68): n is a, c, g, or t
  misc_feature (107)..(107): n is a, c, g, or t
  misc_feature (122)..(122): n is a, c, g, or t
  misc_feature (124)..(125): n is a, c, g, or t
  misc_feature (131)..(131): n is a, c, g, or t
  misc_feature (136)..(136): n is a, c, g, or t
  misc_feature (139)..(139): n is a, c, g, or t
  misc_feature (144)..(145): n is a, c, g, or t
  misc_feature (148)..(148): n is a, c, g, or t
  misc_feature (155)..(155): n is a, c, g, or t
  misc_feature (163)..(163): n is a, c, g, or t
  misc_feature (190)..(190): n is a, c, g, or t
  misc_feature (200)..(200): n is a, c, g, or t
  Coding DNA Sequence Number=SeqID_4976
accggccaccactgaagctgatctgcgngaggnccnngtccaggagaatagggcgangtcaantaaantccttgcttcatgagctgacagcgacccacttcgatggngacggggttggacgntnnttgtgnacgcntcngcggnntanttcttgngcgcctgnggcgagctcctcctcgagtgcgtgtgngacctggaangcgttctccccctcgggcctctcgggagg

SEQ ID NO: 19380 - DNA, 396 bp, Zea mays
  misc_feature (140)..(140): n is a, c, g, or t
  misc_feature (182)..(182): n is a, c, g, or t
  misc_feature (261)..(261): n is a, c, g, or t
  misc_feature (288)..(288): n is a, c, g, or t
  misc_feature (301)..(301): n is a, c, g, or t
  misc_feature (317)..(317): n is a, c, g, or t
  misc_feature (333)..(333): n is a, c, g, or t
  misc_feature (361)..(361): n is a, c, g, or t
  misc_feature (370)..(370): n is a, c, g, or t
  Coding DNA Sequence Number=SeqID_4977
acggttctgccgtcgcgctgcgtgcctgcatctcccttcgcgctccctccaccctcccgcgggcgcaccctgccccgcatcgcgcccgcatcccgcccgccgccgcacctcgccctgcatcccggccgcatcccgccggngggcgcaccccgccccgcatcccgcgaccttccatcaacggngcatcaacacccgcgcgcgatccactccccccacccttctgcgctgctggccgaggggacatcgatccgcggaggaganaacggtcgtaccttctgcgctgctggncgaggcagggganagctccattccgaggngaaggcgcgcggccgnggcttctggctggtggccggggctggtngaaaacttnatccacaatggaaaaggcccatccgg

SEQ ID NO: 19381 - DNA, 300 bp, Zea mays
  misc_feature (53)..(53): n is a, c, g, or t
  misc_feature (110)..(110): n is a, c, g, or t
  Coding DNA Sequence Number=SeqID_4978
gcacgctcctcctgggggttccctttctcttcctcctcctcctctttctctangtctaattcaccaccttcgtgggggcctgcatcagggcttcccggaaacggcggaanaaaaaacaaaaaaaaacggtggccaccaccaacaccaaccaaccggtggcggtgaaccccttcccttcggtcccggaaattcgggatggggggggtccgggtacggttcctacgacgactaacttccgccaccagctgaacaagacgctggacccgcggctccggcgggtgtgggcgacgcggactggca

SEQ ID NO: 19382 - DNA, 298 bp, Zea mays
  Coding DNA Sequence Number=SeqID_4979
atttgtatgaaagctactaggcccccgcgtcgcccctttggcgacttgggcggctgcaagcctagccgccgccaactcccctccctccccatctctttgccttgccgccgccggagctagctggtgggttgcccgcgcggctagcaatgaaggcggtggtggggtgcttgctgccctgctcacgcgtccaacccgtggcagcgctgtccgtccactcaggcagctagccttcggctgggtgcgcgcccgcgtggatggcccggtggcggcatctgcccatccctgatgctcggggggt

SEQ ID NO: 19383 - DNA, 297 bp, Zea mays
  Coding DNA Sequence Number=SeqID_4980
aagtccaatccatggctgctccgccgcggcgaaaccccaaccacggcggcaagaggaaggacgaggagccgtggctcgcggcgggcatccgcccggccaacttcctcccgggcctggccatcgggttcctcctcggcctcctcctcgacctctcctcctcctggaggccgaggtttagcctcccgtctgccccggcgccacggggctccaagcgggcggccgccggttcctccgccgccccagccccaggcgaagagctcaagatggttttagtagtgcgtcaggatcttaagatgg

SEQ ID NO: 19384 - DNA, 212 bp, Zea mays
  misc_feature (176)..(176): n is a, c, g, or t
  misc_feature (187)..(187): n is a, c, g, or t
  Coding DNA Sequence Number=SeqID_4981
tttctcccattactaaccctagccgccgcccgacgcccgccgctgtggcccgatgccccgtgagacgtgagcccgtgacgattgacgactgcggcaccgaggcgcgccgcgcgccgcgcgccctgaccgatgaagactggcgcccacagcggcgaccctgaccggtgaagagcggngccccgagcgngcagtcctgaccagggaagaccggc

SEQ ID NO: 19385 - DNA, 201 bp, Zea mays
  Coding DNA Sequence Number=SeqID_4982
ccgttggacgacagcgtcaggtcgaccttcgacggcgagagcatgcagcagtcacgcgcatggtcgtcccttgcccgcggcttagcgcgccgcctcgccggaggagcgccgtcagctccgattcctcctctccagtcctcgggaatctccaccggctcggcctgtctgctcgcccgccaggacggaggttttgttcatggt

SEQ ID NO: 19386 - DNA, 318 bp, Zea mays
  misc_feature (191)..(192): n is a, c, g, or t
  misc_feature (249)..(249): n is a, c, g, or t
  misc_feature (267)..(267): n is a, c, g, or t
  misc_feature (277)..(277): n is a, c, g, or t
  Coding DNA Sequence Number=SeqID_4983
aatccaatctcccaaaccttctcctccttctgaacctcccggcgcatctccgactccatggcccgcaccaagcagacggcgaggaagtccaccggcggcaaggcgccgaggaagcagctggccaccaaggtcgcccgcaagtccgccccggccaccggcggcgtcaagaagccccaccgcttccgccccgnnaccgtcgcgctccgcgagatccgcaagtaccagaagagcaccgagctgctcatccgnaagctccccttccagcgnctcgtccggnaagatcgcccagtacttcaagaaccgaacttccgctttcaa

SEQ ID NO: 19387 - DNA, 277 bp, Zea mays
  misc_feature (243)..(243): n is a, c, g, or t
  misc_feature (245)..(245): n is a, c, g, or t
  Coding DNA Sequence Number=SeqID_4984
gactcacgcttcttccttggctggcgccagtccaatccgcttgcttccccactttcttccttggccaagttaaccaggtcgactgatccaatccatcgctccagtccaagctcgtttcttcaatccaaagtcaatcgccctcatccaagaaagatccaggagaaacgatcagggcatctcctaagctaaagaaaccgtgcgtgcgtgctccctgtccatatccatcgccatggccggagatgnanagtgctctgtctttgcccgtgaacaccaacaa

SEQ ID NO: 19388 - DNA, 66 bp, Zea mays; identical to SEQ ID NO: 19177
  misc_feature (32)..(32): n is a, c, g, or t
  Coding DNA Sequence Number=SeqID_4985

SEQ ID NO: 19389 - DNA, 87 bp, Zea mays
  Coding DNA Sequence Number=SeqID_4986
ggtgtttggcagactagatgcatacgtccgccaactagtaccactgccaccgacgagtactgatctggtgcggtcgacatgggcggc

SEQ ID NO: 19390 - DNA, 110 bp, Zea mays; identical to SEQ ID NO: 19040
  misc_feature (84)..(84): n is a, c, g, or t
  Coding DNA Sequence Number=SeqID_4987

SEQ ID NO: 19391 - DNA, 335 bp, Zea mays
  Coding DNA Sequence Number=SeqID_4988
aatcgacgtaacaccagcactttcaccactttgcgtcgagcttcccgcgcgcacccacgctcttgatcattgccgccgtagcctgctcgggacgtacggacgtgccatccgtcgtattttattttcgcagcaatgcgtatggcgccggtggcggcaggaagagcccacggcgcttggagcagcgcaccacgcgcgctctccgaccggcgcggcctcctgtcatcatctcacgacgtcgccgccacggcggacggttcggttcggcgctcgtcgcgccggcgggaagcagagtgatcctctgcctcgcgtcgggaggtggtcacccgcgggacagc

SEQ ID NO: 19392 - DNA, 277 bp, Zea mays
  Coding DNA Sequence Number=SeqID_4989
ggtagcttagaatcgaagcggacgacgccacatatataccgcggccgcggcggcccctctccctcgtccgtcagatacgcgccctcgcatcgccgccgaagcccatcgctctcactctccgaaccccgccgacgccagcgcgggctcctgctccggaggcttcggccgcaatggctctccccaacaccccgcccgtggactaccccagcttcaagctcgtcctcgtcggcgacggcggcaccggcaagacgacgttcgtgaagaggcacgtcaccgg

SEQ ID NO: 19393 - DNA, 185 bp, Zea mays
  misc_feature (128)..(128): n is a, c, g, or t
  Coding DNA Sequence Number=SeqID_4990
attgctcgtccagggttttagccgccgccgccgccgcccccgccccagccccccccccacagagagaagcgagcgacagcgaggtcgacgccatggtgcagcgcctgacgtaccggaagcggtacagntacgccaccaagtccaaccagaccagggttgtcaaaaccccaggagggaggcttgtg

SEQ ID NO: 19394 - DNA, 413 bp, Zea mays
  misc_feature (350)..(350): n is a, c, g, or t
  Coding DNA Sequence Number=SeqID_4991
gccgcatgttcgtccaacgtctctgcttcctgctccgactccgactccgaggatctccgactcctcctcccaaacctcctccccgcgtccgccgccgccgccccctcatccgaggcgcagctccaccaattccacctccccgcgcttccgtcccccatcaccgtccgcaccatcccttccctcgggctcaccttccagctctggccctccgccaccacgctcctccgcttcctcccagcctccccgcacctcctcccgcgcccgcccgccgcacactgcccgctcagcatcctggagctcggctccgggaccggcgccgcgggcctcgccctggcggcggctctcccggngcacaccgtcctctccgacctccccgccgcgctccccaatctccgccacaacgcctccctcaa

SEQ ID NO: 19395 - DNA, 270 bp, Zea mays
  misc_feature (153)..(153): n is a, c, g, or t
  Coding DNA Sequence Number=SeqID_4992
gccaccgacagaatccaccggcgtagcccggatggcgccggcggcggcggacatcccttccccgctcgctaggaggtggattcggggctccctcctccaggcggcggtgctgctcggcggacggcggtgtggctcggcggcggagtccgcggncctcgagcgcccttgacgcgacggcgtggccgttggctgcggggctgcgtggcgtgcggctggccggcggtgcccgctcggcccagatctgggccctttcggccccatctgggtttg

SEQ ID NO: 19396 - DNA, 142 bp, Zea mays; identical to SEQ ID NO: 19089
  Coding DNA Sequence Number=SeqID_4993

SEQ ID NO: 19397 - DNA, 216 bp, Zea mays
  Coding DNA Sequence Number=SeqID_4994
tggcctcgccgtctagctggcaccatcaccacctcgtcgccgtgagcagagatccaagcgggtcgccatcgcgacccctcgcccgtgtcctcggcgttggctgggcggtgctgttggagggcagcctgagcgccacacactcggctccatccttctgtccgcgctcacgccgcctgggcctcgtgatcgccgtcatcatctcgacggggcaccgct

SEQ ID NO: 19398 - DNA, 167 bp, Zea mays
  misc_feature (28)..(28): n is a, c, g, or t
  misc_feature (38)..(38): n is a, c, g, or t
  misc_feature (52)..(52): n is a, c, g, or t
  misc_feature (98)..(98): n is a, c, g, or t
  misc_feature (123)..(123): n is a, c, g, or t
  Coding DNA Sequence Number=SeqID_4995
accagctggactcttcataccattagcntttattatantccacgagctgcanaaggaatccggatattacacacatgtagggtgttggctcgttgccntcgagtctcctgtgctctcgctgcnagcgccatcctccacgcatacaaatgaatggactgcgattgaca

SEQ ID NO: 19399 - DNA, 93 bp, Zea mays
  misc_feature (42)..(42): n is a, c, g, or t
  misc_feature (51)..(51): n is a, c, g, or t
  misc_feature (63)..(63): n is a, c, g, or t
  misc_feature (65)..(65): n is a, c, g, or t
  Coding DNA Sequence Number=SeqID_4996
tgccgcgagattcgcgcaggattccaagaccgacctccgctnccagtcccnccgccgtccccncncctggtaggtggccgcggcaggcctacc

SEQ ID NO: 19400 - DNA, 322 bp, Zea mays
  misc_feature (42)..(42): n is a, c, g, or t
  misc_feature (48)..(48): n is a, c, g, or t
  misc_feature (106)..(106): n is a, c, g, or t
  misc_feature (110)..(110): n is a, c, g, or t
  misc_feature (124)..(124): n is a, c, g, or t
  misc_feature (137)..(137): n is a, c, g, or t
  misc_feature (171)..(171): n is a, c, g, or t
  misc_feature (173)..(173): n is a, c, g, or t
  misc_feature (181)..(181): n is a, c, g, or t
  misc_feature (217)..(217): n is a, c, g, or t
  misc_feature (220)..(220): n is a, c, g, or t
  misc_feature (245)..(245): n is a, c, g, or t
  misc_feature (253)..(253): n is a, c, g, or t
  misc_feature (259)..(259): n is a, c, g, or t
  misc_feature (272)..(272): n is a, c, g, or t
  misc_feature (277)..(277): n is a, c, g, or t
  misc_feature (289)..(289): n is a, c, g, or t
  misc_feature (297)..(297): n is a, c, g, or t
  Coding DNA Sequence Number=SeqID_4997
gacgcgacgcctcaatcgctcccctgcctctggtcacttcgnttccgntcccggttcccctcgggcacccagacatcgtcccgttcgctcgccaagagacaggacngganacatggcggacagntcaccgacgacanatcgccgagttcaaggaggccttcagcctcttcnanaggacggngacggttgcatcacaacaaggagctcggaactgtcntgngatcactgggtcaaaaccaaccganggttgagntcaganatgatcaacgagnccccncgacggaacggnacctccanttcccggagttcctaacctcatggc

SEQ ID NO: 19401 - DNA, 163 bp, Zea mays
  misc_feature (123)..(123): n is a, c, g, or t
  Coding DNA Sequence Number=SeqID_4998
aacctcgacttccaggctggcagggagggcggccgcaaggctcaaggtgggacggcatggttcggcacccgccgcaccatggccgccatccgcaccgcccatctcccacgtccaaacctccanttcaaggggggtcaccaagggctacgtacaaagaaatggg

SEQ ID NO: 19402 - DNA, 403 bp, Zea mays
  misc_feature (38)..(38): n is a, c, g, or t
  misc_feature (58)..(58): n is a, c, g, or t
  misc_feature (64)..(64): n is a, c, g, or t
  misc_feature (67)..(67): n is a, c, g, or t
  misc_feature (99)..(99): n is a, c, g, or t
  misc_feature (107)..(107): n is a, c, g, or t
  misc_feature (117)..(119): n is a, c, g, or t
  misc_feature (126)..(126): n is a, c, g, or t
  misc_feature (137)..(139): n is a, c, g, or t
  misc_feature (209)..(209): n is a, c, g, or t
  misc_feature (211)..(211): n is a, c, g, or t
  misc_feature (247)..(247): n is a, c, g, or t
  misc_feature (263)..(263): n is a, c, g, or t
  misc_feature (270)..(272): n is a, c, g, or t
  misc_feature (276)..(276): n is a, c, g, or t
  misc_feature (282)..(282): n is a, c, g, or t
  misc_feature (284)..(284): n is a, c, g, or t
  misc_feature (289)..(289): n is a, c, g, or t
  misc_feature (292)..(294): n is a, c, g, or t
  misc_feature (304)..(304): n is a, c, g, or t
  misc_feature (316)..(316): n is a, c, g, or t
  misc_feature (318)..(318): n is a, c, g, or t
  misc_feature (361)..(362): n is a, c, g, or t
  Coding DNA Sequence Number=SeqID_4999
ctctcctgctgataatggtgcgtctgcgctcctcctcntcccagaacgcagactgtcnttttcnccnaagaggcctgatggccctacctgcttgctgcnggaagtgnctctgcgctnnngcctggnctccatggatnnnatgtacatgcgacttggtgcacaccaccaatggcatgcatgtacaactgtgaccacactacaatcctgcntncgaaggagcatggcagcaccagaagatgagaaccgncatgctgggtgatctnggaaacnnnacanctgcancngatgntgnnncaaaaaatcngtgtacccgacngncccagatccccactgactgggccaaactcaatctttggcaganncttgttgttggttcacgctggatcctgatgatctttggaaa

SEQ ID NO: 19403 - DNA, 360 bp, Zea mays
  misc_feature (34)..(34): n is a, c, g, or t
  misc_feature (36)..(37): n is a, c, g, or t
  misc_feature (40)..(40): n is a, c, g, or t
  misc_feature (45)..(45): n is a, c, g, or t
  misc_feature (53)..(53): n is a, c, g, or t
  misc_feature (62)..(62): n is a, c, g, or t
  misc_feature (71)..(71): n is a, c, g, or t
  misc_feature (77)..(77): n is a, c, g, or t
  misc_feature (102)..(102): n is a, c, g, or t
  misc_feature (125)..(125): n is a, c, g, or t
  misc_feature (129)..(129): n is a, c, g, or t
  misc_feature (133)..(134): n is a, c, g, or t
  misc_feature (147)..(147): n is a, c, g, or t
  misc_feature (183)..(183): n is a, c, g, or t
  misc_feature (186)..(186): n is a, c, g, or t
  misc_feature (189)..(189): n is a, c, g, or t
  misc_feature (198)..(198): n is a, c, g, or t
  misc_feature (212)..(213): n is a, c, g, or t
  misc_feature (218)..(218): n is a, c, g, or t
  misc_feature (255)..(255): n is a, c, g, or t
  misc_feature (286)..(286): n is a, c, g, or t
  misc_feature (295)..(295): n is a, c, g, or t
  misc_feature (307)..(307): n is a, c, g, or t
  Coding DNA Sequence Number=SeqID_5000
aaagtggaatccagctatcaacatgtatgagtgncnntgnggacnaagatatnttccctccntatgctccntgctcnttctgcatgtgttgctaacgcgacnattttccctcaatgctcacaagntccnatannttcccttcttccnccataccttccatcgatgatagcttcagtatgtganaanccngctcttcanccctataggctccnncaagnaatcgcagcaagcaacatacctttatcacccttgttncaacaatcgccagccctatctttggtgcagncattggtanaaaccatcaggncacagcagctgcagcaactcgtgctacctgtgatcaaccaagtagctctggca

SEQ ID NO: 19404 - DNA, 105 bp, Zea mays
  Coding DNA Sequence Number=SeqID_5001
caggtcatgattcaggccggtcgtccaaggtcatcatcaaggttcctgacggtcatgcagcgccacggctaccattgggagaggttcgaggtacgttgatgacca

SEQ ID NO: 19405 - DNA, 192 bp, Zea mays
  Coding DNA Sequence Number=SeqID_5002
cgccgcacgttcacagttcacacacacaggcacagctcgcagcatccagctcccgtcgagctcactcgctcactccagtctatctacccagtctcccttcggttcaggagctcgatttcccgcgcgccgtctgccaacgagatggccgtgcctgtggaaggggttcggcgtcttcgccctgtgactggacgg

SEQ ID NO: 19406 - DNA, 343 bp, Zea mays
  misc_feature (40)..(40): n is a, c, g, or t
  misc_feature (43)..(43): n is a, c, g, or t
  misc_feature (47)..(47): n is a, c, g, or t
  misc_feature (49)..(49): n is a, c, g, or t
  misc_feature (57)..(57): n is a, c, g, or t
  misc_feature (70)..(70): n is a, c, g, or t
  misc_feature (82)..(82): n is a, c, g, or t
  misc_feature (94)..(94): n is a, c, g, or t
  misc_feature (139)..(139): n is a, c, g, or t
  misc_feature (152)..(152): n is a, c, g, or t
  misc_feature (173)..(173): n is a, c, g, or t
  misc_feature (194)..(194): n is a, c, g, or t
  misc_feature (196)..(196): n is a, c, g, or t
  misc_feature (245)..(245): n is a, c, g, or t
  misc_feature (250)..(250): n is a, c, g, or t
  misc_feature (262)..(262): n is a, c, g, or t
  misc_feature (273)..(274): n is a, c, g, or t
  misc_feature (278)..(278): n is a, c, g, or t
  misc_feature (281)..(281): n is a, c, g, or t
  misc_feature (283)..(283): n is a, c, g, or t
  misc_feature (286)..(287): n is a, c, g, or t
  misc_feature (293)..(294): n is a, c, g, or t
  misc_feature (297)..(297): n is a, c, g, or t
  misc_feature (302)..(302): n is a, c, g, or t
  misc_feature (313)..(313): n is a, c, g, or t
  misc_feature (317)..(318): n is a, c, g, or t
  Coding DNA Sequence Number=SeqID_5003
agcatatgtttcccctccgtatgcctccttgcgtctttcngcnatgngnaaggtaancggcgacgaattntcccgtcaatgntcacaaggtccnatagcttcccttcttcccccataccttccatcaatgatagcttcngtatgtgaaaacncagcttcttcaccctataggntccaacaagcaatcgcagcangnaacatacctttatcacccttgtttcaacaatcgccagccctatctttgntgcanccattggtacanaccatcagggnnactncancntgnncaaacnngangatanctgcggatcanttcnngtaaatcttctgcatcatatcattt

SEQ ID NO: 19407 - DNA, 123 bp, Zea mays
  misc_feature (57)..(57): n is a, c, g, or t
  Coding DNA Sequence Number=SeqID_5004
cattccgatcctcgcttctatttggcggctaaccctagggcctagcttcgttttggnggtggctgctctggtgcgcagtgcagtgcctggcggctgctcttcagctcttgtgcgcactgcgca

SEQ ID NO: 19408 - DNA, 154 bp, Zea mays
  misc_feature (59)..(59): n is a, c, g, or t
  misc_feature (73)..(73): n is a, c, g, or t
  misc_feature (84)..(84): n is a, c, g, or t
  misc_feature (92)..(92): n is a, c, g, or t
  misc_feature (98)..(98): n is a, c, g, or t
  misc_feature (102)..(103): n is a, c, g, or t
  misc_feature (121)..(121): n is a, c, g, or t
  Coding DNA Sequence Number=SeqID_5005
gggataagcgggtacctgcgcccaagtccccctgaaagagggggggacaagaaaggtangaaaatgcaagaanggcgtggagangtagaganctaatnttcnnggcctgaaaaagggcacncgacatcggcatctcctcgagggcatgtgcatc

SEQ ID NO: 19409 - DNA, 411 bp, Zea mays
  misc_feature (26)..(27): n is a, c, g, or t
  misc_feature (29)..(29): n is a, c, g, or t
  misc_feature (34)..(34): n is a, c, g, or t
  misc_feature (36)..(36): n is a, c, g, or t
  misc_feature (44)..(44): n is a, c, g, or t
  misc_feature (46)..(46): n is a, c, g, or t
  misc_feature (48)..(48): n is a, c, g, or t
  misc_feature (51)..(51): n is a, c, g, or t
  misc_feature (54)..(54): n is a, c, g, or t
  misc_feature (63)..(63): n is a, c, g, or t
  misc_feature (66)..(66): n is a, c, g, or t
  misc_feature (69)..(70): n is a, c, g, or t
  misc_feature (74)..(74): n is a, c, g, or t
  misc_feature (78)..(78): n is a, c, g, or t
  misc_feature (80)..(80): n is a, c, g, or t
  misc_feature (89)..(89): n is a, c, g, or t
  misc_feature (93)..(93): n is a, c, g, or t
  misc_feature (96)..(96): n is a, c, g, or t
  misc_feature (100)..(100): n is a, c, g, or t
  misc_feature (105)..(105): n is a, c, g, or t
  misc_feature (111)..(111): n is a, c, g, or t
  misc_feature (116)..(116): n is a, c, g, or t
  misc_feature (118)..(118): n is a, c, g, or t
  misc_feature (122)..(123): n is a, c, g, or t
  misc_feature (127)..(127): n is a, c, g, or t
  misc_feature (135)..(135): n is a, c, g, or t
  misc_feature (139)..(139): n is a, c, g, or t
  misc_feature (142)..(142): n is a, c, g, or t
  misc_feature (145)..(145): n is a, c, g, or t
  misc_feature (150)..(150): n is a, c, g, or t
  misc_feature (153)..(153): n is a, c, g, or t
  misc_feature (159)..(159): n is a, c, g, or t
  misc_feature (162)..(162): n is a, c, g, or t
  misc_feature (164)..(164): n is a, c, g, or t
  misc_feature (168)..(169): n is a, c, g, or t
  misc_feature (171)..(171): n is a, c, g, or t
  misc_feature (179)..(179): n is a, c, g, or t
  misc_feature (181)..(183): n is a, c, g, or t
  misc_feature (189)..(189): n is a, c, g, or t
  misc_feature (193)..(193): n is a, c, g, or t
  misc_feature (205)..(205): n is a, c, g, or t
  misc_feature (219)..(220): n is a, c, g, or t
  misc_feature (224)..(224): n is a, c, g, or t
  misc_feature (244)..(244): n is a, c, g, or t
  misc_feature (246)..(246): n is a, c, g, or t
  misc_feature (257)..(258): n is a, c, g, or t
  misc_feature (261)..(261): n is a, c, g, or t
  misc_feature (263)..(263): n is a, c, g, or t
  misc_feature (268)..(268): n is a, c, g, or t
  misc_feature (288)..(288): n is a, c, g, or t
  misc_feature (295)..(295): n is a, c, g, or t
  misc_feature (320)..(320): n is a, c, g, or t
  misc_feature (338)..(338): n is a, c, g, or t
  misc_feature (347)..(347): n is a, c, g, or t
  misc_feature (358)..(358): n is a, c, g, or t
  misc_feature (362)..(362): n is a, c, g, or t
  misc_feature (369)..(369): n is a, c, g, or t
  Coding DNA Sequence Number=SeqID_5006
atctgcttattattgtcgacgcatcnnantgatntnaaggggangncngcngcnatgataganganaannggcngccnanatattgttncctnctnatgntcctngctctntctanangggnngctnacgcgaanattntcnctncatgntcnctggcnccnanaagnncncttcttcncnnntacctnacanctattatagatncgatatgggagaanncagntcttccaccatataggcttnanccagcaaatcnnagnangcaanatacctttatcggcccttgntgtttcnagaatcgacaggcctatcttttggnggagtcattggtacaaancatcagggnacaacagctgnaggnaactcgnggctacctctgatcaaccaaagaagctctgggaaacctttct

SEQ ID NO: 19410 - DNA, 236 bp, Zea mays
  misc_feature (35)..(35): n is a, c, g, or t
  misc_feature (39)..(39): n is a, c, g, or t
  misc_feature (43)..(43): n is a, c, g, or t
  misc_feature (67)..(67): n is a, c, g, or t
  misc_feature (99)..(99): n is a, c, g, or t
  misc_feature (103)..(103): n is a, c, g, or t
  misc_feature (108)..(108): n is a, c, g, or t
  misc_feature (128)..(128): n is a, c, g, or t
  Coding DNA Sequence Number=SeqID_5007
atagagaggatcgtagagtagcaacagcatgaagntggncatnttttcgcgtcctgatgctgcttgntgctttctgccagtgctgctgcggtgaccatnttcngaccntgctcgcaagctgctatagntgtcccttcttcccccgtacctctcaccagcggtgtcttcggtatgtgaaaacccaattcttcaaccctataggatccaacaggcaatcgcagctggcatcttacctt

SEQ ID NO: 19411 - DNA, 316 bp, Zea mays
  misc_feature (36)..(36): n is a, c, g, or t
  misc_feature (55)..(55): n is a, c, g, or t
  misc_feature (85)..(85): n is a, c, g, or t
  misc_feature (101)..(101): n is a, c, g, or t
  misc_feature (125)..(125): n is a, c, g, or t
  misc_feature (131)..(131): n is a, c, g, or t
  misc_feature (138)..(138): n is a, c, g, or t
  misc_feature (145)..(145): n is a, c, g, or t
  misc_feature (152)..(152): n is a, c, g, or t
  misc_feature (168)..(168): n is a, c, g, or t
  misc_feature (198)..(198): n is a, c, g, or t
  misc_feature (222)..(222): n is a, c, g, or t
  misc_feature (231)..(231): n is a, c, g, or t
  misc_feature (234)..(234): n is a, c, g, or t
  misc_feature (247)..(247): n is a, c, g, or t
  Coding DNA Sequence Number=SeqID_5008
cccaacccccgtcggagagagagagagagagatggnatgcggtggcggagatgcngcccctcgcgccggtggtgtaccgccgcgngccggagatgaagganaaggtggaggcgtgcggtggtggnacctgnaggacgngaccggngagacgntggtatgcggcgatcntcgcggcggggagagcgctcttcctgatgnggcttcgagccgtgaggtctacgncatcctcgntgngcagctgctcctncaccaccgccgtctccgccctcaccgttctccaccccaccctcaacgccacgctctccgactccccggg

SEQ ID NO: 19412 - DNA, 192 bp, Zea mays
  misc_feature (49)..(49): n is a, c, g, or t
  misc_feature (71)..(71): n is a, c, g, or t
  misc_feature (80)..(80): n is a, c, g, or t
  misc_feature (86)..(86): n is a, c, g, or t
  misc_feature (104)..(104): n is a, c, g, or t
  misc_feature (128)..(128): n is a, c, g, or t
  misc_feature (132)..(132): n is a, c, g, or t
  Coding DNA Sequence Number=SeqID_5009
gctaaaccgtcaagctggtggacatcgacttcactgccgcctggtgcgntccatgctgcgccatcgccccnctgttcggngaacangccaagaagttcactcangtcggcttcctgaaggtggacgtngacnaagtgaaggaagtcaccgcggtctacttacgtttaggtgatgccgaccttccagttcgtg

SEQ ID NO: 19413 - DNA, 40 bp, Zea mays
  Coding DNA Sequence Number=SeqID_5010
ggacacgcgggcgcgtgactggcgatggctcgtgcgctcc

SEQ ID NO: 19414 - DNA, 278 bp, Zea mays
  misc_feature (34)..(34): n is a, c, g, or t
  misc_feature (54)..(54): n is a, c, g, or t
  misc_feature (62)..(62): n is a, c, g, or t
  misc_feature (71)..(71): n is a, c, g, or t
  misc_feature (81)..(81): n is a, c, g, or t
  misc_feature (83)..(83): n is a, c, g, or t
  misc_feature (86)..(86): n is a, c, g, or t
  misc_feature (88)..(89): n is a, c, g, or t
  misc_feature (94)..(95): n is a, c, g, or t
  misc_feature (98)..(98): n is a, c, g, or t
  misc_feature (103)..(103): n is a, c, g, or t
  misc_feature (106)..(106): n is a, c, g, or t
  misc_feature (111)..(111): n is a, c, g, or t
  misc_feature (114)..(114): n is a, c, g, or t
  misc_feature (136)..(136): n is a, c, g, or t
  misc_feature (156)..(157): n is a, c, g, or t
  misc_feature (164)..(164): n is a, c, g, or t
  misc_feature (168)..(168): n is a, c, g, or t
  misc_feature (170)..(170): n is a, c, g, or t
  misc_feature (199)..(199): n is a, c, g, or t
  misc_feature (234)..(235): n is a, c, g, or t
  Coding DNA Sequence Number=SeqID_5011
acgatcgcccgttgcctactctcgtccacactgnctcgccggggcggcggtggncggcggcntctccgcgnaccgtagatntngcncnnaaganncanatccnaancccgnatnttctcttcttccccctccttcnccattgtccccgccgctgcnntgggcancggngncgccggccgccaccgcctccgatgccggngccaaagaagaagttgctcatcttcgactccgagnnggaattctcgcggtttcctcttgcgaagtaacttgcggagtgg

SEQ ID NO: 19415 - DNA, 95 bp, Zea mays
  misc_feature (30)..(30): n is a, c, g, or t
  misc_feature (46)..(46): n is a, c, g, or t
  Coding DNA Sequence Number=SeqID_5012
tattgctcctttcactctgagcatcggganccgagtgaccatgagntcgacaggcggacggagcacgatgggcgtccgagagagtcttggctgga

SEQ ID NO: 19416 - DNA, 342 bp, Zea mays
  misc_feature (31)..(31): n is a, c, g, or t
  misc_feature (39)..(39): n is a, c, g, or t
  misc_feature (42)..(44): n is a, c, g, or t
  misc_feature (46)..(46): n is a, c, g, or t
  misc_feature (52)..(52): n is a, c, g, or t
  misc_feature (56)..(56): n is a, c, g, or t
  misc_feature (61)..(61): n is a, c, g, or t
  misc_feature (67)..(68): n is a, c, g, or t
  misc_feature (75)..(76): n is a, c, g, or t
  misc_feature (79)..(80): n is a, c, g, or t
  misc_feature (83)..(83): n is a, c, g, or t
  misc_feature (85)..(85): n is a, c, g, or t
  misc_feature (88)..(88): n is a, c, g, or t
  misc_feature (90)..(90): n is a, c, g, or t
  misc_feature (94)..(94): n is a, c, g, or t
  misc_feature (106)..(107): n is a, c, g, or t
  misc_feature (112)..(112): n is a, c, g, or t
  misc_feature (119)..(119): n is a, c, g, or t
  misc_feature (148)..(148): n is a, c, g, or t
  misc_feature (158)..(158): n is a, c, g, or t
  misc_feature (166)..(166): n is a, c, g, or t
  misc_feature (173)..(174): n is a, c, g, or t
  misc_feature (185)..(185): n is a, c, g, or t
  misc_feature (187)..(187): n is a, c, g, or t
  misc_feature (191)..(191): n is a, c, g, or t
  misc_feature (198)..(198): n is a, c, g, or t
  misc_feature (200)..(200): n is a, c, g, or t
  misc_feature (213)..(213): n is a, c, g, or t
  misc_feature (220)..(220): n is a, c, g, or t
  misc_feature (224)..(224): n is a, c, g, or t
  misc_feature (231)..(233): n is a, c, g, or t
  misc_feature (237)..(238): n is a, c, g, or t
  misc_feature (241)..(241): n is a, c, g, or t
  misc_feature (256)..(256): n is a, c, g, or t
  misc_feature (266)..(266): n is a, c, g, or t
  Coding DNA Sequence Number=SeqID_5013
aggtcatcgcctccgattatttcgtgggcgntgaggtcntannncntatggngttnctccnataccnncaggcanngcnngcntnccnangggngaaaccgggtcnnctccnctagagngtcctccgagatgatcggatggcgtccgnatactatttntcacgccntgattcnncaatcgtcagncntatntgttggngnaggaattggtacnaaccatnacgntgacagnnngtgnngcngctcgtgctacctgngatcaaccangtagctctggtgaaacctttctccctactctcagcaacaacaatttcttccattcaaccaactgtctacattggaa

SEQ ID NO: 19417 - DNA, 58 bp, Zea mays
  Coding DNA Sequence Number=SeqID_5014
aagggtctccaagaatcgggtaatgctctccacttttaagctgttggtacttgcttgc

SEQ ID NO: 19418 - DNA, 446 bp, Zea mays
  misc_feature (31)..(31): n is a, c, g, or t
  misc_feature (34)..(34): n is a, c, g, or t
  misc_feature (43)..(44): n is a, c, g, or t
  misc_feature (71)..(72): n is a, c, g, or t
  misc_feature (76)..(76): n is a, c, g, or t
  misc_feature (87)..(87): n is a, c, g, or t
  misc_feature (91)..(91): n is a, c, g, or t
  misc_feature (95)..(96): n is a, c, g, or t
  misc_feature (102)..(102): n is a, c, g, or t
  misc_feature (104)..(104): n is a, c, g, or t
  misc_feature (107)..(107): n is a, c, g, or t
  misc_feature (112)..(112): n is a, c, g, or t
  misc_feature (114)..(114): n is a, c, g, or t
  misc_feature (124)..(124): n is a, c, g, or t
  misc_feature (128)..(128): n is a, c, g, or t
  misc_feature (132)..(135): n is a, c, g, or t
  misc_feature (140)..(140): n is a, c, g, or t
  misc_feature (148)..(148): n is a, c, g, or t
  misc_feature (150)..(150): n is a, c, g, or t
  misc_feature (155)..(157): n is a, c, g, or t
  misc_feature (160)..(160): n is a, c, g, or t
  misc_feature (167)..(167): n is a, c, g, or t
  misc_feature (177)..(178): n is a, c, g, or t
  misc_feature (182)..(182): n is a, c, g, or t
  misc_feature (186)..(186): n is a, c, g, or t
  misc_feature (196)..(196): n is a, c, g, or t
  misc_feature (203)..(203): n is a, c, g, or t
  misc_feature (211)..(212): n is a, c, g, or t
  misc_feature (225)..(225): n is a, c, g, or t
  misc_feature (227)..(227): n is a, c, g, or t
  misc_feature (236)..(237): n is a, c, g, or t
  misc_feature (239)..(239): n is a, c, g, or t
  misc_feature (248)..(249): n is a, c, g, or t
  misc_feature (253)..(254): n is a, c, g, or t
  misc_feature (258)..(258): n is a, c, g, or t
  misc_feature (261)..(261): n is a, c, g, or t
  misc_feature (268)..(268): n is a, c, g, or t
  misc_feature (272)..(272): n is a, c, g, or t
  misc_feature (288)..(289): n is a, c, g, or t
  misc_feature (303)..(303): n is a, c, g, or t
  misc_feature (306)..(307): n is a, c, g, or t
  misc_feature (320)..(320): n is a, c, g, or t
  misc_feature (343)..(343): n is a, c, g, or t
  misc_feature (348)..(348): n is a, c, g, or t
  misc_feature (362)..(362): n is a, c, g, or t
  misc_feature (366)..(366): n is a, c, g, or t
  Coding DNA Sequence Number=SeqID_5015
tattcctggatacgacttgacgcatgatacntgntcctgtcannctaggaccctcttaggcatgcaggggnngccntattgtttgcnatcntganncatctngntcntccancncgaggtgctnccgnggcnnnnattcncgctagancncaacnnnacngtctctncggagaccgnngcgngatntgaatacctnactatanaatcctannggctacaagaggntnatcgcagtnngnatcttacgnncgtnngcantgnccgtacnacanccatatgccctattgnnacaaccatccttantgnntctatatctccanagaatcgcagcacaacaactacnacatnagttgcttccaacnatcnatcaagtagttgcagcgaaccttgctgctttacctccagcaacaacaatttcttccattcaatcaactagctgggggtga

SEQ ID NO: 19419 - DNA, 356 bp, Zea mays
  misc_feature (35)..(35): n is a, c, g, or t
  misc_feature (37)..(37): n is a, c, g, or t
  misc_feature (45)..(45): n is a, c, g, or t
  misc_feature (48)..(48): n is a, c, g, or t
  misc_feature (50)..(50): n is a, c, g, or t
  misc_feature (55)..(55): n is a, c, g, or t
  misc_feature (59)..(59): n is a, c, g, or t
  misc_feature (61)..(61): n is a, c, g, or t
  misc_feature (72)..(72): n is a, c, g, or t
  misc_feature (79)..(79): n is a, c, g, or t
  misc_feature (84)..(84): n is a, c, g, or t
  misc_feature (86)..(86): n is a, c, g, or t
  misc_feature (88)..(89): n is a, c, g, or t
  misc_feature (92)..(92): n is a, c, g, or t
  misc_feature (98)..(98): n is a, c, g, or t
  misc_feature (100)..(100): n is a, c, g, or t
  misc_feature (103)..(103): n is a, c, g, or t
  misc_feature (115)..(115): n is a, c, g, or t
  misc_feature (130)..(130): n is a, c, g, or t
  misc_feature (140)..(142): n is a, c, g, or t
  misc_feature (144)..(144): n is a, c, g, or t
  misc_feature (151)..(151): n is a, c, g, or t
  misc_feature (153)..(153): n is a, c, g, or t
  misc_feature (158)..(159): n is a, c, g, or t
  misc_feature (167)..(167): n is a, c, g, or t
  misc_feature (169)..(169): n is a, c, g, or t
  misc_feature (174)..(174): n is a, c, g, or t
  misc_feature (187)..(187): n is a, c, g, or t
  misc_feature (190)..(191): n is a, c, g, or t
  misc_feature (204)..(204): n is a, c, g, or t
  misc_feature (211)..(212): n is a, c, g, or t
  misc_feature (219)..(219): n is a, c, g, or t
  misc_feature (248)..(248): n is a, c, g, or t
  misc_feature (328)..(328): n is a, c, g, or t
  Coding DNA Sequence Number=SeqID_5016
tggttgatttgctctgcctcggcctccgcctgacngncttgctgnagntnaacancttncnactgacgctgnggccgcnaccgngncnnttnttgcgngngangcacaacgatangtctctccggagacngacggcagannngnatacctnantatannatcttacngnctaanagaggacatcgcngtnngcatcttacggcngatagcnntgaccgnccaacaaccatatgccctattgctacaancatccttaatgaatctatatctccaaagaatcgcagcacaacaactacaacaacagtttgcttccaacaatcaatcaagnagttgcagcggaaccttgctgcttacct

SEQ ID NO: 19420 - DNA, 157 bp, Zea mays
  misc_feature (26)..(26): n is a, c, g, or t
  misc_feature (129)..(129): n is a, c, g, or t
  misc_feature (132)..(132): n is a, c, g, or t
  Coding DNA Sequence Number=SeqID_5017
gcattgctccgcctgcaaccagtgcntatgagatctgtttcctgcgctgccaagaagggatacggtgggacaaggtttgtgaaattgtgaagaagcagcttgctcttcctgaccacactggaagtttgnggngaatcgaaattctctgaacttggtg

SEQ ID NO: 19421 - DNA, 371 bp, Zea mays
  misc_feature (58)..(58): n is a, c, g, or t
  misc_feature (78)..(78): n is a, c, g, or t
  misc_feature (92)..(92): n is a, c, g, or t
  misc_feature (106)..(106): n is a, c, g, or t
  misc_feature (117)..(117): n is a, c, g, or t
  misc_feature (129)..(129): n is a, c, g, or t
  misc_feature (160)..(160): n is a, c, g, or t
  misc_feature (310)..(310): n is a, c, g, or t
  Coding DNA Sequence Number=SeqID_5018
tcacagtcaaacaccgcgaagccgcccccgctcccaaacccgaccgagcaaagcgcanagccccccaaccgcggatcnatccggcagcatcnatggcgcccaaggnggagaaaaagncggcgggcgaanaagcccgccggaggaggagcccgcgaccganaaaggcggagaagggctccgggcagggaaaaaagccgaaggcggagaaacgccctccccgcggggcaggtccgggggccggcgaggggcaagaaagggcaagaagaaagccaagaaagaagcgtggaggacctacaagatctacatttcnttcaaggtgggttcaaggcaggtgcaccccgacatcgggcattctcgtcccaaggccatgt

SEQ ID NO: 19422 - DNA, 256 bp, Zea mays
  Coding DNA Sequence Number=SeqID_5019
aagcaagcacgcagcgtcagctcctctccccacctcacgcacgttttctcccagccaccgcacggcagcttccctgctccactcggcatctctgcttctcccagcgccctggctctgctctaccttcacagcgagctcgccctcaagccatggtggctgccgccgccatctccccttggtactcgccgagttcgccctccctctgtgccatgccccctgtacggcgccctctctgctccagtttgtttttccagcc

SEQ ID NO: 19423 - DNA, 339 bp, Zea mays
  misc_feature (174)..(174): n is a, c, g, or t
  misc_feature (229)..(229): n is a, c, g, or t
  misc_feature (258)..(258): n is a, c, g, or t
  misc_feature (264)..(264): n is a, c, g, or t
  Coding DNA Sequence Number=SeqID_5020
ctccatttattttgcttgatccttgagaaagaagaagaaggaaagacgagagctagaagcgaaagggagaaaaagcagttctttcagctaggcaggagggcacaggaaaggaggagatggcgtcaaagaggattcagaaggagctcaaggaatctgcagaaggaccctcccacncggtggcaggtgcagggtcctggttggtgaagacatgtttccactggcagaaacnaataatggggtccatctgatagcccatanttcttngggggggaggttttcctagttacaatccattttcctcctgattatcctttcaacccaccaaaaggtggcatttcg

SEQ ID NO: 19424 - DNA, 111 bp, Zea mays
  misc_feature (36)..(36): n is a, c, g, or t
  misc_feature (53)..(53): n is a, c, g, or t
  misc_feature (82)..(82): n is a, c, g, or t
  Coding DNA Sequence Number=SeqID_5021
gagtataaaccctaaaatgaatgactcgcgtgcctntccttcgctagcggaancgccctcccctcgcccggaggtaaggggnttcaggcaccgagatgctcgccactggct

SEQ ID NO: 19425 - DNA, 220 bp, Zea mays
  misc_feature (81)..(81): n is a, c, g, or t
  misc_feature (125)..(125): n is a, c, g, or t
  Coding DNA Sequence Number=SeqID_5022
cacctcctcgtccacgaggtgaggaaaccctagcgaccgaccatggcgttgctcccgcgcaccgcgcggctggccctcctnttccacccccgcgggcggtactcccgctgcccgcttgctgcggnggccctccccgacgtccccagcggccaatacgggggcgcccccccaccggcgatgtcaagaacggccggagttcgtggtctctaaggtggacgac

SEQ ID NO: 19426 - DNA, 158 bp, Zea mays
  misc_feature (40)..(40): n is a, c, g, or t
  misc_feature (53)..(53): n is a, c, g, or t
  misc_feature (85)..(85): n is a, c, g, or t
  misc_feature (93)..(93): n is a, c, g, or t
  misc_feature (117)..(117): n is a, c, g, or t
  misc_feature (121)..(122): n is a, c, g, or t
  Coding DNA Sequence Number=SeqID_5023
atattagtgcgaccaacctagcaacatggggcgggccctntcgtcgtgccacncgatggacagctcgggcggttttcgcctcgtnatgctccntggtctttctggaagtggtgctanagcnnccattttcccgtgatgctcaggagctcctatagctt

SEQ ID NO: 19427 - DNA, 279 bp, Zea mays
  misc_feature (34)..(34): n is a, c, g, or t
  misc_feature (153)..(153): n is a, c, g, or t
  misc_feature (220)..(220): n is a, c, g, or t
  misc_feature (251)..(251): n is a, c, g, or t
  Coding DNA Sequence Number=SeqID_5024
gctggatctcccgtggtgcggagcgcgctgaaanccatggaatggtcggtggtgcccttctgcctcttcctgctcatggaatcctactggaagtacgagacgcgccccacctgcgacgacgagcacgcctgcaccccctccgagcacctcggnccaccagaagcccaatcatgaaagtcgcagcggaacgcgctcctcatcgccgccgcgctgctccctnctactggatccctcttctccgtcaccccagnttcgtcgtcagggctcgagcaagatgca

SEQ ID NO: 19428 - DNA, 374 bp, Zea mays
  misc_feature (27)..(27): n is a, c, g, or t
  misc_feature (29)..(29): n is a, c, g, or t
  misc_feature (31)..(32): n is a, c, g, or t
  misc_feature (55)..(55): n is a, c, g, or t
  misc_feature (58)..(58): n is a, c, g, or t
  misc_feature (62)..(62): n is a, c, g, or t
  misc_feature (70)..(70): n is a, c, g, or t
  misc_feature (76)..(76): n is a, c, g, or t
  misc_feature (81)..(81): n is a, c, g, or t
  misc_feature (102)..(102): n is a, c, g, or t
  misc_feature (105)..(105): n is a, c, g, or t
  misc_feature (140)..(140): n is a, c, g, or t
  misc_feature (143)..(143): n is a, c, g, or t
  misc_feature (145)..(145): n is a, c, g, or t
  misc_feature (150)..(150): n is a, c, g, or t
  misc_feature (159)..(159): n is a, c, g, or t
  misc_feature (175)..(175): n is a, c, g, or t
  misc_feature (178)..(178): n is a, c, g, or t
  misc_feature (187)..(187): n is a, c, g, or t
  misc_feature (190)..(190): n is a, c, g, or t
  misc_feature (195)..(195): n is a, c, g, or t
  misc_feature (198)..(198): n is a, c, g, or t
  misc_feature (203)..(203): n is a, c, g, or t
  misc_feature (207)..(208): n is a, c, g, or t
  misc_feature (213)..(213): n is a, c, g, or t
  misc_feature (217)..(217): n is a, c, g, or t
  misc_feature (234)..(235): n is a, c, g, or t
  misc_feature (247)..(247): n is a, c, g, or t
  misc_feature (258)..(258): n is a, c, g, or t
  misc_feature (269)..(269): n is a, c, g, or t
  misc_feature (271)..(271): n is a, c, g, or t
  misc_feature (274)..(274): n is a, c, g, or t
  misc_feature (292)..(292): n is a, c, g, or t
  misc_feature (295)..(295): n is a, c, g, or t
  misc_feature (308)..(308): n is a, c, g, or t
  misc_feature (318)..(318): n is a, c, g, or t
  Coding DNA Sequence Number=SeqID_5025
gcgccacttgtgtgaggcgaactactntngnngtcgaagagtgccagcgatctgntcnatcngcgaatgncaaggngcccngctcggggcaggtgggcttcnctntggcccagaaatgagtgatctttgacggataagtnctngnatatngagccgaanccctggcggactgtancgncctgaaggnatntacgnttnccgtngggnntaggntccncgttggtatcattgagnnctcgctgcaganggctcgctcgnaagtacaaccngnacnatgatgatctgccgcaantgntatgtacgactgngccctagggntgtcaactgccgcaagaataagtgtggtcacagcaaccagctgagggccaagaaga

SEQ ID NO: 19429 - DNA, 389 bp, Zea mays
  misc_feature (246)..(246): n is a, c, g, or t
  misc_feature (249)..(249): n is a, c, g, or t
  misc_feature (252)..(252): n is a, c, g, or t
  misc_feature (321)..(321): n is a, c, g, or t
  misc_feature (356)..(356): n is a, c, g, or t
  Coding DNA Sequence Number=SeqID_5026
aggaagaggacagccaaatcctcagtcctcaggctgctcacagttcgtgctaccccctcccaccccggtagtctatctactgccttcgctgctcaacatggcgctccaggcggcgacgtccttcctcccctcggccctctccgcgcgggaagggaggggtcggtgaaggactcggcggtttcttgggtgttcttctcgcggatggcctcaagctggagaccgctgctctgggtctacgccaccaanggnggnggattttggactgaggctactgcttcttttaccctacatcatcttctatgcccattcccatcattaggnctttaggggagcttgcgtgcaccaatttccacggnctacttaaatgtaatggaagcttcttctgtcag

SEQ ID NO: 19430 - DNA, 247 bp, Zea mays
  misc_feature (108)..(108): n is a, c, g, or t
  misc_feature (206)..(206): n is a, c, g, or t
  misc_feature (209)..(209): n is a, c, g, or t
  Coding DNA Sequence Number=SeqID_5027
agaacctcgagaaaggtctggcggggattctggtgaagggcgccaagggtaagggagctcaaggtcaaggggcccccgtgcggaggccctaccaaggtgctccacatnccccaccaggaagtctcccttggggggagaaggtaccaacaacctggggatcgcttttgagatgaggattcacaagagggtgatcggatctcgtcagnacncccagacgttgtcaagcagaatcacctcgatcactatt

SEQ ID NO: 19431 - DNA, 330 bp, Zea mays
  misc_feature (28)..(28): n is a, c, g, or t
  misc_feature (47)..(47): n is a, c, g, or t
  misc_feature (51)..(51): n is a, c, g, or t
  misc_feature (85)..(85): n is a, c, g, or t
  misc_feature (106)..(106): n is a, c, g, or t
  misc_feature (114)..(114): n is a, c, g, or t
  misc_feature (140)..(140): n is a, c, g, or t
  misc_feature (142)..(142): n is a, c, g, or t
  misc_feature (210)..(210): n is a, c, g, or t
  misc_feature (236)..(236): n is a, c, g, or t
  misc_feature (280)..(280): n is a, c, g, or t
  misc_feature (292)..(292): n is a, c, g, or t
  misc_feature (305)..(305): n is a, c, g, or t
  Coding DNA Sequence Number=SeqID_5028
caggtcggctggcttcagtatgctccanctcctcgggcgccgtggtnttgncgtacctgaccgccgtgatctagccgcctccgantgtatatgccgcctgcgtatntatctgcngccgcatcagcagccgcaagcatggnantaccccactcaaccaccgcagctaagcccgtgccagcagttcggatcctgcggcgtcggcagcgtcgncagcccgttcctgggccagtgcgtcnagttcctgaggcaccagtgcagcccggcggcgacgtcctacggntcgtcacagtgncaggcgctgcagnagcagtgctgccaccagatcaggca

SEQ ID NO: 19432 - DNA, 186 bp, Zea mays
  Coding DNA Sequence Number=SeqID_5029
catcagctgatcaataaggacaagtcaatcgatgataggagtaccagttacaagtttcttgtgtccaatcatagatcacagcagcatgcttccggtaattccataaaagctagtgcgcagtgcgaccttcttgtgcttttgtggaattaccggaagcatgctgctgtgtccaatgattggacacaa

SEQ ID NO: 19433 - DNA, 94 bp, Zea mays
  Coding DNA Sequence Number=SeqID_5030
gtccaatcattggacacagcagcatgcttccggtaattccacaaaagcacaagaaggtcgcactgcgcactagcttttatggaattaccggaag

SEQ ID NO: 19434 - DNA, 181 bp, Zea mays
  misc_feature (29)..(29): n is a, c, g, or t
  misc_feature (49)..(49): n is a, c, g, or t
  misc_feature (62)..(62): n is a, c, g, or t
  misc_feature (85)..(85): n is a, c, g, or t
  misc_feature (121)..(122): n is a, c, g, or t
  misc_feature (135)..(135): n is a, c, g, or t
  misc_feature (139)..(139): n is a, c, g, or t
  misc_feature (143)..(143): n is a, c, g, or t
  Coding DNA Sequence Number=SeqID_5031
ggccgccgttccatgtcgacagagacganccgacagcgccatccgattnctgcgccgctgancatggacgatcgtcgtgcatggncaactttgtcacagctgatcgcgttgcgctgtgtanncggctggtagcanaacnaggntcgcggactccagaatccgactactttgcctactgcgt

SEQ ID NO: 19435 - DNA, 254 bp, Zea mays
  misc_feature (51)..(51): n is a, c, g, or t
  misc_feature (93)..(93): n is a, c, g, or t
  misc_feature (99)..(99): n is a, c, g, or t
  misc_feature (129)..(129): n is a, c, g, or t
  misc_feature (135)..(135): n is a, c, g, or t
  misc_feature (144)..(144): n is a, c, g, or t
  misc_feature (151)..(151): n is a, c, g, or t
  misc_feature (161)..(161): n is a, c, g, or t
  misc_feature (175)..(175): n is a, c, g, or t
  misc_feature (186)..(187): n is a, c, g, or t
  misc_feature (193)..(193): n is a, c, g, or t
  misc_feature (196)..(196): n is a, c, g, or t
  misc_feature (208)..(208): n is a, c, g, or t
  Coding DNA Sequence Number=SeqID_5032
gccgctacgcgcagctgtgtaggcacgggtgaccccgtctacctcgtgcgncgtcctggagtacctcgcgggcgaggtgctcgagctcgccgntcaacncgttaagggacaacaagaagacgcgcatcntcccgngccacgtgntcctcgncatccgcaangacgaggagctcgngaagctgctgnncgacgncantatcggccacgnagtggtcctccccaacatccacactgtgctcctccccaagaatgtg

SEQ ID NO: 19436 - DNA, 240 bp, Zea mays
  misc_feature (36)..(36): n is a, c, g, or t
  misc_feature (46)..(46): n is a, c, g, or t
  misc_feature (60)..(60): n is a, c, g, or t
  misc_feature (95)..(95): n is a, c, g, or t
  misc_feature (107)..(107): n is a, c, g, or t
  misc_feature (110)..(110): n is a, c, g, or t
  misc_feature (114)..(114): n is a, c, g, or t
  misc_feature (125)..(125): n is a, c, g, or t
  misc_feature (133)..(133): n is a, c, g, or t
  misc_feature (143)..(143): n is a, c, g, or t
  misc_feature (146)..(147): n is a, c, g, or t
  misc_feature (163)..(163): n is a, c, g, or t
  misc_feature (166)..(166): n is a, c, g, or t
  misc_feature (198)..(198): n is a, c, g, or t
  misc_feature (209)..(209): n is a, c, g, or t
  Coding DNA Sequence Number=SeqID_5033
ctctccggtgacagcgcgcgaagatttgaatacccnactataccancctaccggctactngaggccttcgcagcaagcatcttacggtcggtagnattgaccgtccnacnaccntatgccctatngcagcaancatccttaangannctatatctccgaagantcncagcacaacaactacgacaacagttgcttccnacaatcgatcntgtagttgcagcgaaacttgctgcttacctc

SEQ ID NO: 19437 - DNA, 141 bp, Zea mays
  misc_feature (29)..(29): n is a, c, g, or t
  misc_feature (96)..(96): n is a, c, g, or t
  Coding DNA Sequence Number=SeqID_5034
caacctaaacaacaatgggctaccaaganatttaatcccctccttggcgctttcttggcgcttttttggcgagcgcaacaaatggcggttcattanttccacaatggctcacttgctcccaggttccattaattaacccag

SEQ ID NO: 19438 - DNA, 336 bp, Zea mays
  misc_feature (31)..(31): n is a, c, g, or t
  misc_feature (49)..(49): n is a, c, g, or t
  misc_feature (67)..(67): n is a, c, g, or t
  misc_feature (80)..(80): n is a, c, g, or t
  misc_feature (83)..(83): n is a, c, g, or t
  misc_feature (106)..(106): n is a, c, g, or t
  misc_feature (119)..(119): n is a, c, g, or t
  misc_feature (169)..(169): n is a, c, g, or t
  misc_feature (186)..(187): n is a, c, g, or t
  misc_feature (189)..(189): n is a, c, g, or t
  misc_feature (290)..(290): n is a, c, g, or t
  misc_feature (302)..(302): n is a, c, g, or t
  misc_feature (308)..(308): n is a, c, g, or t
  misc_feature (311)..(311): n is a, c, g, or t
  Coding DNA Sequence Number=SeqID_5035
atgacggggcaaggcgtaagccgaacaagcncacgtccgaaggagatcnccgcgaagatcgacgcgncgacgacgaaccnggncggcgaggaaggccgaggcaggngacaccgcgctgnccgcaggacaagggcggccatgcgaagctggcgtgcccgctctgccgcancccggcgcccgacatcnngnccatgcagatccaccacgaggcgcgccaccccaagctccccttcgagccggaagaagctcctcaacctgcactcctccgcccccgctgctggcgccgccgncgacgctgccgncgtcgntgncgaggacaccacctccaagtcccta

SEQ ID NO: 19439 - DNA, 144 bp, Zea mays
  misc_feature (86)..(86): n is a, c, g, or t
  misc_feature (92)..(92): n is a, c, g, or t
  Coding DNA Sequence Number=SeqID_5036
aaaactattagctttacgcctccatcgagatctccaccaactagaatgaaggttgtcgccgcctagttgctcgccgctttgagcgnaaaagnttccccaaccagtgccgatatcaaacaaatcctcggatctgttggttgtgaa

SEQ ID NO: 19440 - DNA, 85 bp, Zea mays
  Coding DNA Sequence Number=SeqID_5037
ttcaccattctctttgtatcagtgacctttatggaacatgtttcaagtgtcaccaccgtcaccaccacctctagcacaacagtgg

SEQ ID NO: 19441 - DNA, 457 bp, Zea mays
  Coding DNA Sequence Number=SeqID_5038
gagtgaatatcctctagtctttataatctgtgcttcttcttctacagaagccctagccgcaggagggaaaggttcgagagatcgcgaaaatgacgaccagattcaagaagaacaggaagaagcgtggccacgtcagcgccggacacgggcgtgtcggaaagcaccgaaagcatcccggaggtcgtggtaacgcaggaggtatgcaccaccacaggatcctcttcgacaagtaccatcccggttacttcggcaaagtcggtatgcggtacttccacaagcttcgcaacaagttcttctgcccgatcgtcaacctcgacaggctttggtcgttggtccctgaggatgtgaaggcgaaggctacgaaggataaggttccgttgatcgacgtgacgcagcacgggttctttaaggtgttggggaaaggtcatttgcctgagaacaagccttttgtggtgaa

SEQ ID NO: 19442 - DNA, 63 bp, Zea mays
  Coding DNA Sequence Number=SeqID_5039
gcatggctagccagagcatattcgcgcctgctgtaggctccttgttgcttgccggcaggtgtg

SEQ ID NO: 19443 - DNA, 209 bp, Zea mays
  Coding DNA Sequence Number=SeqID_5040
agggacagttgaggctatccacggtgcggagcgtttggcagtggcgcgcccacaccagcgagaaattgccattgatatggcggaggtctcccccgtccgagctcgacaccccacttcccactctcagacgacgctccggcacgcacccaagagacggaatgccagtgaggatgcgaattcgtggtgttctccgcgcctccctgattttg

SEQ ID NO: 19444 - DNA, 154 bp, Zea mays
  misc_feature (49)..(49): n is a, c, g, or t
  misc_feature (89)..(89): n is a, c, g, or t
  misc_feature (96)..(96): n is a, c, g, or t
  misc_feature (103)..(103): n is a, c, g, or t
  misc_feature (108)..(108): n is a, c, g, or t
  misc_feature (111)..(111): n is a, c, g, or t
  misc_feature (115)..(116): n is a, c, g, or t
  misc_feature (121)..(121): n is a, c, g, or t
  misc_feature (123)..(123): n is a, c, g, or t
  misc_feature (127)..(128): n is a, c, g, or t
  Coding DNA Sequence Number=SeqID_5041
gtcatctgcctacctccaccatgctcactacagctactcaaccgccgangggctcagagctcatccccagccacacccatgcaccgtgncaacagncgcatcntagcncgngacnngtgcntngaannctgcgaacgatgagagaactcgcgca

SEQ ID NO: 19445 - DNA, 550 bp, Zea mays
  Coding DNA Sequence Number=SeqID_5042
accttccgcgtcgtgtaaggattcatgttgctgccagtcggcactaacctctttctataggtttatattgtacgaattggctgctgtagattgggagctcggatttgtttaggctcctccaccgggagaactaattgtgcgctcgatttgatgcggccagaattttttaccccatttaactcggaagcggatggaaagaagattcagatccagctgacagggttcatggaaaagaacacagtgaagttcatgaaggagctctggagccttctcctcagtgcgcagcagaatgccagtggggtgcctcaacagtttctggatgaaaaggaggctgagatacatcagaaaaaggcataggatgacatgattgcgcaggagatccaaaagaagccaggaaaggagggaatggactcagaactggaaaagaacaaaacgatggatggggatgttggtaactcaagatcctatggtgatccagttgcctctgctttaaacagtacaaatttcaatatcgaggaagaaaaggacaatgatttcaagcgcacctcaa

SEQ ID NO: 19446 - DNA, 320 bp, Zea mays
  Coding DNA Sequence Number=SeqID_5043
tatccaacatagtgacagtcccttcttctcgtcagcacttttggtaaaaaagaaggatgaatcatggcaattctgtgttgatttcagacacttgaatgcaattgcagtaaagtctacttatccggtacctgtcattgaagagcttttagatgagttgggtcaagcgtcattgtttactagtctggatctcacagcagggtatcatcagatactgctacaacctgaagacacggcagttcgcagcagcctctccacatttgcggatgaaggcctgcctcagtttatcccttctttagataccacagatgtgggagcctccg

SEQ ID NO: 19447 - DNA, 544 bp, Zea mays
  misc_feature (46)..(46): n is a, c, g, or t
  Coding DNA Sequence Number=SeqID_5044
gaggacgtggtgaagctctctccctgggggaacgcgggcgagctcnccgtgttgccgtgctcctgctccgtcatggacgactcggtcaccgacgacgaggccgccgaccgttcgggcgatgccggcgcagcggtggccggggccggtacgacgacggcgtcggcgtcggccgtcgccttcctggctccgtcgcccccgcgcttcgccgccgccgcgggcctgtgcttcttgccgacgccagtcgtcggcgtcgtgccgtgctgctgctgctcctgcttggtgggatccaggcgcttcttgaggtgcgtgtgccagacgttcttgatctcgttgtccgtccgcccgggcagcctggcggcgatggcggaccacctagcaattcagaagagagagagagagcagaagagagagaggcgagagcagcagctgcgacaaaccctagcgtcggcggctgcggctgtggctgagagaaacgagagagaggcgagagccgcagctgcggcaaaccctagcgtcggcggctgcgactgtggctgagagaaac

SEQ ID NO: 19448 - DNA, 572 bp, Zea mays
  Coding DNA Sequence Number=SeqID_5045
tctttttgcaactacaattcttgagaatattctttttggcaaacctgaggcgacaaaggcagaggttgggtctacgactacttccgcaggtgaaatgtaactgctgactgggttatcggctccaaaaatttgagatgttgctccactacaccatcctgctcctgcaaaagcagtaatccaggaacatgaaggatcattgaatctatgcaagagggatgatctgatgaattgatcaaggaaaggtagattcctgcggctcaaactgaatagcgggagaagagccggaggaaacagggaggaggcgcggcgcacggatcgaacggtgctgatttgatggatatagatggacgattcagattggctcgaggcagaacaagttttctcctaaacacatttgctctgatgttgtttgtcaccataactgtagattaaaggagccctagctttcggaggacaacccagatgccttcaaagttcaaaatgacggtgatgaaggcgctgaaccgcgctggtggcaaggctggaaacaagggtgctgaagctgctcttacttcccacaactgtcacggcgt

SEQ ID NO: 19449 - DNA, 524 bp, Zea mays
  Coding DNA Sequence Number=SeqID_5046
tggtgttatggctggcatcccataccgccgtttgttaatttgcttagtttgttagatctaatagagtttgttggatcggatagagtttgttaggatcaggttgttagtcttggatagagtttgaggctgctatctcagccatatatatagccccatcttgccagtgctcccccaactcatatattgttcatccgtgtgctgttcatctgagatactattcattggcgatgctgtttatcagtattactattcaccgcgtgtactgttcacccacgatattgttcaccgatgatactgttcatcacttagtaaccaggttcctggatcgatgggatcgaggaacgagaacgtgatacgcgatacgctactaaaactaggatttaacactactggaacgagattgttcccacgttcctagaacagaacgaacgttcccggaacgaggaacgtggccaagttcccatttcccggttactaaggttcatcaacattactgttcacccggctattgttcacgcgtgaac

SEQ ID NO: 19450 - DNA, 505 bp, Zea mays
  Coding DNA Sequence Number=SeqID_5047
tcgacgccatcgagctgttggtttggggaggtgtggctgttcacgcgtgaacaatagccgggtgaacagtaatgttgatgaaccttagtaaccgggaaatgggaacttggccacgttcctcgttccgggaacgttcgttctgttctaggaacgtgggaacaatctcgttccagtagtgttaaatcctagttttagtagcgtatcgcgtatcacgttctcgttcctcgatcccatcgatccaggaacctggttactaagtgatgaacagtatcatcggtgaacaatatcgtgggtgaacagtacacgcggtgaatagtaatactgataaacagcatcgccaatgaatagtatctcagatgaacagcacacggatgaacaatatatgagttgggggagcactggcaagatggggctatatatatggctgagatagcagcctcaaactctatccaagactaacaacctgatcctaacaaactctatccgatccaacaaactctattag

SEQ ID NO: 19451 - DNA, 546 bp, Zea mays
  misc_feature (305)..(305): n is a, c, g, or t
  misc_feature (307)..(307): n is a, c, g, or t
  misc_feature (335)..(335): n is a, c, g, or t
  misc_feature (366)..(366): n is a, c, g, or t
  Coding DNA Sequence Number=SeqID_5048
ttttgttctcttagatttaagccaatttttcccggccacccccgggaaattgtggggggggttcaaaaaccctggaacccccccattctgggaaaacccccaaccgggttttcccccccgattttgggttgtccaaaaagggtcccagggatttaaaattaactcccctgccgcccaaattcttctagggtaccatctcctccttttgggaatccccaaccacccatggggatactcttgggaaaatattctggaccacccaaatttgatgcagagagagatacctcgatctgcgtggacgcgcngncacccccgggagcggagaaagcgatcgnccgcggcgggaggctgcggaggcgctttggncggtggcggagccgacgggatgagcaccggcgtggctcacctcatcggagcagcagttccccatagccggcgggaccgtccgcccgtcagtcgctcgccggcgaggcggttgagatctcggatgggagagcgcgtggagatgggagttgccgcaagtagccagggccagcgaaaagagca

SEQ ID NO: 19452 - DNA, 512 bp, Zea mays
  misc_feature (83)..(85): n is a, c, g, or t
  Coding DNA Sequence Number=SeqID_5049
accgcagctggaggtaacaccgattaccaagtacacatcggatcccgggctcgtgctgggcagacagatcgctgtgaaccggnnntacatcgtgtatgggctcaagctcggtaacatccgtgtgctgaacatcaacaccgcactccgttcactcctccatggtcacacatagggaggctcgattcatttaactggaaggtctgcgcattcacctccttccgagccgtcaatggaagccagatctccaaacacgcggtcctcacaacgtcgatcgaatccaatctaatccaatccaatccacagcaaacaatggcgtccaacggcagtgatgtggtgatgatgtacgggacacgacgctgctggagccgtccaagcagcccaagtcagcgactttctccgtcaagccatatgaaacctatggatataaatccaagtgatgattggacaaatgtaagtatccctttgatacataataacagctagaaactaattttcgttatatccatcttttt

SEQ ID NO: 19453 - DNA, 391 bp, Zea mays
  Coding DNA Sequence Number=SeqID_5050
acttgagttttgcattggccgacactgatgttggccaggtttggatggtagtatggcacggatataccagctagctagtactggaattgtacagagatgcttggcttgtccaacttctatagataggtgtcagctcatgtcttgtttgctacagatagatttctctccaggttgtgtggagcagttcaacacattttttttcgacagataaatctcaccagcttcttctgttctcatactaggtgcgttgcatatcaagctgaaaaagccagcttggatattttttctctctcccagtgtcccagctctagtcattcatgataataaaaaaagctatcccaacgtaattttatcaaaacagttttagctttgtgaataacgacgctgctcg

SEQ ID NO: 19454 - DNA, 583 bp, Zea mays
  Coding DNA Sequence Number=SeqID_5051
tgtaacagtcaaagcgaatctcgagatgaatcaagacttagatttttcagatgaagtttttcctatctttctgttggggaccttcggcctccgaaggtcctcaaaaacaggatttaacagtatttctggagtataatgtgtgaacaggtatcttcggatccaagtcggcatcacagtagaccagagtaatacgaaggttgatacagcgccgaaggtgtgagcaggaaagcttcggcgcgacaacaaaaagtgaaaccgacttaaagatgaaaaggctatttagacctcgacagattactatagaattattaccaagtgtaaagggcattaatgtaattttgtatgggctgcgacccgtgcctataaataggtgaacagtattcccgtactgttcacgctgacttggcattcacttttgcgtcacgcctgtattctcattccttcaagccgaaggtacatttgtaatttaccattgtttacataagtaatataaatggaaatagattaataataatgtttatagaaattatgttactttctatactttgtatgaatgttctccatcttctatcatgatcatgaa

SEQ ID NO: 19455 - DNA, 498 bp, Zea mays
  Coding DNA Sequence Number=SeqID_5052
atcaggtggcacatatcatagttacagccgaaatgggaaccgcaacaacttgagaccttgagtaaaaatgctcaggccagtgctccgaacaggagtacatgaccactcccccctacagtagaaggcaaaaaaatgtcaacatcagccacaaaatatattgtactacataattgaggactacaaatattttatctgtcctcatagccagtaggtggatctgtgtattctgttgttctttgctcactcattgcaattggacgcacaaacctacggtcaactaactgaagctatcatagaaatattaatacttttcaaaatatcaaatttgagccaaattattttaaaaacatgttgcacatgtaaaacaaacaactaaggaaaggagccatcctgaccacctagcctcaacaaaaattgattaaaatttattaagacaagcaaatcaagttatttccagtagcataccaaacccattggcgcaaccacacatatgatatg

SEQ ID NO: 19456 - DNA, 550 bp, Zea mays
  Coding DNA Sequence Number=SeqID_5053
aaactcttctgtgggtgattggtattgtaactttcttcctgagttcgatcctcgacaacctgacttccactattgtgatggtatccttgcttcgaaaactagtacctccatcagaatatagaaagtatgctttctgataactcatctgtcatggctacacattatctagtacttctttgactattccgccattttactcatgatgatcttatcctagcaccactgtacatatgtaatatgttcattatacacttgctttgtatacttgaatagctcctaggatcaatattgtgtatagcatctttctactcaagcctagtggttaaggctttcgagtagcacctccaagtcccgggtttgattccccccgggggcgaattttcaggatcaatattgtgtatagcatctttctactcaagcctagtggtatagcatctttatcctgtagcagcttagtagataatggaccatgttcaaccttgcaatatttactctgtgctcttaaaatagcaccatgacatccctgtgctcttgctgtgatcctcactaa

SEQ ID NO: 19457 - DNA, 457 bp, Zea mays
  Coding DNA Sequence Number=SeqID_5054
ttgcgatttggctctgtggaatggagaggatgagagatctgtgtcaacaccacaggagatggggatgcagcgtttagccaactaggagaggagaggaattgtgcgcaaggtcaagctcctggaagcttcgtgggaaagagtgtgtggaaggatttggttactggaagcttcacgggatggaggggtgaaaggtttcacggaccatcggtgcccgatcggacggctgaaaaatagaggatgacgtggacaggctagttgggctcgtttccgttcggctttaaagatagaaaaatatcacaccattccagtgtagcctgccttctcaatggcatccataagcaagacaagaccctctctgttgtcttgaacattaggagcaaaacctccttcatctccgacattgcatgcatcttgaccatattttgccttaatgatgcccttcaggacatggtaaact

SEQ ID NO: 19458 - DNA, 145 bp, Zea mays
  Coding DNA Sequence Number=SeqID_5055
gggagtttagtgataagaacatgtataatacttaggcctgacaatcacgaaactccctggtcaaatatatgattaagtcttggaacttaagacactagaaagaatataggggggctctaactaccatggagtttagtgattataa

SEQ ID NO: 19459 - DNA, 505 bp, Zea mays
  misc_feature (325)..(325): n is a, c, g, or t
  misc_feature (447)..(447): n is a, c, g, or t
  Coding DNA Sequence Number=SeqID_5056
aacactgcagtgagcgacggcaggcatggtgagccgtgaaaatttgcacctggtgctggacccggcgtctctgggcgcgccttgggccgacccgtccgccgcagagatcccgccgcagctcctcgccgcgctgggagagtacctctcctccgcccgcggcgacgtcgagacggaggcggacgacgagttcatgatgcacgagttcaaggtgcggcggtgcgcgcgcgcgcggagccacgactggacggcgtgcccctacgcgcacccgggggaggccgcgcggcggcgggacccgccccccggggcctacgcgggggagccgccntgacagtttttcagcccccttctcggatccctggccccccccttgccccttgtgcctcttcattccccttacgctcccgcgtgacaatttagcggggggcccctcccccccccccgttaacnaccggaacccctgcccgtacaagttttctaccctgcccgaagcttggtttattgtttc

SEQ ID NO: 19460 - DNA, 542 bp, Zea mays
  misc_feature (59)..(59): n is a, c, g, or t
  misc_feature (181)..(181): n is a, c, g, or t
  Coding DNA Sequence Number=SeqID_5057
gaaacaataaaccaagcttcgggcagggtagaaaacttgtacgggcaggggttccggtngttaacgggggggggggaggggccccccgctaaattgtcacgcgggagcgtaaggggaatgaagaggcacaaggggcaaggggggggccagggatccgagaagggggctgaaaaactgtcanggcggctcccccgcgtaggccccggggggcgggtcccgccgccgcgcggcctcccccgggtgcgcgtaggggcacgccgtccagtcgtggctccgcgcgcgcgcgcaccgccgcaccttgaactcgtgcatcatgaactcgtcgtccgcctccgtctcgacgtcgccgcgggcggaggagaggtactctcccagcgcggcgaggagctgcggcgggatctctgcggcggacgggtcggcccaaggcgcgcccagagacgccgggtccagcaccaggtgcaaattttcacggctcaccatgcctgccgtcgctcactgcagtgttgttcaacactcggtccagtcctgttagcctgggtggt

SEQ ID NO: 19461 - DNA, 153 bp, Zea mays
  Coding DNA Sequence Number=SeqID_5058
caactcgtaatgcagctcgagctagagagacagacacgcctcacccacaccacaagaacaccaaagccacatcccatccatctccacggtgaggcttgagcgacccgagcaaaaaaaaatcatccgcgaagcagcgacgcaggtttgttctct

SEQ ID NO: 19462 - DNA, 451 bp, Zea mays
  Coding DNA Sequence Number=SeqID_5059
gaaagctaagggagacgagcagcctaaaaaccctagcccccgaatcagatcccaccgcccgccggaacgcggaaccctgcccccggccggcggtgggatctgattcggggggttgcttgctggagggtttttgttcgtttagtgtctatccttagcttacttattacttttgttagtactctactagcagagtacatgcatagagtcagtggtgtggctgtggcgtggatcagatcattgatttgatcgagctgtacaaatagcgaggcgatacatgtcactgagttgatcagttgacaaggtggtttggaccatgttgaggcacggagaaacttcatccctaagttttagtttgtctggctttgctcgtcattttgtacttgttcttctcacatatttgttgcttagaatttacttcaaactcacgtccttttagcaatataatacacat

SEQ ID NO: 19463 - DNA, 109 bp, Zea mays
  Coding DNA Sequence Number=SeqID_5060
tcctgttagcttcgagggatcctccccatatcgataaacggttgcatagcccgacaatcggaagagttaaactgttaaagatttcaaacatcaaccccatatcgataaa

SEQ ID NO: 19464 - DNA, 90 bp, Zea mays
  Coding DNA Sequence Number=SeqID_5061
ttttttgcttctcaaagcttccgaataatttacttcataaagaaaaaaaactcttgcaattcattaaactgcatgcaggacacgctcaaa

SEQ ID NO: 19465 - DNA, 500 bp, Zea mays
  misc_feature (231)..(231): n is a, c, g, or t
  Coding DNA Sequence Number=SeqID_5062
cactcgcgggcacccgaaaatgtaaaaatttttttggaagttttttgggggccccccccttgcacaaggaaaaacatttcttaagcttttaaaaaagtttctctgggggacaaatcaggaccatacccccctggtgctggcctttggaaagaaccttgaatgtccccttgttgttccacccagggattgaggatgcaccttcagcaccagaggcaggttcttcaaaaacgnccggctgggtgcgtttcaaagtcaccatgcctgagcaggccatcccccacccgacccgccgaggccgggcggcgggcgccgccaggagaagcagcgccagcaatgcgagcctcgtcgtcgccgaatctggctccatctcctcacccccctccgatcggaccccaggagaacaggctgcgagcgagactcggaagtgggagcgtgtgagtgagactgggcggggaggtaggaggcagcagacaagagggcactgcgctcaacgctggctg

SEQ ID NO: 19466 - DNA, 268 bp, Zea mays
  misc_feature (38)..(38): n is a, c, g, or t
  Coding DNA Sequence Number=SeqID_5063
tgctcaggcatggtgactttgaaacgcacccagccggncgtttttgaagaacctgcctctggtgctgaaggtgcatcctcaatccctgggtggaacaacaaggggacattcaaggttctttccaaaggccagcaccaggggggtatggtcctgatttgtcccccagagaaacttttttaaaagcttaagaaatgtttttccttgtgcaaggggggggcccccaaaaaacttccaaaaaaatttttacattttcgggtgcccgcgagtg

SEQ ID NO: 19467 - DNA, 519 bp, Zea mays
  misc_feature (228)..(232): n is a, c, g, or t
  misc_feature (252)..(256): n is a, c, g, or t
  misc_feature (263)..(263): n is a, c, g, or t
  misc_feature (265)..(267): n is a, c, g, or t
  misc_feature (274)..(274): n is a, c, g, or t
  misc_feature (276)..(286): n is a, c, g, or t
  misc_feature (293)..(301): n is a, c, g, or t
  misc_feature (304)..(305): n is a, c, g, or t
  misc_feature (307)..(319): n is a, c, g, or t
  misc_feature (323)..(335): n is a, c, g, or t
  misc_feature (337)..(347): n is a, c, g, or t
  Coding DNA Sequence Number=SeqID_5064
gggccattggagttcttgttcgtagtagaaagcaaagacgatccagcttatcgtgccgtctcccgtttgattgtagagtacaaggacaaattggacgcaaaggtcgttgtagctgggttttcaacaacgtgtagccagaaaattcataatcagttaattggtgttgaaaagatgcacaaggacagcaagtatgttctatttctggatgatgatgtcagactgcacccnnnnncagtcggagctctcacaaannnnntggagangnnncctgagntnnnnnnnnnnncgggatnnnnnnnnnacnnannnnnnnnnnnnngggnnnnnnnnnnnnntnnnnnnnnnnnatgccttgttcgatgggatttgcaactggtgggaagactttcttcttgtggggtggctgtatgatggtatatatagtctatttcttgacgggaacattttctctagattttctctgtataaacattaatcacccatagtgttctaacaaggcttcactttagatgcatgctg

SEQ ID NO: 19468 - DNA, 376 bp, Zea mays
  Coding DNA Sequence Number=SeqID_5065
ggagacgctttgtgaccgggccatatcatctccaccacccattcggcggggaaagaacggcgagccccaagcgggaccattcagtttacatgggcagaaaccgggtccgtggggccacaggcttccattttgggatgcggcccttcccaggccttaagggggccctgagaaaccagggaaaagaccctttccccccaattcaagaaaagggtggccttgccaaagaactcgggcgggttaaccaagaaaacccggagaaagcttgcaaaacttttaatgggcggggcccatgggaggccaccccccaagcggtcattctctggccctgagaaagcactgggctttctttcctctgaaaaacgaagcgagggtacca

SEQ ID NO: 19469 - DNA, 535 bp, Zea mays
  Coding DNA Sequence Number=SeqID_5066
tcagaggaaagaaagcccagtgctttctcagggccagagaatgaccgcttggggggtggcctcccatgggccccgcccattaaaagttttgcaagctttctccgggttttcttggttaacccgcccgagttctttggcaaggccacccttttcttgaattggggggaaagggtcttttccctggtttctcagggcccccttaaggcctgggaagggccgcatcccaaaatggaagcctgtggccccacggacccggtttctgcccatgtaaactgaatggtcccgcttggggctcgccgttctttccccgccgaatgggtggtggagatgatatggcccggtcacaaagcgtctccccccttcccccgtccttgtgcttgtcgcctgccggcgggaggaatcgccgcggcggcggcggcgggaggtggggcgtccagctccatgggccccggtcccggcggcgcctccatggtggggtgaacggaacggaacggtcggtcggtcggtcggttcagagttcagacgccgctgccga

SEQ ID NO: 19470 - DNA, 429 bp, Zea mays
  Coding DNA Sequence Number=SeqID_5067
agacttcctggtcagtagctagccacgccaacaaagttttttttgagtgctgctgaattacatcatctatcaaaaggaaaaaaaagagaaaataatagctccatctatcatctctctcagatttagggccatgtttggtttggtgcataacttaccacactttgtctaatttttctgcttaaaattagtttttaaattcagacgactaaccttagataaaatatgtcatagttagtcacaaaccaaacatgcaccattcgacaacgaagatatatctttcatgcgcgctagcttatcatagacgatcgactagttgttcttttaaattaccagtcgttttcaattgggtggtcttgcttaaatcaatcggccagggctgctcctagaaattagtgtgccgcattgtcagcacactcacgtcagatatat

SEQ ID NO: 19471 - DNA, 346 bp, Zea mays
  Coding DNA Sequence Number=SeqID_5068
gggagccagcgaagacaagacaagccaggccagcggcggaggagagggagagagagagagagagcacgcgacagtaggcaggagggcgaggaggagcttgtagagggttaaggaaggcgaccgccatgggggactccagcggctccgtgtcggtcgacgtcgagcggatcttcttcggcggcaaggagcatcgagtaagaacgaggcatggctctcttttaagtgtatccggaaaaaaggggctgctagctatcttcgtttactttttgagcttctgtgtgttgcatagttggttatgtattcatatggctgtgaacctttcctgtaacaactggacgcatgatgc

SEQ ID NO: 19472 - DNA, 209 bp, Zea mays
  misc_feature (140)..(140): n is a, c, g, or t
  misc_feature (179)..(179): n is a, c, g, or t
  Coding DNA Sequence Number=SeqID_5069
ttgtggaatgaggacttgatgctttgttgcagctgagccatttgaagaggcacctaattttggagtgtataggacagggtggcccccaggaaaaggatggaggtaattgggaagggacaatcattgccactgcaccatgntacccccgggaggctgggatcacagggtgcttaacccgnccccagtgggtataaaccccttgagccttg

SEQ ID NO: 19473 - DNA, 493 bp, Zea mays
  Coding DNA Sequence Number=SeqID_5070
gcttttagttgtgcttaagtttacaaattttcagattcgccctattcaccccccctctaggcgactttcaattggtatcaaagccggtgcttcattagagcctaaccgctcgaagtgatgtcgggagatcacgccaagaaggagatggagaccggcgaaaagcccactacaagccacgggagcacttcatcggaagagtcccgcaccaaaaggagggagaagaagaagagctcctccaacaaagggaaggagaagaaatcttcttctcaccacaaagagaagaaggaaaaatcttcttcccacaagccgcatcgaagcggggacaagcaaaagaggatgaggaaagtggtctactacgagaccgacacttcatcaacatcaacctccgactccgatgcgccctccgtaacttctaaacgccaagagcgtaagaagtttagtaagatccccctacactattctcgcatttctaaacatgcacctctactttccg

SEQ ID NO: 19474 - DNA, 508 bp, Zea mays
  misc_feature (188)..(189): n is a, c, g, or t
  misc_feature (199)..(199): n is a, c, g, or t
  misc_feature (235)..(236): n is a, c, g, or t
  Coding DNA Sequence Number=SeqID_5071
aactagcactgatcgatacattctttcttcaacctgctgtttcttagagacagacagacgacgtgagcgaggtctgcactatagggagctcatcatttcagaaatttcgaatctaataaatatatatgtggcacaaaaaaaaaaaaaaaaaaaatgtgtgtggttgccccagcaaatacactgaaatnnttttggttcntccttccgtcgtactctgcaaaaaaaatgcagtgtnnagagttgcttttgcttgggtggcatgcaagcgtggaacccgtggtgctattctttcatcgatgcgagacttcacgcgtgtcgaaattttcctgaatttttaggggccgttcgcttgtcaggaatgaacgggccggaatttgatctaactcatcaaaaaaccgaacagggtagtgttttttggtttttatacggtctaggtgcagcttttcgtggcaccaccacggccttcgtagctgaagccattagtataggattctctcagctcactgga

SEQ ID NO: 19475 - DNA, 337 bp, Zea mays
  misc_feature (53)..(54): n is a, c, g, or t
  misc_feature (157)..(159): n is a, c, g, or t
  misc_feature (163)..(163): n is a, c, g, or t
  Coding DNA Sequence Number=SeqID_5072
ggcggcgcccaaaatgcaggcatcagatcggcgcatcacgctgcaaataaccnncgcacgatgatatatgtgggtgcaactttttttttttgttgttgccctcttccgtccgctttacggtgtacccctacatacataataggagaggaggcccgannngttnaaaagttaggcatttttagttttaatttaatccagataatcagtgcgatatatgtaatgacatgtatatgcatgtgtgtataactactcgcataagcagtaaacagcaatgaaattttttatcatgcacgaatacgaagaatagagtgtacccagcggagggaccgatgctcaa

SEQ ID NO: 19476 - DNA, 175 bp, Zea mays
  Coding DNA Sequence Number=SeqID_5073
gaaacgaatgccaccatctacttctagtaacactacaacgacgagcagcacgacgggcgctcaagccctctcgcccctgatgcgccgcactcattctctcttgccggtaaggagtggatctccactccataccggtatcctaatcaatagaagatggacgcggatctccactcct

SEQ ID NO: 19477 - DNA, 489 bp, Zea mays
  Coding DNA Sequence Number=SeqID_5074
aatgcctctcattcaagttttttgctgtaaggagaggtcgtcccggtttggccaaccagtgcaatggtcgagccagccaattccatggtttgttgagctccgttttggctaatgtcagattagctcttcggcatcaatttccgggaggaggacggcgagggggccgcgcagcggcaagagccacaacagaaggagctgttctgggctcccgcgccgcttaccaccaagtcctgggcggacgtcgaggacgactactactactacttcgccaccaccgcgtcgccgcgccccatctggggcactgccggtgagcccgccaaggaagaggacgacgtcgatgatgttgtgcgtgccgcccttcaggaggtactgaagacactttttgagatcatgctctttgaggatgttggtaatcagtgtaggctgcgtcgaccaatattgagcctgataatgaccagcgaacaggtgccttcacttattattttattt

SEQ ID NO: 19478 - DNA, 267 bp, Zea mays
  Coding DNA Sequence Number=SeqID_5075
ctcaaatgatccctcggaccgagggagcttcttcttctcaatcaaacgggaacaaaacttccccgcaagggccaccacacaattggtgcctcttgccttggttacaattcagttttgatcacaagaacaagtgagaaagaaaagaagcaatccaaacgcaagagctcaaaagaacacggcaaatctctctcgctaatcactaaagccttgggtctgaattggagagaaagcgatcaccaaaaggtgtctagaattgaatccctaaaa

SEQ ID NO: 19479 - DNA, 506 bp, Zea mays
  misc_feature (259)..(262): n is a, c, g, or t
  misc_feature (264)..(269): n is a, c, g, or t
  misc_feature (271)..(286): n is a, c, g, or t
  misc_feature (288)..(288): n is a, c, g, or t
  misc_feature (291)..(292): n is a, c, g, or t
  misc_feature (294)..(296): n is a, c, g, or t
  misc_feature (298)..(299): n is a, c, g, or t
  misc_feature (301)..(301): n is a, c, g, or t
  misc_feature (306)..(324): n is a, c, g, or t
  misc_feature (328)..(336): n is a, c, g, or t
  misc_feature (342)..(346): n is a, c, g, or t
  misc_feature (378)..(380): n is a, c, g, or t
  misc_feature (387)..(389): n is a, c, g, or t
  misc_feature (391)..(392): n is a, c, g, or t
  Coding DNA Sequence Number=SeqID_5076
tgggaagttttgtatacctcaaggtatcacccaccaagggagtgcagaggtttgggatcaaaggcaagctagcccctcgttacattggaccttatgagatcatagaagcatgtggacccgtggcatacaagctgaagttaccttcaaagatgtctgccattcacagtgtattccatgtatctcagctgaagaagtgtgttcgattgccgaccgagatcatagcagagccagaattggagatagagccagatctatcgtnnnnannnnnntnnnnnnnnnnnnnnnnancanngnnnanncntggtnnnnnnnnnnnnnnnnnnngtgnnnnnnnnntagatnnnnncctctcaccatgacatcttcaacctttcttcnnnacgtcgnnnanncgaccgagcaatgcaagatcttgttgatgggcagatagcaccgccccgccgcatcccggtgggtcctcaccattggggaccgcctcgacgctggaacccacctcaacgccagaa

SEQ ID NO: 19480 - DNA, 80 bp, Zea mays
  Coding DNA Sequence Number=SeqID_5077
ccttatttacttttcggtcaatcagactgggacaggcatagttctactggctatcttggtcatatggtccggctataatg

SEQ ID NO: 19481 - DNA, 231 bp, Zea mays
  Coding DNA Sequence Number=SeqID_5078
cttcttcatatatttggcaaacaactgatcaaaagtagggccgactctactgagtcgtccagacgtcttagaagtgttttgtttcctaacacttgttttggtacgttgtggtccgatggtctgaggttgctgcttctgaccgtttgcgaactgttcgaccattatagccggaccatatgaccaagatagccagtagaactatgcctgtcccagtctgattgaccgaaaagt

SEQ ID NO: 19482 - DNA, 469 bp, Zea mays
  Coding DNA Sequence Number=SeqID_5079
cgaagacccgaactgagtcctccctccaccgacccaaaccctagcgcgcaccctcctccctccccctttcccggcgcgcgggccggcgtcggagatgcgggcgctgcctcccggacggcgggatggcactggcggccgtcgccggaggccaacgagtggttgggtggcggtgccccgcccgcacgcccgctaccgccggcgccctgtgacgcagaccgcgcccgccgcaccctgcgccatgactgatgcccatccgctgctcgtcccccacccgttccctcgcccccccgtgcggtcgctgcgtgcaacacgcgctgctgcgtgtctgccccacactcccccccgcctccgccctgtcggcccccgcgcttcgcgcgtgggccgtaggtttccccccctcacgacccggacggtacccctcccgcctgattccttcccctccccgcgcttcagtagcatcgcggcgcgc

SEQ ID NO: 19483 - DNA, 571 bp, Zea mays
  misc_feature (338)..(338): n is a, c, g, or t
  misc_feature (354)..(354): n is a, c, g, or t
  Coding DNA Sequence Number=SeqID_5080
ggcgggcgtttgagctgttcgccacctacccctccctccttcctttcatttttctggaagacttcttcggcctcacgcatctcctcctcctcctccaatccaattcacaaacacacacgggcaatcaattagcagaacccgcgccacccccccttcctcggagtcggagcgagtcgaggaacggctcgtctgcctctcccgttctccttcctctcctccccagaagatctgatccatcatcgaggactcgccgggaagaatcaaggatatatagataataaacaaacaaaggttcctccagagcccagaaaggagggaagtcaccggccgtcggcggnggaaggagatgtcggnacggcgcgggctcccggacggggcgtcgcttggcgcgtgggggcctctcgggtcacccttcgtcgggtggccatcgtcatctgcaacaagtacctcatcagcactctagggctttcttctttgccgacgaacgctgacgagctggcaaccctcatgggtggacttcttcacggcttgtacggttggcgcaagcggctggcgctttctcgagcccaag

SEQ ID NO: 19484 - DNA, 516 bp, Zea mays
  misc_feature (218)..(218): n is a, c, g, or t
  misc_feature (234)..(234): n is a, c, g, or t
  Coding DNA Sequence Number=SeqID_5081
cttgggctcgagaaagcgccagccgcttgcgccaaccgtacaagccgtgaagaagtccacccatgagggttgccagctcgtcagcgttcgtcggcaaagaagaaagccctagagtgctgatgaggtacttgttgcagatgacgatggccacccgacgaagggtgacccgagaggcccccacgcgccaagcgacgccccgtccgggagcccgcgccgtnccgacatctccttccnccgccgacggccggtgacttccctcctttctgggctctggaggaacctttgtttgtttattatctatatatccttgattcttcccggcgagtcctcgatgatggatcagatcttctggggaggagaggaaggagaacgggagaggcagacgagccgttcctcgactcgctccgactccgaggaagggggggtggcgcgggttctgctaattgattgcccgtgtgtgtttgtgaattggattggaggaggaggaggagatgcgtgaggccgaagaagtcttcc

SEQ ID NO: 19485 - DNA, 257 bp, Zea mays
  Coding DNA Sequence Number=SeqID_5082
tcattggatcatgtaagcaccgcaccaagcctttactagcctcccttctgttttgaaactatatctcttgcattttcgagatgtttgtactttttattagtcttttaagcttatgctaatttaagtgtcaacacgtcgtaatgcatagctcttcagcttttaagaaccatgtgaccaaccatttatggataatgttttcttcatgaacaggttgtataaatgtagcaagtttgattcattcgggagagttaatttaa

SEQ ID NO: 19486 - DNA, 534 bp, Zea mays
  Coding DNA Sequence Number=SeqID_5083
atatgatttgcacttctcactttatttagcacataagaaattaatcaaacgtgttgggcatttaatcaccaaaacattatagaaatggcccaagggcacatttccctttctcaaacccaagagaccctaaaaggattcttaagacgggctcaaaacgagttcggattaaggataaaaaagataagaagcgataatgggatggagttcaggaattcacaaattgaaggttttattgaggaagaggggcagatggcatcaagcatgagttctcttctccctacacatctcaacaaaatggtgtagtggagaggaagaatagaactctactggatatggcaagaaccatgcttgatgagtacaagacaccagaccggttttgggccgagacaattaacatcgcctgctactccatcaaccggttatatcttcactaaatcctcaagaatacatcatatgaactcctcactggtaaaaagcccaatgtttcatattttagagtctttgggagtaaatgctttattctggttaaagagg

SEQ ID NO: 19487 - DNA, 438 bp, Zea mays
  Coding DNA Sequence Number=SeqID_5084
aagaccttctatagatctctctgaatttgagaagagtacagataaaaggtacatgtccaggcagtgtcgaacacatttccatctagcacattatacatatagtttgttcagaagctatgaggaaagactctcatctaacgaatggcaagcagctctgcgattaaggaaatacaagactagggagttggagatactgattaaaagactgagaagttcatctaagggtgtgaagactgattactcagtaaaaatccaagagttacagaaacaacttgcacttgacagagaagaagcagagaaaatacaggatgatcgcgataatttcttaaatctagcacttcaaggctaccaacgttccattgttgttggtggcaaatatgacctacaagtggtttttcggttggtctcgttgtggtttagtcttttctcaagggatca

SEQ ID NO: 19488 - DNA, 367 bp, Zea mays
  misc_feature (221)..(223): n is a, c, g, or t
  misc_feature (231)..(235): n is a, c, g, or t
  misc_feature (258)..(279): n is a, c, g, or t
  Coding DNA Sequence Number=SeqID_5085
ataaatttagccatcgtccacacagcttaagattgtaaaatcgttgtgctagcttgtatgtgctgagctttggctccccggcgcaccgctaagcctcaactcgcaggcagccatgccgatgagaatcgagcgtgatctccacatggccatagggaacggagaaactagctacacaaaaaattctaggattcaagagaaagctatgtttcagatgaagtcgnnncttgaggnnnnnactagagcagtatgcacaactcnnnnnnnnnnnnnnnnnnnnnnggccgacttaggagaggggtatattggacccatactgctcatctatagggccccccactgaggggttgttttcgggtgattggcatca

SEQ ID NO: 19489 - DNA, 256 bp, Zea mays
  Coding DNA Sequence Number=SeqID_5086
caagccaagaggcacggccacgcatgggtttgcacgagggctactcggagctggtgctcccgaagcagctgctccacctgctgctgctgctggggtacgtccgccgcttcctcctctgggcgttcgacgccgtgggcctcggcgacctgctggatctcggggacgaccaccaggcgccgccgccgccgcagcagccgcagccgcagcaccggcgggcggagttccgggcggccatgccggcgatggtcatcgagga

SEQ ID NO: 19490 - DNA, 383 bp, Zea mays
  Coding DNA Sequence Number=SeqID_5087
ggtaaccgcaagatcatgttgctatagctagctttgttacacgttttctaatattgactaaaccattcttttctctctcttttttattttccattcccaataagagagagtccctcccccattcttgaataaccgttgctagcttataatatccccccccattgatatggttgttccattccccaatttgttttcaggtcggggtgaaggtgccagaacctataaagccgaaggaccaccacccaccgactgatgatgaaggccctctcttcaaccaagtggtcgcaaggccaggagcatataaatatatatgccctccatgctaggacatcttcttggttttggcatatatatagctccgaattccatttcttctgctggta

SEQ ID NO: 19491 - DNA, 583 bp, Zea mays
  Coding DNA Sequence Number=SeqID_5088
gaccaatggcagcatgtttcttccggccttttgtagattttatttcccccattacaaagagatcaaaactatatgcacattgatatcaggaaacaccaacagtacaacataactcacatagctctactagctaccttactattgggtatatatctagtaccagcagaagaaatggaattcggagctatatatatgccaaaaccaagaagatgtcctagcatggagggcatatatatttatatgctcctggccttgcgaccacttggttgaagagagggccttcatcatcagtcggtgggtggtggtccttcggctttataggttctggcaccttcaccccgacctgaaaacaaattggggaatggaacaaccatatcaatggggggggatattataagctagcaacggttattcaagaatgggggagggactctctcttattgggaatggaaaataaaaaagagagagaaaagaatggtttagtcaatattagaaaacgtgtaacaaagctagctatagcaacatgatcttgcggttacctttgtcgcctgatgctgggttttcggacgatgtacaatccttt

SEQ ID NO: 19492 - DNA, 165 bp, Zea mays
  misc_feature (93)..(93): n is a, c, g, or t
  Coding DNA Sequence Number=SeqID_5089
aagcaaggcatcaatatggtttgttgatccaggccgtcttcgctcgctgaccacccgcctcgctcgtcgagcatatagccatgccgtggcgangcacaggctcagagggatagataggtccagtgcaagcgagcaggagcaggcatcttcatccagggagagggt

SEQ ID NO: 19493 - DNA, 433 bp, Zea mays
  Coding DNA Sequence Number=SeqID_5090
gctctgctggtcgtgaggtcgcccatccccttctggccttctctctcgcatcctcgcgctgccgccgccgccgtcggtcctgcacccctatcttcttctccctcccatactcgtgcggctgccatacaccgctgctaaacatggaatccttacgcctgttcagaacgtcaggtgtttgtatttcggttgcaattgagtgattgggaaacctgattggccagaagtattgtcgggtaaccaatgggaagcaatgaccctagcacaccctccaagtacttaaaacagtggagggtcgttttgggcacatggcgtcgagaagaaaagtagaagcatgatctagttcgattttgattggaagagaaatttaatttgattgaaggtggacaactggacatcagattcgaagatgtgttccgtctttttcctgaagata

SEQ ID NO: 19494 - DNA, 312 bp, Zea mays
  Coding DNA Sequence Number=SeqID_5091
gacggaacacatcttcgaatctgatgtccagttgtccaccttcaatcaaattaaatttctcttccaatcaaaatcgaactagatcatgcttctacttttcttctcgacgccatgtgcccaaaacgaccctccactgttttaagtacttggagggtgtgctagggtcattgcttcccattggttacccgacaatacttctggccaatcaggtttcccaatcactcaattgcaaccgaaatacaaacacctgacgttctgaacaggcgtaaggattccatgtttagcagcggtgtatggcagccgcacgagtat

SEQ ID NO: 19495 - DNA, 168 bp, Zea mays
  Coding DNA Sequence Number=SeqID_5092
ctaggattttggctctgatgtcatgacctttgggccagagcgtgattaacggctaggattggctctgatgctttgtcctgttgctgtagaggatcgttcctgtcaggcttgcctggctgggatggcccacaggttgtctgacaggcacttaaattgcatatagtctaa

SEQ ID NO: 19496 - DNA, 312 bp, Zea mays
  misc_feature (236)..(236): n is a, c, g, or t
  misc_feature (283)..(284): n is a, c, g, or t
  Coding DNA Sequence Number=SeqID_5093
acgcgtatcgcctcgacgaacaaaccacacaccccacctaccccggccggaccggcaggcagcacaacatggacctcgccctcctggagaaggccctgctgggcctgttcgccgcggctgtggtggccatcgccgtggccaagctgagcggcaagcggtaccgcctcccaccggggcccccgggcgcccccgtggttggaaactggctgcaggtgggcgacgacctgaaccaccgnaacctgatggccatggcgaagcggttcggtgacatcttcctgctgcnncatgggcggagcgcaaccctggtggttg

SEQ ID NO: 19497 - DNA, 404 bp, Zea mays
  misc_feature (161)..(161): n is a, c, g, or t
  misc_feature (210)..(210): n is a, c, g, or t
  Coding DNA Sequence Number=SeqID_5094
gagatggaggaattcattttcttctgtccggcttcgccccctggttacgtccccgctactaaccctaggatcattctgtcttttctcgtttcttatccgactcttcttcgttttatgcctatcagttatgaggttgaacgccttcagaagcttctctactnagatagtgtaaatagtagacttgttcgagtttagctgggctgggagaantagtctctggtccgtgttatatctgctagcaataatggctgcgatgaaacgagaagtattgggtgaatgtgaaaggaacataaatagtctcaagaaaagcgggagaaccccgctgcatatgctgctggcgtattcctgacctctgaatgcatcaccaactggcatgattctgctgttagggtcctcttgaaaaa

SEQ ID NO: 19498 - DNA, 180 bp, Zea mays
  Coding DNA Sequence Number=SeqID_5095
aacttgagtgtatagtatagcgctagcttagcacgtcgctgtcaattgcttcgtctgaacgaagcagccggtcaactccgatccatatatatcactacatacggaaggcttaaattcaagccaggaacctcaaacggcaagcatactagcaggcagcataaggtagtaccatgaactgtg

SEQ ID NO: 19499 - DNA, 55 bp, Zea mays
  Coding DNA Sequence Number=SeqID_5096
acgtcattgttttccgttctctgtcttgtgcttgtgcatgttcggttgaacttgc

SEQ ID NO: 19500 - DNA, 76 bp, Zea mays
  Coding DNA Sequence Number=SeqID_5097
gagagaagcgccatggctctctgaccaagaaaagaaaagaaagaggtagagagagatctcactcagcccagtctct

SEQ ID NO: 19501 - DNA, 272 bp, Zea mays
  Coding DNA Sequence Number=SeqID_5098
gggaagaaggccagagatctcctatataaggactaccacacggaccgcggcgtgctgcaccaggcggcggtgacgcagctcggcaagtgggagtgcctgctcgtgaccatggcttggggtttcctcttccgcatcctcttctacttcagcctcgtgctcggcagcaagaacaagagaaggtgatcgcgccacggtacggactagggatacgcgagcgcgctcgcgcgcgccgttgtacatttgaatggtgggaactcgcaggccatggtcca

SEQ ID NO: 19502 - DNA, 261 bp, Zea mays
  Coding DNA Sequence Number=SeqID_5099
aatggttactgttgatgattgtgtcaaggagtttgctagaattgtccgtgagaaactaggacctaagaatgcaatcttcaccaaagcagcagatgccatggatctcagaacgcatagcttggagtttgcgtgtgtccaacagaacatctataatcatttggaatatttgttttttttcagttttatatttttccctgtggaactcatgaagctgaaatagatcgtgtgttgtcaggacagtgtatttttggtgcacagata

SEQ ID NO: 19503 - DNA, 101 bp, Zea mays
  Coding DNA Sequence Number=SeqID_5100
aacagaagcatactacgccgctacgcgctgggcggtgccgcacaggcacagctatagatactactccagcagtgttgcatagaaatggacagcggcagcag

SEQ ID NO: 19504 - DNA, 190 bp, Zea mays
  Coding DNA Sequence Number=SeqID_5101
tctgagtagttgtctggttgattgttagaaataaaaatctctttcatgggagtttcctagtgattgcagactgatgggtatttgatgggattgtgttgtacactttctttgagtttgtcccaatgtatttgggtgacaattgagtttaccatgccatgttaccatccgtttatgctatacagtccaatgc

SEQ ID NO: 19505 - DNA, 550 bp, Zea mays
  Coding DNA Sequence Number=SeqID_5102
gaaactatgatgctgaacctgcacaccataccgagaaagtggagatacagttggtccaaaaagatattcagtctgttgctgatgcacaccatacaattgatgagaattcgaggaagcagcaaccttatgtgtctgatgagaaggaacatttgcagaaaccagtgtctcctgtggacactaacaggacccaaaaagatgttcagaagcttaacagaagagctgtccgccatttggaaaaggagctgatggaggcagtggaacttgatctcaacggcctaccaaaaaatggatttggcgcagtcagatttcccgaagcagaaggcaacaaaacagttcaactaaatgtcaagccaaatgaggccgtgagagatttccatattgaaaaagagaatgatgaagtccttcattgttcacgtttgcctggtggttctgaacacaatgggggacatgcagattcagggctaagagctcagggcctagagaatcaagggcatccagtgagtcctcttagtggtaacactagaaaaaaggctccttacactaagctgaa

SEQ ID NO: 19506 - DNA, 584 bp, Zea mays
  Coding DNA Sequence Number=SeqID_5103
catacatggcaccatctactgcttccctatcccccgcctgctgtgttcactaacccacctccgtcccccgttgcgggtccccctccccgtcagaaggttccccagatttatagcccggagtagcggcggcgacggggcatgcgctcggagcccaaaccagcttacaacgagagcaaggccatccctgatgccttcttccttgagaaggcctccgcggaggcgttcacggagcgagtcgagtcggtattggcctagtgggcgaggtattcaacatcgtcaggcagtggcaaactcagcagcagaagcaggtctaggagttccagaagtagcaaagttttattatttcctggctggagagcagtttacatgaaaagataattgaggcatgcaacaaccttattgcaaagctcaagtaagtgaggtagtcacgaatggctcagttgatgaattccctgaatcacatttcccatatggctcggaaacaacggttgggtggaaatgccccactggagtatgccagctttacaataagatttggctcattgaatgtgaccccatggctttactcggtcacaaacatcttg

SEQ ID NO: 19507 - DNA, 307 bp, Zea mays
  Coding DNA Sequence Number=SeqID_5104
actcctcactgctgccatttaccaaggtcctggccgagggcgagaggagggccaaaggccgttgcttttccaacgagatcgacagggcttcccgggaggaagaaggccagaggaatcaccattgcgacagctcaccgtcgaaggaatgagaaccggctaaaaggcattatggcttcccccgtgggatggtcaaggtcacggcccaagattatgtccaagaacatgatccactggagctgctcaaaagggggtaggggggggaagttttcttgggccgggcccaacactccctgaaagggccccgatg

SEQ ID NO: 19508 - DNA, 507 bp, Zea mays
  misc_feature (264)..(264): n is a, c, g, or t
  Coding DNA Sequence Number=SeqID_5105
ttttgagcagctccagtggatcatgttcttggacataatcttgggccgtgaccttgaccatcccacgggggaagccataatgccttttagccggttctcattccttcgacggtgagctgtcgcaatggtgattcctctggccttcttcctcccgggaagccctgtcgatctcgttggaaaagcaacggcctttggccctcctctcgccctcggccaggaccttggtaaatggcagcagtgaggagtggttttgccgtgatcgancgtgccccaatggtgccgacgttcaccatggggcttcgtgcgcgtgaaggtggccatagacctcgcccaggagggtcccggccgtcggtggcggctgggccggcgctgccgccgccgcgggcgcatcgggtagcgcagaaggtacatatatcgcagcggcgcggagagtagggtaggagaagaggcgccgggagccggcgttccggagcaccgcggcggaagccattacgtcgctgcggcggc

SEQ ID NO: 19509 - DNA, 280 bp, Zea mays
  misc_feature (242)..(242): n is a, c, g, or t
  Coding DNA Sequence Number=SeqID_5106
ccccacttatcttctgcatgatggattcatttgatggaactattttaggcctctgattgcggaatacagatcgatttgcttgtcacaaggataaagcagatcccacgatgaggacagtagaagcgtgggcatccaaatgaataaccagggggagagcagtctaaggcaaattttgctagggctggagcagtcacaagagctaggataatcagtcataggtcctgctagccagggtggaccanccataaaacccctaacagtcaagggaaattttgctagg

SEQ ID NO: 19510 - DNA, 537 bp, Zea mays
  Coding DNA Sequence Number=SeqID_5107
aattccctatgcgaatggagcactatgcatgtggtgttgatctatatgggagggcaggacagcttgataaagcaaaagagcttattgagtctatgccatttcagccagacgccatagtttggatgacccttttaggtgcttgcagaatccatgggaatatggaactagcaagcgatgtggcaaggcatttatttgtggcggaacctcgacagcactccacctacgttcttctctccagcatgtattctggtcttggtatgtggagtgacagagcaacagtgcagaaggtaatgaggaacagggcattaagcaaaattcctggatggagctggattgaggtgaaaaatgaggtgcattcctttaacgcagatgataggtcacacccaaggatggttgaaatctttgatatgttaagaatgctgcttcaggttgcaccgaggctttgctcttctggaggtgaagagattcccatgacaatatccagtgaaacatgacctgcaaccttttgtcttgcacattttttcttaacaacccagt

SEQ ID NO: 19511 - DNA, 213 bp, Zea mays
  Coding DNA Sequence Number=SeqID_5108
ttgcacctgccgaaggtttgcttcattgtctatccgtgttgtacctgaaatacattttctcaatccgaaggtaaggtattttgagggccttcggctaagtaggccctcaaaatgcatgatgctcaaatagctcacttacgtaatagttcattctatttcctttcttttttgtgcaatcgacagcttgtgttgaacagttcaagtaaccatata

SEQ ID NO: 19512 - DNA, 575 bp, Zea mays
  Coding DNA Sequence Number=SeqID_5109
tcttcgtttccttttgcagtttgattcaaatgaacttgagctttttttttctttacttctgaggtccttgatccctggcagcctccagcttaaaatgtttggttctcagccagacaaccttcttggaagtttctctgacattgttggaacttcaacagaaatttgtgtagagaattttacatggaaaaaggcaaatggtttcattcatctggttgaagaaatttttggtacttttgatatgccacatataagcccatttcttaatgttttattaatcattgtcgctcgcttgctggagagttgcatgaggaatcttaccgttactcgaacctatatgatgttccatggataatgttttttggctgaggaattggctcgtcatatttatgtatgcattttcactctctctataaagtgtactagagtaatcttccctagcgaaagggcctatagcctagtggttaaggactttcgaatagcatctccaaatcttgggttagatttctctcgggaacaaatttttaggcttgttaaaaaaatcctctcgctatgtctcatccgcttttgggttatga

SEQ ID NO: 19513 - DNA, 346 bp, Zea mays
  misc_feature (255)..(255): n is a, c, g, or t
  misc_feature (314)..(314): n is a, c, g, or t
  Coding DNA Sequence Number=SeqID_5110
gatgagagctacagcttctgcatgaacaataatgacattgtcctcatggtctacttccagcgttgaagaggtcaacttagttgggttaggaatacgtttcttccagctctatgtctccaaggacaggaatatcgtactacaactcgtgaaaagggctgagggaaggtatataaccaaaattacctctacatcttcggtgggtgttgtgctattggatagtagtgccattaaagctgatgctgtgcagatggtgtntgagggaatttttgctctggatctagtgcatattaagcaacaatggcctccatctatanagtttgagtccttggattcgtgtttagtaaat

SEQ ID NO: 19514 - DNA, 352 bp, Zea mays
  Coding DNA Sequence Number=SeqID_5111
tacacttcagtcgtacgtacacacgcgtatgcaagtccagattttggctcgagcagggccaccacctccctaccgaggaggcagcccaccagggccaccacctccctaccgaggaggcagccccaacgtaccgccatattcgggtggtggcaatccctggcctaaccctggtggcagccctggctaccagggtcaaggaggcaactccaacttccagtgaacatgaccccgagtactaagttggcacccctgtttcagagtagccttctgcaagagatggtggcgccggtaggcccttagcccagcataaatcgaacccttgttgctatcggattttcatgggaatttgggt

SEQ ID NO: 19515 - DNA, 132 bp, Zea mays
  Coding DNA Sequence Number=SeqID_5112
aatatggctgcatcctaccagacagttttcagttaaatgcaatattgttaagactcttgacctctgttaaattctgtatgacatttagtacacagctccttagtattgacttttagtgaggattattaggct

SEQ ID NO: 19516 - DNA, 263 bp, Zea mays
  Coding DNA Sequence Number=SeqID_5113
aggatcattggtgtggatttgaaccctgcaaaatacgaacaaggtacaatagtctgaaaacaaggatgtcttggcaaatgtttttggattgatagaacactgaacctaacaacatgttggcaaatgtttttggattgatagaacactgaacctaacaacatgtactacattattttttagctaagaaatttggatgcacagactttgtgaacccaaaggaccacactaagcccgtgcaagaggtctgttgttcatgtccctca

SEQ ID NO: 19517 - DNA, 275 bp, Zea mays
  Coding DNA Sequence Number=SeqID_5114
cacccagtcgcccatattcgtattgctggtatccgctctcccctcccttggtctcatagagcgcagccatctcccgaccgcacaatagccaccccacgtcttgctcaccgtcgggcagaggagccgtgccgcgctcaccatcgctcatgtccaaaccatcggcgtcccggccatgtatcaagattgcgatccgtttccgagcttcgaggaatcgaagatcaagagttggcgaccaagtgatctggttcttcgagttctatgaggctagagatcct

SEQ ID NO: 19518 - DNA, 124 bp, Zea mays
  Coding DNA Sequence Number=SeqID_5115
tttttgcctcacacggtcgcaccatgacaaaaccgtcggagccgtcgagcctcgctaaggtcgcacctcgccggagtactgcacaacacgccagcaccgtcgccctggcagatcgcgatttgtt

SEQ ID NO: 19519 - DNA, 193 bp, Zea mays
  Coding DNA Sequence Number=SeqID_5116
tcttcagcctcatagaactcagagagcttgatcacttggtcgccgacgcttgatcgtcgactcctcggagcgcggaaacaaatcgcgatctgccagggcgacggtgctggcgtgttgtgcagtactccggcgaggtgcgaccttagcgaggctcgacggctccgacggttttgtcatggtgcgaccgtgtgag

SEQ ID NO: 19520 - DNA, 479 bp, Zea mays
  misc_feature (68)..(68): n is a, c, g, or t
  Coding DNA Sequence Number=SeqID_5117
ttaaaagatcgaggttcttttgcaccccaaggttgaggatgttttgcaactgcggatcaaagtgcggnttcgggtcaaggtgcaagtgcggcaaaaagtaccctgacctggaggaaacgagcaccgccgggcaggcccccgttgtcctcggggtggccccggaaaaaaaggccgcgcccgagtttgtttaggccccggcggagtccggcgagagccgcccaccggctgcagcttcggtggcaactgcaaatgcgacccctgcaactggtgatcccatcgattggcggccatggatatgattattatttatttagcttgtggtgggggttgaacaataataaacgaggcccagctggctgccatacataggtattgtgtggtgtgtgtgaaaaaaaaaaaaacaaagtttttcagtttggtatttctttttgcaagtttggggtcagtttttggggtcaagtacgtacgtgtgtttacct

SEQ ID NO: 19521 - DNA, 105 bp, Zea mays
  Coding DNA Sequence Number=SeqID_5118
gctttaagctaaactagtcgacaattgattggacggcaccaatcatggattctgacgtgcgagtagcgacggcaccgcagaggcgcgatacgacgcggcgcgtca

SEQ ID NO: 19522 - DNA, 395 bp, Zea mays
  misc_feature (52)..(54): n is a, c, g, or t
  Coding DNA Sequence Number=SeqID_5119
cctgcgacaggtgcggcgtggcagcgggtgtgcgggcgcgggcaccggcgcnnncgatccgggcttatacaatggagttggaagccgaagttcagaaactgaaggaacaaaatgaagaattgcagaagaagcaggaacaaataatggagatgcagcaaaaccaggtcccggaattgatcagcaatccatatgcacaaaagaaacggtgcctgcggagaacattgacaggtccctggtaaccgagttgttgacgagtcgggcttgacaggatatttaacattatggcacctgtacatataccttgaggatttggagaacccaaatttccggtgtatattagcgaccaacagagtcgaatgtacctgtgcataacttccttatgctgacactatgcc

SEQ ID NO: 19523 - DNA, 472 bp, Zea mays
  Coding DNA Sequence Number=SeqID_5120
gcctccatgtgtgtcctgacgaagaaacatcacggtccggatcggggagtttggactctcctgagggggccgagtgaccgagggcgagtcgtcgatgggcatggcggaagaaggcgaactcggctccgctcgacgtcactgacgaccacgagcacacgaaggaaggggtcgcgctcacaaagcgttgccgtcggtggactccgagccagcaccgcaacaaccatcgccgtcgtgggtgttcttcatcgccgcatccgtcgtccgacagtccaattggcgacgccagtctccgatcgggttttcccccatcgacggtccttcttggaccacactccttagatccatcacatatgcaccacatcctcaatgacaactacttcaaggttgctttgtttgtacttagtctgtcatttgtttgggttttcgggtccctacatgaataactgaagtgcacaagcatcatatccataga

SEQ ID NO: 19524 - DNA, 419 bp, Zea mays
  Coding DNA Sequence Number=SeqID_5121
gctctctcaactactatcctatggaccccagcgcccgtacagccagctattgcgcctggcccagcacccgacccaccagaccacacgtaccataggatgtgtttggtttcaggtcaagtaggatgaggcgggggcgacaccgttcccttgattttttgggatcacgtcgccacaaaaaacaaactccggtgcttacctcgctcacacgtgactctcatccaaacattataaatattgtggccgcccccttcaatccctccttttacatccgactaaacacacccttaatgttagaaataaacaataattatataaaagtagcgcagggcgagcaatcgaacccacgtcctctgctccagaaatttaggggtaaccaacagagccacacgtatattagagcaagcactcgaactcatgcc

SEQ ID NO: 19525 - DNA, 426 bp, Zea mays
  Coding DNA Sequence Number=SeqID_5122
catggcagcaaggattcctgggagcgggttgctaagagggctccctccttggactgaagtgcccagctgcttccccttcggagaaaggaacaacctttctggcgaagcgacggcgggcggtttcgcctttttccaaaaaagggggggcgggaggaacccaaagggacacatctacttgtggaaaaaacttttgaaaacaacgcggccacacttcccacgtgatttcccccaataaaaggtcgggccgggcgcaataaaaaaactcccccccgacccttgtggcgcaaaaatcgcccatgccgcggttaacgtgcgctcccccccactcccccacctttatgcgcccgtcaccatatactgggacttactacgcaccgcgtctcctctggacggcaacacatagcagtaacactccccgagacattg

SEQ ID NO: 19526 - DNA, 474 bp, Zea mays
  Coding DNA Sequence Number=SeqID_5123
cgtgctgtcggtttatcccctctctccagttctccagctcacaagtttcctggcctcgcttgtatctttgagcgcctcaactctgcagcacgtatatcctgtaataagctctatcttgcatacactagctctagagtctttcaagatgagcaaacagatctgagctccaggtatgaggacaagagcatccgctaattcgtaaatcatagttgcggacttgtggtacaagatctctctacagcctcttcggtgctggaagcggtggtacattagccaatggtaaaaaccagccaaagaagtggagaaataccgttgccctaatgctgggagaagggggtctggatttctgccgacgaggtgggcgacagagaaggaagaagggatggaggaagactggaagaggagggagctgcatgcgggctctcttgatggggcgccgctattcagtgctagacagtttggttgtgagagaca

SEQ ID NO: 19527 - DNA, 438 bp, Zea mays
  Coding DNA Sequence Number=SeqID_5124
tgtctctcacaaccaaactgtctagcactgaatagcggcgccccatcaagagagcccgcatgcagctccctcctcttccagtcttcctccatcccttcttccttctctgtcgcccacctcgtcggcagaaatccagacccccttctcccagcattagggcaacggtatttctccacttctttggctggtttttaccattggctaatgtaccaccgcttccagcaccgaagaggctgtagagagatcttgtaccacaagtccgcaactatgatttacgaattagcggatgctcttgtcctcatacctggagctcagatctgtttgctcatcttgaaagactctagagctagtgtatgcaagatagagcttattacaggatatacgtgctgcagagttgaggcgctcaaagatacaagcgaggccaggaaacttgtgagc

SEQ ID NO: 19528 - DNA, 157 bp, Zea mays
  Coding DNA Sequence Number=SeqID_5125
gacgctgcgactcccgcgattaactctcttggggtggctcgcgccgagaactccccggagcgaccccttcgccaacctctacgggaacagtgcgggttggaacattagcgacgtccaccattgtgattttggtgacggaaccctgggatacccctct

SEQ ID NO: 19529 - DNA, 454 bp, Zea mays
  misc_feature (32)..(33): n is a, c, g, or t
  misc_feature (35)..(35): n is a, c, g, or t
  misc_feature (46)..(46): n is a, c, g, or t
  misc_feature (62)..(62): n is a, c, g, or t
  misc_feature (74)..(74): n is a, c, g, or t
  misc_feature (87)..(87): n is a, c, g, or t
  misc_feature (97)..(97): n is a, c, g, or t
  misc_feature (108)..(108): n is a, c, g, or t
  misc_feature (113)..(113): n is a, c, g, or t
  misc_feature (118)..(118): n is a, c, g, or t
  misc_feature (129)..(129): n is a, c, g, or t
  misc_feature (140)..(140): n is a, c, g, or t
  misc_feature (155)..(155): n is a, c, g, or t
  misc_feature (161)..(161): n is a, c, g, or t
  misc_feature (172)..(173): n is a, c, g, or t
  misc_feature (195)..(195): n is a, c, g, or t
  misc_feature (197)..(197): n is a, c, g, or t
  misc_feature (206)..(210): n is a, c, g, or t
  misc_feature (212)..(212): n is a, c, g, or t
  misc_feature (214)..(214): n is a, c, g, or t
  misc_feature (218)..(218): n is a, c, g, or t
  misc_feature (224)..(224): n is a, c, g, or t
  misc_feature (230)..(230): n is a, c, g, or t
  misc_feature (247)..(247): n is a, c, g, or t
  misc_feature (250)..(250): n is a, c, g, or t
  misc_feature (264)..(265): n is a, c, g, or t
  misc_feature (271)..(271): n is a, c, g, or t
  misc_feature (286)..(288): n is a, c, g, or t
  misc_feature (316)..(316): n is a, c, g, or t
  misc_feature (325)..(327): n is a, c, g, or t
  misc_feature (337)..(337): n is a, c, g, or t
  misc_feature (356)..(356): n is a, c, g, or t
  misc_feature (368)..(368): n is a, c, g, or t
  misc_feature (393)..(393): n is a, c, g, or t
  misc_feature (400)..(400): n is a, c, g, or t
  misc_feature (402)..(402): n is a, c, g, or t
  misc_feature (423)..(423): n is a, c, g, or t
  Coding DNA Sequence Number=SeqID_5126
ccgttctgtcctcgttgtctgttccgcaggtnntngcctccgtaanttcgtggccgactganaatcgctccacnatggccgtcaagncctattccgnaaggtcagtgnagagnactcngctacgagganaactgttgcantctcgcggccggttntcgtcntttcatgcaanngcacgctccaatacctacgtgnangtgagaatnnnnnancntctnggagangatgantataaagaacaggttgnttnatatctcacaaaannttggantggtgggtttgaaannngcatcaatacattgtttttgactgaaangtgccgtgnnntgatgctaantctcaagtacttctttganagaaatgtcacnattaactatccgtttgagaaggttnctctgantncccgcttccgtgtagagcacnctctcagacgttatgaatctgggagaagagc

SEQ ID NO: 19530 - DNA, 543 bp, Zea mays
  Coding DNA Sequence Number=SeqID_5127
aaatctcctgagaagttgccggccggcgcccgtggttttttccccttcactttggaggggttttccacgttaaatccgtgtcttctctgtgattgatcctattttgtgtcgcatttatttacaacagaaatctcgtggaaacagaggcggaagaagtgctgaaatggatgcagcgggcgagtgctgtcggactgaacattggcagccaaaaaggaatcttggtaaaaagaaaactcaatggcaagagaaacactacagtatcagatgaaggtcgtgtgcttgctttgcttcgtccacgagtgggaaagggagagataaaatatggaattcgagaagaaacgagcgtcgaagcatagctaaaaaaaacaagcacaaaaaaacagagccggggacgtccggacgtcagagcacacagaaagcggtagaagaacttgcagtggcgattcggcagaatgacgaacacacgagagagatccccgtggtttgcgcttgcgcgcgcacagagtagccgaaacaaatggcggtagagacgctattagaaaa

SEQ ID NO: 19531 - DNA, 480 bp, Zea mays
  Coding DNA Sequence Number=SeqID_5128
gttatgatgcctgagatctttctcctccttatggtttgtatttgcatagtagtgtcaccattgtcttctagtacttgttgagaacatcaagtcctttttgagtttgaatttgaccatccaatattttaatgacacctttacctctaaaaatcattattccttgtgtggtagccattttctcctcctcgtcgtagacaatttcttgtgtagaggtcgtatcgtggattttctatcaacaatctcccaaacttgtcccctatagatgaggtgtttggtggctttccatccattgatactagtgtcaatggtagtgatatcaatgctttggggcctctctatgactgcacttgtcgtatccctagtgtcatgattattcttgaattttgtgctcttttccttctgtaaggtgacctctttatccttctcatacttttcttgtagattggagaggagattaaaccttcgctttccctttatgat

SEQ ID NO: 19532 - DNA, 506 bp, Zea mays
  Coding DNA Sequence Number=SeqID_5129
taatcatgacactagggatacgacaagtgcagtcatagagaggccccaaagcattgatatcactaccattgacactagtatcaatggatggaaagccaccaaacacctcatctataggggacaagtttgggagattgttgatagaaaatccacgatacgacctctacacaagaaattgtctacgacgaggaggagaaaatggctaccacacaaggaataatgatttttagaggtaaaggtgtcattaaaatattggatggtcaaattcaaactcaaaaaggacttgatgttctcaacaagtactagaagacaatggtgacactactatgcaaatacaaaccataaggaggagaaagatctcaggcatcataacattaatttaaagggggaaattaagccaatgattatgtaggaaatatattgttactttattattactgatgaattatgttgattcagttaccatcagattgtttcatcctttctatccgttaaagtcgtcatta

SEQ ID NO: 19533 - DNA, 266 bp, Zea mays
  Coding DNA Sequence Number=SeqID_5130
gagaagatacttgtcttcctagccactgcgggtctgcctgcaccgcgtcgcgtcgccactgcaccgacccgccacagccccgctagcctgattccaccgtcaccctagatatactgtatgactcgtggtccccagcgatgactgtcagttctatctgtatcagcatattatctatgctgtccagctcgccagaaaaggttacatattttctctacatcaccttgttgaattggtgggtcttgcttttgactgcaatacattaccga

SEQ ID NO: 19534 - DNA, 203 bp, Zea mays
  Coding DNA Sequence Number=SeqID_5131
acatgagtgggctgccatatcctccacctttgtttgatatgatatgatatgattcagggctatgtatgaggcacgcgtcccattatttttgttttattacgaatgaatgaaggcccaaacaataataacggatggatgggcatgtatatcgtcatgggcatgtcccccgacgagacgggagtataccccggtggagtagtatt

SEQ ID NO: 19535 - DNA, 551 bp, Zea mays
  Coding DNA Sequence Number=SeqID_5132
aggacggcttccacatgtacggcatccatgcacgcgtcaattcggcttccgcttcggctcgctttccggagaatctgtgtgctgaagacaggttcaagctggcggtgtcggagatgctgcagctgatcaacatctgagctaggccaacgcgctcatgctcgccaatgcaacaaatcgctctgctccttggacatggagttgagctatggtgctatgctgctgccgtcgtcgtttcgtgttaagtttggtcgtcgtccaactcttttagtttgtttctcttgttagtgccaagtttggtcgtcgtcggttgaactcttttatttctcaagacagctggttagtggttcctagcgtatggtaagtactgtttgaggtttaacccgtcgtggatgtagttgtatgatcgggtttcatgtgtgagagttctaaccataatcactagacatcgtagaacaaaaaaaaaaaaaaaaaacagacggagtggcccggtactcaagacagctggtcagtggtgccaagcacgtggtaagctctgtcaaaggtttaacccg

SEQ ID NO: 19536 - DNA, 357 bp, Zea mays
  Coding DNA Sequence Number=SeqID_5133
gggttcaggcattgtcacccgtcgcccgctggttctgcaactccataggattgatggagacagagagtatgcagagttcatgcatgtccccaggaagagattcaccgatttcgccatggtgaggaaggagatagctgatgaaactgacagacaaaccggccatggaaagggaatatcatctgtccccatccatttaagcatattttctccatacgttgtgaatctgactcttattgatcttcctgggcttactaaagttgctgttgagggtcagccggagagtattgttcaggaaattgaaaacatggtccgttcattcatcgaaaagcccaactgcatcattttggctgtttcgcc

SEQ ID NO: 19537 - DNA, 314 bp, Zea mays
  misc_feature (39)..(40): n is a, c, g, or t
  misc_feature (46)..(46): n is a, c, g, or t
  misc_feature (72)..(74): n is a, c, g, or t
  misc_feature (97)..(100): n is a, c, g, or t
  misc_feature (103)..(103): n is a, c, g, or t
  misc_feature (117)..(118): n is a, c, g, or t
  misc_feature (135)..(136): n is a, c, g, or t
  misc_feature (149)..(149): n is a, c, g, or t
  misc_feature (151)..(151): n is a, c, g, or t
  misc_feature (171)..(173): n is a, c, g, or t
  misc_feature (178)..(179): n is a, c, g, or t
  misc_feature (261)..(263): n is a, c, g, or t
  Coding DNA Sequence Number=SeqID_5134
agccaattttatcattgttcctgcgtggagaaaaagcannatggtntaaaagcagatggaactggcaaaacnnnacagaatgaactgacatgtagtnnnngcnccgaacgtccgatnntgggtgtttggtggagnntgtaatcatgctngnatcccccgcacgctaactcnnntcaannatggggcgtctattttcctcttaatgaaaacctgtctcgatcctggtcacattttcgctacctttttcttcaaagaaagaannntttctccaggtagattaaagtgcaactcccatagtaacatttttgtctaca

SEQ ID NO: 19538 - DNA, 322 bp, Zea mays
  Coding DNA Sequence Number=SeqID_5135
tcttagtggcggttctcgatgtcatctggaatctgtacaaaggtgatatttgtgtagcgaaagcgccatgcccgatgtgcggggaggtgtcctaccttcgcaccatcgtctctgcttgcctgatggttgcatatgtgtagtcttctttgttggtcaggtcctcaggaattcggttgttgttgttctgctcgcgtcaagtctgttcatgttgtgtttgctttctttccctgcttgttgctgaagcacttgctacgttgtgcttgttgctgtttctaatatgtgttctactacaaaattatgtaacgagtcgtttggatccctt

SEQ ID NO: 19539 - DNA, 366 bp, Zea mays
  Coding DNA Sequence Number=SeqID_5136
aatattacacacattgtccagcaaaacattacatttcaaatgtcttcaaaataacagctaatcttctcttaaaactacttcgacagcttcgtttaatagttgatcaacaactttatccataataacttcgaccattttctattcgtcatcctcctttgctttggggttcgccaatggctcggcgggctctgggggaggagatagtaaggcttcaatgcgcgcggctcagtgggccttattgctcggtggggggttgggatgaaagggtcgatcagcctcaaccagggcttctcagacgggcctccgatgctacaatgcgcgtggcttggaggttgaagacggtggcggaagtcgaatcgtctgtcc

SEQ ID NO: 19540 - DNA, 383 bp, Zea mays
  misc_feature (241)..(241): n is a, c, g, or t
  misc_feature (260)..(260): n is a, c, g, or t
  misc_feature (327)..(327): n is a, c, g, or t
  Coding DNA Sequence Number=SeqID_5137
gcactacccgccctggcgggtaagaagaaggaagggaatgcggcaaagtacatcacgaggaccaaggcggtcaactacctgcaagttagcctcgcaatctttaggaagctatgcattctaaagggtgtctttccacgtcagccaaagaaaaaaggtgggaaggggaaccacaagacctactaccacacaaagggatattgcatttcctcgcctcatggaccccttggatcggagaagttcnggggagaattaagggtccntccgaaggaaggttaaaaaagggtggtggcttaaaaaaaacaggggatcttgcagaacagggttggntggaatcgggccaccaaacttacaagctttggataagggctggtccccttggaaag

SEQ ID NO: 19541 - DNA, 449 bp, Zea mays
  Coding DNA Sequence Number=SeqID_5138
tttgcgcgaaaaaggtgaggaatcctcttgtgtcctggccgttggccgtcgctgcgtcgttccagatttggggaaggaaatccggcaccgagattcgagtcgaaaagatccgcggtatcgctcggccttcaaatacttcggcaacgtcgccggttcagcctttgtctaggtctatgaatgccgagcgatacagtggatctagaagaaatgcagatgctctaagatcggggctcctgaacaaaagagagatgcaatcagccgattagagagatgtataatcggatacaaatcacacatttagctgaagaataagggttacaatcaaatccacttcaatcgacaaaaaatgcttcaaaaatcgacggaaacctcgatgtatttcaagttggattacctggaacttctcgggaaagcattggctcttgaatcgggctccaatgctcggagat

SEQ ID NO: 19542 - DNA, 533 bp, Zea mays
  Coding DNA Sequence Number=SeqID_5139
gtccgaatgcagtagttggtcctgatggtaaaatattcaacatgtgcacctcaacccttggttgtggagatggatgtatgtggctacctactctccttattagctttggtgtttggtgcatttctagaatacttgaagtgcttccttcggcaaagaaacctttgctttttgggaagtatagtagggttctcaatcgccttcagggcattctggatccagcattcttgaagcctgttcaacctgtctccatatgcccgtgcaccaagagcgtcccagtcgtgagactgcctgatggaagccaacgtatcagcgtggaagctgtgctggagatgctgatggaagttgaggccaccatctacggtgtgaggcacgctggagtctatggcagggagaagaaaagcctgaaatctgttctggaccgctataagctccggctctccgaggtggcatctcaggagtaggatttccttcatattagatcgacataataataataaaataaaaagctgaactctccagctatggtcacagat

SEQ ID NO: 19543 - DNA, 476 bp, Zea mays
  Coding DNA Sequence Number=SeqID_5140
tggatcccatttaccagagtggcatcgagggatggaaccaaatactcctaaagagaagttcaatcgagttcactcatctattcgtaatgtcatcgagcgctcatttggggtattgaaaatgaaatggcagatcctttataagatgccgggctattccacgctcacacaaaaaaaaattattgctgccaccatggttattcataacttcattcatgaacatgcaagtgaggatgaggattttgcaaattttgatcgggatccaaattttgttgctcctatcccagaaagatccaacaaatatgcggtatctcagcatgcctctgatggatcaccattggaatcaagctttgtgcccatggatgcatttcgtgatagtttggctacatctattgccttagcgtggaactagaaaaaataattagcattgtatactatgagatattttgttttagcgtatggccatgcaacattttata

SEQ ID NO: 19544 - DNA, 180 bp, Zea mays
  Coding DNA Sequence Number=SeqID_5141
cttttctctctgaaaaagtctttcgaaatccatctctagggttccttgttttttccccaatcctcccccccaacccaaccccccacaaaaacagaattcatttccaacaagtaccagcaatcccattgtcgttcctataacgcccggaagtctctaatcctccggaatcagctaaacaat

SEQ ID NO: 19545 - DNA, 97 bp, Zea mays
  Coding DNA Sequence Number=SeqID_5142
gaaagtggtaacacggcctttgaagggggtgactccagcaatgctggttatggcgggacagcagcccctactgaattgtgtgaattggctccaaaag

SEQ ID NO: 19546 - DNA, 425 bp, Zea mays
  misc_feature (57)..(57): n is a, c, g, or t
  Coding DNA Sequence Number=SeqID_5143
gaagtcttcgtttagggcaaaagcacccaattccccccttgtggttggtaggagaanttaattgactggggattcggcctccaaaggcttcccgggagggccttatggattaatcccctcccaatttcctatcctgggcagcagacgcctctgaaaaatggaaccggtaagcttgtggtgactaaatggataatccccctggaagcatcacctacccccaaaccccacctgttgtcaggatggtttgttacgtattttattacttgcaacaccataacgtgattgatgcttggtcatagaatcagctgaagtacttgccctaaactcttccagttctttagtgagaagttggcctgctcttgcatttcttgctcccaaccgctgagcgcaaattagaacagccctgcacatcttgtatcctattt

SEQ ID NO: 19547 - DNA, 550 bp, Zea mays
  Coding DNA Sequence Number=SeqID_5144
tctaccgcgacgacttcagccagaacggcctgcacccgcaagtgcgtccttcggccctgccgttcgagatcgaaggccagcacctggtgctgatcgatgacgtcctgatgagcggtcgcaccatccgcgccgccatgaacgagctgttcgactacggccgcccggccagcgtgacgctggtctgcctgctggacctggatgccggcgaattgccgatcagcccggacgtcgtcggcgccaccctgtccctggaagcccaccagcgggtaaaattgtccggtcccacgccgctcgaactcgaactgcaagaccttgccctttaaaccgccttgtaaagagtccccgcgatgacgcctctagatgccaagcgcccgctgcagctcaatgctcagggccagctgcaacacttcctgtccctcgacggcttgccccgcgaactgctcaccgaaatcctcgacacggccgactcgttcctcgaagtcggcggtcgggcggtgaaaaaagtcccgctgttgcgcggcaagaccatctgcaacgtgttcttcgagaa

SEQ ID NO: 19548 - DNA, 313 bp, Zea mays
  Coding DNA Sequence Number=SeqID_5145
gtttaaaatcgttcacccatggtattcgtaacagcaataggtggattctgaagagatgaaccgtggtgttgttagaagtcctgcttcgttctgtattcttctattgtgcatcaacatctgggtgacacaatgccaaagccgctggtgacaaggtggtgaggacaatgatctccatgttttgatggttggaaggcagatcgatgaccaaaggggtcggtcgcccttgggaaccggctcgcacacataacgtgatgcgggtggatcggttccttgagcagactcgctaggtgggctctcagtcgcaacagtgagt

SEQ ID NO: 19549 - DNA, 196 bp, Zea mays
  Coding DNA Sequence Number=SeqID_5146
accttgtcaccagcggctttggcattgtgtcacccagatgttgatgcacaatagaagaatacagaacgaagcaggacttctaacaacaccacggttcatctcttcagaatccacctattgctgttacgaataccatgggtgaacgattttaaacagtttcattgtttgtaattgccaactatgtatctaaaggtga

SEQ ID NO: 19550 - DNA, 466 bp, Zea mays
  Coding DNA Sequence Number=SeqID_5147
ctttgggctcaaatctgtgatcagaaaacgtttacagaaggcggagcaagggcgcagagcactgcagacgcatccatagggcctcaggaccaaaataacatcacagaaaagctagaataatcagatccatgcttcaaaaccctccaaatctcgatccccgttacatattatccatttcttacaagcatacatcacgtgaagtggggatcgaataaaaaaaaaaggggaagaaaatcatgacagagatggccatgcagccaagtggctgcagaaatgtccatgcggccaaatggtagaataaagaataaaaattcagagagagatttggaagaacagaaaacacagttttagagttaatattaggggcagcttccatcgttcagagaaccgaagtgcttgccacaccaaacaaaaagagacatgcgaagagagaggaatagcatggcatgcatgcagcgcacagtgc

SEQ ID NO: 19551 - DNA, 520 bp, Zea mays
  Coding DNA Sequence Number=SeqID_5148
gcacgaggatttgtgctccctccagccgccacaaacagatgccgagcgcgcctaccggctgccacggcacgaggcagtgcactgtgcgctgcatgcatgccatgctattcctctctcttcgcatgtctctttttgtttggtgtggcaagcacttcggttctctgaacgatggaagctgcccctaatattaactctaaaactgtgttttctgttcttccaaatctctctctgaatttttattctttattctaccatttggccgcatggacatttctgcagccacttggctgcatggccatctctgtcatgattttcttccccttttttttttattcgatccccacttcacgtgatgtatgcttgtaagaaatggataatatgtaacggggatcgagatttggagggttttgaagcatggatctgattattctagcttttctgtgatgttattttggtcctgaggccctatggatgcgtctgcagtgctctgcgcccttgctccgccttctgtaaacgtttt

SEQ ID NO: 19552 - DNA, 300 bp, Zea mays
  misc_feature (116)..(116): n is a, c, g, or t
  Coding DNA Sequence Number=SeqID_5149
gaggaggagtcatcgcatgtgcgcgaggaggaaaggggattttccgtcgcctgcgtgtaagtcccatcgccgagctgcagaatgcacgctctagaaaagagcgcaccgcccgcggnggttcgggggcccggaggaggccatggtcccatgcaccctggcgccttgcagaaaggaaaaagccggcagcttgaaaattgagggggggaaagggaatggcccaaaccgcttgagggagggggtggcccctttctaaaagggaccaagggcaagggaagcctcgcgggaaatcgtggcccctgt

SEQ ID NO: 19553 - DNA, 219 bp, Zea mays
  Coding DNA Sequence Number=SeqID_5150
tttgacaattaatggatcgatctgcttctgcttttgtatagcagtgtgtaaagtaattacacttgcttccactttctcgcccgccacatttaatggtttaaagttattaccttgagtaaaaaaaaagaatcaataaacgcctagtcctgcagccatatcaacgtcagcgccgtccatgtcgccgtcctccgggatttcctggccgtaaacctcgtgctc

SEQ ID NO: 19554 - DNA, 389 bp, Zea mays
  Coding DNA Sequence Number=SeqID_5151
ggaaagccctacaattccagctcacgtttctcatcccgttcccgatcccctttgcctgtttcttttctcctcgtcgccggagacttggagcctcgcagccgccccacttcccatcctcttgccccctcatccccaggagagccagccagccagccaggaataatcctcttctccgcgcggcgacccgacgcggcggccaggcgacgtcgctgtccactccgccggcgggttcctgccgcctgattccgccaggcttcgattcggccgttcgccgccgccggaggtcggggagaggcagctaccgaccagccgtccacgccgcgggcgacggggttcccgctcccgtcaggaacgccgccgaaaacattggcttccataacttcgcccgg

SEQ ID NO: 19555 - DNA, 505 bp, Zea mays
  Coding DNA Sequence Number=SeqID_5152
ccgggcgaagttatggaagccaatgttttcggcggcgttcctgacgggagcgggaaccccgtcgcccgcggcgtggacggctggtcggtagctgcctctccccgacctccggcggcggcgaacggccgaatcgaagcctggcggaatcaggcggcaggaacccgccggcggagtggacagcgacgtcgcctggccgccgcgtcgggtcgccgcgcggagaagaggattattcctggctggctggctggctctcctggggatgagggggcaagaggatgggaagtggggcggctgcgaggctccaagtctccggcgacgaggagaaaagaaacaggcaaaggggatcgggaacgggatgagaaacgtgagctggaattgtagggctttcccctctccgaagagagggagcccttccagaaattctcagtggcccataagggccaaagagggggtttggaaatagttttcaaccagcaattgacgcgcctcggtataacctcactag

SEQ ID NO: 19556 - DNA, 554 bp, Zea mays
  Coding DNA Sequence Number=SeqID_5153
ggaaaccttgccctacgtatgtattctttttcttcctcttatttcttctacatctttgctcaagaacgacggctggctcccttgggtgcctcgatatggtgtagactatcttggagttctatagtaatctctgcaaaagtcagacacgcatcaggatctttgtcctagcaccgtcgaatcagcttggtcaatcttgggtgcacgctgcccggaatgtccaagcgcaatcccaacagtttgatcgtcccaaaatcacgtctccctgagttatattttaagccaaaaaaagccagtcaagtaaattttgcaaagctgagtgtgaagaatatggaagttagtaggttgacgacagaggtagtttgtttcagtagtgatagcctaataattaaggcagtttgtttcaatagaacattgacatcttgctcgtccctccacccattcctcatgaacacgaagtaagcgttgggtgccctcttgggcttgttgggtccttgccggtattgatcccaagccaaggtattgtttcaatgttgtatcagtgtgctccaagccaa

SEQ ID NO: 19557 - DNA, 549 bp, Zea mays
  Coding DNA Sequence Number=SeqID_5154
ctagctgttagcctacctttcccctcccagccgtgggacgcaccaccctcagcctcccagctgccgcacacgtggaggctccacgcgaccacgcggcagcggcacgccggcacgcgcgccgcccggcgcccctcagcctcgcgccctcgccggccacgcgcctcagtcttgcgctctcgccgcgttaagccggtcagccttgcgggttgcggtctcgccgccgacgccgggcgccgggattgccggctgcccgccttgccggagacgggagacgccatgtccttgctgctcctgcccctctgtcgaacctccgcggaccgcgccgttccctggttgtcgtaggacgtcggcaggagtccctccgccgtcacccgtcagacgcgccaccgcggcgccgcctccccaggctcccctgctctgctccacagcttcagtgctccgtggtgcgatatcacctgtccatgctgaagcaagagctggaagactcttccagtaatcatgggtgcatgtgcctcttcatcttgtgggcgaccccaccatggcaggaac

SEQ ID NO: 19558 - DNA, 165 bp, Zea mays
  Coding DNA Sequence Number=SeqID_5155
tcgagccccgatattttcctttcagctcaacgcgattgctttgatgaggagaaggatactacagcgtgatgtggagatagaggttgaagcagttgacagcatcaggaacattcataggttcgttgtgggagtccacgaccatccatagggctcaattgctccgag

SEQ ID NO: 19559 - DNA, 417 bp, Zea mays
  Coding DNA Sequence Number=SeqID_5156
agtcagcgagctggcaagttcggatagggactgctgacgtgaggaccatgacgaatatgaaatcgatgaccgaccaagatatgattggtgagttgagcgactccgatgatttgacggcagtcgcgacagcgaacaggaggacgtgcgcagagaaacagcacggcacggtatcaagcgccattggtcggacgagttcggacaccagcacacgcagcgttttaccatgcccaacacgcgcgtcacggacttgatatcgactgcgagcagtttcgcgcgcacgacaacgcgatggaggcgaactgaacagggagcttcacggcaggacacgcaggaataacgaaacgcgatgcgcgcgacgcaaagaattcgaccggcgagcagagaggctgggcaactcctggacgagcagagcgcgca

SEQ ID NO: 19560 - DNA, 566 bp, Zea mays
  misc_feature (140)..(142): n is a, c, g, or t
  misc_feature (175)..(177): n is a, c, g, or t
  misc_feature (180)..(182): n is a, c, g, or t
  misc_feature (217)..(218): n is a, c, g, or t
  misc_feature (380)..(382): n is a, c, g, or t
  misc_feature (384)..(384): n is a, c, g, or t
  Coding DNA Sequence Number=SeqID_5157
gtaagttggcttctagatgttttaagatctttcgtatatgaggttggatgttattcctaacagaaaaggagtgagttagctcttggctcagccaaaggacatggcattcctcaagtacgtcaacaagtggaaggattacnnnggtggcggtctgccagcggtgggaggataactnnngcnnntgggtgtcagggtttgcagtagctaagttatttannatgtgtttggtttgaggtcaaagtggtacaaggcgggggcgacactgtcccttcaattttttaagatcacgccgctaaaaaaactactttggtgtttacgtcgttcctacgtgactctcatctaaaccctatagaaactgtgaccgtcccattttatccttnnntntacttggttaggtcgtcacagtggttcgccatactcgtcgcattagctaatgaaaactgtactagaacctagttttcttccctttgctactgaaatgaacactggttcacaaatgaaaagcttttgctactgaagtgaactgtgccactctttttccacctttgcgttccatgtgtttaaca

SEQ ID NO: 19561 - DNA, 432 bp, Zea mays
  Coding DNA Sequence Number=SeqID_5158
ataccgacacgagtacgtacgtctcacctgtgttttgatattgtaatactagtagtatacacttgattgtctcgccatcgtcgtctcacacacatttggcatgcttgcaggcttacactgaaattggcagtgaaaactacttcaagactcggtggagtagtgtcaaaacgagtctaggacattcaaggagagtgacccgtgccaaggacgagaactgtgcgtcaacggttagcatcggtggctacactacagccttctgcatcgcagtcctacaacaccagttcgagccgctgccggaagagcgcgaataatccagctcgatcgagtttgcgcgttattacctcctaatttaaataagctgtgcacgcaaacgtaagactgtattagtatttatatatgtattacatgtatgtcgtctattacaatacttat

SEQ ID NO: 19562 - DNA, 431 bp, Zea mays
  Coding DNA Sequence Number=SeqID_5159
caccggtacaagatgcgcgaagcccgtccccctcgacgcccacaaggtccggcccatttcacaatccccagtggaaacattatcgatattctcgaccctggcctttctggctctccctgacaaaaggtgaaaggagaaagagccgaggccccctttggggggagggttcctccaaacggggcaaatcggcgtaaaacgtagactggcgcccattaccgtaggcttcgatttctccccggggcacccgcaagccctgctccacccccccacggcccacgttctctcctccccagacaaaaggaccttaaattaacccaggggcctgctgcgcataccggcagccgcgccaccaaaacccgacccccggtatcaaccaaagcgtattaactgcatcctactgcgagaaaacaaacaccgatagcaccaaactc

SEQ ID NO: 19563 - DNA, 581 bp, Zea mays
  Coding DNA Sequence Number=SeqID_5160
gcagtaggatgcagttaatacgctttggttgataccgggggtcgggttttggtggcgcggctgccggtatgcgcagcaggcccctgggttaatttaaggtccttttgtctggggaggagagaacgtgggccgtgggggggtggagcagggcttgcgggtgccccggggagaaatcgaagcctacggtaatgggcgccagtctacgttttacgccgatttgccccgtttggaggaaccctccccccaaagggggcctcggctctttctcctttcaccttttgtcagggagagccagaaaggccagggtcgagaatatcgataatgtttccactggggattgtgaaatgggccggaccttgtgggcgtcgagggggacgggcttcgcgcatcttgtaccggtggtcggagccgtcggccgccacgccgccggccgccgcgagggcgaggaggacgaggagcgccgcggccggggccggcgaggccgccatcgctctcgtcgggcggcgttgacgagagaggcgggcacgagggtttggggtgggaggggggacgcgggcggagagatctgagcgaggcctgac

SEQ ID NO: 19564 - DNA, 545 bp, Zea mays
  Coding DNA Sequence Number=SeqID_5161
tacgtacaaggcagttggtagggatatgctgatattttggaaacgagtagacaaagagcagtatgagttgagaaaaaaagaggaaagagaagctgctgaagctttaaaacgtgaggaggagcttcgtgaagccaaaagacaacaacagaggctaaactttctgctgtcacaaacggagctttatagtcatttcatgcagaacaaggctggtggctcagcgccacctgatgaggaagatgtccctgatgaagatgaggaagaagatcctgaagaagctcaattgaaaagagaggccttgagggcagctcagcatgccgtctctcaacaaaagatgaagactaatgcatttgatagtgaaattgtgaggcttcgtcaaacttctgattctgctcttccaactgatgattcatctagcatggatcctagtaagattgatctattacacccttcaacaatgcctgagaagtcatctgtgcagacaccagagttgtttaagggtgtattaaaagaatatcagttaaaaggcttacaatggctggttaatt

SEQ ID NO: 19565 - DNA, 386 bp, Zea mays
  Coding DNA Sequence Number=SeqID_5162
ggccgccggcacacagatagagaaagagagagagactgagagagagagggaggggaagcgaagagaccagaacaagagcgaagatggtcggactcctccccgagaccaatgccgcggcggagacggacgtcctcctcgacgcctgggacttcaagggccggccgagcagcaacgaccgagccctggccgagctgccctcccccgacgcgcacctctctccatcacgccgagccgagccctgtcaggacggtacagctacagcggcaagcagccgacgacacctctctccatcacgccagcgacagcgccgatgagccactgaagaaggacgggtcgttctttgatttcctcggcgtcgggcgaactgcatgcggtagtagctgaca

SEQ ID NO: 19566 - DNA, 111 bp, Zea mays
  Coding DNA Sequence Number=SeqID_5163
ctgtctccttgccagaaactgggcgcgggggcttgcttctgcttccccctcctcattcttccaagaagggagatcccccccgcgcgtgccaaaagagaggctttttatctt

SEQ ID NO: 19567 - DNA, 174 bp, Zea mays
  misc_feature (45)..(45): n is a, c, g, or t
  misc_feature (51)..(51): n is a, c, g, or t
  Coding DNA Sequence Number=SeqID_5164
gggttacgtaacacggcgattcaggaggggatagcatcgtcatcncaaaangcaggctctcctgctccccgcgcgggccgccgccgacgccggcattgcttcggcagcgtgcggtttctgcctccgcgtgtgcgtcgcaggagagcctgcatttttgcggtgacgatccttttc

SEQ ID NO: 19568 - DNA, 425 bp, Zea mays
  misc_feature (394)..(394): n is a, c, g, or t
  Coding DNA Sequence Number=SeqID_5165
cacggctccagctcggcatgcccggcgccaccgctccgagcgcctttccccgagtggtcccgcctcgtcgaccggcttgccgccaccgggtacggctccggcgtgcccttttccgctgacgatctcgcgagccctcgtgtccggatgcgtcctgtcggacggggagcaggccgctgtctccacctgcctcgccttcgcgcgcgaccggcctgacctcctcagttcgcttcaaaggaaggatgtggaggtcctggtgggcaatgtggcgccgtctctgttcaaggacggggaggcatcagcgctgcggcttcggcgctaccttgctggggaagaaaccgatgtcactgtttcagacagagctgaaactgtcgatattgttcgatatctgctaagntacacatacggttcttctgtcagctgctcag

SEQ ID NO: 19569 - DNA, 422 bp, Zea mays
  Coding DNA Sequence Number=SeqID_5166
atttaaccaagccccccatcagttgcggccgcgcgctcgtgccgttgcgctgcggcaaagcctccccccacacctctctcctccacccgccgcccccgcgggaccgaaaccctagctagggttctgcccgccgccgccgccgccttcgatccagacgcggccagccttcccgcaacaccgccatggacacggggcgcaagcggaccgcaccggagggcgccaacggcgcgggcggccccaagcgcgcgagagaatcggagacaactggtgtaggaagcaaatccaagccgtgcaccaaatttttcagcactgcgggttgcccctttggtgcaacccgcagtgctgaaaaattcggtgactcagggtttggtggtcggtcaggtggcggtggaggatttggtgactcaggattcggtggccaa

SEQ ID NO: 19570 - DNA, 287 bp, Zea mays
  misc_feature (184)..(184): n is a, c, g, or t
  misc_feature (204)..(204): n is a, c, g, or t
  Coding DNA Sequence Number=SeqID_5167
actgaagatcttcaacgaattgttgaagcgagtgctacgtcacttgttgcgatgcggattacagctgaagagagactaaacaaccagcgattgcgtgaggaacaagatgctgcttacagagctgcacttgaagctgatcaggccagggaacgtgaaaggttagaggaactgaaaagacgtgaangagaggctgcagaggctganaaaaagcgtaaagaagaaggaggaaactgtacccaagggcatccccaaaaaaacacctgaaaaggaaaactggctcttgcaag

SEQ ID NO: 19571 - DNA, 439 bp, Zea mays
  Coding DNA Sequence Number=SeqID_5168
gacaagatgtgtatccaccttaacttaatgatttttgccaaaatcattaggggattcatcagagcaaagggttacttcagaatttaatttatagatgcatcgcataaacataaacagcttcaatggataacacaataatattgatattaaatacgctatatcacacatacttactttctactagcaaccgtgactaatgggaagaataataatgctaagcaactcaaactatagttaacagtgacataccaaataagtaacaacaacactaaattcttaatcgttcaactataacatatggaagtttctgttttgcagacaacatacagtcacaaatgattcagcttagcaaacctaacatggtgatgtagaagccttgtcatggcaatgatacacatgttgcagtcttccaatgccaaacagtttatgtttcctttcg

SEQ ID NO: 19572 - DNA, 535 bp, Zea mays
  Coding DNA Sequence Number=SeqID_5169
gctgtcaaactggaatcagtcacatcacgacatccacagcttcactatgaatcaaaactatacatgcttttgcagggtggaactgggattccacatcttaagtggttcggggtggaggggcagtacaatgtcatggtgattgatctgcttggtccaagtctggaggacttatttaactactgcagcagaaagttctcccttaaaacagtactaatgcttgctgatcagatgatcagtagagtagaatacatgcacacaagggggtttctacatcgtgacatcaagcctgataattttctcatgggtttaggacgtaaagcaacccaggtatttgtcatcgactatggccttgcgaagaagtatcgagatctccaaactcataagcacataccatacagggaaaacaaaaatctcacaggaacagcacgatatgccagtgtaaatacccatcttggagttggtgagtttgtggcttgtaaatacagatgtgctactgtatcatcagtatctgagcattaaatgaatctataggaca

SEQ ID NO: 19573 - DNA, 253 bp, Zea mays
  Coding DNA Sequence Number=SeqID_5170
gcgtccgcccattccatgttgatgaccatgtctcctgaatggggcagctcaccctcccattttggaatatgatcaagaattagataaggagagcttaaatccaggagaacagatttacgagaagttaacgtcaggaatgtatttgggtgaaattgtaaggagggtgctccttaaaatatcattgttttgcgccatttttggtgatactgagcacactaagccacaaacctctgtcctttccacatatttcagc

SEQ ID NO: 19574 - DNA, 582 bp, Zea mays
  misc_feature (111)..(111): n is a, c, g, or t
  misc_feature (122)..(124): n is a, c, g, or t
  misc_feature (164)..(164): n is a, c, g, or t
  misc_feature (187)..(187): n is a, c, g, or t
  misc_feature (221)..(221): n is a, c, g, or t
  misc_feature (224)..(224): n is a, c, g, or t
  misc_feature (228)..(229): n is a, c, g, or t
  misc_feature (231)..(233): n is a, c, g, or t
  misc_feature (238)..(238): n is a, c, g, or t
  misc_feature (251)..(251): n is a, c, g, or t
  misc_feature (253)..(254): n is a, c, g, or t
  misc_feature (257)..(257): n is a, c, g, or t
  misc_feature (259)..(259): n is a, c, g, or t
  misc_feature (265)..(265): n is a, c, g, or t
  misc_feature (272)..(277): n is a, c, g, or t
  misc_feature (298)..(298): n is a, c, g, or t
  misc_feature (343)..(343): n is a, c, g, or t
  misc_feature (351)..(351): n is a, c, g, or t
  misc_feature (374)..(374): n is a, c, g, or t
  misc_feature (421)..(421): n is a, c, g, or t
  misc_feature (434)..(434): n is a, c, g, or t
  misc_feature (487)..(487): n is a, c, g, or t
  misc_feature (530)..(530): n is a, c, g, or t
  misc_feature (536)..(536): n is a, c, g, or t
  Coding DNA Sequence Number=SeqID_5171
tactaccagaagataccgttccagtttcagacgaaccaagtggatgagagtgaggttagggagctgcggcgtaccctgcgacagctgcaaggaggaatgatgcgatggcgnccaccaacccnnngtgggggtgcgcggggtgagcgtggcgaagtcgaagaagntagaggagggtgagtcgcggganccgcgggtgcccgacgaggcaagcgccatggcgnccncccnncnnnccaanttagtagaggccntnncangncccccngtttttnnnnnnccccgatcagaccacggatcnccccccccccagtggccccatagaaccatctttgcttccctgtcncctggcgnccaccggacgggaaggaggaaancaggcttcttcacttccccgtctttggcgaccaccggaggggaagangaagggaggcttnttcactcctcccggcgaccaacggagggaaggaagggaggcttcttcgctccntcgtccccggcgaccaccaatggaaggaggaagggatcaaggnggagtncgagggaggacgcgagccgagaatccggtggttgagcgcgggatct

SEQ ID NO: 19575 - DNA, 420 bp, Zea mays
  misc_feature (354)..(354): n is a, c, g, or t
  misc_feature (385)..(385): n is a, c, g, or t
  Coding DNA Sequence Number=SeqID_5172
tagttgttgatacatccgtgccgcaacccttcggcagacgcccacgaataccccagctacaccccttgcaacacgttgatccaagttgggccgtatacgcgtgtattccgcttcctgggcctgcttgagcgcccgggctggtcttcgactgctccttcaccaccaatatctcctgattctccccagctgctaacacacctatcgaagtcttcaatgatcagcgcccagacgcccttatacaatacttcaggatggtactacaactcatgtcaggtatggctgttttgcctccataggagatcctcaaaacttaactgaagctttgaataatacaaagtgggagcttggcatggnatactgagtttgaggcattggttaagaatgnatacttggccatctagtccccgtcagaacaaagta

SEQ ID NO: 19576 - DNA, 566 bp, Zea mays
  Coding DNA Sequence Number=SeqID_5173
attggacctccactgtgccgacaacggggcttttgcgctgcctttggtgcctgcgacccaccagaagggctaacacgggctccggatgggtctccccggccgggtactcctttggtggggtcagctgaagatatcaaaattacagtatgatgtgcctaattcggggccgtttcctcttcaatatgagtagttttagactatagtttctatagcaaagttggagaacagatatagatggacaaggacaactgtaggtgggcctaattacttgggaggttccgtcacaactttgtatccatgagcatatttctttgtatccatgatatatatattgcttaattgaatatccatgaaaggcaccttgtattgattagcaattatgtgaattgtttgtgagattctttacttgtatggttattctaaatgatgtccctagtcagagtcgatgactagcacatgtattagttgatgactacatttcacaagtcatggacatggatatgttaaactaaaaatgtgggcacatgtatgatatgagtttggaccgacccaacatgagatattgt

SEQ ID NO: 19577 - DNA, 529 bp, Zea mays
  misc_feature (27)..(27): n is a, c, g, or t
  Coding DNA Sequence Number=SeqID_5174
atagaacccgccaccattgatgaggtngagagcaacaggtcaacgtaaaaaaaacccgagtagcttaagtgtgaagttataatttatcataccaattaaaatagttttttatctaaataataaataaaaaagacgtatctaaatgtcttctaaagatttaacgctctagtcttatgattttctggagcacttttaatgactttagttgaccaaatttctgaagcaggagctgtacagggccacaaattaaaagcggagtgacgagagtggttgcctgccgggtctgtaccgtactacgtcattagcgctagcataatgcataacacccgtagctagcgtcaatgcagcaacttgctagcccccaacttgcaacagtgagatcgaagcaagatctgcttcttttttgatttcggatcttcttttgcgccttttttaccccccgggtgaagaaacgtttttaccggcagccggcaggagcaaaagtcacacctgccaaaatgtttggtttgacaaactaatcggatggcgt

SEQ ID NO: 19578 - DNA, 530 bp, Zea mays
  Coding DNA Sequence Number=SeqID_5175
tccgctgtgtgtcgttcttgtagaacgacagacgatgatgactgggtcgttccagattgtgacaagctaggtgtccctaggaaagttcagcggccatgtacccgctgccgacgagatgaactcatcttaatcgaatccgtcatcttaaagatgaccatcgacgatatatatgggcgccgcgcgcacgtcgtcgcggcggctccgccacgcattatcgagccaattacgacgatgctggcgggaccagtttgggcggtacgcgcgcacggacgttcggcgcggcctgcgtccagatacaagcccatgaggtggattccagcgtttctctgtatatatgtaggacggtacgagccctagtaggctagtactacgaactgccctctttcaattagctaatgctatggatgtaaggcttcgcccgaaccaaaaccagttcttctttcgccaaagttgaaaacctgcaatggcgagttcagcttgttgccacaaaaagtaaaaaaaaaactgtttacctccattcagatgttcaa

SEQ ID NO: 19579 - DNA, 498 bp, Zea mays
  misc_feature (198)..(198): n is a, c, g, or t
  misc_feature (239)..(239): n is a, c, g, or t
  Coding DNA Sequence Number=SeqID_5176
ggagaagcttccttcagtgagtcctccctttccgtttaaggcagcaagcaggagcagacaggaggcgccgagagcccagcgtcggagatctccgccgccatggagacgctggccagcgccatgcggcgcgagaaccgccgggtccaggcccccgccctcctcctctggttcctccgccctcgcctcgggcaggggccntctcgtcatggccttcctctcttggctcgcctggtcttacntcccccggccgtttgtggcaggacgcgaaaacccgggggaatctgggccgcctcctcgagagagctctacaggggtcccgaggggttttccggggggggacaagcttagaaccttgggggcaggggtttggaggaaaaattttgggggggggaagggccctgccaggcaaaagcggggggccccttgggggggaaagaccccgtcctttgggcccccaaaagaaaacacgtcttttgcgcccttttgggtatacacggg

SEQ ID NO: 19580 - DNA, 466 bp, Zea mays
  misc_feature (257)..(257): n is a, c, g, or t
  misc_feature (298)..(298): n is a, c, g, or t
  Coding DNA Sequence Number=SeqID_5177
gtgtatacccaaaagggcgcaaaagacgtgttttcttttgggggcccaaaggacggggtctttcccccccaaggggccccccgcttttgcctggcagggcccttcccccccccaaaatttttcctccaaacccctgcccccaaggttctaagcttgtccccccccggaaaacccctcgggacccctgtagagctctctcgaggaggcggcccagattcccccgggttttcgcgtcctgccacaaacggccgggggangtaagaccaggcgagccaagagaggaaggccatgacgaganggcccctgcccgaggcgagggcggaggaaccagaggaggagggcgggggcctggacccggcggttctcgcgccgcatggcgctggccagcgtctccatggcggcggagatctccgacgctgggctctcggcgcctcctgtctgctcctgcttgctgccttaaacggaa

SEQ ID NO: 19581 - DNA, 580 bp, Zea mays
  misc_feature (264)..(264): n is a, c, g, or t
  misc_feature (280)..(284): n is a, c, g, or t
  misc_feature (291)..(293): n is a, c, g, or t
  misc_feature (308)..(311): n is a, c, g, or t
  misc_feature (317)..(319): n is a, c, g, or t
  Coding DNA Sequence Number=SeqID_5178
atgtcagcttccgagttcaggattccataccagcaagtttcaccttcgcagcctgctgagaatgtaaatcagtttaagacctgtcgatgtggggagggagacccgaactccacttctgaaactggtgacagtccaccggcctcttgtcctaattgccaggtccttaagagtggacatttactactttcatctaaaggaattggatggacatcatggaaaaagcgctggtttgttcttacgagggcatccctagtgttcttcagnagcgaccctaatgtgnnnnnacccagnnnagctgaaccaattgnnnnacttgnnngaattgacttgaataacactgcaagtatgataatcaaagaagaaaggaaacttataacagtcgtgtttcctgatggccgtgacggacgcactttcacccttaaggcagaaactacagaagacctaaatgagtggagaagtgcattggagaatgctctggctcaggcacccagtgttgtgaatacagcgggacaacttccagtagtcagcactgacataacagaacctgttgaagctgctgttgaacaattgcattcttcga

SEQ ID NO: 19582 - DNA, 568 bp, Zea mays
  Coding DNA Sequence Number=SeqID_5179
agaacataacctcaaatccccatatggaaatgataaagtgaagtattgattatgttgaaacttagatatttagggcgattccacatgtaactatccgaatatctgaaatctggtaagatatctgggtagatgtccggatatccgaaatatgaaattcggacagttatccgagaagatatccggatatccgaaatccgacggatatcagtcatatcatatccgtatccgatatccgaactgtactatccgaattcgaatccgaaatccgaaaattctgcggatatcctaaaaaaactatccaaccgaataattagccttttcgaacggtcggatggtcggataatatccgtaccgtttacacccctactaatcagtaacgggttgtttagaacaaattacggagacagatcttgaacaattcatgcgtagccaaatatcagaagatatacctgctttgcaaaggaagcagcaacttcacattaacatttgagaagatgggtgtctctggagagcaacaacataataatttaaaaatagtcagatattaatcttgcacctcaaagcggag

SEQ ID NO: 19583 - DNA, 329 bp, Zea mays
  misc_feature (301)..(301): n is a, c, g, or t
  Coding DNA Sequence Number=SeqID_5180
acaatgcacaaacatgcgaccgtaaggacgccggtcgccgggcagtcgcgcggggcccggcccccccgcccatgccgcccgcccgcactgcactcatcggcagctacgtccatgccggattctctagtgttcggtgcgacgcacacgcacaggtatgcgcagggtccatcgagctcgcgtcccctcggtgtcgctctcgcttagagggccccacgcccgccttgctgcgcgcgcatgcgcgggccggtctaggcagcgcgggcgaaggcgaccgccacctccgtggtggcgctggaggaangggacgtgcacactcagggtgtaggaag

SEQ ID NO: 19584 - DNA, 502 bp, Zea mays
  Coding DNA Sequence Number=SeqID_5181
attacaatcataccctcaagcctatacatataagctataaatttgaacaagggcatcaacgtcttttccttccgtagtcttattgagcaagtcgaggactttggtttgctatcgctgattccttcctcatgtacatgctctgttgaatcgatgcttgctgcttcgaccttgtaaccacgacagccacacatcatcccctaaacgaaggtatccttcggcattttacctcgttgctcttaaaacatactcagaaataattggagttaatattttgaggaccttcgaccaaagaggatacccaacagtagcccctcacggtatttcgaaattcataacgagctcaggtcgtgtaataaacggaggcctcatgccgaaggtccaaaaaacatcttccctaagatcgttaacgaaaacaaattctttaaagtacaacaacaaacaacaacaacaaagcctttttgtcccaagcacgttggggtaggctagagatgaaaccccatat

SEQ ID NO: 19585 - DNA, 525 bp, Zea mays
  misc_feature (109)..(111): n is a, c, g, or t
  misc_feature (388)..(389): n is a, c, g, or t
  Coding DNA Sequence Number=SeqID_5182
gttgttacttggttttaggatgtattctctttaattgtgggggccttcaagcatctggatgacatagagagccccttctttggaaggagaacttcaattcttgatacannngcaaaagttcggtcctatgtggtgatgctagatcttgaatgtgacgatttgataaatgatatgttccatcacttcttgaggactgttaattctgggcattcagaagccgtcatatgctgcatggaaacaataataatgagattggtaattgaggagagtgaggatgtccaaccacagattgcttcatgtctactccaagatgttagaaaagaagaaaatgtatcatccttaattttttctcacatcagcaacatagatttatttacaactaattaannactcagtgtaggtgttggaacttgctctcagttgcaaggggatccaacaagggtgaatagtggcgttaacagggttctcgcgcaagatggcaatagctctgttaatctggcctctcacgggcactatgcgggagta

SEQ ID NO: 19586 - DNA, 397 bp, Zea mays
  Coding DNA Sequence Number=SeqID_5183
gagtgtacccactacaaggtgcgattcctctcaacggctgcgggctgcgacccttccgccaacaagacgaagcccgcggagaagttcgtccagctggtgtcggtggacagtcacgagttttggttcatgggcttcgtcaactacgacggcgcggttgcgcacctgcaggaagcgctgagcgggttccgcaacctgcaggcgtgacatggaggacctcaatgcaatggccagtgttatattgtacgtgctcgccagaactgattgatcgaacagagcgattgtgaacccgctctctgtgtgtgttgcggtgctagtgtttgcatcgtgttgtgcgtgtgcggatttgtatgacattttttgatttggttgccattgcagcgagagaccagtccaatca

SEQ ID NO: 19587 - DNA, 566 bp, Zea mays
  Coding DNA Sequence Number=SeqID_5184
ttgctcgcgcttatcttcctctctgctctctgccgtgcagaagctcccagccgaagcccatggcgctcggtcgcccggctgcctagcccagcgccgatctcccttcagctccaaccccctctgcgcgcggacctctctcatccccatggcgtcttcccctgctggtttgccggcgcccgagctccctctgcccatcaatggcctcagcccaggagttcgtctgctttccccgctcgtccctccctcaaaatcgcctgaccgcgcgacctccatgtagctcccttcagttcttcccaattcgtggccgcgtccctcagctcgctctcccatgccgcacccagcccctgctctgctcgccgtggagctcgcctccgacccctgcttgccgcgttcctgcgcgctgtcgccttgctgcgtgcgtcgtggttttcttcctctgcgcgccaggctgttccggagcttcctttgctccattccttggttgcgtgacgagcccctcgcgcaggcgcgagctgtctgttcggcgtagtcgagccgttctcagttgctcgctgtaacaccctgaa

SEQ ID NO: 19588 - DNA, 298 bp, Zea mays
  misc_feature (144)..(145): n is a, c, g, or t
  Coding DNA Sequence Number=SeqID_5185
ctgacagtctgatgctctattttaatactccctccgtttcgttttagttgtcgctggatagtgcaaaattgaaccattcagcgacatctaaaaagaaacggagatgagtatatatgtagcagcagccggagcggcattgccaannctgcgtacctgattgaatgctggtgactgccacccaagccaggccagactgcttcatcggttaccaagaatttgctactgtatgggtatacagaattgcatgcacacacatgtactgggtgctgcttgtgatgcaatgccagttgtggaggat

SEQ ID NO: 19589 - DNA, 159 bp, Zea mays
  Coding DNA Sequence Number=SeqID_5186
cgacggaggagagcacatggcatctccccaggaaataataataatcagagagaggtcacagagctgtatcaggaggcgctcaaattttctgtgtggtctctaaaggtacgtactccctccgtttcgttttagttgtcgctggatagtttcaataattga

SEQ ID NO: 19590 - DNA, 300 bp, Zea mays
  Coding DNA Sequence Number=SeqID_5187
gtctaatcgccgtgtgaattcacgtgatcgacaagctgatctggccgaggatttggccaccggcgagcgccggccgcggacaaggtgtgtcgttgactcgtttccccactatggcctactataagctagtagtttaagaacgataggtccaagccacatctacattatggacctacctgttgaaggctttcaaaggaggacacagcctctaattttatgtctttttatgtagcgatgacaatcttatcgtgaatatgtatacctgcggttacgtatgtaatgggtgtgccggtatcgtaa

SEQ ID NO: 19591 - DNA, 147 bp, Zea mays
  Coding DNA Sequence Number=SeqID_5188
tcagagagcctatcctattgcttttgttttgggacaatgagactgatataacttttacggtcctgttaaatatagagtgtgctgtactgatgctcctcatggctgtggctacatggttgacacgtgacatgagatttgttattttca

SEQ ID NO: 19592 - DNA, 84 bp, Zea mays
  Coding DNA Sequence Number=SeqID_5189
ggattatgatattccaagtggtaagctccttcgagtagtataggtttgtacatggggactcctgattatcactggcacgtaccg

SEQ ID NO: 19593 - DNA, 385 bp, Zea mays
  Coding DNA Sequence Number=SeqID_5190
tggcgcagaaggaccagcgtgcccagcgccggcagcttcagccacagcactgccccgggctcccggaagcttcacccacccaaaccggtcccaacgtacccaaggatggcgaatgaattgttgcccgttcgtagtacagacaaggattctcctcgtaaggaaggaccaagtagccaccccgccccttgtttgcgtctgtatccgacgcgaaccaccgaagtgcgcgcggaggcttttccgtgtcctgcaactatattagcaatccaagacttgctcggtttttgtttggctcctgattaaaaacggagccctcttggaggcttggagccactaattgaggtcttttctctatcaatcgagtccttgctccttgtacttttattta

SEQ ID NO: 19594 - DNA, 189 bp, Zea mays
  Coding DNA Sequence Number=SeqID_5191
accgccgcgagaatggtatgtcgattgcgcttggtggtgttagttcgagtaggggttatgagcggagggaaaataataattattgtgttttaacttaaatgatttgcgtttcgtctcttgtactgcgtcgagcgtcgtcttcaattagcgagtgatgtaaaattgtgactgctaatctggactgttaat

SEQ ID NO: 19595 - DNA, 274 bp, Zea mays
  misc_feature (67)..(67): n is a, c, g, or t
  Coding DNA Sequence Number=SeqID_5192
accggcgaggatgcccgttcaagagggttccgtggagatcgggcgcgtggccctggtgaactacggngagggactatggcccgtctcgtcgtcattcggtaagatgtggtcggaccagaacagggcaacttgtggatgcccctggaatatggtcagggtgccaggtgaacttcaagcggctctcacttactgacatcaagattgacatcaaacgtgtccccaagaagacaaccctgatcaaggcgatgggagggaagcttgatgtgaagaccaa

SEQ ID NO: 19596 - DNA, 364 bp, Zea mays
  Coding DNA Sequence Number=SeqID_5193
tgtcgctcctgctccgtttgtttacccaagtcccagcctagatgccgcagatggatgtgcccactaatcagatccccgcaggctggttcactgagccggcttccgagcggcccatgggcttgcccaggaccggctcttcagtcgcctcaacgcgcaggcgcccgagttcgtgccgggggggcccgcccccaccgacgcccgggggttgtgctttccccccccccccaaagggatccgaatgtttccccaccccccctccccggccgcgtgggggcttcttctcccgggcccaaacccgggcggttgagtactatggccaattgggggaacgcagcggattttgccaaagcaaaaagcgctcccc

SEQ ID NO: 19597 - DNA, 137 bp, Zea mays
  Coding DNA Sequence Number=SeqID_5194
ggagcgctttttgctttggcaaaatccgctgcgttcccccaattggccatagtactcaaccgcccgggtttgggcccgggagaagaagcccccacgcggccggggagggggggtggggaaacattcggatccctttg

SEQ ID NO: 19598 - DNA, 339 bp, Zea mays
  misc_feature (27)..(27): n is a, c, g, or t
  misc_feature (79)..(79): n is a, c, g, or t
  misc_feature (81)..(81): n is a, c, g, or t
  misc_feature (171)..(171): n is a, c, g, or t
  Coding DNA Sequence Number=SeqID_5195
tcctttctcgctcctgtttcttctagncccccgccgaccgcgtcccaggcccgcccgccctgtcggtgccccgcgaccncncccacccaccgtccccgcaccgccggcgcccccgcccgccaggtgagggttcagcgtggaggtgaggtagtggcagtagcgagcaacgcnccgggtgggcacgtcaacccggcgttcacgttcggcttgttcgtgggccgccgcatctccttcgggcgtgccgcggtatactggcttgtgcagatgctcggcgcggtggtcgcgtcgttcctgctaacgctcgtctccggcggcacggtatataatgtttgctaacgt

SEQ ID NO: 19599 - DNA, 225 bp, Zea mays
  Coding DNA Sequence Number=SeqID_5196
tgctgtcgtttatttttaaagaatttttgaccctatttccctttcatgtttagaatgagtaagcatgtatttgaaagccttcatgatgtgctcacatcaacatgtcatatgagctccatagaagctttagccatgtttttgtggatcattggtgctcctcagtcaattagacaactgacaatcgttttgagaggtcaaaagacacaactagtagagaatttgagg

SEQ ID NO: 19600 - DNA, 129 bp, Zea mays
  misc_feature (38)..(62): n is a, c, g, or t
  misc_feature (67)..(69): n is a, c, g, or t
  Coding DNA Sequence Number=SeqID_5197
gcggccgggtgcgatctattgtcaatcttctttgaaannnnnnnnnnnnnnnnnnnnnnnnntttgnnngtaaatctgcgcacttttaggagactcggagttcgtcctagatgcaaaagtacctggctg

SEQ ID NO: 19601 - DNA, 474 bp, Zea mays
  Coding DNA Sequence Number=SeqID_5198
tacctgatttgctcgtgccctcgctcggcatcacacagattcccgcgtcccgccgtcggcgactcggcgtcctgctgattgcgtcgcgaggagtgctcgtagccgccctcctctctcagattcagtcgtcgcccatggcgaggaatccaggccgcaccgtcttcatcggcaacttggatgaaaaagtatctgaaagagtcttgtatgagattcttattcaggcaggccatgtagtaggcctacatgtacctagtaataaggagagtaacagtcacaaaggttatgcttttgctgagtatgaaaccgaggatatcgcgcaatacgctgttaggcttttctcgggacttgttcggatcaatggtaaaacgctcaagttcgtggtaggttttcatttctatctaggtacattagttgtgtataatattctgtctacaagcattacttgtgtatacaccacttgtctataatagcagg

SEQ ID NO: 19602 - DNA, 293 bp, Zea mays
  misc_feature (58)..(58): n is a, c, g, or t
  Coding DNA Sequence Number=SeqID_5199
gtaagacactgcatcctcttagggacgactttggagtctcttcaccttttacttaggnggcatttaagctctgcatcccgtaggaacaactttaagcttcttcaccttttacttaggtgatattttagctctgtgtccctataggaacgactttggagctaagccctgcatccccttaggaaagactttgggagatttttcaccttttacttaggggggtattttagaactgcgtccccgtaggaatgactttgggagctttttcaccattactgttacactcaaaaccatca

SEQ ID NO: 19603 - DNA, 250 bp, Zea mays
  Coding DNA Sequence Number=SeqID_5200
taaatacattacctttagttgatggttttgagtgtaacagtaatggtgaaaaagctcccaaagtcattcctacggggacgcagttctaaaatacccccctaagtaaaaggtgaaaaatctcccaaagtctttcctaaggggatgcagggcttagctccaaagtcgttcctatagggacacagagctaaaatatcacctaagtaaaaggtgaagaagcttaaagttgttcctacgggatgcagagcttaaa

SEQ ID NO: 19604 - DNA, 559 bp, Zea mays
  misc_feature (397)..(397): n is a, c, g, or t
  Coding DNA Sequence Number=SeqID_5201
aataccttatttattcgagaatgtctccaatatgcaacatatacacacattgttggtagtcaaattaaaagtatattcaaaagttcatattcatctattttgatagaaaagatttatctaatgcataatcttttattaatagattgtttaactaattctacatagtttactacagcagtcattcatattgggccttttatttaaccacttgtttcaaaacataactatttttactttagaatgtttttttcctaaattacccaaaataatattttagggtgttacagattggtcactttattgctaactgtcccgataatgatagtgaccaggaacaaggaaagaatgggaagagagagaacaagaaggtttacaagaaggctaagggcgaggcacnccttggaaaagaatgggactcgaattgttcttcgtccgactccgacgacgaaggactcgccgccacggccttcaacaaatcgtctctcttccccaacgagcgtcacacctgcctcatggcaaaggagaagaaggtaagtacttgaagtactattacgtatgc

SEQ ID NO: 19605 - DNA, 545 bp, Zea mays
  misc_feature (29)..(29): n is a, c, g, or t
  misc_feature (456)..(456): n is a, c, g, or t
  Coding DNA Sequence Number=SeqID_5202
agattttaagccaactctcctaatatggnggttggattagggataggggagctcttagagatgctcgtagcccctctaacctaccaaacgggccttaacttttttttatattcaaatcttcattgaaaacaatggttctcacttctcaatacattttttgtatctcctttttgtaatgtatattttccttatccaactcatctctatttctatatcttgaagagtatctttttcttcttcttctttttaggtcttttggcctctatatcgatatcttgtgaaaagagcctaactcatggataattgtgggacccatagaccatggtgtaaactgaacaccagaaattgatttaagtacacgtaaatgacattttatatgtaattgcaaatttattgttggcaaacgaacgacagattatttgttagagttaaccaacatgaattaatatatatacnataatcatggataattgatttcctaattaatatacgttcgcaaaattgtccaagtgtcatttttgcattagttaattacgtcatggtca

SEQ ID NO: 19606 - DNA, 583 bp, Zea mays
  misc_feature (120)..(120): n is a, c, g, or t
  misc_feature (547)..(547): n is a, c, g, or t
  Coding DNA Sequence Number=SeqID_5203
aaatccataaagtaccatattgcatataattgaccatgacgtaattaactaatgcaaaaatgacacttggacaattttgcgaacgtatattaattaggaaatcaattatccatgattatngtatatatattaattcatgttggttaactctaacaaataatctgtcgttcgtttgccaacaataaatttgcaattacatataaaatgtcatttacgtgtacttaaatcaatttctggtgttcagtttacaccatggtctatgggtcccacaattatccatgagttaggctcttttcacaagatatcgatatagaggccaaaagacctaaaaagaagaagaagaaaaagatactcttcaagatatagaaatagagatgagttggataaggaaaatatacattacaaaaaggagatacaaaaaatgtattgagaagtgagaaccattgttttcaatgaagatttgaatataaaaaaaagttaaggcccgtttggtaggttagaggggctacgagcatctctaagagctcccctatccctaatccaaccnccatattaggagagttggcttaaaatctctactcca

SEQ ID NO: 19607 - DNA, 424 bp, Zea mays
  Coding DNA Sequence Number=SeqID_5204
ggtcgagtctgcgaggttctcctctgcgaggaggaccagatggctgatgtgatgaacaagaacaacaggctggtacgtaatagacgtccgtgatgcggccgaatgctctacttctactgtacgagaagaaagtgtcatctgggagatagatacatctgctcgccgaatcacgtttgcacagaggacttggtggcctgttcctggttgaagaagatgtacacaaagtgcagctgcataaataacgtggatcgttaacatatgtcagaagctgatggatctggctgggaaccaaggaaactggaggagacgctcttggacacagcgttgagcggtctgaaaaaaaggcatgccttctccaggctgtggccgggcgtccctgcctgccgccttccccatctcttccgtcgatctgtcatgtgaccag

SEQ ID NO: 19608 - DNA, 586 bp, Zea mays
  Coding DNA Sequence Number=SeqID_5205
gaagtagagcattcggccgcatcacggacgtctattacgtaccagcctgttgttcttgttcatcacatcagccatctggtcctcctcgcagaggagaacctcgcagactcgaccggccggaggggcgcgatggcggcgccccacgcacccccgggcgggggctgacggcgcgacggggacaggcccgccaggcgagcgccgataggggccgccgggggggcccaggaggacggccaggcgggcaggggtcggcccggccggcggggccgccggggcagacgagcacgggctggtgccgcgggcccagcagggcggcgtgggggcaccacggggcccacggtaggggtcgcacacgaaccgacggccccagagaggcagcgcggttgcaaagaacgtctttgcacgggaatccaaatcaacagcaagggagcagttttgtctgactgtcagtggaatagatggggttagtgtacttgggtccggttcctctccatcatccgctgctgtaccactgcaccgctcaccgatttcagagcgagaaccccgcaacttgacatcgccgagtttgtatatgactgctgcagtt

SEQ ID NO: 19609 - DNA, 452 bp, Zea mays
  Coding DNA Sequence Number=SeqID_5206
taggagaaattcctcgtgggcgccccattgatgacaagttgttggcgtcgcgagcatatcgccgtgctagggggctgtgccagcgctgcgctgaaaagtggtcccgggatcacaaatgcccagccactgtaccgctcaatgcaatattgcaggtgtgggatttaattcgagacgaggatcaggaagtgactgaggagacgcatccagttgatactgaacagttattcttagctatctcaaaggaagctagtctaggaatcgaagctccatggcagtgcgttttgtggtgaagttcagaacaaaccactactaatcctggttgattcgggcagttcacattcctttattagtggaagattggtgtcggaaattggatggtctctctggaattctagccccggtgcatgtcaaagtggccaattgcgaggttttgtcatgctcgttacagttgt

SEQ ID NO: 19610 - DNA, 460 bp, Zea mays
  Coding DNA Sequence Number=SeqID_5207
aacgaataccctttgattaaccatgaatcatgtaacaactgtaacgagcatgacaaaacctcgcaattggccactttgacatgcaccggggctagaattccagagagaccatccaatttccgacaccaatcttccactaataaaggaatgtgaactgcccgaatcaaccaggattagtagtggtttgttctgaacttcaccacaaaacgcactgccatggagcttcgattcctagactagcttcctttgagatagctaagaataactgttcagtatcaactggatgcgtctcctcagtcacttcctgatcctcgtctcgaattaaatcccacacctgcaatattgcattgagcggtacagtggctgggcatttgtgatcccgggaccacttttcagcgcagcgctggcacagccccctagcacggcgatatgctcgcgacgccaacaacttgtcatcaat

SEQ ID NO: 19611 - DNA, 475 bp, Zea mays
  Coding DNA Sequence Number=SeqID_5208
gacgctgcaaggtacacggtggcaccgaacggggtggcgcgcatcggcaaggcaggagatgccatggtgccgtgccacctgatggcctatccgtacatggtccactactgccaccggtcggtggacgtggaagctctccgcgttgagctgatggggctcggagacgaccacgcggcggcggccagccacgcaatcgcgatagcgatgtgccacgccaacacgacgagctgggatgcccgctacttccaaatgttgaatgcgacgcggggggaggagatctgccacttcatgccgcacaactacgtgttgtggctgcctgctgccgctctgtagagccacaggcactaggagtgcagcatgctgagagacaagaagattgagtactactagtagtagcttgctttgcttgtcaggaacaagctaggttgtccatgcatgtcttacgtctctgacgatcatcgagcggacaatcaaa

SEQ ID NO: 19612 - DNA, 420 bp, Zea mays
  Coding DNA Sequence Number=SeqID_5209
atttattatttgattgtccgctcgatgatcgtcagagacgtaagacatgcatggacaacctagcttgttcctgacaagcaaagcaagctactactagtagtactcaatcttcttgtctctcagcatgctgcactcctagtgcctgtggctctacagagcggcagcaggcagccacaacacgtagttgtgcggcatgaagtggcagatctcctccccccgcgtcgcattcaacatttggaagtagcgggcatcccagctcgtcgtgttggcgtggcacatcgctatcgcgattgcgtggctggccgccgccgcgtggtcgtctccgagccccatcagctcaacgcggagagcttccacgtccaccgaccggtggcagtagtggaccatgtacggataggccatcaggtggcacggcaccat

SEQ ID NO: 19613 - DNA, 535 bp, Zea mays
  Coding DNA Sequence Number=SeqID_5210
agctgatgaggctcgtctccggcgccatcgtgggcgggccgtcaaatccccttctctcttcttccataatgacaattatctcgagcgcagcagggagatctagccaggcgccatgggagaagacacgagcagggacagcgcgggcgcgtccacggctgctccagactcccacgaagcgggacttcagcgcggccagaaagatggggacgagctgcgggggagctcgcagcggatccaacgccgggagctcgcctgggaagaaggccgtcgagccggggccggaaccaggggtgcggtggagaagaagctcagggcgcggcgccagcagggaagaagtgcgcgacgcgcaggggaagaagctggagcagcgcgcggctgtgagggagatggaggctggagaagatgacctcgagctctagaagaagcgagcagggacacgttgcgcaggaaaaaatctcaccaaggggcggcggctcggccacagttgatctttactgccttgaacacaccgataaggttacccatgacttcccag

SEQ ID NO: 19614 - DNA, 366 bp, Zea mays
  misc_feature (266)..(266): n is a, c, g, or t
  misc_feature (289)..(289): n is a, c, g, or t
  misc_feature (305)..(305): n is a, c, g, or t
  Coding DNA Sequence Number=SeqID_5211
gggtttgctacctctcgggattcagggtattttatagatgacgaaggcagcaactatttatgggagcaagacacagagcgatgccttgcggccagggccattgcgtccagcaaatattatcaagaaaataaatttcccacataccagaatgggttcaaatgggtatagtaatccagctgggctgatgggtcccgaaatacccccctctcaagggagataattgcaaaggaggactggcagatcttacttgggatcggtcggtcagncgtcttccttctggtccgggganttttgcggatggaagntttggagaaaagggtctccaacactggcccccattggttggtcccaatggaaggttaaatg

SEQ ID NO: 19615 - DNA, 465 bp, Zea mays
  Coding DNA Sequence Number=SeqID_5212
gcaacagcccaaccagagggtggtacacatgacatcgtaacccgagagcggatgaggcacaacgagggatttttttaactaagccagaaaattcgccctcgagaggaatacacccgggtcttggaggtgctactcagaagccttaaccactaggctagagaccctttcactgaaggccaactgaacacaacagtgaaaatcagaaatgacgggcaaaggagcagttgactagcgagtgatttattgtttccggtgcctgatcacaaaggggacagcgagtaggatgaggaaagcttctcttctcgtggcaaaggagcacctaaccagcaaccgaacctctcaattcagtggtgcctcataatggtcatctatttcagcaacttgtcttgatgcttggttagttggttttatatagtatattggtccaggtatatacagtaatatatgggtgaccgggaccgacta

SEQ ID NO: 19616 - DNA, 302 bp, Zea mays
  misc_feature (31)..(31): n is a, c, g, or t
  misc_feature (39)..(40): n is a, c, g, or t
  misc_feature (48)..(49): n is a, c, g, or t
  misc_feature (68)..(69): n is a, c, g, or t
  misc_feature (77)..(77): n is a, c, g, or t
  misc_feature (80)..(80): n is a, c, g, or t
  misc_feature (85)..(85): n is a, c, g, or t
  misc_feature (87)..(87): n is a, c, g, or t
  misc_feature (91)..(91): n is a, c, g, or t
  misc_feature (96)..(96): n is a, c, g, or t
  misc_feature (105)..(105): n is a, c, g, or t
  misc_feature (108)..(108): n is a, c, g, or t
  misc_feature (113)..(113): n is a, c, g, or t
  misc_feature (123)..(123): n is a, c, g, or t
  misc_feature (128)..(128): n is a, c, g, or t
  misc_feature (135)..(135): n is a, c, g, or t
  misc_feature (139)..(139): n is a, c, g, or t
  misc_feature (150)..(150): n is a, c, g, or t
  misc_feature (168)..(169): n is a, c, g, or t
  misc_feature (197)..(197): n is a, c, g, or t
  misc_feature (203)..(203): n is a, c, g, or t
  misc_feature (221)..(221): n is a, c, g, or t
  misc_feature (231)..(231): n is a, c, g, or t
  misc_feature (245)..(245): n is a, c, g, or t
  Coding DNA Sequence Number=SeqID_5213
tttagcctggcaaaagtcaggttgggctggngggtatanngcccaacnncccatactcaatggggganngccctaanagnaaagntnggtnttatnccgggggtnccntgggncccctcgganacggnaccctgntaangttatttgggngcacatccatacccgtcnnaggtctttgagacaaggtcaagtgccangtgggncccaataacttgggaggncctgccatgncatccatcatcatnctaagcctacccaaaaagttttaccatttttggagctattaatttatttctaaaatt

SEQ ID NO: 19617 - DNA, 185 bp, Zea mays
  Coding DNA Sequence Number=SeqID_5214
catatgtgaaccttttttgaatttgtaagtagcgttgatcagtgtgccctggaaacaaatctagtggtttgatgaatggttgctagtaccttcgtttcttctttttttttttccgctaattggttttgaaaggccaaaatttaggtggcagcatgtggtatcttcctttataagtttgttcagtt

SEQ ID NO: 19618 - DNA, 301 bp, Zea mays
  Coding DNA Sequence Number=SeqID_5215
acttcaaagtcaggatacccctcttggactgggcctatcacaaccacttactctcgtgcgctctccgtgggagcgaggactcgcggccggcggcagcggcaggttctcctagatctccggcatcatcagtaacaaatggctgacggtgaggacattcagccccttgtttgtgacaatggaactggcatggtcaaggctggttttgctttcggtttagctcaaggctgtggtgtggcagcgagttgagggggtcgcgagagctgcgtgtcgaagtaatttaagcggccagcgcggaaagggc

SEQ ID NO: 19619 - DNA, 315 bp, Zea mays
  Coding DNA Sequence Number=SeqID_5216
aaaatcacttcagccaccacgccgatcgagctcaccggagccggcggccgccctttccgcgctggccgcttaaattacttcgacacgcagctctcgcgaccccctcaactcgctgccacaccacagccttgagctaaaccgaaagcaaaaccagccttgaccatgccagttccattgtcacaaacaaggggctgaatgtcctcaccgtcagccatttgttactgatgatgccggagatctaggagaacctgccgctgccgccggccgcgagtcctcgctcccacggagagcgcacgagagtaagtggttgtgata

SEQ ID NO: 19620 - DNA, 362 bp, Zea mays
  Coding DNA Sequence Number=SeqID_5217
atggactgctccatacaggccacgctcggcctccaccttcggcgcccaacgagcaggtgttagggccgcgcagcaccttcctctagtgtgctcggctccagccatggcgtgtggacgctcaagttcggccctcctctggcctctgctcccatggtacaagcccctcttccatgatgccccccatcatcgcgttctcattccctgtgagggcagggagaaatcgggtgtgtactcgtggctagcatgtgggtcgggccaccagttccgaccgaattgtgcgctggcgtgctgaggccgccgtggtaccgtgcgttgccgtggcacgcttccggcaccatcttgaagcacgcagtgaggacacg

SEQ ID NO: 19621 - DNA, 149 bp, Zea mays
  Coding DNA Sequence Number=SeqID_5218
tccgtattccggataccctcatgctctttccctaacgatggtagccatggcggggagaggtaaggcgatcaggttcatgcaccgccatgaaggccatgtccaggatcttcatggctggcctccatttccctgtgggaaggatctgcata

SEQ ID NO: 19622 - DNA, 499 bp, Zea mays
  Coding DNA Sequence Number=SeqID_5219
ccaagccggtgccagttacagggaccttggggggttggcagccccccgatcttgggccagtgggtggagttcctgaggcatcagtgcacccggagggggaccccttattgttccccccagtcccaggggttggggcagcagttttcccaccagttcaggcaggtggacccccaccccgggtcccaggggtttttgggtttggtcctccagtccatcctgcagcagcacccgcaaagtggccagttcggggggcttttgggggcccaaatagcccagcaactgcgggggatgtgggttttgcagcacccgattccatccccttacgttgttgcggggggtgtccccccctgaagaaattatgtgttgtagtatacccgctccccgcgggttagttagttagttgagtcatttaggggggatgattgagtaataaggggtcccccatccccagggggggcagtgtcagggggagcaatgccctgaatgaccatttgaaatg

SEQ ID NO: 19623 - DNA, 416 bp, Zea mays
  Coding DNA Sequence Number=SeqID_5220
cgtgcagcgtgttgtactgagcctagaacacgtgtgggacgaagtcgtgctagatctgcttggaatgccaccgcgcacgtttattctagaaccatatagccatctagtgcgtttgctggcctaggaacctaacttcacatgctatcgtgatgtgttatgtcatcgtcgtagacagatcaaataaatattactcttaagcagcggcacgagaatatttttgggctagggtggtccgtggcccacacggaccgccctctagctccgccattgcaccgaatcttagtttgtcaaatccggccaaaatccacacttccaactagaattctttgacttcgccttcctctctcggatcattggacggatcaagtgaaacctcttcctgtctacttcctgctccagcatccatggtcgagggt

SEQ ID NO: 19624 - DNA, 166 bp, Zea mays
  misc_feature (31)..(31): n is a, c, g, or t
  misc_feature (103)..(104): n is a, c, g, or t
  misc_feature (116)..(116): n is a, c, g, or t
  misc_feature (139)..(139): n is a, c, g, or t
  Coding DNA Sequence Number=SeqID_5221
ggaaagccttaccaattcctatggcaagagnaactttcttttgggatatcccaaaaggcatgggggtttaaccagcggcttggaaccccaatggaactcccgnngcaggttatggnaaaatcctgggggaatttcatgngggcgatgggaatcccacccaagggtc

SEQ ID NO: 19625 - DNA, 470 bp, Zea mays
  misc_feature (31)..(32): n is a, c, g, or t
  misc_feature (50)..(50): n is a, c, g, or t
  misc_feature (82)..(82): n is a, c, g, or t
  misc_feature (112)..(112): n is a, c, g, or t
  misc_feature (135)..(135): n is a, c, g, or t
  misc_feature (147)..(148): n is a, c, g, or t
  misc_feature (220)..(220): n is a, c, g, or t
  misc_feature (251)..(251): n is a, c, g, or t
  misc_feature (265)..(265): n is a, c, g, or t
  misc_feature (300)..(300): n is a, c, g, or t
  misc_feature (366)..(366): n is a, c, g, or t
  misc_feature (383)..(383): n is a, c, g, or t
  misc_feature (425)..(425): n is a, c, g, or t
  Coding DNA Sequence Number=SeqID_5222
agcagtggccccagccttaccaaggcggtcnntgtgttttttacggaaantcaaaaaaggccccatccggatcccctttttngggacccttgggtgggattcccatcgcccncatgaaattcccccaggattttnccataacctgcnncgggagttccattggggttccaagccgctggttaaacccccatgccttttgggatatcccaaaagaaagttnctcttgccataggaattggtaaggctttccntgcatcccaatctnctttaagaagggaaacaaatggaagatcccgcctnggaagctcaaaagcaaaaggtgacatgttaattgtccagacgagcaaaaagtgacttccactgggnccaatcgagtcccattngcaactggtataaatgccagtttctcccagttcttttttttnggaagaagaatattgttcccccatatttaatccaattatcccaag

SEQ ID NO: 19626 - DNA, 414 bp, Zea mays
  misc_feature (112)..(115): n is a, c, g, or t
  Coding DNA Sequence Number=SeqID_5223
ggaaccaagaggaaatgggcctgcagaccaagactagaattgaggacgaccttaatatgtgctgaatgaatatacgagtggccccgagcgcacactaccggacggaggaagnnnnaaatgacaggtaggccaatagaattgtggagagttagttagcagcagataagtccaagaaagtaggagttagttgagagtttgtaggagaagttggttagccatagggctatttataagccgcatggcagcagggaataaatcaagcaagatcaattatccaaagctgctcttctcccttgcctctctcaagccaccggtgaggaatccctcacggtgaaggtctggagcgcgactacgaactgcgtagccgcggtccagcgacgttgggcgtcgaggcgcttgacaagtggtcaggga

SEQ ID NO: 19627 - DNA, 158 bp, Zea mays
  Coding DNA Sequence Number=SeqID_5224
agcaagcaagattattatttcctaatctctctctaaaacaagccgacggttgaggggaaaaacctcaccggcgacgacggaccgtggctacgaactccgtagtcaggggccagctaccctaggtcgggaggtccttgacagctgtgttcctcactgct

SEQ ID NO: 19628 - DNA, 570 bp, Zea mays
  Coding DNA Sequence Number=SeqID_5225
ttttagccgtcgcttcgagttcttatctccgggattgttttcaccgttgtagtacttctacctgtcatgcgacctaacttaccatttgtctctgcaaaacacacgttagtcacatataatattacgttgtcattaatcactaaaaccaaccaggggtctagatgctttcagttgccttatgaattttgaaacaatatgtatatggagtcttaatgcctagttgggactagatgaatgtcggtcttttgtcgttgtgatcgtgattgctgaacattttttgatgaaactagtaaattttgcacactacaaaaaatctattaaaaataaataccccctccattctttttatttgtcgtgttttagttcaaaaatgaactagcaagcaacaaatattcgagaacagaagtagtaataaagtagtttacaaagaggaaaattaagagacaaagaaggaaacaaagatgtaactcaactcatgaatttcttcaactataccgtgggttttgttcaagactctataagcttcatttgatgtggaatatccaaggagaaagtcttcatcgcactcaa

SEQ ID NO: 19629 - DNA, 264 bp, Zea mays
  Coding DNA Sequence Number=SeqID_5226
aacaagggcgccagacttagaaggccggagctgtgtccgaaccagaagttcatcaacggggaagctctctgattacttgggggaagaagtaccgtcatttctggtccttctacccctggaatttcaccttcgtctgcccgaccgagatactgcgtttagtgacagatacgaggattttgagaagttgacactgagggttttgggggttccattgacagggtgttctccccccctttgatggttgcaaacaaacagaatgccggg

SEQ ID NO: 19630 - DNA, 365 bp, Zea mays
  Coding DNA Sequence Number=SeqID_5227
gttgctgtcggaagaccgagcgcactgcgcccaagtccgacgatgtctacctacctcaagctcctcctcaagctgtaccgcttcaacgccgtgatcctcaagcggtacttcattagcaagaccaaccgccctgcctctctcgctccaccgtctcatcagcttcatggaagggggggatgtctcgcttggatttccattcagattggggtggctgcatgtgttttccagttatgtgtcacattgcaggagaatcaaattgctgtgatcgtgggaaacgtgactgacgacaagagggtctacgaggtatctgcaatgaaggtggctgcgtctcaggttcactgagacggcaagggcacggattctga

SEQ ID NO: 19631 - DNA, 395 bp, Zea mays
  Coding DNA Sequence Number=SeqID_5228
atagatgaccatcaacctgacaatggacaatggtcaaaggcgaggcactcgtcacccgcgctcagaatccgtgcccttgccgtctcagtgaacctgagacgcagccaccttcattgcagatacctcgtagaccctcttgtcgtcagtcacgtttcccacgatcacagcaatttgattctcctgcaatgtgacacataactggaaaacacatgcagccaccccaatctgaatggaaatccaagcgagacatcccccccttccatgaagctgatgagacggtggagcgagagaggcagggcggttggtcttgctaatgaagtaccgcttgaggatcacggcgttgaagcggtacagcttgaggaggagcttgaggtaggtagacatcgtcggacttg

SEQ ID NO: 19632 - DNA, 281 bp, Zea mays
  misc_feature (52)..(52): n is a, c, g, or t
  misc_feature (97)..(97): n is a, c, g, or t
  misc_feature (109)..(109): n is a, c, g, or t
  misc_feature (144)..(144): n is a, c, g, or t
  misc_feature (149)..(149): n is a, c, g, or t
  misc_feature (163)..(163): n is a, c, g, or t
  misc_feature (171)..(171): n is a, c, g, or t
  misc_feature (177)..(177): n is a, c, g, or t
  misc_feature (209)..(209): n is a, c, g, or t
  Coding DNA Sequence Number=SeqID_5229
gggaactccaaccaggttcttctcaccggtcgcccttcgaggccggcaggcntcaagggcttccacgctcctttaccgaaaggagtgggtgacggantggatcatgccnatggaatggggcaatccttacggcggggaccccgnagagntttgccttgcggcngagaaggntgcctncctcaaaagaagggttacccttgcccgattgntgatggcgccccgcaacactgacccgtcagccatgcagttttcttgtgcgccgggtggtttggctcatcaca

SEQ ID NO: 19633 - DNA, 232 bp, Zea mays
  Coding DNA Sequence Number=SeqID_5230
atgatcattgaaggcttagcaccattagacagaagtcaatacccgaacccattcatcatcctctgctgcagactacagaatgtgagactgcaaaaactagggcgaggggggaggcacaaattaaaagagcaatggaattaattaacaaccgagcgcgacggcagcaagaggaatgagacgagcatggtgcgttcttgactcctccgtttcatgcaaagcctcgcgagcaagc

SEQ ID NO: 19634 - DNA, 264 bp, Zea mays
  misc_feature (26)..(26): n is a, c, g, or t
  misc_feature (99)..(99): n is a, c, g, or t
  misc_feature (200)..(200): n is a, c, g, or t
  misc_feature (237)..(237): n is a, c, g, or t
  Coding DNA Sequence Number=SeqID_5231
cctttccctgttcccatcgctcaagnatccgtttttagtagtagtaattttagtagtagtaattgtcattaacctttgcgttccctccgtcgcgcacgntcctcggctcgggcctcacctcccatttcggtttgggtctggttgtgctcgatccgaggcttactttgggctttgcggcttctctccttgtccaagcttgntgtctgggattcgacctgcagatcggaaggaaacaanggggggcattatcacctaccagataag

SEQ ID NO: 19635 - DNA, 531 bp, Zea mays
  Coding DNA Sequence Number=SeqID_5232
attgcatcacttcctactaagtctggcaaagtgacataggtatccaagttgaacatgtatattgacaactgtcctccacctatggctattaacaataagaggcagctgaacacaccattaggcaatataagaccatgccaatgcttaggcttctagttcttctagattttcttgacagcttgttctctttgttatttctcacatcaatcacatgatgatgtggttatgtgttaatgtttgtaagtcctcagtgacaaatgtcttaaatatttataagattgttcctttttaacttagtaaccttactccctccggtcctaaaaaaacaagaacaaactagaggcccctacggcggccaataacaggcgtacagaaacccatccatgactacaaaaaactaacaagaactaccacaatgctagctaactagcagggaggcccggaatgggggcggtcaattctgcatacttgttaatcaaaatgcagatatgtagttcaatgcaatatgcacccatttgtccacatttgaag

SEQ ID NO: 19636 - DNA, 585 bp, Zea mays
  Coding DNA Sequence Number=SeqID_5233
gaccaactttatcttggcctatcaccaaggtagcacccgctggttcatagttctaaacttacaaaacaattccaacattgtgatttctgtaccgcataggctctgaggagatctacacatcctcatacaaaacaattccaacattgtgattccagcctgtctgcggtattgagaactttgtgccctgtccttgttgtctctcatgggcacctcaaaatgtttcttgtttatgaggatccttatcttgactaccatggctatatcagctgccatgaatgctacaatcattgggacactagtaactaagagggactacaagtttgctgagctcatgagactccctgacacatttcttatgttgtttgttctgctgtgctttgacttttcaatatatttgtcattcaagatattgtggtctgcaagaacttcagtagatcagaaaatatgttcacaggtcttgttggagagtggtcatggttacaaagttgggaacaaaaggaaccccctaacagatcatttacttggagagttagaggatactaccaaaaacacaggaattgggcgtgacccagttatggactctga

SEQ ID NO: 19637 - DNA, 561 bp, Zea mays
  Coding DNA Sequence Number=SeqID_5234
gaagttcttgcagaccacaatatcttgaatgacaaatatattgaaaagtcaaagcacagcagaacaaacaacataagaaatgtgtcagggagtctcatgagctcagcaaacttgtagtccctcttagttactagtgtcccaatgattgtagcattcatggcagctgatatagccatggtagtcaagataaggatcctcataaacaagaaacattttgaggtgcccatgagagacaacaaggacagggcacaaagttctcaataccgcagacaggctggaatcacaatgttggaattgttttgtatgaggatgtgtagatctcctcagagcctatgcggtacagaaatcacaatgttggaattgttttgtaagtttagaactatgaaccagcgggtgctaccttggtgataggccaagataaagttggtcctaagtaccgcagacaggctggaatggagaaagccacactggtcaatatatcaaatccagaacattcttgggattcgactaaaggagtgtaggaagctcctcgattccgatccccttttcttcgatagtata

SEQ ID NO: 19638 - DNA, 481 bp, Zea mays
  misc_feature (78)..(78): n is a, c, g, or t
  misc_feature (86)..(86): n is a, c, g, or t
  misc_feature (93)..(93): n is a, c, g, or t
  misc_feature (98)..(98): n is a, c, g, or t
  misc_feature (103)..(103): n is a, c, g, or t
  misc_feature (106)..(106): n is a, c, g, or t
  misc_feature (112)..(112): n is a, c, g, or t
  misc_feature (114)..(114): n is a, c, g, or t
  misc_feature (122)..(122): n is a, c, g, or t
  misc_feature (124)..(124): n is a, c, g, or t
  misc_feature (129)..(129): n is a, c, g, or t
  misc_feature (131)..(131): n is a, c, g, or t
  misc_feature (134)..(134): n is a, c, g, or t
  misc_feature (136)..(136): n is a, c, g, or t
  misc_feature (139)..(140): n is a, c, g, or t
  misc_feature (144)..(144): n is a, c, g, or t
  misc_feature (154)..(154): n is a, c, g, or t
  misc_feature (157)..(157): n is a, c, g, or t
  misc_feature (161)..(161): n is a, c, g, or t
  misc_feature (166)..(166): n is a, c, g, or t
  misc_feature (172)..(172): n is a, c, g, or t
  misc_feature (179)..(180): n is a, c, g, or t
  misc_feature (183)..(183): n is a, c, g, or t
  misc_feature (187)..(188): n is a, c, g, or t
  misc_feature (190)..(190): n is a, c, g, or t
  misc_feature (192)..(194): n is a, c, g, or t
  misc_feature (200)..(201): n is a, c, g, or t
  misc_feature (203)..(204): n is a, c, g, or t
  misc_feature (208)..(209): n is a, c, g, or t
  misc_feature (213)..(215): n is a, c, g, or t
  misc_feature (218)..(219): n is a, c, g, or t
  misc_feature (221)..(221): n is a, c, g, or t
  misc_feature (225)..(225): n is a, c, g, or t
  misc_feature (230)..(230): n is a, c, g, or t
  misc_feature (242)..(242): n is a, c, g, or t
  misc_feature (244)..(245): n is a, c, g, or t
  misc_feature (249)..(249): n is a, c, g, or t
  misc_feature (253)..(253): n is a, c, g, or t
  misc_feature (257)..(258): n is a, c, g, or t
  misc_feature (280)..(280): n is a, c, g, or t
  misc_feature (283)..(283): n is a, c, g, or t
  misc_feature (285)..(285): n is a, c, g, or t
  misc_feature (287)..(287): n is a, c, g, or t
  misc_feature (293)..(295): n is a, c, g, or t
  misc_feature (297)..(300): n is a, c, g, or t
  misc_feature (309)..(309): n is a, c, g, or t
  misc_feature (311)..(311): n is a, c, g, or t
  misc_feature (314)..(314): n is a, c, g, or t
  misc_feature (316)..(316): n is a, c, g, or t
  misc_feature (319)..(319): n is a, c, g, or t
  misc_feature (322)..(322): n is a, c, g, or t
  misc_feature (324)..(324): n is a, c, g, or t
  misc_feature (326)..(326): n is a, c, g, or t
  misc_feature (330)..(330): n is a, c, g, or t
  misc_feature (338)..(338): n is a, c, g, or t
  misc_feature (340)..(340): n is a, c, g, or t
  misc_feature (343)..(343): n is a, c, g, or t
  misc_feature (349)..(350): n is a, c, g, or t
  misc_feature (353)..(354): n is a, c, g, or t
  misc_feature (359)..(359): n is a, c, g, or t
  misc_feature (363)..(363): n is a, c, g, or t
  misc_feature (365)..(365): n is a, c, g, or t
  misc_feature (367)..(368): n is a, c, g, or t
  misc_feature (370)..(371): n is a, c, g, or t
  misc_feature (374)..(377): n is a, c, g, or t
  misc_feature (379)..(379): n is a, c, g, or t
  misc_feature (390)..(391): n is a, c, g, or t
  misc_feature (394)..(394): n is a, c, g, or t
  misc_feature (396)..(398): n is a, c, g, or t
  misc_feature (400)..(402): n is a, c, g, or t
  misc_feature (407)..(409): n is a, c, g, or t
  misc_feature (411)..(411): n is a, c, g, or t
  misc_feature (413)..(414): n is a, c, g, or t
  misc_feature (435)..(435): n is a, c, g, or t
  misc_feature (437)..(437): n is a, c, g, or t
  misc_feature (440)..(441): n is a, c, g, or t
  Coding DNA Sequence Number=SeqID_5235
gcgaaaactggaagcgggaagacaactcagatcccccaattttgttcttgagacggaaggcttgggttaaacccggcntccatggntttgacnttggnaactnagnccctcngnaggggagngncagcnantgntnagnncttncccagccatngtnggcngggcnatgcgnaaaatannggntctnngntnnncctatnngnnggcnngcgnnnaannanaaanggcgngggtggttaatntnngttnatcncctnnttgtcgaggtcgcggattattnggnangncggggnnnannnnggattacgntntananaantantnangtcngttttcgngnacnctattnnccnnccccnattntntnngnnatnnnntntcttttctttnncgntnnntnnntttannntncnngtgggttttggtgtgttttcncntgnnggtttggtttgtgatctcaatttcattattgatttctgaa

SEQ ID NO: 19639 - DNA, 70 bp, Zea mays
  misc_feature (28)..(28): n is a, c, g, or t
  Coding DNA Sequence Number=SeqID_5236
ggaacgaactggacattacctgactgtnaaagataaccagggcgtcccatcttcatcccctcccaatttg

SEQ ID NO: 19640 - DNA, 460 bp, Zea mays
  misc_feature (284)..(287): n is a, c, g, or t
  misc_feature (289)..(292): n is a, c, g, or t
  misc_feature (297)..(299): n is a, c, g, or t
  misc_feature (315)..(315): n is a, c, g, or t
  misc_feature (317)..(324): n is a, c, g, or t
  misc_feature (332)..(336): n is a, c, g, or t
  misc_feature (338)..(339): n is a, c, g, or t
  misc_feature (377)..(379): n is a, c, g, or t
  Coding DNA Sequence Number=SeqID_5237
gccgactcgcgtaagaagtctgcttcttctgagggccagcgcatccacgacttcggggctgacgagcaagcctctgtggattctgagattcagcaactagaagtagttgagccggagctctttgaaggagaagagcaggtggtcgaagaggagccgcctaacactgaggcattcgccttgttccaggtgccgtctcccagtcagctttctagcgccaaggatagatgttagatggaggcaatgtttatctcttatttaaaaagacttcttttatgtaataaagnnnntnnnntgttnnntttttatgaagattantnnnnnnnntgctaaannnnngnntataaattttcatagcaaattctatatgttatttgttnnnaattgaagaaagaagaccaaaaaattgacatccgaataaatatccggatccatccctacctacaggagaacaggtggtcaa

SEQ ID NO: 19641 - DNA, 213 bp, Zea mays
  Coding DNA Sequence Number=SeqID_5238
agggaaggctcgtctgtgcgtgggctccggcaggctacgggcagtgctacagaacacgccggagcgtgccctcgaccgactgccgccgctgcaggaacgcggcgcccacgccaacgtctactcgacatttgtagccttccgggaggtcgcaggagtccaggatgccgacgacaccacgggccgccgcatgggtggctggagcgtgaggtcacg

SEQ ID NO: 19642 - DNA, 244 bp, Zea mays
  Coding DNA Sequence Number=SeqID_5239
tggcagaggccctcgtgcccgtctatccaatggccggcccgctcccgcgggacggggaccgtaggctccagatccactgcaatgccgaggcagtggtcttcctccaggcccacgcgcccgaatccctctggcgatgacctacggggggcttcccccccaccctgggagtccaggggcctcatccccgaccgtcgattaaccccgacgaacttctcggcctttctcccttactcggggctccagg

SEQ ID NO: 19643 - DNA, 428 bp, Zea mays
  Coding DNA Sequence Number=SeqID_5240
gatgaggcccctggactcccagggtgggggggaagccccccgtaggtcatcgccagagggattcgggcgcgtgggcctggaggaagaccactgcctcggcattgcagtggatctggagcctacggtccccgtcccgcgggagcgggccggccattggatagacgggcacgagggcctctgccagcgcgcgcggcatccgctcgccgtcgaagaagccctccgcatccggcacggggccgtcgcggcggtagaagtagacactgggcgtgtggaagcgcggcaccaccgaggtcgaggttgggagttccacagccgctgccgcggcgtctcccgcgccgggcgcaccatcgtcgaccgcctcgcagtaatcgccatctcagcgaagacgcggcgtctcgggtcagatctagggcggtgaaaccggaaat

SEQ ID NO: 19644 - DNA, 507 bp, Zea mays
  Coding DNA Sequence Number=SeqID_5241
ttttcccttttcacaatttcatatacacttgtattttaatattttatgaagaaataatggtcgaagcccttttctaagtcacataaaataatgataataagaatttgacacattttacttagcaagacaaatgtttgatgtattatttattgcattttttgctagaggaagcagtgaccgacgttccagaagccttagctccaaagaagggcaggagcccgacctctcggagatagaaccttcgtgttacgagagcttcgacgaaggcaagttcattctacccttttttgaaaggtcaagagggggaacccctactgtaaaattttaataataatgtaaaattacaatgcgacgtgagtacaagagatagatatgagctgggaaggtctagctaggaagctaagaagaaggatcataagagcacaaaagttatgcctgccactgatcaagccagttcggaattgagttgtcatatttccctctgctctgtgtacaaccaaccttaat

SEQ ID NO: 19645 - DNA, 568 bp, Zea mays
  misc_feature (537)..(537): n is a, c, g, or t
  Coding DNA Sequence Number=SeqID_5242
gaatggaggtagtcggcccaaacaacggttttggtctttttcctttttattttctattttcttttctccctttcccaattcaatactccaatttgaacttaaattcaaattccgtggcaaactcgtctccaaattaactatcccacttgaatatgacatgagatgaattgatttatttttaagaaatttatttagtggtggctaatgcttttcctcctcgttttctagtgtttacaatttgatatttatttccaacttggcttttaatatattttatcaacattattttatatagtcacaaaatacacacaaaataaagtctcagcatgatgcaccatttaatatcttttattaacctttgttttttttaatgaggtgttcacatgaaatgataaatagatacaacacacacatacaaataaaggtaataatattttttccttttatattatcccttacaaattgggtattacaaatcctacccccttaaaaataatctcgtcctcgagaattaggaagaacgagggaaaagatggngaaaatctatacgaagctcttcttctctttc

SEQ ID NO: 19646 - DNA, 195 bp, Zea mays
  Coding DNA Sequence Number=SeqID_5243
gcggctcgaggcaaggttcgcttcctgtagaaactagctctccctccgggtgccatggccgatccggcggaggagaccgttgtctcgccgccaccgacccctgcggccccagccgtgggcgcctcagacccgcccctgcagcctgctgctgacgagcgcctcaacggagaaaggtgtctgcctccggccccggag

SEQ ID NO: 19647 - DNA, 196 bp, Zea mays
  Coding DNA Sequence Number=SeqID_5244
taaggccccggggattcagcttcttggagaggacacttccgggccaaatcccttgggggcggaaacctgctgacgttcttgtatggaaaaacaagaaacttctgctgttggataaggcggggcacctggcatctgggttcttgtccaaaaggcttgattaacccctccctggcccggaaaacccatgaccggattg

SEQ ID NO: 19648 - DNA, 410 bp, Zea mays
  misc_feature (202)..(202): n is a, c, g, or t
  misc_feature (325)..(325): n is a, c, g, or t
  Coding DNA Sequence Number=SeqID_5245
tccggtcatgggttttccgggccagggaggggttaatcaagccttttggacaagaacccagatgccaggtgccccgccttatccaacagcagaagtttcttgtttttccatacaagaacgtcagcaggtttccgcccccaagggatttggcccggaagtgtcctctccaagaagctgaatccccggggccttacttcggcgncggggcagacacttctccgttgaggcgccgtcagcagcaggctgcaggggcgggtctgaggcgcccacgctgggcccgcaggggtcggtggcggcgagacaacgttctcctccgccggatcgnccatggcactcgaagtaaagcaagatgcgagaagaagcgaacctttcccctttgtcgatttgaaaagtcgctttgtgtttgtgtg

SEQ ID NO: 19649 - DNA, 355 bp, Zea mays
  Coding DNA Sequence Number=SeqID_5246
gtgcgtgctgcctgcttcgctgtccgactgctggctccgtcgcagcgtcccggcgagaagagtactgggagaaagattgggactggagtcaggcataatgggttgtggttcatcagtcatgaggagtcagcattgaaagcaactgttgagggggatgtcaaggagattctactacatcatcgtcggttaggacatatatcttttgagaacttaagtcggttgtatcccatgatgtttaagggagtggacaaaagtagacttgtatgtgatgcatgtgaacttggcaaacatactagatctacctaccctagtgttggtcttcgtagttgtgaaccgtttattctaatacattcag

SEQ ID NO: 19650 - DNA, 278 bp, Zea mays
  misc_feature (27)..(27): n is a, c, g, or t
  Coding DNA Sequence Number=SeqID_5247
ctcataagtcatactccctccatttcnttttatttgtcgctggatagtgcaaaattgcactatccagcgacaaataaaaagaaacggagggagtacataacaagtcatgcatgtagatcttctgatgactgatctggttacagtggcaaagttcatggactcagtaatagagtattatatatatattaagccctcaaagttacgctaattaggtcagtagctgcaaacatctagctagctaactagtgacatgataccagtacctgactacctgagat

SEQ ID NO: 19651 - DNA, 478 bp, Zea mays
  misc_feature (282)..(282): n is a, c, g, or t
  misc_feature (392)..(392): n is a, c, g, or t
  Coding DNA Sequence Number=SeqID_5248
aatatctggcaaaagtatcttcaacaacacaaaaagttttaaactaaaagaaaaagaccgcgaaaagttgtcatagagtcatcgcatgcaaggtttatatatggtgtttgatttgagtaatgatttagttcattatcttctcatttctcgcttttttgtttgatttgtggaattcttatttctcactttttttgtttgatttatgacatagaataagttgaccaattaccatcttatttctcatagttagttagtattaatatgagaaatgtggctatttcnctaaatttatagggtgtttggtttgagtaataagctagtctgtcatcttctcactcatcactatttttattaggcttgctctttacataaaatcaaacattttaagtgcnctagttccgtcatatccatctagtatcatgaaacgtacaaatacttagagggcgttggtttgagtaatctcttcatcaaaaataaa

SEQ ID NO: 19652 - DNA, 428 bp, Zea mays
  Coding DNA Sequence Number=SeqID_5249
aagtacattactaaccggccagcggcgagcggaggccgaggtttggccggggagagaaagcagaggcgaggagggtgcgtgggcgggagagctgaggcacgggcaagcagcaactgccgacgcgggggcgagcagcggcggttggcgcacgtgcgagcaacggcgcaagcggctaagagcagcagcgcgacacggacggcggtggcgcgaccaggagttgtgaatcggcagcgacgacgaaaatgggcagtgggggcatcgaatggaagtaactgggagagaaaaagtcgatgaaccggtataaaggggtcgataccaaatatcttagcgtggactcctgacacgtgactggccggtataaaggaggtcggccactaggaacggacattacgggtggtttatataggccaccggtacacccctaagat

SEQ ID NO: 19653 - DNA, 322 bp, Zea mays
  Coding DNA Sequence Number=SeqID_5250
tgtaccggtggcctatataaaccacccgtaatgtccgttcctagtggccgacctcctttataccggccagtcacgtgtcaggagtccacgctaagatatttggtatcgacccctttataccggttcatcgactttttctctcccagttacttccattcgatgcccccactgcccattttcgtcgtcgctgccgattcacaactcctggtcgcgccaccgccgtccgtgtcgcgctgctgctcttagccgcttgcgccgttgctcgcacgtgcgccaaccgccgctgctcgcccccgcgtcggcagttgctgcttgcccgtgc

SEQ ID NO: 19654 - DNA, 417 bp, Zea mays
  Coding DNA Sequence Number=SeqID_5251
gtcgattgacgacaaacctgaggtcgtatcgatgaatcgaaagtaccgggacaaacatctcgacaagacgaatgcaacagtactctcggatttcgccagcgacacatggattgaaagtagttactcgctggagttgtcgcagagttagaaccgtcccgaacttcggtgagcaattccaggaattgtggatcgaatttggggaaacagttttgagatatgaaaagggttcaacgagagggttccatccatatgtatattgctagggtttgaagatattttatttttcgtaataatcctatttttaaaattaaaataattccaaaaaaagctgaaattgtttttaatgtctgaaaaatacttcaaaggctccaaaaactatagaaaaattcctaggcatgatttcgcaccgaataaact

SEQ ID NO: 19655 - DNA, 399 bp, Zea mays
  Coding DNA Sequence Number=SeqID_5252
attcggtgcgaaatcatgcctaggaatttttctatagtttttggagcctttgaagtatttttcagacattaaaaacaatttcagctttttttggaattattttaattttaaaaataggattattacgaaaaataaaatatcttcaaaccctagcaatatacatatggatggaaccctctcgttgaacccttttcatatctcaaaactgtttccccaaattcgatccacaattcctggaattgctcaccgaagttcgggacggttctaactctgcgacaactccagcgagtaactactttcaatccatgtgtcgctggcgaaatccgagagtactgttgcattcgtcttgtcgagatgtttgtcccggtactttcgattcatcgatacgacctcaggttt

SEQ ID NO: 19656 - DNA, 578 bp, Zea mays
  Coding DNA Sequence Number=SeqID_5253
tcagtcgcgcctggatacagtcatggagttcatggggaagtacgcaagcccggatttcagggttgctgtgggcagtgatgaacgcaggctataggctcaacctgcagtctgcagtgttaaatacttaaatgtgaagcacttgtattggctcatcgagaggatggtcgatctgagggtgacggataatgcggtgacgccgtggagtgatcaggctgccctggctactgatttgcagaagttgctgaatgttgcagacatgcggcggaacatgatgcctgggcttccaatgcttgtgacccgatgcacactcagactcgccaattcagtcatcactggggagactctggtacctcgacaggttattttagtctgctaactgataatttttctattacagcaactttatgcatgctgtatcttgtggtggtaagttactataccataaatgtgatgattcagttagaacttagaagatgctatctgcatctgattttcttctgttgaaaagcagttgacaatagattctatatgtcaacataatacaatgctctgtttgaatggtttaacttgctgcggct

SEQ ID NO: 19657 - DNA, 278 bp, Zea mays
  misc_feature (235)..(236): n is a, c, g, or t
  Coding DNA Sequence Number=SeqID_5254
gctcagtacgtacgctttaccgccgtctttgtatcagcacccctgctgtgtgcatacctagcaagtgtttatatgggctgtgtgggctgttatcattcagtggcgcagcaagaaacccgatcgtttgcttccaaaaaaaaaaaaaaaatgtggcgtgtggccatccatcgtcgatccatctacacaactccacagctcacctcgagatccttcgatttcgtctctcacacgaccnntgggtgccccccgtctctcttgcaattgggtccgcatgtctc

SEQ ID NO: 19658 - DNA, 460 bp, Zea mays
  misc_feature (26)..(26): n is a, c, g, or t
  misc_feature (56)..(56): n is a, c, g, or t
  Coding DNA Sequence Number=SeqID_5255
gttatctccacccatgggtccctggntctcctctagttgagctcaatcccaagtgntcgcttaagctggtgtggccaggttccctttcctgggtcgccgtcgatgggaagcccctggccatcgatatcgatggatattgggttggtttcttcgaccacgtcaatgcctcacaggatttgggacaccttgtcgacactcggaccatggtggttcgctcgttaccacgccatcttcagcatcatgggttctataaaactctggcgcactcggtcgggcacccggtctgtcaatctccaccacgcagcgctggcatcgggactttaccctggtatggatggttcgacgacaaggcccggaaccagtattttttccagcattttcgcggagtagtgaagtcacggtttgatggtggggacgataaattacctcgccggggatggcgggaagaacgaacccaagt

SEQ ID NO: 19659 - DNA, 128 bp, Zea mays
  Coding DNA Sequence Number=SeqID_5256
taaacccctttgatggttctccttgcgatcctccctgaggaagcgctgtgttagagttttttggtagagcccttggagcagcatgtgtagctttcggtagtggtaacggcggattagccggtttctcg

SEQ ID NO: 19660 - DNA, 146 bp, Zea mays
  Coding DNA Sequence Number=SeqID_5257
tgccttgtgtcaacagtagactgactagatcagggctttcttatggaaccgatgatcacagtctcagagatgagttaggctattgcttacaactggctaattcttgttcttggacatgtatgttgagacatcaaaggagctggttt

SEQ ID NO: 19661 - DNA, 272 bp, Zea mays
  Coding DNA Sequence Number=SeqID_5258
tatagacttcggtaaattaatccacccagtggaaagcaacagccaacagacgtcctcgagaccacacgtcgcttttcatgaccttgcctccctgttcatcggctgcggcgaagcattttcttcaacctctgctcccttccgaagccgtcgcactcgcaccttgagcaagctcctgtgcagacacacgggtttaccgcggccgtcctccatctggcacggcggagctaacagcagaccatgaccaagggcagctggcctgtggcctcactagg

SEQ ID NO: 19662 - DNA, 174 bp, Zea mays
  Coding DNA Sequence Number=SeqID_5259
cctgagcacccgaggagactccgtgcgaccgaagccagagccagcggaaccgaacggaagcgagacccccggcggctagcgagatggacggcggcgccggcgaggatccgctccttcgcgtgcaaattaagcagaaatgaaggagatgtagaactccaaacgtgattggtatta

SEQ ID NO: 19663 - DNA, 156 bp, Zea mays
  Coding DNA Sequence Number=SeqID_5260
tttttcgatgaacagataataccaatcacgtttggagttctacatctccttcatttctgcttaatttgcacgcgaaggagcggatcctcgccggcgccgccgtccatctcgctagccgccgggggtctcgcttccgttcggttccgctggctctgg

SEQ ID NO: 19664 - DNA, 97 bp, Zea mays
  Coding DNA Sequence Number=SeqID_5261
taaagcttggaccacatgggccggaccaaagaggggaatctcttactactaaggtttctagtgtagacgtccacacaacagattggcgcacggttct

SEQ ID NO: 19665 - DNA, 292 bp, Zea mays
  misc_feature (51)..(51): n is a, c, g, or t
  misc_feature (129)..(129): n is a, c, g, or t
  misc_feature (169)..(169): n is a, c, g, or t
  misc_feature (179)..(179): n is a, c, g, or t
  misc_feature (228)..(228): n is a, c, g, or t
  misc_feature (236)..(236): n is a, c, g, or t
  misc_feature (256)..(256): n is a, c, g, or t
  Coding DNA Sequence Number=SeqID_5262
ccatctcctcctttctcaagcacttgcagccacacatcaaaccctagccgncccccacccatctcctcctcccatggtgccattcgttgccgctcggatctccgtcgcgtggtgcaaatcttcaacggntttcggtggagagaggaagggaggaaaaaaaggggagaanccaagggggnggacttccggatcgtacttaaggaatttgccccaactttccggaaaggnaagtaaanacaagggggggtgctaccgnttgggtttgcatcctattcccggttttggggatgca

SEQ ID NO: 19666 - DNA, 518 bp, Zea mays
  Coding DNA Sequence Number=SeqID_5263
tgctgctactatttttccatcatatatatttagaaatgcttaaggctgatgtttttccctatttgaaaaatgttaaattatatagaaatgttactgttcaggaatccaagtgcaaaccaactacacaaatgatcttttggctagtaatatgctactgtattttttcttctatggtgatcgatattttcacttacttattaaacgttcatacattagactataataacctttcctgatcaatatatgcaaccattagtattatccttattcaaattgatttgtctcgcatcgctttcgttctggctgtaacgtatgctttggttgtttggtgaaatatgtcgccctcgtcgttgtctacattttgtcaagtttaggaaaaaggtttgcttcaattggtttcgccaagctttgtctgttttggatctccttcaatcgtcgtcttctactgtgcgtgaaagggaattaggcttacacttagttcctatataattttggtgggttgaattgccccacacaaa

SEQ ID NO: 19667 - DNA, 567 bp, Zea mays
  Coding DNA Sequence Number=SeqID_5264
aaagcatacgttacagccagaacgaaagcgatgcgagacaaatcaatttgaataaggataatactaatggttgcatatattgatcaggaaaggttattatagtctaatgtatgaacgtttaataagtaagtgaaaatatcgatcaccatagaagaaaaaatacagtagcatattactagccaaaagatcatttgtgtagttggtttgcacttggattcctgaacagtaacatttctatataatttaacatttttcaaatagggaaaaacatcagccttaagcatttctaaatatatatgatggaaaaatagtagcagcattgtataaatagattcatagatgcatctagcttatggatgagttaaatgcagtagggaactatgagagcacctagagggggggtgaataggtgatcctgtaaaacttgaacttaatgccacaaaaacttggttaaacgttagcacagtattgccaagtggctagagaggagtcttagcgaaacacaataaccacaagagaatcaacacaggtagacacagtggtttatcccgtggttcagccaagtac

SEQ ID NO: 19668 - DNA, 114 bp, Zea mays
  Coding DNA Sequence Number=SeqID_5265
gacccagtgtaggacatgggtgtacacatgtacacccaataaccggatggagattgacgccctcgatagttccttatggtgtagtagtatagattgtactcctcgtgcactggg

SEQ ID NO: 19669 - DNA, 116 bp, Zea mays
  Coding DNA Sequence Number=SeqID_5266
gatctggcacctcactcggaagcggcagggcccagtgcacgaggagtacaatctatactactacaccataaggaactatcgagggcgtcaatctccatccggttattgggtgtaca

SEQ ID NO: 19670 - DNA, 390 bp, Zea mays
  Coding DNA Sequence Number=SeqID_5267
gaagagatctacacagggcgtcggcggcacgagctcgaccaggtactcgcacggagggacgtgcgcatgctctatgcctctacgagtctacgtgctccatgctcgtgttctgcgcctctgcatgctctgtgctgctaatatttgcaagatttcatcaggtgctcggtgcttgtgctctgcgcttcggcgtgcttcactactctgcgcaagcagatttcatccacatccctatgcagacaatcagacattgctccattgttctatgtagatttcatcaagtactccattgctctgatttctaaacaaacttatcctcttcgttacagaatacataagtaaatatgttacaggaaaccatcagttctgctgtttgctgctcttgtgaataac

SEQ ID NO: 19671 - DNA, 252 bp, Zea mays
  misc_feature (26)..(31): n is a, c, g, or t
  misc_feature (40)..(42): n is a, c, g, or t
  misc_feature (47)..(47): n is a, c, g, or t
  misc_feature (49)..(50): n is a, c, g, or t
  misc_feature (58)..(59): n is a, c, g, or t
  misc_feature (79)..(80): n is a, c, g, or t
  Coding DNA Sequence Number=SeqID_5268
caactgcatgtatactttaacgtgtnnnnnnggaagggtnnnagcangnnttctcttnncttccgccgaaaatcatcgnngatctattcagggtggaactaactcacatcgaggtttgctcgagctcgctcagcacatagctgaacaaggtcccgacgatcgctgttatctgcgtacactggtccaaattatttgcagttgtggtaggaggctcagaatcgacactttaatccgatctcagtgaacacttta

SEQ ID NO: 19672 - DNA, 547 bp, Zea mays
  Coding DNA Sequence Number=SeqID_5269
gggctcgctgctaagctttcctgtgcgctcgccctggctgttgaggccccgcacgtggctgctgtgaggcgtctcgcccataatgcttccctcgcacctgcgccagttgatgcccgggctgctgttgggctttgccacactttctgccgcgaggcccctcccgccgtcctccttggtggccccgcggtccttctgggtttaaaaataagtcgcataggaaactagcacgaaaaagtccatctgaagtaaacactagtcaaagccacggtaataagtgggcatggccatctggatcaccacagaaatgggttctatgctgttcagccctttctgccgcagaaaagggtattgtatcagaactcgcaaaaatagctggtgtgccaatctcaacaagttggagtcctaatgttacccatgttattgcatcaaccaacatgtctggttcttgcaagcgcacactgaagtttctgatggcaatcttgaatggcaaatgggttatctccatggactgggttaaaacttgcatggaacttatggaacctgctga

SEQ ID NO: 19673 - DNA, 490 bp, Zea mays
  Coding DNA Sequence Number=SeqID_5270
atcagcaggttccataagttccatgcaagttttaacccagtccatggagataacccatttgccattcaagattgccatcagaaacttcagtgtgcgcttgcaagaaccagacatgttggttgatgcaataacatgggtaacattaggactccaacttgttgagattggcacaccagctatttttgcgagttctgatacaatacccttttctgcggcagaaagggctgaacagcatagaacccatttctgtggtgatccagatggccatgcccacttattaccgtggctttgactagtgtttacttcagatggactttttcgtgctagtttcctatgcgacttatttttaaacccagaaggaccgcggggccaccaaggaggacggcgggaggggcctcgcggcagaaagtgtggcaaagcccaacagcagcccgggcatcaactggcgcaggtgcgagggaagcattatgggcgagacgcctcacagcag

SEQ ID NO: 19674 - DNA, 538 bp, Zea mays
  misc_feature (32)..(34): n is a, c, g, or t
  misc_feature (117)..(118): n is a, c, g, or t
  misc_feature (120)..(120): n is a, c, g, or t
  misc_feature (148)..(148): n is a, c, g, or t
  misc_feature (154)..(154): n is a, c, g, or t
  misc_feature (156)..(157): n is a, c, g, or t
  misc_feature (159)..(159): n is a, c, g, or t
  misc_feature (161)..(163): n is a, c, g, or t
  misc_feature (170)..(170): n is a, c, g, or t
  misc_feature (177)..(179): n is a, c, g, or t
  misc_feature (197)..(197): n is a, c, g, or t
  misc_feature (211)..(212): n is a, c, g, or t
  misc_feature (221)..(224): n is a, c, g, or t
  misc_feature (255)..(257): n is a, c, g, or t
  misc_feature (264)..(267): n is a, c, g, or t
  misc_feature (282)..(283): n is a, c, g, or t
  misc_feature (299)..(301): n is a, c, g, or t
  misc_feature (305)..(308): n is a, c, g, or t
  misc_feature (318)..(318): n is a, c, g, or t
  misc_feature (331)..(331): n is a, c, g, or t
  misc_feature (344)..(348): n is a, c, g, or t
  misc_feature (357)..(357): n is a, c, g, or t
  misc_feature (383)..(385): n is a, c, g, or t
  misc_feature (397)..(397): n is a, c, g, or t
  misc_feature (399)..(403): n is a, c, g, or t
  misc_feature (407)..(407): n is a, c, g, or t
  misc_feature (409)..(410): n is a, c, g, or t
  misc_feature (413)..(413): n is a, c, g, or t
  misc_feature (421)..(421): n is a, c, g, or t
  misc_feature (426)..(426): n is a, c, g, or t
  misc_feature (431)..(431): n is a, c, g, or t
  misc_feature (446)..(451): n is a, c, g, or t
  misc_feature (456)..(460): n is a, c, g, or t
  misc_feature (463)..(465): n is a, c, g, or t
  misc_feature (467)..(468): n is a, c, g, or t
  misc_feature (479)..(479): n is a, c, g, or t
  misc_feature (481)..(483): n is a, c, g, or t
  misc_feature (487)..(490): n is a, c, g, or t
  misc_feature (499)..(507): n is a, c, g, or t
  Coding DNA Sequence Number=SeqID_5271
gatcattcgatcattcatcgttcgttcatagnnnctattcatcgttcatcgttcgttcatagttcctattcatcgttcgtcgttcgttcatacgaattattcaccatcactatccanngnataatctcatcactactattcactgacnctattnannancnnnactatcnatcatcnnnactattcatcatccatanttcctatccatccnncattgatcnnnnatattaactattcaccatcactatttacacnnnctatttnnnnatgctatttagtgtnnctttttacctatactnnngtcnnnnactttttacngagtctatttacntttgctacgcttnnnnnctttttacntttactttttcatgtttgtatttacnnntagttttaattntnnnnngatncnngtnctatttantgttnggggntgataatagtttttnnnnnntaatnnnnntannngnnattcagctcancnnntgcnnnntgtgtcgtnnnnnnnnnatttttatatttgttctccatgtctcgtttt

SEQ ID NO: 19675 - DNA, 496 bp, Zea mays
  Coding DNA Sequence Number=SeqID_5272
tataattccatgtttgactcctcccatgaccttttttggttttatcgaaggcccctaggaggttttgggatcgcacgtcggagcgcgtagcacttgtacaagagtccatagtcgagacttctatggtgatgctgaggtatctgcgccttttaatgttatgctgaggtaactggccagttccaggcatctcctgacgataagggcacctcagctcctcttgtatattcgccacgaacaaagaaacggtcttgatgtgcatgtggtactcctatgcggtggtgaaagaggagagacgatattgtgtattgggacattcgggacaaccctcaggtcgcttgttcgtcgagatcgcgaggtagaaatcgtagcattgcagaccgcaagatcaggaggctcgctgacctcgccgtctccttcaccgcctttttgcggctgcgcagcggcgccaaaccgtagagggggtcccgctggatgagcagcgatatggccgctcttt

SEQ ID NO: 19676 - DNA, 82 bp, Zea mays
  Coding DNA Sequence Number=SeqID_5273
aaaactggaataggtcggtagtctggtcctggaagactcaaaagcatagtggaaggatatcctacatatccctggattgcta

SEQ ID NO: 19677 - DNA, 183 bp, Zea mays
  Coding DNA Sequence Number=SeqID_5274
ctggaccattttagatcaccgcaatatatttgtttttgatagtatacatccctgtttggctagaaccttgttattgcttgttagcaaggaaattcagttgtgggtttgttgggactaaatgtatcttttacctttttgcccagtcgcctgagtatgtttgttcttaggttacatacccttctg

SEQ ID NO: 19678 - DNA, 314 bp, Zea mays
  Coding DNA Sequence Number=SeqID_5275
tccggtccttccctctagattgagagcaggagctcaccggcttcctgccgcctgccgctgacgcgcagggtacacgcggccagcccagcgtcgcagccccagcgtcacagcacgtggccccgtgctgcgagcgggcggcgtggtcgtgctatcggtggcgccgcggccgccgcaggctccggcaacctccttgtcgttgtccctctccctgccagggctcgaccagcagcccgaaccatccccgccgccaacatctcaagcacaagcaagctcgctgtatgatgcaggagacaggcttcgacgcacgcaccgtg

SEQ ID NO: 19679 - DNA, 443 bp, Zea mays
  Coding DNA Sequence Number=SeqID_5276
ttcctcgcacgacgagtgacgacgaccatccccaactccacgccgcggagccgcaccaaatctcaccctgcatctctttagggttagggttctgcccgcacttgtgaattccgttgtgaaatctctcatctcctgagtcgagaatcgcagtttcctactcggttcgtttggggaaatcagttattttcgttcggccgcgtgggctctctgaaacgtttgggttgtcggctatttcccccgagttttgaggtaagaaatcgcgttcggtctggaatttagtttttttgatgacttctgacagaaaagctgtgtttttttgttttgtgggagaaggtttgaaaaatcgtcgtaattggatcatcacgcggctgccgaactttaagtggtggtggaagtttcgtgcctcggcgtggcccccgtgctcgattcttgatcacctgccc

SEQ ID NO: 19680 - DNA, 142 bp, Zea mays
  Coding DNA Sequence Number=SeqID_5277
taacttgagccaacttttctgacaactcagcctccaattcctttgcttctgctaatgaagtctcgagactagttgatttatgcttgtatgcttcaagctcctcagaaagttcatcaatcttcacatgacaactactacactc

SEQ ID NO: 19681 - DNA, 550 bp, Zea mays
  misc_feature (480)..(483): n is a, c, g, or t
  misc_feature (490)..(494): n is a, c, g, or t
  misc_feature (510)..(515): n is a, c, g, or t
  Coding DNA Sequence Number=SeqID_5278
aagctccgcaaccatcgtcgtgagggacgatgggccgacctccactacaagaagcgtctcctcggaaccgctttcaagtcttctccctttggtggttcttcccacgccaagggtatcgtccttgagaaggtcggtgttgaggccaagcagcccaactccgctatccgaaagtgtgtcagggttcagttgatcaagaacggaaagaaggtcaccgctttcgttcccaacgatggttgcttgaactttgtcgacgagaacgacgaagtcctccttgccggtttcggtcgtaagggcaaggccaagggtgatattcccggtgtgcgtttcaaggtcgtcaaggtttccggtgtcggtctgtccgcactgtggaaggagaagaaggagaagcccaggtcatagaggactcgtctgcaaggagtcaaggaaggaaacgaacgtggaccacaagcccgccatgaacgaatgatggaatccgcggannnntatgggnnnnnaccggagtctttacannnnnntatctgtgcttctactcggcatatgaaaagtcatg

SEQ ID NO: 19682 - DNA, 567 bp, Zea mays
  Coding DNA Sequence Number=SeqID_5279
gcacactgtgtcactgagttttaaaacctcagtcactgaccaaaaaccttcggaaaattaattttacactgtttcttttcaaagacagtaaccattggctccatggtgccatttcatcaaagccctttaaagaacatacttaaaggcactccgaatcatgaatcttttccaacatcaatatcggatgtgcaggtggcacagatagtctgtcatctacctgtgcatgtttaattcctattgattatcatcagaattccataattttaatgtctgattagacctttgagaatatatggaacgcggtttacaccacgtgcccctatttctagagaacacgctgctgaatttacagctgttctgcatacattctgtatatggcttcatctaaaacaataaaacatagaatcctatgatggcccccttcctttcagaccttcaggcagatctagaagatacctgatgcacgccctcagacacaattattcttttggaatttgcgtaactttctacggttagaggtcctttttcatacccccctcttaatagaggcgcaaaccaacctccaga

SEQ ID NO: 19683 - DNA, 557 bp, Zea mays
  Coding DNA Sequence Number=SeqID_5280
tgtcatctagatgccttatttctggaggttggtttgcgcctctattaagaggggggtatgaaaaaggacctctaaccgtagaaagttacgcaaattccaaaagaataattgtgtctgagggcgtgcatcaggtatcttctagatctgcctgaaggtctgaaaggaagggggccatcataggattctatgttttattgttttagatgaagccatatacagaatgtatgcagaacagctgtaaattcagcagcgtgttctctagaaataggggcacgtggtgtaaaccgcgttccatatattctcaaaggtctaatcagacattaaaattatggaattctgatgataatcaataggaattaaacatgcacaggtagatgacagactatctgtgccacctgcacatccgatattgatgttggaaaagattcatgattcggagtgcctttaagtatgttctttaaagggctttgatgaaatggcaccatggagccaatggttactgtctttgaaaagaaacagtgtaaaattaattttccgaaggtttttggtcagtgact

SEQ ID NO: 19684 - DNA, 480 bp, Zea mays
  Coding DNA Sequence Number=SeqID_5281
atggagatgctatcccaaccttgacttacgtcagagaatactaggtttgaatggagatcacatcagcaaaattgaccatattctgcaaaatcactccggcgttggcatgaagaaactaaggattgaactttttgactgcgacaaggttgattcctgttatatcaatagctggcttcgtattgctgttacagcaggaattgaagagctcactctttatctgcccgctaccgctgaggacgaagcatactacagtttcccatgctcgcttttatttaatgggagtgaaaactcgattcggtatcttgacataggcatctgtgcctttcgtcccacggctgggcttggtcgctggagaagcttggcaattttatttctgagtaatgtgttgattgctgacgatgagctagagggccttctttacaattgtgctgcattggagcatttgggactcctgaattgcccggagatagtttgcctgaa

SEQ ID NO: 19685 - DNA, 360 bp, Zea mays
  Coding DNA Sequence Number=SeqID_5282
caggctgcggcagctgctataagatccgatgtgtcgccgccaacaacccttcctgctccgaccagccgaggagggtggtcatcaccgacatgaactactaccccgtggccaggtaccacttcgacctcagtggcacggcgttcggggccatggccaagaacggcctcaacgacaagctccgccacgccggcatcatcgacatgcagttcaggagggtgcgatgcaacttcccgggcatgaaggtcaccttccacgtccagcgtggctccaaccccaactacctcgcggtgctcgtggaatacgccaacgtcgacggcaccgtggtccgcatggagctgatgcagaccaggaacggccgcc

SEQ ID NO: 19686 - DNA, 267 bp, Zea mays
  misc_feature (216)..(218): n is a, c, g, or t
  Coding DNA Sequence Number=SeqID_5283
ggcacacggattaccgtgttctggttactggcctgccttcttctgcatcctggcaagatttaaaggaccatatgcgaagggctggtgatgtttgtttcgcagaagtgtatcatgaaggcggcggcaccctaggaattgttgactacacaaactatgatgatatgaaatatgctataaagaaactggatgacactgaatttaagaatgcattttctnnnggttatataagggtgaaggaatatgatggcaaatgtgggcgctcctact

SEQ ID NO: 19687 - DNA, 451 bp, Zea mays
  misc_feature (422)..(422): n is a, c, g, or t
  Coding DNA Sequence Number=SeqID_5284
gccgcctcgaggagatgatccgatccaggaagattaagtgggtgatcgtggatgtgtccatgagctgggcactgcaggtggccaccacggcgggtgcccgtgttgcctcgttctcgacctactccgcggccgtgtttgctctcaggatgaacctccccaaattgatacaggatggcgttcttgatgaaagtggggatgtgaaggggcaggagcagatcaagatgatgccgcccatcgacgcgtcggagatcccctgggtcagcctggccagcaccagcgcccctgagaggcgcagaaacaacatcgagaacgtcctcaagaccaacctgtcgatgccactcgccgaggtggtcatcctcaacacttccttggagttggaacccgacgctctggccctcctccccaacgcgctgcctctcggncccgctagtggcgcccacgtcgaggccag

SEQ ID NO: 19688 - DNA, 217 bp, Zea mays
  Coding DNA Sequence Number=SeqID_5285
acgtgaagcccccagctttcaagttccccatctacgtgaagaccattcagcagagcaagcatgggagcgatacagacgtgtacgatacccagggcaggtttgttcctgaaaagtttgaggagatattcaagaagcatgcccacactaggcctgatgccctaacggacaaagagcctgggggagatgcttaaagcaaacagggatcctaaagatttca

SEQ ID NO: 19689 - DNA, 207 bp, Zea mays
  Coding DNA Sequence Number=SeqID_5286
gcatcctaagttgcaatggttgtatccacggcaagaacaattatgtgtctacgagaacctccaattgatgcaccatgtgaagtcatgttgacatttttttttcttctctttggtaaggttatggaataaattttgtttcccctagtattgtgtgagtggtgtatatattcactaaacaaggttcttccattcctctgttcccatatg

SEQ ID NO: 19690 - DNA, 112 bp, Zea mays
  Coding DNA Sequence Number=SeqID_5287
aggcaccatcgtgcagatggagatcagggagaagaactccaagcagtggaagccgatgcagcactcgtggggagctatctggagggtggacagggtcgagccgctcgtgggc

SEQ ID NO: 19691 - DNA, 388 bp, Zea mays
  misc_feature (344)..(345): n is a, c, g, or t
  Coding DNA Sequence Number=SeqID_5288
gaaggcgtgcgccaacgtactgaacctgctaaagctcaacctcggcgtgccggcaagcgaggactgctgccccctgctgagcgggcttgccgacctcgaagccgccgtctgtctctgcaccgccatcaacgccaacgtcctcggcatcaagctcaacgtccctgtcgacctcgtgctcctcctcaaccagtgcggcaagacttgccccgccgacttcacctgccccagctgatccacccatcatccatcgatcgatgcatcacaaaccatgcatcgtcgtggccacactcgtcactggtttgcatgtcatacgcatgcagttacatattttgtttcctcttccnnttggtcgtcatcacactcgtcatttataagatactctcgttga

SEQ ID NO: 19692 - DNA, 556 bp, Zea mays
  Coding DNA Sequence Number=SeqID_5289
gtatgacatgcaaaccagtgacgagtgtggccacgacgatgcatggtttgtgatgcatcgatcgatggatgatgggtggatcagctggggcaggtgaagtcggcggggcaagtcttgccgcactggttgaggaggagcacgaggtcgacagggacgttgagcttgatgccgaggacgttggcgttgatggcggtgcagagacagacggcggcttcgaggtcggcaagcccgctcagcagggggcagcagtcctcgcttgccggcacgccgaggttgagctttagcaggttcagtacgttggcgcacgccttcagcttcagcgtgttgatcgagcaggggccgctgccgcctccggtcgtcggcggggttgggactgggatgacgggcgggggcatggccatcggcggggttggcactgggatggccggtgtgttgccgcagtacgacccgcagccatgcgcggctgccatgaggaccaggttcagggcgaggaagagggcgaccttggagggcgccattgctatgctgatgaaacaagtagccagcaagagtgtac

SEQ ID NO: 19693 - DNA, 262 bp, Zea mays
  misc_feature (28)..(28): n is a, c, g, or t
  misc_feature (30)..(30): n is a, c, g, or t
  Coding DNA Sequence Number=SeqID_5290
tccccgtcactacagtgcttggactcgnanaaggaaaagattgtgtgcttgttgggactttatacaagcacatgaaactgaagccttctattctcgatgaatactcaaaggagaggtcggcaatccctcttgttaagccacacaatttcatgcattctgatgataatcttattctggaagatgaaagtggaagagttgcacttgcaggagccatacctccagcagcttatgtgactggagttgtagtagctcttcatgggaa

SEQ ID NO: 19694 - DNA, 312 bp, Zea mays
  Coding DNA Sequence Number=SeqID_5291
tcattgaccgcatccgtatgcgcgtgcacagcgcctgtagccgcacggtctcgtgcgccgacatcaccgtgctcgccacccgcgagtcgctcgtcctggccggcgggccccgcttcgacgtcgccctcggccggcgcgactccttcttcccggcgtccaaggaccaggtcggcctgctgccggcgcccttccacccggtggacaccctcatcaagtccttcggcgaccgcggcctgaacgtggcggacctggtgtccctctccggcgcgcacaccttcggggtcgcccactgcggggccttcagggaccggt

SEQ ID NO: 19695 - DNA, 264 bp, Zea mays
  Coding DNA Sequence Number=SeqID_5292
gatccgcactgggatgcttttctccccccagaaaactaagaaatgtaatgtgtctttacgttgcacgaaacgcacgagcatgcctcgtagcagcgctagatcgaacagtatatcccgtcgcgatccagtcctctccttgaacgcgcacctctccacgagccaccaaagcaaattggcgaaaactctagagttcctctccttccaaatggtacaagagatgagatgcttatgggacaggagccaccagtccagtagcgatgtcgt

SEQ ID NO: 19696 - DNA, 287 bp, Zea mays
  Coding DNA Sequence Number=SeqID_5293
aaaaacctgggctacacgatcgatggccgcgtcaggatcgatggtatgcagcatctgctactgaccaacacgacatcgctactggactggtggctcctgtcccataagcatctcatctcttgtaccatttggaaggagaggaactctagagttttcgccaatttgctttggtggctcgtggagaggtgcgcgttcaaggagaggactggatcgcgacgggatatactgttcgatctagcgctgctacgaggcatgctcgtgcgtttcgtgcaacgtaaagacacatt

SEQ ID NO: 19697 - DNA, 502 bp, Zea mays
  Coding DNA Sequence Number=SeqID_5294
ccatttcgattcaggacccagcgaattctaacagaacccggcgtgtccatgtcatccgacccctccccatgcgagtctattaacagtctcctgccgctcttcccggccgggcggatgggacagtgtcgttgtcaggagggtcattccttcggataaccgttgcctcttcaacgctgtgggctacgtgatggagcacaaccgaaataaggcttctgagctcagacaggtcatagcagcaacagtcgctggtgatcctgagaaattcaatgaggtgtttcttggcaaaccaaatgaagcgtattgtgcttggattttggatcctggaaagtggggaggagccattgagctctctattctatccgaatactacgggcgtggaatcccagcatatgacattcaacccacccgttgggttctctatggccaggagaaaaaatttcggggaagggcccatgccctttaatgagggtttgcattatgatgctctccattgggccccggg

SEQ ID NO: 19698 - DNA, 431 bp, Zea mays
  Coding DNA Sequence Number=SeqID_5295
gaggggcagatgttcggtggcggcaaatggggctcgtcgccctaccctggccccaacgccaacatcaacgccagtaacgagaatcagttcctgttcgatgccaaggccgcgccgcagcagcttcaactctttgggagcaactcagttggcaccagtggatattataactacaatggaaatgacaacccatatgttatgaaccaaccaagaaagacaagcaattgtacagcggatgaaaagaagctcaagcttcagatgtccttgaacaactttcatgcaggagatgccgaccggttggcatgtactggtaattcaagtgttgtgtctactgggctgaaattgtcctatgaggataatgagcataattcttccttcacgtctggtactggaagcatgtcttccttgacttcccgacaccttttggtcatgat

SEQ ID NO: 19699 - DNA, 410 bp, Zea mays
  Coding DNA Sequence Number=SeqID_5296
ttttcatccgctgtacaattgcttgtctttcttggttggttcataacatatgggttgtcatttccattgtagttataatatccactggtgccaactgagttgctcccaaagagttgaagctgctgcggcgcggccttggcatcgaacaggaactgattctcgttactggcgttgatgttggcgttggggccagggtagggcgacgagccccatttgccgccaccgaacatctgcccctccattgccgtatccttccccggaaatggctcctgccgtgccaggaagcaggggggaggggcggcggattgtgcccccggacgacgaaggcggcccccggtcagggcccgaacccgatcccgagcgccggccctggcgaatcgaaaccctagcggctgttccgccgaaatcgg

SEQ ID NO: 19700 - DNA, 387 bp, Zea mays
  Coding DNA Sequence Number=SeqID_5297
acaccaacaaccctgcaggttcgatcgtcacggcggccaacgtgcagtcattccccggggtgaacacgctcggcgtgtccatggcccgcatcgactacgcggtcggagggcagaacccgccgcacacccacccgcgcgccaccgagatcatcttcgtcaccaagggaaccctcgaggtgggcttcatcaccaccgccaacaagctcttcactaggttcgtcaccgtcggagaggtgttcgtcttcccgcgtggcctcgtgcacttccagcagaacaggggacatcgccccgcctccgtcatcgccgccttcaacagccagctccagggcacacaagccatcgccaccacactcttcgctgccacaccacagtgccaaccgacgtggt

SEQ ID NO: 19701 - DNA, 564 bp, Zea mays
  Coding DNA Sequence Number=SeqID_5298
agagcaacaagcgtctgccgccatactgccctcctcgcgcgttaatggagcacgagttctcgtgtagcgacagccctagccccgcgttccttgcggccaagagactccagtcacggctgaagcggggtgccgccgccagcgctgccgtctcttcctgctttggtgccaccgttggggcctcgtacgggtcgccaccggcgacacaggaggacgatgtggttgaggaggaagatgaggctgatgggtcggcctgctacgagcttgagcctgacgtggactacagggcggaggagttcatcaatatgttctatgagcagctcagggcgcagaactttcccccagttttgcaacgctcgccatgacgcgcgacgctgagacatgagagctgagagatcgagggcgtgcgtacgtcaggtacgtgtcaagaggagaggagtacgttcgtactttcgatgaggaaggacaggccagcttgtatcactttattttgatttctacatgagtgtttgtgacttgtaactaagtgtactacgtacacatgtgggctacggatatacctattga

SEQ ID NO: 19702 - DNA, 452 bp, Zea mays
  Coding DNA Sequence Number=SeqID_5299
ttttgccctgccgatgatgcattcggcagggttgcagattccagcggcatggccgatatgtagtgcatgcatggatgttattcattcatgatgcatgcattgcgctgcctatgttcgcattttaggagggattgatcggttgatgggttgagattttcatttccatttgtcttttcacttgcttctctggaggcaggggtgtgaggagaggacgccggaccactcagctacaaaggttgatgtgcttcctttctcttccacaaatggaaaaggttgatatagataccagttcatttcgttgctgggactccagttcaattggctacaaatgctggcgatgctgatcacacgcatgattctgaagaagatcgaagataagaagaagattaaataagacgctgatctcatggattattctgctgggatgttgcttttcgttctgatccttgtat

SEQ ID NO: 19703 - DNA, 567 bp, Zea mays
  Coding DNA Sequence Number=SeqID_5300
gtatctatatcaaccttttccatttgtggaagagaaaggaagcacatcaacctttgtagctgagtggtccggcgtcctctcctcacacccctgcctccagagaagcaagtgaaaagacaaatggaaatgaaaatctcaacccatcaaccgatcaatccctcctaaaatgcgaacataggcagcgcaatgcatgcatcatgaatgaataacatccatgcatgcactacatatcggccatgccgctggaatctgcaaccctgccgaatgcatcatcggcagggcaaaaaaagatccaaaacagaagggactgatcggctgaaacaaacgattgatcaccgatcgatctgcggcgaacagatcgacggatggatcaatcactccagcggaggagcatgacgacgcagcggtggatgatgtagagcttggccctcttctccttgagcgccttgttcagcttccccatctgcttcatctggctcccaaccttcatggctcaatacttggtagttgatgtaccaaaaaaggggctttgtctaaggtttgtgtggtgttccttttacacaaaag

SEQ ID NO: 19704 - DNA, 194 bp, Zea mays
  misc_feature (137)..(142): n is a, c, g, or t
  misc_feature (151)..(155): n is a, c, g, or t
  Coding DNA Sequence Number=SeqID_5301
gggttctcagtgctgttcgattgcatcaaggcacctggtcttggaatagccacaagatatatgttcaccatggcagtcggacggttgcttcggacggcaacttttgttggtacaattcttccatctgcaagaccttnnnnnngctgcaggnnnnnatcaaatacctgggcaccctcatccctgggcgcaaaaaa

SEQ ID NO: 19705 - DNA, 356 bp, Zea mays
  Coding DNA Sequence Number=SeqID_5302
ctggtgatggacgggccctgcatctcgctcctctcgccggtgctccgcgtcggcgacctccgcaagcacggcgtcaccctccacctcaacatcgacaaggcgcgccagcaggtcgccgacgcgcccgcggtctacctcgtccgccccacgcccgccaacgccgaccgcatcgccgccgacgccgccgcggggctctacgcctccttccacgtcaacttctccacctccctcccgaggcccgtcctcgaccgcctcgccgccgccaccgccgcgtcccgctccgcgcaccgcgtcgcccgcgtcgccgaccagtacctcgacttcgtctgcctcgaggacggcctcttctcgctcgc

SEQ ID NO: 19706 - DNA, 339 bp, Zea mays
  Coding DNA Sequence Number=SeqID_5303
tccacctccgtgacggcgacgtgatggccgcggtgctcccccacagcgcgaggcactttgagagagccatcgtgatgcccaacctgaagccaccggttactacaacggcacgtgcgatcgcgtacagagatgagatcctcaaggcgctgcctcccgggagcagcttcgtgccgctcatgacgctctacctcacggacaggactagcccggaggaaattaagatcgcaagaaagagtggtgtggtttttgctgtcaagttgtatcctgctggagcaactactaactcccaagatggcgtaactgatattttggggaaatgcttgcctgtccttgaagaga

SEQ ID NO: 19707 - DNA, 453 bp, Zea mays
  Coding DNA Sequence Number=SeqID_5304
tctccagggcgaaactgctctaccgccatgagaagggctggtacagcaccctgcctccgatggtcggcgcgatggtcgccgacgcacgcttcgccgcgcgcccctcggacatcgtcgtcgccaccatgcccaagtccggcaccacgtggatgaaggcgctcctctactccacggtccaccggagggagcacaccccgggcggccccggccacccgttcaactccctcggcccgcacgactgcgtccgccacctggagtaccagctctacacgcgcaacagggtcccggacctcgacgggctcccggacccgaggctcctcgccacgcacgtcccgctcgcgtcgctgccgaggtccgtcgccgcgtcggggtgccggatcgtgtacgtgtgccgcgaccccaaggacaccctggtctcgacgtggagcttcgtgaacaagttcagggccgagg

SEQ ID NO: 19708 - DNA, 354 bp, Zea mays
  Coding DNA Sequence Number=SeqID_5305
atgctgcatggctcaatggctgcattagttacagtctacaacatgcttgccctagagaacgcagcagcaatcctgaccattgtttcttttaacacagtaggcgccttcactcttgtggccctttatttggcagtaagcagcgcacacatcatttacgcagggtcccgaagttccatagcattgctcctttatccttccagggcagcagcctccggcttggcaagatgggaaggtaggcatggtcccaagaaccaagaacaaagcagcagccaggtacacgatcctagtacagatcttgattgacgatgccatggagacgggagaatgttgctaccgtttcgttttcctgatcag

SEQ ID NO: 19709 - DNA, 374 bp, Zea mays
  Coding DNA Sequence Number=SeqID_5306
tacatccaaaagtagcccagctgatcaggaaaacgaaacggtagcaacattctcccgtctccatggcatcgtcaatcaagatctgtactaggatcgtgtacctggctgctgctttgttcttggttcttgggaccatgcctaccttcccatcttgccaagccggaggctgctgccctggaaggataaaggagcaatgctatggaacttcgggaccctgcgtaaatgatgtgtgcgctgcttactgccaaataaagggccacaagagtgaaggcgcctactgtgttaaaagaaacaatggtcaggattgctgctgcgttctctagggcaagcatgttgtagactgtaactaatgcagccattgagccatgcagcat

SEQ ID NO: 19710 - DNA, 344 bp, Zea mays
  Coding DNA Sequence Number=SeqID_5307
ctggcggccagatcagttcgagtttgggtaacaccagatctgccgaggacgcggtcctcgcccacggatctggccgggggaaatcattttcttcattgtttggccggtggagttgcaggcttccctcagcgtcacagagcaggaaatatgacgtgctggagaaccagccggcgccggacaaagcgagggattcgccggggtgcacgcgtgcatcaaagctaccggcgacagttcgttttggttgagagagcgtgctttccaagtgaataatctgaatgatagcacctctcactattttttctcttagctgtttgggtttgtgtctgaccatagctagtgagatt

SEQ ID NO: 19711 - DNA, 527 bp, Zea mays
  Coding DNA Sequence Number=SeqID_5308
atctcactagctatggtcagacacaaacccaaacagctaagagaaaaaatagtgagaggtgctatcattcagattattcacttggaaagcacgctctctcaaccaaaacgaactgtcgccggtagctttgatgcacgcgtgcaccccggcgaatccctcgctttgtccggcgccggctggttctccagcacgtcatatttcctgctctgtgacgctgagggaagcctgcaactccaccggccaaacaatgaagaaaatgatttcccccggccagatccgtgggcgaggaccgcgtcctcggcagatctggtgttacccaaactcgaactgatctggccgccagagtggaagatgacccggatccgggtggtttggccgccgtagtggaaaaggactagcgccccggacgtcgcttccgtcgcaggcgcatcgtagtggaggttggctgtggcggcgccatgagcagacgagaggtggctggctcgatgggaataatggaagagagagaacacgatgcagccttcacc

SEQ ID NO: 19712 - DNA, 532 bp, Zea mays
  misc_feature (494)..(496): n is a, c, g, or t
  Coding DNA Sequence Number=SeqID_5309
atcagcccgggcaagttcgggcagaggagccagcagctgtcgtgcaaggacaccaacggcaggaaggcgggctgcatgggcaagtgcgacaagcgctgccccaaccagtgcatcgtcctctgccccagctgcaagacatactgcatgtgcgacttctacgccggcgtgtcctgcggtgacccgcgcttcaccggcggcgacggcaacaacttctacttccacggcaagaaggaccaggacttctgcatcgtctccgacgccgacctccacatcaacgcccacttcatcggcaagcgcaacccctccatgagccgcggcttcacctggatccaggccctcggcatccgcttcgcgcaccaccgtctcttcatgggagccaagaataccaccagctggaacggcgacgtcgaccacctcgagatgtccttcgacgatgcggccatcgagatcccgatcgaggtcggcgcacggtggcagtcggccgcggtgccagnnntgaccgtcacgaggaccgcggcgaccaacggagtga

SEQ ID NO: 19713 - DNA, 246 bp, Zea mays
  Coding DNA Sequence Number=SeqID_5310
atcagcactttgctctctaccgagcggttctcccgacgtcgtccatggccgggcttcgcctggtgccatctccccgggcatcgttccgctctgtaccggggcatcggtccgtggtggcgcacacagggatgtgcccgtcgctgaagcacgtgaagcgaatgagcgatgcggatggccttctcagtctcacgtcgtctttttctcccgcggcgaggctgaacaacagcgcctccgtggctggagcaa

SEQ ID NO: 19714 - DNA, 261 bp, Zea mays
  Coding DNA Sequence Number=SeqID_5311
gatccacgagcgtgtgcccatgcagtccatcggcgtggttgctccagccacggaggcgctgttgttcagcctcgccgcgggagaaaaagacgacgtgagactgagaaggccatccgcatcgctcattcgcttcacgtgcttcagcgacgggcacatccctgtgtgcgccaccacggaccgatgccccggtacagagcggaacgatgcccggggagatggcaccaggcgaagcccggccatggacgacgtcgggagaaccgc

SEQ ID NO: 19715 - DNA, 452 bp, Zea mays
  Coding DNA Sequence Number=SeqID_5312
ctgtcggaccgaagggagtgtatccgggtcagaatttgtgaaggaagatttgcattgttgatacgagaggtatgcacgcttattttgttttcattatgcttctttcattctttgacatgaatctataacacattgccctttctcttcccttcaatattttgctagcctataagggaaggaaattttattatccagccaaaggttgattttgatattagtgccagtactgttgcagggcttcttaagcttggttaccaagctgttgcatatattgaagcttctgcggtgatttaccaagatggaaaggttattatgttccttaaccagtgtagctcttttttttatttagagaaaaggatgcatacttgcctaccactaaatggacaaagtcttttttatttttgtaaaagtctccctactcctgtgctattatgccattattgcttgcttgt

SEQ ID NO: 19716 - DNA, 502 bp, Zea mays
  Coding DNA Sequence Number=SeqID_5313
gtgccagcaaaattcacaattcctaagttatttaagccttaatcatgcatactcagcaataatactaaaggataaatctttgtacaagcaagcaataatggcataatagcacaggagtagggagacttttacaaaaataaaaaagactttgtccatttagtggtaggcaagtatgcatccttttctctaaataaaaaaaagagctacactggttaaggaacataataacctttccatcttggtaaatcaccgcagaagcttcaatatatgcaacagcttggtaaccaagcttaagaagccctgcaacagtactggcactaatatcaaaatcaacctttggctggataataaaatttccttcccttataggctagcaaaatattgaagggaagagaaagggcaatgtgttatagattcatgtcaaagaatgaaagaagcataatgaaaacaaaataagcgtgcatacctctcgtatcaacaatgcaaatcttccttcacaaat

SEQ ID NO: 19717 - DNA, 391 bp, Zea mays
  Coding DNA Sequence Number=SeqID_5314
agcccatcacggagcgcgcggactacgcctggccgaatggcgcgcggctggccgtctacctggggttcaacatcgagcatttcgcttttggcgaggggctgggcgccgagctgggcccggcctcgccgcacccggacgtgctcaattacgcctggcgcgagtacggcaaccgggtcggcgcgtggcgctgcctggaactgtttgacgcgttggggctgcccgcgggggcgctgatcaacaccgcgctgtatgaccattgccccgagctggtggacgcctgcctggcgcgtggcgatgagctgatcggccacggttacagcaacgcgcatcggcagggagggctgggcgaggccgaggaaagggcgctgctggaacattgccgcgaccgcat

SEQ ID NO: 19718 - DNA, 529 bp, Zea mays
  Coding DNA Sequence Number=SeqID_5315
gggccatgagcctgttgtgcacccacagccatcaactggcgctgttttccgccaagctgcagcaggaagtctgggacgataacccgaacgccacggccagtagcagcatcgcgccgtttggccgcactgaagaagttgaagggggtgtgctgttcagcggtgaaatgggctggagcagcggttgcgatcacgccgagtgggcgattgtcggttttcgtcgtaaaaacgccgaaggctctcaggattactgctttgcggtgctgccgcgcagcgattatcagattcgtgatgactggttcgccgccggcatgaagggcagcggcaccaagaccctgatcatcgacaacgtgcgggtgcccgaacatcgcatccagaaagccaaggacatgatggaaggcaagtccgccggtttcggtttgtaccctgacagcaagattttctactcgccgtaccgtccgtatttcgccagcggtttctccaccgtcagcctgggggtggccgagcgcatgcttgaggtgttccgcgaaaa

SEQ ID NO: 19719 - DNA, 499 bp, Zea mays
  Coding DNA Sequence Number=SeqID_5316
aagcggatcaagaccttccagggctcggcgttttccatcggcctgtcggccaacgcggtggattgcattttttgcctggagttgtttcgccatgtgcccacgccagaagggcgcctggccctgctcggggagtttcaccgggtgagccgtgacacggtgatcgtctcggtcaacagtgacagcggctaccgggctgtgcagcccgcactggcggcagttgccagccatcgggcgcaggtggaagcggagtttcgccaggccggtttcaaggtcctcaatcaacaggaattcctgcccggctcggccatgtggcgcgtgtacgtcctgcgtaagagaggataagcaccggctgtcggactattcttcagctcctgtaagagttttcatggcggatgctgtactgcgaatgctcgcaactccctttcgcgatatatactgcgcgccattcttcaagggagagccgtgtggccatcgatattcactggatctgcgacaacga

SEQ ID NO: 19720 - DNA, 368 bp, Zea mays
  Coding DNA Sequence Number=SeqID_5317
cgcgcaggcaatctgaaggcataaaaaacccggccatcaaggccgggtttaaaagagcgtgggcgattcagcctcgcttggcaggcttgaccaatttctgttccagttcggcgcaggcgctctggatcatctcttcggtgatttgcacttcgcggccttgagcgtcgatgtacgagcaaggcaactgctgcggctggcggatcacttcaatcttggcattgctgctgttttgcaaggacatggcccgtctcctcatcaggttgtgtacctattgtaaaatcaccgcgtgaccgcgttgttacaactcctttcacggtcagcagatcgaatgcccagtccagcagaaaccgatacaaatttccagccgg

SEQ ID NO: 19721 - DNA, 384 bp, Zea mays
  Coding DNA Sequence Number=SeqID_5318
ggcctggtgcagtcccagcaaggcagcatcgcggcgttggcctcggagatcgatcaatcggtgcgggtgatcaaccagttggccatcgacagccaatccatcagtcgcgtgctggaagtgatcaagagcatcgccgaacagaccaatttgctggcgctgaatgccgccattgaggccgcgcgtgccggtgagcaaggacgcggtttcgccgtggtagccgatgaggtgcgcactttggcccggcgtactcagcactccaccgaggaaatcgagcagatgattgccaagctccacagtggcgtcggcgcagcggtgaaggccatgggcaccagccacgagatggccaatggcacggtggggcagtcggagaaagtccagcaggcc

SEQ ID NO: 19722 - DNA, 548 bp, Zea mays
  Coding DNA Sequence Number=SeqID_5319
gcaagcatccggcataaccataaatggagacaaccatgacccccatgccccggatttcgcagcaacgcagcacccccaatccgcgtctcgcacgcgccctcgtcgcgctgaccgcggtcgccggcctgtccctcggcggccccgcccaggcccagaccgcccccgccgccatctccgacgatatcgtccgcctcggcctgatcctggacatgagcggcatctacgccgacgtgaccggcaagggcagcgccaccgccgcgcagatggccatcgacgacttcggcggcaccgtgctcggcaagaagatcgacctgctggtggccgaccaccagaacaaggccgacatcgccgcggcccgcgcccgcgagtggtacgacacgcagaaggtggacgccatcatggacgtggccggctcggccccggcgctggcggtgctggaagtggcgcgcgagaaaaagaagatcgtggtcttcagcggccccggcaccgagcgcatcaccaacgacctgtgctcgccctattcggtgcactacacctatgacacctgg

SEQ ID NO: 19723 - DNA, 504 bp, Zea mays
  Coding DNA Sequence Number=SeqID_5320
gagcgccagcgcaaacagcaaaccgctgagcagttcctggcaccgatcgccgaagccgcggcgacgttgctggtggaaggggatttcggtttgatccgcacctgcgaacaccccgagtgcgtgctgtggttctacgaccggaccaagggccacaagcgccgctggtgcagcatggcgctgtgtggcaaccggcataaggtggccgagtttcgcaagcgcaaactcttgtagcggtcgtcaggcaccggccgggctttcgcgctcgagcaactgccgcttgcgctcaacgccccagcggtagcccgatagattaccgtcggcgcgcaccacccgatggcagggaatcgccacggccaggctgttggcaccgcacgcctgggccacggcgcgataggcggtcggggcgccgatgcgctgggcaatctctgcatagctggcggtgcaacccaccgggatttctcgcaaggcctgccagacccgttcctgaaacgcagtgccgcgcag

SEQ ID NO: 19724 - DNA, 556 bp, Zea mays
  Coding DNA Sequence Number=SeqID_5321
gacagcatttccgatgccggacgacgcctgttcggtgtttcccgacaagccaaggcgcaaccaaacgatgccgaccgactacgcaaatacctggcgaggttttcgattgagtggaaacagttggcggagttgaagggctgacggatacctagagcgcagcagcctggccttgtgccgcctgaaacaacgcatcggcagtctcctgaatttcttcacgctgccacaccttgcccaaccactcgattggaatgccctgcacgccgtaatacgcaccagccaactgacccacgatcgccgcagtagtgtcggcgtcatcccccaggtttgccgcagccagcacggcctcggcaaagctgttggtgtgataaaaacaccatagcgcagcttcaagcgaagccaccgcgtaaccagaaccaacgatgtcgctgcgcgccttatcgaggtagtgcccatcagcaatgtccacaactttgggttcgctcaagtccagatagtcaacctttagtacctgcgctttcgaatccccacgcagcgcattggaaatacactccgccag

SEQ ID NO: 19725 - DNA, 524 bp, Zea mays
  Coding DNA Sequence Number=SeqID_5322
cgctcctgcagaagctctaagctaattccataaaattatttattttattttttatagatcaatatcatctaactgagttgacccttggagagccggagtccgcgctgctcaagtcttatccgctcaggaatctataaaaatgaacacgctgaaactggcccgcaacctcctctcggccatgggcctcgctgtcctctccctaagcgctcaatccgctgacctcaccatcggctacatcaacggcatcgacccgatcaaacgcgccatcgccgatggtgaatatgaaaaaggtatcggccagaagatcgattggcgcaaattcgacgcgggcccggccgtcctggccgccatggcttccggtgatgtgcagatcggcaacctgggttccagcccattggctgcggcggcttcgcgaaacatgccgctggtggcgttcattgtcagcgcgcagattcgcagttccgaggccctggtggttcgcgacggcagcgggatcaagacccctgatgacctgatcggcaaaa

SEQ ID NO: 19726 - DNA, 436 bp, Zea mays
  Coding DNA Sequence Number=SeqID_5323
gcgacctggaaggcaccggctactacaccgacgccgcccactcgcagatcgaccccgcgctgcaggcccgcaaccaggcccagacccggccgctgaacgactacgcccgccgcgtcgccgacctttccgacgcctacctggcccacggcgacgccgccgccggccaatgcgcgctgacgtggctggcatcctgggccaaggacggcgccatgctcggccgcatgatccacggcaacaacgaccaggccgactacctgcgccaatggacccatggcgccgccgccctggcctatctgaagacgctgccgctggccacgccggcgcaacgcggcctcatcgggccctggctcgaacagctgtcgcgcgccaacctggcctactgggaagacccccggcaccagcgcaacaaccattactactggaccggcgtcggcat

SEQ ID NO: 19727 - DNA, 304 bp, Zea mays
  Coding DNA Sequence Number=SeqID_5324
acctgccaacgcctgaggaactggagcgcgccaccaagatcctgatgaactcggcgcaacccgatggcggcctggcactgaccggcgacaaagccctgctgtttcaccccaacgacgaagcgttcctgatgtacgctcgtcgcggtcgcagcctggtggcgttgtatgacccgatcggcccgaccctgcaacgggccgagatgatctggcagttccgcgacctgtgcgacattcaccacgcccgtccggtgttctaccaggtgcgcgccgagaacctgccgtattacatggacatcggcttgac

SEQ ID NO: 19728 - DNA, 466 bp, Zea mays
  misc_feature (376)..(377): n is a, c, g, or t
  Coding DNA Sequence Number=SeqID_5325
gatatgcgcgacttgctggacatcccgtctgactacaaagtgttgttcctgcagggtggcgcgagccagcagtttgctcagatcccgctgaacctgctgccggaaagtggcactgccgactatatcgataccggtatctgggggcagaaggctattgaagaggcgtcccgttacggtcacgtcaatgtggcgggtactgccaaaccttacgactacttcgcgatccccggtcagaacgagtggaagctctcgaaagacgcggcgtacgtccactacgtagcgaacgaaaccatcggcggcctggaattcgactgggtgccggaagtgggcgatgttccgctggtatgcgacatgtcgtcggacatcctctcgcggnntatcgatgtgtccaagtacggcatgatctacgccggtgcgcagaagaacatcggcccgagcggcatcctggtcaacatcatccgtgaag

SEQ ID NO: 19729 - DNA, 130 bp, Zea mays
  Coding DNA Sequence Number=SeqID_5326
agtcacccctgtcgcgcacgatcaaggagttggaagaagatctgggtgcgcctttgttcgcgcgcaccacgcgcagcacccgattgacgcgagccggaaggctgttgctcgaacacgtgccacgcgtgtt

SEQ ID NO: 19730 - DNA, 129 bp, Zea mays
  Coding DNA Sequence Number=SeqID_5327
acacgctggcgcgggcttgatctagtgcagcgaacacgcgtggcacgtgttcgagcaacagccttccggctcgcgtcaatcgggtgctgcgcgtggtgcgcgcgaacaaaggcgcacccagatcttctt

SEQ ID NO: 19731 - DNA, 378 bp, Zea mays
  misc_feature (326)..(331): n is a, c, g, or t
  Coding DNA Sequence Number=SeqID_5328
ggcgactttttcctcggcgacagtgccagcaataccggcaccttcaacatcgatggcagcagcaccctgggcgtgacgcaaggcagtatccgcccctacaccgcaggcgcactggccaccctgaataatgccggcaccctcgacatgaccagccgcagcaacagcgccaccgatacgttgacggtgtacggcaactacgtgggcaacaatgggcagctttggttgcaaaccgtgctgggcgacgagaactcggctaccgacaaactggttgtgtctgacgggaccatcagcgggcacacacaaatgaccgtgagcaatctcggcgnnnnnngcggtctcacgcaaaacagcgggatcgaagtggtgcaagccctcaac

SEQ ID NO: 19732 - DNA, 521 bp, Zea mays
  Coding DNA Sequence Number=SeqID_5329
tggaagccatcgtcgaaaacctcgacgccaagcgcggcctgttgcagcagttggaaggcgtggtcagcgcgggttgcatcctcgccaccaacacctcgtcgctgtcggtcacggccatcgccaccggctgccaacaccctgagcgggtcgccggtctgcatttcttcaacccggtgccgttgatgcgcgttgtcgaagtgatcgacggcctggccacggcgccaaaggtcggcgatgacctgctggccttcgtggcccgcaccggccatcgcggtgtgcgtgccaaggacacccccggctttatcgtcaaccacgccggccgtgcctacggtaccgaagccttgaagatgctcgatgaaggcattgccgagcgcggcgatatcgaccgtatcctgcgtgagggcgcaggctttcgcatgggcccgctggaattgctggacctcaccgggctcgacgtttcccacccggtgatggagtcgatctacaaccagttctatcaagaggcgcgctacaaaccgtcg

SEQ ID NO: 19733 - DNA, 581 bp, Zea mays
  Coding DNA Sequence Number=SeqID_5330
tcagtgatgggtacagctcccggcggcgcgagcagataggggagcaggcccagccacccaagcctggtgatcctcacgccagtggcacggtgtacctggccaccgccgatgcggaaggcaatatggtttcgtttatccagagcaattaccacgggtttggctccggtgtggtgttgcccgacagtggtattgcgctgcagaaccgagggcaggagttcagccttgatccggggcatgccaattgcctgatgcctgggaaaaagacgttccacaccatcattcctgggttccttacccgggatggccaggctctcggaccgtttggtgtgatgggcgggtatatgcagcctcaggggcatgtgcagatggtgatgaatctggtggatttcggtcttaatccccaggcggcccttgatgcaccgcgttggcagtggttgggggagatgaaggtgggcatcgagcagggggcgtcgcgggatttggccaatgccctggctcggcgtgggcaccaggtgcagattgccagtgacctgacggacttcgggcgtgggcagattatcctgcgggatccagtcagtgga

SEQ ID NO: 19734 - DNA, 414 bp, Zea mays
  Coding DNA Sequence Number=SeqID_5331
tgatccatgccggtatctactacgcgccgggcagcctcaaggccgacttgtgcaaacgcggcgccgaagccaccaagcagttctgcaccgagcacgggatcaagttcgaggtgtgcggcaagttgctggtggcctcgaccccactggaagtgcagcggatggaagcgctgtacgcccgctcgcagctcaacggaatgaaggtcgaacgcctggacgccgaccagttgcgccagcgcgaaccgaacatcgtcggactgggcggattgtttctcgacgccaccggtatcgtcgattaccgcgaagtctgcgaaaccatggcccgggtcatccgccgtgccggtggggaaatctgcctggaacgcaccgtgacctccatcgtcgaggacactgacaaagtcaccgtcagcactcggg

SEQ ID NO: 19735 - DNA, 211 bp, Zea mays
  Coding DNA Sequence Number=SeqID_5332
gcgtcaacggcctgcacctggcgctggaaggcgcctacgacctgatcgtgctggacgtgatgctgcccggcgtggacggcttcggcatcctggccgccgtgcgcgccaacaaggacaccccgatcctgatgctgaccgcgcgcgacgccgtcgaggaccgcgtgcgcggcctcgaaggcggcgccgacgactacctggtcaagcccttcgc

SEQ ID NO: 19736 - DNA, 159 bp, Zea mays
  Coding DNA Sequence Number=SeqID_5333
tatacccaccacgttacattttcttttactattagtgcgacaagtcattgttgctccgtccaattcaacaacctcaaacaccatagagtccattatgctaatgtggttttagaaacgatctaatgcttgcaagagccaataacacaagagatgagcacc

SEQ ID NO: 19737 - DNA, 150 bp, Zea mays
  Coding DNA Sequence Number=SeqID_5334
gggcactaccacagtccacagggtgctcatctcttgtgttattggctcttgcaagcattagatcgtttctaaaaccacattagcataatggactctatggtgtttgaggttgttgaattggacggagcaacaatgacttgtcgcactaat

SEQ ID NO: 19738 - DNA, 290 bp, Zea mays
  Coding DNA Sequence Number=SeqID_5335
ttgccatgcagcaccagaaagcgctgcacttcggcgatgtcggtgtttttggtggtgacgaacgacaggcgcgaggactcgttgtccaggtaccagtcggcgtgggcaggcacggcggcagcggccagcagcaggacggccatgggtttgaacaggcacataaagactcttggggcaaaaaacctggacgaaccttaagcgcaatgtaacgagcggcgcaaatccaatgtgggagcaggcttgtgtgggagcgggcttgctcgctcccacatgagctgtatttcaggcca

SEQ ID NO: 19739 - DNA, 248 bp, Zea mays
  Coding DNA Sequence Number=SeqID_5336
tggcctgaaatacagctcatgtgggagcgagcaagcccgctcccacacaagcctgctcccacattggatttgcgccgctcgttacattgcgcttaaggttcgtccaggttttttgccccaagagtctttatgtgcctgttcaaacccatggccgtcctgctgctggccgctgccgccgtgcctgcccacgccgactggtacctggacaacgagtcctcgcgcctgtcgttcgtcaccaccaaaaacac

SEQ ID NO: 19740 - DNA, 522 bp, Zea mays
  Coding DNA Sequence Number=SeqID_5337
tgggcacacggctgttcatggtcatggacactgcggccgggttcagcttcgacgggttggaccacgccgcacgcgccaaccctgaagtgcaagcctgggaaaccctgatgtggcgtttccaggtgcccacgccgtggactgaccctggcggcaaatggcagtcgctgacgcagattttcagcctcaccaatcaaccgtagtacccgctgcatcgcacgccttgatcccataaaaacaacaggagaagcgtcatgttaagcaaagacacacacctggcaggtacccgcgccgtgccgacctatcgctgggcgctgatgctggtgaccagtctgttcttcctctggggcttgtcctacggtttgctggacgtcctgaacaagcatttccaggaagtcctgcacgtcagcaaggcacagtccgggctgttgcaaggtgcatatttcggcgcgtatttcctgatcgccctgccggcggggctgctgatggaccgtcacggctacaaagccgggatcctcttgggct

SEQ ID NO: 19741 - DNA, 549 bp, Zea mays
  Coding DNA Sequence Number=SeqID_5338
tttgtagccgtgacggtccatcagcagccccgccggcagggcgatcaggaaatacgcgccgaaatatgcaccttgcaacagcccggactgtgccttgctgacgtgcaggacttcctggaaatgcttgttcaggacgtccagcaaaccgtaggacaagccccagaggaagaacagactggtcaccagcatcagcgcccagcgataggtcggcacggcgcgggtacctgccaggtgtgtgtctttgcttaacatgacgcttctcctgttgtttttatgggatcaaggcgtgcgatgcagcgggtactacggttgattggtgaggctgaaaatctgcgtcagcgactgccatttgccgccagggtcagtccacggcgtgggcacctggaaacgccacatcagggtttcccaggcttgcacttcagggttggcgcgtgcggcgtggtccaacccgtcgaagctgaacccggccgcagtgtccatgaccatgaacagccgtgtgcccaggcgccagatctgcatctccacgatgtgctggctgcgcagatgttc

SEQ ID NO: 19742 - DNA, 200 bp, Zea mays
  Coding DNA Sequence Number=SeqID_5339
actaccgcaacgacgaccgcttcggcgacaacaccttgcccggcattcccaagcactactatcaggcgcaattgcgctacagccatcccagcggtttctacaccagcctcaatggcgagcactcatcgcgggtggcagtggactatgccaattcctactacgcggcggcctacacgctgctcggcgcgacggtcgggtat

SEQ ID NO: 19743 - DNA, 234 bp, Zea mays
  Coding DNA Sequence Number=SeqID_5340
aactgaccctggctaatccgttcgccggcaaggccgagctgagcatgatcgaacacatgaacagcgaccataccaaggccattgcccactacgtcgaactggccggcttgccgaccaccgagcctgcgcaactggcgggcatcgacagtgaaggcatgcacctgcgcattggccaggcactctactggctgccctttgccgagccttgcaacacgccgacacaagtacgcgaag

SEQ ID NO: 19744 - DNA, 543 bp, Zea mays
  Coding DNA Sequence Number=SeqID_5341
aatgccttcgaacccacggtggcgttcgacctcaagcaggacgccggaggtatcgtcgatattgaatttatggtgcaatacgcggctttggcgtggtctgcgcaacatccatcgttgctgcgctacaccgacaatatccgcattctggaagggctggagcaggtcgggctgatgcccgctgccgatgcccatttgctgcgcgaggtgtataaagcctaccgttccgccgctcaccgccaggccttgcagaacgaggccgggaccgttgccggggatcagttcgctgacgaacggcgccaggtgcagcgaatctggcatgaactggggttaagctgaaactatataaggcggggaggcatgagcctccccgtatcgtttgtggaaactacatgaatattctgatcgttgggcccagttgggtcggtgacatggtgatggcacagacactgttccagtgcctgaaacaacgccatcccgactgccaaatcgacgtgctcgcccccgagtggagccggccgattcttgagcgtatgcccgaggtgc

SEQ ID NO: 19745 - DNA, 518 bp, Zea mays
  Coding DNA Sequence Number=SeqID_5342
gaaagcggtatttccttcgacgtgctgttcggcccggcctacaagggcattcccctggccgccgcgaccgccgtggcgttggctgaacatcacgcgctggatttgccttggtgcttcaaccgcaaggaagccaaggcccatggcgaaggcggtagccttgtgggcgcgccgctcaagggcgacgtgctgatcatcgatgacgtgatcactgccggtacggcgattcgcgaagtgatgcagatcatcgcttcccaggacggcgccaaggcggctggcgtgttgatcgcgctgaaccgccaggagcgcggcaacggtgaattgtcggcgatccaggaagtggaacgtgatttcgcgattcctgtggtgagcatcgtgtcgctgaaccaggtgttgcagttcctggaagatgacccgcagctcaagcagcacttgccagcggtcaaggcctatcgcgagcagttcggcgtttagaagatccatgtgggagcgggcttgctcgcgaatacggcttgtcagtt

SEQ ID NO: 19746 - DNA, 550 bp, Zea mays
  Coding DNA Sequence Number=SeqID_5343
gggcgagattcagatgcgctacctcgcggaaaaaatgaacggcaagggcaacctcgcaatcatgctcggcttgctctctaacaacgccacccacaaccgcacacagggcgtgaaaaacgtactgaaggattaccccaacatccatatcgtcgaagaacaaagcgccgactggcagcgcagcaaggccatggacctgatgaacaactggatcgtctcgggcaagaaaatcgacgccgtggcggccaatgccgatgaaatggctatcggtgccgcgatggcgattacccaggccggtatgcaccctggcaaggacatcctggtgggcggcagcgacggcggacccgccggcctggatgcgatcaaaaaagatctattggtagtcacggcctatcaggacaacaagggccaggccgtcggctcgattgacctggcgctaaagatgatcagaaagcagccctacacggcggagctgaccattccctatcaacagatcaccaaggacaactatcaggcctttctcaccccttgattgttatcagcccagcgccaa

SEQ ID NO: 19747 - DNA, 526 bp, Zea mays
  Coding DNA Sequence Number=SeqID_5344
agaacctgcaggaccacgtggccgtggcgatccagtattcgacgcccaagcagggtgtgtcgccgacccgcgcgctgtcgccgctcgggcggctgttcgtcggggcgcgctggatggccgcgcgcagtggcctgggggcgtccaactacttcgaggtgggggcgttcttccgtggcaacgaccaggtcgagtacgccaacctggagcacgaatttctccccatggtgggcgagttctaccgcggcaaggcgcgcatcaccccgggcttccagtacttcaccagcgtcatgcgcccggccagtcgtggcagcgtcaccctggcctcgaaggatcccaaggccgatccgctgatccgcctgaacttcctcaccgcgccgggcgacctggagcaactgcgcgaaggcctgcgcaagacccgggaaatgatcgcccagcgctcctgggacgaactgcgcggcgaggagctcagccccggcaagcacctgcagagcgatgccgagctggaagcctggatccgcgacaacgc

SEQ ID NO: 19748 - DNA, 185 bp, Zea mays
  Coding DNA Sequence Number=SeqID_5345
tcgtttgcccgggtgctgtcgctgcagatcgaagccgaagaaagcctccagcagaccgaggccgacttgcagcaggagcgcgaaaccgccgaactgcgcgaacaattcatcgccgtgctcggccacgacctgcgcaacccgctgtttgccatcaacgtcggcgccgaacggctgctgcgcaaaca

SEQ ID NO: 19749 - DNA, 210 bp, Zea mays
  Coding DNA Sequence Number=SeqID_5346
tggccagcatgtgccgtaccagggtgtcggtggccgggtccgggtgtttgcgcagcagccgttcggcgccgacgttgatggcaaacagcgggttgcgcaggtcgtggccgagcacggcgatgaattgttcgcgcagttcggcggtttcgcgctcctgctgcaagtcggcctcggtctgctggaggctttcttcggcttcgatctgcagcg

SEQ ID NO: 19750 - DNA, 154 bp, Zea mays
  Coding DNA Sequence Number=SeqID_5347
gcctgggccgtctgcaactgaacgaagtgctcacgtacaaaagcagccagggtctgaccctcaaggccggcgaccgcatggccagcagcaagggcctgatcctcgacgtggccagcctgaacaacggcggcgaactgctcagcgacggcaacgt

SEQ ID NO: 19751 - DNA, 160 bp, Zea mays
  Coding DNA Sequence Number=SeqID_5348
tattgttcaggtcgccgctcagggtgatgctcacgttgccgtcgctgagcagttcgccgccgttgttcaggctggccacgtcgaggatcaggcccttgctgctggccatgcggtcgccggccttgagggtcagaccctggctgcttttgtacgtgagcac

SEQ ID NO: 19752 - DNA, 499 bp, Zea mays
  misc_feature (472)..(472): n is a, c, g, or t
  Coding DNA Sequence Number=SeqID_5349
tggacggcgaactggcccacggcctgacctccaaggacgtgatcatggcgctgatcggcaagatcggcgcttcgggtgccaccggctacgccattgagttttgcggttcgaccattgatgccctgagcgtcgaggcgcggatgaccatctgcaacatggcggtggaagcgggcgcccgtggtgcgttcatggcgccggacgaaaaagtcttcgcctacctcaagggcaaaccccgcgcgccgaacggcgagttgtgggagcgcgccctcgtgggttggcgccaactgcactcggatgccgacgccgtgttcgacctcgaagtgcaactggacgccaccgccctggagcccatggtcacctggggcaccagccccgaccaggccgcgcccatcgggcgcccgcgtaccggacccgcaagacgtcagcgacctgatcctgcgccaggacatgcgccgcgccctgaactacatgngccttgaagccggcatgcccctgagcg

SEQ ID NO: 19753 - DNA, 537 bp, Zea mays
  Coding DNA Sequence Number=SeqID_5350
gccccatgagcgctgataaaccggaaaccgaccagcacatgccactggtctcgcacctcaccgagttgcgtacccgcctgctgcgctgtgtcgcggcgatcttcatcatctttgccgggttgtttgccttcacccagcagatctacaccttcgtctccacgccgctgcgcaattacttgccggccggcgcgacgatgatcgccaccgatgtgtcgtcgccgttcctcacgccgttgaagctgacgatgatggtctcgctgttcctggcgattccggtgatcctgcaccagatctggggctttatcgcgccgggtctgtacaagcatgaaaaacgcatcgccgtgccgctgctggtgtcgagcatcctgctgttctacaccgggatggccttcgcctacttcctggtgttcccgctgatcttcaagttcttcgccgccgctacaccggccggtgtggagatgatgaccgacatcaccagttacctcgacttcgtgatgacgctgttcttcgcctttggcgtggccttcgaaatcccgg

SEQ ID NO: 19754 - DNA, 538 bp, Zea mays
  Coding DNA Sequence Number=SeqID_5351
ggagccagggtagcaacgcgaccaacccgctggctggctccggctgcaattcccccgggttgctgtcgcgcaatggcatctgccgccaaagcctgtggagttacctggacctggtgccggaaaccgaaaaaacctcggcctttgccaaagccaccggcaagctcgccgatgaccacaccgtgagccttgagtacttctgggcgcgcaacgaaaaccgcacgcagattggcccgggcaccttgatgggcgcccaggtcaatccgggtacggcgttctatccgggcaacggcatcacgccgggtccgacgggttttgccctggacccgacacaaccggtggatgtgaactggcgcgaaaccgacgccggggcgcgcaagcacgaagatgacaacaccagtcagcgcctgctgctgagcttcgaaggcaccgtggcgaactgggactacaacgtcggtgcgtcctacaaccagaacaaagtggtgcaaaccattctggacggttatgtgaacgaccagaccatcagccagggtatcgccaa

SEQ ID NO: 19755 - DNA, 386 bp, Zea mays
  Coding DNA Sequence Number=SeqID_5352
ttgttcttcgccgaagccttgccggcaccgaccttcggtacgcctggcctgctctgggcgtccctgaccctggcgctgctggcggtacccgtggtgatcgtagccaccgaagaaggcctggcgcggatccctcgcaccgtacgtgaaggttctttggcactgggggcgaccaaggcggaaacgctgtggaagatcgtgctgccgatggccagcccggcgatgatgaccggcatgatcctcgccgtggcccgcgccgccggtgaagtggcgccgctgatgctggtgggtgtggtgaaactggcgccgtcgctgccggtggacggcaactacccgtacctgcacctggaccagaagatcatgcacttgggcttccatatctatgacgt

SEQ ID NO: 19756 - DNA, 427 bp, Zea mays
  Coding DNA Sequence Number=SeqID_5353
gatggtggccatcagcgaacgcaaccccaagcgcgtgccggcactgaaagtgaagctcaaggactcgccggtgtacgtgggcgtaaacaagaacgagccggcgctgctggacaaggtcaaccagatcctggtcgcggccaaagccgacggcagcctggaaaagaacgcaatgcagtggctcaaagagccgctgccggctgatctctgatcgcggtaacgagggttagctatggcctatcaattcgactttgtgccggttctggccaataccgatctgttgctgcgcggcgcgctgttcacccttgagctgaccgccatcggtgcagtactgggcgtggcgctgggagtcgtcggcgccgtggtgcgggcgtggaagatccagccgttcagctggatcttcggggtgtacgtcgagttgatccgcaac

SEQ ID NO: 19757 - DNA, 314 bp, Zea mays
  Coding DNA Sequence Number=SeqID_5354
ggtttgccaactggtagaggccgaaagccagggctgcatcaccttggtgcgcgactacgacccgagcattcccgacgtattgatcgaccgcgagcagatgatccaggcggtgctcaatatcgtacgcaacgccatgcaggccatcagcagccagaacgaactgcgccttggccgcatcagcctgcgcacccgcgcgctgcgccagttcaccatcggccacgtgcgccatcgcctggtgaccaaggtcgagatcatcgacaacggcccaggcatccctgcagaactgcaggaaaccatctttttcccaatggtca

SEQ ID NO: 19758 - DNA, 586 bp, Zea mays
  Coding DNA Sequence Number=SeqID_5355
gaaatcgccagtgcggtgctttatctgtgcagtgacggcgctgcctttaccacaggccaggcattggcggtggacggtggtgcgaccgcgatttaggaactgatgctgatgccattcagaaaagcgttggcggcgctgtgaggcttttctgcaggtggccaggtgccctggccgaatgtgtatcaataggtaaataatccaattaaatcaatgatttaataaatcttcaccacggctgtcattgggcttctgtgcttaactggtttgggttaaatgacaacagtttaagtgagtggctcatggatttagggatcgatcgacaagcccttgtaccggtagtgcagcaaatcgtcagcgcgttggccgcctggattcgcgaaagcggagccagtcccgggacgcggttgccttccgttcggcaactggcccacgagaacctgctcagccagtccagcgtgatcgaggcgtttgagcggatggttgcccaaggcgtgctggcctcaaggcaaggcgcgggtttctgtgtggcccagccacccgccgaacgtggccttcgctgcgaaaaccaatggtatgagggcgccga

SEQ ID NO: 19759 - DNA, 523 bp, Zea mays
  Coding DNA Sequence Number=SeqID_5356
actgtccaggacattcatgttccggacatcggttcgtcgggcaaggccaagatcatcgagctgctggttaaagtcggcgacaccgtcgaagccgaccagtcgctgatcaccctggagtccgacaaagcctccatggaaatcccttcgccggctgccggcgtggtggaaagcattgccgtgaagctggaagacgaagtcggcactggtgacttcatcctcaaactgaaagtcgcgggcgcttcggctcctgctgctgccgctccagccgccgctgctccggccgccaaggctgaagctgcacctgctgccgcccctgcgcctgctgcaaaagccgaggccgcaccggctccggcggctgcacctgcgccaagcggtgccaaggttcatgccggccctgccgtgcgccaactggcccgtgaattcggcgtcgagctgagcgctgtgtcggccactggcccacacggtcgcgtgctgaaggaagacgtgcaggtttacgtcaaatccatgatgcagaaggccaagg

SEQ ID NO: 19760 - DNA, 481 bp, Zea mays
  misc_feature (452)..(456): n is a, c, g, or t
  Coding DNA Sequence Number=SeqID_5357
attattttccatacgatggcgcgtatggcggcgtcggcggcgtcaggcggccgtattacgccgatcctggttcaaaactgatagcgcacaccgacctggccgctgtagtcgtgtttcagtttgccggcgaagctgctttcgacctggctgtaaacgcgccagttgggcgacagcctggcgttgagcgacacgttgaccagataacggctgtcgtccgccatcggattgctcaacctgtctcccggaacgctgttgttcaggatctcgacactgccgccgcgccgcaggttctgcagccggaacagccccgcggacagggtcagcgcatgctgttcgtccgactccagggtcaacccggcagcggcgccgatcttggcatagatcggcgtgctggcattgatccgcacatcgacgctgttgtcggcgccgtgcagcgtataggcgctggtgcnnnnngtggccacttcgatcgagggttcga

SEQ ID NO: 19761 - DNA, 544 bp, Zea mays
  Coding DNA Sequence Number=SeqID_5358
tggagtcggacgaacagcatgcgctgaccctgtccgcggggctgttccggctgcagaacctgcggcgcggcggcagtgtcgagatcctgaacaacagcgttccgggagacaggttgagcaatccgatggcggacgacagccgttatctggtcaacgtgtcgctcaacgccaggctgtcgcccaactggcgcgtttacagccaggtcgaaagcagcttcgccggcaaactgaaacacgactacagcggccaggtcggtgtgcgctatcagttttgaaccaggatcggcgtaatacggccgcctgacgccgccgacgccgccatacgcgccatcgtatggaaaataatattttttcattggaactcgcatggccaggtccagataatggctccacataaaaaaaccatacggagacatcaacatgaccaagccatgcatggcgaggcgcttgcggctgggcgccgccctcgcgctcgccctgggcttttcccccgcctgggcccaggccccctatcccgccaagcccatcacattgatcgtgccct

SEQ ID NO: 19762 - DNA, 415 bp, Zea mays
  Coding DNA Sequence Number=SeqID_5359
gcggatgtcgctaactcaggtttaccttggtcttggcagcaatatcgagcgtgaggcccatttacgcgctggcctcgatgcgctggcgggtttcctgacggatctgcgctgttcgccggtgtttgaaagccagccggtgggcatcaagagcgggccgttcttcaatctggtggtgtcggcgtataccgacctgccgctgatggagctggaccgtcgattgaaattcatcgaggccgacaatggccgctacgccccggatcgcaagggcttgccgctggacatcgacgtgctgctgtatggcgaattggtgggtaacttcgatggcctgattctgccccgggccgaaatcctgaagaacgcgtttgtgctgtggccgctgtcgttgatggcgccggaacgtgtgcatcctgaggca

SEQ ID NO: 19763 - DNA, 426 bp, Zea mays
  Coding DNA Sequence Number=SeqID_5360
ggcttgcagcgcattgacctgaccaccaaggagttcgccctgctgcatttgctgatgcgtcagagcggcgtggtgctgtcccgcacgcagatcatctcgttcgtatgggacatgaactttgattgcgacaccaatgtggtggaagtgtcgatccgccgtctgcgcgcgaagatcgatgacccgttcgagcgcaagttgatccataccttgcgcggcgtgggttatgtgctggaagaccgtgaatgacggtcaggcgtgcacctcgtcgtgctcgtcatgctgaaaaccttcgccttcgatctggatcgtggcgtgggaaatatcgaattgctcatgcagtaactccgtcacctggctgaggatctgttgctcggcgccttgcgccgaatccgccaccaagtgagtgctcagcacatttttgccgct

SEQ ID NO: 19764 - DNA, 515 bp, Zea mays
  Coding DNA Sequence Number=SeqID_5361
tggaaccccaggactttatcgctgacatcagctcccgcctgatcgtcaacaaagcttccatgaaaatgcagcacgcccgtatccaggcgttgatcgacaccctgcgcaaggcagtggagtctcgacaccgcggttgactcacccgcgcggccctaagccgcgcccgtctatccgcctcatagccagaattctcaggtgcccaagcggaaacgactgctagtttagggcgcctgagtttttgccaattctattgaggccctcgctatgaccacgtccactgcaattgcccgactcaacgctgccgacccggatttcgcccatcatctggatcatctgctgagctgggaaagcgtgtccgacgatacggtcaaccagcgggtgctcgacatcatcaaggccgtgcgcgagcgcggtgacgcggcgctggtggacttcacccggcagttcgatggcctggacgtcccctccatggccgacctgatcctgccccgcgaacgcctggaactggccttgac

SEQ ID NO: 19765 - DNA, 579 bp, Zea mays
  Coding DNA Sequence Number=SeqID_5362
gttcgaccctgcgtgacatggttgccaaggtcctgaacaaccccgagcacttgcaggtcaacaatgtcagcgacctgaactcgaccacccgtcagcagatcatcaccgctgaccacaacgtgcacaaagagcagatcctcaactggttgctggccaacgagacctatcagaaggccatcgtgttcaccaacacccgggccatggccgaccgtatctacggtcgcctggtggctcaggagtacaaggcgttcgtcctgcacggtgaaaaagaccagaaggaccgcaagctggccatcgaccgcctcaagcaaggcggcgtgaagatcctggtggccaccgacgttgccgcccgcggcctggacgtggatggcctggacatggtgatcaacttcgacatgccccgcagcggcgacgaatacgtacaccgtatcggtcgtaccgggcgtgccggcaacgatggcctggcgatctcgctgatctgccatggcgactggaacctgatgtcgagcatcgagcgctacttgaagcagtcgttcgagcgccgcaccatcaaggaagtcaaaggcacctacggcgggc

SEQ ID NO: 19766 - DNA, 265 bp, Zea mays
  Coding DNA Sequence Number=SeqID_5363
gaactcggcatcgacgtgcagcggctgggtggcgcggcgttcgtgttcgaggatgccgatgcgggcgtcgagcgcgagcccggataggatgatgcggcgagtgggcatgatgaaaacctgggtggaatcccggaattgtaaggcggcggcggaccgggccggcgcgctggctacaattcggccatggccggacgcccgcgcggggacggcgaacaagggatgaaatgcaacagatgcacgatgcggtcattgtaggcggcggccc

SEQ ID NO: 19767 - DNA, 188 bp, Zea mays
  Coding DNA Sequence Number=SeqID_5364
cgcctacaatgaccgcatcgtgcatctgttgcatttcatcccttgttcgccgtccccgcgcgggcgtccggccatggccgaattgtagccagcgcgccggcccggtccgccgccgccttacaattccgggattccacccaggttttcatcatgcccactcgccgcatcatcctatccgggctcgcgct

SEQ ID NO: 19768 - DNA, 579 bp, Zea mays
  Coding DNA Sequence Number=SeqID_5365
acaaggcctcgttcaagcaatggttcggtgtggatctgccagagcctgcgatcggtttcccggttgagttcaagtaattcgtaaacactgggggcgtcgctgacggcgccccaatcaggtactgctgaccatgaactatcagttgaactttgccgctgtgtggcgcgacttccccagcttgctggcggggctcggcctcggccttgaactggcactgctgtccatcgccatcggttgcgtgatcggcctgttgatggcgtttgccatgctgtccagacaccgcgcgctgcgcatcgtggcctcggtgtatgtgacggtgatccgcaacaccccgatcctggtgctgatcctgttgatctacttcgccttgcccagcctcgggatccggctggacaagatcccctcgttcatcatcaccctgtcgctgtacgccggtgcctacctcaccgaagtattccgcgcaggcctcttgaacattcccaaggggttgcgtgaagcgggcctggccatcggcttgggcgaatggcgcatccgcgcgtacatcaccgtgccgctgatgctgcgcaatgtgttgccggc

SEQ ID NO: 19769 - DNA, 492 bp, Zea mays
  misc_feature (82)..(83): n is a, c, g, or t
  misc_feature (420)..(422): n is a, c, g, or t
  Coding DNA Sequence Number=SeqID_5366
aatccctatccacgtcttacttgtttgggggaaatgccccctacgttgaggagctttacgaagcctacctcgacaaccccgnntcggtacctgacaactggcgcgaatacttcgaccagctgcagcacgctcccgcgaccgacggccaggaatccacccgcgaccaggcccacgctcccatcgtcgaatcgttcgcccagcgcgccaaggccaatgccttcgtgcaacgcgccgccgaacccgatctgagcgtcgcctccaagcaagtctcggtgcaatcgctgatcgccgcctaccgctcgctgggttcgcgctgggccgacctggatccgctcaagcgccaggaacgtcccccgatccccgaactcgatccggccttctacggcctgaccgaagccgacctggaccagacctactcgnnnaccaacacctacttcacgaccgccagcaccatgacgctgcgcgacatcctgaaggcgctgcgcgacacgt

SEQ ID NO: 19770 - DNA, 556 bp, Zea mays
  Coding DNA Sequence Number=SeqID_5367
ggacgcgtgaccatgcaggatgaattcaacgacccgctttggcgccagatcctgtctggcgcacagatgctcttcgtagcatttggcgcgctggtgttgatgccgctgatcaccggtctcgatccaaacgtcgccctgtttaccgcaggcttgggcaccttgttgttccaagtggtcaccgggcgccaagtcccggtgttcctggcgtcgagctttgcgtttatcaccccgatcattctcgccaaaggccaattcggcctcgcggcgaccatgggcggcgtgatggcggcaggtttcgtttacaccttcctggggctggcggtgaagatcaagggcaccggtttcatcgaccggctgctgccgccggtggtgatcgggccggtgattatctccatcggcctggccatggcgccgattgccgccaacatggcgatgggcaaggcgggtgacggtagcgagttgatccactaccagaccgccatgctgatctcgatgccggcgctgctgaccacattgatcgtggcggtattcggcaaaggcattttccgcctggtgc

SEQ ID NO: 19771 - DNA, 552 bp, Zea mays
  misc_feature (87)..(90): n is a, c, g, or t
  Coding DNA Sequence Number=SeqID_5368
aagaggatttaactatggccaccaagaaacccaagggattgggtcgcggacttgacgctttgctgggcgccgacgcgcccgccatcnnnnacatcggcaaggccccggccaagcccgagggtctgccgtccaccctgcctgtttcgaagatgcgggccggcaagtatcagccgcgcacccgcatggacgagggcgcgttgggcgagctggccgagtcgattcgcacacaaggcatcatgcaacccattcttgtgcgcgcgctgggcgatgcgcccggccattacgaaatcatcgcgggcgaacgccgtttccgcgccgcgcagctggccggcctgaaggaagtgccggtgctggtgcgcgaagtcgccgacgaaaacgcggccgtcatggcgctgatcgagaacatccagcgcgaagacctgaacccgctggaagaggcgcatggcgtgcgccgcctgctggacgaattcggcctgacccacgagcaggccgcccaggccatcggccgctcgcgctcggccaccagcaacctgctgcgcctgttgaacctgg

SEQ ID NO: 19772 - DNA, 510 bp, Zea mays
  misc_feature (365)..(367): n is a, c, g, or t
  misc_feature (385)..(385): n is a, c, g, or t
  misc_feature (387)..(387): n is a, c, g, or t
  misc_feature (402)..(403): n is a, c, g, or t
  misc_feature (468)..(469): n is a, c, g, or t
  misc_feature (471)..(473): n is a, c, g, or t
  Coding DNA Sequence Number=SeqID_5369
gttgtagacgttggtccattcgggatgatggttcagcttctcggcgaacatcgccacccgcgccatgaacccgaaggcggcgttgaaattggcgaagcggaagcgcttttcgatcgcgtcgcgcatcgcgacggcctgccaaccggacagggccgcgaccgcgatgtcggtgccgatacgggcagggggaaacatgctcatggcgaactccaggaaaggccaggaaagagcgccgcgccgttcgcgccggcaacggcccggcgcgccatcgcggccggcggcatgccgccggcgcacggcgggcgcggcgcccgcatgctactactgcttgaccgcgtacaggtagatctcgacccggcggttcnnngcccggccgtcggcggtngngttgtcgccgatcgnntcgttgggcccgcgcccttcgatcgtcagccgcgtcgccgccacgccctgctcgcgacagatagnncnnnacgctgcgcgcccgcttcaccgacaaagtctggctgt

SEQ ID NO: 19773 - DNA, 485 bp, Zea mays
  misc_feature (38)..(40): n is a, c, g, or t
  misc_feature (42)..(43): n is a, c, g, or t
  misc_feature (108)..(109): n is a, c, g, or t
  misc_feature (124)..(124): n is a, c, g, or t
  misc_feature (126)..(126): n is a, c, g, or t
  misc_feature (144)..(146): n is a, c, g, or t
  Coding DNA Sequence Number=SeqID_5370
acagccagactttgtcggtgaagcgggcgcgcagcgtnnngnnctatctgtcgcgagcagggcgtggcggcgacgcggctgacgatcgaagggcgcgggcccaacganncgatcggcgacaacncnaccgccgacggccgggcnnngaaccgccgggtcgagatctacctgtacgcggtcaagcagtagtagcatgcgggcgccgcgcccgccgtgcgccggcggcatgccgccggccgcgatggcgcgccgggccgttgccggcgcgaacggcgcggcgctctttcctggcctttcctggagttcgccatgagcatgtttccccctgcccgtatcggcaccgacatcgcggtcgcggccctgtccggttggcaggccgtcgcgatgcgcgacgcgatcgaaaagcgcttccgcttcgccaatttcaacgccgccttcgggttcatggcgcgggtggcgatgttcgccgagaagctgaaccatca

SEQ ID NO: 19774 - DNA, 407 bp, Zea mays
  Coding DNA Sequence Number=SeqID_5371
caagctagacctggcgccgaaggaaacgccgcagagcatcaccacgttcacggcgcagcagattcaggatcaggggttgttgacgctgagcgaggtgcttgaccagactccaggcatcacgttggtgaccgctggcgttgaaggcgctggcagccaaccggtctactcgcgcacctttcctgtcagatcggtgcagatggacggagtcatggccagcagctatatcctgtccggctcgtcgaatggcgacatcggcatgcaggattcctttctatatgaacgtatcgacgtgattcgtggctccaccagcctgaccggcggcgaaggcgacgcttcggccagtctgaacttcgtgcgcaaacatccctatctggatcgtcacctgtcggcgaacctgaaatacggca

SEQ ID NO: 19775 - DNA, 214 bp, Zea mays
  Coding DNA Sequence Number=SeqID_5372
atgcgctgcacgatctcggaggtgcgggccacgtcgatgtccagcgtcacctcgggatggctgcgccagtagccgggcagcacccggtcgaacatcagctcgacgaagccttcgcccagcaccaggtcgatgtggccgcgctccgccttgcgcaggctgtcgatttccgagaagaagctttcctggatgttctgctggcgcttcacgtagcgcg

SEQ ID NO: 19776 - DNA, 176 bp, Zea mays
  Coding DNA Sequence Number=SeqID_5373
gcgcgctacgtgaagcgccagcagaacatccaggaaagcttcttctcggaaatcgacagcctgcgcaaggcggagcgcggccacatcgacctggtgctgggcgaaggcttcgtcgagctgatgttcgaccgggtgctgcccggctactggcgcagccatcccgaggtgacgctgga

SEQ ID NO: 19777 - DNA, 173 bp, Zea mays
  Coding DNA Sequence Number=SeqID_5374
acaaaattcacgctgacggtgatcaacgccactgccagcgccggcagcaacgggctgatgtcgccgaaggtaatcagcaccgcattgtcgcggaccatgctgccccaatcggcggtgggcggttgaatgcccaggccaaggaacgacagcgcgctgataaacaaaaacacgaa

SEQ ID NO: 19778 - DNA, 161 bp, Zea mays
  Coding DNA Sequence Number=SeqID_5375
gttgattgccgaattcggcctgcgcttttgcttcgtgtttttgtttatcagcgcgctgtcgttccttggcctgggcattcaaccgcccaccgccgattggggcagcatggtccgcgacaatgcggtgctgattaccttcggcgacatcagcccgttgctgc

SEQ ID NO: 19779 - DNA, 265 bp, Zea mays
  Coding DNA Sequence Number=SeqID_5376
gagggcgtggacctggccctgcgcgtgcggaccaagctggataccgatgccgaactggtggtgcgccacctgggcacggcacgcggcacgctggtggccagccccggctacctgcagcgtcacggcgcgcccgacaccccgcaggacctggcctcgcacaccacgctgagtttcagcgatccacagaacgaggtgcgctggccgctgcgcaacgacaagggcgaggaagtgcatatcgagctgaagccgcagctgtcttgcaatg

SEQ ID NO: 19780 - DNA, 540 bp, Zea mays
  Coding DNA Sequence Number=SeqID_5377
cagttgattgaacggccacgggcttacgtgcacttgccgacggcttcgcttcagttgatttatgacttgcgcctggaagtgcccaaggaagcaaagtccctgagcctgtttcatgtggacgagcgcctggagggtgaccaactggtggcccgcctggaccggcaacgcccggacctgtacctgatgccgctcaaggacggacagccgtgtgcagagctgtataccttgaagaaggatcagctgtatccggcgagtacgcgagggttgtatctggcagagagctttgcccaacaggaaggctgggtggtgcgtgatgaaaggatccgctggaaagattggctacgccagcaagggctgagtgcgccagagaaagagtcgaaattgaagcggttgaccggcaaggccaagctgcttttgaagaaaatcgtcccgcacaagcgcgctcggtaacctgcggcaagggagcacgctcccctgccactgtcggtcagttactgcggattttttccacgattgccgtggtcgagctgttttcaacca

SEQ ID NO: 19781 - DNA, 185 bp, Zea mays
  Coding DNA Sequence Number=SeqID_5378
tgctgatctggcattgacgcccgttcgggtttacgcggatcgaaccatttagattaaagtatacaatgttcagaaattacctcagacggccaatttccgggcatcccggccagcccggcaaaggaaggacttccgtggacgagctttcgcagcaggcatttctgaatcacatcggcggcgaatgg

SEQ ID NO: 19782 - DNA, 252 bp, Zea mays
  Coding DNA Sequence Number=SeqID_5379
ccatcggtggcgtccgattgctggaaccgccccaccacgtcggcgctgtcggccgggttcaggttcggcgccgtcgcgcccgaggcgcaggcgacccattcgccgccgatgtgattcagaaatgcctgctgcgaaagctcgtccacggaagtccttcctttgccgggctggccgggatgcccggaaattggccgtctgaggtaatttctgaacattgtatactttaatctaaatggttcgatccgcgtaaac

SEQ ID NO: 19783 - DNA, 405 bp, Zea mays
  Coding DNA Sequence Number=SeqID_5380
ttcgacgaatcgctcaagggcctgtcggccaccgacatcgacacgctgaaccgcgtgctgaacgtgctggaagagaatttcctgcgcgccgccagcggcaacaagggcgagtaaccacgcccagggccgcccagggcagcccgccaacggtcgcgaccaaagccatccccccgtgccgctacgcgcgggcaaagccccgccattcgtccgtgccattgacacccggaaaggttattgaataacattcaattaatctattgattgttatttcatcttgccggaatccccgcatgccttctgacctcctgcttcgcgccgtgctgatcggcgtcggcgccaccctcgtcatggatctgtgggcgctgctgctcaagcgcctgttcaacgcgccgtcgctggactacg

SEQ ID NO: 19784 - DNA, 419 bp, Zea mays
  Coding DNA Sequence Number=SeqID_5381
agcggccgaccatggcgtagtccagcgacggcgcgttgaacaggcgcttgagcagcagcgcccacagatccatgacgagggtggcgccgacgccgatcagcacggcgcgaagcaggaggtcagaaggcatgcggggattccggcaagatgaaataacaatcaatagattaattgaatgttattcaataacctttccgggtgtcaatggcacggacgaatggcggggctttgcccgcgcgtagcggcacggggggatggctttggtcgcgaccgttggcgggctgccctgggcggccctgggcgtggttactcgcccttgttgccgctggcggcgcgcaggaaattctcttccagcacgttcagcacgcggttcagcgtgtcgatgtcggtggccgacaggcccttgagcgattcgtcga

SEQ ID NO: 19785 - DNA, 483 bp, Zea mays
  Coding DNA Sequence Number=SeqID_5382
aagaccaccctgatcgaggccatgctgccgctgctgggcgcgcgcggcctgaaggtcagcgtcatcaagcacagccaccacgacttcgagatggagccgcccggcaaggacagcgcgcgctttcgccaggccggggcgcaggaggtgatggtggcgtcgccgttccgctacgccatcgtgcacgagctgcgcggcgcgcccgagccgccgctggccgagcaggtggcccgcctggcgccggccgacctggtgctggtcgagggcttcaagcaggccgccatcccccgcatcgaggtctaccgcccggcgctgggcaagccgccgctgcacgccgaggacggcagcttcctggccgtcgtgaccgacgcggcgctcgataccggcttgccctgcctgccgctgaacgatccggcggcggtggcggacttcatcgcgcgcacggtggggcggggctgaactacacttgaggctgtggaccgcgcg

SEQ ID NO: 19786 - DNA, 568 bp, Zea mays
  Coding DNA Sequence Number=SeqID_5383
gtgatccgcaagctgaccgagatgaagatcggccaggccgtgcgttcgtacggtccggaaacccacctggtcaagaccggcacccccaccatgggcggcgtgctgatcctgatttccatcgccatcagcacgttgttgtgggctgactggaccaaccgtttcgtgtgggtggtgctgctggtgacgttcggctttggctggatcggctggatggacgattaccgcaaggtggtctatcgcgatccggaaggcatgccggcgcgccagaagttcttctggcaggcgaccatcggcctggtggccgcggtctatctggcgttcgccgtgtcggcgcccgccaacaccgaactgtggccgctcttcaaagcctgggtgggaagcggcttcacgatgtcgctgccgacgcgcgccgacctgatcgtgccgttcttcaagaccgtcagctatccgctgggcgtgctcggcttcgtggcgctgacctgggccgtgatcgtcggcaccagcaacgccgtcaacctgaccgacggcctcgatggcctggcgatcatgcccaccgtgatggtcggca

SEQ ID NO: 19787 - DNA, 571 bp, Zea mays
  Coding DNA Sequence Number=SeqID_5384
agcgatgacccgttgattcagcgagccattacttactaccagggcgccagttatggctacaaacaacagttgttgagctggagggtacccaaggacgaggttcccaaagtgagtacgcgctaaccaaaatgccccggccaggtctgaccggggctttttttagagtctgagttcaccatgcacgcaatcgctgttcgtccgggatcccaacccctcaatttttggctgtgcctcggtgtgccagccatgctggcggtggtcatgctgttgctggagctgacgtcgctggacatggacgttgccaagctgttttacaacgcctccgaaggcggctttgtgggccggcacagtttttttctagaggacattcttcacgatcgcgccaagcagatggtgatcgtgttttcggtgctggcgatcgccgggtttgccggggcctttattgttgagcggcttaagccctaccgccgggaattgggctgcctggtgctctcgctggccctggctacctcgtttgtttcgccgttgaagaccgtgaccggggtgcaatgcccgtggagcgtcaaggagt

SEQ ID NO: 19788 - DNA, 458 bp, Zea mays
  misc_feature (426)..(429): n is a, c, g, or t
  Coding DNA Sequence Number=SeqID_5385
ttgccggcttttcgcctgtaggccaagccgcctttttcgaggacagcaccgccaccctcgaaacccgcaacatgtacttcaatcgcgactttcgcgatggcaccagcgcacaacaatccaagcgcgacgagtgggcccagggcttcatgctcaacctgcaatcgggctacaccgacggcaccgtcggcttcggcgtggatgccctgggcatgctcggggtcaagctcgactccagccccgaccgcaccggcaccggcctgctgcccacccacgatgacggccgcgccgccaacgaatattccaaactcggcctgaccggcaaagtgaagatctccgccaccgagctgaagatcggcgcactgatccccgagttgccgatcctcaagcccaacgacgggcgcatcctgccgcagacgtttgaaggcnnnntgttgagttccaaggagttcaagaacctg

SEQ ID NO: 19789 - DNA, 545 bp, Zea mays
  Coding DNA Sequence Number=SeqID_5386
cgcagctggccgtcgatcatggcgacgccaccctgcgtgtcacgccatggcagggcctgctgctgcccaatatccgtgacgcgacggctgtcattgaacgcctcgaacggcttggctttttgtgctcggtggaccaacccctggcgcgcctgatcgcctgcaccggctccagcggatgcgccaaaggcctggccgacaccaaggccgacgccctgcaattggcaacgctcgctcccggccacagcgtgcacctgtccggttgcccacgttcctgcgccgccgcacacaccgcgcccgtcaccttgctggcggtaagccccggccactacgacctctatttccgcgacgcaggccagcccggtttcggccgcctgaacgcgcgcactctttctattgaagcggcgggcgccttgctgcgcgcccacccacggagcaacaccgatgattgattacatccgcgacggtcaggagatctatcgcaactccttcgcgatcattcgcgcagaagccaagctggatcgcattcctgccgacctggaaaaact

SEQ ID NO: 19790 - DNA, 428 bp, Zea mays
  Coding DNA Sequence Number=SeqID_5387
tttctgccgccgcacgcaaattgggccgggtaccctcggccattaacatggcggtgtcgcagcttgaagcagagctggatttattgctgtttgatcggtcaacccgcaaagcgattcctacggccgccgccaaagcactggagccccaggcacgccaggttgccagccagttaaacctgctggacgcccatgcgctccagcttcatcaggggttggaggagcgcttggtccttgcgatggcgccggagttgcaaacaggcgtatggaatcgtccgctgtccattatcgccagcgagttccccacgcttgaaatcgagattcgctccgcgtcgcatccggaggcgatgcgcatgctccatgacgggcgtgtgcaattggcactgggatttgaacgaccagggcttgacgagcgggagacgtttcttgaa

SEQ ID NO: 19791 - DNA, 585 bp, Zea mays
  misc_feature (436)..(444): n is a, c, g, or t
  Coding DNA Sequence Number=SeqID_5388
aactggctgccgagtacttggtgatggccgcgatgctcgcggagatcaagtcacgcatgctgctgccgcgttcggaaagcatcgaggcggaagaggatgacccgcgcgccgaactgatccgtcgcctgcaggagtacgaacgtttcaaggccgctgccgaaggcatcgacggcctgagccgggtgggtcgcgatgtggtggtgcccaagctcgacgcgccggaagcccgggctcgcaagctgctgccggacgtaagcctggaagaattgctgatgtccatggccgaagtactgcgccgtggcgatatgtttgaaagccaccaggtcagccgcgaggcgctgtccacccgcgagcgcatgagtgatgtactcgaccgcctcaagggcggcgggtttgtgccgtttgtcgagctgtttaccaaggaggaagggcgccnnnnnnnnngtggtgacctttatggcgatcctcgagctggtcaaggaatctttggtcgaactggtccagaatgagccttttgcggctatccacgtgcgggcgcgagccgaataaagagctgaatcgatgaatctgactgaaccccgcgaa

SEQ ID NO: 19792 - DNA, 197 bp, Zea mays
  Coding DNA Sequence Number=SeqID_5389
ctccaacaatcacgagcgcgcgtttccatgaagatcaatttgccggtcaccggtcgaaatgtggactttgcccccgacgccaatatcctctcgaccaccgacctgactagcacaattacctacgccaaccaggacttcatcgatatcagcggctacacccgcgaggagttgttgggtacgccgcacaacctgctacg

SEQ ID NO: 19793 - DNA, 231 bp, Zea mays
  Coding DNA Sequence Number=SeqID_5390
aacacctgccacatgtgcgcaaaggcagcgggtggcatgtccgggtggcgtagcaggttgtgcggcgtacccaacaactcctcgcgggtgtagccgctgatatcgatgaagtcctggttggcgtaggtaattgtgctagtcaggtcggtggtcgagaggatattggcgtcgggggcaaagtccacatttcgaccggtgaccggcaaattgatcttcatggaaacgcgcgct

SEQ ID NO: 19794 - DNA, 269 bp, Zea mays
  Coding DNA Sequence Number=SeqID_5391
tagccttcgatggtctgggcgctgctggcgaacaccaggcgcttcacgcccgcagccacggcggcttcgaacaggtaggtggtggccaggatgttgttgggcagcaactcgtcgaaggtggcgctagcgtgagggatgccggacaggtgcacgatcacgtcaatgccgtcgagcagggcggcgagggcggttttgtcgcccaggtctgcgcggatgaaacggtgttcgccgagggcgaaatccggctcgatgcgatcggtgagggtgaa

SEQ ID NO: 19795 - DNA, 290 bp, Zea mays
  Coding DNA Sequence Number=SeqID_5392
attggcaagacgtttttcgaagcgtcgaaagaccgctaccgcttcaccctcaccgatcgcatcgagccggatttcgccctcggcgaacaccgtttcatccgcgcagacctgggcgacaaaaccgccctcgccgccctgctcgacggcattgacgtgatcgtgcacctgtccggcatccctcacgctagcgccaccttcgacgagttgctgcccaacaacatcctggccaccacctacctgttcgaagccgccgtggctgcgggcgtgaagcgcctggtgttcgccagcag

SEQ ID NO: 19796 - DNA, 419 bp, Zea mays
  Coding DNA Sequence Number=SeqID_5393
gccaccttcggtttcatcctgttcttcaacgagctgacccgcatcatctggggcccggcgcccatcagcatgggcctgccatcgtggctgtcgggcaccatcgatctgctcggcgtcacctacccgctgtaccgctttctcatcatcgtggccgggctggcggtggcggcgggctgctacgcgctgatccaccgcacgcggctgggcatgctgatccgcgccggctccaccgaccgcatgatggtgggcgcgctgggcgtgaacatcgcgcgcctgaacacgttgctgttcgtgctgggcgcggtgctggccggcgtggccggcctgatggccgggccgatcctgtcggcgcagaccggcatgggcgaaccgatcctgatcctgacgctggtggtgatcgtcatcggtggcatcggctc

SEQ ID NO: 19797 - DNA, 545 bp, Zea mays
  Coding DNA Sequence Number=SeqID_5394
tgaccaccagcgaaacgttggcccgcgacacgctggtcgagatcgagcggcaattgaacctgctgcccaccgcgggtatcgcggcgcaggcctgggccgattgcggcgaggtcatcgtctgcgacagcgaggcggaaatgctggccgtggccgacgaactggcgttcgagcatgtgcaggtcatgacgcgcgatccggactacttcctgaagaacctgagcaatttcggcgcgttgttcctgggcccgcgcaccaacgtcagcttcggcgacaaggtcattggcaccaatcacacgctgcccaccaaccgcgcggcgcgctatacgggcgggctgtgggtcggcaagttcctcaagacctgcacctaccagcgcgtgctgaccgacgccgccagcgcgaccatgggcgaatactgctcgcgcctgtgccacatggagaacttcgccggtcatggcgagcaggccaacatccgcgtgcgccgctacggcaaccggccggatctgccctggtaccagcccgtggaggcccaggcatgatcgccttgc

SEQ ID NO: 19798 - DNA, 268 bp, Zea mays
  Coding DNA Sequence Number=SeqID_5395
tgcgcggcagcggtggtatggccaaggcggtggccagtgcgttgcgcgatggcggttatgccaagggcgtgattgtggcgcgtaatgaagtggcgggccgggcactggcccagagcctggggtatgagtggcaggcgcagttgggtgccttgcgcccgcagatgcttgtcaacgtgacgccgattggcatgaccggaggggcggaagcagatcagttggcgtttgaggctgatgccattgatgcggccgagaccgtattcgatgtggt

SEQ ID NO: 19799 - DNA, 540 bp, Zea mays
  Coding DNA Sequence Number=SeqID_5396
tgatccagagcgaaagcggcttcctgtcggtcaccggcaccgccgacgacccggtcaaggccggctgctccatcgccgacatctcggccggcatgtacgcctattccgccatcctcaacgcgctgctgctgcgccagaagaccggcctgggcagccgcctggacgtctccatgctcgagagcatggtcgagtggatgggcttcccgatgtactacgcgttcgagggcgccacgccgccggtgcgcgccggcgcggcccatgcctcgatctatccgtacggcccgttccccaccggcgacggcaacaccatcatgctgggcctgcagaacgaacgcgaatggcgcgtgttctgcgcccaggtgctgcgccaggccgagctggccgaggacccgcgcttcgccaccaactcgctgcgcaccgccaaccgcgaggccctgcgcgcgctgatcgtcacggccttcgccgacctcagcgtgcagcaggtcaccgaccggctggaagacgcgcagatcgccaacgcccgggtcaacgacatggccg

SEQ ID NO: 19800 - DNA, 238 bp, Zea mays
  Coding DNA Sequence Number=SeqID_5397
cgcggttgcgcgacggctttctcgacctcaaggggtttgatgaatgggcggacctgtacaaagcccgtgtggagcgtgacgccagcggcacagaagaacagcgacgtgagcggatgcatggggtgaatccgctttatatcctgcgcaattacctggcgcagaacgccatccaggcggcagagctgggggattacagcgaagtgcgccggctgcatgaagtgctgaccaaaccgtttga

SEQ ID NO: 19801 - DNA, 335 bp, Zea mays
  Coding DNA Sequence Number=SeqID_5398
gctgtcctccggtatggcgcaagcactgcagcttggggagatgaccctcaagtcgaagctgaaccagccgctgtcggtggagatcgaattgctcgacgtcggtggcctgaccgcctccgagatcacccccagcctcgcttcgtcccaggcctttgtggatgcgggcgttgatcgccaggcgttcctgaatgaccttacgtttaccccggtggtcaacccgaacggccgcagtgtggtgcgtgtcacctccagccagccgttgcctgattcctatgtgcgtttcctgctgcaggtgcaatggcccaacggccgcctgatgcgcgactacagcgtat

SEQ ID NO: 19802 - DNA, 278 bp, Zea mays
  Coding DNA Sequence Number=SeqID_5399
aaggaaccgggcacgatcaccacgcttttaccggtgcccggctggggcttggctgcatcggcggccgaggccactaacggtgcagcgagtgccatggcgatcgccagggaagaaagaatacgcatgcgactctccacaggccttggggcctgatcattgttgtgaaagggttaacggcgttggccggacaacacgcggtccagtgaccaggccccgccgccatacgccagcagcggcagcaacagcccggcccaggtcaggtgggtcggccaggcatc

SEQ ID NO: 19803 - DNA, 266 bp, Zea mays
  Coding DNA Sequence Number=SeqID_5400
cgctgttgggcatgaccctggtgatcgaggtgttcgtgtaccccgatgcctggccgacccacctgacctgggccgggctgttgctgccgctgctggcgtatggcggcggggcctggtcactggaccgcgtgttgtccggccaacgccgttaaccctttcacaacaatgatcaggccccaaggcctgtggagagtcgcatgcgtattctttcttccctggcgatcgccatggcactcgctgcaccgttagtggcctcggccgccgat

SEQ ID NO: 19804 - DNA, 246 bp, Zea mays
  Coding DNA Sequence Number=SeqID_5401
tgtttaccctcaaagagcgcctgctgagcagcgagctgctgtgtcatgactgcctgatggccattcactcccgaccaccaatccgggtagatatcgcctgcaagcacttcgacaatgtcgctggcccaagaagtaaaatccgagaccatactggcgccggcctgaacgaacgcggaatagcccacgaacccccagggatcacagcaatatgctgcagacgctcggtagaccggcagtgctgctatc

SEQ ID NO: 19805 - DNA, 242 bp, Zea mays
  Coding DNA Sequence Number=SeqID_5402
ttgctgcaacagctttagctctggggatagcagcactgccggtctaccgagcgtctgcagcatattgctgtgatccctgggggttcgtgggctattccgcgttcgttcaggccggcgccagtatggtctcggattttacttcttgggccagcgacattgtcgaagtgcttgcaggcgatatctacccggattggtggtcgggagtgaatggccatcaggcagtcatgacacagcagctcgct

SEQ ID NO: 19806 - DNA, 436 bp, Zea mays
  Coding DNA Sequence Number=SeqID_5403
ccagggcgcgcaggttgccatgatcgatcttcataggattagttttacttaagatagtgaaggaaaattagctgtatttcatattggcggcaagcgaaaatgttgcattgccggtatgcgcgacgctgccggcccggtatcccaagcgccaccacaaggcgttgcagtcaaaaggttcgcgtcatgttcgccacgttgtcatcccccctcttcctcaccgcctgggccagcggcacggccaccgggctgggcctgttcgccgtcgtcggcgcgcaaagcgcgttcatcctgcgccagggattgatgcgcgcgcacctgctgtccgtggtcgccatctgcgcgctgatcgacgccatcttcatcttcgccagcgtctcgggcctgcaggccctgaccgcctggttcccgtggctgaccaccgcggtgctgtggttcg

SEQ ID NO: 19807 - DNA, 251 bp, Zea mays
  Coding DNA Sequence Number=SeqID_5404
gattggccgctgctgttgcacgaaaccgccgccaatgtgctggccggcctggtgggcgtgcatgtgctggcggcggtgtttgaaagtatccaggtgcgggacaacctgcctttatccatgctcaccggccgcaggaggcgcctgccggatgaccgtgcgcagtaatccttttccccgacaggttctctatgcgcccgcttttaataatctgcagtctgctggtggtatttttcgccgcctggcaaagccat

SEQ ID NO: 19808 - DNA, 265 bp, Zea mays
  Coding DNA Sequence Number=SeqID_5405
gggccttgggcaaacggtgccaacacgtggggcggatggctttgccaggcggcgaaaaataccaccagcagactgcagattattaaaagcgggcgcatagagaacctgtcggggaaaaggattactgcgcacggtcatccggcaggcgcctcctgcggccggtgagcatggataaaggcaggttgtcccgcacctggatactttcaaacaccgccgccagcacatgcacgcccaccaggccggccagcacattggcggcggtttc

SEQ ID NO: 19809 - DNA, 429 bp, Zea mays
  Coding DNA Sequence Number=SeqID_5406
gaaaacccgattaaccaggcgctgctggaaaagggcaaaggcgaacgagccctggataaagtgctggacgcggcgaaaaatgatccctcggtgttctacgtcgaagcatccatcagccccaatggcgtagagataggcaaggtccgcatgggggtttcgaccgccgcagtagagactgacctggccgcgctggataagcgttttgctgcactgattgccagcggtgaccagttagtgggcgacagtctcaagggggccgctgcggacagcgctgcagccatgggcgcgcgtttgcagtcggcacaagccaccgccagccagatgaccgccaataccaccaatgccgtgcaagaggcggcaggcaccttgcgttggcgcatcggcatgggcctggcggttgttggctttggcgtgttgttgctgattgct

SEQ ID NO: 19810 - DNA, 132 bp, Zea mays
  Coding DNA Sequence Number=SeqID_5407
ccaaagctggcagatgctggtggacggcgaatacgatatttcggtgatgtactggaccaacgacatcctcgacccggaccagaagaccaccttcgtgctgggccacgacactaaccagaactacatgactcg

SEQ ID NO: 19811 - DNA, 137 bp, Zea mays
  Coding DNA Sequence Number=SeqID_5408
aggtccttgaccttgtcgttcttgtagcgagtcatgtagttctggttagtgtcgtggcccagcacgaaggtggtcttctggtccgggtcgaggatgtcgttggtccagtacatcaccgaaatatcgtattcgccgtc

SEQ ID NO: 19812 - DNA, 533 bp, Zea mays
  Coding DNA Sequence Number=SeqID_5409
aaggtgaggacgaaacccgcctgcacttgttgcacgccctcagtggcttgcgcctggcgttgttgcccggcgtggaatttctcggcggcacagaaatggaagcgccgttacccgatggagcgcctttatgatcggtgatctggatatcagcggggtattcctgcccacgctgctggtgctgatgggcattacgtatgtgctgtacctggtggtgcacgggctgttgacccgcgtccacttctatcgcctggtctggcaccgggcattgttcaatgtgggtctctacgctctgttgctgggcgcagtggattcactcagtcgatacctcatgacatgaaaaaaccttttttgaccatcggccgtgtagtcctgacgttattggtggtgaccttcgcctgcgtcgtcgtatggcgcatggtgatgtactacatgttcgccccctggacccgtgacggccacatccgtgccgacatcgtgcagatcgccccggacgtgtccgggctgatccagcaagtggacgtgcgtgacaacca

SEQ ID NO: 19813 - DNA, 213 bp, Zea mays
  Coding DNA Sequence Number=SeqID_5410
gcctgtttggcagagaacggaacaagcggctggcccatcgcattgagctggggcgcggcatttgccgaggcgggaagatgaagaggtttgagatccgcggctttgccatcgacggttgccttcgattcacgcggaaccgtttggccaggcttgggaagcttgacgcgccgcttcttcaaattcccgggggtgcgagctttgtctttcttgcgg

SEQ ID NO: 19814 - DNA, 224 bp, Zea mays
  Coding DNA Sequence Number=SeqID_5411
acagttacccgaaagcgttggagagacggtccgcaagaaagacaaagctcgcacccccgggaatttgaagaagcggcgcgtcaagcttcccaagcctggccaaacggttccgcgtgaatcgaaggcaaccgtcgatggcaaagccgcggatctcaaacctcttcatcttcccgcctcggcaaatgccgcgccccagctcaatgcgatgggccagccgcttgttc

SEQ ID NO: 19815 - DNA, 123 bp, Zea mays
  Coding DNA Sequence Number=SeqID_5412
tcgggcaggcccgtggccagtgtgaccagggcatcaccttggcggatctccacgaggtcgctgacgccaccttgttccaggtgttgccgcgccagggcgatctttgagggctcgaactcgctg

SEQ ID NO: 19816 - DNA, 126 bp, Zea mays
  Coding DNA Sequence Number=SeqID_5413
gcggcggcgcgctgatcagcagcgagttcgagccctcaaagatcgccctggcgcggcaacacctggaacaaggtggcgtcagcgacctcgtggagatccgccaaggtgatgccctggtcacactgg

SEQ ID NO: 19817 - DNA, 533 bp, Zea mays
  Coding DNA Sequence Number=SeqID_5414
agaccctgtcgggtctctggcagcgcctgcgccgcctgacctatccgcgcgccgcgcgcgtggtggccctgacccgcggcaccgcgcaatggatcgagcagcatgtgccgggttcgcgcctggcggtgatccccaatccggtgcattggccgctgcccaagggcgagccggtgctggcgccgcccgcgggcgacggccgcaagcgcctgctggcggtgggacggctgcatggggacaagggtttcgacctgctgttgcaggcctacgcgcggctggcgccgtcgcatccggactgggatctggttatcctgggcgagggcgatgagcgccgcgcgctggaagcgcaggtgcgcgaggccggcctgcgggatcgcgtcagcctgccgggacgggcgggcaacgtgggcgactggtatcagagcgccgacctgtatgtgctgacgtcgcgcttcgaggggctgtccaacactctgctggaatcgatggccagcggcctggccgcggtggcgttcgattgcgataccgggccgcgc

SEQ ID NO: 19818 - DNA, 588 bp, Zea mays
  Coding DNA Sequence Number=SeqID_5415
ttggcgtaccgggtcgatgacacatggacggtggcgctgaacggtaacaatctcttcgacaaaaattactatcagacggtgggaacggccgactggggtaatttctacggcgaaccgcgcaacttcaccgtcagtttgaaaggcaatttttaaggttagtaccgcctcaatgtggtgacggactcacgtcctcaccactcgtcgcttgtccccgaaaaaccccgcgtcctacctccgtcaaaaaaaggttttcctccccggcaggaaatttcccaaatttgttcctacactccaaaacgccagcattttgttctcgaagaacccgagaacccgacctagacagtcaacaatttgtcacatagatgattagataatgtgtctagatcgatacccttataaaaaagtcaaaaccttgacgaacaaggaaaagagaaccatcatttagccattaccccgcaaattccctgcaaatagataggtaattgcgtattacccagcgaagcaagccgttcgtctggcgccacttataaagcaagccctgcctttatggatgagcagccgaacaaggaagccctggtgtgcaatgag

SEQ ID NO: 19819 - DNA, 600 bp, Zea mays
  Coding DNA Sequence Number=SeqID_5416
agattgagcacatgtcccaggccgcgcaactggccatggccgaaggcttcgatgaagaagtggtgctggcggcgttcttccacgatatcgggcacatctgcggccaaggtggcgagaacatgggcggttatggtgtggtcagtcatgaacggctgggggccgattatctgcgccaggcgggcttcagcgagcgcatggcaaaactggtggaataccacgtgcaagccaagcgttacctgaccttcagccagccggattactacgcgcgcttgagcgaagccagccgtcgtaccttgggttaccagggcggcgtgatgactgccgaggaggcacgggcgtttgagcaggatccgctgtgcgccgtcagcctgcgcatgcgtcactgggatgaacaggccaaggaaatgcacgtgccggtgatggaccttgaagtgttgaaatccaaggcccggcagttgttggcggcttaggtttcgtccaggcgctgggccagggcttcgatctgttcctggcgttcggcctggctcaacttgggatgcgggttgagggacgaccattgcggatgagcccgggccttgttcagggcttcgggcaatttgc

SEQ ID NO: 19820 - DNA, 236 bp, Zea mays
  Coding DNA Sequence Number=SeqID_5417
tccagcggcaacaagacctaccagaagaacacgccgtccttgagcgtgatgtacgccttcacgcccgaactgcacggctacatcagtgccggcaagggtttcgagacgccgactcaggcggaactggcctatgcgccaggcaatatcgaagggtttaacttcggcctgaagccgtccgaaagcacgcaatatgaagtgggcttgaaggcacagctgagcgacacccggatcaacgc

SEQ ID NO: 19821 - DNA, 349 bp, Zea mays
  Coding DNA Sequence Number=SeqID_5418
gtgatccaggctgacggtggcactcgcacggcgtccatcaccggcgctatggttgccctggtcgatgcgctcaaagtcatcaagaagcgtggcggcctgaaaggcggcgatccgctcaagcagatgatcgcggctgtatcggtaggcatgtatcagggcgagccagtgctggatctggactatcttgaagattcggctgccgagaccgacctgaacgtggtgatgaccagcaccggtggtttcatcgaagtgcagggcaccgccgaaggcgcgccattccagccggcggacctgaatgccatgctggcattggcccagaaaggcatgaccgagatcttcgaactgcaga

SEQ ID NO: 19822 - DNA, 406 bp, Zea mays
  Coding DNA Sequence Number=SeqID_5419
tggatcgctccaataactcgccgctgaaccagcaatgggacgaactcgagcgcctggccaatctcgcccataccgacatattgccggacgccagcctcaccctggccgcgctgatgacggtatatcggctgccccggcccgccagcgcagaggaagccctggctctgatcgaacagctacgcgccaccacggctgccacgtttccttatgtcagctcggcggcgcactcattgatggccgtcagcaaacacacgcggcatatcgcggtgctcaacgaccgctacaccatgcgggcagcactcaagtcgatcaccctcgatacacagctcaacagcaccctggacatgaccttcaacctggccctgggctcaccctttttcgggttgatcgacaaaggcgcgcaatt

SEQ ID NO: 19823 - DNA, 528 bp, Zea mays
  misc_feature (27)..(27): n is a, c, g, or t
  misc_feature (29)..(29): n is a, c, g, or t
  misc_feature (42)..(45): n is a, c, g, or t
  misc_feature (47)..(47): n is a, c, g, or t
  Coding DNA Sequence Number=SeqID_5420
tcgttccagcgcgtagccactgaggtngncgtccgcgttcannnncntatacccgggcaaggtcgaactggcggctggcgctcacgcgttgaaaggccgcttcctggcgcaggccggcgagcaattgcgcgcctttgtcgatcaacccgaaaaagggtgagcccagggccaggttgaaggtcatgtccagggtgctgttgagctgtgtatcgagggtgatcgacttgagtgctgcccgcatggtgtagcggtcgttgagcaccgcgatatgccgcgtgtgtttgctgacggccatcaatgagtgcgccgccgagctgacataaggaaacgtggcagccgtggtggcgcgtagctgttcgatcagagccagggcttcctctgcgctggcgggccggggcagccgatataccgtcatcagcgcggccagggtgaggctggcgtccggcaatatgtcggtatgggcgagattggccaggcgctcgagttcgtcccattgctggttcagcggcgagttattggagcgatcca

SEQ ID NO: 19824 - DNA, 367 bp, Zea mays
  misc_feature (40)..(41): n is a, c, g, or t
  misc_feature (49)..(51): n is a, c, g, or t
  misc_feature (86)..(88): n is a, c, g, or t
  misc_feature (92)..(93): n is a, c, g, or t
  misc_feature (103)..(116): n is a, c, g, or t
  misc_feature (121)..(123): n is a, c, g, or t
  misc_feature (129)..(142): n is a, c, g, or t
  misc_feature (147)..(149): n is a, c, g, or t
  misc_feature (161)..(163): n is a, c, g, or t
  misc_feature (177)..(177): n is a, c, g, or t
  misc_feature (196)..(196): n is a, c, g, or t
  Coding DNA Sequence Number=SeqID_5421
gctgttcatcggcaagaaggtctcggaaaaggaaaaccgnntgatgctnnngggcaagcgccgctacgcgccgctgctggacctgnnnctgnnccgcacgccnnnnnnnnnnnnnnccgcnnncctgtnnnnnnnnnnnnnntcggnnngatcgacaaagnnngcgcaattgctcgncggcctgcgccaggaaggngcctttcaacgcgtgagcgccagccgccagttcgaccttgcccgggtatacgtactgaacgcggacggcgacctcagtggctacgcgctggacgatacccccaaggtactcacccgtaccgacacgccgctctcaagcctgacctcgatggccgagcccttactggagctg

SEQ ID NO: 19825 - DNA, 544 bp, Zea mays
  Coding DNA Sequence Number=SeqID_5422
aagccgttggtgttcctgccccattccttgtcggaaatcaccggcccgactatcggcgccgagcgcatcaacgagaaggacagcgacctgaccgcccagcatgaaggcgagccccagggcgaacgcatcatcattcacgggcgtgtgctggacgaaaacggcttgcccgtgcccggcatcctcgtggaaatctggcaggccaatgctgccggccgctacaaccacaagcgcgaccagcacgacgcgccgctggacccgaacttcaccggcaccgggcgcaccgtcaccgacgccgagggctggtaccagttccagaccatcaagcccggcgcctacccgtggggcaaccaccacaacgcgtggcgcccggcgcacatccacttctcgctgttcggcccgagtgtgctgacgcggttggtgacgcagatgtatttccccggcgacccgctgctggcctacgacccgatctacaactgcgtcccggacacgtccgccaaggaacgcctgatcgccagtttcgacctggaaaaaaccattccgcact

SEQ ID NO: 19826 - DNA, 462 bp, Zea mays
  Coding DNA Sequence Number=SeqID_5423
gataagaccgcaaccaatggctgcccggtttcgatggttactggtgaggagctactgaccctcactgacggctcgttggaaggtgtgctgccgtttgcctggacgcggttgtatcgcagcagtgccgtggagttggattgcgggttggggtttggctggagtcattcgctggcgcagcggttggtggtgagcggtgaatcggtggtgtggaccgatcacgaaaaccgcagcaccacgttccccctgccctctgctgcgcggccagccatcaccaatagcctggcggaggcggcgatttatctgggctcgttgcccgatgaactggtgctggctcaggcgtcgcttttctaccatttccgcaacggggtgctgacgtcgatcagcgacgcgtacgacaaccggctgcgcatttcccgagactattccggacgaattcagcggatcgataaccatgtcggccaa

SEQ ID NO: 19827 - DNA, 503 bp, Zea mays
  Coding DNA Sequence Number=SeqID_5424
ccagggcctggtattggcgagcaatatcctggtctcggaaagcgtcgccagcgggttgctggtgccttaccggccacagatccgcgtcaacggcgccggctacagcgccctgtgcgtgccggggcgtgaacggcatccgccggtccgggcgttttttgagtggttgcaggaggaagcgcggctgtcgggacacacgctggaaaatccgataaaacttttcgggttgcctgggactcacaaccagtgagcgatcacgccggcagagcgtggcgcaaaaccggattagtaccaggagaatgagatgactgactcacatttgtctgacgtagccactttacgtgaccgcgcccgcaagaacgtcgaaaacggtgccgtgactgaaggctatgacgccgaccgccaggaaatcctgcgtctgctcaacgaatcactggccaccgaactggtgtgtgtgctgcgctacaagcgccactacttcatggccaatggcgtcaaggcgcatg

SEQ ID NO: 19828 - DNA, 347 bp, Zea mays
  Coding DNA Sequence Number=SeqID_5425
ggaacaggcgctaaaggctcaggattggccgcagttgaccatcgtccgaccttcactgttgctgggtgagcggttggagccacgcctggccgagcaactggccgggccattgtcgcggctgattccgggtaaataccacggcattgaagtgtgtgaactggcgcgcgcgatgtggcggctggcgctggaagagcaggatggggtgcgggttgtggagtcggatgagttgcgtaagctcggcaagtaattttgcagtgaggcgacgggcctcttcgcgggcaagcccagctcccacattgaccgcgctgtcatggcgaacacagtctcatgtgggagctggcttgcct

SEQ ID NO: 19829 - DNA, 96 bp, Zea mays
  Coding DNA Sequence Number=SeqID_5426
tgcccgagccggatacgccggtcacgcacaccaggcggcccagcggcagctcgaccgagacgttcttgaggttgtgcgcgttgacgccctcgagca

SEQ ID NO: 19830 - DNA, 58 bp, Zea mays
  Coding DNA Sequence Number=SeqID_5427
tgctcgagggcgtcaacgcgcacaacctcaagaacgtctcggtcgagctgccgctggg

SEQ ID NO: 19831 - DNA, 581 bp, Zea mays
  Coding DNA Sequence Number=SeqID_5428
aaagggtttatctgactgccacgccactgcctgaacaaggcgggaaggcgcagccagcgccggcctcaccgccggcaagccccaagccaggagacctgcctcgcaaccgattttctacttcaaccgggcggggtgatccggtggcgaattctgcttctgcgcacccgcgcagggccactcgtcccgtatgcccgccccaaagggcatccgatgaaaacactggccaaactccccgtcaccatcgttaccggcttcctcggctcgggcaagaccaccttgctgcgccacatgctggataacgcccaggggcgccgcatcgcggtgatcgtcaacgagttcggcgagctgggcattgacggtgaaatcctcaagcaatgttccatcggctgcaccgaagaagaagccaacggccgcgtctacgaattggccaatggctgcctgtgctgcacggtccaggaagagttcttcccggtgatgcgcgaactggtggcccgtcgcggcgacctcgaccatatcctcatcgaaacctcgggcctggccctgccaaaacccttggtccaggcgttccagtggccggaaat

SEQ ID NO: 19832 - DNA, 219 bp, Zea mays
  Coding DNA Sequence Number=SeqID_5429
tgcccgtgaggtgtgcaacctggactttgccgagggcaacctggcggtcggtcgcgaaaacgggcaactgaatccgcaattgccgacgatggaattcgtccagtccgactacttcccggcaatccgccaactggccggcctgcccatcagccagcgtcgcggccagaagctgccgagttatccgcgtctgggccagcgtcaatacgacctggtgctgct

SEQ ID NO: 19833 - DNA, 394 bp, Zea mays
  Coding DNA Sequence Number=SeqID_5430
tggagttcgcgcaccttccggtgttgccgttcgccgactggctgcgcctgggggaattggcgtttgccatggtgatgattctttacgccgagtcctacggctccatcagcgcgttcgccctcaagcacggtgatcgcgtgtcatccaaccgtgacttgctggcgctgggggcggccaacctgttgtccgggctgttccagggcatgcccactggcgccggttattccgcgacgtcggccaatgaggcggcgggagccaactcccggctggcgggcgccgtggcggcattggtggtgttggcgatcgtactgacagtgctgcccctggtggcattgacgccggagccggtgcttgccgccatcgtcatctatgccttgggtcgtggcttgagcct

SEQ ID NO: 19834 - DNA, 514 bp, Zea mays
  Coding DNA Sequence Number=SeqID_5431
gaactgctgcgcctgatgtccaccggcgtggtcgagttcggcaccgccacgctgtcgtacttcgccagcgacaacccgatcaacgaagccatcgacctggccggcctggcgccggacgtgaagacggcgcgcgaggtgaccaacgccttcgagccggtctatgcgcgcctgtacggcgagggcagcaacgtcaagctgctgggcatctccacctatccggcgcaggtgctgttctgcaacgccgagatcaagggcctggccgacatcaagggcaagaaggtccgcaccagcagccgcaccaccgccgaattcgtggaagcgctgggcggctccagcgtcaccatggcgttcggcgaagtggtgccggcgctgcagaacaaggtggtcgattgcgccatcaccggttcgctgtcgggctactcggccaagtggtacgaagtctcgacccacctggtggcgctgccgatcaactggaaccagcagatccacgccgtcaaccagaaggcctgggaca

SEQ ID NO: 19835 - DNA, 485 bp, Zea mays
  Coding DNA Sequence Number=SeqID_5432
cctggaccgctttaacctgatagaggccgtggcatgaacccgctgattcgcacaggcaatttcatcgatggccaatggtccagcggtgggccggtttacccggtgctcaacccggccaatggcgcgcaaatcgccgaggtgcaacgcgccggagccgaggaaaccaacctggccatcgccgccgccaaccgtgcgttgccggcctggcgcaagctcaccgccaaggaacgcagccagcgcctcaagcgctggagtgacttgatgctgagcaaccagaaagacctggcccacttgctcagcctcgaacagggcaagccgctggccgaagccatgggcgaagtggtctacgccgcgagcttcctggagtggttcgccgaagaagccaagcgcgcctatggcgacgtgatcccgagccacaaggccgatgcgcggatcatcgtgaccaaggaagcgattggcgtggtcgcggcgatcaccccgtggaa

SEQ ID NO: 19836 - DNA, 331 bp, Zea mays
  Coding DNA Sequence Number=SeqID_5433
ctgcgggtagaatcgacgggtttatccctcaaccggcgatggaacccatgcgacacctgattaccggccgcgcctggcgcggtctgctgttggccttgtgcatgctgcttgccgcctgcggcgaccgcaatgtcgattggacgctctacaacgtcaagggccacctgcccgacctgaagttctcgctgccgggcgccggcggcaagacggtcagcagcgatgacctcaagggcaagacggtgctgctgttcttcggctacgccagttgccccgacatctgcccgaccaccatggcgcagttgacggcggtgctgcagaacctgggcgacaa

SEQ ID NO: 19837 - DNA, 581 bp, Zea mays
  Coding DNA Sequence Number=SeqID_5434
tagtccttgtacatggtgggtcctcgcttcagggttttggaatgctgctcaggatgtccagcagcagcgattcggagtcattgaggtagctggccagggcttccccggcggcttgtttgtggccgtcaaccagcaagtcgtgaatctgccggtcgcgctccagccagggcttctggaaggtttcctcgctgggcgcgttggaaaacaccaggcgcatctgggctgcaatatgggtaaaaaactcgtccagcagcgggctgcgcatcagcccgacaatgtgttgatgaaagcgcaggctgtgggtgccgaaggcttgccagttctcgcggtcctgggccagttgcgcggcttcgatggactcgagcatcaggtcggactggtattcgcgcagcggcttgctggcggcgatggcctgcagctccagggtgcgtcgcaccttgaagatgtcacgcacttcctccaccccgaggcggcgcacgatcacgcctttgttgcgcacgtagctggtcaggccttcgcggcccaggtggtgcaaggcttcacgcaccgtgttgcgcgaggcgttgtaggcgttcaccagt

SEQ ID NO: 19838 - DNA, 587 bp, Zea mays
  Coding DNA Sequence Number=SeqID_5435
gagcgaactggtgaacgcctacaacgcctcgcgcaacacggtgcgtgaagccttgcaccacctgggccgcgaaggcctgaccagctacgtgcgcaacaaaggcgtgatcgtgcgccgcctcggggtggaggaagtgcgtgacatcttcaaggtgcgacgcaccctggagctgcaggccatcgccgccagcaagccgctgcgcgaataccagtccgacctgatgctcgagtccatcgaagccgcgcaactggcccaggaccgcgagaactggcaagccttcggcacccacagcctgcgctttcatcaacacattgtcgggctgatgcgcagcccgctgctggacgagttttttacccatattgcagcccagatgcgcctggtgttttccaacgcgcccagcgaggaaaccttccagaagccctggctggagcgcgaccggcagattcacgacttgctggttgacggccacaaacaagccgccggggaagccctggccagctacctcaatgactccgaatcgctgctgctggacatcctgagcagcattccaaaaccctgaagcgaggacccaccatgtacaaggacta

SEQ ID NO: 19839 - DNA, 116 bp, Zea mays
  Coding DNA Sequence Number=SeqID_5436
ctgacccttgataacgaggcggcgagtatttttgtggggcagacgattccgtttgtcaccggcagttatgtgaccggtggtggcgggaccagtaataacccgttccagacggtgca

SEQ ID NO: 19840 - DNA, 98 bp, Zea mays
  Coding DNA Sequence Number=SeqID_5437
ccgctgcaccgtctggaacgggttattactggtcccgccaccaccggtcacataactgccggtgacaaacggaatcgtctgccccacaaaaatactcg

SEQ ID NO: 19841 - DNA, 121 bp, Zea mays
  Coding DNA Sequence Number=SeqID_5438
agcggcgcccaccaggacttcagcgcctggggcgtttccccgtcgcaggcagctcctggacaagcctacctggcaccgggcacctttaccggcgccgagggctatgccaagccaaccaggc

SEQ ID NO: 19842 - DNA, 115 bp, Zea mays
  Coding DNA Sequence Number=SeqID_5439
ctttgcctggttggcttggcatagccctcggcgccggtaaaggtgcccggtgccaggtaggcttgtccaggagctgcctgcgacggggaaacgccccaggcgctgaagtcctggt

SEQ ID NO: 19843 - DNA, 226 bp, Zea mays
  Coding DNA Sequence Number=SeqID_5440
gcgtcggcatcgaatacggcgtctacggcgtgcccgagaccttcgtcatcgacagcgccggccgcatccgctaccgccagttgggcctgatcacgccggatatctggcgcacccggctgcaaccgatgatcgaggcgctgcaatgatgacgcggtcccgccatcccgcgcccgccccggcctggcgcccggcgcaatcgccgggcatccaggagggtcacggcggc

SEQ ID NO: 19844 - DNA, 368 bp, Zea mays
  misc_feature (35)..(35): n is a, c, g, or t
  misc_feature (38)..(41): n is a, c, g, or t
  Coding DNA Sequence Number=SeqID_5441
ccagtcagcgcaggccatgggccaggtgctcggcncgnnnntccagcgctggcggcagcgggggcgacggcacctgggcccgggccggcgccagcgaccccagcgccagcagcaatgccagcagcggcgcggccaggccatggcccgggcggcgccgcggcggctggccgccgtgaccctcctggatgcccggcgattgcgccgggcgccaggccggggcgggcgcgggatggcgggaccgcgtcatcattgcagcgcctcgatcatcggttgcagccgggtgcgccagatatccggcgtgatcaggcccaactggcggtagcggatgcggccggcgctgtcgatgacgaaggtctcgggcacgccgt

SEQ ID NO: 19845 - DNA, 415 bp, Zea mays
  Coding DNA Sequence Number=SeqID_5442
gccagcgtgcgcaaggacaccgaaaaagccctgatggcctaccggcagtccttgcaggacgggttgccgatcgagcaggtgcagcagcgcctggacgtggccaaaggcaagctcaccgagtcggccggcctgttgggcagcgatggcttgagctggtccctgagttacatctccggtttgctgatcctgctgcgcgagggcctggaggcgatcctggtgttggcggcgatcctcgcgttcctgcgtaacaccggccagcaatcggcggtgcgcagcgtcaacgtcggctggggcctggcgctattggccggcttggccacctgggcgttggcggcttatgtgattgacgtcagcggcgcccagcgcgagttgctggaaggctgcacggcgctgtttgccagtgtgatggtgctgt

SEQ ID NO: 19846 - DNA, 537 bp, Zea mays
  Coding DNA Sequence Number=SeqID_5443
agaacgtaccgcgaccattattgcctccggcgtgggtggttttcccgcgattgccgaggccgtccgaacggctgacagcaaagggccgcgccgcctgtcgccgttcacgatcccgtcattcctcggcaacatggcggccgggcatgtgtcgatccagcatcaactgaaaggcccgctgggctcccccgtcactgcttgcgccgccggcgtacaggcgattggtgatgccgcgcgcatgatccgtgcaggggaaatcgacatcgccgtgtgtggcggcgccgaagcctgcatccaccgggtcagcctcggcggttttgctgcggcacgtgcactgtccagcgattacaacgacacgccgacattggcttcccgcccatttgatcaaggccgagatggatttgtgatgggcgaaggtgccgggatattggtgatcgaggagctggagcatgcactggctcgcggggccacgcctatcgccgagctggtgggctacggtaccagcgccgacgcctatcacatgacctcagggccggaaga

SEQ ID NO: 19847 - DNA, 510 bp, Zea mays
  Coding DNA Sequence Number=SeqID_5444
ggtgatagatgttccagagcggcatggcggggttcctttttgaggaggggcgacggccgtccggcaggggcggccagggggaatggcggtgtcgatcagttagtataattattgacttcaattattgaagttgtaaagcaaaggccgtggcggggaggcttgagcgttgtccgcccggctgcgatactgcggtggccgcgctccggcggcacggcaaagggaatccatgcgctccaagagttttgaaggaatggtctgctccatcgccacggtgctcgatgccgtcggcgaccgctgggccatgctgatcctgcgcgacctggtgctcggcctgcggcgctacgatgacctgcgccgttcgaccggcatcgccaacgcgacgctggccgaccggctcaggcagctggaacagaacgggctgatcgaacgccgcctgtaccagagcggccccgatcgtcatgaatatctgcccaccgccaagggccgcgatatcgccctggtgctgcaggc

SEQ ID NO: 19848 - DNA, 573 bp, Zea mays
  Coding DNA Sequence Number=SeqID_5445
gtacaggcggcgttcgatcagcccgttctgttccagctgcctgagccggtcggccagcgtcgcgttggcgatgccggtcgaacggcgcaggtcatcgtagcgccgcaggccgagcaccaggtcgcgcaggatcagcatggcccagcggtcgccgacggcatcgagcaccgtggcgatggagcagaccattccttcaaaactcttggagcgcatggattccctttgccgtgccgccggagcgcggccaccgcagtatcgcagccgggcggacaacgctcaagcctccccgccacggcctttgctttacaacttcaataattgaagtcaataattatactaactgatcgacaccgccattccccctggccgcccctgccggacggccgtcgcccctcctcaaaaaggaaccccgccatgccgctctggaacatctatcacccgcaggacgccttctccgacgccgacaagcaggccatcgccgaacgcattaccgcgctctacaccgacctgccgaagttctacgtcgggctggtgttccaccccgtgcccaagtcctcgttcttcatcggcggc

SEQ ID NO: 19849 - DNA, 340 bp, Zea mays
  Coding DNA Sequence Number=SeqID_5446
atgcccaggcctgtgtttatggattgcaggagcaggtgcaggtgcactcggtgcagttgctggagcagagcgtagcggtcacgcaaaagctgcagaaggctggcgcggcgacggacctggacctgactcgcttgcaaggcctgctggaagaaacccgtgcaccgctgccgatgttcaaggcccggcgcagcagcgcattgtatgagttggccgtgctcagcgggttgccgcccgagcaggtcacaccgcgcagctgtgcccacagcccgcagttgcaggccgcgttgccggtgggcgagggctgggcgctggtgcaacggcggccggatattcgccgtgc

SEQ ID NO: 19850 - DNA, 175 bp, Zea mays
  Coding DNA Sequence Number=SeqID_5447
agttgccgccgtttctcgacgcgtacctgccggccagcgccgccgagtttcgcgtggccatcggcgaatggctgagcaaacacctcagcgaattgcagttggtgggcaaagacgccgcgcacatgttcgtgaccttgctcatcggcatggtgttgggcgcgatcatcgccctgca

SEQ ID NO: 19851 - DNA, 270 bp, Zea mays
  Coding DNA Sequence Number=SeqID_5448
gcaataccgagatcgccaccgagtacctcaagcacctgtacagcccggctggccaggagattgcggcgaagaacttctaccgcccacgcgatgagaaagtcgccgccaaatacgcccagcagttcccgaaactggacctggtgactatcgacaaagacttcggcggctggaaaactgcccaaccgaaattcttcaatgacggtggcgtgttcgaccagatttactcggcgcagtaagcaaaatcaaactgtaggagccagctttctgtgg

SEQ ID NO: 19852 - DNA, 457 bp, Zea mays
  misc_feature (427)..(428): n is a, c, g, or t
  Coding DNA Sequence Number=SeqID_5449
cctggcccactatttgatcgatcaaggcgtgaagccgggggacagcgtggtcatcgcgctgccacgctccatcgacctgttggtcagccagttggcgatcctcaagtgtgcggcggtctatgtgccgctggacgtcaacgcgcctgaagagcgccaggcgttcatggtgcaggacagccatgccaaacacgtgctgaatgaccttgctgcgctgaaccttgcgacgcagcctgcgcataacccgaacctcgcccagtcggcggaaagcgtggcgtacatcatgtacacctccggctccaccggggcgcccaagggggtacaggttccccatcgcgccatctcccgattggtgatcaacaacggctacgccgacttcaatcaccgtgaccgggtggccttcgcctcgaacccggcgttcgacgccagnnccctcgacgtgtgggcaccgctgcttaat

SEQ ID NO: 19853 - DNA, 139 bp, Zea mays
  Coding DNA Sequence Number=SeqID_5450
tgttcaggcacagctcgacgtgggtggtctgcaacttgcgcttgaagtagcgcagggtttcaaagaactcttccttacccggcacgcgcttggcgatgttgaactggccaccgatctcgctggccgaatcaaacagcgt

SEQ ID NO: 19854 - DNA, 119 bp, Zea mays
  Coding DNA Sequence Number=SeqID_5451
cgggcatcaggtgacgctgtttgattcggccagcgagatcggtggccagttcaacatcgccaagcgcgtgccgggtaaggaagagttctttgaaaccctgcgctacttcaagcgcaagt

SEQ ID NO: 19855 - DNA, 334 bp, Zea mays
  Coding DNA Sequence Number=SeqID_5452
tgttccccgacctgaacatccgcgacaacctgcgcctgggcctggccaacgaccgcctgttcgacgaacgcttcggcgagatcgccgacctgttcccggtcttcgccagccgcctgcgccagcatgccggcaccctgtcgggcggcgagcagaagatgctgctggtggcgcgcggcctgatgcagcggccggccctgttgctgctggacgagatcaccgaaggcctgcagccctcgatgatcgagcggctgggccgggcgctcaactgggagcgcgagcggcgcggcacctccatgttcatcgtcgaacaaaacgtggccttcgcgctggacgt

SEQ ID NO: 19856 - DNA, 171 bp, Zea mays
  Coding DNA Sequence Number=SeqID_5453
ccagggcaacgccagcggcatgctggccaaccggctcggccagctggggcgggcgctggctggctacgccgatgccatgggcccggcctggaagcaggccacggtggtcgtcatcagcgaattcggccgcaccttccgcgagaacggcaacaagggcaccgaccacggcca

SEQ ID NO: 19857 - DNA, 408 bp, Zea mays
  Coding DNA Sequence Number=SeqID_5454
accaacaatggctcgatctaccaggccggtttcgaacagaacctgtacagcgaccgcaaggccttccgggtgggtgacatcatcaccatcacgctgaacgagaagacccaggcgagcaagaacgccaactcgcagatcggcaagaccagcaagaccagcatcggcctgacctcgttgtttggcggtgtaccgaacaccaacaacccgctgggcagtggtgatctgagcctggacgccggttacagcggcgaccgcgccaccaacggcaaaagtgcggcggggccagggcaacagcctgaccggttcgatcaccgtgaccgtggccgacgtgctgcccaacggcatcattgccgtacgcggcgagaagtggatgaccctcaacaccggtgacgaactggtgcgcattgc

SEQ ID NO: 19858 - DNA, 569 bp, Zea mays
  misc_feature (535)..(535): n is a, c, g, or t
  Coding DNA Sequence Number=SeqID_5455
agcgtacctacgatccggacaagtcgcgcttctacctgcgcaaggccggtgtcgagtcgctgaaggtgcgcctgcaagcttctgatgccgcctacaccggcgcagtggacgcctcggtgctgttcaaggaacaggcgcgtcaggccgggattgatatcgatgtggtgcgcgagccggcggatgggtacttctccaacatctggatgaagcagccattcaccacctcgttctggtacagcagcctgactgcagaccgcatgttcagcatcggctacgccaagggcgcggcgtggaacgaaacccattgggataacccgcgcttcaatcagttgctcaacgcagcgcgaggcgagatgaacgcgccgctgcgccaggagatgtacaacgaaatgcagagcctgtgccgggacgacggcggggcgattgtgccgttgttcgccagctccgtggcggcccgctcgaaccgcatcagccatggaccgctgacggcgccgtatggggaactggatgggttgcggctgatcgagcggtggtngcaggcgtgaatctttcagaaacgctatccctca

SEQ ID NO: 19859 - DNA, 398 bp, Zea mays
  Coding DNA Sequence Number=SeqID_5456
gcggcgcgatttgtgtctggctatctgatccaactgaccgccgacgtcaaagccctcgacggcccgtccggcaccgaggtggatttcaccgacctgcatgcctggtgcgaagtgtatttgcccggcgccggttggatcggtctagatgccacctccggcttgttcgccggtgaagggcatatcccgttggcttgtagtcctgatccttcctcagcagcgcccatcagtggcctggtggaaccctgcgagtgcgaatttacccacgagatgtccgtggagcggatttgggaggccccacgggttaccaagccctacaccgaagagcagtggctggcgatccaggccctgggccggcagatcgacggtgacctgctcaaggacgacgtgcgcctgaccat

SEQ ID NO: 19860 - DNA, 589 bp, Zea mays
  Coding DNA Sequence Number=SeqID_5457
cacaccgccgatatgctggaaaaactcggcattccctacgaagtgaaggtggtttccgcccaccgcactccggatttgctgttccagtatgccgatgaagcagaatcccgtggcatcgaggtgattatcgccggtgccggcggtgcagctcacctgccaggcatgtgtgcggccaagactcacctgccagtactgggcgttccggtgcagtcgtcgatgctctcgggcgtggattcgctgttgtccatcgtgcagatgcccgccggtattccggtggccaccctggcgatcggcaaggccggcgcgatcaacgcagccttgctgtccgccagcatcctcggcgccaagcacccgcagttccacgcggtgctgaaaaaattccgtgctgaacagacagacagcgtcctggacaatccagacccacgcattgcctgaggttgttgacgatgaaaatcggtgtaatcggtggcggccaactgggccgcatgctggccctggcgggtacgccgctggggatgaacttcgctttcctggacccggcgccggacgcctgcgcggctgcgctgggtgaacacctgcgggctgacta

SEQ ID NO: 19861 - DNA, 302 bp, Zea mays
  Coding DNA Sequence Number=SeqID_5458
tatgcgcggcatgtgcttgctcaacgtgagcagcgactggatcttgaaacggctgaagagccagttgcagaaccttcccggccacgcctcggatgactgtccacccgccccccgagacatccgggggcgggttcctttcagctggtgagcaagggatctgcgcccaagtcagcgaggcgtttatcgcggcgttgctctgcggccttttgcaggcggtcagcctccgcctggctcaaaagtccagcatcagccaaggcgtcaatatagccccagacgtaggccattttgacacgcacctggat

SEQ ID NO: 19862 - DNA, 292 bp, Zea mays
  Coding DNA Sequence Number=SeqID_5459
tacagatgaagcagatccgatccaggtgcgtgtcaaaatggcctacgtctggggctatattgacgccttggctgatgctggacttttgagccaggcggaggctgaccgcctgcaaaaggccgcagagcaacgccgcgataaacgcctcgctgacttgggcgcagatcccttgctcaccagctgaaaggaacccgcccccggatgtctcggggggcgggtggacagtcatccgaggcgtggccgggaaggttctgcaactggctcttcagccgtttcaagatccagtcgctgc

SEQ ID NO: 19863 - DNA, 576 bp, Zea mays
  Coding DNA Sequence Number=SeqID_5460
attgggtggatatcatcggccagcaggcgttacgcctgaaagacgggcaactgcacacctggcaactgcctgagcctgtgtcggcgtttatcccgtgtgccagtggtgatgcgctggtgaccctgagcagtggcgtgtatcgcctcgacctcgattcggcgccgagggatccacgcctgaccttgctctgcgtcgccgatccgcaaccgggcaaccgtgccaacgaagcccgttgcgatgcccagggccggctgtggctgggcaccatgcagaacaacatcggcgcgcacggtgaagatttgccggtgctgcagcgttccggcggcctgttccgggtcgatgccgacgggcaggtcacgccgttgctgcaaggcctggggattcccaacaccttgctctggaacgacgccgctacccatgtgcatttcggcgacagcctggacggcacgttgtatcggcacgcgatcaccgacgatggtcagcttgaacccgcgcaggtctggttcgggcctcactcccggggtggcccggacggctcggccatggacgccgaaggctatatctggaacgcccgct

SEQ ID NO: 19864 - DNA, 195 bp, Zea mays
  Coding DNA Sequence Number=SeqID_5461
caggccagccgcagtgcaggccaagccgtggaacagggccaacgggtgatcggcctgagcctgaacgggttgcacgccttggtcggcgaagtgcagataaatgcgcagatgatcgagaaactcgccgaggaatccgcaaccatcggcggcgtactcacggtgattcgctcaattgccgaccagaccaacctgctg

SEQ ID NO: 19865 - DNA, 126 bp, Zea mays
  Coding DNA Sequence Number=SeqID_5462
gctgaagaagtccgccgacagggccgccacgtccgccaattggccgaccttgatctggcctttcttgccctgctcggaagagaaccaggcgctgccgtgggtgaacagttccagggcggtcagccg

SEQ ID NO: 19866 - DNA, 133 bp, Zea mays
  Coding DNA Sequence Number=SeqID_5463
tgggcgggctggaactgcacgccgagggtttgccccggctgaccgccctggaactgttcacccacggcagcgcctggttctcttccgagcagggcaagaaaggccagatcaaggtcggccaattggcggacgt

SEQ ID NO: 19867 - DNA, 348 bp, Zea mays
  Coding DNA Sequence Number=SeqID_5464
tgcgttgcatgctggattccccttgttttgtagtgtggaggccggcagattagcaccgggcatgcggcaccgcgtcatcgaaaaatgtcgaaaacctataatccgccgttattgatcaaggggaaccaacatggatgagcaggcctatgccgacgaggtcgggcccagcgccggccggccgctgaacctgcgccagatcgaggtgttccgcgccatcatgatggccggctcgatcagcggcgcggggcgcatgctgcacgtgtcgcaaccggcggtgagccgggtgctggcgctgaccgagacgcgcctgggctaccggctgttcgagcgggtcaagagccggctctc

SEQ ID NO: 19868 - DNA, 567 bp, Zea mays
  Coding DNA Sequence Number=SeqID_5465
gccggttgcgacacgtgcagcatgcgccccgcgccgctgatcgagccggccatcatgatggcgcggaacacctcgatctggcgcaggttcagcggccggccggcgctgggcccgacctcgtcggcataggcctgctcatccatgttggttccccttgatcaataacggcggattataggttttcgacatttttcgatgacgcggtgccgcatgcccggtgctaatctgccggcctccacactacaaaacaaggggaatccagcatgcaacgcaccttcatccgcagcctcgccgccctggcgctggccgccaccttcaccgcgggcgcccaggccgccggcgcctatcccgacaagcccatcaccttcatcgtgccgtcggccgccggcggttcgcccgacgtgctgtcgcgcctgatcacgacccagatctccaaggacacgggcgccaccctggtggtggaaaaccgtcccggcgccgccggcaacatcggtatcgcgctggtcaagcgcgccgcgcccgacggctacacggtgggctacggcaacatcaacacgctggcggtca

SEQ ID NO: 19869 - DNA, 559 bp, Zea mays
  Coding DNA Sequence Number=SeqID_5466
acgtgcgccccaagcgcggctatgtggtgccgcgcgcgctcgagaccgatgagatcccgggcatcgtcgaggcctaccgccgcggcgcgcagctggcgcaggaagccggtttcgacggcgtcgaagtgcacggcgccaacggctatctgctggaccagttcctgcaggacagcaccaaccaccgcaccgacggctacggcggctcgctcgaagcgcgcgcccgcctgatgctggaagtggtggacgccagcgtcagcgtgtggggcgcgggccgggtcggcctgcatctgtcgccgcgcggcgatgcccatacgatgggcgattcggatccggccacgaccttcaactatgtggcgcgcgcggcgcgccgccgcggcctggcgttcctgtgcgcgcgggaacacgaaggcgccgacagcctgggccctcagctcaaggaatcgttcggcggcgtgtacatcgccaacgaaggcttcacgcgcgaatcggccgaggcggcgattgccgcgggccgcgccgatgcggtggcgttcggcgtgcagtacatcgccaatcccga

SEQ ID NO: 19870 - DNA, 314 bp, Zea mays
  Coding DNA Sequence Number=SeqID_5467
gcggcgacgttcttcatgggctttgccggcagcttcgtgatcctgttcgtgctgcgcctggccgtgggcgcgctggaggccccggcctatccgatcaacaaccgcgtcgtcacgacctggttcccggaaaaggaacgggccaccgccatcggcttctacacctcgggccagttcgtcggcctggcgttcctgacgccggtgctggcctggctgcagcaccactacggctggcacatggtgttcgtcagcaccggcctgctgggcatcatctggggcgtgctgtggtacctgatctaccgtgaaccgcgccagtt

SEQ ID NO: 19871 - DNA, 351 bp, Zea mays
  Coding DNA Sequence Number=SeqID_5468
aaccgcgacctggtgaaactgaccaaggccaaatacggcatcaaccccacctacccgctggccgctgactacatcagcaccaaggtcatgctcgaaaccatcatctccaccggcagttttgacgggccgaccgtggccaaggccatgcggggcctgagctacgaaggccccaccggcaaggagtcgatccgcgccggcgaccatcaggtgatcaaggattactacctgctggtgggcaaggccgccggcgacatggccgacaaggatgacctggccaaggtgctcagctccggccagtcgttcccgccggtggaagccacgggctgcgtgctcggctgatccgctgaaaat

SEQ ID NO: 19872 - DNA, 351 bp, Zea mays
  Coding DNA Sequence Number=SeqID_5469
gcgctgtgtcaccagtagattttcagcggatcagccgagcacgcagcccgtggcttccaccggcgggaacgactggccggagctgagcaccttggccaggtcatccttgtcggccatgtcgccggcggccttgcccaccagcaggtagtaatccttgatcacctgatggtcgccggcgcggatcgactccttgccggtggggccttcgtagctcaggccccgcatggccttggccacggtcggcccgtcaaaactgccggtggagatgatggtttcgagcatgaccttggtgctgatgtagtcagcggccagcgggtaggtggggttgatgccgtatttggccttggtcag

SEQ ID NO: 19873 - DNA, 494 bp, Zea mays
  Coding DNA Sequence Number=SeqID_5470
gcgccgcttgtcttttattttttcaggattaggctagtgggctcactgcattagggaaagcgcgatgaccaccgagcacgacaccacttccgaagagccgcgcctgaacagcacggaaatccgcatcctgggctgcctgatcgaaaagcaggctaccagccctgaaacctacccgttgaccctcaacgcgctggtgatcgcctgcaaccagaaaaccagccgcgaaccggtgatgaacctcagccagggccaggtcggccagagcctgcgggccctggaaggtcgcgggtttacccggctggtgatgggcagccgcgccgaccgctgggagcatcgggtggacaaggccctggaactggtgccggcccaggtgattctcagtgggctgttgttcctgcgggggccgcagacggtcaacgaactgctgacccgcagcgggcgcatgcacgaatttgaagacaccgagcaagtggtgcatcaactggaacgcctga

SEQ ID NO: 19874 - DNA, 271 bp, Zea mays
  Coding DNA Sequence Number=SeqID_5471
ggcgacggcatcacgggtggcggcgccgtcgaggaaggtcagggtgtcgctgtcggttttcggcgcctgtttttccagccaggcgccgatgttgtcgcgggtgccgatgccgtccgacttgccggtggccgggttgtcgccaccggtttccagggcatggaacatcccgggtctggaccacatggccgccgcgccggtcagctcggtactcagcgccgaatcgctgcccaaggcttgcaggttgtcgatgcgcagcatgccgtcgttgctg

SEQ ID NO: 19875 - DNA, 225 bp, Zea mays
  Coding DNA Sequence Number=SeqID_5472
agcaacgacggcatgctgcgcatcgacaacctgcaagccttgggcagcgattcggcgctgagtaccgagctgaccggcgcggcggccatgtggtccagacccgggatgttccatgccctggaaaccggtggcgacaacccggccaccggcaagtcggacggcatcggcacccgcgacaacatcggcgcctggctggaaaaacaggcgccgaaaaccgacagcgac

SEQ ID NO: 19876 - DNA, 302 bp, Zea mays
  Coding DNA Sequence Number=SeqID_5473
ggcgcgcgttatcgcgacgctcattcggggatgtccggcgcctacgggccgcaacgccaaatcctgcaggccatgaccaaaccggcctgggccttcgatgtgggcctgctggggcgcccccacgacctggggaacatctccaaatacctgggcaaacccacccaactgaaggactacatcggctggctggccaacaacttcgacccgtccatcagctggaaagacctggagtggatccgcgagttctggaaaggcccgatgatcatcaaaggcatcctcgaccccgaggatgccaaggacgc

SEQ ID NO: 19877 - DNA, 531 bp, Zea mays
  Coding DNA Sequence Number=SeqID_5474
tccgaagcacgtacagcaactggttgaagaaaacttcctgcgctgggattccctgggcgagttcctggccctggccgcgtccctcgagcatttgggtgtgaactacaacaacccgaaagccctggtgctgtccaagaccttggaccaggccaccggccagttcctcgacaacaacaagtcaccatcgcgcaaagtcggcaacatcgacaaccgcggcagccacttctacctggctctgtactgggctcaagccctggccgcccagacggaagacactgcactgcaagcgcagtttggcgaactggccaagaccctgaccgcgaacgaagcaaccatcgttgccgagctcaacgccgttcagggcaagccagtggacatcggtggctactacgcaccgaacgccgagctgaccagcaaggccatgcgcccaagcgccaccctcaacgcggcaatcgctgcgctggtgtaaggttgtaaggatgcaaagaagccccggccctgtgccggggtttctgtttctgaacatggcgt

SEQ ID NO: 19878 - DNA, 128 bp, Zea mays
  Coding DNA Sequence Number=SeqID_5475
tttggcggcaaggaaacccaggccgccagcccggcatgcctgtgcgcggtagtcgcgcgcctcaccggccagccgaccaagatgcgcctgccacgcgtggaagacatgctgatgaccggcaagcgcca

SEQ ID NO: 19879 - DNA, 163 bp, Zea mays
  Coding DNA Sequence Number=SeqID_5476
gtcgtcgaagcccacgtcatactcgatgtagaacgggtggcgcttgccggtcatcagcatgtcttccacgcgtggcaggcgcatcttggtcggctggccggtgaggcgcgcgactaccgcgcacaggcatgccgggctggcggcctgggtttccttgccgcca

SEQ ID NO: 19880 - DNA, 569 bp, Zea mays
  Coding DNA Sequence Number=SeqID_5477
actacgatctctttgtgtttggcacagtggtgccctaccgcacggtgtgtatcggcaagaagagcctgaagtgggtaccgttgttcggccagttgttctggctggcgggcaatgtgctgattgaccggggcaatgcgcacaaagcgcggcgctcgatgctcactacaacgcataccttgcaacatgcagacacctcgatctgggtgttcccggaaggcacgcgcaacttgggtgaaaccctgctgccgttcaagaaaggcgcgttccagatggcgatcgccgcgggcgtgccgattgtgcaggtgtgtgtcagcacttacgtgaagcagatgaagctcaaccgctggaacagtggcgatattctgattcgttcgctgccgccgattcctacgaaggggctgacgatggatgacatgccgctgttaatgcagacctgccgtgagcaaatgcgcgattgcatcgaagcgatggatcgcgagctgcaaactgcgcctgtaatcacgggtgaaccccgccgaatttgctgactctgattgggcagggcagctaagctgcctgacagttgtcat

SEQ ID NO: 19881 - DNA, 251 bp, Zea mays
  Coding DNA Sequence Number=SeqID_5478
acagtcgcagcactgacgctgagttcgatgatgtcaatgggtgccatggccggtacgacgctcgacaatgtcaagaagaagggatttgttcaatgtggtatcagtgatggcctgccaggcttctcttataccgaccccaagggtaattttcacggattcgatgtagatgtttgcagggctgttgctgcagccgtctttcccgcttgaccggcgagaaggaaaacggatttcacggcgcgtaccggagcaat

SEQ ID NO: 19882 - DNA, 598 bp, Zea mays
  Coding DNA Sequence Number=SeqID_5479
aaatcccttcttcttgacattgtcgagcgtcgtaccggccatggcacccattgacatcatcgaactcagcgtcagtgctgcgactgtcaggccaactttgaagatcttgttttcatttttcatgttattgctctcatggattgcagcagagacattccgcccaagcgatgacgctctagcaggtactcaaccaactctcagaggcagaaaacatcagacaggccactacggcccagagaaacaatcagaagattttttaagtggcataggctgccctctttttatttttaaaaagccccgtttccggggcgaaatatgaagcaccgtcagacctaccgaattactgaatgtcaggatcagcaattgagtgtgcccaaccgagagtctcctcccggttgagatcaacctagcgcctatagaaaaagagaaaaagcgaataattttacaatattacgtaagctaagcttacgaatgcggctacacgccactatgatgttgatttttaggggggtcaccgaatctcagccgcgtgttgctctaggcattgtacgaacacctgaagcgccgggctcctcttctcacccttgcgaaatgcaat

SEQ ID NO: 19883 - DNA, 453 bp, Zea mays
  Coding DNA Sequence Number=SeqID_5480
tgtacccggaatcgcacctgtcgttcctggccaatgtctacaaccagaaggctcgcgacttctatcaccgccatggcgtgcaactgatcgacgcggcgtacgaagcccacgaagaaaccggcgaagtgccggtgatgatcaccaagcactgcctgcgtttctcgttcaacctgtgccctaaacaggccaagggtgtgacgggggtgaaaaccaaagttgccccaatgcagctgatccacggcgatgaagtgctgacgctgaagttcgactgcaagccttgcgagatgcacgtgatcggcaagatcaagggccacatcctcggcctgccgcaaccgggcagcgtggtgggttatatcagcccggatgacctgctcaagaccatcccgcgcggcgcacactgagtcgccggtgagcgtcatgctacggcgtgacgctcaccgctgttttcgaacg

SEQ ID NO: 19884 - DNA, 530 bp, Zea mays
  Coding DNA Sequence Number=SeqID_5481
tatcaggtgctgctgaacagccccgccgtggtgcagggctgggaagcgatgctgaccgcgatccgcctgaacacgtcgctgtcgccgcgggtgcgcgagctgatcatcctgcgcgtggcgacgctgaacaacgcgccctacgagttcgacgcgcacgtgccgcacgccctggcggcgggcatgccgcaggcggtggtggaccagttgcgcggcgggccgcgcgcggacgcggtgcaggggctggaggcgggcgaggccgacgtgctggccctgaccgacgccatgacccgcgacatcgaggtgccggacgcgctgttcgcgccgctgcgggcgcgctacaacgaccaggaactggtcgagttgaccgcgacggtggcggcctacaacatggtgtcgcgcttcctggtggcgttgcgcgtcgggcactgaaaggagctttgcatggacaagacggtattgctggtgtcgctgggcgagcgtttcgacgcggcgcgcgcggccgacatggcgcaacgcctgaccgagggcct

SEQ ID NO: 19885 - DNA, 513 bp, Zea mays
  Coding DNA Sequence Number=SeqID_5482
tggccatgacgcgtttcgaagcgttccgccacgtggtgttattgcccgcactgggcaaggtctggccggccctgagcagccagatcatcatcgtgatgctcggttcggcggtctgttcgcaaatcgccacagaagagctgagcttcgccgccaattttatccagtcacgcaacttccgtgcgtttgaaacctatgcactgaccaccctggtctacctgtgcatggcgctgatgatccgccagttgctgaactggatcggtcgtcgctatgtcatgaggaacgcccgatgagtgatttttccttctgggacatcgtgcgcaacctgctcaccggcttgcagtggaccttgctgctgtcgctggtggcgtttatcggcggcggcgtgatcggcttgctggtgatgacgatgcgcatcagcaccaaggctttcccgcgcaacgtcgcccgtacctatatcgagctgttccagggcacgccgctgttgatgcagctgttcctggtgttcttcggcat

SEQ ID NO: 19886 - DNA, 577 bp, Zea mays
  Coding DNA Sequence Number=SeqID_5483
gcattggcgtgttgtccggcccgaacctggcgcgggaagtggctgagcacgccctgaccgccaccgtgatcgcgagtgaagacgaagaactctgcgagcgggtgcaggcagtgctgcacggtcgcaccttccgcgtttacgccagtgctgaccgcttcggcgtcgaactgggcggggcgttaaaaaacgtctacgcgatcatcgccggcatggcggttgcgctgggcatgggcgaaaacaccaagagcatgctgatcacccgtgccttggccgagatgacgcgctttgcggtcaaccagggcgccaacccgatgaccttccttggcctggcgggtgtgggcgacctgatcgtcacctgctcgtcaccgaaaagccgcaactatcaggtcggttttgccctcggccagggcctgagcctggaagacgccgtgacgcgtttgggcgaagtggccgaaggcgtcaacaccctgaaggtgctgaaggccaaggctcaggaagtcggggtgtatatgccgctggtcgcgggtttgcacgcgatcctgtttgaagggcgcaccttgaaccaggtcatcgagtt

SEQ ID NO: 19887 - DNA, 578 bp, Zea mays
  Coding DNA Sequence Number=SeqID_5484
tgggacagcgaagtgctcaaggccaggattgccctgacccacaactacgaccccttggtcgcccccctcaaagagataaacgacctgtgggcccagcttgagcgccgcgagtcgcagaacactcacgaagacccggcccactggcaatccagccaggatgcctatcgccaggcaatccaggaaaaggcccggctggtggagcaattcaagtcccacaatgcggtactgcgcaactctctggccttcctgccgacggccgaagacgatattcaggcgcagttcctggcacttaccgacggggacaagctgcttcagcaaagcatcgccaccgacacctacgacgtactcctgagcagcctcgaattcgcccaggtgaccagcgacgacaaggccgccgacattctggtgggcctgaacaaactggcgatcaacaaactgagcctgcccgagtcgttccaggtgccggtggagattctcagcaagcacatttcgctgatcctgcgggaacagcccgtggtcaacgacctgctcgaacgcatcgccgccgtgccgctggccgatcatctggacgacctgac

SEQ ID NO: 19888 - DNA, 502 bp, Zea mays
  Coding DNA Sequence Number=SeqID_5485
tgctgaaccaggaagcggtgcgcatggcggtgatgttcggcctcgccatcgatgccgagatcggccagcacaacgtgtttgcccgcaagaactacttctacccggacctgcccaagggctaccagatcagccagatggaattgccgatcgttggcaagggctacctggacatcccgctggaagacggcaccatcaaacgtgtcggcgtgacccgtgcgcacctggaagaagatgccggcaagagcctgcatgaagaattcaacggcgccaccggcatcgacctgaaccgtgccggcaccccgctgctggaaatcgtttccgagccggacatgcgcagcgccaaggaagccgtggcctacgtcaagacgatccacgcgctggtgcgctacctcggcatctgcgacggcaacatggccgaaggctccctgcgttgcgactgcaacgtgtcggtacggccaaaaggccaggtcgagtacggcacccgctgcgagatcaagaacgt

SEQ ID NO: 19889 - DNA, 544 bp, Zea mays
  misc_feature (464)..(464): n is a, c, g, or t
  misc_feature (471)..(473): n is a, c, g, or t
  Coding DNA Sequence Number=SeqID_5486
cggtagatttctccggcgatgagccgaaaatcctgccgtcctggtcactcaccaccgacgcggaaaagaaaaccggctgggctccgggtggctggcagttgatggctgtggcaccaaagctcaaccgcatgtacgtgctgatgcacgacaaccacgagccgatgaagtgggaagacccgagcaccatcatctgggcctatgacctcaagaccatgaagaagatagccaccctggaagccccgaccccggtctggagcatgcaagccaccggcgacgacaagcccctgttgctgggcgccgacgtcgaaggcggcttgcagatcttcgacctcaagaccaataaactcaccggtagcatggccaaggtagcgaagaccgcaacccagatcatgagctactaaagaggttcggccatgcatatcgacccgatcttcatcattgccagcgccctcgccatcgcgggnttgctgnnnagtgccgcgacccacaagttgcgcgcaccggcacgcttcgcccggcaactggccgattaccagttgctgcc

SEQ ID NO: 19890 - DNA, 516 bp, Zea mays
  Coding DNA Sequence Number=SeqID_5487
ttggccatgctaccggtgagtttattggtcttgaggtcgaagatctgcaagccgccttcgacgtcggcgcccagcaacaggggcttgtcgtcgccggtggcttgcatgctccagaccggggtcggggcttccagggtggctatcttcttcatggtcttgaggtcataggcccagatgatggtgctcgggtcttcccacttcatcggctcgtggttgtcgtgcatcagcacgtacatgcggttgagctttggtgccacagccatcaactgccagccacccggagcccagccggttttcttttccgcgtcggtggtgagtgaccaggacggcaggattttcggctcatcgccggagaaatctaccgggcggatggtgccggtggtggtggtgaagtagtaggtgtcgcccacgttcaccgcgcgttcgttgagcttctcggcgttggggtcgaagaagtgcgtgcggttgcgtgaggtttcctggccctgctcgttcagcgtcaccacttgcaggctg

SEQ ID NO: 19891 - DNA, 584 bp, Zea mays
  Coding DNA Sequence Number=SeqID_5488
caacctcgcgttgcaagtgattgaaccgatcaaccgccgctgatccacattaatttctgctccgccgaggacatgtaatggctaccgaacacgaaaacacttccgccgaagaccaggccctggctgacgagtgggcggctgccctggaggaaaccggcgatgtcggccaggacgatatcgacgcgctgctggcagctgatgcggccaccgcaccggtgggcaaccgccttcccatggaagagttcggcagcgtgccgaagaacaacgagccggtgaccctggacggtccgaacctggacgtgatcctcgacatcccggtgtcgatctccatggaagtcggcagcaccgaaatcaacatccgcaacctgctgcaactcaaccagggttcggtgatcgagctggatcgtctggccggtgagccgctggacgtgctggtcaacggcacgctgattgcccatggcgaagtggtggtggtcaacgagaagttcggcatccgcctgaccgacgtgatcagtccaagtgaacgcatcaagaagttgcgttgatatgaagcgctcattggtaggactgttatcgacgctgcc

SEQ ID NO: 19892 - DNA, 482 bp, Zea mays
  Coding DNA Sequence Number=SeqID_5489
ccgcgcctcgggagtgattggaaaccttggccacatagcccaggcgccagaaatcctgcttgttcactcggggataaaactcggccttggccgggtcgcccggcaggctggcgaagcggcccatgttcgccacggcacggctggggcgatagcagtcgaataccttcaagccgtaaccctgcctggccaactcggcctggacccgcaccagggcctttgccgcgtcggcagacagcacgcattcggcagcgttgtagccgtccagtggcgcaccggtgaagttatgggggctggcgtagcgaatgtcctgcgcgatgctcggatcgaggcttcgcaggtaaaccatgttggctggcattggcgtgtctgccgctgccggcgcggcgagcaccaggaggctaagggcggcaactgcggggaaagagtagggcatgggcgcggccgggctcgggcggtggcttaagcgcgccacactagcaatg

SEQ ID NO: 19893 - DNA, 470 bp, Zea mays
  Coding DNA Sequence Number=SeqID_5490
acgccctagcactggcggcatgggccgggcattgctagtgtggcgcgcttaagccaccgcccgagcccggccgcgcccatgccctactctttccccgcagttgccgcccttagcctcctggtgctcgccgcgccggcagcggcagacacgccaatgccagccaacatggtttacctgcgaagcctcgatccgagcatcgcgcaggacattcgctacgccagcccccataacttcaccggtgcgccactggacggctacaacgctgccgaatgcgtgctgtctgccgacgcggcaaaggccctggtgcgggtccaggccgagttggccaggcagggttacggcttgaaggtattcgactgctatcgccccagccgtgccgtggcgaacatgggccgcttcgccagcctgccgggcgacccggccaaggccgagttttatccccgagtgaacaagcaggatttctggcgcct

SEQ ID NO: 19894 - DNA, 417 bp, Zea mays
  Coding DNA Sequence Number=SeqID_5491
agatattgctgtcggctcgtggccaggtactgggaattgcacccagatcctcggtgggattgatcgtagggtcaggttgagatggccttgaaccactcccccctggaagttgaaggagatctgcgcatgttccggtgtgagctcggagacgaatgcttcgagctggtctccacgctctatcggcgaggcgctgatcaaactgcagactcgatctgcagctgctcgtaggctgagtgcttgagggtggtttacggcagtgttcggagtgatatccggcatattggttctccctgcgcaaggtgctaacaatgttattaccctgcgcaggggaaatcaaactaccagctacgctttatgcccctgcgaggtaaggtagcggcccgaacgggatgtcgtcgtcgaagtctggcggagtac

SEQ ID NO: 19895 - DNA, 401 bp, Zea mays
  Coding DNA Sequence Number=SeqID_5492
aaggtactccgccagacttcgacgacgacatcccgttcgggccgctaccttacctcgcaggggcataaagcgtagctggtagtttgatttcccctgcgcagggtaataacattgttagcaccttgcgcagggagaaccaatatgccggatatcactccgaacactgccgtaaaccaccctcaagcactcagcctacgagcagctgcagatcgagtctgcagtttgatcagcgcctcgccgatagagcgtggagaccagctcgaagcattcgtctccgagctcacaccggaacatgcgcagatctccttcaacttccaggggggagtggttcaaggccatctcaacctgaccctacgatcaatcccaccgaggatctgggtgcaattcccagtacctggcca

SEQ ID NO: 19896 - DNA, 127 bp, Zea mays
  Coding DNA Sequence Number=SeqID_5493
gcgccggtgaggtcgccaaaagcatggctgacagagcccaggacgcggctgctggtgcactcagcgccgccggttcggcacaggttgcagccaatgccgcgcttggcgcggcaaccgacgcccagac

SEQ ID NO: 19897 - DNA, 148 bp, Zea mays
  Coding DNA Sequence Number=SeqID_5494
acccgccgagtcagctgtttgccgggcggtggcggccgttgtctgggcgtcggttgccgcgccaagcgcggcattggctgcaacctgtgccgaaccggcggcgctgagtgcaccagcagccgcgtcctgggctctgtcagccatgctt

SEQ ID NO: 19898 - DNA, 576 bp, Zea mays
  Coding DNA Sequence Number=SeqID_5495
ggaaaatccgatcctggcttcgacgccagcggccaagaatggacgcgtctatgagctggacccgacgctgctggttggtgggcttgggccgcgcttgccgcaaagcctggtgaagctgtctgccgggttctatccgtctcaggctaataccgccccatgaccactctggttaaaccgcgaaccctgtttatcggcttgagtctgctgtgtgtattggcgatctggttgtcattggccctggggccggtgagtttgccgttgatggacacactgcgggcagccttacgcttgatgggtgtgccaatcgaggcccaaggcctggagcaggcggagttgatcctcgggcagattcgcctgccgcgtacgttgctgggcctggccgtcggcggggttctggcactttccggcgtcgcaatgcaggggctgtttcgcaaccccttggctgatcccgggttggtcggggtgtccagcggtgcggcgttgggcgcggcgattgcgattgtcggtggttcgttttttggtggtttgccggacgtcctcgggccttatctgctgtcgttgtgtgccttcctaggg

SEQ ID NO: 19899 - DNA, 130 bp, Zea mays
  Coding DNA Sequence Number=SeqID_5496
acgatcttctcgatctcgcccgggtggcccagtgcgacgatgacccagtcattgcccggcgtacgacgacgtgcggtctcccagccgtcgcccatgttgatgccacggcccgggttgaggatgttgctca

SEQ ID NO: 19900 - DNA, 140 bp, Zea mays
  Coding DNA Sequence Number=SeqID_5497
gcactggcctgctccgatgaacacttcgggcgcatgagcaacatcctcaacccgggccgtggcatcaacatgggcgacggctgggagaccgcacgtcgtcgtacgccgggcaatgactgggtcatcgtcgcactgggcca

SEQ ID NO: 19901 - DNA, 472 bp, Zea mays
  Coding DNA Sequence Number=SeqID_5498
gtcaccctggaagatgagttcggcaatatcaatgtggtggtctggcgcgatttggccgagcggcagcgccaggcgctggtgggctcgcggttgctcaaagtcgatggccgctgggaggcggtgggggaggttcggcacctgatcgccgggcgcctgaccgacctgaccccgctgctgtcgggcatcagtgtgcgcagccgggattttcgctgatccggctcttgctccttcatggccgcataagcaatatgcgatgaaaccaaccgccgctgtcgggctcaaagttttcatcgccgcccaccttttatcttttgcagagccgactgatgcagtttttatccgatacccatggctgtgatggctgggctggggaaatggcccagaggattcgcgcattcgattggtccggcaccgacctcggcccgattggtgcctggccctccagcctggtcagcgccgtgcagatgatgct

SEQ ID NO: 19902 - DNA, 539 bp, Zea mays
  Coding DNA Sequence Number=SeqID_5499
ggctccgaccgcatcaagcaattggctcgggatgaaggcctgaccctacgggaagtggccctgcgtttctcccggcccaagcgcgatttcgtcggcaccccggagcaggtcgccgacgcgatccagacctggttcgaagcgggtgccgccgatggtttcatcattaattcactgctgcccgatggcctgcagtacttcaccgaacaggtggtgccggtgctgcaagaacgcggtctgttccgccgtgaatacagcggcgtcaccctgcgggaaaaccttggcctggacgtgccggccaaccgctacagcgccgcccttgaaacccaacccacacagatcgccatctgaccagggcacgaccatgacgaacacgatcaaacacggacagttcaatcgtcgcggcttcctgggcgccagttcgattgcctttggcgcgctgggcctcgcctcgctggtgccacgggctttcgctgcacctgcgaagctctcggacctgaccctggctgtcgccacctaccgtggccaggactcgtacttca

SEQ ID NO: 19903 - DNA, 154 bp, Zea mays
  Coding DNA Sequence Number=SeqID_5500
tgctggacgagcgttccatcgtattgctgtcgccgctgggttattcgcctaccggtgaaatcttcaacctcgcctgcgaagacgtcgccactcgcgccgccattgacctgggcgcggacaaattgctgctgtttggcgccgatcttggtttgat

SEQ ID NO: 19904 - DNA, 170 bp, Zea mays
  Coding DNA Sequence Number=SeqID_5501
accagccggccatgttcatcgatcaaaccaagatcggcgccaaacagcagcaatttgtccgcgcccaggtcaatggcggcgcgagtggcgacgtcttcgcaggcgaggttgaagatttcaccggtaggcgaataacccagcggcgacagcaatacgatggaacgctcgtc

SEQ ID NO: 19905 - DNA, 321 bp, Zea mays
  Coding DNA Sequence Number=SeqID_5502
gtgtcgaacgctggtacttgcccggcagccacagcctgaacttcctgctggaaaacgccctgggcggcggcgggattgccagcctgcgcatcgacccccaaggcaaagccttcgcccaacaactgctggaaatcccgattgccgtgccacaacacattgccgatcaattcacttaaaggacccacgccgtggccttcgactcgatcttcaaagccgacttgttccaggggcaaaccatcatcgtcaccggcggcggcagtggcattggccgctgtaccgcacacgagctggcggccctcggcgcccatgtgattctggtgg

SEQ ID NO: 19906 - DNA, 356 bp, Zea mays
  Coding DNA Sequence Number=SeqID_5503
gaccgtttgcagtttttccggcttgcgccccaccagaatcacatgggcgccgagggccgccagctcgtgtgcggtacagcggccaatgccactgccgccgccggtgacgatgatggtttgcccctggaacaagtcggctttgaagatcgagtcgaaggccacggcgtgggtcctttaagtgaattgatcggcaatgtgttgtggcacggcaatcgggatttccagcagttgttgggcgaaggctttgccttgggggtcgatgcgcaggctggcaatcccgccgccgcccagggcgttttccagcaggaagttcaggctgtggctgccgggcaagtaccagcgttcgacacggccgt

SEQ ID NO: 19907 - DNA, 376 bp, Zea mays
  misc_feature (325)..(325): n is a, c, g, or t
  Coding DNA Sequence Number=SeqID_5504
gatgtgcaattgatccttgaggaccggcatgttgatctgattgatgacaatgtcgatctgagcatccgcatcaccgacagcccgccgccgggcttggtggggcgccaattactacctatcgaacacttgatctgcgccacgccgcattacctggcggagcacggtgcgccgcaggatccccatgatttgttggagcacagttgcatctacctgggcgagacgcctggggatgcgcgctggaagtttcgccagggcagcaaggcggtgacggtcggggtgcgcgggcggtatgcggcgaatcacaccggggtgcggctggatgcgntgttgcagcatgtgggaattggcagcttgccgtatttcacggcgcggcatg

SEQ ID NO: 19908 - DNA, 582 bp, Zea mays
  Coding DNA Sequence Number=SeqID_5505
aaagcaggtagaggacgcccatccacttcagcacgacgtggatctgcggatgctcatgcagggcgccgcccaggcccaggccgtaaagcgcgcacagcgccaggttcgcggcttcgaatccgacccagaagggcacggacccccgcaagccgtagcggccacccgcggtggccagcagcgtattgcccggcccggggctgatgatcatgggcaccgcatacccgacaaacgccatccagacttcccatcccgtcattgccgctccttggctggccgtggaccggcgcgcgtattgggctgagcaccggcgaagccgccattaaacggggcttaccgaggctggcaaaacgatctattctcatgccttcgataactcaggctaatcgagttcatgcgacgcttgcctccgctcggcgccttgcgcgcctttgaagccgctgcgcgtcacctgagtttcacgcgcgcggcggccgagctgtgcgtaacgcaggcggccatcagccaccaggtgcgggcgctggaacaatggctgggccgggagctgttcgtccggcgtggtcatgcgctggcattgacgcacaa

SEQ ID NO: 19909 - DNA, 512 bp, Zea mays
  Coding DNA Sequence Number=SeqID_5506
tgatggccgcctgcgttacgcacagctcggccgccgcgcgcgtgaaactcaggtgacgcgcagcggcttcaaaggcgcgcaaggcgccgagcggaggcaagcgtcgcatgaactcgattagcctgagttatcgaaggcatgagaatagatcgttttgccagcctcggtaagccccgtttaatggcggcttcgccggtgctcagcccaatacgcgcgccggtccacggccagccaaggagcggcaatgacgggatgggaagtctggatggcgtttgtcgggtatgcggtgcccatgatcatcagccccgggccgggcaatacgctgctggccaccgcgggtggccgctacggcttgcgggggtccgtgcccttctgggtcggattcgaagccgcgaacctggcgctgtgcgcgctttacggcctgggcctgggcggcgccctgcatgagcatccgcagatccacgtcgtgctgaagtggatgggcgtcctctacctgctttatctggcctggg

SEQ ID NO: 19910 - DNA, 313 bp, Zea mays
  Coding DNA Sequence Number=SeqID_5507
gtgttcgagtggtatgacttcttcctctacggcgccctcgcggcggtgatcagcaagcagttctttgccggggtcaacgacaccacggcgtttatcttcgccctgatggccttcgcggccggctttgtggtgcgcccgttcggcgccctggtgtttggtcggctgggggacatgatcggccgcaagtacaccttcctcgccaccatcatcctgatgggcctggcgaccttctgcgtgggcctgctgcccacctattcaagcatcggcatcgccgcaccgatcatcctcgtggcactgcgcatgctccagggcc

SEQ ID NO: 19911 - DNA, 100 bp, Zea mays
  Coding DNA Sequence Number=SeqID_5508
tcgcccgggcgcaggaagtaaccgtgcaacgaatgcacatgccgcgcctcttcaacggtctggctggccgccgacagcgactggccgagcacttggccgc

SEQ ID NO: 19912 - DNA, 128 bp, Zea mays
  Coding DNA Sequence Number=SeqID_5509
aggacctgggctttcgccagctgttcggcggccaagtgctcggccagtcgctgtcggcggccagccagaccgttgaagaggcgcggcatgtgcattcgttgcacggttacttcctgcgcccgggcgat

SEQ ID NO: 19913 - DNA, 308 bp, Zea mays
  Coding DNA Sequence Number=SeqID_5510
gacctgcgcgagtgcacgctgatcgtgctgcaactggagatcaatctgccgacggtctactacgccatcgaattcgctcaccgccacggcatcgccgtgctgctcaacccggcgccggcgttggccgggttgagcgctgagcacttggcgcagctggatttcctggtccccaacgaatccgaactggcgttgattaccggcaaaaccgtggactcgccggactcggcccgcgctgccgcacgaaccctggtggccagcggcattcgccacgtgattgtcaccctcggcgaacacggtgcgttgtacgt

SEQ ID NO: 19914 - DNA, 356 bp, Zea mays
  Coding DNA Sequence Number=SeqID_5511
tagcggcgatcaagttggcgggcaagctggtggcgcagtacggcacgccgctggtgacgccccatgccggtgtgacccacgtgtttccatccgccgaggtgctggcagcagcagatttggcgaccctcggcatgccgaaaagtcgcgggcgcaccttgtcgggtgtggcccaggccttactggatgacccgcaggtattccagccgaaggcgagcctgaaggagggtgtggcgcggttggtggcattaccggggattggagactggacggcgcagtacatcgccatgcgccagatgcgcgagcaggatgcgtttgcctcgggggatatcggcttgatcaatgcgttggtggcgctg

SEQ ID NO: 19915 - DNA, 492 bp, Zea mays
  Coding DNA Sequence Number=SeqID_5512
acattggcgtgctcaaggctcttgaggagcaaggcatccacatcgatgcgatcgccggcaccagcatgggcgcagtgatcggcgggctgtatgcctcgggctacaagatcgatgagctggagaaactcgcgttgagcatcgattggaggctcgccctgtccgacgcgccgccacgggaagatgtaccgttccggcgcaagcaggatgaccgggatttcctggtcaaacagaaactcagcttccgcgacgacggcagcctgggcctgccactgggggtgatccagggtcagaacctggccttgctgctggaaagcatgtttgcccacaccagtaacgtacgggatttcgacaagctgcccatccccttccgcgccgtcgccaccgacatcaccagtggtgaaaaggtggtgttccgcaaaggccacctgccccaggtgatccgcgccagcatgtcgatcccggcagtgtttgccccggtagagctggatggac

SEQ ID NO: 19916 - DNA, 263 bp, Zea mays
  Coding DNA Sequence Number=SeqID_5513
gggttgcgccatcgtgccgatgccgcggatcgagagatgggtcgagcggccatcgccgagcgcggagtagccgacgttgggcgtcatgcgcagcacgctttcgacgttggcggtgcgcaggtcctgcaattcgccgccgtcgaagacgctgacgctgaccggcacattgatgaggttttccaggcgcttgcgcgcggtgacgtagatgggcggcagttcggcggtggccggcgtgaccgcgaccggcgcggaatcggcggctg

SEQ ID NO: 19917 - DNA, 199 bp, Zea mays
  Coding DNA Sequence Number=SeqID_5514
gtcaccgcgcgcaagcgcctggaaaacctcatcaatgtgccggtcagcgtcagcgtcttcgacggcggcgaattgcaggacctgcgcaccgccaacgtcgaaagcgtgctgcgcatgacgcccaacgtcggctactccgcgctcggcgatggccgctcgacccatctctcgatccgcggcatcggcacgatggcgcaac

SEQ ID NO: 19918 - DNA, 590 bp, Zea mays
  Coding DNA Sequence Number=SeqID_5515
gcagctggatttgtcgcgctttgatgtaggcggcctggaagaagacggtgcgatcaatcgcctcagcgcctacctgtttaccgaccgtggcctgtaccggcccggcgagaccgcgcacttggccatgatcgtgcgcagcggcgactggaaaggcgccctgcaaggcctgccggttgagctgcagatcaccgacccacgtggtcttgaggtgattcgccagccattgaaactgtcggccagcggctttgagacttttgatttcccaagcagcgaagtcgcgccatccggcgattacaccgcgaccctgcaactgatcggcgagaagcagcgccgcactgacctgggcagcgtcagcttcaaggtccgcgactttgaaccggaccggatgaaagtcagcctgagcttgcacgatacaccggtgctgggctggatcccgccggaccaagtggtggccaaagtcaccgcgatgcacttgttcggcgctccggcggcgggccgtcgcgtcacggcaaaaatgtccctgagccccacgctcgcggcctttgatcgctacccggattaccgcttccgcctgaatgactcactggagg

SEQ ID NO: 19919 - DNA, 548 bp, Zea mays
  Coding DNA Sequence Number=SeqID_5516
aacgcaggcgcacatatcagtgcacccgcaaccgatacactcagcaatcatgggcaccccctcagctcatcttcacaggcacggttaaagccggcctgccactcttccgccaactttgttccagccggatacgggttatcgtccagattctttccgtcacgaaacgcctggttgcccagctgccaggcagcgcctgcagcgggctgctcagtagtcattcaacgtgccctcggcctgggtctgctcgatcaaccgcacgagctcggtttcaccctgaacgcgaacaacctccgcgagatgtcgctcagcagcggagatcaagcggcgcttcgctttcatgtgcagcaggccgcactgccgacctgtcttgaactcggaaatgacgtaggcgacgtgctccagaggcgcaacagggggatgaatggcgaaacggaacgaccgccctgctatcgggtagtcgaatgcgcgaaccacgcgaacttcactgaagatgagcccgcgcccgttcgagcggggtacaagcatggtcgcttgaactgactttccga

SEQ ID NO: 19920 - DNA, 503 bp, Zea mays
  Coding DNA Sequence Number=SeqID_5517
acatctcgcggaggttgttcgcgttcagggtgaaaccgagctcgtgcggttgatcgagcagacccaggccgagggcacgttgaatgactactgagcagcccgctgcaggcgctgcctggcagctgggcaaccaggcgtttcgtgacggaaagaatctggacgataacccgtatccggctggaacaaagttggcggaagagtggcaggccggctttaaccgtgcctgtgaagatgagctgagggggtgcccatgattgctgagtgtatcggttgcgggtgcactgatatgtgcgcctgcgtttcagaggatgggccctgttactggctgcgggtggattacagccgtggcgagggcgtctgcagttgttgctccgagcgggtggccgaatgggacgccgagatcggacgcaaatcgatcgacgaccagttcattgagctgatggacgctctcgatgggtacgatagcccggaagcgatcagtcaacggcttgctgagctccaag

SEQ ID NO: 19921 - DNA, 518 bp, Zea mays
  Coding DNA Sequence Number=SeqID_5518
aagtgcgcgccctgagcaccgagatttccctggccgccggcagcaccctgttcgaactcgcgggcagccaggccaccctcgccgaacacggtctggaccgccactggcgcaacgctcgggtgcacaccctgcacgacccggtgcgctggaagtaccacgcggtgggcaattactacctcaacgatgaaaacccgccactgcgggggactatctgatggcaaagaaaaagatcctgctcaatgccttcaacatgaactgcatcgggcacatcaaccatggcctgtggacccatccacgggacacttcgactcaatacaagaccctcgaatactggaccgaactggcacagctgctggagcgcggactgttcgacgggctgttcatcgccgacatcgtcggcgtgtacgacgtctaccagaattcggtggatgtgccgctcaaagagtctatccagctgccggtcaacgacccgttgctgctggtctcggccatggcggcggtgaccaaaaacctcggct

SEQ ID NO: 19922 - DNA, 564 bp, Zea mays
  Coding DNA Sequence Number=SeqID_5519
aacgactgctgcatgttgatcgccaccggccaggccgacctgccggaaatcacctcgtccaacggcgcgtatttcgcagccttgaagcaggcggtgttcgaagtgtgcatggacgtggcccaagccattgtgcgtgatggcgaaggcgccaccaagtttgtgacggttgaagtcaacggcggcggcaaccatcaggaatgcctggacgtcggctacaccgtggcccactcgccgctgatcaagactgcactgtttgcctccgacccaaactggggccgtatcctggccgctgtggggcgtgccggtgtgccgaacctggacgtgagcaagatcgatgtgttcctcggcgaggtgtgcatcgccagccgtggcgcccgggccgagacgtacaccgaagcccagggttctgcggtgatgcagcaggaagaaatcaccatccgtatcgaattgggccgcggtgagtgcagcgaaaccatctggaccaccgacctgtcccacgagtacgtgaagatcaacgcggaataccgcacctgataccaggcaggtcttcaaaccgattcagag

SEQ ID NO: 19923 - DNA, 307 bp, Zea mays
  Coding DNA Sequence Number=SeqID_5520
atcagcgctttcgtgcctggcgcaattgggggacgttctaccagatgtttgagcggcttcacatctggttgaacgagctagggttaatcggtctggagacctggatgattgactccacgacggtacgcgcaacccgggcgtcttctggtgccgggaaaaaagggggcctgaagaaccgcaaaaccatgcactcggacgtagccggggcggcctggcgaccaagatccacatgttgtgcgatgccaatggcgtaccgttaaactttctactgtcaggtgggcaagccagcgacatcacctatgcgcaa

SEQ ID NO: 19924 - DNA, 296 bp, Zea mays
  Coding DNA Sequence Number=SeqID_5521
gatgtaagcgttatccagcagcggttgcgcataggtgatgtcgctggcttgcccacctgacagtagaaagtttaacggtacgccattggcatcgcacaacatgtggatcttggtcgccaggccgccccggctacgtccgagtgcatggttttgcggttcttcaggcccccttttttcccggcaccagaagacgcccgggttgcgcgtaccgtcgtggagtcaatcatccaggtctccagaccgattaaccctagctcgttcaaccagatgtgaagccgctcaaacatctggtagaa

SEQ ID NO: 19925 - DNA, 476 bp, Zea mays
  Coding DNA Sequence Number=SeqID_5522
agatcggtacaatggccccgcttgccgagaggcgagcgtcgttatggtgatcccatcggtccccccgcaacgattacccgtgaacctggtcagagccggaaggcagcagccacagcgggaacattgtgtgccggggtgtggctggtggggttgcctccataacgccacctccttgattcaaaaaaatacttttatgaagcccttcgctgacaatcgtcatctgcgaagcgatttctgctgttcgtccttcagcacagtgctcacaagcccgaaagcaatcgttaccggcaaaagactgtgagggctctttcacaacttcaagcttccactctggacaacccaaaaccaccttgctagtttgcgccagtcacatatttcaaaatatgtcgatggcacatggatgatattaaagtgatggcgctttatggctcattcacctcaactaaacaaggatgtcggtcatgaaaagcctgcaa

SEQ ID NO: 19926 - DNA, 473 bp, Zea mays
  Coding DNA Sequence Number=SeqID_5523
aatcaccgccgatcaaaaagagcagttcctcctgaacaacccggcgctgcaatcggtggacgcgatcaagaaccagcgttttatcgtgatcccctacgtgcaagccacgccgggcatcgacaacgtgctggcggttgaaaccctggccaaggggttccacggcgaatgattacccgtcgctacgccctgctgctgagtgcccttggcgcgttgttgctgatctcatgcgtggtctcgctggggttcggctcggcgcgggtgccggtggacgtggtgtggcggatcttgctgcataaagccttcggcatgggcgaggtggactggagcgccgggcaggaacatatcgtgtggctgatccgcgtaccgcgcatgttgctcggtgccctggtgggcgccgggctggcgttgattggtgcggtgttgcaggcggtgacgcgcaacccgctggcggatccgcacctgctgggcgtgac

SEQ ID NO: 19927 - DNA, 586 bp, Zea mays
  Coding DNA Sequence Number=SeqID_5524
tggcaatcggcggactgaccggcaacgtcacccgcgaaatgatttttatcttggcgttcctgctaggcgcggcgcgttcgtttgaaatgcccaccacccaggccctgctgccgagcatcgtgcccactgcgctgtttccccgcgccgtggcgtcgtcgcaatcggcacagcaattggccaccatcgtggcgccggcactgggcggtttgttatacgccttcggcagtgtctgggtgtacggccctacggtggtgctgtacctgattgcctgcgtgctgaccctgaacctgcccgcacgccagacgcccttgaacaaggccaaggcgaccatggattcgctgctggccgggattcgttttatccgcagccggccggacatcctcggggcgatttccctggacctgtttgccgtactgctgggcggcgccacggcgttgctgccggtgtttgccaaggacatcctgctgaccgggccgtgggggctcgggctgctgcggtcggcgccggcagtcggggcgttgctgatgtcgttgtggctggcgcggtttgccgtagaccggcacgtcgggcggatcatgtttacggc

SEQ ID NO: 19928 - DNA, 145 bp, Zea mays
  Coding DNA Sequence Number=SeqID_5525
catggaatgggtcaacctgttcgccctcgccgtcaacgaagaaaacgctgccggtggtcgcatggtcaccgcgccgaccaatggcgcagcgggaatcatcccggcggtgctgcactactacatgaagttcaacccggacgcgtcc

SEQ ID NO: 19929 - DNA, 155 bp, Zea mays
  Coding DNA Sequence Number=SeqID_5526
ggcgaggaagaaattcaccacgtcatcgtcggacgcgtccgggttgaacttcatgtagtagtgcagcaccgccgggatgattcccgctgcgccattggtcggcgcggtgaccatgcgaccaccggcagcgttttcttcgttgacggcgagggcga

SEQ ID NO: 19930 - DNA, 538 bp, Zea mays
  Coding DNA Sequence Number=SeqID_5527
agagcctgaacgacacgtccaccgacatgccctacggccactggctgcgcccgctgtggaagctggcgcaggcgctgtcggcgcagcgcgagaacgtgcgcggcaagcccgagaacaactcgcgggtggagtacagcttctacctggacggcgaccccgacgatcccgacaccccggtgcgcctggtgccgcgccagcgcaacgcgccgctggaccggatggtggccgagtacatgatcctggccaacaacctgtggggcggcctgctgaaccagcacggcgtgcccggcatctaccgctcgcaacaggccggccgcgtgcgcatgagcacgcaggcgctgccgcacgaggccatcggcgtgccgcaatacgcctggagcacgtcgccgctgcgccgctacgtggacctggtgaaccagtggcagctgatcgccgcggtggaacacggcgtctcggcgcgcctggtggcccccttcaagccgcgcgacgcggacctgttcgcgatcatcggcgcgttcgacgcgcagtacgcggcctg

SEQ ID NO: 19931 - DNA, 348 bp, Zea mays
  Coding DNA Sequence Number=SeqID_5528
tggcaatcggccagttgatctatgggccgctggcggaccgctttggccgacgcgggccgctgctcagcggtgtcaccctgtttaccctggcgtcgttcgcgtgtgcgtacgccccttccctggagtggctgatcggcgcgcgtttcgtccaggccttgggcggctgcgcgggcatggtgatctcccgggcggtggtcagcgataaatgcgacgcggtgggctcggccaaggtgttttcccaattgatgctggtcaccgggctggccccgatcctcgcgccgttggcgggcggggtgatggtcggtatctggggctggcagtcgatattcctggcgctgacggcattca

SEQ ID NO: 19932 - DNA, 557 bp, Zea mays
  Coding DNA Sequence Number=SeqID_5529
aactgggcctgtcgatcctgttcatcacccatgacctgcgggtcgcggcgcaggtgtgcgaccacgttgcggtcatgaaggacggcaaggtggtggaggaggggccgtgcgccgaggtcttcggccagccctcgcatccctatacccaggcattgctggcggcggtgccgggccggggttgggatccggccgaggccgccgcgcggcgggcggcctagcggcctggcggctttggccaggcgcggcattcgcggtataaccgactgatgccgtgccgcgtttcgcgcgccccgcgcgagtcgcgcccatcccggcgggagagcatccatggccgacatcgtccaattgcgtccggagggcctgtactgcgccgcgggcgggttctacatcgacccctggtgccccgtggacgtggccgtcctcacgcatggccatggcgaccacgcccgcgtcggcatgggttgctaccacaccagtgccgagggcctgcccatcctgcaatggcgactgcgtgagcaggactaccgcgtccacgcctatggcgagccgttcacgct

SEQ ID NO: 19933 - DNA, 121 bp, Zea mays
  Coding DNA Sequence Number=SeqID_5530
tccatgttgcgccttggcgaacgccacgaacgcctgcatggactccagatccgtaacgtccagtgcgctcgcacttgccgagccgccttcggcctggatctcgcgcaccagtttgtccagc

SEQ ID NO: 19934 - DNA, 151 bp, Zea mays
  Coding DNA Sequence Number=SeqID_5531
gttgatcgccgccaaaggcgctcaggtggtactcggtgcccgccgtaccgagcggctggacaaactggtgcgcgagatccaggccgaaggcggctcggcaagtgcgagcgcactggacgttacggatctggagtccatgcaggcgttcgtg

SEQ ID NO: 19935 - DNA, 469 bp, Zea mays
  Coding DNA Sequence Number=SeqID_5532
gaatgcatgattggcgacctcaccggcatcacccggggcaagatctcgccgaccaacaagttcatcgccgaaaaaggcatgcgcctgcccgaaagcgttctgttgcagaccgtgaccggcgactatgtcgaagacgacatctattacgaattgctcgacccggccgacatcgacatgatttgccgcccggacgagaacgcggtgtacctcgtgccctgggccatagagcctacggcccaggtgatccacgacacctacgacaagcaaggcaacccgatcgagctgtcgccgcgcaacgtgctcaagaaagtcctcaagctctacgccgataaaggctggcagcccatcgtggcgccggagatggagttctacctgaccaagcgctgcgaagacccggacttcccgctgcaaccgccgattggccgttccggtcgcccggaaaccggccgccagtccttctctatagaag

SEQ ID NO: 19936 - DNA, 386 bp, Zea mays
  Coding DNA Sequence Number=SeqID_5533
gacggaaaactctttgccatgcgcggtcaccgactgagcctggaccactttgcggccgaggccgttcgcctcgaacgcgatatcgtccagctcaacatagtggccggcggggaactgaacggccgactggatgacgacctgcggataggtgaattgggtattcagagcaacagtcatggcgatacctctatctgaattggcaaatgttattttctgttattattgcgtattgtcaacggactttcaggctattcccgccctcttccagctcgttgctcatacgctgaactcccgccaacatttgcgcctcggacagcagcgaattcgcaaactggtcttcctgcagctcaaccaggccgtcacgcatttctctacgcagttcacga

SEQ ID NO: 19937 - DNA, 368 bp, Zea mays
  Coding DNA Sequence Number=SeqID_5534
tcaggtcagtcgtgaactgcgtagagaaatgcgtgacggcctggttgagctgcaggaagaccagtttgcgaattcgctgctgtccgaggcgcaaatgttggcgggagttcagcgtatgagcaacgagctggaagagggcgggaatagcctgaaagtccgttgacaatacgcaataataacagaaaataacatttgccaattcagatagaggtatcgccatgactgttgctctgaatacccaattcacctatccgcaggtcgtcatccagtcggccgttcagttccccgccggccactatgttgagctggacgatatcgcgttcgaggcgaacggcctcggccgcaaagtggtccaggctcagtcggtg

SEQ ID NO: 19938 - DNA, 416 bp, Zea mays
  misc_feature (206)..(206): n is a, c, g, or t
  misc_feature (345)..(350): n is a, c, g, or t
  Coding DNA Sequence Number=SeqID_5535
aggagcaggccctgaccaacccgaacgtgcacgtggtgctcaattcctacgacatcctcggccccaactcgccgacggtgctgttcgccaccgagaaattccgcaacgacaacccgaaaacctacaaggcgttcgtcgaggcgctgaccgaagcggcccaattcgcccagaacgataaaggcgccgccgccgatacctacattcgngtgacgaaggccaagatcgaccgcgccgaactgctgaaaatcatcgaaaacccgcaattcgaattcagcgtcacaccgaaaaatacctacccgctggcggaattcctctaccgcgtcggcgcgatcaaaaacaaacccnnnnnntggaaggattacttcttccaggacaccaagccgctgcaagggagctgacatgaacgcgcccttgca

SEQ ID NO: 19939 - DNA, 268 bp, Zea mays
  Coding DNA Sequence Number=SeqID_5536
tgttctggcgggatttgcacgcagtcgccggcttctggggcgcggcgttcctgctggtgatgctgctcagcggcatgacctggaccggcttctggggcaagcaatatgccgaactgtggaataaattcccggcggcgatgtggaacaacgtaccgcagtccgaccagcaggcccgcagcctcaacaccgcgagccaacagaccgtgccgtgggccatggaaaacacgccgatgccgatgtctggcgagcatgccgagcacatgaagca

SEQ ID NO: 19940 - DNA, 332 bp, Zea mays
  Coding DNA Sequence Number=SeqID_5537
gcggcgggtttgtcatgagtttcaccgacatcaccgcgttccgcgaagccgagcaggcgttgaccgaggccaacgaaggcctggaacagcgagtgaccgagcgtactcacgaactgtcgcaactcaacgtcgccctgacggatgccaagggtgtcgccgagacggccagccagtcgaaaacccggttccttgcagcggtcagtcacgacttgatgcaaccgttgaacgccgcccggctgttctcggccgccctctcccaccagaacgacggcatgtcgccggatgcccggcaactggtgcagcacctggacagttcgctgcgctcagcggaa

SEQ ID NO: 19941 - DNA, 336 bp, Zea mays
  Coding DNA Sequence Number=SeqID_5538
cggagtcattgacccttggcacgcgcctttacgcggtggaccaaactacccgctatcaactcgtgggttacccgctgcgcttcgacgtggaaaccgacctgcgagccctcgcgttcgagggcgactggcgcaagtccgacgaccgccagctgcggattctcagcgccgggctctaccagggaatcaacggcctgggggcacgcacccacagcgatatcgaaggcacgcagccggacctggaattcttccgcctgcgtctgtcgggggtgcaaagcaacaagttcttcgaccactggcaaggcgtggcatcgggtgccttctactggagcaacgaca

SEQ ID NO: 19942 - DNA, 542 bp, Zea mays
  misc_feature (504)..(505): n is a, c, g, or t
  misc_feature (507)..(507): n is a, c, g, or t
  Coding DNA Sequence Number=SeqID_5539
tgctcgaacatgtgccacgaagccagcggcgtcgccctggcgcaaagcgtgggcgtgggcaaaggcaccgtaaccttcgatgacttcgagcatgcggacgcgattttcgtctggggccagaaccccggcaccaaccatccacgtatgctcgagccattacgtgaggcggtaaaacgcggcgcccaggtggtgtgcatcaacccgctgaaagagcgtggcctggagcgtttccagcacccgcaacacccgctggaaatgctcaccaacggcgacaaaccaaccaacactgcctacttccgcccggcgctgggaggcgacatggccatcctgcggggcatggccaagttcctgctgctgtgggaacgccaggcccaggccgaaggcaaagaggccgtgttcgaccacgacttccttaatgaacacaccgccaacgtgctggattacctgggcaagatcgacgacacctcatgggatgagatcgtcgagcagtccggcctgaccctnntngagatcgagcaagcggcgcgcatgtacgccaaagg

SEQ ID NO: 19943 - DNA, 548 bp, Zea mays
  Coding DNA Sequence Number=SeqID_5540
tcggctgcgctatcgttgacattcgtcgtgcgtggcctgctgcaggtgccggtcgagggatcggtggcgctgttcctggccggggtggcgctgcacttgttcgcgaccacctccatgggcatcttcatggccaccctcgcacgcagcatgccgcaattcggcatgctgctggtgctggtgctgctgccgctgcagatgctgtcgggcggcaccacgccgcgcgaaagcatgccggatttcgtgcagaacatcatgctggccgcccccaccacccatttcgtggaactcggccaggccattcttttccgcggcgcgggcttgagcgtcgtgtggcagcccttcctggcgctggcgctgatcggcagcgtcctgttcgccttctcgttgacccgattccgcaagaccctcagccagatggcgtgaggcctgtgcattcgttgccccttaccactctcttaaaaggacgcatgatgaagaagacaaccgcccccacgccccaggacctcgccggcgccaacgccgcctattgccaacgactgggcgagctg

SEQ ID NO: 19944 - DNA, 102 bp, Zea mays
  Coding DNA Sequence Number=SeqID_5541
tgaaacccggtgagcaggacgacaggttcctgttcaaccgcattcgccggggcagccacatcacccgcgagcgcatcaccaagcacgcgatttactacatcg

SEQ ID NO: 19945 - DNA, 221 bp, Zea mays
  Coding DNA Sequence Number=SeqID_5542
tacgacgccgtgaccagcctgtcgttcgaagtgcgccagaaactcaagacgcatcggcccgaaaccatcggccaggccgcccgcatttcgggcgtgacgccggcggcgatctcgctgctgctgatccacctgaagcgcctgcactacggctcgcgcaagcaagccgcatgagcgcccatccccaaccggccggcgcggacatggccggccgcctttcgcat

SEQ ID NO: 19946 - DNA, 216 bp, Zea mays
  Coding DNA Sequence Number=SeqID_5543
tgcagtccgagctgctcgaaggcatgcgaaaggcggccggccatgtccgcgccggccggttggggatgggcgctcatgcggcttgcttgcgcgagccgtagtgcaggcgcttcaggtggatcagcagcagcgagatcgccgccggcgtcacgcccgaaatgcgggcggcctggccgatggtttcgggccgatgcgtcttgagtttctggcgcactt

SEQ ID NO: 19947 - DNA, 458 bp, Zea mays
  Coding DNA Sequence Number=SeqID_5544
cggcggcgccgctcttgcgcaagatccgcaacatcggctggctgatcgggcgctacggcagcaatcgcaccgcgctcagcccggtggcccgcaccgcgccccaggccgatccgtcgcagggcctgctggtgatcggcgcctcggccggcggcccgtccacgctggcgcagctgctgcgcgacattccgttgagctttcccgccggcatcgtgctggtgcagcacgtggacgcatccttcgcggccggcatggccgactggctcaatgaccagatcgcgctgccggtgcggctggtgcgcgagggcgagcggccggcgcccggacaggtgctgctggccggcaccgacgaccatctgcacctgctggccgatggtacgctgcgttacaccgagaatccgaaagaaagcctgtaccggccctctattgatgtatttttccatagcgtcgcgcagcattgg

SEQ ID NO: 19948 - DNA, 214 bp, Zea mays
  Coding DNA Sequence Number=SeqID_5545
ggtcgttatcgcgaatccgatgactatgctcatggtagccaggtggtggtggcggatacgccggtcggccgcctggggctgacagtgtgttacgacttgcgttttccggagctttacagcgaattgcgcgcggcgggtgctgaactgattaccgcaccctccgcgtttacggcggtgacgggtgccgcgcactgggatgtgctgattcgtgccc

SEQ ID NO: 19949 - DNA, 569 bp, Zea mays
  Coding DNA Sequence Number=SeqID_5546
actggattgtcaacgctaggcgcacttcgcggagctgttgaaattactgagtcattgttaatagttggttgaggcatactcagcaatgagttgcgcatcgattggtagaatccctggatgtggcagccaaataaagctcgctgccattcgaacaaccggacggggtaacagcatgcaggtcgatcgagccaaccttgccgattttgtattatttttggccattgccaggcacaaaagcttcagccgggccggacaagaggttggtattagcgcttcagcattgagccatgcaatcaaaggtctggagacacgtctcggtgttcgccttctgaaccgcactacccgcagcgtcacgctaacagccgctggtgaagaacttcacagcgtgatcagcgtaccaatggacgagatcggtcaagccatggaagccctcaatcgcttccgcgacgagccaaccggccgcattcgactgaacaccctgagcgatgccgccgatcttctcctcggccctgttttgccagtattcaatgaccgctatcctgaaatccagatcgacttgacggtgacca

SEQ ID NO: 19950 - DNA, 281 bp, Zea mays
  Coding DNA Sequence Number=SeqID_5547
agcattgccctcaagcgcctggaaacccgcctgggcattcggctgctggcgcgctccactcgcagcatgcgcctgaccgaagaaggccggcgctacctggacagcgtgcgggtggccctggaggcgttgtccgaaggcgaacaggcgatcaagcaacaaggccaaagcctcagtggtttgctgcaattggccgcgccctcggatttcgggcgcaatgtgctgctgggctggctggatgagttcaagctcgagcacccgaacgttcgcctgcaattgctgct

SEQ ID NO: 19951 - DNA, 256 bp, Zea mays
  Coding DNA Sequence Number=SeqID_5548
gatcagcatgatcaggacacctgtggatgtgggcggtgccacaggaggagcaattagcgtgcccaatggtgtggccccgtgtttacggggcttttggccgccaccgtcggcaagccttggcatgccgacggccagggtttgccgctagtgggcaatgttctccagcgccaggttgcgggtgcgcgggccgaaccaactgatggtgatcatcacgatcaacatgctgctggcgataaacgccaacacgccgggcgtg

SEQ ID NO: 19952 - DNA, 264 bp, Zea mays
  Coding DNA Sequence Number=SeqID_5549
ttcagcagcctgttgatcggtgtgatcctcgaacacctcggcacgcccggcgtgttggcgtttatcgccagcagcatgttgatcgtgatgatcaccatcagttggttcggcccgcgcacccgcaacctggcgctggagaacattgcccactagcggcaaaccctggccgtcggcatgccaaggcttgccgacggtggcggccaaaagccccgtaaacacggggccacaccattgggcacgctaattgctcctcctgtggcaccg

SEQ ID NO: 19953 - DNA, 475 bp, Zea mays
  Coding DNA Sequence Number=SeqID_5550
tttcgtggcgaagacctggtgcccaccgcgcgtctggatcagcaggacggcattgaactggtgtcgcgcctggtgtttgaactgcccgccggctggaaaagcgtcgagacgtcctggccgcgcatcggcaagaacaaattccgcatcgataatgtttcccgcctgtttgaccggcccaccggctggatgctcgcgggtacgttgggcagccgcaggatgcgcctgggggaaaccgaaatcaccgtggcgtcgcccaaagggcagggcatgcatcgcatggatgtgctgaccttgctgacgtttgtctggccgcaagtgcaagcggcattcccgcggcacccggcgaaactcctggtggtgggcgccagtgacccgatgcggcgcggtgcgtactcggcgcgggactcgatctacctcaacagccgaacaccgctggtcagcgaaaacggcagcagcccgttgatccgcgaagtgg

SEQ ID NO: 19954 - DNA, 556 bp, Zea mays
  misc_feature (382)..(383): n is a, c, g, or t
  misc_feature (518)..(519): n is a, c, g, or t
  Coding DNA Sequence Number=SeqID_5551
cggttcgctgggtgccacgatcaacctggtgcgcaagaaacctacggctgatttccagggccatgccagcctcggcgcgggctcctgggataactatcgcagcgaactggacgtcagcggcccgatgaccgaaagcggcaacgtgcgtggccgggccgtcgcggcgtatcaggacaagcgctcgttcatggaccgttactcgcgcaaaagcccggtgtactacggcatcatggaattcgacctgtcccccgacacgatgctgaccgtgggcggcgactatcaggacagcctgcccaccgcctcgagctggtccggcagcttcccgctgatcaacgccaatggcgaccgcaatagcgtaaagcgctcgttcaacaacgcggcnnaactggagcagttgggagcaatacacccgcaccgccttcgccatgctcgagcatgacttgggtaatggctgggtcaccaagttgcaactggatcacaagatcaacggctaccatgcgctgatgggctcgatccanngcgatgagccacgggcagatggcaccgccaaaatcac

SEQ ID NO: 19955 - DNA, 522 bp, Zea mays
  misc_feature (236)..(238): n is a, c, g, or t
  misc_feature (305)..(305): n is a, c, g, or t
  misc_feature (358)..(358): n is a, c, g, or t
  misc_feature (360)..(375): n is a, c, g, or t
  misc_feature (390)..(393): n is a, c, g, or t
  misc_feature (397)..(400): n is a, c, g, or t
  misc_feature (454)..(467): n is a, c, g, or t
  misc_feature (494)..(495): n is a, c, g, or t
  misc_feature (497)..(497): n is a, c, g, or t
  Coding DNA Sequence Number=SeqID_5552
aaagtggcatcgtcaatcgcgccgatgtcgaactgatggaaatcagcggcgtgtactcgttcctcgtcggcgaaaccttcatcgcgtgccgagaacccgggggctgaattgcagcgcctgttcttcccggagcgtggcgttgctgtcagcggttcgaccctggattgatgatgacccagccggtggcgatgacggtcgaggcaggccttaaggccgagcaggatgtgctcgccgcnnntctgcgcgggggagcagccgttcggcctgctgttctggcagcccagcgatcaaggcgttggtgatgnctcgtcgtttgagccgccttccggcattcgagaccgccagccaggtatcggcngnnnnnnnnnnnnnnnngtgctgctgcgggannnnggcnnnnagccggttccgcaatcggcagccacggtcaatattgcgctggtctacgcgccannnnnnnnnnnnnntgaccaagggcgcatcgaaaccggctnncngcgtttgtgccagccgatttgcgac

SEQ ID NO: 19956 - DNA, 534 bp, Zea mays
  Coding DNA Sequence Number=SeqID_5553
ggtgctgctgagcaaaccctttgagctgaaacagggcgattacgccagccagatcaaaggtgatttacccctgttggtggatgtgtgggccgaatggtgcgggccgtgcaagtcgtttgcgccggtgtttgagcaggccgccgggcagttggccgggaagtgtcgattggccaagctcgatagtgaggccaatcagcagttatccgctcagttggggattcgctcgattcccagcctgatcctgttcaagaatggccgggaagtggcgcgtcagagcggtgcgtttccgttaccgcagttgatgagctggctgcgcagtcagggcgtttgaggtaacggggcaccccggtccatcacttgccccattagcaatacgcccaattcgctcaattgatgaatggccaacgcgacatcgcgctgcttgccggtgaggtcgtcggaaaggtcgagcaagagggtggtgactgaggagaaggtttcgtaggagttgaggatcagggtttcggtggcttggcctgggctgactgtgaaaag

SEQ ID NO: 19957 - DNA, 425 bp, Zea mays
  Coding DNA Sequence Number=SeqID_5554
ggctactttgacaacatgaacgcgttcttcagtggcaacggctaccgcgtagtggaccagagcagcgtgcctgaagcggaaatcagcttcaaaaacgcctggggcatggccgacgaagacctctataaacagacgctgaaactggcagatgccgactacgccaagcagcaaccgttcctgctgcaactgatgaccacctccaaccaccgcccgtatacctacccggcaggccgcattgatatcaaatccggcgacggtcgcgacggtgcggtgaagtacaccgaccatgccatcggccagttcctggaggcggcccgccagaagccatggttcgacaacacaatctttatcttcgtcgccgaccacacagccggcagcgcgggcaaggaagacctgccgatggtgaactaccagatcccactgtt

SEQ ID NO: 19958 - DNA, 477 bp, Zea mays
  Coding DNA Sequence Number=SeqID_5555
ccgtggcgctggaactgggctatccggccgatgccgtccgcgatcaggtaagcgagatcgccgtggcggcgctggccgccgctggcgcgcccggggcccaggtgagcgtgtcctggaaggtggcggcgcatgcggtgcagaagggcctgaagccgctgcccaatgtgcgcaacattattgcagtggcctccggcaagggcggcgtgggcaagagcaccacggccgtgaacctggcgctggccctggccgccgagggcgccaaggtcggcctgctggacgccgacatctacggccccagcgtgccgaccatgctgggcgtctcgggtcgtcccgagagcctcgacaacaagagcatggagccgctcaccggccacggcctgcaggccaattccatcggtttcctgatcgacgccgattcgcccgccatctggcgcggcccgatggtcacccaggcgctcgaacaactgctgcgccaga

SEQ ID NO: 19959 - DNA, 328 bp, Zea mays
  misc_feature (281)..(282): n is a, c, g, or t
  misc_feature (284)..(284): n is a, c, g, or t
  misc_feature (286)..(289): n is a, c, g, or t
  misc_feature (291)..(291): n is a, c, g, or t
  Coding DNA Sequence Number=SeqID_5556
agatgatcgatttcgggctgcgcgccggaccttatggcgataccttgtctattgccgcgctggctgattatccccacggtctagaccttgggccgctgaagcccaacctggcagggcgcatgaaaaccgccaacggccatttgcaggctgcgccgccggtgatcctcgcagacttggcgcgctttgccgcacaaccagtgcctgggctgaatgaattgttgctgatcggccgtcgccatgtgcgcagcaacaactcgtggatgcataactaccatcggttnntnannnncnagccccgtcaccagttgctgatgcatcccgatgacct

SEQ ID NO: 19960 - DNA, 405 bp, Zea mays
  Coding DNA Sequence Number=SeqID_5557
gcggtattcagtatctaagcggtattcatcgagcaaggtgttgataaatcggcgggcttgccaggtatcaaggtctgtctctccacggccccccatcagatactctcccgttcgccacccaactggagcccatgatgctcggtttatgtccagggtgagcccgtagtagtccggagcattcacctcgctttcatcaaagtaagcccagtaaacacggcctaaagctgggtgctctgcgccaatgacaacgtaccctgttgggtccctcaaaacttcatccatcggcacgtcctaatttgtagtggttctctaatgaggtcgggggaaacgatgagctgtttcccccaacaccgacagctacacgaatgggccgaaaaattaagcccctgttttcagaattgcggt

SEQ ID NO: 19961 - DNA, 406 bp, Zea mays
  Coding DNA Sequence Number=SeqID_5558
gctccaggcccggatgaatatccagataccgatccaccgcaattctgaaaacaggggcttaatttttcggcccattcgtgtagctgtcggtgttgggggaaacagctcatcgtttcccccgacctcattagagaaccactacaaattaggacgtgccgatggatgaagttttgagggacccaacagggtacgttgtcattggcgcagagcacccagctttaggccgtgtttactgggcttactttgatgaaagcgaggtgaatgctccggactactacgggctcaccctggacataaaccgagcatcatgggctccagttgggtggcgaacgggagagtatctgatggggggccgtggagagacagaccttgatacctggcaagcccgccgatttatcaacacctt

SEQ ID NO: 19962 - DNA, 295 bp, Zea mays
  Coding DNA Sequence Number=SeqID_5559
ttcgtcaaagccttgaccgacgccggctggctgtcggcaatgatccccgaagcctacggcggctccggcctcgggttggcggaagcctcggtgattcttgaggaagtgaaccgctgtggcggcaactccggtaccgtccacggccagatgtacaacatgttcaccttgctgcgccacggcagcgaagcgcagaaaagcttctacctgcccaagctcgccagcggcgaactgcgtctgcagtcgatggcggtgaccgagcccaccaccggcactgacaccaccaaaatcaagacca

SEQ ID NO: 19963 - DNA, 161 bp, Zea mays
  Coding DNA Sequence Number=SeqID_5560
gaactcgaacgccatcaggaagagaccggcatccaactgctgtggggcacggccaactgcttcagcaacccgcgctttgccgccggtgccgcgagcaatcccaaccccgaggtgtttgcctatgcggcggcccaggtgttcagcgcgatgaatgccaccca

SEQ ID NO: 19964 - DNA, 163 bp, Zea mays
  Coding DNA Sequence Number=SeqID_5561
cacagcacatagctggaacccttgagacggtgggtggcattcatcgcgctgaacacctgggccgccgcataggcaaacacctcggggttgggattgctcgcggcaccggcggcaaagcgcgggttgctgaagcagttggccgtgccccacagcagttggatgc

SEQ ID NO: 19965 - DNA, 134 bp, Zea mays
  Coding DNA Sequence Number=SeqID_5562
aatgcaccagccttgttgccgcacttcctgcaggcattcgagcaaggcttgcggggtggtgagggtacggctggtcttggtttgcaggtcggcgtggtcgaggtagtcctgcagcgaggcgtcatccagcgccg

SEQ ID NO: 19966 - DNA, 144 bp, Zea mays
  Coding DNA Sequence Number=SeqID_5563
ttgccggcctactgcacctccatgggccgtatcctgctggcggcgctggatgacgcctcgctgcaggactacctcgaccacgccgacctgcaaaccaagaccagccgtaccctcaccaccccgcaagccttgctcgaatgcctg

SEQ ID NO: 19967 - DNA, 387 bp, Zea mays
  misc_feature (65)..(67): n is a, c, g, or t
  Coding DNA Sequence Number=SeqID_5564
ataccgatcgcttgccggagcagatcatcccgcgtaccgggcgggttcatacgtcctatcaccannncgtcgcagctaccgggcggctgtcttccagcgatccaaacctgcagaacattccggtgcgtaccgccgaaggccggcgtattcgccaggcgtttgtcgcgcccaagggctacaagctgctggcggcggactattcccagatcgagctgcgcatcatggcgcatttgtccaaggacgcagggttgctgaatgcgttccgcgacgacctcgacgtgcacaccgccacggcggctgaggtgttcaaggttgagttggctgaggtcacatccaatcagcgtcgcagcgccaaggcgatcaactttggcctgatctacggcatgg

SEQ ID NO: 19968 - DNA, 394 bp, Zea mays
  Coding DNA Sequence Number=SeqID_5565
ataacatcctgctgcgtgacgataagtcctacccgtacgtgtttctctcggacggcgacttcccacgcctgagcatccatcgcggtgccaagaagcagaagggcaagtacttcgggccttaccccagcgccggcgccatccgcgaaagcctgagcctgttgcaaaaggcgtttttcgtgcgccagtgcgaagacagtttctacaagaaccgcaaccgcccatgcctgcagtaccagatcaaacgctgcaaggcgccatgcgtaggcctggttgagccgtcggaatacgccgaggacgtgcgccattcggtaatgttcctagaaggccgcagcaatgccctggccgatgaactgtccggcgccatggagcaagcggccagcaccctggatttcga

SEQ ID NO: 19969 - DNA, 532 bp, Zea mays
  Coding DNA Sequence Number=SeqID_5566
ccaagccggtggacaacgcaatgatgtggtttcgcccggaggtcaagtccacggtggagtggagcggccagccggtcaaacatcaagaaccgggcagcacgaccttgagtccgcgcctgtcgtttgacctatggaagcagcaggtcgatggcaaggccctgtactggtcgctctcggaattgctggcggtggagagcctgcggcgcaatgccctggagcatgacctcgcgcgccaggtgcagcgtgaacatgaagccgtacgggcgcgtgatgaactggtggcagtggtctcccatgacttgcgcagcccgctgacgatcctgctgatgcaatgcggcatgatgcgcagcctggtgcccgctgacggcagcaaggccaatcgtcgcctcgccaccgcgattgaaaccatgcaaaacgcgacgtcccgcatgaacaccctgctggaagacctgatggatatctcgcgtatcgaggccgggcgctacagcgtttcgctgcaatcgctcgatgtggccgcgactcaggaacagat

SEQ ID NO: 19970 - DNA, 139 bp, Zea mays
  Coding DNA Sequence Number=SeqID_5567
ggtcggcctgcctggtgacgaaatcgcctacctcgacaaaaaactgtatgtgaacggtcaattggtgccgcatgagcgcgccggcgactatttcgaacccgaccgtgtctcgtatatcgcgcaatataaagagaagttg

SEQ ID NO: 19971 - DNA, 154 bp, Zea mays
  Coding DNA Sequence Number=SeqID_5568
atccagcaggatattgtgactaacttcgcccaacttctctttatattgcgcgatatacgagacacggtcgggttcgaaatagtcgccggcgcgctcatgcggcaccaattgaccgttcacatacagttttttgtcgaggtaggcgatttcgtca

SEQ ID NO: 19972 - DNA, 479 bp, Zea mays
  misc_feature (410)..(410): n is a, c, g, or t
  Coding DNA Sequence Number=SeqID_5569
ttctcgggcatgctggaccgcatccgcgacgacgtggtgcgcgtgctgatgacggtgcgcgtgcagtcgtccgaacaggtcgagcaggccgaggccgaagccgcccagtcccacgtgcagaacgtgcagtatcaccactccgactacgacgaggccctggcccagtcggccgaggacacgggcgcccagccggtgcgcaacgtgctgcccaaggtgggccgcaacgatccgtgcccgtgcggcagcggcaagaagtacaagcagtgccacggcaagctggtctgagcggataacgccatgctgcatgccgtcggccagaccgagttcgaccacgccgtggtcatggtgcgggaccggctggatgcgctggcgccgcacttcgagcgccagggtttccacctgagcgatanggcggtgcacaacctcggttcgtgcaaccgcctgatcgtgctcgaaggcacctacgtcgaactgctggg

SEQ ID NO: 19973 - DNA, 50 bp, Zea mays
  Coding DNA Sequence Number=SeqID_5570
cctggcgccgttggagtctgattttgaactgttcgtcagcaccaacctcg

SEQ ID NO: 19974 - DNA, 112 bp, Zea mays
  Coding DNA Sequence Number=SeqID_5571
tgggcaggctgacgccgggcatgtccagcaggctgccgggcatggtcaggcgcagggtggcgaggttggtgctgacgaacagttcaaaatcagactccaacggcgccagggc

SEQ ID NO: 19975 - DNA, 581 bp, Zea mays
  Coding DNA Sequence Number=SeqID_5572
atgggtacggtagagctgctgacacgtgaaggcgaaatcgaaatcgccaagcgtatcgaagagggcatccgtgaagtgatgggcgcaatcgcgcacttcccaggcacggttgaccacattctctccgagtacactcgcgtcaccaccgaaggtggccgcctgtccgacgtcctgagcggttatatcgacccggatgacggcattgcgccacctgcggctgaagttcctccacctatcgatgccaaggctgccaaagcagacgacgacaccgacgatgaagaagctgaagccagcaccgacgacgaagaagaagtcgaaagcggtccggatccgatcatcgcagcccagcgctttggcgcggtctccgatcagatggagctggctcgcaaggccctgaagaagcacggtcgcggcagcaagcaggcaactgctgaattgctggccctggctgaactcttcatgccgatcaaactggtaccgaagcaattcgaaggcctggttgagcgggttcgtagcgcccttgagcgtctgcgtgcacaagagcgtgcgatcatgcagctctgtgtccgtgatgcgcgcat

SEQ ID NO: 19976 - DNA, 413 bp, Zea mays
  Coding DNA Sequence Number=SeqID_5573
tggatgaagaccgacactggcgagtcgtccgggcaagcgtcttattaccagtccaccaaccgcggcaaattatccgtggccatcgacctcgccacctccgaaggccaggaactggtgcgagccctggcggccagctccgacgtactgatcgaaaactacaaggccggctccctggcgcgttatggcctggattacgcgaccctggccgagatcaatccgcggctggtgtattgctccatcaccggcttcggccagaccggcccgcgtgccgaagagcccggctacgacttcatcatccagggcatcggcggcctgatgagcatcaccggcgaacgcgacgacctgcccggcggcggcccgcaaaaagtcggcgtggcgttttccgacctgatgaccggcctgtattccaccgt

SEQ ID NO: 19977 - DNA, 585 bp, Zea mays
  Coding DNA Sequence Number=SeqID_5574
cagcgttatcgtgagttggtcgcacaacaggtggccagcgcccagcacctcgaaaccgtcagtgccagccaggccaaagcccaggcggccctggcacaagcccgcgcccaagttgcgcggcagcaggcgcagttgcaggtgttgcaggcgcgccggcaacaggcgcaggcgcaaatcgtcgagcatcaggcacgcatcggcgaggcccaggccaatctcgccctggccggtaatgcgttgaaggacaccgagattcgcgcgcctttcgacggcgtggtgggccagcgcaaggttcgtcgccagcaatacgtgatgcccggcctgccattgttggcggtggtgccggtggagcaggcctatgtgattgccaattacaaggaaacccagctgcagcacatggcgccggggcagtcagtggagatcgcggtggacagctttgccggcgcgcagtggcacggcaaagtggaaagcatcgcccctggctccggtgccgtgttcgccttgctgccgccggacaacgccaccggcaacttcaccaaaatcgtccagcggtttccggtgaaaatccgcctggagcctggcgaa

SEQ ID NO: 19978 - DNA, 443 bp, Zea mays
  misc_feature (411)..(411): n is a, c, g, or t
  misc_feature (413)..(414): n is a, c, g, or t
  Coding DNA Sequence Number=SeqID_5575
aaatggcgattgctgccatgcccggcggtggcgtgatcttcaagaaggtcgagagcatccgtgaacgcaagttcgccaacctggtggaacagaaaaccgatttcagctgcggtgccgccgccctggccaccatcctgcgccaggcctactggatggatgtggatgaagaccacatcatcaaaggcatgctggtcaacgccgatcaggacctggtccgtacccagggtttctccatgctggacatgaagcgctacctggaaagcatcggcatgcgcgcccggggttaccggatcaacgccgacacactgctaacggtgaaaatcccggtggtggtgctgctggagatccgtggctacaagcacttcgtggtgatgcagcgtgccgacaaggactgggtctacatcggcgacncnntattgggtcacaaacgctatgccaaggac

SEQ ID NO: 19979 - DNA, 427 bp, Zea mays
  Coding DNA Sequence Number=SeqID_5576
aactcgtttctaagctgctgcagaacggccgcatgctgagtcccaaggcctgggtagctggagcgactccagcagttgttcagctcggctttccagcttcggcctttcagggtgcggaagaccctgatggcctccagttgcaacaaagaaagcttcgtgtcctgccggctggcattgttagaggctacaggagcatgggccggcggcgcctgtgtcgccgaatcgctgggacgaaggcgtttgatcagggccatcagccttactccccgtccagatcttcggcatcctgcagatcgcccgggacggcgtccagcccgaggtcacggacttcctgccagcccagatcgtcgtgggggatatcacgggctccgacttcaggcaggatcttctgtgtattggtgttggcggtatcgctcatggcagtctc

SEQ ID NO: 19980 - DNA, 505 bp, Zea mays
  Coding DNA Sequence Number=SeqID_5577
agtaaggctgatggccctgatcaaacgccttcgtcccagcgattcggcgacacaggcgccgccggcccatgctcctgtagcctctaacaatgccagccggcaggacacgaagctttctttgttgcaactggaggccatcagggtcttccgcaccctgaaaggccgaagctggaaagccgagctgaacaactgctggagtcgctccagctacccaggccttgggactcagcatgcggccgttctgcagcagcttagaaacgagtttggccctgagtggctgcaaaaattcagcgtcagtcagcaacaagatgcgctgtataaggctgcgcaagaagcgctgcaggtcgaagagttactccgacacgattccaacgccacgtctgagcagatttccagggtcaaggatgatcgtaagacggcagaagcgactgccatgctgtgggagcgcggcgatgatcggagctttagcgccgatggcccgtcggtccgcttgagcatgagcgat

SEQ ID NO: 19981 - DNA, 367 bp, Zea mays
  Coding DNA Sequence Number=SeqID_5578
acgatggcatggacggcatcacaagggaacgggaacgggaacggtattgaagataccgaggctcgcctggtggataaataggttaaaaatccacacatcacggaattaatttcttcaatggaaccgccatggaccgcctgagcggcttgttgccctttgtccgcagcgccgagctgggcggctttgccgccgccggccgcgacctggacctgtcgccctcggccgtcggcaaggccgtggcgcggctggagcaggacctgcacgtgcggctgttccagcgcagcacgcgccgcatgcaattgaccgaggaaggccggctgttctacgagcgctgcaagcgcatcctggaagacctggacgaggcgca

SEQ ID NO: 19982 - DNA, 475 bp, Zea mays
  Coding DNA Sequence Number=SeqID_5579
gatccgggcccaattgcggcaaattgcgctaaatctcccggtaaagttgggcaggtcatcgctaaaaggctttatgattccgccttttggtactcctgtaacttacggcatatagctggggggctggtaatgaaactacgggcgggaatgcgctgggcgctggggacgatgctgatcgcggcagccacgtcggcggcggtggcgcagaacaaggtcgtcaacgtctacaactgggccgaatacacggctccggacacgatctcgggtttcgagaaggaaaccggcatcaaggtccgctacgacgtctacgacagcaacgacaccctgcaggccaagctcctggccggcaaatcgggttacgacgtcgttgtcccgtccacgcattacgcctcgcgccagatcgaggccggcctgttccagaaactggacaagtccaagatccccaactggaagtacctggatcccgacgtcatgg

SEQ ID NO: 19983 - DNA, 427 bp, Zea mays
  Coding DNA Sequence Number=SeqID_5580
atcgtggtcgatgccgagcatccgctgttcgtctacctgccctgcggcgtgggcggcgcgccgggtggcatcgcattcggcctgtcattgctgtatggcgcgcacgcgcactgcttctttgccgaaccggtgcagtcgccctgcttcttgctgcgcatgatggccggccatggccaattgcccggcgtgccggtgccgccgtcggtctacgacatcggcctgaccaaccagaccgaggccgacggcctggcggtgccgcgcgcctccgacctggcgtatgccgccgtcggccagtcgctggccggcgtctacacggtggccgatgacacgctctacggcgatctggcgcggctgcacgacagcgaaggcctgcgcatcgagccgtcggcggcggccggtttttccggtccgcgccaactgttgggca

SEQ ID NO: 19984 - DNA, 550 bp, Zea mays
  Coding DNA Sequence Number=SeqID_5581
tacggccccaatctcaagttgcaggccgaccacctgcacactgccgagccgcgttcgatcctgcagcggctgtcacgcaatctgcgccagttgcacctgtccaacgacgaccacctggccgctctggtggacgccgaacgcgtgctggagctgggcaacgccagcgccgccgactacctggcccgggccagtttgtatcagcgtctggattgcccgaacgccgagcgttttgacctggaacacgcgttgatgctcagcgaagacccgatccagcgcctgcgcctgaccgagcgcctggggcatttgccgcccaactctgtggtgcattgacccgcttggcgtaagctgtaccgccccatggatgaggttgtcatgcccctgcgctcccccgccgaacgttacctcgaagattttcaccaacgccagcccggcaccaccagcgcggcattcgccgaactgaaggcggtgaaatacagctcatcctatgccgcattgactgcacatgtgcccaccgcacaaagcccgttgaacgtgctggacttggcctgcg

SEQ ID NO: 19985 - DNA, 417 bp, Zea mays
  misc_feature (365)..(372): n is a, c, g, or t
  Coding DNA Sequence Number=SeqID_5582
tgaccgggcatgaccacctgatctgcatcatcagcgacttcgccggggccggtgaccgcaccctgcaattgatgaggcagctgtcggcgcacaacgatgtggttgccctgcaagtctacgacccgctggcgttgaacgtgccggataccgggcacctgatggtcacccagggccagttgcaggtggaacttgccgtacagaaacgccaggtacgccaacccctgggggactttcttggcgggcgcctaaaggacgtagccagcctgctgcgccgcagccaggtgccgctgttgatgatcagcacggcgctgcctgcagttgaccaactgcgcgatgagctgggccggcgcaatggagcgcggcgnnnnnnnncaatgtgccgagcatcgaacaactcaaggagctaggtctgccggc

SEQ ID NO: 19986 - DNA, 454 bp, Zea mays
  Coding DNA Sequence Number=SeqID_5583
gcgcgagctgccttcacgggaagccgtggcgcagattctcgaggcgttgtgtggtgcgctgttccccatgcgtttggggccggtggacctgcgtgaagaaagtgaagacttctacgtcggccataccctggatgtggcgctgaacgcgttgctcgcccaggcgcgactggagctgcggtatgccgcacggcaaggcggccaggatgacagtgaggtagacgcccatgccatccacctgatccaggatttcgccctggcattgccggccttgcgcagcctgttggacaccgacgtactcgccgcctaccacggggacccggcggcgcgcagcgtggatgaagtgctgttgtgctacccggggattctggcggtgattcaccatcgcctggcgcaccacttgtatcgggcgggcttgccgttgctggcgcggatcagtgcggaaatcgcgcactct

SEQ ID NO: 19987 - DNA, 528 bp, Zea mays
  Coding DNA Sequence Number=SeqID_5584
gtgcaaacccggcatggccagattcgcgcgttgggtacccgattcctggtgcagcgtgacgaagcgtccacccgtctggtgatgctgcattcgcgagtggaagtggtcactcaggacggcgcgcgccaaatcgtggaggcggggcagagcatgcggtttgatgagcaacacaccttcggccttggcccgctaaagggcgatgaagccggttggagccaaggacgccttgaagtccacgaccggtcgttaagcgaagtgatcgacagcctgcgcagctatcgccacgggattctgcgcctgaatcccaatgtggcgcagctgcgcctgagcggcatctatcccctggacgatacggaccgcaccctgcagctgctggagaattcattaccgattcgcgtgacgtatcacagcgcctattgggtaagtattgaggcccgttaaaccggttataaactcatagcatcttcgcctaaacaccgccctataaaaacgcgtctgccgctgctcaacccctgtagacacattcaa

SEQ ID NO: 19988 - DNA, 537 bp, Zea mays
  misc_feature (497)..(497): n is a, c, g, or t
  Coding DNA Sequence Number=SeqID_5585
cggcgtgttcctgcaactgtcggaaccggcgattgccgcgctgacggccaagggctggcgcttctacaccttcatcggcaagggtggcgcgcggttcatgtgtgcgtgggataccgaggaagagcgcgtaagagaattagccgctgatattcgggaagtgatgagcgcttgaagtaggcatcagtccctcagataatggcgaaaggccgagactgttttttgatatttctgacagcaaccaactccgctttcattgactagcctcttggaacccgaaaggaaaaggccgcctttcgggactaaccgccagccgaacagtcggccggaaacggaaatccagcagagggcaataccatggaagcacaacgctacggaaacaacctgctaggcgaaggcactatcagcaccaccgtcatcgactgggatgaattcagaaaatccgcgaaaatcggtgacaccatcagcgagccgacgaggacattgcagatcactgacanagtctatgaactgacagcatcaggccagcacttcgtcgtg

SEQ ID NO: 19989 - DNA, 140 bp, Zea mays
  Coding DNA Sequence Number=SeqID_5586
tggcaaaaactcgcctgcgccctggccacacgcggtgcattcagcatcgtcaccggcggcccgggcaccggcaagaccaccacggtggtgcgcttgctcgcgctgttgcaggcgccagcggtagagagtggtagcgcgtt

SEQ ID NO: 19990 - DNA, 143 bp, Zea mays
  Coding DNA Sequence Number=SeqID_5587
ttgccggtgggtgccgccaggcggatgcgcaacgcgctaccactctctaccgctggcgcctgcaacagcgcgagcaagcgcaccaccgtggtggtcttgccggtgcccgggccgccggtgacgatgctgaatgcaccgcgtgt

SEQ ID NO: 19991 - DNA, 522 bp, Zea mays
  Coding DNA Sequence Number=SeqID_5588
gttctgtctcttcatccagactataggcaaggaagttcgaagcgatctgggccactgcaaaaccacaaagcagtgcgccgttgaccggtgcatcatgcccggattgttcaagaacaagggtacgtagaagcagcatgacgttcaggctccatttcaaattggcagaacaaatacacgccaaataaacaacgacaataattaaaacatcaaaagcctcacaattgtttcagcgagccatcgcttgacacgtaggacttatcttattcatgcgctacaacgtttccaagactgcctattgaacgtaccattttttaacaatacgaccctggacacgcacacaacaaaatatttcaacttttgacttttctaacattcacaacctgccgctcatgcaggttaatcgaggcctcgtcttaacgagccttgccataaacattcagtagaaaagcataatgatcgagataacgagcctgacaaaaaagatgggcgggaaaaacatcgtccacgacttttcatttaatg

SEQ ID NO: 19992 - DNA, 497 bp, Zea mays
  Coding DNA Sequence Number=SeqID_5589
aagtcctacgtgtcaagcgatggctcgctgaaacaattgtgaggcttttgatgttttaattattgtcgttgtttatttggcgtgtatttgttctgccaatttgaaatggagcctgaacgtcatgctgcttctacgtacccttgttcttgaacaatccgggcatgatgcaccggtcaacggcgcactgctttgtggttttgcagtggcccagatcgcttcgaacttccttgcctatagtctggatgaagagacagaacccggcagttcacgggtatacatcgcagcgttgcgcaaaaagtccgatcggtactttctgggcgcgatagattccaaggaagacctgcagacagcgacccatgtcttcaagcaaatactgacgcttgccgcagcagccgggaccaagtccgcaaacaccggcgaagctcagattccgtatcattttattgacttgaaaggctgcaagctgccccccgccaggcctgaagatcatcactcgt

SEQ ID NO: 19993 - DNA, 454 bp, Zea mays
  Coding DNA Sequence Number=SeqID_5590
gaacgcctatggttttggcaccttggtggaccaggacggcgggcgtatttaccttgatcgcttgtcggcgttacccgccgagacccagcgtgtatggctgatcagcggcacggagccgccggatgagtttgctccgttaccgacagggtggcgccagctcagccagcaggatggcggtggcgcacgagcccggctgttcgtgctgtgtaacgcgccagcgggcgtgcaccgcgagggttgcgattaatctgcgcaacaccggagaggttcatgttcgcctggggggctagactcaggtgaaccatttctccaggaacgcctcatggaatccccagtccacaacttgccatcgttgttcaaacagctcggtttgcccgatgacccggtcagcattgagcggttcatcgcggtccactccccactcaaacccgaactgcacctggcggatgcgttt

SEQ ID NO: 19994 - DNA, 562 bp, Zea mays
  Coding DNA Sequence Number=SeqID_5591
gtgctgttcgatcgctcctacatgacccaatacagcccggtgcgtgatgccagcggcaaagtgattgcggtgctgtttgtcggcttcgactacaccgacgcgcagaacgcccagttcgacaacctcaagcgcttccgcatcggccagaccggctcccttgcgctgctggatgagcagaagcattggctggtaccgcccgctggggtgcaggcgctggatcagtcgattccggtcatgctcgacctggccgccaaacctggaaaaggccgtttctggagcgacaagaacgaagatttctacagcgtcgcggtgccgtttgaaggcggcccgtggtcggtggtggcgagcatgccgaaagccgaaattcgcgcggtgacctggtcggtggggattcgcctggcgatcggcagtttgctcgcgatgctgctggcggtgggcgcagcggtctggctgctgcgcagcaagttgcagccgttgggcgacctggtacgtcaggcagaagccctgggcgccggtgatttgagcgcgcgcttgaacgtttccagccatgacgaaatcggcc

SEQ ID NO: 19995 - DNA, 520 bp, Zea mays
  Coding DNA Sequence Number=SeqID_5592
gtgggctgctgctcactgcagagattcgcgggccgcaaagcgaggcgaccagcctgggtatcaaagtcgccgaagaactgctggaaaaaggcgccggtgccatcctgcaggcggtgtacggcgaggccggcccgcagtgacgcaatggcgtgtgctgctgacgcggcccgccgaggagtcggcggccctggcggcgacgttatctgaggaaggtattttcagcagcagcctgccgttgctggagatcgaagcgctgcccgtcacgcttgagcaacacgcgatctttcgccagctggaccgttattgtgcggtgatcgtggtgagcaagcctgcggcgcgcctgagcgtgcagttgttggcgcaacactggtcgcaacctccggcgttgccatggttcagcgtcggcgccgctacggcgaaggtgttggccgaccacggccttgacgtcagttgtccccaggaaggtgacgacagtgaggccttgcttgaattggctgccctgcgcgaggctattgcacag

SEQ ID NO: 19996 - DNA, 461 bp, Zea mays
  Coding DNA Sequence Number=SeqID_5593
ctacctgtttatcggcaacggcgtctcgcggccgatggtccacaaccccgcctatgacttcaacgacgacatcctgttgaccggcgccgcctactggggcgcgctggccgagagctggctcaagcccgcctgacgacctcttttttctgccgctggaccctttcccaacaggttgaatggagtgttcctcatgcagactgcaaaacagggcgtatcccgcacccgccaggtcgtggcggcggtgatcggcaatgcgctggaatggtatgacttcatcgtttacggctttctcgccagcatcatcgcccggcaatttttcccgtcggaggatgaatacgcctcgctgctgatggccctggccacctttggcgtcggcttcttcatgcgcccggtgggcgggattctgctgggcatgtattcggaccgtaaaggccgcaaggccgcgatgcagttgatcatcc

SEQ ID NO: 19997 - DNA, 427 bp, Zea mays
  misc_feature (394)..(395): n is a, c, g, or t
  Coding DNA Sequence Number=SeqID_5594
cttgcagcagcgtgccgatgcgcaggccgcgcagcttttcgatcacctgcgcggcgtcgaacggcggcatcagcaccgccacgtcgcgcagcgcttccacgtatttgccgccgctgccgatcatgacgaccggccccagcactggatcgacgcgcgcgcccaacgcgcattcgtgcaggccgcgctgcatccgcgccaccagccaggcgccatcccgcacgttcagcttacccaaggtttgggcctgatgggcaaacgccgcgcgcagcgcggcctcgtcgttcagtcccagcgccaccagcccgtgctcggacttgtgcggcagttgtgccgagcaggctttcaacgccaccggcgcgccgatacggcgccacgcggcgacggcctcgtcggnngtgcggcagacggcgtgctcgatcaccgccag

SEQ ID NO: 19998 - DNA, 439 bp, Zea mays
  misc_feature (29)..(30): n is a, c, g, or t
  Coding DNA Sequence Number=SeqID_5595
cggtgatcgagcacgccgtctgccgcacnnccgacgaggccgtcgccgcgtggcgccgtatcggcgcgccggtggcgttgaaagcctgctcggcacaactgccgcacaagtccgagcacgggctggtggcgctgggactgaacgacgaggccgcgctgcgcgcggcgtttgcccatcaggcccaaaccttgggtaagctgaacgtgcgggatggcgcctggctggtggcgcggatgcagcgcggcctgcacgaatgcgcgttgggcgcgcgcgtcgatccagtgctggggccggtcgtcatgatcggcagcggcggcaaatacgtggaagcgctgcgcgacgtggcggtgctgatgccgccgttcgacgccgcgcaggtgatcgaaaagctgcgcggcctgcgcatcggcacgctgctgcaaggcgtgcgtggcgatcc

SEQ ID NO: 19999 - DNA, 228 bp, Zea mays
  Coding DNA Sequence Number=SeqID_5596
gtggcgaccagttcgccctggtgcaggccgatatcgagcaaccctacgaagccgccgagctggcgcaaagcatcctcgatgacctggaggccgaattcgccctcgaccacgaacagatccgcctgcgtgccaccatcggcatcaccctgttcccggaagacggcgacagcaccgagaagctgctgcaaaaagccgaacagaccatgaccctggccaagagccgttcgc

SEQ ID NO: 20000 - DNA, 524 bp, Zea mays
  Coding DNA Sequence Number=SeqID_5597
ggattgtctgctccacgttggtcagcgccgcgatcctgccgcaaaccgccagcgccgcgatgcgcaacgctctgtaccaacgtttcggtgtgtttgcgctgttcgtcaccgacggtctgcgcggtcgcagcgagcgtgaagggtttgaacgcagcaacgtacgctttatcgccgaagccgtgggcctggaagggctgcgcagcatcacggtgttcgaagacccgcacatgcgtcggcgcaatggtcggctgacgcgcttgaacagcgagttcatgagcatcactactcgcttcaatgccttgcaccaattgctcgaacgcctgcgcagccaagaggccgatcacgtggtggccgccatcaaacccggcctgcaagacctcgcggaattgctcgacggtttttccggccgtgccctcaccagccccgacgcggcgcgcctggccaatcagttgaatacctataaggaaggcctgcccgccaaggtacgcagcctgcgcacgagcttccaggaaagtcagcccagc

SEQ ID NO: 20001 - DNA, 585 bp, Zea mays
  Coding DNA Sequence Number=SeqID_5598
caccgcgaattcgaaatcgcgattgagcaggaattcgagcggggtcttgttctcgtcgccgcgctggtcgggccgggcgccggcggccagcagcatgtccaggatctcgggcgtgccgtacagcagggccagttgcagcgacggacggcgcgattcgtaggtgatgtcgtcgagcgccggccgggtcgccagcagcgccgccagcatgcggctgcgggccggcagcgcggcctgataggcctggcgcaggcgcgccgcctcgtccgccggcatgtcccaatacacgtgcttgccgcgctcgcccgccggcctcagcagcgcgtgcagcagcggcacgccttccagcgcgtagtcgcccggctgcttcactttggccagcgcggcggtgaaggccgcctcgtcgccggcggcggcggcgctgaacaaggcgcgggtctcggcggtctcggccgcctggtattcgcggtagggcgatacgcagtcgcaatcggaccgcggcttgggtggcggcgcggccgggggcggtggcgccacggacggcggcgcggcgggcggcggcggcggatcgatctggaattcggccgg

SEQ ID NO: 20002 - DNA, 584 bp, Zea mays
  Coding DNA Sequence Number=SeqID_5599
ggccccggccgaattccagatcgatccgccgccgccgcccgccgcgccgccgtccgtggcgccaccgcccccggccgcgccgccacccaagccgcggtccgattgcgactgcgtatcgccctaccgcgaataccaggcggccgagaccgccgagacccgcgccttgttcagcgccgccgccgccggcgacgaggcggccttcaccgccgcgctggccaaagtgaagcagccgggcgactacgcgctggaaggcgtgccgctgctgcacgcgctgctgaggccggcgggcgagcgcggcaagcacgtgtattgggacatgccggcggacgaggcggcgcgcctgcgccaggcctatcaggccgcgctgccggcccgcagccgcatgctggcggcgctgctggcgacccggccggcgctcgacgacatcacctacgaatcgcgccgtccgtcgctgcaactggccctgctgtacggcacgcccgagatcctggacatgctgctggccgccggcgcccggcccgaccagcgcggcgacgagaacaagaccccgctcgaattcctgctcaatcgcgatttcgaattcg

SEQ ID NO: 20003 - DNA, 133 bp, Zea mays
  Coding DNA Sequence Number=SeqID_5600
aagatggcgcgctacctggagcgattcctgcagcgcgtgcgcgagctggacatcggccacgagccgcacaccatccactccaacggcggcctgatgtcgatcgccacggtgcgccagtatccggtgcgcacct

SEQ ID NO: 20004 - DNA, 142 bp, Zea mays
  Coding DNA Sequence Number=SeqID_5601
ccgacaggcaggtgcgcaccggatactggcgcaccgtggcgatcgacatcaggccgccgttggagtggatggtgtgcggctcgtggccgatgtccagctcgcgcacgcgctgcaggaatcgctccaggtagcgcgccatctt

SEQ ID NO: 20005 - DNA, 526 bp, Zea mays
  Coding DNA Sequence Number=SeqID_5602
ggtgcagccgctggtacaactggatgccgggcaacatcacgtgctgcgggtcctgtatgccggtgaagggttgcccggtgatcgggagtcgctgttctggctcaacgtcatggaaatcccgctgaagccggaaagccccaacagcgtgcagtttgcggtgcgccagcgcctcaagctgttctatcgcccgcccgggctcgcgggcggctcggcacaagccgtgcggcaactggcgtggagcagctctgacgggcactccattgccgtgaccaaccagagtgcctttcacctgtccctggtgaatctccagaccaataccgccggcaagactcacgcgctggacgactacctgctgctcaagcccggggagcgcaaggtcctcgacacccaagcgcctatcaatgccggaacccaaatccactttaccgaaatcaccgatatcggcttgcaggcgcgccatagcgcagccctcaagtgatagatcgcggggaacaccgacccatgccacacgttaaacacctgctac

SEQ ID NO: 20006 - DNA, 437 bp, Zea mays
  Coding DNA Sequence Number=SeqID_5603
tataccgctggctggccatcggcgacccggacgtgttccgcgccatggtcgccagcctgttcgacatggcgcgggtgtcggtcgaggtgatggtgctgttgttcggcacgctgacgctgtggctggggttcctgcgcatcgccgagggcgccgggctggtggaacggctggcgcggctgctggggccgctgttcgcgcgcttgatgcccgaggtgccgcgcaaccaccccgcgatcggcttgatcacgctcaacttcgccgccaacggcctgggcctggacaatgccgccacgcccatcggcctgcgcgccatgcgcgaactgcaatcgctcaaccccaggcccgacaccgccagcaacgcccagatcctgttcctggtgctcaacgcctcgtcgctgacgctgctgccggtgacgctgttcatgttccgcgcgcag

SEQ ID NO: 20007 - DNA, 256 bp, Zea mays
  Coding DNA Sequence Number=SeqID_5604
gtgtccaggcccagggcaattgccgccacacccgccagcatcaatgcacccaggccacggcgcagccattcaccggcgcccagggaacgcttcatgaagccaaagactttaccgccgaccagcaacgccaaggccagggaggtggcagcgcctgccgcgtaggccagcaagagcaaggtagtgccgatactggcgccttgcagcgcggcgcccgtcagcaccaaccccaggataggcccggcgcacggagcccaca

SEQ ID NO: 20008 - DNA, 290 bp, Zea mays
  Coding DNA Sequence Number=SeqID_5605
gtccgggcgcttcattcctgatcggcgtggccaccgggctgctgtgggctccgtgcgccgggcctatcctggggttggtgctgacgggcgccgcgctgcaaggcgccagtatcggcactaccttgctcttgctggcctacgcggcaggcgctgccacctccctggccttggcgttgctggtcggcggtaaagtctttggcttcatgaagcgttccctgggcgccggtgaatggctgcgccgtggcctgggtgcattgatgctggcgggtgtggcggcaattgccctgggc

SEQ ID NO: 20009 - DNA, 556 bp, Zea mays
  Coding DNA Sequence Number=SeqID_5606
ccctcacagttgcaaagccacggtgagtcggccgccagcaaagaccgtattcctaagatcgacgagtccgcggactggctgacccgcaccgccctgtgtgccgaagcgcgggaaggccggctctacttgttcatgccgccgctggagcgggtggaggattatctggagctggtggcggccatcgaggccaccgctgaagagctgcattgcccggtgctgctggaaggctacgagccgccgagcgacccgcgcctgagcaacttccgggtgacgccggacccgggcgtgatcgaggtcaacgtgcagccgtccgccacctgggacgagttggtggagcgcaccgagtttctctacgaggaagcccggcaaacccgcctcaccacagaaaaattcatgatcgacggccgccacaccggcaccggcggcggtaaccactttgtgctcggtggcgctacgcccaaggactcaccgttcctgcggcgccccgatctgctgcgcagcctgatcagctattggcataaccacccgtcgttgtcctacctgttttccggcctgt

SEQ ID NO: 20010 - DNA, 486 bp, Zea mays
  Coding DNA Sequence Number=SeqID_5607
tggagctggatattccgcccatcgagctgcacgccagcacccagaccgacatccgcaccctgggccgggccaagttcctcgaccaggccgggttctcgcaactggtgttggcccgtgagctgaacctgcaagagatccgggcgattgccgatgaaaccgatgccgccatcgagttcttcatccacggtgccttgtgcgtggccttctccggccagtgcaacatctcccacgcccagaatggccgcagcgccaaccgcggcgattgctcccaggcctgccgcctaccctacaccctcaaggatgaccagggccgtgtggttgcctttgaaaagcacctgttgtcgatgaaagacaacaaccagagcgccaacctgcgcgccctggtggatgccggcgtgcgttcgttcaagatcgaaggccgctacaaggacatgggctatgtgaagaacatcaccgcctattaccgtcagcgcctggacgagattc

SEQ ID NO: 20011 - DNA, 524 bp, Zea mays
  misc_feature (373)..(376): n is a, c, g, or t
  Coding DNA Sequence Number=SeqID_5608
aatgataaccattctctattgtaataacgagacacagccatcggcaagcgcgagtcccggcgcggctgcgcgccccgcggcgacgcgtccggttcaggccttggggccgtccgaggcaagcctgtccgcgacagcggctggcgccccgctttcgcggtgaaagaacagcggcgccaagccgcccttgccccggtccaggtactcgaacgccacccgctccccgggatgcgccgggccgccgccgtggctgaggtgatatagctcaccgcccagtcgatagacatacagcggggtccacgacgcctcctccggcatctgcacctgataggtcaggacctcatccacccggccgcgcaccccgtacttgacggtnnnncgccgcagggcccggcccggccgccccgcccaccatgccgccgccaggcacaacgcggcggcgccatacagcggccacgcgaaccaccccgcggccagcaacgccagcgccacgcccagcaacacattgcgcaacaaggtcgcatccc

SEQ ID NO: 20012 - DNA, 502 bp, Zea mays
  Coding DNA Sequence Number=SeqID_5609
ccgggtggatgaggtcctgacctatcaggtgcagatgccggaggaggcgtcgtggaccccgctgtatgtctatcgactgggcggtgagctatatcacctcagccacggcggcggcccggcgcatcccggggagcgggtggcgttcgagtacctggaccggggcaagggcggcttggcgccgctgttctttcaccgcgaaagcggggcgccagccgctgtcgcggacaggcttgcctcggacggccccaaggcctgaaccggacgcgtcgccgcggggcgcgcagccgcgccgggactcgcgcttgccgatggctgtgtctcgttattacaatagagaatggttatcattcatttgcccgcgagggcgcgcggccatgccccccacgacgcaggatcgaatcgaatcgctttatgtggatcaccacagctggttgcacggttggctgcgccgtcagctgggcaattcgttcgaggccgccgatctggcgcatgatgtgttcgt

SEQ ID NO: 20013 - DNA, 116 bp, Zea mays
  Coding DNA Sequence Number=SeqID_5610
ggcctgatgggcatgctgcccacctacgccagctggggcgtgtgggcgccggtggcattggtggcgctgcgcttcatccagggcgtggcgctgggcggcgaatgggccggcgcggt

SEQ ID NO: 20014 - DNA, 93 bp, Zea mays
  Coding DNA Sequence Number=SeqID_5611
gtcgggcttgccgtgttccatcgacagcagcaccgcgccggcccattcgccgcccagcgccacgccctggatgaagcgcagcgccaccaatgc

SEQ ID NO: 20015 - DNA, 571 bp, Zea mays
  Coding DNA Sequence Number=SeqID_5612
tgcaatacgtcctttacctgctggccctgcatcgccagcttaaggctcgcctgccggattacgactacgaccgccacgtcggtggtgcgttgtacctgttcctgcggggcacccattccgcgagccagggtgcgtatttcacccgtccgccccgggaattgatcgaaggcctggacctgctgttccaaggcaaaccgctaccacccaaggccgagcccgcctgggaacaaggagagctgctatgagcctgtcgccgttaccgcttgaggagttgacgcccctcagtcgcgccgccgacctggtgcaattgctcgatctctgggtgcagcgcggctggttgcgtgcgttggataaagccttcgtcggcttcctccatgagcttgatccccaggctgatcctttggtgttgctggccgcagccctgaccagtcaccaactgggccatggccacgtgtgcctggacctgttcgaaaccctcaaggcgccggactttgctctgtcgctgccgcccgaaggcgatgcgcaaaccggcgtcatgctgttgccatcgcaattgctcgacggcctggat

SEQ ID NO: 20016 - DNA, 268 bp, Zea mays
  Coding DNA Sequence Number=SeqID_5613
taaacccaaatctcctctgtcattttcccgggtactccaactatcgaattggctgtcaatttggagttcaaattgagcacgaccacgaactgccgaacaagtgacagccaattcgagaatatctacagatacgtgcatgcggtagaggtaggcacatattacaaatgcacaccaggcagacgcaactcgtatgtctcttgttggcatgtcgctttccaaggttttcaggcgcattcagaaaccaattcttcacgcttgacgtgcgcgt

SEQ ID NO: 20017 - DNA, 270 bp, Zea mays
  Coding DNA Sequence Number=SeqID_5614
gacctagcgggaaagacgagcgttccggcgagacgcgcacgtcaagcgtgaagaattggtttctgaatgcgcctgaaaaccttggaaagcgacatgccaacaagagacatacgagttgcgtctgcctggtgtgcatttgtaatatgtgcctacctctaccgcatgcacgtatctgtagatattctcgaattggctgtcacttgttcggcagttcgtggtcgtgctcaatttgaactccaaattgacagccaattcgatagttggagtacc

SEQ ID NO: 20018 - DNA, 459 bp, Zea mays
  Coding DNA Sequence Number=SeqID_5615
gtggtgcaaccctggccgagctcaacggcctggccagcaaggacgcagaagaagccggcgaggtccagaccgaccacgcccaccagtgcttcctggagttcgccgagagcatcctgccgcaatcggtgctgcgcgcgtcgatcaccgccgcttaccgtcgcccggaaccggaagtggtaccgatgctgatcgagcaggctcgcctgcccgcggcaatggccgaagccaccaacaagctcgcctcttcgatcgccgagaaactgcgcaatcagaaaagcgccggcggccgtgcaggcatcgtccagggcttgctgcaggaattttccctgtcgtcccaggaaggcgtagcgctgatgtgcctcgccgaagcgctgctgcgcatcccggacaagggcacccgcgacgcactgatccgcgacaagatcagcaccggcaactggcacccacacttgggcaaca

SEQ ID NO: 20019 - DNA, 446 bp, Zea mays
  misc_feature (371)..(371): n is a, c, g, or t
  Coding DNA Sequence Number=SeqID_5616
aagatggccgcgtcgtactgtgcagttccttctcgaaaaccctggcgcccggcctgcggattggctgggtagcacccggtcgttacctcgagcgcgtcctgcacatgaaatacatcagcaccggcgccaccgcgacccagccgcagatcgcgattgccgagtttctgaaaaatggccatttcgaaccgcatttgcggcggatgcgtacgcaataccagcgtaatcgcgacctgatgctcgattgggtcagccgctatttcccggcgggcacccgcgccagtcgtccacagggcagtttcatgctgtgggtggagctgccggaaggcttcgacaccctgaagctcaaccggctgctagtggatgaaggtgtncagattgccgtgggaagtatcttttccgcctccggcaagtaccggaaattgtttgcgcatgaactacgctgccaa

SEQ ID NO: 20020 - DNA, 325 bp, Zea mays
  Coding DNA Sequence Number=SeqID_5617
ttgctgcgggtattcaaccgtatctactcgatgtacccgaagcaggaagcccgcggtgaagtgctgctcaatggcgaaaacatcctcgcccccggctactcgatgaaccgcctgcgcagtcatgtcgggatggtcttccagaagccggtgccgttccccatgtcgatctacgacaacatcgcctatgccgtgcgccaccatgaaaagctgtcgcgccgggaaatggatgatcgagtcgagcaagccttgcgcggcggcgcgctgtgggatgaggtgaaagacaaactcaagcagagcgcccagagtctctcaggcgggcagcagc

SEQ ID NO: 20021 - DNA, 257 bp, Zea mays
  Coding DNA Sequence Number=SeqID_5618
cagtacccacagcagtacgttggaaacaataaggccttccattgatcacctaccaatcagtttgagcagaagaggggagttcgccagcaggccatcggctgcggcgtaaatcagcagcgcgacggcgctggcggcgacggtgacgaagccgtcgaaaaaacccaggtcacgggcaatcggcagcacgctggccagcagggccacggccaccagtgcgccgttgcgcaacagcaggatcggccgcaacggctgcgcct

SEQ ID NO: 20022 - DNA, 313 bp, Zea mays
  Coding DNA Sequence Number=SeqID_5619
aggcgcagccgttgcggccgatcctgctgttgcgcaacggcgcactggtggccgtggccctgctggccagcgtgctgccgattgcccgtgacctgggttttttcgacggcttcgtcaccgtcgccgccagcgccgtcgcgctgctgatttacgccgcagccgatggcctgctggcgaactcccctcttctgctcaaactgattggtaggtgatcaatggaaggccttattgtttccaacgtactgctgtgggtactgctgctggcgctggcgtttgccgtgatgggcctggtgcgccagattggcgtgctgca

SEQ ID NO: 20023 - DNA, 496 bp, Zea mays
  Coding DNA Sequence Number=SeqID_5620
atgaacccggaacctttcagggcattttccagaaagggcttggccgcttcaggggcggtttccagggttagcatcggtacgcgggacatggagtggtctcctcatggaatcgtgtaccaagtctgttggttataaaaaatccgctcaatagtctaaagtagcgattacttgctctagagtctttccgttagatgaattcgtccagttcgctcgtcgattggttattagatagcctcgaactcaacaccagtctgtttcacgtcggccgttactgcggcggctggcacgccagcacccacggcctggcgagcgcgagttttcatctggtggtgcaagggcagtgctggatgcacatcgatggcgacccgaccccttacccactgaacaacggcgatgcggtgttcctgttgcgggatctcgcgtaccgcttgtccagcgatggcaccgccgccggtgcccaggagtgcccgcgcaagccaatggtgccactggacag

SEQ ID NO: 20024 - DNA, 513 bp, Zea mays
  Coding DNA Sequence Number=SeqID_5621
cggcgattccgctgcgtccgggcttcctggaccgcatcgagcagcgcggcggacggctgatttccaacgtcgaagacgccaccgagcagctgcgccgcctgctgagcgaacagaacgtgcaggcgctgaccgccagcctgcagaacgccactgacatcacccagtcgttgaaagaggccagccgcgacctggcgccgaccctggccaagctggggccgctggtcgagtcgctgggcagcacctcgcgccaggcggaccgcgccgcgcgcgaagtggcggatctggcgcaacaggcgcggcagtcgctggcgcgcctgaacgcgcccgacggcgcgctggccatggccacgcgcagcctcagcgacatcgcctatgccgcctcgcgcctggacaacgagacgctgccggccatcaccggcatggcggccagcgtcaccgaggccgcgcgcggcgccacctacaccctgcgccgcgtggacaacacgccgcaatcgttattgttcgggccggcgc

SEQ ID NO: 20025 - DNA, 492 bp, Zea mays
  Coding DNA Sequence Number=SeqID_5622
acggcgcgctggaaatcgacggcaagttgaacggcccggtcgatatcggccgcgaagtcgtgctggccggcgtcggccagctgggcaccaccacgctctaccccaccgccgtgatctccccgggcaacgacggctcgcccatcggcacgctgacgatcaacggcaacctgaccttcggcgccgacaccgtctatcgcgtgcacgccgatccggccagcagcgccagcgaccgcatccacgtcaccggcgtggccgtgctggacggcacggtggcgcacgtcggccccgccggcaactacgcgccgcgcaccacctacaacatcctgacggccgacggcggcatccagggccgcttcaccggcgcctccagcgcctacgccttcctgacccccacgctcagctacgacgccaagaacgccttcatgacgctgacgcgcaacgacgtgccgatcggcagcattggcggcaccggcaacgaaaccagcgtcggcg

SEQ ID NO: 20026 - DNA, 550 bp, Zea mays
  Coding DNA Sequence Number=SeqID_5623
aaacagggcactttcgcgagtggcactaccactgacgacgccgccccagtgctcaacggcaccttcactggtacgttagcgacgggcgaagtggtgcgcatctacgatggcagcactttattgggcaatgcgacggtcactggcaataactggacgttcagcagcgacacgggcttggtggacggtaccacccacaacttccacgcggtggttgcggacagtgcgggtaacgaaggtacgtcatcggcgaacttcaccctgaccatcgacaccacacctccgacccaggtcgcgacgattgttacctacactgacaacgtcggtttgaatcagggtaactatgcttctgggacgaccagcgatgacatcacaccggtgctcaacggcaccttgtcggcggccctgggtgccaccgatatggtgcgcatctacgatggcagcaccttgttgggtaatgcgacggtcaccggtaccacttggactttcgccgggatcagcggcctgcttgacgccagtacccacacctacactgccaaggtgaccgacgtgg

SEQ ID NO: 20027 - DNA, 460 bp, Zea mays
  Coding DNA Sequence Number=SeqID_5624
tgccagttggcgttcgagcctgaatacatcggcatcgtattgccgtggctggccctcaaccgcaacggcctggtggtgttcctgcacccgaccaccggtgatgacctcaaggaccacaccgaccatgcgatctggatgggggcgatgcgcacgctagacctgtcgatattctaagttcatatattccctatatatgggactgatatttatatattgagactttgccggtcttgggtttatattcgcctcatccgctcagaacactcaggtgaagcgatgcaggcgcaattgatcgcgctcgattggggaaccagttcccttcgtgcttacaagctcggcccggcaggcgtcgtgatcgaacggcgcactttggcgtcggggatcatgcacctgcccaccgaaccccgggacatttgccggggttcgcagcagcaacgggttcgagctggcattcgacgca

SEQ ID NO: 20028 - DNA, 585 bp, Zea mays
  Coding DNA Sequence Number=SeqID_5625
gcacaagcacgacacctactaagggaacatcatggacgcttttaactaccgggacggcgagctgttcgcggaaggtgtcgcgctgtccgccattgccgagcgctttggtaccccgacctacgtgtactcccgtgcccacatcgaagcgcaataccgctcctttgccgacgcgctggaaggcacgccaagcctggtgtgctacgcggtaaaagccaactccaacctgggtgtactcaatgtcctggcgcgcctgggcgccggtttcgacattgtgtcccggggcgagcttgagcgtgtgctggccgctggcggcaaagctgacaagatcgtgttctccggcgtcggcaagagccgcgaagacatgcgccgcgccctggaagttggcgtgcactgcttcaacgtcgagtccaccgacgagttggagcgcctgcaagtggtggccgccgagatgggcgttcgcgcaccgatctccctgcgggtcaacccggacgtagacgccggcactcacccgtacatttccaccggtctcaaagagaacaagttcggcatcgccattgccgacgccgaggacgtgtacatccgtgc

SEQ ID NO: 20029 - DNA, 188 bp, Zea mays
  Coding DNA Sequence Number=SeqID_5626
gtagaccgcctgtacggcgccttcggtcttgatgcccaacatgttgtggcgggtggtctgaggcttgcgcgaggtgatcgccagcttctgtcccaggatgtggttcagcaacgtggacttgcccacgttcggacggccgacgatggcaacatagccacagcgagttgcggttgaatcagtcatggcca

SEQ ID NO: 20030 - DNA, 191 bp, Zea mays
  Coding DNA Sequence Number=SeqID_5627
tgcagcactgattgccctgggcgtggagaatggccatgactgattcaaccgcaactcgctgtggctatgttgccatcgtcggccgtccgaacgtgggcaagtccacgttgctgaaccacatcctgggacagaagctggcgatcacctcgcgcaagcctcagaccacccgccacaacatgttgggcatcaag

SEQ ID NO: 20031 - DNA, 174 bp, Zea mays
  Coding DNA Sequence Number=SeqID_5628
ggcgtactgatcggccaaggcatccgttaaactgtcggtcacccacaaaaaatgccgctgaatcagcggcattgtcttttcggaagttcagtcatgaagcgtgagcaagtcagagaacagcatgcaggggggcatatatctgcgacccatgtgattcaaaatcccgcggatacg

SEQ ID NO: 20032 - DNA, 172 bp, Zea mays
  Coding DNA Sequence Number=SeqID_5629
cttcttgaagaacacgatccactcgcccgtatccgcgggattttgaatcacatgggtcgcagatatatgcccccctgcatgctgttctctgacttgctcacgcttcatgactgaacttccgaaaagacaatgccgctgattcagcggcattttttgtgggtgaccgacagtt

SEQ ID NO: 20033 - DNA, 439 bp, Zea mays
  Coding DNA Sequence Number=SeqID_5630
cgtggctggcgttcaagccgccgctgggcctgtggccggcggtggacgaattgaccgcggatgtgcgcagcggcaccggcgaacagcgccgcgtggcgctggcgggcgacgccagcgtgcagctcaatacccagacccgcatcaacctgtcgcgcagcggcccggcgcagcagatcgatctgctggccggcgaggtcgagctgctgacgtccggccaactggtcagtctgacggcgggcgcgggtcgcgtcagcgccacctcggggtgcgtcaacgtgcgctacaccgatggcctggtgcgcgtgacctgcctggagggcagcgcccgcgtcgcgctgcgcaaggactccattgaattgacggccgcgcagcaggtggtgctgggcgccggcggcgccagcgggccgcaaagggtggaccccgaccaggtcacggcgtg

SEQ ID NO: 20034 - DNA, 477 bp, Zea mays
  Coding DNA Sequence Number=SeqID_5631
aggctaacccggacatcgatatcaaatgggtgcgcgactccaccggcatcatcaccgccaagctgctggccgaaaaagcccgcccgcaggctgacgtggtctggggcctggcggcttccagcctggcgatcctcgaccagcagggcatgctgcaaaactacgcacccaaggacctgggcaagatcggcgcgaactaccgcgacgccgccaacccaccggcctgggtcggcatggacgtgtgggctgcgaccatctgcttcaacaccgtcgaagccgaaaagcagggcctgagcaagccggtgagctggcaagacctgaccaagcctgagtacaaaggcaagatcgtgatgcccaatccggcctcgtccggcaccggcttcctggatgtcagcgcctggctgcagaccttcggcgagaagcagggctggcagtacatggacgatctgcaccagaacatcggccagtatgttcactccg

SEQ ID NO: 20035 - DNA, 570 bp, Zea mays
  Coding DNA Sequence Number=SeqID_5632
gcactttgccgaatacgagcgcgcggtgttcgacaagcacgccaagacgcagatcatggtgctgtccgagcaccagcagcagctgttcacccagtattacgggacccaggccgagcgttttcacttgttgccgccgggtatcgcccgcgaccgccgcgcgccgcccaacgctgcggaggtccgcgctgaatttcgtcgcgaattcggcctggccgaagatgatttgctgctggtgcagatcggctcgggcttcaagaccaaaggcgtcgatcgcagcctcaaggccgtggccgcgttgccgtcgaacctgaagaaacgcacccggttatttgtaatcggccaggacgaccccaaagtattccaattgcagagtgctgcgctgggcctgggcgatcaggtgcagttcttcaaggggcgcagcgatatcccgcgctttctgctgggcgcggacctgttgatccaccccgcgtacaacgaggcggccggcatggtgctgatcgaagcggtggtcgccggcctcccggtactggtgagcaaggtctgcggttacgcgttctacatcgacaaggc

SEQ ID NO: 20036 - DNA, 250 bp, Zea mays
  Coding DNA Sequence Number=SeqID_5633
ttctacttcggctcggaatccgacgaccgcaccgtggcggcagcgttcaacgacaaggtcaatccgctcggcgtgaagatcaacgccatctggtcctcggacatcggccactgggacgtgcccgacctgaccgcgccgctggccgaaagctgggacctggtcgaacagggcgtgatcagcgcgcaggacttcaaggcgctggtgttcggcaacccctaccgcttctacaccgaggccaatccggcctttt

SEQ ID NO: 20037 - DNA, 310 bp, Zea mays
  Coding DNA Sequence Number=SeqID_5634
aatcccgaggcgtatcgcttggataggccctgaactgaaatgaccggctgcactctggctcccagcgtggtggacaaccctggattttacccgtccgccggacccggcttgttcggcctggcggaacggtgtgtttgataaatgcgataaacggaccggcctgccgtacactgcccggacaggaaaaacagggcaagaatcgcccgacactggggaatcgggccggccaggcccgtcaaaaggctatgttcgcggatctgaaacacctgtcgcaccacgccgcctggcgccgccagctggaaatgctgct

SEQ ID NO: 20038 - DNA, 328 bp, Zea mays
  Coding DNA Sequence Number=SeqID_5635
caggtcgatgccgtagatgccctcgccggccgattccagcagcatttccagctggcggcgccaggcggcgtggtgcgacaggtgtttcagatccgcgaacatagccttttgacgggcctggccggcccgattccccagtgtcgggcgattcttgccctgtttttcctgtccgggcagtgtacggcaggccggtccgtttatcgcatttatcaaacacaccgttccgccaggccgaacaagccgggtccggcggacgggtaaaatccagggttgtccaccacgctgggagccagagtgcagccggtcatttcagttcagggcctatcca

SEQ ID NO: 20039 - DNA, 460 bp, Zea mays
  Coding DNA Sequence Number=SeqID_5636
ggcctgctgcgtactgagctgattttcatggcccacaagcaggcgccggatgaagccacccaggaagccgaataccgccgcgtgcttgacggcctcggcggtcggccactggtggtgcgcacccttgatgtaggtggtgacaaaccgctgccttactggccgatcgccaaggaagaaaaccccttcctcggcgtgcgtggtatccgcctgaccctgcaacgcccgcagatcatggaagcgcaattgcgtgcgctgttgcgctcggcggacaaccgtccgctgcgcatcatgttccccatggtcggcagcgtggatgagtggcgccaggcccgggacatgaccgagcgcctgcgcctggaaatcccggtggccgacctgcaattggggatcatgatcgaagtgccgtcggccgcgttgctggcgccggtactggccaaggaagtggacttcttcagcgtcg

SEQ ID NO: 20040 - DNA, 431 bp, Zea mays
  Coding DNA Sequence Number=SeqID_5637
tgggtgctggcattgctcagcctgctgctgggcggcctggccggttgggtacagctggaaagccgccaggccctgtggcatcgccagcatacccaggcgttgctggcggcggaggcgggtgtggcgttggccatgcaggccctggccgacccgctgcaacgcaagcaatggatcgccgacggccgcgaaatgccgctggtatttgatgacgcacagctccacgtaagcctgcacagcgagcgcggcaaactgtatttgaacagcgccgagacggccgactttgcccgcctggccctggcctgcggcgccacccaggcccaggccagccggctcgccagggacctggaagtgcggcgcaacgcaggcctggcgccgttccgcgtggtggaggaagtgcggcaattgcccggcatgacccaggcgctgtacag

SEQ ID NO: 20041 - DNA, 557 bp, Zea mays
  Coding DNA Sequence Number=SeqID_5638
aaggccatcgctagcttcgcgctggcctcgggtctgtcgctggcgttcgagccggcctggaccgacggcctgcacagtcccggcgtgtcgggcgaattgagtcgggccgaggcggcgcgccgcctgctggcgggaagcgggctcgagatggtggcgcgcgccgatggcagctacacgctgcgcaagacggtgtccgacgcgacgacgctgccggccatcaccgtgacgggcgcgtcgggctatgccggcgccaatccctatctggtcggcggcgccaccaccgccaccaagaccgccacgcccttgatggagacgacgcagtcgatctcggtggtgacgcaggaacgcatggcggcgcagggcgcgcagacggtgacggacgccttgagctataccgccggggtgcacgccaatgtggcgggcgacaatccgaccgacaacaccctgatggtgcgcggcttccagcagctcaccaccaatgccttcaccgacggcctgcgcaacaacaacaccgggtatttcgcgcccgagccctacggcatggaccggatcgaggt

SEQ ID NO: 20042 - DNA, 557 bp, Zea mays
  Coding DNA Sequence Number=SeqID_5639
gatccggtccatgccgtagggctcgggcgcgaaatacccggtgttgttgttgcgcaggccgtcggtgaaggcattggtggtgagctgctggaagccgcgcaccatcagggtgttgtcggtcggattgtcgcccgccacattggcgtgcaccccggcggtatagctcaaggcgtccgtcaccgtctgcgcgccctgcgccgccatgcgttcctgcgtcaccaccgagatcgactgcgtcgtctccatcaagggcgtggcggtcttggtggcggtggtggcgccgccgaccagatagggattggcgccggcatagcccgacgcgcccgtcacggtgatggccggcagcgtcgtcgcgtcggacaccgtcttgcgcagcgtgtagctgccatcggcgcgcgccaccatctcgagcccgcttcccgccagcaggcggcgcgccgcctcggcccgactcaattcgcccgacacgccgggactgtgcaggccgtcggtccaggccggctcgaacgccagcgacagacccgaggccagcgcgaagctagcgatggccttgccca

SEQ ID NO: 20043 - DNA, 341 bp, Zea mays
  Coding DNA Sequence Number=SeqID_5640
tgaccatcgggtaaaacagcgtatcctgcaaatgaggcggaatgcccggcccgttatcttccgcttcccccaaaggagacaggcatggccaagcagaacgaaaccgcggtgcgcaaagtcgtcgccgcgtcgctgatcggcgccaccatcgagtggtacgacttcttcctgtacggcgtggtcgccggcatcgtgttcaacaagctgtacttccccactggcgacccgctggtctcgaccatgctggcctacaccaccttcgcggtgggcttcatcacccgcccgctgggcgggctggtgttcggccatttcggcgaccgcatcggccggaaaagcatgct

SEQ ID NO: 20044 - DNA, 110 bp, Zea mays
  Coding DNA Sequence Number=SeqID_5641
acgatggcgcgggtcttgggatcctggaagctgaacggctcggccgtgcccatggtgccgcagatgaacttgccgcgcgccttgatgtcctgcagcgtgtccgcgtgggc

SEQ ID NO: 20045 - DNA, 84 bp, Zea mays
  Coding DNA Sequence Number=SeqID_5642
cggacacgctgcaggacatcaaggcgcgcggcaagttcatctgcggcaccatgggcacggccgagccgttcagcttccaggatc

SEQ ID NO: 20046 - DNA, 489 bp, Zea mays
  Coding DNA Sequence Number=SeqID_5643
ggcgcagtaggcaagcaccagcatgcccatcagccaggtccagtaagccgggattgccgccggttcgatgccttgatacaggcgcaatggcaggccaatcaaactgccggccaccaaccccactgccaggcccacagcgcgattgcccttgaacagcaccgtcagttgccataactccggggccaggcgcgcgagcagtgcgatcagcccaagggataagccgcccagcgccgccagcacgaagggattggccgtgaactggatctgcacctcgcggctcagcgaccaaatgcccaacggcgtcatcgcatcgcgcatcagcacgaaggccaacagcagaataacgatgcgcacgcccggcaatgtttttggcgtgaggccgaaccacaggccgaacaggatcagccctggcagcagataaatcccatagtgaatcagcactgtaaaagcgtcggcaatcactcggtgtcagccctgtgctacagcgat

SEQ ID NO: 20047 - DNA, 555 bp, Zea mays
  Coding DNA Sequence Number=SeqID_5644
aggtgcagatccagttcacggccaatcccttcgtgctggcggcgctgggcggcttatcccttgggctgatcgcactgctcgcgcgcctggccccggagttatggcaactgacggtgctgttcaagggcaatcgcgctgtgggcctggcagtggggttggtggccggcagtttgattggcctgccattgcgcctgtatcaaggcatcgaaccggcggcaatcccggcttactggacctggctgatgggcatgctggtgcttgcctactgcgccaatgcgctggaagaggtgttgtttcgcggcttcttgcagggctatctcgaacagcacgttaggccgctgcgtgcggcgttgctcagcgggctggcgttcgccgcgtgccattcatttttggccctgagcgtgacgcaactgggctggccagtgttggcttttaccctgattgaaggcgtggcctgcgggctggtgcggatgcgttacggcgtggtggcggcgacggccacccatggcacggcgatcttgctgattgccgtaccgatggtgtgagccgtctcag

SEQ ID NO: 20048 - DNA, 577 bp, Zea mays
  Coding DNA Sequence Number=SeqID_5645
aatcctaccctgatcacatttgtgatctatatcgctgccatggtgctgatcggcttcatggcctatcgctccaccaacaacctttccgactacatcctcggcggtcgcagcctcggcagcgtggtcaccgcgctctcggccggcgcctcggacatgagcggctggttgctgatgggcctgcccggcgcgatctacatgtctggcctgtcggaaagctggatcgccatcggcctgatcgtcggcgcctacctgaactggctgtttgtagccggccgcctgcgggttcagaccgagcacaacggcgacgccctgaccctgccggattatttctccagccgtttcgaagataaaagcggcctgctgcggatcatctctgcggtggtgatcctggtgttcttcaccatttactgcgcttccggcatcgttgccggcgcccgcctgtttgaaagcaccttcggcatgtcctacgagaccgcgctgtgggccggtgctgcggcgactattgcctacacctttgtgggtggtttcctggcggtgagctggactgacaccgtacaagccacgctgatgatcttcg

SEQ ID NO: 20049 - DNA, 468 bp, Zea mays
  Coding DNA Sequence Number=SeqID_5646
agaccggtgtctacaaacacctgctcaccggcgtgtcgttcatgttgccgatggtggtggcgggcggtctgctgatcgccctgtcgttcgtattcggcattcatgcctttgaagaaaaaggcaccctggccgccgcgctgaaaaccgtcggcgaccaggccttcatgctgatggtgccgctgttggcgggttatatcgcctactcgattgccgaccgtccgggcctggctcccggcatgatcggcggtctgctggccagcaccttgggcgcggggtttatcggcgggatcttcgccggtttcctggccggctactgcgtcaaattcatcagtcgtgcgatccgtttgccccagagcctcgaagccctcaagccgatcctgatcatcccgttgctggcgagcctgttcacgggcctggcgatgatttacctggtggggccgccggtggcgaagatgcttaccggcctca

SEQ ID NO: 20050 - DNA, 416 bp, Zea mays
  Coding DNA Sequence Number=SeqID_5647
tgtacagcggccagccgttggcattggtgattgccgataacctggagctggcgcgtcatgccggctctttggttgagatcgaatacacagccgaaccttccgagaccgacctgctggccttgcaggaccaggcgcacccttcgccacaaacaccgcccaagccgcgcggcaacttccaggccgaatggaccggcgccgccacgagcctggatctgcactacagcacgcccatcgaacaccacaacccgatggagccccacgccagcaccgtgctgtaccagccggacggcaccctgcatatccacgacaagacccagggcccgcagaactgccaggcctacgtgcagaaagtcttcggcttggataaaagccaggtgcgaatcttcgctgcatttgtcggtggtgcctttggttca

SEQ ID NO: 20051 - DNA, 471 bp, Zea mays
  Coding DNA Sequence Number=SeqID_5648
atcacctgatggatgggctggactttggtgacgcggtttcccaggacatcaagggcgccgtgcagtacttgcaggcggattcgaaaaaagtcggcgtgaccggttactgcatgggcggggcgttgacgttgctggcgttgaacgcgattccggaattggcggcgggcgtggtgtggtacggcttcccgccgctggaatacctggatgcttcgaagatcaaggcgccgctgatcgggcattggggcacacaggatgccttcttcaacatcgacaccgtggcggagctggagtcaaaactgcacgcggcgggtgtggacgcgacgttccatcgctacctggcgcgccatgcgtttgccaacgagactgcgattggtgatggccgaattgcggatacgcaatacgatgccgcctggtcgcaattggcgtgggatcggacgctgacgttcttcggcaagaccttgtggcaggcat

SEQ ID NO: 20052 - DNA, 458 bp, Zea mays
  Coding DNA Sequence Number=SeqID_5649
tgggccaactgtatgacgaagcactggcaccgattggcctgaaggccacacaggtcggcttgctgggtgaaatcacccggctgtcggcggttgacgagcaggcggggccgacgttgcaggaggtggccggacgcctggcgatcctgatgtcggcgctgacccacgccatgaagccgctggtgcgcgacgggatcgtcgagctacgtccggacgccctggacaagcgcaccaaacgctgtgtgctcacgcccaagggcgaagcgctgttcaatgaggcgctggtgttctgggcgtctgccaacaaccgggtggaggaggtgctggggcatgattcggccgcgcagttgcgcggcatggcagaccatatcgcctccgacgcgtttttggcggactacaacagccagtccgcgcaggcataagccagatcctttcgttattagacagacgccgttcgcgca

SEQ ID NO: 20053 - DNA, 589 bp, Zea mays
  Coding DNA Sequence Number=SeqID_5650
ttgtagtccgccaaaaacgcgtcggaggcgatatggtctgccatgccgcgcaactgcgcggccgaatcatgccccagcacctcctccacccggttgttggcagacgcccagaacaccagcgcctcattgaacagcgcttcgcccttgggcgtgagcacacagcgtttggtgcgcttgtccagggcgtccggacgtagctcgacgatcccgtcgcgcaccagcggcttcatggcgtgggtcagcgccgacatcaggatcgccaggcgtccggccacctcctgcaacgtcggccccgcctgctcgtcaaccgccgacagccgggtgatttcacccagcaagccgacctgtgtggccttcaggccaatcggtgccagtgcttcgtcatacagttggcccagtcgcctggcggcacggcgcagtgcgttgttggtgcacgccacatcgccgagcagactcaaaaggtcggcgcgatcatcaggcttgtcagtcttctcaatgggcattttcagctcctccatgcctctagaatgattgagtactaaaccattgacaaggacaaacgccaagcctataacttgagccctcaaca

SEQ ID NO: 20054 - DNA, 175 bp, Zea mays
  Coding DNA Sequence Number=SeqID_5651
gtacctgatgcagtttcatcacgtgatggaggatgacgccgcatgaacaaggaaccggaattcctggccaaggggcacgatcccgccgatccgagcccctggctggcgctgtacctggatcgcagcacgccgctgccggacaaggtcaagaaggcctggctgaccgattcgagct

SEQ ID NO: 20055 - DNA, 201 bp, Zea mays
  Coding DNA Sequence Number=SeqID_5652
ggaacggcagcaggtactggcgcgagccgcagctcgaatcggtcagccaggccttcttgaccttgtccggcagcggcgtgctgcgatccaggtacagcgccagccaggggctcggatcggcgggatcgtgccccttggccaggaattccggttccttgttcatgcggcgtcatcctccatcacgtgatgaaactgcatcag

SEQ ID NO: 20056 - DNA, 391 bp, Zea mays
  Coding DNA Sequence Number=SeqID_5653
gggccacaagtttgccggcccgcaggatgccaaccacctggcagccatcctggtgggcgcaccgtccctggacggcaagccggtgggcaataaccgtttctatggggccaacgacccacggcgcaataccgggttgtcgttgggctactgaggtcaatcgcgcctgaaaacggaacgaccgaacaccttccgggctctactccaagagccctggaaggacccttcccatgaaagcgctgaagatcgcgaccttcaacatcaatggcatccgcgcccgcctgcccaatctgctggaatggctggcgcgggaacagccggatattgtctgcctgcaagaactcaaggcgcccgacagcctgtttcccttcaacgactttgacgccgccggcta

SEQ ID NO: 20057 - DNA, 279 bp, Zea mays
  Coding DNA Sequence Number=SeqID_5654
gcgagccaacgtttacttcgacaattcgattccggatggcaaaggcggctacgaagatcgtggcggtttttgggcgaatgtggagtggtggcacaaggacgccgagcattattcgcaactgttccagaaaggtatgcgagtgctggtttccggtcgcgccgttatggaccgttggaagaacgacgatggcgaattcgaagctttgaaaatccaggccagccgggtcggcatgctgccacaccgcgtgaccatggtgaatctggcgccttcgcaaaacca

SEQ ID NO: 20058 - DNA, 285 bp, Zea mays
  Coding DNA Sequence Number=SeqID_5655
attcgggtctgttggactgttgcgaattctggttttgcgaaggcgccagattcaccatggtcacgcggtgtggcagcatgccgacccggctggcctggattttcaaagcttcgaattcgccatcgtcgttcttccaacggtccataacggcgcgaccggaaaccagcactcgcatacctttctggaacagttgcgaataatgctcggcgtccttgtgccaccactccacattcgcccaaaaaccgccacgatcttcgtagccgcctttgccatccggaatcgaat

SEQ ID NO: 20059 - DNA, 582 bp, Zea mays
  Coding DNA Sequence Number=SeqID_5656
gtccaatccgaaatcaccaagtggggcgcggcggccaaggcctccggcgcccgcatggactagcgtccggtatcaactcccccccgcgcgccgggcggcgccgggggttcaatacgatgggaaacccgcagcgatgacttcacccttgcccaaccgctttcgccaacgcatcctggcgcgcgagcgcctgatcggtttctggatgtgcatgtccagccacatcaccgcggaagtcgcgggcctggccgacttcgactggctgctgctggacggcgagcattcgcccaacaccgtgccgatgttcctgcagcagctgcaggccctgcagggcagcgccagcgccgccatcggccggccgacctggaacgatccggtcgagatcaagcgcctgctcgatatcggcttctacaacctgctgatccccttcatcgaatccgaggacgacgcgcgccgcgccgtggccgccacgcgctatccgccgcagggcatccgcggcgtggccggcatgcagcgcagcaaccgctacggcaccgtgccggattacttgaagaccatcaacgacaacatctgcgtgctgctgca

SEQ ID NO: 20060 - DNA, 516 bp, Zea mays
  Coding DNA Sequence Number=SeqID_5657
aagcgcctggcctagaggctccggaagtgttgggtgaagaggtcgatgtggccctggctcaagctccggtgcgcaatgagcagaagctgggtcgcaatgaactgtgctggtgcggttcgggcaagaagttcaaacactgccacggcgaaatcaactaagattttcgcctgacgctgcaacaccccgcgccgcgaccggcatcagccgtcgcggcgttttgccattttgtcaccgtcgagaatgacgggtcacacatccactatttttaggagcgcattcatggctgttggtcttggtcctttgcccacgttgcacccggttgccggttttgaactcggtattgcttcggccggcatcaaacgcccggggcgcaaggatgtggtggtgatgcgctgtgccgaaggctcgaccgtcgcgggtgtgttcaccctgaacgcgttttgcgcggctccggtgattttggccaagcagcgggttgaaggcccggtgcgttacctgctgaccaacactggcaat

SEQ ID NO: 20061 - DNA, 468 bp, Zea mays
  misc_feature (395)..(397): n is a, c, g, or t
  misc_feature (414)..(416): n is a, c, g, or t
  misc_feature (427)..(428): n is a, c, g, or t
  misc_feature (430)..(430): n is a, c, g, or t
  misc_feature (443)..(443): n is a, c, g, or t
  Coding DNA Sequence Number=SeqID_5658
tgtacgaagtgaccgaagccctgatggtgcccgatccttccctcaccatccgccagcgcgccgtagcgtcctggccgctggcgtggcaaggccagaaccagcgcgacatccttgtcaccttgggctacgacgtcgacatcccatggagagatctgccgaaaaagcagcgcgactggatcctcttcaccgaagaaacccccaccgtcccggtatatgccggcttcacgcccgcgcaaacccgcgacgccctcaaacgcaaactcgaacccagctaccaaggcaccttcaccggtgctcgacgctacatcctgcacaccttcacccattcccaaagcgccctgatgaaaaagcgcgtgtcgcaattcatgcaaggcagcccatgcccgctgtgcgannncaaacgcctgaacaagnnngcgctgtcggnnanatttgccggcgtngacattggcgagctgtcgcaaatgt

SEQ ID NO: 20062 - DNA, 502 bp, Zea mays
  misc_feature (297)..(298): n is a, c, g, or t
  misc_feature (300)..(304): n is a, c, g, or t
  misc_feature (306)..(309): n is a, c, g, or t
  Coding DNA Sequence Number=SeqID_5659
accgacttcggcctgaaactggcgcgccagttcggcctgaaggtggtcgagccgcggccggcgctggtgccgctgaccttcgacgccgcgcactggcagccgctggccgaactgtccggcgtggcgctggaggtcaacctggccacggggcagggcaaggcgcgtggcgagttcctcgaggacctgctgttcacccatcgcggcctgtcgggcccggccatcctgcagatctccagcttctggaagccgggcgagcccatcgtgatcgacctggcgccggggcgcgacctggccgcnnannnnntnnnngccaagtcgggcaaccggcagcagttgcacacggtgctggccggcctgtggcccaagcgcctggccgaccgctggctgcagctggcggagcagggcggcaagccgggcctggcggcgctgcgcctggccgacgcgccggacaagaccctgcgcgcgctggcgcaggacattcaccagtggacgctggtgccca

SEQ ID NO: 20063 - DNA, 484 bp, Zea mays
  Coding DNA Sequence Number=SeqID_5660
gattgaaatcgcgtcgtggcgcaatatcgtgcccaacgtgtggtcgctgcatatccgcgatgcgcactcgccaatgtgctttaccaacggcaagggcgcgaccaaggaaggcgcgctggcgtcggcgttgggcgagtttatcgaacgactgaactgcaacttcttctacaacgaccagttctggggcgaagacatcgccaacgcggcgtttgtgcattacccggatgagcgctggttcaagcccggccgcaaggacgaactgccgccggaaattctcgacgcccattgcctgcatatctacaaccgcgatggcgagctgcgtggctcgcacctgtacgacaccaactccggcaacgaggagcgcggtattgtttcgctgccattcgtgcgccagtccgacggcgaggtggtgtatttcccgtccaacctgatcgagaacctgtacctcagcaacggcatgagtgccggtaacaccctggctgaa

SEQ ID NO: 20064 - DNA, 327 bp, Zea mays
  Coding DNA Sequence Number=SeqID_5661
caccggctggacctcggagatcgtcaacagccagaaactcaaggcttacggcctgaccgacaccttcgtcaacttccgcaccggctccggcgcggcgctggatgccgaggtcgcttcgtcgatccgacgcggcaaacctgtgctgttctactactggtcgccgacgccactgttggggcgcttcaagttgatcaaactggaagagccaccgttcaacgccgaagcctggaagaccctggccgacgccaacaacccgcaccccatcggcacccgctcgatgccagcgcacctggcgattggcgtgtcggcgtcgttcaaggcgcagta

SEQ ID NO: 20065 - DNA, 481 bp, Zea mays
  Coding DNA Sequence Number=SeqID_5662
aaggcctacagcgacctgggtcaggcccatatcgtgcgcgacctggccaatgatgacctcaagcgcacccggcaaatgctcgacctgggcaagcgtcgcctgaactccgggatcgacagccagtaccagtaccagcaaaccgagagcctggaagccagctcccagtcgcaactgatcgatgcggaaaaacaactgcagagcgccaagatcgccctcgccgtgttgctcggcaaaggtccggatcgcggcagcgaactggtacgccccaacgtgctcaagcccagcgcggttgccgtgccttccgtattgcctgccgagctggtgggccgtcgtccggacctgatcgccgcacgctggcgtgtcgaggctgcaagcaagaacatcgatgccagcaagacccgtttctaccccaacctcaacctgagcgcgagcgccggggccgagtcgttgctgggggatgcgatgtttggttcggccagcc

SEQ ID NO: 20066 - DNA, 123 bp, Zea mays
  Coding DNA Sequence Number=SeqID_5663
aaacccggggtttgtgctgaagcagcggtcagcgacatcgcctgcggcttccacggcccgatgccgtcggcgtaggtcttgacctcggccaacccggccggtgtcagcatcgcaccaaaggag

SEQ ID NO: 20067 - DNA, 135 bp, Zea mays
  Coding DNA Sequence Number=SeqID_5664
tacagctggaccgtcgcgggcgatccacgctcctttggtgcgatgctgacaccggccgggttggccgaggtcaagacctacgccgacggcatcgggccgtggaagccgcaggcgatgtcgctgaccgctgcttca

SEQ ID NO: 20068 - DNA, 365 bp, Zea mays
  misc_feature (312)..(312): n is a, c, g, or t
  misc_feature (314)..(315): n is a, c, g, or t
  misc_feature (318)..(318): n is a, c, g, or t
  misc_feature (334)..(335): n is a, c, g, or t
  Coding DNA Sequence Number=SeqID_5665
tgcgccgcttgcagtcagccaagacgctggaaagtttgtaccagacctgcgtcaccgagattcgcagcctcaccgggtatgaccgggtcaccttgtaccgcttcgagcaggaaggccatggcaaggtcatcggtgaggccctcagcgagggcatgcagccgtacctgggattatgtttccctgcttcggacatcccgccccaggctcgtgagttgtaccggctgaactggatccgcgtgattcccgacgccgagtaccagccggtgccgatcctgccggccttgcgccccgacaacggccagcccctggacntnngcntcgccgtattgcgcanngtgtcgccggtgcactgtcactatctgaaa

SEQ ID NO: 20069 - DNA, 564 bp, Zea mays
  Coding DNA Sequence Number=SeqID_5666
tacatgatgcgcctggtgcgcaaagggcctgtgacccacgaaagcaccgagcctactcacggtggccctgggcagaaacgcacaccggcccgtccgttgtcggcggctgatgacagtgccgatgccgatcacggcgacaccttgaacaaggggaactgagccatgggtattgatcttccgctgatctgggccgtgatcatcatcttcggcatcatgatgtacgtggtcatggacggctttgacctggggatcggcattctcttcccgttcatcccgggcaagaccgaccgtgacgtgatgatgaacaccgtcgcccccgtgtgggacggcaacgaaacctggctggtactcggcggtgcggcgttgtttggcgcgttcccgctggcctattcggtggtgctctcggcgctgtacctgccactgatgctgatgctgatcgggctgatctttcgaggcgtggcgtttgaattccgcttcaaggccaaggacgacaagcgtcacttgtgggacaaggccttcatcggcggctcgctggcggcgacgttcttccagggcgtagcgctg

SEQ ID NO: 20070 - DNA, 537 bp, Zea mays
  misc_feature (507)..(512): n is a, c, g, or t
  Coding DNA Sequence Number=SeqID_5667
tgatcaacgacagcgccgaatggaaggactaccgcgccatcagccccgagctgaacccggcaccgtcggtgatctggactcgccgcggcgagaacgacacccaggccaaactcgacccgatcatcaaggagctgcaccgcagcggctggctgatcgacgcccagacccgcaatcacatcaccccggcgtccccggcgctggtggaattgcagaaacagttcaagggcgcctgacacatgacattgaaaaccctgactgccttgggcctggcactgtgcgcaagcctggcccacgccgacgccaccctcgacaagatccagcaacgccacgccatcagcgtcggcgtgatcctcagcggcccgccgtttggcaccctcgaccccaagaccggcgaacacctgggctacaacgtcgagctggccaagggcctcggccaggcgctgggtgtggagaccaagaccgtctcggtactggcgcccaaccgggtgcagttcctgcaacaaggcnnnnnncgatgtgctgatcgccaacatgcag

SEQ ID NO: 20071 - DNA, 404 bp, Zea mays
  Coding DNA Sequence Number=SeqID_5668
tggtttaacagtgcgggcttaacctgtgggcccgccccacccaagctactggtcacagtccctggtgcagccagttgcgcaggcgctgaagatggtgcaccgggcagcacgtcccgagctttagccgcggcttcgggattgatcaggcgttcggcaagcgcatcgtccgagcgggcatggagccggtcacgggcgcctttataaccacctgccacccccttgcccgcaaaagcaagaaaacgccctgccagtagatcggccatggccgtgccgaccttttcaacagaaccgctttcatcatcggcttcggctgtgcgtcgcgcagtggagctgttgcccgtcgcacgctgacggagaccagatgaggccacttcctggtcaagaaagctattccactgggtcct

SEQ ID NO: 20072 - DNA, 595 bp, Zea mays
  Coding DNA Sequence Number=SeqID_5669
ggcgttttcttgcttttgcgggcaagggggtggcaggtggttataaaggcgcccgtgaccggctccatgcccgctcggacgatgcgcttgccgaacgcctgatcaatcccgaagccgcggctaaagctcgggacgtgctgcccggtgcaccatcttcagcgcctgcgcaactggctgcaccagggactgtgaccagtagcttgggtggggcgggcccacaggttaagcccgcactgttaaaccatgcagcatcgcccaggttacaggttcgccaggacgatgaggatcaggatgcccctcaatcagttgcgcgtccccagcctggcggaggatctcgacttattgaaactaaaggggctccgtccggtgaagctaaacctccggcatcgccagaagaagtacctggtcgaaacgaccttttgccctcatcgagagctgaccgggcgagcctgccgccggcagaggcactggatctggccgaccatagtgcagcgacctcgcccgacaatgacctgcctgagccgacccaggctcaaaaggacgctggcaactaccgcaaagggcatatcaagctgcaagggctggatatttccat

SEQ ID NO: 20073 - DNA, 572 bp, Zea mays
  Coding DNA Sequence Number=SeqID_5670
caaccaggctgagggcgtcatcgaatcgcacttcggtatctttgcactgctggcggtgctgaccttctaccgcgactggctgcccatcctggtggccgccgccaccatcgcggtgcaccacgtggtgttccatgccttgcaacaccagggtttcccggtgtttgtgatggagcatcacgggggctggagcatgattttcgtccacgcgttctacgtggtgatggagacggtcgccctgctctacctcgcggttcacagccagaaagaggcggtagaaagtcaggagatgctcgaaaagatgctcgccgtcaccacccagttcagcggtgaggccgccaagggcagcccggaaaaagctcatgtctcactggcgacgcgtttcgaccactttctgacccagatcaccggcctgatagacggcgtcgcccgcgactcccatggcctcggccaactcggccaggaactggcccacgccagcggcaccctggaaaaaggcgcgcgccatcaactggcggaaatcgcgcaaatgaccgactccatgcagcgcatggaagacgccatgggccacatcg

SEQ ID NO: 20074 - DNA, 281 bp, Zea mays
  Coding DNA Sequence Number=SeqID_5671
gggcgctagtgctcagcttcaacgcgctggagcagtactaccaggatcagggccgcgactgggaacgctacgccatgatcaaggcgcgggtggtggcgggtgaccaggtggctggcgcgcaactgctcgacatgctgcgaccgtttgtctaccggcgttacctggacttctccgccatcgaagcgctgcgcaccatgaagcagttgatccagcaggaagtgcggcgcaagggcatggccgagaacatcaagctgggctcgggcggcattcgtgaagtcgaa

SEQ ID NO: 20075 - DNA, 327 bp, Zea mays
  Coding DNA Sequence Number=SeqID_5672
aatgacggcggtggcaagtcttgcaccgcgtcgaaacgagcaaagaacaggcttggtgtgtgcccgggcagcgcgaccagaggcgccgagcccgagcaacaccagcaatgctgcatggtggagtgatcgtcctgctgcggcgccggaatctccagcttgcccagggcaatggctgtcagtttcgtgccattggaggagcagaaactgccccagagcagttggtcgagggcattgttcgaacgttgcatcgccccggccatcggcatggcaaacacattgaacagcactgcaaagcaggcgatccaggcaaatgtttttcgttgacgg

SEQ ID NO: 20076 - DNA, 534 bp, Zea mays
  Coding DNA Sequence Number=SeqID_5673
aaaaacatttgcctggatcgcctgctttgcagtgctgttcaatgtgtttgccatgccgatggccggggcgatgcaacgttcgaacaatgccctcgaccaactgctctggggcagtttctgctcctccaatggcacgaaactgacagccattgccctgggcaagctggagattccggcgccgcagcaggacgatcactccaccatgcagcattgctggtgttgctcgggctcggcgcctctggtcgcgctgcccgggcacacaccaagcctgttctttgctcgtttcgacgcggtgcaagacttgccaccgccgtcattgcaatcccccaccccgcgccagcaatggccgagccttaacccccgcgcctctccaacggtctgatttcttcgcaagtgaactgcgtttagaaccgttctggagaactgccatgctcaaatcttccctgcttctggctgcgttgctgctgccggtgtgtgctgctgccaatgccgaagacttcaaggtcggcgaactggtggtcagcgaaccctggt

SEQ ID NO: 20077 - DNA, 537 bp, Zea mays
  Coding DNA Sequence Number=SeqID_5674
cttgaattgattcgcgatgccctggggcgtcgcaagaccgaaaacggccagaaagccgcagaaatgattgtgctcaatgccggtgcggcgctgtatgccgcggatcacgcctacagtcttaaagagggtgttgccctcgctcatgatgcattgcataccgggctggcgcgcgaaaagctcgaagaactgggtgcgtttactgcggtgttcaaagtggagaatgaaggatgagtgttccgaccgttctggagaaaatcctggcccgcaaggcagaagaagttgccgaacgccgtgcccgggtcagcctggctgaactggaaggcctggcgaaaaccgctgatgcaccgcgcgggtttgccaatgcgctgatcaagcaggccaaggaaaagcagccggccgttatcgctgaaatcaaaaaggcttcgccgagcaagggcgtgattcgcgagatcttcattcctgaagacattgccaagagctatgaaaagggcggtgcgacgtgcctctcggtgttgactgacatcgacttcttccagg

SEQ ID NO: 20078 - DNA, 447 bp, Zea mays
  Coding DNA Sequence Number=SeqID_5675
gctgatcgatcagtaccaagggtacgggcagatgttcaagcgcctgttttccaaacagccgattgccgccgaattcgtcatctataacgtggtgcagggcgaatacccggcggatgaagaagtgttcgacgcgtacctcgtgacgggcagcaaagctgactctttcggcaccgatccctggatccagaccctcaagacctacctgctggaccgccatgcccgcggcgacaaactgatcggcatctgcttcggccaccagttgctggcgctgctgttgggcggcaagaccgagcgggcgaccaagggttggggcatgggcatccatgactacaaactgaacgccaaggcaccgtggatgagcccggtggtggaagaattgacgctgttgatcagccaccaggaccaggtcaccaccttgccggaaaacgccacagtgatcgcttccag

SEQ ID NO: 20079 - DNA, 586 bp, Zea mays
  Coding DNA Sequence Number=SeqID_5676
tggagcaacgatcacccgcaggcgttcgccgccgccatggccaaaatcaccggcttgccgctggaggtgcacgtagccgtggccaacgccacccatatgcaaccggtggcgattgacgactcggtgatcagcggcctgcaaaccaccgccgacatctatcaggacgaaggcctgctgaccaaacacatcgacgtctcccaaggcttcgacaaaagcttcaacgccaagcgtgccccgcttacccaggcttcccgctaaaaggagaaagaacatgagcaaacgccaactgaaactcggtgccatggtgcacggcgtcggtcacggctggggcgaatggcgccacccgcaggcgcaacccaatgccagcgtcaacttcgggttctacaagcatcaaacgcaactggccgaaggtgcgaaattcgacttcgtgttcatcgccgacagcctgcatatccatgagaaatccagcccccattacctcaaccgttttgagcccctgaccatcctttcggccctcgccgccttgacctcgaatatcggcctggtggcgaccgtcaccgtgagctacaccgaaccgttccaggta

SEQ ID NO: 20080 - DNA, 442 bp, Zea mays
  Coding DNA Sequence Number=SeqID_5677
tttgcccttgattcgtcctgaacaccatcccttccctgtgcgaaacgctgtgaaattttccggccgctgcgaattgttgtgaagccggcgataaatggccaattgcccatgctaacgtcggcttcgatgtcatccaatccattgagggagcagcgccgatgtctactaccgtaacacccgccggtggcggaccgaccactcaaaaagcctcgacgtcggtattcgacgacaagttgaatatttccaagtcgagcaaggtgatcgccgattacatgcgccagtcgggcaaatcggcgattaccaagcaagagctttcgcaactggccagcaatgcctcgggcaaggtgcccgccgatgtgagcgctgctgcccagtacatggaacgccatcccgacgtgttcaccgccattgaaacccatgacgtggcgggtgccgataacct

SEQ ID NO: 20081 - DNA, 513 bp, Zea mays
  Coding DNA Sequence Number=SeqID_5678
tgaacacgtcgggatggcgttccatgtactgggcagcagcgctcacatcggcgggcaccttgcccgaggcattgctggccagttgcgaaagctcttgcttggtaatcgccgatttgcccgactggcgcatgtaatcggcgatcaccttgctcgacttggaaatattcaacttgtcgtcgaataccgacgtcgaggctttttgagtggtcggtccgccaccggcgggtgttacggtagtagacatcggcgctgctccctcaatggattggatgacatcgaagccgacgttagcatgggcaattggccatttatcgccggcttcacaacaattcgcagcggccggaaaatttcacagcgtttcgcacagggaagggatggtgttcaggacgaatcaagggcaaagccggtttgccggttttttcatcagccgcaatttttcacttttatggctgggccaggcgctctcgtccttcggcgagttcgtgctggagagcacgatcatcgtctggctgg

SEQ ID NO: 20082 - DNA, 546 bp, Zea mays
  Coding DNA Sequence Number=SeqID_5679
tggtgacgccactgcatttcggcatgccgaagttcgagttggcgccgattctgtcgatgtgcctggtggtggtgattatcttcgtcgagtccaccgggatgttcctcgccctgggcaagatcaccggccaggaagtcacgccgaagatgctgcgtcgcggcctgttgtgtgatgccggcgcgtcgttttttgccggcttcttcaacacttttacccactcctcgttcgcgcaaaacatcggcctggtgcagatgaccggtgtgcgctgccgttcggtgacgatcatggccggggcgtttctgatcgtgctgagcctgctgcccaaggccgcgttcctggtagcgtcgattccacccgcagtgctggggggtgcggcgattgccatgttcggcatggtggcggccaccgggatcaagatcctccaggaagccgacatcgccgaccgccgtaaccagttgctggtggcggtgagtatcggcatgggtttgatcccggtcgtgcgtcccgagttctttgcgcagttgccactgtggatgagcccgatca

SEQ ID NO: 20083 - DNA, 353 bp, Zea mays
  Coding DNA Sequence Number=SeqID_5680
acaaactcaacggtgagcgccgcttcgaattcgcccagctgcaagcgggcagcattgaggaagccaaggaagcactggcaaaaatgcacgatgccagcgatgaaatcaccgatatcaatgtgagcaaggccctgtaattcgagcgcaagcatcggagtgtcgtaacgctggcgacttcctagactggcagcccttatccgctgccacaggaactcgtcgatgccttctacctcacttaaagagcgcctggccaagctggactggcgcgcgatcgagcaagaccttgaccaacagggcaacgcaattattccagcgctgctggatcagcaagaatgtgcggagctctgcggcca

SEQ ID NO: 20084 - DNA, 332 bp, Zea mays
  Coding DNA Sequence Number=SeqID_5681
ctgacgccggcgtggatattttccactgttccacccgccgtttctgggagccggaattcgaaggctccgagctgaacctggccggctggacccgcaagctcaccggcaagccaaccatcaccgtgggcagcgtcggcctggacggcgaattcctgcagttcatggtcaacaccgacaaggtggcgcaaccggccagcctggaaaacctgctggagcgtctgaacaacgacgagtttgatctggtcgccgtgggccgcgcactgctggtggatccggattgggcgctgaaggtccgcgaaggacgtgaaggcgatatcctgccgttcagtcgt

SEQ ID NO: 20085 - DNA, 303 bp, Zea mays
  Coding DNA Sequence Number=SeqID_5682
gcacgaaactgtattggcattggcaatcatcctgcagcgctacaaccttcaatcggatccgaagtacacgttggatattcgagagactttgtcactcaagcctttcgggttcgagctttctgtgcagcggcgttgacccccttggactccgtattggcctagccgacagatcaccgctcacttctgtcctgcagatgcgtgatccacacaggttgcgtcgcattttcgcgcgccgaggcgtcgagcttgcggcggcgagcgatatcggtcgcacggcgagcgacgaaacgagcagactgccga

SEQ ID NO: 20086 - DNA, 307 bp, Zea mays
  Coding DNA Sequence Number=SeqID_5683
ggctgcttccgaggactcgatcggtcggcagtctgctcgtttcgtcgctcgccgtgcgaccgatatcgctcgccgccgcaagctcgacgcctcggcgcgcgaaaatgcgacgcaacctgtgtggatcacgcatctgcaggacagaagtgagcggtgatctgtcggctaggccaatacggagtccaagggggtcaacgccgctgcacagaaagctcgaacccgaaaggcttgagtgacaaagtctctcgaatatccaacgtgtacttcggatccgattgaaggttgtagcgctgcaggatgattgcca

SEQ ID NO: 20087 - DNA, 353 bp, Zea mays
  Coding DNA Sequence Number=SeqID_5684
atgacggcactaggcagacgcggtccggccgcagctcggcgtcggccacatcggccaccacccgcagccgttcggccgcgcccagcggcgccaacgcgcgtgccatgacggcgggatcgcccaccgccacgcagcgctcggcgtaacccggcaacagcagcgtcttggcgacgatctccggcccgatgccggcggggtcgcccagggtgatggccaggggcaaggcgggcgcgggcaggtcggcgcccgcgcgggaaggattcatcggcacagcagtctccaggcggcgtcgcgcaaggcctcggggccgccgaagccgcccgccttcatggcgatcgccagttgccgacccg

SEQ ID NO: 20088 - DNA, 353 bp, Zea mays
  Coding DNA Sequence Number=SeqID_5685
cgggtcggcaactggcgatcgccatgaaggcgggcggcttcggcggccccgaggccttgcgcgacgccgcctggagactgctgtgccgatgaatccttcccgcgcgggcgccgacctgcccgcgcccgccttgcccctggccatcaccctgggcgaccccgccggcatcgggccggagatcgtcgccaagacgctgctgttgccgggttacgccgagcgctgcgtggcggtgggcgatcccgccgtcatggcacgcgcgttggcgccgctgggcgcggccgaacggctgcgggtggtggccgatgtggccgacgccgagctgcggccggaccgcgtctgcctagtgccgtcat

SEQ ID NO: 20089 - DNA, 296 bp, Zea mays
  Coding DNA Sequence Number=SeqID_5686
gagcactgggagtcgggcctggccgacatccgccagacgctggccaagccgggcatcctggcgcgcccgacgcaggacagctgcttcgtggcccacgacatccatcgcaatggcaagcacacggcctgagccgccacgggccaggctgggatccgtctgattccaagggaaacccgccgcacaatggcgtcagcaacggtagtctttcggcaagacttgaaaccttgttccgggtccgggccgccgtcttccacgccgcgcccgcgcccgctggagacgccgacatgaccaccgct

SEQ ID NO: 20090 - DNA, 578 bp, Zea mays
  Coding DNA Sequence Number=SeqID_5687
gaaactcggcgctgctgattacaaactggtgcaccatgccaagaacggccgttcggtgtacagcttctgcatgtgcccgggcggcaccgtggtcgcggcgacatcagagccgaatcgcgtagtgaccaacggcatgagccaatactcgcgcaacgaacgcaacgccaactccgggatcgtggtgggcatcaccccggaagtggattacccgggcggcccgctggccgggatcgagttgcaggagcgcctggaatcccacgcgttcatcctcggcggcagcaactacgaagcaccggcgcaactggtgggtgatttcattgcgggcaagccgtccaccgccatcggcaccgtggaaccgtcctataagcccggcgtggcctggggtgacctggccctggcgctgccggactttgccatcgaagccatccgcgaagcactgccggcgttcgagaagcagatcaagggttactcgctgcacgacgcggtgctgaccgggatcgagacccgcacttcatcgccgctgcggattacccgtaacgaatcgatgcagagcctgaacgtgaaaggcctgttcccgg

SEQ ID NO: 20091 - DNA, 294 bp, Zea mays
  Coding DNA Sequence Number=SeqID_5688
tggcccatctggaccgcatcctggtgttcgacaatggccgggtgatcgaggacggcagccacgaacagttgctgcgccagggcgggcaatatgcgcggttgtggagtcgccagttcagtgatgcgctggatgaagtcgcgctgtgatcaggcggcgtaccgggtacgccgcgcagtgcaggtcagatcgacaggtgcagcactcgctcgtctttggcgccagccagcgggcggcgcttgttgaccttcagctcacccaggttgatcagcaaagtgcgggtcacgttgcggctca

SEQ ID NO: 20092 - DNA, 539 bp, Zea mays
  Coding DNA Sequence Number=SeqID_5689
atgaagcgggccatgcgtcgagcaagcgccccaaaaccaagtaacacccgcagaaacgccaatcaagcctcgtttatcggggcttttttgtgtttgtctgtaccttgatggcggttcgctataatctcgcctgaaacgccccacgacagtgtcagcgcttccctccaacaccctaatgacgactcctacatgaacaagatcctggcactgattgcggtactggcgcttaccggtggctgcaccaccacttccgacaccgtgctgaaaaacggcgaacaagggctggccatcgattgttccggcgaagccaactcctgggccagctgctatgaaaaggctgatgcgtcctgcgcagggaccggttaccggattgtcggcaccgaaggcacaccggccctgaaagaaagcgacaagaccctgggcaaggatgtcggcaactacaagacccgcagcgtgaccgtggtctgcaaataattacatatgaatttcggcgaatttgatgcccaggccgcgaatggtctcgattaagtcgtccaggc

SEQ ID NO: 20093 - DNA, 459 bp, Zea mays
  Coding DNA Sequence Number=SeqID_5690
tccgcaatgcggcagccaattgatgaaacgaatgggaggcaatgggccgtttatcggctgcgagggcttccggtcgggttgcaagtacaccgaacaagtagccgcataaggggcagagatgatgatcggcgtgagagatctggtgattgacgagttgcgtgctgtcgcagccgtaccgaatgggctggaccgcaacgtgttggtgcggatccaagacagcatcgctgccgacgtgatttacctgtaccgggagcagctggaacagatgatgagacgccaggaagtcgcgggcctgcccgcagccattgcgaagcaagagcggcaggattttttcgccgagcgactgaatctggaataccgcaatcgggcggccaacggccaaggcttcagtttgccgctctatgtcgagtcggcgaagaacttctaccacctggagatccggcgccatttgcagcaggt

SEQ ID NO: 20094 - DNA, 582 bp, Zea mays
  Coding DNA Sequence Number=SeqID_5691
tggcgtctcatcatctgttccagctgctcccggtacaggtaaatcacgtcggcagcgatgctgtcttggatccgcaccaacacgttgcggtccagcccattcggtacggctgcgacagcacgcaactcgtcaatcaccagatctctcacgccgatcatcatctctgccccttatgcggctacttgttcggtgtacttgcaacccgaccggaagccctcgcagccgataaacggcccattgcctcccattcgtttcatcaattggctgccgcattgcggacaggccttgccgaccggctccggtgcgacacgagggcccgagcttccacctttgcctgcccccgctttcgccggccccgtgtaggggatattcaggggtttggagcggatctccgcgatcaccttggtaatccacgagcgctgcatcgcctcaaatcgatcgatggtgcttctgcccgcctcgatctcgcgcatcgccgtttcccacaacgcggtcatgtccggtttcgcgatctcggcaggcagcgcctggatcagcgccctgccggcttgagtcgagatgatgaattcttccttctgctta

SEQ ID NO: 20095 - DNA, 361 bp, Zea mays
  Coding DNA Sequence Number=SeqID_5692
tggcccggcgttatcgcgctgatcctcggcgccctgatctacggctggcgccgcccgctgctgcgcaagcccctgagcgcaggcgtgatcaccggcctcgcgttctgggccctgaccagcctgtccctgaccctctacgaaaaaggcacgcacctgccggacatcaccctgcgcaacgccaatggcgaaaccgtgcaactagccgactacaagggcggcccgctggtgatcaatctgtgggccacctggtgcccgccgtgccggcgcgaaatgccggtactggaaagtgcccagcgccaacgcccggacgtgaccttcctgttcgtcaaccaggccgaaagcatgcaaagcgtcgccacct

SEQ ID NO: 20096 - DNA, 123 bp, Zea mays
  Coding DNA Sequence Number=SeqID_5693
gaggccggcctgaacctgggccgcgccgcgctcgactcgctgctggccgacctggacgcccgcgcccgctcgatggcggccgaactgaaccgcaattccgataccggcgtgacgctggccctg

SEQ ID NO: 20097 - DNA, 155 bp, Zea mays
  Coding DNA Sequence Number=SeqID_5694
tgccggtgaagaccatggcttcctgcacgccgttggcttcgcgcagccgggtcagggccagcgtcacgccggtatcggaattgcggttcagttcggccgccatcgagcgggcgcgggcgtccaggtcggccagcagcgagtcgagcgcggcgcgg

SEQ ID NO: 20098 - DNA, 242 bp, Zea mays
  Coding DNA Sequence Number=SeqID_5695
cgtggtcgcccaagtcgaagcgctgggcggcaaagcggcgatgctgcaactggacgtcagccaaagcgccaccttcgacgcattcaccgcccaggtcggctcggtattgaaggacgtgttcggccaggcgcacttcaacttcctgatcaacaacgccgggattggcgcccacgccagcttcgccgaaaccaccgaagcgcagtttgaccaactggtggcaatccacttcaagggtccgtttt

SEQ ID NO: 20099 - DNA, 276 bp, Zea mays
  Coding DNA Sequence Number=SeqID_5696
gcggcaacagtttctgggtcaggaaaaacggacccttgaagtggattgccaccagttggtcaaactgcgcttcggtggtttcggcgaagctggcgtgggcgccaatcccggcgttgttgatcaggaagttgaagtgcgcctggccgaacacgtccttcaataccgagccgacctgggcggtgaatgcgtcgaaggtggcgctttggctgacgtccagttgcagcatcgccgctttgccgcccagcgcttcgacttgggcgaccacggcttgggctt

SEQ ID NO: 20100 - DNA, 587 bp, Zea mays
  Coding DNA Sequence Number=SeqID_5697
cggtacctggctgacggctgaagaccgccacttgttgcgccagcccgaggtgggcggcctgatcatttttgcgcgcaatattgagcatccgcgccaggtgcgtgagttgagcgccgcgattcgcgccgtgcgcccggacctgctgctcgcggtcgatcaggaaggcggccgggtgcagcgcttgcgccaagggttcgtccgcctgccggcgatgcgcgccttggccgacaacccgaatgccgagcaactggccgagcagtgcggttggatcatggcgacagaagtgctggcggtcggcctggacctgagcttcgcgccggtgctggacctcgattaccagcgcagcgcagtcgtgggcacgcgcgcattcgaaggcgaccccgagcgcgccgcggtgcttgccggtgcctttattcgcgggatgaacagcgctggcatggccgctaccggcaaacacttccccggccacggctgggccgaagccgattcccacgtcgcgattcccaatgatgagcgcagcctggaacagattcgcgccaatgacctggtgccttttgcacgcctgagcaagcagttggcggccgtca

SEQ ID NO: 20101 - DNA, 581 bp, Zea mays
  misc_feature (36)..(36): n is a, c, g, or t
  misc_feature (45)..(45): n is a, c, g, or t
  misc_feature (47)..(47): n is a, c, g, or t
  misc_feature (49)..(49): n is a, c, g, or t
  misc_feature (72)..(73): n is a, c, g, or t
  misc_feature (94)..(98): n is a, c, g, or t
  misc_feature (110)..(110): n is a, c, g, or t
  misc_feature (117)..(118): n is a, c, g, or t
  misc_feature (121)..(121): n is a, c, g, or t
  misc_feature (123)..(125): n is a, c, g, or t
  misc_feature (137)..(143): n is a, c, g, or t
  misc_feature (145)..(146): n is a, c, g, or t
  misc_feature (149)..(157): n is a, c, g, or t
  misc_feature (164)..(190): n is a, c, g, or t
  Coding DNA Sequence Number=SeqID_5698
tgcaccacatccattgggcagtaatgaggtgattcnaatcgttangngncaagcataatgttgtgtgatagnnctatttgcggtgtttgacatnnnnnctggggaagttngaaaatnnacngnnntcgcacagctcnnnnnnncnngtnnnnnnnnnccatgcnnnnnnnnnnnnnnnnnnnnnnnnnnnatgtctgcattatactgatgcctggaatgagggtgtgtccaagaaggagctggactccacctggcgaggagtcgatctacggatacataatccatgtgattggtagcccggttggctatgtgcaagctcagcgggtgcattgactatagccgtgcccgtgattggtctcctgcgtaggatgcgatgagcctgctcacgcgcatgcagcatagttaattttttcagctcccgcttgcatgcgtggggatgctgggaggaggcgtctctgctgatccaggccggcgcgagcctagcgctcgtggtaagaggaaccaatcacgcggaatgggaatggcagatacatgtagtctgtagaatccatcaggatttccccttgataggtctcaggttt

SEQ ID NO: 20102 - DNA, 544 bp, Zea mays
  misc_feature (518)..(518): n is a, c, g, or t
  Coding DNA Sequence Number=SeqID_5699
aatgcgttgatgctgacgttcctgtttgcgctgatcgtgatctatatggtgctggccgcgcagtatgaaagcctgaccgatccgctgatcatcctgatcacggtgccgctgtcgatctgcggcgcgttgatcccgctggccctgggtttggccacgatcaacatctacacgcagattggcttggtgacgttgatcggactgatcagcaaacacgggatcctgatggtcgagttcgccaacgagttacagctgctataccgctgcacaccggctcaggcgatcattcgcgcggcgcgaattcgtctacgcccgatcctgatgaccaccgccgcgatggtggttggcctggtgccgatgctgttctcgtccggcgccggcgccagcagtcgatttggcctggggcttgtgatcgttatcgggatgctggtgggcaccttgtttacgctgttcgtgttgccgtcggtctacaccctgctgtcacgagcgcataagccggtaattgattgggaggtgatagnaaaaaacagccgcaggcttcaagcct

SEQ ID NO: 20103 - DNA, 525 bp, Zea mays
  Coding DNA Sequence Number=SeqID_5700
tggtcgagaagacccgcgccagcctgcgcgccgtgatgcagggcatgccggcgcgcgaacgcgcctacgccacgctcaaggcgcgcgccgccacgcgcttccagaccatgacggtggcgcgcatcgtcggcgagaacgacgccggcgtggtggccggcagctacgccatccccggcaccttcacccgcgaggcctgggagcagtacatccagccggccatcaacgaagccgccaagaaggaagtgcagaccagcgactgggtgctgggcgtgaacgcgcgcgatgacctgacgctggacggcagccccgagcagatccagaagagcctggcgaccatgtacaagatggaatacgcccaggaatggcagaagttcctgcgcggcgtgaccatcaagccgttcaccagtttcgagcagtcggtgggcgcgatgaaccgcctgggcgatccgcagacctcgcccatcgccaagctcatcaacaccgcctatgaacagacctcgtgggacaacccctcgctggtcaacg

SEQ ID NO: 20104 - DNA, 407 bp, Zea mays
  Coding DNA Sequence Number=SeqID_5701
gagcaggcctggctgcgcgatgatgacgcgccgcgcatcgagccggccgacccgcatgccgccgactggacgcgcggcgtgctgcacgccagcgcctggcgcctggacgccttcgcggcggagctgggccgctaccggcccggcgtgctgcgctgtgatccggcagtcgccgggctgcgcatctccggcgccttccaattgcaggataccgacgcggtgctggcggccttgccgtccacgctgccggtgcaggtgcgctaccgcagcgcttactgggtgacgatcatgccgcgcgcgggacaggcctgatttgtcgttgttacaaaaaagccgggggcgagctgtccggttggcgttggccgagggtcatggtcagtagaggcaaacaaatgccgatacccgttgga

SEQ ID NO: 20105 - DNA, 359 bp, Zea mays
  Coding DNA Sequence Number=SeqID_5702
gcttcacttataaagagcccggtcttttgaccgggcttttttttgcccggtaatttttgaatgggagaaccctgccatggaattgcgtccctggactgtactgctggccctgtcgctgctgccgacggtgtcgctggcggctggcaaatgtgatcgcctggtgatcaccggcagcccggacgcaccgccttatctgtggcgtgatccccgggaccccacgcacttgatcggcgccaccgccgacatgttgcagcaagtggccaaggacctcggagtgaaaatcgacctgctgtacggcggcaagcgctccgtggctctggacgaagtgcgcagcggacgcatggacatccttgccgatg

SEQ ID NO: 20106 - DNA, 485 bp, Zea mays
  Coding DNA Sequence Number=SeqID_5703
agtctttccagacgccgtttgccaagccgcgcggcgaagggcggtcttcctcgacgctgaatgtgctctggggttttctcaacctggtgatcggctacgtgctggtctgccgggtcggggatttcgacctcaaaagcaccgctgatgtgctcgccctcgggcttggggccttggcgctgagtgttttcctggcgcagcatttcgggcgcttcaatggtggtaatccctcaaggccggtgtgagttcgatgggcattttccgctcgctgcgcagcgtcaactaccgcatctgggccgccggcgccctggtgtcgaatatcggcacctggatgcaacgcacggcccaagactggctggtgctgacccagctcaccccgcataacgcctcggccgtcggcatcgtcatggcgttgcagttcggtccgcaattgctgttgctgccttggaccggcttcgccgccgaccactacgacaagcgcaagctgc

SEQ ID NO: 20107 - DNA, 537 bp, Zea mays
  Coding DNA Sequence Number=SeqID_5704
accgcttccccatggataaattccgcctgttgcgtgaccatctggtggagagcggcctgacccgggacagccaactgctgcgaccggaactctgccctgccgagattctggccctggcccatgaacctcggtatatcgaacgctacatgagcggcgagttgtcccgcgaagaccagcggcgcctcggcctgccctggagcgaagccctggcccggcgcaccgtgcgcgcggtgggcggctcgttgctggcggccgagcaggcccttgagcatggtctggcctgccacctggccggcggcacccaccacgcccactacgattacccggcgggtttctgcatcttcaatgacctggcggtgatcagccattacctgctggccagcggccgggtcaaccgggtgctgatcttcgattgcgacgtgcaccagggcgacggcaccgcgcgcatcttgcacgacaccccggacgcgatcaccgtgtccctgcactgcgaaaagaacttccccgcccgcaaggccgaaagcgactgggacatcc

SEQ ID NO: 20108 - DNA, 456 bp, Zea mays
  Coding DNA Sequence Number=SeqID_5705
gctttcgggttaatggtgccttgaaccttaacctgattcgccagcgcaccggcttcaaggcggtggcgacggaggattaccagaccctggccgggctggtgatgagcctgctggatcgcctccccgccgtcggcgatagcctggaacatgaagggtggcgcctgaccgtggcagcggtggaggagcggcgagttactcaggtgttgctggctcctctctaacgggtgaatttcattcgacgctgcgctggcctttggatagcatcggcgctcattgaaccgttaaggaagggttacccgaatgactttggacgtgcttaagatttctgcattttgtgacggtaaccagggcggtaacccggcaggcgtatggatcggtgacaacctgccggaagccgcagaaatgcagcgtatcgcccacgaagtcgggttttcggaaacggtattcgcctgcccg

SEQ ID NO: 20109 - DNA, 353 bp, Zea mays
  misc_feature (31)..(33): n is a, c, g, or t
  misc_feature (54)..(54): n is a, c, g, or t
  Coding DNA Sequence Number=SeqID_5706
gcagcgacacgctcgaattcgtgcgcgacgnnnggtggcagcccggcaacttcnacgccgcgcagcggccggcggtgcgcgccgcgatcaagcagcggctggaggaaaagaaggacatcgacctgatcatcgccatgggcacctgggccggccaggacatggcgggcatgggcgcgccggtgcccaccatcgtcgcctcgaccagcgacgccgtcggcgcccgcatcacccgctcggcgcaggacagcggcctggacaacctgcacgcacgcgtccagcccgaacgctatcagcgccaggtgcgcctgttccacgaaatcgtgccgttcaagcggctcggcctggtctacgaa

SEQ ID NO: 20110 - DNA, 192 bp, Zea mays
  Coding DNA Sequence Number=SeqID_5707
agtacttcacccttggccacttgggtggtcacgttgtccaccgcgcgcacgacgtggccacgggtgtcgaagacttttaccagatcgcggacttcaatcactttgcgcgagcctccgctcaagccggctggcgattttcgacagcggcaggttgatcagcaggtacaggcctgcgacgcagaacaggatttc

SEQ ID NO: 20111 - DNA, 215 bp, Zea mays
  Coding DNA Sequence Number=SeqID_5708
ttaccacctcgttctcgccgtttgaaatcctgttctgcgtcgcaggcctgtacctgctgatcaacctgccgctgtcgaaaatcgccagccggcttgagcggaggctcgcgcaaagtgattgaagtccgcgatctggtaaaagtcttcgacacccgtggccacgtcgtgcgcgcggtggacaacgtgaccacccaagtggccaagggtgaagtact

SEQ ID NO: 20112 - DNA, 423 bp, Zea mays
  Coding DNA Sequence Number=SeqID_5709
gcggatgattgacgcctgtttttcaagccgctgattaatcagcggttttttttcggcacgggtattgctacagcactcgcaacgttccgtttaactgacggtcagccaagcgagagagcatgatgccccacgccgcccaactatcttcggtccctgacattcaggggcctgccccctccgtagagcagatcagccgccttgggcttgaacaggcattttccctgttcaaccagatgtcgagccagttgactgactcctacagcctgttggaagcgcgggtttccgagcttaaaggcgagttggcggtggtcagcgcccagcgcatggaagagctggccgagaaagagcgcctggccaaccgcctgcaaaacctcctcgacctgttgcccggtggcgtgatcgttatcgacgaccagggtcgcg

SEQ ID NO: 20113 - DNA, 129 bp, Zea mays
  Coding DNA Sequence Number=SeqID_5710
ggccggtgcgcgaattcacgctgcacctgccggtcaaggggctgcgcgccgactccaataccgcgcgcctgttggagtcggcctctgccgacaacttccggctgggctgcacgccggtgatcaacctgt

SEQ ID NO: 20114 - DNA, 139 bp, Zea mays
  Coding DNA Sequence Number=SeqID_5711
cgctgctcgaacaggttgatcaccggcgtgcagcccagccggaagttgtcggcagaggccgactccaacaggcgcgcggtattggagtcggcgcgcagccccttgaccggcaggtgcagcgtgaattcgcgcaccggcc

SEQ ID NO: 20115 - DNA, 455 bp, Zea mays
  misc_feature (405)..(405): n is a, c, g, or t
  Coding DNA Sequence Number=SeqID_5712
tcgccgagcaggatcgcctgttggtgggctggccgactaagctggcattggcgccggacttcgctgatcgggtgatcaacgcactggaacgtgacggcatcaagccaagtgtcacggaaacgctccccgacctgccaaaacccgccatcgcccaacctgcctgggagcaactgctgccatgaccctgccgaccctgcatgaccttcatcgcccattgggcagcaccggtttgatggtttcgccgctgggactgggaaccgtcaagctgggccgcgaccaaggggtgaaataccccagcggcttccagattcccgatgacgatgccgcgcggatgctgctgcgccaggcccggcaattgggcatcaacctgatcgacaccgcgccggcctatggccgcagcgaagnacgcctgggcccgctgttgcgtggtcagcgccaggaatgggtgatcgtca

SEQ ID NO: 20116 - DNA, 584 bp, Zea mays
  Coding DNA Sequence Number=SeqID_5713
aacgcaagctcgatgatctgcactctgccgacgttgcctacatcctcgaagccttgccgcttaatgaccgtctgacgctttggcaattggtcaaggctgatcgcgacggcgacatcctccttgaagtatccgactcggtccgtgaaaccctgatcgccgacatggacgatcacgagctcctggctgccgccaaggacatggatgccgacgaactcgctgacctggcttccgagctgccgcgtgacgtcgtccatgagctgatggaaaccctcgacgcccaacagcgtgagcgtgtgcgctcggcgttgtcctacgacgaggagcaggtcggtgcgttgatggacttcgagatggtcaccatccgcgaagacgtcagcctggaagtggttctgcgttacctgcgccgcctcaaggagctgccaggccacaccgacaaactgttcgtggtcgattacgaaggcattctcaagggcgtgctgccgatcaagcgcctgctggtcaatgacccggacaagaaagtcgcggacgtcatggccagcgacccggtgagtttccatccggacgaagacgcttacgacgctgcc

SEQ ID NO: 20117 - DNA, 234 bp, Zea mays
  Coding DNA Sequence Number=SeqID_5714
tgttcgtcccgcaggtgcaggcagatcaaatcggcaatgtgcgcatcgtcctcgacaaccaggacacgtttgggctgatccattggcaaaaccttttctcgtgattcgcgcattgtgcgggttttgcaacagtgtagttatcacgaattgtttaactctgcgtgaggattccgcgaccagaccgggcctaaccttgactcatcgcaatggcataagtacgcaaccccattgtgg

SEQ ID NO: 20118 - DNA, 327 bp, Zea mays
  misc_feature (27)..(32): n is a, c, g, or t
  misc_feature (39)..(39): n is a, c, g, or t
  Coding DNA Sequence Number=SeqID_5715
gcacatgcacatcccagttaagtatgnnnnnngctcacncgccacaatggggttgcgtacttatgccattgcgatgagtcaaggttaggcccggtctggtcgcggaatcctcacgcagagttaaacaattcgtgataactacactgttgcaaaacccgcacaatgcgcgaatcacgagaaaaggttttgccaatggatcagcccaaacgtgtcctggttgtcgaggacgatgcgcacattgccgatttgatctgcctgcacctgcgggacgaacagttcgaggtggtgcacagcgccgacggtaacgaggccgtgcaactgctggaa

SEQ ID NO: 20119 - DNA, 337 bp, Zea mays
  Coding DNA Sequence Number=SeqID_5716
tacagcgtcacgctgctggtctcggcggcctgcgccgggttcaggcagctcagggccagggcggcgcccagcgtgctgcgatggcggatgattcttttcatggtgtgatcccctcgattggtatggcgttggacaaaagaagcccctgccgccggcgcgccggcggcaaagggtgaagcaagcggaggtctggggcgggcgctagcgggtcatggcagcgcaccgtgcgcgggcagtggcgtcaggtcgctcggcgtggccacgcacagcgtgacgctggacgggtgcgcggccgacaggtgcagcgtgttcagcgcgatgcgcttctcgcgtgcgt

SEQ ID NO: 20120 - DNA, 305 bp, Zea mays
  Coding DNA Sequence Number=SeqID_5717
acgcgagaagcgcatcgcgctgaacacgctgcacctgtcggccgcgcacccgtccagcgtcacgctgtgcgtggccacgccgagcgacctgacgccactgcccgcgcacggtgcgctgccatgacccgctagcgcccgccccagacctccgcttgcttcaccctttgccgccggcgcgccggcggcaggggcttcttttgtccaacgccataccaatcgaggggatcacaccatgaaaagaatcatccgccatcgcagcacgctgggcgccgccctggccctgagctgcctgaacccggcgcagg

SEQ ID NO: 20121 - DNA, 573 bp, Zea mays
  Coding DNA Sequence Number=SeqID_5718
ctgcatggccattcgttcaaggtggcgatccacctcagcggcgacctcgacccgcataccggctggatccgtgacttctcggagatcaaggcgattttcaagccgctctacgaacgcctcgatcacaactacctcaatgacattccgggccttgaaaaccccaccagcgaagtgctggccaagtggatctggaatgagttgaaaccgttgttgccggaactcagcgcgattcgcatccatgagacctgcaccagcggctgcatctatcgcggcgagtaagccggcgatgtaaaaaaccacccttgcggtggtttttttatgccggtaagtcccttacagtcagggcctcttgcacagaaggcgcacgctgcgatgccaccccttatccgccccgctaccgttgacgatatcgccgccatcgaggccatcgtctacgccgcctactccccttacatcgaacgaatcgggcgcaagccagggccgatgctggatgactatggccaccaagttgcagccggaggggtgcacgtgcttgagcgcgcgggccgggtgcatggctttgtcgtactgatc

SEQ ID NO: 20122 - DNA, 593 bp, Zea mays
  Coding DNA Sequence Number=SeqID_5719
gctcagcgctatgggacaactcttttggctggccggacgtggctgcaacatgcgacgccggtcaccctgggcatgaaaatcgccggctggctcggcgcagtcacccgaagtcggcagcgcctgagtgagctcaagccgcgtttgctggtgctgcaatttggcggtgcttccggaaccctggcagcccttggcgaacaggcgatgccggtggcgcaagccttggcggccgagttgcagctgggcctgccggagcaaccttggcacacccagcgcgatcgtctggtggagtttgcctcggtgcttggcctgatcgccggtagtctcggcaaactgggccgcgacatcagcctgctgatgcagaccgaagcggcggaagtgttcgaaccctcagcccccggcaagggcggctcttcgaccatgccccacaagcgcaacccggtgggcgctgccgtgctgatcagcgccgcgacccgcgtgccgggcctggtggcgacaatgttcagcgccatgccccaggagcacgaacgcagcctgggcttgtggcacgccgagtgggaaaccttgccggaaatttgccggctggtatccggtgc

SEQ ID NO: 20123 - DNA, 155 bp, Zea mays
  Coding DNA Sequence Number=SeqID_5720
taccagtacgtcggcaagcgcgccgccgatccgcagaaccacttcgacctgggcagctaccagttgctgaacgcgcgcctgggcgtggccaacggccgcgccgagtactacgtgtggggcagcaacctgctgaaccggcagtacgacctgtacgg

SEQ ID NO: 20124 - DNA, 138 bp, Zea mays
  Coding DNA Sequence Number=SeqID_5721
cgcgaagtagccgtacaggtcgtactgccggttcagcaggttgctgccccacacgtagtactcggcgcggccgttggccacgcccaggcgcgcgttcagcaactggtagctgcccaggtcgaagtggttctgcggatc

SEQ ID NO: 20125 - DNA, 583 bp, Zea mays
  Coding DNA Sequence Number=SeqID_5722
aaacacgacaccacctggatgctcggcctctacggcaccgccatcggtgccggcaccctgttcctgccgatcaacgccggcgtgggcggcttctggccgttgatcgtgctggcgctgctggccttcccgatgaccttcttcgctcaccgtgggctgacgcgctttgtgttgtcgggcaaatccggcgacatcaccgacgtggtggaagaacacttcggcatcggcgccggcaagctgatcaccttgctgtacttcttcgcgatcttcccgattttgctggtgtacagcgtggcgctgaccaacaccctgaccagctttatggaacaccaactgcacatggcgccgccgccccgggcgatcctgtcgctggtgctgatcctcggcctgatggccattgtgcgttgcggccagggcgtgatcgtcaaggccatgagcgtgctggtgtacccgttcgtcgccgccctgttgctgttggcggtgagcctgatccccaactggaacggcgccttcttcgcctccgccagcgaaggcatgccgctgccggcgttcttcaagaccttatggctggcaatcccggtgatgg

SEQ ID NO: 20126 - DNA, 436 bp, Zea mays
  misc_feature (411)..(411): n is a, c, g, or t
  Coding DNA Sequence Number=SeqID_5723
gagtgcctgctatcgagtgggctacgaaagcccatcgcaattcagccgagagtacagtcgccagtttgggtgtccgccctccagagacaccaaccgagtttgccgccctgcgtgaaagtctgacgggctgcctgcggctgcgacgatacccgctcgcagccggctcattcgttagccgctggaaagatgcatccgcccccacgcaatagcgctttcacctcttcgttcacctgtgcggggctttggctcaactgctcaaagagcgttgagtccggacgcacgtacgattgcgaatcgtgcttcgcgctccacaagacgatgttcagcaggatcggaatgaggtctatgcctttctccgtcaacccataaaaatccttgcgccggtcatcggggttgggcgccttcgagagnatccctgctcctcaagaaaggcaag

SEQ ID NO: 20127 - DNA, 481 bp, Zea mays
  misc_feature (448)..(450): n is a, c, g, or t
  Coding DNA Sequence Number=SeqID_5724
gagatctggatccagcacgacggccgtggccaactgttgatcggcgttgacgtggaagagggcgacgcggaatacgccaacctgctgatgcgcccattggccaccaacctgatgagcctgcaactggaaatggaaccggccgacgttgaaggtgatgatgacgatcacgtccacggtcctggctgcaaccactaaggaagctgcttatgctcgccctcggcaaactgcttgaactgaccctcgccggtcgcgaaccggcgcaaaaaattcaactgactgtcgatggcgtgcaactgcgctggctcagtgagggcgcgctggaagtgcggcctcctgaggcgcgggacaacggcagcgacgtgctgctgtcgtccggcatccatggcaacgaaaccgcgccgatcgaattggccgaccgcttgctgcaaggcattgcccgtggggagannnagccccgcacccgtattctgttcctgttcgg

SEQ ID NO: 20128 - DNA, 451 bp, Zea mays
  Coding DNA Sequence Number=SeqID_5725
cgttgcacgtgaccctgatcgaagacgccctgaaccgccgcttcaatccgtgggcgctggtggccgcattggtagcggtgacgggagcggcggtgatccgctttgaccagatcaccccgaacttcttcgtgggcttcctgctgctgcaactggcgaacttcacctacgctgccgggcaggtgctttataagcacttggtggcccgccatccgagcgatctaccgcactatcggcgctttggttacttctacctcggcgcgttggcggtggcattgccggcgttcctgatgttcggcaaggccaatttcctgccggaagcaccgttgcaatggggcgttttggtgttcctcgggctggtcagtacggcactgggcatgtactggtggaacaagggcgcgtgcatggtcaatggcggcacattggcggtgatgaataacctgcatgtgccggt

SEQ ID NO: 20129 - DNA, 166 bp, Zea mays
  Coding DNA Sequence Number=SeqID_5726
cagtgctccaacagtctcgttgcaggattgatttagtgattgttgctctgcggctgctctgcggcgggggttgagatggaggacttgctgaacacggagattgggaagaacgactatgactggtaattgaatgattactctcgtcttgtggcgatttcctaatttg

SEQ ID NO: 20130 - DNA, 485 bp, Zea mays
  Coding DNA Sequence Number=SeqID_5727
tggccctgggcaagaccttgagcctgcccaaggaccacccgcaacaggccacgccgtactggcaccagtcgatctacaccgccgccgtgatcgaaggcctgacccgcgccatgccccgcgcccagcgcccggaagccggcctgacctacctggccggcctgctgcacaacttcggctacctgttgctggcccacgtcttcccgccgcatttttcgctgatctgccggcacctggaggtcaacccgcacctgtgccacagctacatcgagcagcacctgctgggcatcagccgcgagcagattggtgcgtggttgatgcgttattgggacatgccggacgaactgtccaccgccctgcgcttccagcacgatccgacctacgacggccaatatgcggaatacccgaacctggtgtgcctggccgtgcgcttgttgcgcagccgtggcatcggctccgggccggatgaagccatcccggacgaactg

SEQ ID NO: 20131 - DNA, 378 bp, Zea mays
  Coding DNA Sequence Number=SeqID_5728
gacattgtactttcagcagtgttattacttttgctgccaggatgtaatgtaagcaaaatccttgggcatggtgttgtgttcgcccgtgagccggtgcggcggtgaccaacagatcccgaccgtgccacacgtggatcctgtttgcctcatgcgtggactttggcgcggacggacgcaactagagccgtgggcaaccgcgaggccgaacctggacgattggggtctccggaagcagttggactgagcaggaggcaaaataagctaccgcctctccctccctcgcccctcggtctcggtatatggcaatggcagctgccaactggagcagcggggcgggcgcgggcgattggacgaagccgtgggcatggcgccatgacc

SEQ ID NO: 20132 - DNA, 463 bp, Zea mays
  Coding DNA Sequence Number=SeqID_5729
ggtagcttattttgcctcctgctcagtccaactgcttccggagaccccaatcgtccaggttcggcctcgcggttgcccacggctctagttgcgtccgtccgcgccaaagtccacgcatgaggcaaacaggatccacgtgtggcacggtcgggatctgttggtcaccgccgcaccggctcacgggcgaacacaacaccatgcccaaggattttgcttacattacatcctggcagcaaaagtaataacactgctgaaagtacaatgtcagctgaataaaagtcggccaaaatcactgaacaaattagagtgacctaaatacattattccaaggtgctttcagaagcgaggtgccaatcactgaacaaatcagattgtttcccagtcagtcttacagttattgtcaaaggctggcaacatccggtgatctctaagggcttgttcgtttcaccgttagtacatgtgt

SEQ ID NO: 20133 - DNA, 148 bp, Zea mays
  Coding DNA Sequence Number=SeqID_5730
accgccttcgtctcgatcatggaaggctgtagcaagtactgcagcttctgtgtcgtgccgtacacgcgcggcgaggaagtctcgcggccgttcgacgacgtgctgatcgaagtggccgacctggccgaccagggcgtcaaggaagtca

SEQ ID NO: 20134 - DNA, 153 bp, Zea mays
  Coding DNA Sequence Number=SeqID_5731
taggcgttgacgttctggcccagcagcgtgacttccttgacgccctggtcggccaggtcggccacttcgatcagcacgtcgtcgaacggccgcgagacttcctcgccgcgcgtgtacggcacgacacagaagctgcagtacttgctacagcct

SEQ ID NO: 20135 - DNA, 494 bp, Zea mays
  Coding DNA Sequence Number=SeqID_5732
agagttattgcgtgcccaaggcgacgctattggcggcgtgcgcaaggcactgcgggattcctgcacgcatcggcctggccgacgtgcgcaaccacctctcgacgccccgtttgatcgagctgctcagaagtgacgtatttgccatgcacggctacaccgagctgtatctggacggccgttgggtcaaggccacgcccgcattcaaccagcaactgtgtgaactgttcgacgtgccacccctggagttcgacggcatccacgacagtgttttccacgccttcaaccgcaagggccagcgttctatggagtacgtggtggaccatgggcaattcgccgaggtgcccgaggaattcttcttcgcccacattcagaaatgttacccgcacctgtttggcgagcagatgccgatcctgttgggcgacgtgcagagtgatttaagccgggcgtgatccggcgtatgctgcctcggcattcatccaaccatctttttcaaa

SEQ ID NO: 20136 - DNA, 543 bp, Zea mays
  Coding DNA Sequence Number=SeqID_5733
aatgccttgtacgtgggttcggtgatcgcggtgatggtctcgctgttgctggtcagccgcttcgttgacccgctgctggaggtggccggctatggcgagacgttgcgcggggccgggatgcaacttgaggcggtgcgcgagatccttgcggcattgccgatgaaggagccaagcgcgccgcagtgtccgcgggatgcctccgtggaattgtgcgacgtcagctttcgtcacccgggtagtcctcgggacgtgttgcgcggcgtgaacctgcgtattgagcctggcagcatgaccgcactcgtaggggaatccggctccggcaagaccacgctcttgcggttggtcgcgcgatttttcgaggtcagccagggccaggtgtgtatcggtggcgtggatgtgcgacagatgtccggcgagcaactcaacgcgcagatcagccagattttccaggacacctacctgttccagggcagcgtcgccgacaacattcgcctcggcaagcccgatgccagcgatgcgcaagtattgaaggccgcgcgacag

SEQ ID NO: 20137 - DNA, 387 bp, Zea mays
  misc_feature (351)..(352): n is a, c, g, or t
  Coding DNA Sequence Number=SeqID_5734
tcgggcgtatcgaccatcaggtgaagattcgcggttaccggattgagttgggtgaaatcgaagcgcgcctgcatgaacaaccggaggtgcgggatgcggcggttggcgtgcaggagggcgtcaacggcaagcatctggtgggttacctggtggcggcggatgcgcagttgaatccaggcgagcgccttgatcggatcaagcaacgcctgcgggccgagttgccggagtacatggtgccgctgcattggctgtggctcgaccgtttgccgctgaatgccaatggcaagctggatcgcaaggccttgccggcgctggagattggccagttgcacagccaggattatctggcgnngcgtaatgagctggagcagacattggccgggattt

SEQ ID NO: 20138 - DNA, 272 bp, Zea mays
  Coding DNA Sequence Number=SeqID_5735
tcgcggcgatgcagcttgagcccttcgtccagctggcgcccgatggacatggacgggttgagcgaggtcatgggttcctggaacaccatgccgatgcgcgcgccgcgcagcttgcgcagcgcggccgggctggcctgggtgacttccacgccctcgaagcggatcgagccgccggccaccaccagcggcggcggcgtcaggcccatgatggcgcgcgccgcctgggtcttgccgctgccggactcgccgacgatgccgaccatttcgcccgg

SEQ ID NO: 20139 - DNA, 265 bp, Zea mays
  Coding DNA Sequence Number=SeqID_5736
cggcgtgtccttcgaggtggcgccgggcgaaatggtcggcatcgtcggcgagtccggcagcggcaagacccaggcggcgcgcgccatcatgggcctgacgccgccgccgctggtggtggccggcggctcgatccgcttcgagggcgtggaagtcacccaggccagcccggccgcgctgcgcaagctgcgcggcgcgcgcatcggcatggtgttccaggaacccatgacctcgctcaacccgtccatgtccatcgggcgccagctg

SEQ ID NO: 20140 - DNA, 171 bp, Zea mays
  Coding DNA Sequence Number=SeqID_5737
gattgaaagcctgacgctggtagacaccaacaaagatccgaagacccgcctgcaggaattcctgcagtcccgtggttgcgacctgccgcgttacgaagtggtggatatccagggtgagccgcactgccgagttttcttcgtcgaatgcgaaatcaccttactgaatgaaaa

SEQ ID NO: 20141 - DNA, 575 bp, Zea mays
  Coding DNA Sequence Number=SeqID_5738
ttggaagaccgacttgtcgtgcccatcggcggcgagccgcaggcggtgaacgtcagaatcatcagcgccacccaccgtaatttgctggagcgggtagaggacggcagttttcgcgaagacctgtactaccggctgaacggtctggaaatcgccctgccgccgttgcgtgagcgcagcgataagtcgcaactgctcgactttctattggctgaggagacgggcgaccagccggtgttgctcgacagccctgcgcgtcaggcactgttggcatttgcctggccgggcaatgtacggcagttgcgcacggtgctgcgcacgttggcggcattgtgtgacgacggacggattgggcttgaggacctgccggcggtcattcgccaggcgcgcccgcagcctgcagtagtggaggaccgttcggattcgcccttggacgatgcagagcgcctggcgctgctcaatgccttggagcaacagcgctggcacatgagccacacggcggagcaactgggggttagccgtaacaccttgtatagaaaactgcgcaaacacgggatcgcccgttagctaaagggtgc

SEQ ID NO: 20142 - DNA, 536 bp, Zea mays
  Coding DNA Sequence Number=SeqID_5739
agcaggatcctcttgcggctcgtttgcaactgttgactactaattgatttgaattgaggccggcgcggcggctgtatgcgctcaggacaggaccccaaaaatgctcgttggaacatataacccttcgctcgtcctcgtatccctaggggtcgccatcctggcgtcatacacggcgctgggtatggccaaccgcgtcagggcggcgaacggactgccggcggcgcgttactggctggccggcggcgcgctcgccatgggcatcggcatctggtccatgcacttcgtcggcatgctggcgttcaacctgcccatcccgatgggctacgacctgccgctgacgctgctgtcgctggccatcgccatcggctgctccgccttcgcgctgtggatcgtctgcaaggacgacctgccctggcgccggctgatcatgggcgccctgctgatgggcgcgggcatcgccgccatgcactatatcggcatggccgccatgcggatgatgccgggcatcatctatgacccgacctggttcgcgctgt

SEQ ID NO: 20143 - DNA, 542 bp, Zea mays
  Coding DNA Sequence Number=SeqID_5740
agcagcggcttacccggtttatcgcagcctgagcgcgcagcatcgtgcgtcgttcctggaggcgatagccgatgagctggacgtccttggtgatgactttatcgccttggtctgccgcgaaacggcgttgcccgccgggcgtatccagggcgaacgcggccgtaccagcggccagatgcggctgttcgccaaggtgctgcggcgcggtgatttctacggggcgcggatcgatctggcgctgccggatcgccagcctttgccacgcccggatttgcgccagtaccgcatcggtctcggcccggtcgccgtgtttggggcgagtaattttcccttggccttttccactgccggtggcgacaccgccgccgcgctggcggccggctgcccggtggtgttcaaggcccacagcggccatatggccactgccgagcgggtcgccgaagcgatcatgcgggcggcgcagagcaccggcatgcccgacggcgtgttcaatgtgatcttcggcggcggggtgggtgaagcactggtcaagcacccggcaa

SEQ ID NO: 20144 - DNA, 254 bp, Zea mays
  Coding DNA Sequence Number=SeqID_5741
ggctgcccgaataggccgccaccgactcgatctggcgcgagaaatcgcggatcaggtagctgcccggaatccaggccggcagcgatagccgctggccttccggcgcgggcgtctggacggttagggttatccggtagcggtggccggcggggtcgtgcggcgcaaggcggtaaagtacggggaaagacacggggaaagcggcagttttttccatccgtatatcttatttcatcccatcctctggagacaggtaa

SEQ ID NO: 20145 - DNA, 247 bp, Zea mays
  Coding DNA Sequence Number=SeqID_5742
agcacaaacgactcgctcattacctgtctccagaggatgggatgaaataagatatacggatggaaaaaactgccgctttccccgtgtctttccccgtactttaccgccttgcgccgcacgaccccgccggccaccgctaccggataaccctaaccgtccagacgcccgcgccggaaggccagcggctatcgctgccggcctggattccgggcagctacctgatccgcgatttctcgcgccagatcga

SEQ ID NO: 20146 - DNA, 295 bp, Zea mays
  Coding DNA Sequence Number=SeqID_5743
gcgacacggtccagcaggttccaggccgccttgggatcgccggccgacaggatttcgcgggcgccgcggatggcgcgcggtccgagcctgccgagctggcgctcggcctcgtcgcgggcgctctggtcggccgacgcgtgcgccaggaccatcttgtaggcgtcgatggcctcgccgaaccagccgccgttgaacgcgacgcgggcaaagtgcaattgcgtgctgaacggcgccgactcgttggcggcggcctgttccaggtggcgcatggcggtctgcttgtcgcccagcgcat

SEQ ID NO: 20147 - DNA, 291 bp, Zea mays
  Coding DNA Sequence Number=SeqID_5744
gctgggcgacaagcagaccgccatgcgccacctggaacaggccgccgccaacgagtcggcgccgttcagcacgcaattgcactttgcccgcgtcgcgttcaacggcggctggttcggcgaggccatcgacgcctacaagatggtcctggcgcacgcgtcggccgaccagagcgcccgcgacgaggccgagcgccagctcggcaggctcggaccgcgcgccatccgcggcgcccgcgaaatcctgtcggccggcgatcccaaggcggcctggaacctgctggaccgtgtcgc

SEQ ID NO: 20148 - DNA, 139 bp, Zea mays
  Coding DNA Sequence Number=SeqID_5745
acaccatctacgacaccggctcgatcctgcgcctggccacccgcctgttcgacctgccgacgctcgacggcctgaaggcgcgcgacgacgccatgaccgcgcgcggccagaagccgatgggtgacctgaccaacgcgct

SEQ ID NO: 20149 - DNA, 124 bp, Zea mays
  Coding DNA Sequence Number=SeqID_5746
atcaggcgctgaaggtcagcgcgttggtcaggtcacccatcggcttctggccgcgcgcggtcatggcgtcgtcgcgcgccttcaggccgtcgagcgtcggcaggtcgaacaggcgggtggccag

SEQ ID NO: 20150 - DNA, 299 bp, Zea mays
  Coding DNA Sequence Number=SeqID_5747
gtccaggaatcaggaaaccccgacggccccaccctgctcttcattcacggcttgctgggcagtcacttgaactgggaagcgcaggtaaacagcccgcaactacaacgttttcgcatgatcacctacgacctgcgcggccatggcctttcgagcaaacccgccgaagacgcggcctacatcgaaggccgtcgctgggcggatgatctcaatgcggtgataaccgcctcccatgccgacaaacccttactggtcggctggtcgctgggcggcgcagtgatttccaactacctggcccggta

SEQ ID NO: 20151 - DNA, 120 bp, Zea mays
  Coding DNA Sequence Number=SeqID_5748
tgactctggactgcatgcgcgccttcggtgcccaggtggacatcgttgatgaaagcacctggcgcgtggccccgaccggctacaccgcccacgattacctgatcgaacctgacgcttccg

SEQ ID NO: 20152 - DNA, 124 bp, Zea mays
  Coding DNA Sequence Number=SeqID_5749
aacacttcggcagcccacaagtaggtggcggcggaagcgtcaggttcgatcaggtaatcgtgggcggtgtagccggtcggggccacgcgccaggtgctttcatcaacgatgtccacctgggcac

SEQ ID NO: 20153 - DNA, 592 bp, Zea mays
  Coding DNA Sequence Number=SeqID_5750
gacatcgtcgtaccgtcgaacaacttcctcgccaagcagatcaaggccggtgtttaccaggaactggacaagtccaagctgtcgaactacgacaacctgaacaaatccctgcttaaggccgtgtccatcagtgacccgggcaacaagcacgccttcccgtacatgtggggctcgatcggcatcggctacaacccggagaaggtcaaggctgcactgggcatcgacaagatcgactcgtgggacaccatcctcaagccggaaaacctcgccaagttgaaaggctgcggtgtgagcttcctcgattcgccaaccgaaatgctgccagtggcactgcattacctgggcctgccgaccgacacccagaagaaagaagacctcaagcaagccgaggccttgttcctcaaactgcgtccttcgattggctacttccactcgtccaagtacatctccgacctggccaacggcaacatctgcgtagccgtgggttattcgggtgacgtgcaacaggccaagtcccgcgcggctgaagccggtggcaaggtcaaggttgcctacgacattccgaaagaaggcgccggcagcttctatgaca

SEQ ID NO: 20154 - DNA, 569 bp, Zea mays
  Coding DNA Sequence Number=SeqID_5751
aaccgttcgactatttcaagtgcatctgaggggccggcggcccgcttggttggagaacaacaatgagcaaattccatagcctgaccatcaaggatgtgcgcaacgagacccgtgatgcggtgtccatcgccttcgagattccgcagcatctgcaagacagtttccacttcacccagggccagcacctggtgatgcgcacccagctggacggcgaggaagtgcgtcgctcctattcgatctgcaccggggtcaatgacggtgaactgcgcatcgccatcaagcgcgtggccggtgggcggttctccgcgtttgccaatgagcagctcaaggccgggcacagcctggaagtgatgccacccgccgggcatttccatgtagaccttgatccggctcgccacggccattacctggcagtggcggccggcagcggaatcacaccgatcctgtcgatcatcaagaccaccctgcaaaccgagccccacagccgcgtgacgctgctgtacggcaaccgctccagctccggtgcactgtttcgcgaacagctggaagacctgaagaaccgctacctg

SEQ ID NO: 20155 - DNA, 233 bp, Zea mays
  Coding DNA Sequence Number=SeqID_5752
tttcgccgccaatctgaatgcacaacgcggcgccacgctcctgagggtcgtcgaacagcgcggcgaaggcttcacgcaccgcttcgaattgaagctcgtaatgaccctgaatctgcacctaagccccctcggaaaagtactacaaaaagtggccgacattgttccagccattgagtgatttgtgaacccgcactcgtcgatccggcaccatcaatgacccttgccggaatgcc

SEQ ID NO: 20156 - DNA, 275 bp, Zea mays
  Coding DNA Sequence Number=SeqID_5753
gtccacatcggcgaaggcggtaaaccggggcgtgacggcaatgctgccgggccgggcgcagggcattccggtgggcattccggcaagggtcattgatggtgccggatcgacgagtgcgggttcacaaatcactcaatggctggaacaatgtcggccactttttgtagtacttttccgagggggcttaggtgcagattcagggtcattacgagcttcaattcgaagcggtgcgtgaagccttcgccgcgctgttcgacgaccctcaggagcgtggc

SEQ ID NO: 20157 - DNA, 423 bp, Zea mays
  misc_feature (397)..(397): n is a, c, g, or t
  Coding DNA Sequence Number=SeqID_5754
gtacgcaataccctgctttggcgagccgcctcgccgcccccacaactcgacttgcccaccaatcaccgccattgaatgacgatcataggcgacgacacccagcttgccgctcgccagctcactgcttgaagagttcctatagagccccttcagcccaaggcgatccagcgcctcgtggggcatttcgccgttgttcaggctctgcatcgcatgggcaaaacttctttgcgcctcacctggcctgtcgtccagaccatttccttcgatctgtgcacgcttggcactcgctgcgaacatgaaattggcatccgtcagcatcgccggatcatcgcctttaaattgtgcatatttggccgcatcctcgaggtccttcttagacagatcaagctcgaagccntcacgcattttcacgtgatagccgcc

SEQ ID NO: 20158 - DNA, 573 bp, Zea mays
  Coding DNA Sequence Number=SeqID_5755
ggacctcgaggatgcggccaaatatgcacaatttaaaggcgatgatccggcgatgctgacggatgccaatttcatgttcgcagcgagtgccaagcgtgcacagatcgaaggaaatggtctggacgacaggccaggtgaggcgcaaagaagttttgcccatgcgatgcagagcctgaacaacggcgaaatgccccacgaggcgctggatcgccttgggctgaaggggctctataggaactcttcaagcagtgagctggcgagcggcaagctgggtgtcgtcgcctatgatcgtcattcaatggcggtgattggtgggcaagtcgagttgtgggggcggcgaggcggctcgccaaagcagggtattgcgtacgcttttatttaagggcgataaacgaaaaaagcccgataaaccctatgcagtcggggtttatcgggcttttcaatcccgggcattcaagcccgggaccggctcagcttattggcaagcttcgcaatccggctcgtcgatcgcgcaggcttttggcactggcgctggaccggcaggtgcggcgagaaccgaatcatcaccgtggt

SEQ ID NO: 20159 - DNA, 63 bp, Zea mays
  Coding DNA Sequence Number=SeqID_5756
cacgtttgccggcaagattgtttgtttcaaatgaacgttaggggatatcaccgcagcggacta

SEQ ID NO: 20160 - DNA, 454 bp, Zea mays
  Coding DNA Sequence Number=SeqID_5757
cgtgcggtgataactggtgtaaagtggagaacaccatatttcctgaaggacacaaaggtgcctgaaatgaacgaaaccggcgtgctgcttttctcctatggaaccttgcaggacaaggccgtgcagcgcgccaacttcggccgcgaactcaacggccgggccgacgccatgctgggctacgtgcagcgctgggtcgagatcaccgaccccgaggtgatcaagaccagcggcctggcgcggcatcccatcgtcagcgccagcgacgacccgcgcgacgaggtggcgggcatggtgttcgagatcaccggccaggagctcgaagccgccgaccgctacgaagtgtccgactacaagcgggtctcggtgcgcctgaagtccggcgcgcaggcctgggtgtacgtcaaggcctgagccggcgcggatggcgccgtctcagcccttcaggccaagacgg

SEQ ID NO: 20161 - DNA, 595 bp, Zea mays
  Coding DNA Sequence Number=SeqID_5758
gctggtgaagttctggccctacaacctgtcgctgtccctggcccactaccagttcgaggacacggccggcggcggttggctggcctaccgcaacagcatcaccatggccctgtgcaccgcgttgatcggcagcgtgctgatctttaccggcgcctacctgatggaaaagaccaagggccagaagggcctgaacctggcgctgcgcatgctcagcttcgtgccgatggcggtgccagggttggtgctgggcctgggctacgtgttctttttcaacctcaacggcaacccgctgcatgtgctctacggcaccatgacgctgctggtggtgtgcaccattgctcactatttgaccaccgcacaaatgaccgccaccacggccctgcgtcagttggacgccgagttcgaagccgccgcattgtccctcaaggcgccgctgtaccggcattacctgcgggtcaccgtgccgatctgcctgccggcgctgctggacatcgtgcgctacctgttcgtctcggcgatgaccaccgtctccgccgcgatcttcctctacagccccgacaccatcctcgcggcagttgccgtgctgaacatggac

SEQ ID NO: 20162 - DNA, 431 bp, Zea mays
  Coding DNA Sequence Number=SeqID_5759
atttgcgcgcgaaggcggcgccgtccggacagcggtacagcaccagccgggtctgccgcgcgccgtccctgacgacccagtgctcctcgcggtagcgctcggcgccgccgtgcgcggcataggcgtagcccaggtaatgttcgttggccgcctgggcgcccagcggtgccagcggcaggatcagggcaagcagcagagccagcggcaggtcggggcgcatggtcattctcctggagagggcgcgcaggggcgggccacgaaggcggcgatgtcgtccagcaccggcgcgcgccagcgcaggggccgcgccagcgcgccgaccagcagcttgtggccgaggccggggtactcgaccaggcgcgcgcaggcccccgcggcgcgcagggtgcgcgccagggcggcgctgttgcgttgcgggtccacctcggtgt

SEQ ID NO: 20163 - DNA, 413 bp, Zea mays
  Coding DNA Sequence Number=SeqID_5760
acaccgaggtggacccgcaacgcaacagcgccgccctggcgcgcaccctgcgcgccgcgggggcctgcgcgcgcctggtcgagtaccccggcctcggccacaagctgctggtcggcgcgctggcgcggcccctgcgctggcgcgcgccggtgctggacgacatcgccgccttcgtggcccgcccctgcgcgccctctccaggagaatgaccatgcgccccgacctgccgctggctctgctgcttgccctgatcctgccgctggcaccgctgggcgcccaggcggccaacgaacattacctgggctacgcctatgccgcgcacggcggcgccgagcgctaccgcgaggagcactgggtcgtcagggacggcgcgcggcagacccggctggtgctgtaccgctgtccggacggcg

SEQ ID NO: 20164 - DNA, 570 bp, Zea mays
  Coding DNA Sequence Number=SeqID_5761
gcgggcaatcgttcttgagtgcctacgcggcgtccaagggcgctctcgcgattctgaccaaaaacgtggcgttcagcgccctgcgcaaccggattcgggtcaacggcttgaacatcggctggatggacacacctcacgaggatgaaatccagcggcactaccacggtgccggggatggctggttggaggccgccgaagccgcgcagcccttcggccgcctgctcaaacctgaagaggtggcccagagcgtggcatttctattgtcacgcgagtcgggaatgatgaccggcacggtgatcgacctggagcaaggcgtcatcggctgtggcgacggcggcaccccacgccccgatcaggccctgagcctggtggagggtgcgtgatgcctgcctttgtcagcgccgacgcagtgcaactggaagattttcactcgatctgtgcccagcaggcggctgccgaggactacccgcactgcgccgaagtgtgcagcaacatcccgatctatcaagcccaggcactgcgcaacggcgatcatcacgccgtgctggacgaactgcatcgcctgttcag

SEQ ID NO: 20165 - DNA, 409 bp, Zea mays
  Coding DNA Sequence Number=SeqID_5762
gacctgctcgaccagaaataccatcgctacctgctggtgttttcaaccttgttggtggcgctgctgctgtacctggcgattcgcctgttgcgcagtttcgccgagatcaaccgggtcaaccgggctttgcatgtggtcaacgaaaaccttgagcaacgcgtcgaggagcgtacccgggaactcaaggatgcccagggtgaactcctagacagcgcccgccaggccggcatggcggaaattgccaccaacgtgctgcacaacgtcggcaacgtactcaacagcgtgaatatctccgccgagctggtgacgcgcaagctgcgcaccagcaaggcgctggggctgggcaaggccatgcagttgatcaacgagcaccgccgcgacctggggacctttctcaccgagaatgaaa

SEQ ID NO: 20166 - DNA, 577 bp, Zea mays
  Coding DNA Sequence Number=SeqID_5763
tgtcagttctgcgtgtttttcaatcgcgactatgctgaccggtcttccagccggattgtcgatttgtcgatacgatcgacattaaagtgacatcatttctgccgatactctgaaacatgccgatacggtaaccgtcatgatcgcccgttagggtgaggtggttcggtgaaatgacaaaagaaagtttcatcgatacaaaaactgtaacaaattgacgagacgataggcatttggccatgatggcgtcgcgtttttgatcgcgcatgacgtatgacccgtctggggaatacaaaacgatctaaaaaagcgtggagaaatactcttcaggaataccccaatggagttttaccgcctcttcggcttgatagcccatggacagtcttattcctgaatcgtatgaaaaaggatgaaacaattctttttgggtgtatgaaaaactcattaccctgcaaggaccaaatcaactgcggttagacgaaggtagtagacacacaaggttacgattgacttgtcagtcactatctggcgctaatcgcgcatctgtggatcgagggcgtcagacccgagacctaagaaa

SEQ ID NO: 20167 - DNA, 205 bp, Zea mays
  Coding DNA Sequence Number=SeqID_5764
gatgccgaccagcaggatcgccagcgccagcagcgaggtgccgatcggccgcttgatgaaattcgctgagatgctcactggccgcctcccgccgccgcggccagctcacgcaccttgctgccgggcttgagtttgtattggccgtccaccaccacgcgctggccggcgtccagcccctgctggatcacggccaggccgtcctgca

SEQ ID NO: 20168 - DNA, 290 bp, Zea mays
  Coding DNA Sequence Number=SeqID_5765
gtgcagcgcggccagtccgataccttcgtgtacgtggtggatggcgccggcgtggcgcagccgcggccggtcaaggtggagcgcatgcaggacggcctggccgtgatccagcaggggctggacgccggccagcgcgtggtggtggacggccaatacaaactcaagcccggcagcaaggtgcgtgagctggccgcggcggcgggaggcggccagtgagcatctcagcgaatttcatcaagcggccgatcggcacctcgctgctggcgctggcgatcctgctggtcggcatc

SEQ ID NO: 20169 - DNA, 356 bp, Zea mays
  Coding DNA Sequence Number=SeqID_5766
gtgagtcgcacctgcctgtggatacttgttccgtcatggaaatcaccttgctgcaaaagaggttgggggagggcgtccttgctgaggcctcctacacatcgggcaacaaattatgcttaatgataatgattgtcaaatgagaaggcgaactaatcttatgctttatcgagaggtgtgaacggcgtctcgctgactaattatttccaggggccatccgttctcatgggtgacaggccagttaacaaaccggccaaggatcagcgcctggaggaggacaaaatgggtttttatcgtgtgagcgggagtggtctgaaatgaacacgccggctcgattacgcctgttttgcctgccgtat

SEQ ID NO: 20170 - DNA, 360 bp, Zea mays
  Coding DNA Sequence Number=SeqID_5767
caacggctgtagaccatggcgctggcgccggaatacggcaggcaaaacaggcgtaatcgagccggcgtgttcatttcagaccactcccgctcacacgataaaaacccattttgtcctcctccaggcgctgatccttggccggtttgttaactggcctgtcacccatgagaacggatggcccctggaaataattagtcagcgagacgccgttcacacctctcgataaagcataagattagttcgccttctcatttgacaatcattatcattaagcataatttgttgcccgatgtgtaggaggcctcagcaaggacgccctcccccaacctcttttgcagcaaggtgatttccatgacggaa

SEQ ID NO: 20171 - DNA, 571 bp, Zea mays
  Coding DNA Sequence Number=SeqID_5768
tgaattatgacctcgacaccctggaagtcacccgcgaagggcgcttgctcaagctcaacccggttggcctgaagctgttggcggtgctgatgcaaaagagccctcacgtattgcgccgtgaaattctcgaagaagccctgtggggcgatgactgcccggacagcgacagcttgcgcagccatgtccatcaactgcgtcaggtaattgataaacccttcgccaaaccgttgctgcaaacggttcacggtgtgggttatcgcctggccgagggtcgtgatggagtttaagcaaagccttgcccagcggatcatcatcgccttcgccttgatgagcgcgttggtggcgggggccttcgccatgggcatcgtcgccacggtgcacctggtggaagaaaagctcatttcggcgggcctgggcggtgacttgcaacgcctgctgctgatggacagcgtcgaggactggagccaccgtcccgagcccgaccaattgttctacttcagcggcggccctggcgattttgagttgcccaaggacttgcgccatctcgacgccggtttccatgaggtattcc

SEQ ID NO: 20172 - DNA, 581 bp, Zea mays
  Coding DNA Sequence Number=SeqID_5769
caactatgaagcacgggcctacggtgtgcgttcggccatgtcgtcccggcacgccttgaagctgtgcccggacctgaccatcgtcaagccgcgcatggatgcctataaagaagcctccaaggaaatccagacgatctttcgtgactacaccgacctgatcgagccgttgtccctggacgaagcctacctggacgtctctgacagcccgcatttcggcggcagtgccacgcgcattgcccaggacattcgccggcgggtctccaaccaattgcatatcaccgtttctgcgggcgtggcgccgaacaagtttctcgccaagatcgccagcgactggaaaaagcccaacggactgtttgtgatcacccccgatcaggtggaagactttgtctcggcgctgccggtgaaaaagctccatggcgtgggcaaggtaacggccgacaagctgacgcggctggggatcgaagactgcctgcaactgcgagagtggaacaagctggctctggtgcgtgaatttggaagcttcggcgagcggctttggagcctggcccgtgggattgatgaccgtgtggtgcagaacgaca

SEQ ID NO: 20173 - DNA, 541 bp, Zea mays
  Coding DNA Sequence Number=SeqID_5770
tggttcggcgcctgagcaaacgcttgccggccgttaccccgaatgcccacttgggcgggctgaccgtactctacggcacccaaggcaatgccgacggtgcgctgatcgccagccacctggcgttggtggtgcaaaaaagcgggcagcaaacgttgttgctcgacctgggcctgcctctcgctgacagcctggcgctgctggggctcgaaagctctttccatttcggcgacgccctgcgccacttgcgacgcctggactccaccctgatcaacagcgccttcacctcggccgaagccggcctgcgcattctcgcctatcacaataacgatgagccgctggaccgcaccagtgcagccgagctgtacatgttgctcagtgccctgcgccagcacttccagcacatcgtggtgaacctgaccggccaacccgacagcgaagccttgcgcacctttgtcagccattgcgacaaactattgtggtgtaccgaccaaagcgtaccggactgccgccgtaacctggcggtactcaacctgtggcgaga

SEQ ID NO: 20174 - DNA, 486 bp, Zea mays
  misc_feature (453)..(454): n is a, c, g, or t
  misc_feature (457)..(458): n is a, c, g, or t
  Coding DNA Sequence Number=SeqID_5771
gggattgatcgcttgacatgcttatataccaaaagtaacttaccaacggtaacttagctcaagcctactcaatttgccttctcatcgctaccccgacggagtcaccgccatgcacgcgctgatcgttgttgctcaccacgactcacactccctgacccacagcctcgccaaacaggccgccgccggcataactgccgccggccacacctttgaaatcgccgacctcgccgctgaaggtttcgacccgcgttacaacgccgccgaccataaagtgcatcgcacccgcgccacgccgccggccgacgtactggccgaacaggcccgactcgaccgcgccgacgccttggtgctggtgttcccgatcttctggtggtcgatgccggccttgctcaagggctggatcgaccgggtattcgtcaacggttgggcgatcgactacagccttgagacganngtnntgaaaaagctcggccacttgcaggtgca

SEQ ID NO: 20175 - DNA, 592 bp, Zea mays
  Coding DNA Sequence Number=SeqID_5772
caggctcgaacaggcgcagtggacagacagcttatcgccgctgcagcgaagaacgttgaaggcgttcaatgaaaccagtttcaaatctcagcacgctgtggataaacacttggcaaatatccaggcactcatgccgttcgccacaggcctgctcaacagcgcgctgaaagaacaattcaacatcagcgtggatgtcgaaggcacctatcttcgtttgtatgagccactgaagctcggcaagctgggggtcaaggccggcgaatacaaagtactcgaggtttcactgatacaggccaccctgcataactttgaagccagcgaaggtgaagacggcgcatttgatcccgcctccgggtttacccaacacccggactgggagggtgcgtctcccacgatcagccagacgctgagcgtgcccgcctttatcaggttgtgccgcacactggacgtgggtgcccgctaccaggctcacctcaaggaagtattactgcccaccgacgaagctgtggccgctcggttgcgcgacgccgtgatcaccagccagaaagacgccctcagggccgcggcgtacctggcgttgctcaagcaggat

SEQ ID NO: 20176 - DNA, 517 bp, Zea mays
  Coding DNA Sequence Number=SeqID_5773
tggaaaggtattgccgcgtacaacgctgccgactacgacctggccctggcgacctttgcccaactcgacaccgcacaggccgcgttctaccgcggcaatatccacgtgcgtcgcttcaagttcgacgatgccattgccgcctaccagcaggcgttgcaacaacagccgcagtttcccgaagccagcgccaacctggccctggctctggcgctgaagaaagacactgaaaacgcctcggacaatgcccccgaggtgaagcccgacgcggtcaagttcgacaaggcggccggcaagggcaagagcaaggcaatccagacagaacaggcaagcaacgatgccttgtggttgcagaacctgacgacgtcccccgcgaacttcttgcgccgcaagttcagccttcaagaccagggagcccagccatgaatcggctctgctggctgttgctgctgatcgccggcccgttgtgggcggccgaaccgcaactgcgagtgcaggcgcaactggtgcccggtaataa

SEQ ID NO: 20177 - DNA, 494 bp, Zea mays
  Coding DNA Sequence Number=SeqID_5774
gtgaaccaggtgtcggtcaacacatcgacctgcaattgcacttgctcgcccaccactacgttattaccgggcaccagttgcgcctgcactcgcagttgcggttcggccgcccacaacgggccggcgatcagcagcaacagccagcagagccgattcatggctgggctccctggtcttgaaggctgaacttgcggcgcaagaagttcgcgggggacgtcgtcaggttctgcaaccacaaggcatcgttgcttgcctgttctgtctggattgccttgctcttgcccttgccggccgccttgtcgaacttgaccgcgtcgggcttcacctcgggggcattgtccgaggcgttttcagtgtctttcttcagcgccagagccagggccaggttggcgctggcttcgggaaactgcggctgttgttgcaacgcctgctggtaggcggcaatggcatcgtcgaacttgaagcgacgcacgtggatattgccgcggtagaac

SEQ ID NO: 20178 - DNA, 298 bp, Zea mays
  Coding DNA Sequence Number=SeqID_5775
cggtcgagggcgaagtctcgacccacagctacggccacggcgtcaaacccggcctgcgcctgtccgccgcctacgacatcgacgaccactggcaggtgggcggctcgggcgaactgctgtcgcgcgagaccccgctgcgggccttgaccaacgacatcaccgccaaccgcctcaccggcttcgtgcgctggcgcgccaacgagcggcgcgaatggaccctgtcgctgtcgccgtcgcgcttttccgacggcaaccagcgctgggaactggggctggacgggcgcgagcgcgtctacac

SEQ ID NO: 20179 - DNA, 419 bp, Zea mays
  Coding DNA Sequence Number=SeqID_5776
tggcctacggcgtgcagccgatcacgcgggaagtgctgcaggaacagcagcaggtggccgatgcgttccacgcgctcaagctgatccccaaacccctcaacgtgttcgacgccgcgccgtcgggcctgaaatagacaagggcaggcattccatggacgtcttctggttcattcccacccacggcgattcgcgctatctcggcaccagccgcggcgcgcgcgcggccggctacgactatttccgccaggtggcggtggccgccgacacgctgggctacgacggcgtgctgctgcccaccggacgctcctgcgaggatgcgtgggtggtggcgtccagcctgatcggcgccacgcgccgcttgaagttcctggtggcgatccgccccggcgtcagctcgccgcagttctcggcgcgcatgg

SEQ ID NO: 20180 - DNA, 561 bp, Zea mays
  Coding DNA Sequence Number=SeqID_5777
aggccggcaacaagctgatggacagcccgtacgaggtcaacccggcgggctacaccatccacagcgcggtacacgaagttcgccacgacgtggtctgcgtgctgcacacccacaccgcttccggtatcgctgtctccgcacagaagcaaggcgtgttgcccatcagccagcaatccttgtttgtgctgtccagcctggcctaccacgcctacgaaggggtggcgctgaaccacgaggaaaaggcccgcttgcaggctgaccttggcgaaaacaatttcctgatgctgcacaaccacggcctgctgacctgtggccccagcatcgccgatacgttcctgatgatgttcatcttccagcgcacctgcgatatccaggtgatggcgcagaacggtggcgcagaattgatcacgattgcaccacagatattggccggtgcccgggcgatgatcgccggggtcaccaaaagcgctcagggtatgggcggcgcactggcctggccggcgttgctgcgcaaactggacgcactcgaccccgggtataaaagctgatgccactcgccga

SEQ ID NO: 20181 - DNA, 198 bp, Zea mays
  Coding DNA Sequence Number=SeqID_5778
tggccttccgcgtcggcggtcccgatggcggcgcgcgcgtgatttcctatgtggtgtccggcgtcggcttcctgggcgccggcgccatcatgcgcgaaggcggcagcatccgcggcctgaacaccgcggccacgctgtggggctcggccgccatcggcgcctgcgccggcgcctcgctgatcctcgaggcgatcgcgg

SEQ ID NO: 20182 - DNA, 196 bp, Zea mays
  Coding DNA Sequence Number=SeqID_5779
gtattggcggccagcacgaacacggtggccgcgatcgcctcgaggatcagcgaggcgccggcgcaggcgccgatggcggccgagccccacagcgtggccgcggtgttcaggccgcggatgctgccgccttcgcgcatgatggcgccggcgcccaggaagccgacgccggacaccacataggaaatcacgcgcgcgc

SEQ ID NO: 20183 - DNA, 537 bp, Zea mays
  Coding DNA Sequence Number=SeqID_5780
cctcggtgccctggaacaagcaaaaatccatgcacgccaggcccggccctggatcgacagccagcaggatcacggctggcaagacccgttcaccatcgccgccatcggcgacctggaatggcgggtccacggcaccgaagcgatcctcgccaaggccggcgttgccgtagaccaggccctggccaaccccaacgaagacaccgtggccaatgcctcgctggtggtcgcccaggccaaggtgctgtcagccgaaaccgcgttgctcgccagcagcaaactcttcgaactggccggcacccgctcggtgtccggcaagcacaacctcgatcgtttctggcgcaacgcgcgcacccataccctgcatgacccggcccgctggaaataccacttgatcggcaactttgtgctcaacggcgtcaagcccgcacgccacgcctggaactgaggagcttcatccatgaccgcactgaatcaggcgcgccaactgctggaaagtacccggcgctttgtcgagaaaagtgatgacccctacgtgat

SEQ ID NO: 20184 - DNA, 196 bp, Zea mays
  Coding DNA Sequence Number=SeqID_5781
accgcgctgttctcgtcgctgatggcggtcggcctggcgttcgtcgcgccggtgatgcagtcgcacggcctgctggccgtggcgctgacgatctggggcatcgcccaggcggcgctattcatcgtctgccacgtgcgcctgatgaaatcggcgcccgaggcccccgccttcgccgcttcgctcaacatttcgggcg

SEQ ID NO: 20185 - DNA, 203 bp, Zea mays
  Coding DNA Sequence Number=SeqID_5782
gccgatgccgatgttggcgcccgaaatgttgagcgaagcggcgaaggcgggggcctcgggcgccgatttcatcaggcgcacgtggcagacgatgaatagcgccgcctgggcgatgccccagatcgtcagcgccacggccagcaggccgtgcgactgcatcaccggcgcgacgaacgccaggccgaccgccatcagcgacgaga

SEQ ID NO: 20186 - DNA, 563 bp, Zea mays
  Coding DNA Sequence Number=SeqID_5783
ggccggagaaaaacacaggagactttcatgacccgatccccggaacgcagccgcatgcgccggttcgccgcgtgctgcgccctggccctggccgccaccggcgccgcgcaggccgacgatgcctaccccagcaagcccatcaccatcgtggtgccgttctcgcccggcagcgccaccgacaccagcgcccgcatcctgaccgaaaagctcggcccgcgcctgggcgtgccgatcgtgatcgagaacaagcccggcgcgtccggcaccatcggctcgtccaccgccgcgcgcgccgcgcccgacggctacaccctgatcctgaccagcagctcgacgcactcggccacgcccgccctgttccgcaagctgccttacgatcccaccggcgatttcatccacgtcatccgcatcgccaccattcccatgatgctggtggtgcgcgccgattcgccctacggctcggtgtcccagctggtgcaggccacccgcgccaagccgctcaactacgcctacggctcgcccaccagccagatcgccggggccaccttcaacagcgttgccgg

SEQ ID NO: 20187 - DNA, 198 bp, Zea mays
  Coding DNA Sequence Number=SeqID_5784
gacgacccgaaaaagggcatcagttattactactggatcacctgggtatccgcctcgggtgtcgagggtccgcccaacagtccggccggtacgcacgttgaatcgatgctcagcattgattacctgctggacctgatcaccaaggagatgaatcagagcgagctggcaaaggctttggcgaaagccatcgacctggat

SEQ ID NO: 20188 - DNA, 197 bp, Zea mays
  Coding DNA Sequence Number=SeqID_5785
agcatcgcaatctgctgattgaggccatccaggtcgatggctttcgccaaagcctttgccagctcgctctgattcatctccttggtgatcaggtccagcaggtaatcaatgctgagcatcgattcaacgtgcgtaccggccggactgttgggcggaccctcgacacccgaggcggatacccaggtgatccagtagta

SEQ ID NO: 20189 - DNA, 364 bp, Zea mays
  Coding DNA Sequence Number=SeqID_5786
aagggcaggcccttgggatcgacttcgatttcattgctggcgaacggtgtcagattggagacgaccgcgcggccccagggatcgatgcgcaacccgctgccgctggccacccgcgcgccggcggcatgccgggcttcgaccacgacggcggtatcgcccagcgcgggcgtgaatacgacgccaccgccatatgccaccacgcctcccgacaccgtggcgccatactgcgagaacccgcgtccgcccgatgcatttgccgccatggtggcgtagggcgatgcgtaagccgcgctgccccccgccacggaggacgctgccgccccccccaggctgcgactcgcattcacgccataggtcagggcgc

SEQ ID NO: 20190 - DNA, 393 bp, Zea mays
  Coding DNA Sequence Number=SeqID_5787
cgatgttcaacagtcggtcaccggggcgacgggcgaggacggcgccctgacctatggcgtgaatgcgagtcgcagcctggggggggcggcagcgtcctccgtggcggggggcagcgcggcttacgcatcgccctacgccaccatggcggcaaatgcatcgggcggacgcgggttctcgcagtatggcgccacggtgtcgggaggcgtggtggcatatggcggtggcgtcgtattcacgcccgcgctgggcgataccgccgtcgtggtcgaagcccggcatgccgccggcgcgcgggtggccagcggcagcgggttgcgcatcgatccctggggccgcgcggtcgtctccaatctgacaccgttcgccagcaatgaaatcgaagtcgatcccaa

SEQ ID NO: 20191 - DNA, 380 bp, Zea mays
  Coding DNA Sequence Number=SeqID_5788
ggtagagttgcggatcattctccaaatccttgcaagacgagttccagcatttcgctggcgcgcgcggccggcagatgcggccacatagttttctgggcgtgcgcggtgcgcaggaagacgacggcgtcatcgtggaactgctccatgtcggcctgctccagcttcgcgtagctgatcgagcgcggcacgggaatcacgccgcccttcgggcccgggtaccagtcaacgaaaccgctgccggtcttaagccaagcgcggaaggcttcaaactcttcgaaccgctcctgagcttcgaacagggccgactccagcgccatgtgcttgcggtggtaccagcccatacgctctttgtgggtggtgatcgacagcatctcgcccgg

SEQ ID NO: 20192 - DNA, 418 bp, Zea mays
  Coding DNA Sequence Number=SeqID_5789
aatggcgccggctgtggaatcaactggttcggcttgagccgggcgagatgctgtcgatcaccacccacaaagagcgtatgggctggtaccaccgcaagcacatggcgctggagtcggccctgttcgaagctcaggagcggttcgaagagtttgaagccttccgcgcttggcttaagaccggcagcggtttcgttgactggtacccgggcccgaagggcggcgtgattcccgtgccgcgctcgatcagctacgcgaagctggagcaggccgacatggagcagttccacgatgacgccgtcgtcttcctgcgcaccgcgcacgcccagaaaactatgtggccgcatctgccggccgcgcgcgccagcgaaatgctggaactcgtcttgcaaggatttggagaatgatccgcaactctacc

SEQ ID NO: 20193 - DNA, 556 bp, Zea mays
  Coding DNA Sequence Number=SeqID_5790
gtgctggcgggcgactatcacaccaactacctggaaagctggatgcagcagcgggaggggacccaatgacggtgcgctacacccatggcggcgatgaattcatcttcgccgagatcagcgaatcgatgtcgctggccgcgttcttcaagggcatggccatcacgcgcgcgctgcgcgagcgcgccgtgcccggcgtgagcgagatctgcccggccaacgcctcgtaccagatccgctacgaccccgaccaggtcgcgcccgaggccatgctggccatcctgcgcgagatcgaggccaccatcgacctggacaacctgcggctcgacacccgcgtgatccaggtgccggtgctctacaacgatccctggacccacgagacgctgatgcgctttcgcgagcgccaccaggacccggcctcgaccgacctggagtacgccgcgcgcatcaatggctttgccgataccgatgcattcatcgcggcgcattccagcgcgccctggttcgtgtcgatggttggtttcgtggccggcctgccgttcatgttccagatggtcga

SEQ ID NO: 20194 - DNA, 592 bp, Zea mays
  Coding DNA Sequence Number=SeqID_5791
gggcattatgacgtgcgacctgataatgaccaatgatatgggttatcaaatacacactgtgcggcgctagaccgaacaatagtcctaaatgccctgcacatcctgcggcaaagtaacaaaaccggcaaatttagatcgagtggtacgtcacactgtcgttcagaggcagcagaatcttgccagcctgttaaaatgcccgcccttttgatcaatgactccctgaattctgtatgtcccgactcaatccccggcagcaagaagccgtgaactacgtcggcggccctctattggtgctcgccggtgccggttccggcaagaccagcgtgatcacccgcaagatcgcgcacctgatccagagctgcggcatccgcgcccagtacatcgtcgccatgacctttaccaacaaggcggcgcgggaaatgaaagagcgcgtcggcaccctgctcaagggtggcgaaggccgtggcctcaccgtgtgtaccttccacaacctggggctgaacatcatccgcaaggagcatgtgcggttgggctacaagccgggcttctcgatctttgacgagactgacgtcaaggcgctgatgaccgacat

SEQ ID NO: 20195 - DNA, 392 bp, Zea mays
  misc_feature (361)..(361): n is a, c, g, or t
  misc_feature (363)..(363): n is a, c, g, or t
  Coding DNA Sequence Number=SeqID_5792
gtcgagtggcgcaacgttcgcgaaccatcactgctgtactggaccgccggtttcgccatcatcagcgtgggcagcaccctggcgctgctgcgggccagcggcctgctgttgatcggcatctggttcgccaacgggctgctgatcaccgcgcattggttgttcttgctgggcgttgcgcgttttactcaggtgcgcctgtctcgcgcctggtacctgatcttcgtggcctggtttgccatgctcctactaccggaaggacagtcgtggtccaaagccatgctgctggccaactcgctgctggttgctctgccaaccctgcgtgccagtttcctgctgcggccccatggccggtcactcagcntnggggcggtgcagctgcgttatgtgctgct

SEQ ID NO: 20196 - DNA, 178 bp, Zea mays
  Coding DNA Sequence Number=SeqID_5793
acctggtcaacgaagccgccctgttcgccgcgcgccgcaatggccgcacggtggatatgtccgactttgaaaaggccaaggacaagatcatcatgggcgccgagcgccgctcgatcgtcatgcccgaagaggaacgcaagaacaccgcgtaccacgaatccggccatgccatcgttgc

SEQ ID NO: 20197 - DNA, 552 bp, Zea mays
  Coding DNA Sequence Number=SeqID_5794
agttcgcctggctgaaccgcatcaacaaagcctcgatcgtgatgctcaccgaagaaggcatcgtcaagccggacatgggccacaagatcgccggcggcgtgcgctttgccatcgaccaggccgaccagcccgatggcaagcgcccggaagacgtgctgcaactggaaaaaatcatgaccgacaagatcggtccggaagcctccctgatccactccggccgcagccgccaggacatgctcgccacctaccgcctggccaacctgcgctcccaggtgctggcctacagcgacgcactgaacgccacccgccaacgtatcctgaacatcgccgacaagaacatcgacaccctggtgcccgcctacaccaacggcgtgcaggccatgcccatcagctatgcgcactacctgctggcgttcgaagccgcatttgatcgcgacggccagcgcattcgtgaactctatacccgcctcaacctgagcccgatgggcaccgcggtactggcgaactccgcttacccgctgaaccgcgaacgcttggccgaactgctgggct

SEQ ID NO: 20198 - DNA, 571 bp, Zea mays
  Coding DNA Sequence Number=SeqID_5795
gcgccaccggttcgaaaatcagcacgccgaagccgcgtatcgacatggttatccagccgaagcagaaaccgggcgcagcccagccggcgccgaaacccgacgcgaagaaggcgaattaatggcaaccctgaaagcccagcatctggccaaggcctataaaagccgtcaggtcgtgcgcgacgtcagcctgtcgatcgacagcgggcagatcgtcggcttgctcggccccaacggtgccggcaagaccacctgcttctacatgatcgtcggcctggtacaggccgatcaaggccgcgtgctgatcgacgacctggacgtgagccaccagcctatgcacggtcgtgcgcaggcgggtatcggctatcttccccaggaagcatcgatcttccgcaaactgtcggtttccgacaacatcatggccatcctcgagacccgcaaggaactcgaccgcgccgggcgcaagaaagagctggaaagcctgctgcaggaattccatatcaaccacattcgcgacaacctcggcatgagcctttccggcggcgagcggcgtcgtgtggaaatcgcccgagcc

SEQ ID NO: 20199 - DNA, 388 bp, Zea mays
  Coding DNA Sequence Number=SeqID_5796
ggaaccaactggaaaacgcactgctcaacctggcgatcaacgcccgggatgctatgaaaggcgagggcgtgattcggatcaccggcgaaaacatcatcctcaatcccccggattgcgccggcaaaagcatcaaccccggtgaatatgtgcgcctggccgtcgccgacagcggcgccggcatgtcaccgacgatcctggcacgggccttcgaaccgtttttcaccaccaagccgaatgggcacggtaccggcctgggcctgagcatggtgttcgggttcgtgcgccaaagtggcgggcatgtggaggtcgaaagcgtggagggcagcggcaccatggtgcagatgtatttcccgcgcaacctcggagagccggaaagccacgatacgcc

SEQ ID NO: 20200 - DNA, 448 bp, Zea mays
  Coding DNA Sequence Number=SeqID_5797
aactggcccaggacggcatcaccatggtctgcgtcacccacgagatggggtttgcccggcgagttgccgaccggatcatcttcatggaccagggttgcatcatcgagcaagccaaacccaccgagttttttgacaacccgcagcacgagcgtgcccgggagtttctgtcgcagattctcagccactgagaagcatcgtcggacatcgaccaaaacaacaaaaatccgcattcacgatatctggaggcttacccatgatctcgctcactcgcttcgtcgcagcagccgctgtcgccaccgctctcacaggcaccgcctgggcgggttcaaccctcgaccgcatccatgaaaccaaggtgctcaaggtagccacctcggccaactggccaccgcaatcgttcctgggcccggacaatcagctgcaaggctttgatatcgatgtcgccagc

SEQ ID NO: 20201 - DNA, 401 bp, Zea mays
  Coding DNA Sequence Number=SeqID_5798
gcgtgccgatgatctacgcggccatcggctactggggcgtgggcctgccgtgcggcgcctggctggcgttccgggccgactggcgcggggtcggcatctggagcgggctggcgatcggcctggcggtggtggcggtgctgatgatgcaacgctgggcccggcgcgcgccgctgggcctggtcgggcggcgcgtgtcccacatgccataatcgccgatgcatttcctggaacttccatgcccaccgccttgcccgtttttcccctgttgaacgccgaacgcctgtggtcgcgtgtcgagaccctgtcgcgctacaccctgcccgaccagccctggacccgccgcgccttttcgccgctgttcctcgaagcgcgcgactggctgcgcggtgaattcgaggccg

SEQ ID NO: 20202 - DNA, 488 bp, Zea mays
  Coding DNA Sequence Number=SeqID_5799
gggcggccccgcacatgaagatgtccagcgcggcgaaccggtgttcgggccaggaatggatgctgatgtgcgattcgctcagcatgaccaccccggtcacgccggcgccctctccgaaatggtggaagtgggcgcccagcacccgcgcccccgccgcctcggcggccaggaccagctcgcgttcgagcgcctgggcgtcggccagcaggcgggcggacacgccgcggaaatcggccaggatgtggcggccgggcgtggcgtgcggcgtcacttgtgcgaaccgcccgatgaccagcccgagctgcccgacgagccgccgccccagctgctgctgctgccgccgctgccgccgccgctggtgaagcgggcgccgggcgagctggcgccggtggcggccatgaccacgatcagggcgtagatggcgtagatgaacttgcccatgcctcagtcgtcctttgcggacatcttgtccgcgaggctggccggca

SEQ ID NO: 20203 - DNA, 516 bp, Zea mays
  Coding DNA Sequence Number=SeqID_5800
attttgccgctcgtgatcggcctggccttcctgtggctgccggccagcctcgcggacaagatgtccgcaaaggacgactgaggcatgggcaagttcatctacgccatctacgccctgatcgtggtcatggccgccaccggcgccagctcgcccggcgcccgcttcaccagcggcggcggcagcggcggcagcagcagcagctggggcggcggctcgtcgggcagctcgggctggtcatcgggcggttcgcacaagtgacgccgcacgccacgcccggccgccacatcctggccgatttccgcggcgtgtccgcccgcctgctggccgacgcccaggcgctcgaacgcgagctggtcctggccgccgaggcggcgggggcgcgggtgctgggcgcccacttccaccatttcggagagggcgccggcgtgaccggggtggtcatgctgagcgaatcgcacatcagcatccattcctggcccgaacaccggttcgccgcgctggacatcttcatgtgcg

SEQ ID NO: 20204 - DNA, 598 bp, Zea mays
  Coding DNA Sequence Number=SeqID_5801
agatccgtcagatcgacaacggcatgaagcaatttttcgacggtatcagccagaacgtcgaatacgtggccaaggacccgcgcgttgtcgcggccagggacctcaagagttatgccggcgccgacgctgcgcaaatcccgctgactgcgaccaacaaagacctgctggggattttcgaccagttcgccaaaagccatcccagcaccgcctacctgtccctgggactgagcgacggcggttacgccagttggcctgacgacaccaaactgaacaactacgacccgcgcgtgcgcccctggtaccaggcggccatcgccgcaccaggcaagaccgtgcgtaccggcgcctactattgggcgccagacgatgtgtcgctgatcggcaccgtgcacaccgtcgccgacgacacgggcaagatcctcggcgtcgtcggcctggacgtgtcgctcaagcaactcaccgaactggtgcgcaacattaagctcggcgacagcggctacctgatgctggtggaagccaacggcaacgtgctggtagaccccagcgacgccaagcacaacttcaaaccgatggccgacttgggccctgattatgccga

SEQ ID NO: 20205 - DNA, 125 bp, Zea mays
  Coding DNA Sequence Number=SeqID_5802
ttcagcggtccataactgttcggtcaggcggatgtccagggtgatgctttcgttgaggctgcgttgcagcagctcacccatcgaacttaccaattgattgatctgtaccggttttgaatccagcg

SEQ ID NO: 20206 - DNA, 122 bp, Zea mays
  Coding DNA Sequence Number=SeqID_5803
gcttgctggcgttttcccgtcgccagtcgctggattcaaaaccggtacagatcaatcaattggtaagttcgatgggtgagctgctgcaacgcagcctcaacgaaagcatcaccctggacatc

SEQ ID NO: 20207 - DNA, 161 bp, Zea mays
  Coding DNA Sequence Number=SeqID_5804
cggccgcgttgctgggcggcatctccctggccgccgccatgagcgcggtcggcctgttcagcttcgcgcccgacatgccctactggccgttcgcggcgatcgtggcgctggccaacctgggcgtcggcattgcggtgcccgcgatgaccagcgtggtgatg

SEQ ID NO: 20208 - DNA, 155 bp, Zea mays
  Coding DNA Sequence Number=SeqID_5805
ctgttggcatggtgcttgcccgagacctgcatcaccacgctggtcatcgcgggcaccgcaatgccgacgcccaggttggccagcgccacgatcgccgcgaacggccagtagggcatgtcgggcgcgaagctgaacaggccgaccgcgctcatggc

SEQ ID NO: 20209 - DNA, 521 bp, Zea mays
  Coding DNA Sequence Number=SeqID_5806
gcggccaggccaattacgatgtgatctacgacaacagcgcggacgatccgcgcctgcgcagcgcggcgcgctcggtctatgcccaatcgcaaggcgccgagcgcgagccgttcaccatcgtcgcctgccacgtggaccggctggccacgccgaagccggtacagcccttctacatccgcgccaatgcgggtccgggcgcgggcagcacgcaggtccagttcgccgatgccgcgggcgacgtcagcttcctctggtacaacatcgacccgggccaggactggttcctggaatgcctgttcgaatacaccgacccggccgccggcgtgcgacgcgcggtggtgccgcgcgatcgggtcacgccggtcccctacgatccggccgagcccaaggcctgccatgccgtgaatgtccgcctggaggggctgctgcccgtgcccacggccggcaagatcgtgctgcgcgtgcggctcatggaaagcgcggcggcgggcatcgcgttctacaacaccaacctgctgtgc

SEQ ID NO: 20210 - DNA, 508 bp, Zea mays
  Coding DNA Sequence Number=SeqID_5807
gtcggtgtattcgaacaggcattccaggaaccagtcctggcccgggtcgatgttgtaccagaggaagctgacgtcgcccgcggcatcggcgaactggacctgcgtgctgcccgcgcccggacccgcattggcgcggatgtagaagggctgtaccggcttcggcgtggccagccggtccacgtggcaggcgacgatggtgaacggctcgcgctcggcgccttgcgattgggcatagaccgagcgcgccgcgctgcgcaggcgcggatcgtccgcgctgttgtcgtagatcacatcgtaattggcctggccgcgcgtggtcagcggcggcagctgcaccacgtccacgccgtgccgcgcgtattcggtggcggttggctggaagccgtgcggacgctgcatcggttcggggccgggcagcatgatctcctggatgtacaggcgcctgaccgtttccacgacttcggtggagatgatctggttcttgtcgttgaccacctcgaacagatag

SEQ ID NO: 20211 - DNA, 199 bp, Zea mays
  misc_feature (35)..(39): n is a, c, g, or t
  misc_feature (107)..(107): n is a, c, g, or t
  misc_feature (109)..(109): n is a, c, g, or t
  Coding DNA Sequence Number=SeqID_5808
ttggcccgaggcgtaggtgccgtcgccgaccaccnnnnncggcgggttgccgccgctgccgaccagggtgatgggcgcgccctgcacggtgtagcggtcggtggcgnantggatgcccgagacgcgcaccgggccggcgccgccatcgacggtgaccgtgccggccgcgccggtgaagatggcatagccgccgccgggc

SEQ ID NO: 20212 - DNA, 143 bp, Zea mays
  misc_feature (84)..(84): n is a, c, g, or t
  misc_feature (86)..(86): n is a, c, g, or t
  Coding DNA Sequence Number=SeqID_5809
ggcggctatgccatcttcaccggcgcggccggcacggtcaccgtcgatggcggcgccggcccggtgcgcgtctcgggcatccantncgccaccgaccgctacaccgtgcagggcgcgcccatcaccctggtcggcagcggcgg

SEQ ID NO: 20213 - DNA, 564 bp, Zea mays
  Coding DNA Sequence Number=SeqID_5810
atgtgaacagcatctcgggcatctgcctgaccaagctggacgtacttgacggcctggaaaccatcaacatctgcatcggctacaaagatgcggaaggtaaggacgttgccccgactgatgctgacagctacgtagggctgcagcctgtgtacgaagaagtgccgggctggaccgaatcgaccgtgggtgccaagaccctggaagagctgccagccaacgctcgcgcttacatcaagcgcgtcgaagagctgatcggtgcgccaatcgacattatttcgacgggcccggaccgcaacgagaccatcgttctgcgtcacccgttcgcttaataagctgttgatgtaaaaagcaaagggctccttcgggagccctttgtcgtttccggctggtaaacggcacggcccttgctatggttctttctttcgcggtgctatcaaattaatggcacccgtggtggagggattcccagtgtctgccgttctctcattgttacaaagccggctgttgcggccggtgttcgttaccctaggtatcgctcttttggtgcaagtactggtggccgtc

SEQ ID NO: 20214 - DNA, 111 bp, Zea mays
  Coding DNA Sequence Number=SeqID_5811
gggaacacgccttcgcgacgggattcgaccaacacctgttgaatgatgctgctgcgggtgaccaaccctggacgctcgacccgggcaatatccggcgtaggcgcggtgagc

SEQ ID NO: 20215 - DNA, 136 bp, Zea mays
  Coding DNA Sequence Number=SeqID_5812
agtccgggtattacgtgcaccagacgccggcgctcaccgcgcctacgccggatattgcccgggtcgagcgtccagggttggtcacccgcagcagcatcattcaacaggtgttggtcgaatcccgtcgcgaaggcgt

SEQ ID NO: 20216 - DNA, 397 bp, Zea mays
  Coding DNA Sequence Number=SeqID_5813
agcaccgccaggtgctgcgagaccgcgggctggctgatgtccaggccctcgcgcagcgcgctggcgttcatggcgcccgccgcgagcttgtcgaacagcgcgcggcgggtcgggtcggccagggccttgaagatgtcgttttcgatcatggcaacacattagcagttgcttatgtgttgtgcaagcccggcccggcccggatcaggggccgggccgccgccctgcgcgggcgggggactcagtggatgacgcgggccgccttgcgggcgcgcttgatctcgtacatgcgggcatcggccaggcgcaccgcttcctcggccgccaggccgcgcggatcgagcgccaccacgccgacgctggcgccctcgtagggcagggcggtctcgccgagctggta

SEQ ID NO: 20217 - DNA, 451 bp, Zea mays
  Coding DNA Sequence Number=SeqID_5814
gccgagcgcggcgatgccgaggaagcggcgcgctcgctcgaagaccgcgccgccgccgccaccgtcggccgctaccagctcggcgagaccgccctgccctacgagggcgccagcgtcggcgtggtggcgctcgatccgcgcggcctggcggccgaggaagcggtgcgcctggccgatgcccgcatgtacgagatcaagcgcgcccgcaaggcggcccgcgtcatccactgagtcccccgcccgcgcagggcggcggcccggcccctgatccgggccgggccgggcttgcacaacacataagcaactgctaatgtgttgccatgatcgaaaacgacatcttcaaggccctggccgacccgacccgccgcgcgctgttcgacaagctcgcggcgggcgccatgaacgccagcgcgctgcgcgagggcctggacatcagccagcccgcggtctc

SEQ ID NO: 20218 - DNA, 436 bp, Zea mays
  Coding DNA Sequence Number=SeqID_5815
cgtggttaaaacagacatcgtcgcagacaaaaaggccatcgccgccaagctcaaagaaatccgtgatcacaatgaggcggtgcgcaagcgcatagccgccggcgaagatgcggagcacgaaattatccccgaaccgaaatgggctcaccttgaacgcggcgacagttcgattcgcatcaggtgacgccagcatgatcagcaatcacctcagcctgatcgagcagcaacgccaacacgcagaatcaatatcggaacgtgttgctcagtttttgcagccggcgggacgatctatcagggcgaaagcctggccatcaacacgcaacctccgaagcgcaccgcaaagatcgatcccgaaacagtcctcaagcgccgtaagcctccgatcacgagagccgagcgtgaagcgctgcgcaaactcgcggaggcgctatgagca

SEQ ID NO: 20219 - DNA, 532 bp, Zea mays
  Coding DNA Sequence Number=SeqID_5816
ttgggtcgatgttcacaaccgctacgtggttggttgcgagtagagcgcggcacgagcgttcaatgcgggccttgaggttgtgaggcttgcgcttcctgctcatagcgcctccgcgagtttgcgcagcgcttcacgctcggctctcgtgatcggaggcttacggcgcttgaggactgtttcgggatcgatctttgcggtgcgcttcggaggttgcgtgttgatggccaggctttcgccctgatagatcgtcccgccggctgcaaaaactgagcaacacgttccgatattgattctgcgtgttggcgttgctgctcgatcaggctgaggtgattgctgatcatgctggcgtcacctgatgcgaatcgaactgtcgccgcgttcaaggtgagcccatttcggttcggggataatttcgtgctccgcatcttcgccggcggctatgcgcttgcgcaccgcctcattgtgatcacggatttctttgagcttggcggcgatggcctttttgtctgcgacgatgtctgttttaaccacg

SEQ ID NO: 20220 - DNA, 458 bp, Zea mays
  Coding DNA Sequence Number=SeqID_5817
ttttatagtgtcttgcgcgggagcaaggcctgcgggccattgatgaaacccctgaaaccatacagcgtacatcccggcggcttttgccccttggtagtcgtttagagggtgatcaccgacaaaccagcagtgctcgggaagaacgcctaaccgtgcagccgcctcatggaagatttcccgtgcaggtttggctgtcccgaacgcttgcgagctgacaacggtaccaaccgactgagcgaagggcaatgcagcgatggttttccttcgcgagtgctcggcgccattggaaacaatcccgaccttgatgtgtctgtgctccagcgcctgaatcaacgctgcagcgcccggcattggcacggctgcggccggaaaatggctgacccagtgctcgaccaggacctcagccggctgcggcactcgccacggcagttggttggcaagggtgtggcctacagctt

SEQ ID NO: 20221 - DNA, 542 bp, Zea mays
  Coding DNA Sequence Number=SeqID_5818
aggcgctggagcacagacacatcaaggtcgggattgtttccaatggcgccgagcactcgcgaaggaaaaccatcgctgcattgcccttcgctcagtcggttggtaccgttgtcagctcgcaagcgttcgggacagccaaacctgcacgggaaatcttccatgaggcggctgcacggttaggcgttcttcccgagcactgctggtttgtcggtgatcaccctctaaacgactaccaaggggcaaaagccgccgggatgtacgctgtatggtttcaggggtttcatcaatggcccgcaggccttgctcccgcgcaagacactataaaatcgctcgacgagctacccgctctgatcgcaaagcgatagccagcataacgccggataattagcctcacttcgcaaaccaaacgtcaacggaactgcgtttatgaaatacagctggatcgcacttgtcttactgctttgtgcctgcacgagcggccccaaccaccaggagcaactggtagagaagcgcttatgggaatatcagttgctcactcacct

SEQ ID NO: 20222 - DNA, 465 bp, Zea mays
  Coding DNA Sequence Number=SeqID_5819
ttcgagatcctgatcaccggccgcggcggccacggcgcgcatccttatcagacgatcgacccggtgacgatcgccggccagatcatcacggcgctgcagaccatcgtgtcgcgcaacgtcaatccgctggattccgccgtcgtgtccatcggctcgctgcaggcgggccatcccggcgcgatgagcgtgattccgcgcgaggcccggatggtgggcacggtgcgcacgttccgcaagtcggtgcaggagatggtcgagacgcgcatgcgcgaactggtcacggcgattgccagcgcctttggcggcaccgccgaactgacctacgaacgcatctatcccgcgaccctgaatacgccgcagcacgccaacctggtcgccgacatcgccaccgagatgatcggcaaggaaaacgtggtgcgtgatctggtaccgtcgatggggtcggaggatttctccttcatgctg

SEQ ID NO: 20223 - DNA, 580 bp, Zea mays
  Coding DNA Sequence Number=SeqID_5820
gtgctggtggacttcgacgaagacatcccgatggtggatgaaagcctggagcagttcgcccagttgctgaaaacccgcacctcggaagaaggcatggcgccgttgacctcggatgcggtcgcgcggctggcgacctacagcgcgcggctggcggagaaccaggggcgcttgtcggcgcgtatcggtgatttgttccaactggtcagcgaggcggacttcattcgtcacctggcgggcgatgagcgcaccgactccgggcacatcgagcgtgcactcaaggccaaggccacgcgcaccgggcgggtgtcggcgcggattctcgacgacatgctcgccggggtgatcctgatcgacaccgccggtgcggcggtgggcaagtgcaacgggctgacagtgctggaagtgggggactcggcattcggcgtgccggcgcggatctctgcatcggtgtacccgggcggcagcggcattgtggatatcgagcgtgaagttaacctcggccagccgattcactccaagggcgtgatgatcctcaccggttacctgggcagccggtatgcccaggaattcccgttggcga

SEQ ID NO: 20224 - DNA, 485 bp, Zea mays
  Coding DNA Sequence Number=SeqID_5821
atgctgatcggcatgaaccgcaccgaagagctgaagctgcacctgcgggccgccgcgagcaacggcgtgacccgcgccgagatcaaggaagtgctgatgcagagcgcaatctactgcgggatcccggcggcgaatgcgacgtttcatttggctgagtcggtgtgggatgagttgggggttgaatcgcgcgatccagtctgattgaacccccgcaggacgcgtctgctatgtgtactgggtgcgtaacgggcggcccatttcctctcggagagcattttccgtaaagggcttgggattggttgtcgtgggttcggttgatcgatgattgtcgaagtcaaaaggcagcgcaatcgtaggcaggcctacagcttgccgttcggcgttgggttcgccgccggggttctccgggatgccggtatcgccttcgagaaaggttcccgtggcaccgttataggcatgggccatttcatggtagagggcgttga

SEQ ID NO: 20225 - DNA, 560 bp, Zea mays
  Coding DNA Sequence Number=SeqID_5822
aatggccaggtcgtgaccgccaacggtttcgcgctggagccggcgattgtggtgccgaacaacgcccagactttcaccgtcggcaacgacggcaccgtgtcgatcactgtggccggtaacccggcctcccaggtgatcggcaacctgcaaaccgccgacttcatcaacccggccggcctgcaggcgattggtaacaacctgttcctggaaaccgcgtccagcggcgcgccgcaaatcggcacccctggccttaacggttttggtaccaccctgcaaagcaccctggaaacgtccaacgtcagcaccgttgaagagatggtcaacatgatcaccacgcagcgcgcctacgagatgaactccaaggtgatttccaccgccgaccagatgctttcgttcgtaacgcagaatctgtaatcaagtctatgggggcgcccttgaaggcgcctgcaacaccgtgaggtatgggtcatgaatcgctatgtttctgttctggcattgagtgggattgctgcgctggcgggctgtgtcgccccgacgccaaagcccaatgatccgtacta

SEQ ID NO: 20226 - DNA, 480 bp, Zea mays
  Coding DNA Sequence Number=SeqID_5823
gatatagatcttcagcgctgaatagcgcgcatccatggcggcgagccaccggcgcaggccgtcggcgccgtcggtgcgcgcgatctgcgtcgcatcgcgggtgaggttgccgggattcaggccgtccagcgaatcgacgcggtaccaggccaccgccgcggtcagcatcatgccgcagaccgtgatgatggccatcgcgccccagaaggtcaggaaggcgcgccagaacagcgagcgtatcggcagccaggccatcaggccgcgcccgccagcacgtagcccagcccccgcaggttgcggatggcgggggcgtcgccggcctggtccagctgcagtttcctgcgcaggctgctgatgtgggtgtcgatgctgcggtcgtagcggtcggcgctgcggcccagcgcgtacaggctgatctggtcgcgcgccaccacctggcccggcgcgcgcatcaggatttccaggatgcgctgttcggcg

SEQ ID NO: 20227 - DNA, 405 bp, Zea mays
  Coding DNA Sequence Number=SeqID_5824
ttggcgcgcaagaggtgctgctgaccggcgccgaacagcgcatcctggaaatcctgatgcgcgcgccgggccaggtggtggcgcgcgaccagatcagcctgtacgcgctgggccgcagcgccgaccgctacgaccgcagcatcgacacccacatcagcagcctgcgcaggaaactgcagctggaccaggccggcgacgcccccgccatccgcaacctgcgggggctgggctacgtgctggcgggcgcggcctgatggcctggctgccgatacgctcgctgttctggcgcgccttcctgaccttctggggcgcgatggccatcatcacggtctgcggcatgatgctgaccgcggcggtggcctggtaccgcgtcgattcgctggacggcctgaatcccggcaacct

SEQ ID NO: 20228 - DNA, 310 bp, Zea mays
  Coding DNA Sequence Number=SeqID_5825
agcctgggcttcatggacacggtcatcgtccacgtgaccctggaaagccacagcgaggaaacgctctatgagttcgggcgggcgctggcgcagattccggaggtgctggaagccttcctggtgtcgggcgactacgactattacatccgcatcgccgtgcgcgacacccgcgactacgagcggctgctgcgcgagcagctgtatcgcatccccggcatccgccacagcaaatcctgcttcgtattgcggcgcctgaaggaaaccatgctgccgctgaacgggccgacgacctgaatcctggcgctcagcg

SEQ ID NO: 20229 - DNA, 367 bp, Zea mays
  misc_feature (312)..(315): n is a, c, g, or t
  Coding DNA Sequence Number=SeqID_5826
tgcggatcagaaccaatggcggcaacgattgcgtgctgatcgatccacaggttgataacgatattcgcattgagttgggcgctggtgacgattacgcccaggcgggctccggcaatacccggctatacggcggtgcaggtaacgacaggctcaaactcgggagcggcaatggcatcgcgatgggcgatgatggcgatgacctgctgatcgcaggctcaggcaacagcatcctcaaaggcaataacggcaacgatcgcatgcaggcaggccaaggcctccctgagcgccgcctgctcatggacggcggtgatnnnnacgacttcatgattgtcaccccgcaatgacacaaacattccggcggtcatgc

SEQ ID NO: 20230 - DNA, 525 bp, Zea mays
  Coding DNA Sequence Number=SeqID_5827
gagtttgagcctgtcgttacctgcaccgccgtatagccgggtattgccggagcccgcctgggcgtaatcgtcaccagcgcccaactcaatgcgaatatcgttatcaacctgtggatcgatcagcacgcaatcgttgccgccattggttctgatccgcagtggttgggtttcactgccatcaggggaacgaagcaggttcagttgatagggcgtgttgttgatgatggcgatcagattgttgtccggactttttttgatgaccaccttgtcgtcgtgattggcggtctcgatgatgaattcgttaccggcagcgcctacaggcttcccgcctttgctgacgtaggtgatttcctggtaaatcttcacattctggtcatgacgcaatatgtcggtgttggtgtattttttttcgtttttgtcgagggggttctgatccgcggcgagcttggaaagggaagagaaatacatgaaatccaggggtctgtcgtgaccgatataccgggatgatttgctggtgactacgac

SEQ ID NO: 20231 - DNA, 366 bp, Zea mays
  Coding DNA Sequence Number=SeqID_5828
gccatgctcaggcagctgggccagccgctgaaccagcgcctgacgcccgacggctatccgcaggcgcagtcggactgggccggctcgggccagatgaccgcgcgcttcgaagtggcgcgcgccatcgccgccgcgccgcaggccttctaccgcgagggcgacgacaaggggcctgtggaattgccgcgcctgcccgacctgctgcgcgagaacgccgccgacggcctgttcgcgcgcctgtcgcccgccacccgcgacgccatcgcgcaggcgaagaaccccaaggacgccaacacctatctgctggcctcgcccgaattcatgcggcgctgacccgccgcgggagacacatcatgcatcgccgcc

SEQ ID NO: 20232 - DNA, 481 bp, Zea mays
  Coding DNA Sequence Number=SeqID_5829
ggcaatatcatcgacgcaggcggtaccggcgccgacaacacgtcggtctggttggtggtgtggggcaagaacaccgcgcacggcatcttccccaagggctccaaggccggcctgatccacgaggacatgggtctgatcgacgcgttcgactccaacaacaaccgcttccgcgcctacgccgaccactggcaatggaaatcaggcctgacgttgcgcgactggcgctacgtggtgcgtatcgcgaacgtggacatcagcgacctggtgggccagaccggcacgcaagcgcccacggccgccaccgccatcatgaagctgatgctgcgggcgatggcgcgcattcccgcgatgggtatgggcactccggtgttctacgccaaccgcacggtcaaggaaatgctgtcgatcgccgccctggacaagtcgcagaatgcgctggccatcgaggccgctaccaaccagttcggcacggttgcaccgg

SEQ ID NO: 20233 - DNA, 261 bp, Zea mays
  Coding DNA Sequence Number=SeqID_5830
ccaggcacagttgggtgagcaggctttcaggcgttggacggagcggggtgggtgtggtcatggcgggcatccctggcgtatgaaaacgacccgaggcgatgcctcggggggttcatgctagggagcggcctggcagatcagggggtggatatatagggcgaccagcctcaggcgagttcgccgcacaggtccagttccaccaggcggcgaacctcggtcaccggcaggccggcaccgagcagtgcgttgagcttgccgaac

SEQ ID NO: 20234 - DNA, 578 bp, Zea mays
  Coding DNA Sequence Number=SeqID_5831
tggaactggacctgtgcggcgaactcgcctgaggctggtcgccctatatatccaccccctgatctgccaggccgctccctagcatgaaccccccgaggcatcgcctcgggtcgttttcatacgccagggatgcccgccatgaccacacccaccccgctccgtccaacgcctgaaagcctgctcacccaactgtgcctgggcccctcgtttcgcgagaccgcttcggtgcagttgcgctattcactgcacacgttatatcccgccttggcactggacccggatatcgtcctggtctgcacacccgcctggggggttgtcggtgaccaggttcagccactcgaaccccgctaccagaccctcaccgatatccttgcgcaccaggctgtatcgggcctcccgaccctttacatcgagggtgtgcatttcttgacccagcagccgctcagcgacccaccgctgcacttgccggtgcgcatcggcgagatcgcccagatgctcaatgtgctggcgcccgtcatgctctgtgccttccaggagcaacagctcaattactggaaccgcatgatcgaaggccaacc

SEQ ID NO: 20235 - DNA, 534 bp, Zea mays
  Coding DNA Sequence Number=SeqID_5832
aagttctacctgtacgacatcgacgacaagcaggccctggcgccgcgcctgggcggccagctcgaaggcatcggcaccagccatccgcgcctgcgggtgcgcgacgccgccggccagacgctggtggagcgcgacatcgcgcccagccacgcgcccgacgtgccaaacggccaggaagtggtcggcacctggctcagcggccacctgggcggcgcgccgctggccgtcggccaccgcgtggtgcacggcggccccgacctgtccgaaccggtgctgatcgacgatgacatcctcgcccggctcgaggccttcacgccgctggcgccgctgcaccagcccaacaacctggcgccgatccgcgtgatccgcgagcggcgtccgtggattccgcaggtggcgtgcttcgacaccgccttccaccgcagccattcggacgtggccgaccgctacgccctgcccgagtcgctgtaccagcagggcgtgcggcgctacggcttccatggcctgtcctacgaatacatcgcgcagcggctg

SEQ ID NO: 20236 - DNA, 318 bp, Zea mays
  Coding DNA Sequence Number=SeqID_5833
atggctggagctgttcccgaaactgccgatctccggcatgaccggcagcatcgccgccaactgcacactgattgccgtggatggcgaccattggttgttgcacctggacccggcccacagcgccctgttcaacgcgacccagcaacgtcggctcaacgatgccctgaaccagttccacgggcgcacactgactatcagcatcgaactgatcaagcccgagcaggaaaccccggcccaggcggcgtcccgccgccgggtcaaccgccagcgcgaggctgaagagtcgatccacggtgatccgctcatccagcagatgat

SEQ ID NO: 20237 - DNA, 447 bp, Zea mays
  Coding DNA Sequence Number=SeqID_5834
ggttctcagagtgatcatggtgctacggaaaaaaaagaagaagggttggcggcggccgtcagccggcgtcggtgcgccgctcgatggcgcggattaccgccaccatgtcggacgcgcccaggccctgggcctcggtctcgccgtacagcgcgtggctggcatccagcagcggcgaggcgatgccggcgctgcgcgcggcctcggccaccaggcggctgttcttgaggacgtcggtgatcgccgcctgcacggaaaagtcctgcgtcaccagcttgcccagtttgacgcgcgacacatcgctggccatcggcccggcgttcagcacctcggcgaacagcgccaggtcgatgccctgccgctcagcgaaatgcaccgactcggtcaggcccgtaaccatggtgatgaggaacaggttgaccgacagcttcatggccagcgccgacggca

SEQ ID NO: 20238 - DNA, 476 bp, Zea mays
  Coding DNA Sequence Number=SeqID_5835
tgtgccgcgacagtttcgtctgtggcgcggtgccgtcggcgctggccatgaagctgtcggtcaacctgttcctcatcaccatggttacgggcctgaccgagtcggtgcatttcgctgagcggcagggcatcgacctggcgctgttcgccgaggtgctgaacgccgggccgatggccagcgatgtgtcgcgcgtcaaactgggcaagctggtgacgcaggacttttccgtgcaggcggcgatcaccgacgtcctcaagaacagccgcctggtggccgaggccgcgcgcagcgccggcatcgcctcgccgctgctggatgccagccacgcgctgtacggcgagaccgaggcccagggcctgggcgcgtccgacatggtggcggtaatccgcgccatcgagcggcgcaccgacgccggctgacggccgccgccaacccttcttcttttttttccgtagcaccatgatcactctgagaac

SEQ ID NO: 20239 - DNA, 189 bp, Zea mays
  misc_feature (156)..(157): n is a, c, g, or t
  misc_feature (159)..(159): n is a, c, g, or t
  Coding DNA Sequence Number=SeqID_5836
agcagctgcgcggcaagtatgtgctggtgggcgcctgggccaccggcctgggcgatgcctacaccacgccggtctcgcacgaggtcagcggcatgccgggcgtggagatcatcgccaacctgctgcaggcagccaacgacgacatcgccttccggnngnccgctccctggctcaatgccctgttctcgg

SEQ ID NO: 20240 - DNA, 162 bp, Zea mays
  Coding DNA Sequence Number=SeqID_5837
cggcatagccatgcttggcgtagaacgcgcggctctgcgtattgaaggtgtcggtctccagccgcgcctcgccgaagccggcggcgcgcatgccatcctcggccagcgccagcagcgccgcgccgaccccgcgccgctgctgcgccggatgcacgtgcaggg

SEQ ID NO: 20241 - DNA, 180 bp, Zea mays
  Coding DNA Sequence Number=SeqID_5838
tggcgggcatggtggactgggagaagaacttcatctgggccctgcacgtgcatccggcgcagcagcggcgcggggtcggcgcggcgctgctggcgctggccgaggatggcatgcgcgccgccggcttcggcgaggcgcggctggagaccgacaccttcaatacgcagagccgcgcgttct

SEQ ID NO: 20242 - DNA, 500 bp, Zea mays
  Coding DNA Sequence Number=SeqID_5839
gcgctgtgcgcctatgtctgctcggcgcacgcgggctacatgacggcgcagaacatcctgctcgatggcggcggctaccccggcacgtactgaatccgcgccccgggcggtccgtggggctgcttagggtgttccgcggctggacgcgggcggggtgtcagggcaagattgcggcgatatcgcttgaggaatccccatggaccagacggacatcaagatcttggcgttgctgcagaaggacgccacctgctcggtcgccgagatcgccgagcaggtcaatctgtccgtcaccccctgctggcgccgcatccagaagctcaaggacgatggcgtcatcgcccgcaacgccatcctgctggacccgcgcgcgctggggctgaacctgaccgtgttcgtctcgatcaagaccagccagcacaacgagaaatggacccagagcctgatcaacgcggtcatggcgctgccgaatgtggtcgagttccatcgcatggccggcgaca

SEQ ID NO: 20243 - DNA, 297 bp, Zea mays
  Coding DNA Sequence Number=SeqID_5840
ggccttcctgtgctacgtcggctaccgcgtggccggacgcatgacccggcgtttttacccgatgtctgatgatatccgtgcagaggtctacggcccccacgtgaccaacgatgacctgcgcgcctggcataacggcaacgcccagaacgtcgaacagggggctggcgccgtcgcgcacatgggcctcgaagagtccaccagcagtctcgttgccaagctgccgcccgctccggcgccgggtttcgggctgatcgtcagcctgatcctgttgcccatcatcctgattctgctgggcac

SEQ ID NO: 20244 - DNA, 399 bp, Zea mays
  Coding DNA Sequence Number=SeqID_5841
gtgcttcctcaaggttgaaaccgaccagggcgtgaccggttggggcgaacctgtggtcgagggccgcgcccacaccgtagccgccgccgtcgaagaactgtccgactacttgatcggcaaagacccacgcaatatcgaagacatctggacggtgctctaccgcggcggtttctaccgtggcggcgcgatccatatgagcgccctcgccggcatcgaccaggcgctgtgggacatcaagggcaaggctctcggtgtgtcggtcagcgacctgctgggtggccaggtgcgcgacaaaatccgcgtgtattcatggattggtggcgaccgcccggccgacactgcccgcgccgccaaggaagccgtggcccgtggttttactgcggtgaaaatgaacggcac

SEQ ID NO: 20245 - DNA, 431 bp, Zea mays
  Coding DNA Sequence Number=SeqID_5842
atgcccatgacctgcatggcgctgttgtctctgaccccgccacaccccatacccacgttcatggagatagctgcaagcatggctgattttctgctctacgccctgctggcaggcttggctctggcgctggtggcgggcccactgggctcgttcgtggtctggcggcgcatggcctattttggcgacaccttgtcccacgctgcgctgctgggcgtggccatggggtttctgctggatgtgagcccgaccattgccgtcaccgtcggctgcctgttgctggcggtgctgctggtgaccctgcaacagcgccagccgctggcttccgatacgctgctgggcatcctggccccaagcaccttgtccctgggcctggtggtgctgagcttcatgcatgaagtgcgtatcgacctgatggcctacctgttcggcga

SEQ ID NO: 20246 - DNA, 412 bp, Zea mays
  Coding DNA Sequence Number=SeqID_5843
gtgctggacgacatcatgtaccgcgccatcgccatcggcttcgccttcttcaccgtggcgaccatcctgggcgcgctgtgggccgcggacgcctggggcgcctactggcagtgggaccccaaggaaacctgggcgctgatcgtctggctgaactacgcggcctggctgcacatgcgcctgatcaagggcctgcgcggcaccatggcggcctattgggcgctgacgggcctgctgatcaccggcttcgccttcctcggcgtgaacatgttcctgtcgggcctgcattcctacggccagctctgagccagacgcgcacggcaaaaggccccgtttcgacggggcctttttcgtggggcggcggggcgttcagggcagcgtcgattcgccgcgcagcaggtcgtccagcgtttcg

SEQ ID NO: 20247 - DNA, 126 bp, Zea mays
  Coding DNA Sequence Number=SeqID_5844
tgacggtgcgcttcgtgggttcggagcgcacggtcgaagccgtgcgcaacttgtcgttccatgtggaccggggcgagaccctggccatcgtgggcgaatcgggttcgggcaagtcggtgacgtcgc

SEQ ID NO: 20248 - DNA, 98 bp, Zea mays
  Coding DNA Sequence Number=SeqID_5845
agcgacgtcaccgacttgcccgaacccgattcgcccacgatggccagggtctcgccccggtccacatggaacgacaagttgcgcacggcttcgaccgt

SEQ ID NO: 20249 - DNA, 332 bp, Zea mays
  Coding DNA Sequence Number=SeqID_5846
gttcggccatcgacctgggcggcctgccgcaagaacgccgcgccaagatcctgccgttcatccgcacctgggccgaaagcggcggcggccagtccggcgaagccgtgttccgcagctactacgaaacgctcaacgtgcgcgccaggacggtcgccgccaccgctcccttcgactacgtcctgtcgccggtggcgccggtggtcgcctacaacgccgagtgggccgcgcccaccaacgaggtcgccacgaccatgcaccacatcggctacacgctgccctacaacatgagcgagcagccggccgcctcggtcaattgcggctacacccgggcc

SEQ ID NO: 20250 - DNA, 421 bp, Zea mays
  misc_feature (36)..(36): n is a, c, g, or t
  misc_feature (66)..(66): n is a, c, g, or t
  misc_feature (116)..(118): n is a, c, g, or t
  misc_feature (376)..(376): n is a, c, g, or t
  misc_feature (386)..(386): n is a, c, g, or t
  misc_feature (393)..(393): n is a, c, g, or t
  Coding DNA Sequence Number=SeqID_5847
acccaatgacggtggtctacgcgacccggtgtgcgntatggcggttatacctccaagtaaatttgncgagtcttaccaaggacagacgtatcaattttgtagccagaaatgccaannnaaatttcgggcagatccagaacgctacattggtaatcatcccagcgctgaacccagcagcgccgctatagagcccacgctacaggtagccactgagtttacctgtcctatgcacccggaaataagacagccagggcccggcaattgccctaaatgtggcatgacattagagcccgtcatgcccgcgcttgatgacgatgacaaacccgagctcctggatttcacccgccgcttttggtggtcgctgcctttaaccgtnatggtggccnttctagncatggcgggtcactcattacaaatcttc

SEQ ID NO: 20251 - DNA, 548 bp, Zea mays
  Coding DNA Sequence Number=SeqID_5848
gggaatcaacgttctcgtcgcaaaaaattcgcggctgaggtcgtcggtttttaagggttgcggatgttaacccctcattgcccggaatgcaaagcctctgatcgaaaaccgctagtcgggagggggagtggcgactattatgcgcgccttcgaattcagcctctacaaggcgcaaacccatgctagttctgggattagaaacctcgtgcgatgaaaccggtgtcgcactttacgacagtgaacgcgggcttttggccgacgcactgttcagtcagatcgacctgcaccgcgcctatggtggcgtggtgccggagctggccagccgtgatcatgtgaaacgcatgctgccattgattcgccaggtgttggacgaggccggctgcgtgccgaccgagatcgatgccattgcctataccgcaggcccgggattggtcggagccctgctggttggggcctcttgcgcccaagcgctggcatttgcctggggcattccggccctcggtgtgcaccacatggaaggccatttactggcgccgatgctggaagaa

SEQ ID NO: 20252 - DNA, 129 bp, Zea mays
  Coding DNA Sequence Number=SeqID_5849
gtgatccaggcctgcctggacctggcccattttccaagacgcggagcgcggcgccatgccgccaaccccaatctccgcttcctgcatcatcagaagcgatgcaccatcgcctactccttgaacgatgac

SEQ ID NO: 20253 - DNA, 158 bp, Zea mays
  Coding DNA Sequence Number=SeqID_5850
tcctccatagaacacgcccataatggtcacggacccgtcatcgttcaaggagtaggcgatggtgcatcgcttctgatgatgcaggaagcggagattggggttggcggcatggcgccgcgctccgcgtcttggaaaatgggccaggtccaggcaggcct

SEQ ID NO: 20254 - DNA, 126 bp, Zea mays
  Coding DNA Sequence Number=SeqID_5851
ccgacgccgagtgcgtggccttgttgcgcgcggccggcgccatcgtcatcggcaagaccctgacgcatgaattcgcctacggtcccaccggcgaccgcagcgtgcagggcgcctcgcgcaacccct

SEQ ID NO: 20255 - DNA, 155 bp, Zea mays
  Coding DNA Sequence Number=SeqID_5852
ggagccgcccgtgatctggctggtgcgccaggggttgcgcgaggcgccctgcacgctgcggtcgccggtgggaccgtaggcgaattcatgcgtcagggtcttgccgatgacgatggcgccggccgcgcgcaacaaggccacgcactcggcgtcgg

SEQ ID NO: 20256 - DNA, 263 bp, Zea mays
  Coding DNA Sequence Number=SeqID_5853
cctggtgcagataggcgcgcggctgcgccacctgcgccgggtccgtttccaggcacttgaccagcgcgtcgtgggccagatcgcgcgcggcgtcgcggcagcctagcttccgggtccagaccgcgagcagttcttcgtaataggccaggaagccggatgggcgggacgaacgcaatgacatggcgcgcaatcgatagagtcaggcatgataatggtttccattttcataaacaaacccgcattccatgcaaggacgccaccat

SEQ ID NO: 20257 - DNA, 228 bp, Zea mays
  Coding DNA Sequence Number=SeqID_5854
atggtggcgtccttgcatggaatgcgggtttgtttatgaaaatggaaaccattatcatgcctgactctatcgattgcgcgccatgtcattgcgttcgtcccgcccatccggcttcctggcctattacgaagaactgctcgcggtctggacccggaagctaggctgccgcgacgccgcgcgcgatctggcccacgacgcgctggtcaagtgcctggaaacggacccggc

SEQ ID NO: 20258 - DNA, 499 bp, Zea mays
  Coding DNA Sequence Number=SeqID_5855
gtcgagggtgaaagcgccgccacttaggcgcttatgccacttttttaacccggttgacggtgcttaactgaaattcaggcctcaatgaacgtggccttttttcaggaggcccgtcatgaacctgcaccagttcgccgaaacccacgacgtcaccaaccagccaccgtccctggacggcaccaacctgtaccgtatcgatctccccctgcaagaatggtcccggcgctttggggccggctgggccgagcagcgtatcgatacctacggtgccttggcaggcgggccgctgatggaggccggtttcctggccaaccagaacaagccggtgttcaacagtcatgaccgttttggtcatcgtatcgacttggttgaatttcatccggcctaccacgaactgatgcgcaccgccgtcgagcatggtctgccgtcgttgccgtgggcccacccacaatccggcgcccatgtggcccgcgcgtccatgacttacctgcacagccag

SEQ ID NO: 20259 - DNA, 383 bp, Zea mays
  Coding DNA Sequence Number=SeqID_5856
acccggctatgacgtgacctatcaaaccgacacctatggtgttcaggcgcagaacacctcgacctttgccttgagcgagctgtccgtgctcaaggctaactatgggctggagtttttctacgacaaggtccggccggactccaatcaaccggtggaggctggctctgcggttgaggcttccgcgctggaaagcatcacccccagaggtgaccgggcgatgggcagcctgttcggtcgcctggattacgactacgacgactggctgaatctgaatgccgggctgcgttacgaccgctatcggttgcggggcgaaaccggcttgaacacccgcaccttcatcatcggcaccacccgccagatcggcgtacccgtgggctacgacg

SEQ ID NO: 20260 - DNA, 565 bp, Zea mays
  misc_feature (468)..(468): n is a, c, g, or t
  Coding DNA Sequence Number=SeqID_5857
gtctctatcacgcttgtacaaactggcgagaaacggtgtcatgtcttcaagcccgttggcgttcaagtccactggataaattttattatccctcgccgaatacaggaaattgctcagctgcagatcgttgtggtaaagatttttctgctccatacgccgaaacgcgtcatccagtaaaagccgcgcctctgggggcaaacttcccctcgccagggtattaacgtccaccccgtccagtttgcccattttcaaataacgacgaccatcctcaaatatcgtcgttgcaaagccgtcaccgtaatagctgttcaggcacagggtctcgttatcgacaaagtcgtcggcagccgtcatggatgaagggccatagtccttataaacacttttaccgtcgagactttcgtagatcgtcccctcgccgcccccgccaatttttgggcccaggtccgatgccaccgaaggcgggtngccgccgcgggcacccaggcgctgccattggtccccctgaaggtgctgcaccaacagcggcgtttgccgattattgtgataaatccgtgcctgcacg

SEQ ID NO: 20261 - DNA, 516 bp, Zea mays
  Coding DNA Sequence Number=SeqID_5858
ggctgccgacgactttgtcgataacgagaccctgtgcctgaacagctattacggtgacggctttgcaacgacgatatttgaggatggtcgtcgttatttgaaaatgggcaaactggacggggtggacgttaataccctggcgaggggaagtttgcccccagaggcgcggcttttactggatgacgcgtttcggcgtatggagcagaaaaatctttaccacaacgatctgcagctgagcaatttcctgtattcggcgagggataataaaatttatccagtggacttgaacgccaacgggcttgaagacatgacaccgtttctcgccagtttgtacaagcgtgatagagacgagctgcgcagggcctattacgcgctgatcgccaaggcgtagctacacttgtggcgggtacaccctgctgtgatggcagcagggttttgaagcgaccgtcaagggttgtcagagcgtgtcagtcctggtgattgaagtcgccttcggacaccagctcgttcaatgga

SEQ ID NO: 20262 - DNA, 419 bp, Zea mays
  misc_feature (391)..(393): n is a, c, g, or t
  Coding DNA Sequence Number=SeqID_5859
tgaagatgaccgacacgcggcccggcaactgggtcgtgatctccggcatcggcggcctcggccacatggcggtgcagtatgcgcgcgccatgggcctgaacgtggcggcggtggacatcgacgatgacaagctggccttcgccaagcgtctcggcgcggaggtggtcgtcaacgccaagaccaccgatccggcggcgtacctgaagaaggagatcggcggcgcccacggcgcgctgatcacggcggtctcgcccaaggccttcgagcaggcgctgggcatggtgcggcgcggcggcacggtggcgctcaacggcctgccgccgggcgacttcccgctgtcgatcttcgacatggtgctcaacggcgtgacggtgcgcggctcgatcgtggnnncgcgcctggacctgcaggaatcgctg

SEQ ID NO: 20263 - DNA, 474 bp, Zea mays
  Coding DNA Sequence Number=SeqID_5860
atcgccctcgtcaacgagatccgcgccttccacgacggcccgctggccctgtccggctgcatcagccacggcaaggacatcctcgccgcccaggccctgggctgcgacttcgcctacatgggcacccgcttcatcgccacccgcgaatccctcgccaacgacgcctaccgcgaaatgatcctgcgcgcccaggccgccgacgtcacctacacgccccacttctccggcgtccccgccaactacctcaccgaaagcatccgcgccgccggcctggaccccacccggctccccgactacgacgccccgcctcccaacctcgacaagagcacccggcccaaagcctggaaagacatctggagcgccggccaaggcgtcggcgccacccaggaaatcctgtcggtggccgaactcgtgacccagctggaaacggaataccaggaagcaaagagggcgctgctgcgctaacaccgagcc

SEQ ID NO: 20264 - DNA, 550 bp, Zea mays
  Coding DNA Sequence Number=SeqID_5861
acacctgcggctggagcgacagcatcggcggcgtgttatgcgcctccgaagtcgcggaaaaatacggcaagggccgctatcaagagctgcgcaacggcttctaccgcaacggcaccgacaacctgctggtggaattgggcaagtggggcctggggctgtccgacctgctgatgaccctcaacctgttcagcaaaatcaccgtggatgacgccggcacgctgcacttcgccgaaggccattccaaggccggcgactacatcgaactctacgcaccgatggacacgctggtggtgctcaccgccctgcaacaccccatggacccgaaccccgaatacgcgccgcagccgctgaaactcagctggatgaacgccgatccaagcgtcgccgaacactgccgcacctcgcgcccggaaaacgagcgcggctttatcaacactgaccgtctgttcgcctgaggacctgccatgtctatcgcactcgccaaccaaccggacgcagccgtgtaccgcgcgaccatccccgccggcgaaccctggctgatggaagtcaa

SEQ ID NO: 20265 - DNA, 301 bp, Zea mays
  Coding DNA Sequence Number=SeqID_5862
tgcacacgggcgacccggacgatacgctcaaaagccagttcggtggctatgccgagcagctggcgcgggcctccggcctgacgcccgacgcccttgaagtggtcgccgtccacgccggcgaacgcccgcgcgcgccggaccagtaccgcgccgccctgatcaccggctcgcccgccatggtcaccgacctggaaccctggagcgaagacaccgccgcctggctgcgcgaggccgccgcggccggcctgccgatgttcggcatctgctacggccaccagttgctggcgcacgccctgggcgg

SEQ ID NO: 20266 - DNA, 566 bp, Zea mays
  Coding DNA Sequence Number=SeqID_5863
agtcacgggattcttccattcacggccgccgcaccgcttgtgtgcacggtaacgacccgcacccgcacccaaatgtggcctgtcaccccggtgtgtagccaacggtagcaatccgatttcagctgctggcccagtgccttgttgccgatacaaatttatcccgttgatttaaaaagaaattaatcccgcaatatttttctgttactgcgtgtggcacactttctgctgtctattccgttgttacatactaagttccggtatagcggaatacacaacccctggagtgcttgtcatgcatcaccgaccttccgtgttcaaagcgtgtgtttttctcttcgccgcatcggcttccctcgccaacgcagtgcaggcggcggacagcaagctcgatacagtgctcaagcgtgggcatctgatcgtgggtacaggcagtaccaatgcgccgtggcacttccagggagcggatggcaagttgcaaggttttgatatcgacatcggccacatcgtggccaaggggttgttcaacgacccgagcaaagtcgaatacgtggtgcaatcttccgatg

SEQ ID NO: 20267 - DNA, 432 bp, Zea mays
  Coding DNA Sequence Number=SeqID_5864
aaccaagcaagtgtgcaccgagcgtgcgctgcactggatcgaaaccgtgggcctcaaaggctacgaaaacaaatacccgcaccagctgtccggcggcatgcgccaacgggtgggcctggctcgcgccctggcggccgacaccgacatcatcctgatggacgaagcgttcagcgccctcgacccgctgatccgcgccgagatgcaggaccagttgctggagctgcaaaagaccctgcacaagaccatcgtctttatcacccacgacctcgacgaggccgtgcgcatcggcaaccgcattgcgatcctcaaggacggcaagcttatccaggtcggcacgccccgggaaatcctgcattcgccggcggatgaatatgtggaccggtttgttcagcggcgggctgcggtggtttgacccgcgatgtgtggtgagtt

SEQ ID NO: 20268 - DNA, 499 bp, Zea mays
  Coding DNA Sequence Number=SeqID_5865
gcaagccggccatgcagttcccggtggtggcgctggagccggtggccgaagccggattcgccggccgcgcctgggattccatccgcctgtggtggcgcgggcattcctgatttgacgggaggggacatggcggtgagttttccgggcgggccggccgcggcgccgacccccgatgatcccctcgggctgctgtcggcctgtcatgggcgcattgcgcggcaatgcgccaccttgcggcgcctggccgcgcatctgccgacgcatggcagcgacgccgccgcccaggtcgcggcggcgggcgtcgcgcgctatttccagacggccgcgatccatcaccacgaggacgaggaagaggacctgttcccggccctgatcgagtccatggcgggttccgacgccgtctgcctgcatgcgctggtcgatgggctgattgccgatcacgcgcggctggcggcgctgtgggcgccgttgcggcaaatcctggacgagatcgcggcgg

SEQ ID NO: 20269 - DNA, 401 bp, Zea mays
  Coding DNA Sequence Number=SeqID_5866
gatctcgtccaggatttgccgcaacggcgcccacagcgccgccagccgcgcgtgatcggcaatcagcccatcgaccagcgcatgcaggcagacggcgtcggaacccgccatggactcgatcagggccgggaacaggtcctcttcctcgtcctcgtggtgatggatcgcggccgtctggaaatagcgcgcgacgcccgccgccgcgacctgggcggcggcgtcgctgccatgcgtcggcagatgcgcggccaggcgccgcaaggtggcgcattgccgcgcaatgcgcccatgacaggccgacagcagcccgaggggatcatcgggggtcggcgccgcggccggcccgcccggaaaactcaccgccatgtcccctcccgtcaaatcaggaatgcccgcgccac

SEQ ID NO: 20270 - DNA, 522 bp, Zea mays
  Coding DNA Sequence Number=SeqID_5867
atttgagccaggaccgccggatattttttgttgtagtctttttcagacaattgttgcaaagatctacaaagctgccgcttttaccgctagtctgcggacatctgcaatgccgacaacagccttctacaagagcccggcgatgactgatctgtcccgaattcaagggcctgccagcgcggtgattccgaccctggaagggcgcttctatcgacccccactgcctgacggctacgtgttgcgaccgcgcctgtgcgaacggctgagtgagggattggccgggcgcttattgctggtcagtgcgccggccgggtttggcaagagttcgctggcggtggagttctgccagagcttgccggcccactggcaaagcctgtggttgggggtcagcccccgggacaacgacccgggacgtttccttgaacgcctgctcgacggcctgcagcaatacttcccgcagttgggcgcccagtccctgggcttgctgaaaatgcgccagcgccatcaaccctttgcgtttgaaga

SEQ ID NO: 20271 - DNA, 344 bp, Zea mays
  Coding DNA Sequence Number=SeqID_5868
gcgagggtcggccagccccagcgtgcgcagcgcgttcagcaccacggcggtcttttcggggcggttgttttccaggtagacataggccagcaggctgagcagctcgcgggcgtcgggcgtcaggggcatggcggcggtcatccctggtacagcgcgctgcggtacatggcgaccagctcgcgcaggccggcctcgtccttgagcagccgcaccgcgcggttcagcgcgcgggcgtcctcgggattgcggtcctggctctgctcggccgcggcggacaggccatccagcgtcgcctgcagggcctgggcgaacttgccgggcagcagcaggtcgcggttggcgac

SEQ ID NO: 20272 - DNA, 463 bp, Zea mays
  Coding DNA Sequence Number=SeqID_5869
gcgaccggagatggaacctcattatgatcgagtctatttcatttaaaactagagccaggactgttgatcacttagggcgagagcagattgcagattgcccaacagctatatcggagctttggaaaaatgcgtatgacgcatattcaaggaaagtctcgcttgatatatatcaagacgacactcctatagcagctcttgttgatgacggtcacggtatgaacaaagaggagttcatacagaaatggcttgttattggcacggagtcgaaagcaaccggcgaagcagcggcggatgatgatcgaaagggattactcccaagacctcgacaaggtcaaaagggaattggtcggctatcagcagcagctcttggtcccttacttctatttgtttcaaaaagaagtatgtcttcatttgttttagcgcttatagattggcgattatttgaaaatcctttcctgttgct

SEQ ID NO: 20273 - DNA, 540 bp, Zea mays
  Coding DNA Sequence Number=SeqID_5870
tccgtgccaataacaagccatttctgtatgaactcctctttgttcataccgtgaccgtcatcaacaagagctgctataggagtgtcgtcttgatatatatcaagcgagactttccttgaatatgcgtcatacgcatttttccaaagctccgatatagctgttgggcaatctgcaatctgctctcgccctaagtgatcaacagtcctggctctagttttaaatgaaatagactcgatcataatgaggttccatctccggtcgcagacttatttatagttgcttaaagcgttagctatcgcactaattatttcttttcccatatcaacagggacagcatttccgacctgttcccctgcggccatcaatccgcctttgaatacaaaccaatcaggaaacgtttgaaatcgtgctgcctggcgcactgtgatgccatggtgctccactggatgtacaaaacggcctttagaggggttcacacaagctgttgtcatcgtaggaccaggtagcgagggatcgatgcgcccataaacgtcggtgtgt

SEQ ID NO: 20274 - DNA, 374 bp, Zea mays
  Coding DNA Sequence Number=SeqID_5871
acgacatgttcgattacccgttggccgcgccgctgatttcccaaggcactcgcaaactgttggcgaatctcagcgggcgcatggatttctcaccgagcattcacaccgaacacttcccggccctggtgaagatcgtgttgcagtccaatgccattggcgtgggcaccgaggaggcgtttgccgaggacattgccaaaggcaaactggtgctgctgcactggcgcaacctgccgcaaaacctcgagagcctgaatgcccgttgcgggatcgtcagccgcaccggctttcgcttgtccccggcggcgaaagcgatgatcgagacgctggtggcagtggatcaacacgaggtaagtgtggcggtctagcacactgcc

SEQ ID NO: 20275 - DNA, 585 bp, Zea mays
  Coding DNA Sequence Number=SeqID_5872
gacgttaaagccatcgagtacctgctcaaagaacaagcggccaagctgccggaactggccaaggtcagcgagttcatccactttgcctgcaccagcgaggacatcaacaacctgtcccacgctctgatgctgcgcgaaggccgtgatgacgtcatgctgccactgatgcgccagactgccgacgctatccgcgagctggccatccgttttgccgacgtaccgatgctgtcgcgcacccacggccagccggcttcgccgaccactttgggcaaagaactggccaacgtggtgtaccgcctggagcgccagatcgctcaagtggccgccgtgccactgctgggcaagatcaacggcgccgtaggcaactacaacgcccacctgtcggcctaccctgagatcgactgggaagaaaacgcccgcgccttcatcgaagacgagctcggcctgggtttcaacccgtacaccacgcaaatcgaaccccacgactacatcgccgagctgttcgacgcgattgcgcgcttcaacaccatcctgatcgacttcgatcgcgatatctggggttacatctccctgggctacttcaag

SEQ ID NO: 20276 - DNA, 576 bp, Zea mays
  misc_feature (513)..(517): n is a, c, g, or t
  misc_feature (526)..(542): n is a, c, g, or t
  Coding DNA Sequence Number=SeqID_5873
gctggctgaccgacctgattctgggccaggagcgcacgttcaccacgccactggtggggcgcgggccttatagcgagtactacggcgacctgagcatcaccctcgacaccgccacctatggcaaagggtttctcgtcagttcggtgatcattttcatctccggggtgctgcgggccctggccatgggcctggtgttgtacctggtctatcactggctgctgaccaagccgctgtcccgcgtcatcgagcacctgagttcgatcaaccccgatcgccccagcgagcacaagattccgcagctcaagggccacgagaaaaacgaactggggatctggatcagcaccgccaaccagttgctcgaatccatcgagcgcaacacccacttgcgccacgaggcggagaacagcctgctgcgcatggcccagtacgactttctcaccggcctgccgaaccgccagaagttgcaggagcaactggacaagatcctgaccgacgccggccgccggcagcgcnnnnntcgcagtgnnnnnnnnnnnnnnnnnatgacttcaaaagcgtcaacgagcagttcaccta

SEQ ID NO: 20277 - DNA, 539 bp, Zea mays
  Coding DNA Sequence Number=SeqID_5874
catcgcctggcgtttgaagaactgctgacccaccaactctcccagcaacgcctgcgcgaaagcatgcgctccctgcgcgcaccggcaatgcccaaggctacacgcctgcccgcgcaatacctggccaacctggggtttgcaccaaccggcgcccagcaacgggtcggcaatgaaatcgcctacgacctgagccagaaagaacccatgctgcggctgatccagggcgacgtgggcgcgggtaaaaccgtggtcgccgccctcgccgccttgcaggccctcgaagccggttatcaagtggcgctgatggcgcccaccgagattctcgccgaacagcacttcatcacgttcaagcgctggctcgaaccactgggcctggaagtcgcgtggctggccggcaagctcaagggtaaaaaccgtgtagccgccctggaacagatcgccgctggcgccccgatggtggtgggcacccacgcgctgttccaggacgaagtgaagttcaagaacctggcgctggtgatcatcgacgaacaacaccgctt

SEQ ID NO: 20278 - DNA, 531 bp, Zea mays
  Coding DNA Sequence Number=SeqID_5875
gattgacgtacagcgcacctgggtgccgtgggatcagatctccgacgagcttaaagtggcggtgatggcgggcgaagaccagcgcttcccgcagcattggggttttgatttcgacgcgatccaggcggcattgctgcataacgagcgcggcggctcgattcgcggcgccagcaccttgagccagcaggtgtcgaagaacctgtttttgtggaccggacgcagctatttccgcaagggcctggaagcctggtttaccgggctgatcgagattctctggcccaagcagcgaattcttgaggtgtacctcaacagcgtggaatgggatgaaggcgtgttcggcgcagaagcagcggcgcggcatcactttggggtgagcgccaaggcgctaacccgccagcaggccagctacctggcggcggtgttgcctaacccacgggtgtggagcgccagccatccaacatcgtatgtggcgcgacgggcggcgtggattcggcagcagatgagtcagttgggtggcgacagctacctgaa

SEQ ID NO: 20279 - DNA, 440 bp, Zea mays
  Coding DNA Sequence Number=SeqID_5876
tcatgacgggcttggacgattggatatgtttgatggacgttgagtatccaatggtactgcgggaaggggaatactgggtgccaggcgtcggccctctgtgccggtgtcccgcccacttcccttcattcaaaggaaaccatcatgtcccgcgttcccctgctcgattccgcctccgccccggccgccagccaggacctgctgcgccatatccacggcgcgttcggcgccacgcccaacatgttccgcgcggtcgccaattcgcccgcggcgctggccagcatgtgggccgcgttcggcgccctgggcggcggcacgctgtccgcgcaactgggcgagaagatcgccgtggccgtggccgacagcaaccgctgcgaatactgcctggcggcgcataccgcgctgggccgcaaggccggcgcgagcgccgaggaaatggccgc

SEQ ID NO: 20280 - DNA, 433 bp, Zea mays
  misc_feature (339)..(340): n is a, c, g, or t
  Coding DNA Sequence Number=SeqID_5877
acaacgactggaacaacatgggccagcgccagaccgacagcggcagcgtgaccttcaagcgcgtacgcgtggaagagtccgacctgctgctggacccggggccgttgagcacgccgttcgcctgcctgcgcccgctgattgcgcaactgcacttcgcgaatatcttcctcggcatcgccgagggcgcattcgaagaagcgcgccaatacaccctggaagaagcccgcccgtggttccgctccagcgccagccacagcacccaggacccttacatcctcagccactacggcgacttctgggtggcgctgcaaagcacccgcctgttggtggagcgcgcanngtgaggtactggacgcggcatgggccaagggctcggccctgaccaacgaggaacgcggcacagctgcgattgccatcgccaccgcaaaagtcg

SEQ ID NO: 20281 - DNA, 575 bp, Zea mays
  Coding DNA Sequence Number=SeqID_5878
gagcgtcagcgcatggaccagaaactcaccgtcggcttctccgaccaagtcacccgtctgtttggcagtgcgcaaccgttggtagcgctgggccgcaacatggggttgttgggtctggacctgctgccgccggccaagcgctggttcgcgcgtcaggccatgggcctgggcactcgtcccgatgcgtgagtggctgacccaacgcctgggcaaggcgcggctgttgcgctggatcatgaccttgtacccgccgtacctcggggccggagtccgggtgttgcacatcggcagcgattttcgcgaggtcaaggtgcgcatgggcctgggctggtacaaccgcaattacgtcggcacgcagtttggcggcagcctgtattcgatggtcgatccgttctacatgctgatgctgatggagaatctggggcgcgattacattgtctgggacaaggctgcggccatcgatttcatctcgccgggcaaaggcccggtgtttgccgaattttccatcgaccaaggattgctggacgagattcgccagcacaccgccggcggcgagaaatacttgccgcagctca

SEQ ID NO: 20282 - DNA, 132 bp, Zea mays
  Coding DNA Sequence Number=SeqID_5879
aggctgctctcgaagcggaaccccggcagcgctttccacgcctgcaggaaggcctcctgcaatgcatcctcggcacgtgcctgctggccgccacacaaccgccaaagcacagcgaatacacgcggcgcgtgg

SEQ ID NO: 20283 - DNA, 120 bp, Zea mays
  Coding DNA Sequence Number=SeqID_5880
cgaactgctgtaccggcgccacgcgccgcgtgtattcgctgtgctttggcggttgtgtggcggccagcaggcacgtgccgaggatgcattgcaggaggccttcctgcaggcgtggaaagc

SEQ ID NO: 20284 - DNA, 340 bp, Zea mays
  Coding DNA Sequence Number=SeqID_5881
tacggcgccaagaccatctacctggccggcctgggggtcttcacgctggcctcgctgctgtgcggcatcgcgcccggcggcgacctgctgatcgccgcccgcatgctgcagggactgggcgcggcgctgttcatgcccagctcgctcagcctgctgacccatgcctacgaagacgagcaggtgcgcaaccgcatgctggccgcctggtcggccatcgtggcggtggccggcgccgccggcccgctgctgggcggcgtgctgatccatcaattcggctggcgcggcatcttcctcatcaacctgccgctgggcctggccggtctgtggctggccaggcgcc

SEQ ID NO: 20285 - DNA, 397 bp, Zea mays
  Coding DNA Sequence Number=SeqID_5882
cgagcacgtggctcagcgggttgagcgcgcgcggacggcgcggcgcggcctggatgcggcgcctggccagccacagaccggccaggcccagcggcaggttgatgaggaagatgccgcgccagccgaattgatggatcagcacgccgcccagcagcgggccggcggcgccggccaccgccacgatggccgaccaggcggccagcatgcggttgcgcacctgctcgtcttcgtaggcatgggtcagcaggctgagcgagctgggcatgaacagcgccgcgcccagtccctgcagcatgcgggcggcgatcagcaggtcgccgccgggcgcgatgccgcacagcagcgaggccagcgtgaagacccccaggccggccaggtagatggtcttggcgccgta

SEQ ID NO: 20286 - DNA, 509 bp, Zea mays
  Coding DNA Sequence Number=SeqID_5883
tgcctggccaggaagcattgcgcttgcagcagcaacagcagcgcgacctgcagcaattacaactggaacagcgtcagcggcaaatccagcgaggcagtttcgcagtaccaccgaccacacccgcactgccggcagacaccgcccaggaccagcgctgctggcctttgagcggtacgcgcgtggccggtgtcacgctgttcaacaaggctgaactgaacacccgcatcgaaccctatgtggcgccgtgcatgggcgtcgcgcagatcaaccgcctgctcgccgagatcacccgcctgtatgtcgaggccggctatatcgccagtcgcccatacctgatcagcaccccggccgccgggcacccgctggatattcacgtcgaggaaggctacgtcgaagccatcgagctggccgatcagagcctccccgtgtcgttacgcggggcattcccgggaatgctcggcgaaccgctgaacctgcgggacctggaacagggcctggaccaactcaat

SEQ ID NO: 20287 - DNA, 444 bp, Zea mays
  misc_feature (418)..(419): n is a, c, g, or t
  Coding DNA Sequence Number=SeqID_5884
acgccaaggcggtcaaggacgacgccaacctgcgcctggccccggtcaccggcctgggcttccagtcgatctcggtcaacctgggcaacggcgcgcgcgccaacaatccgctggccaaggacaagcgcgtgcgccaggcgctcgacctcgccatcgaccgcgacgtgctcaaccaggtcatcggcgaaggccagtaccagccggcctaccagccgttcccgccggccagcttcgcctacaacaagtcgttcgagcacgccggccgcgatcccaagaaggcccaggccctgctcaaggaagcgggcttcgaccgcgtcaagttcgagatcaccttcggcaacaacaccaccatgcagcaggtcttcgaactggtgcaggccatgggcgccgaggccggtttcgacatcaccctgcgtcnngtcgagttcgcctcgctgcaatcgt

SEQ ID NO: 20288 - DNA, 503 bp, Zea mays
  Coding DNA Sequence Number=SeqID_5885
atgcccagcttgtcctggtagaaggcgatggcggtgtcgtaatcgttgacgagcaggacgaggcggcccagcgaatgcatgtcgagactcttttgaaagttttgcttgcggctatgctaaccggtctacgttaatccacttcgcgcagcagccggaatccgaccagcggatagcgcgtttccaccgtattccagttgcggtaggccgagcgcacgtacagcgcccaggtgtgccaggagccgccgcgccgcactttgacgttgccgctggcggggccttgcgggtcatcctggggcgaatgcgcgtagtagtcctcgccataccagtcggacacccattcccaggcgttgccgtgcatgtcgtacagcccgaacgcgttcggcgcgtagctggccaccggcgcggtgaaggcatggccgtcgcggcgcgcggcggcgaacgcctgccactttggccacaggggcgcggcgtcggcgtcgaacgtgttggccacgtccggcaac

SEQ ID NO: 20289 - DNA, 491 bp, Zea mays
  Coding DNA Sequence Number=SeqID_5886
agaacggcgacgatccggccgcgttgccggacgtggccaacacgttcgacgccgacgccgcgcccctgtggccaaagtggcaggcgttcgccgccgcgcgccgcgacggccatgccttcaccgcgccggtggccagctacgcgccgaacgcgttcgggctgtacgacatgcacggcaacgcctgggaatgggtgtccgactggtatggcgaggactactacgcgcattcgccccaggatgacccgcaaggccccgccagcggcaacgtcaaagtgcggcgcggcggctcctggcacacctgggcgctgtacgtgcgctcggcctaccgcaactggaatacggtggaaacgcgctatccgctggtcggattccggctgctgcgcgaagtggattaacgtagaccggttagcatagccgcaagcaaaactttcaaaagagtctcgacatgcattcgctgggccgcctcgtcctgctcgtcaacgattacgaca

SEQ ID NO: 20290 - DNA, 465 bp, Zea mays
  Coding DNA Sequence Number=SeqID_5887
tgcgttgctcgacaagcacatggatgatcgggacaaccctctgggcccggcgatgctgtgtgcgttctttctgcaagcgggacgcagccttggcgtagaaattcgggtcaagctgatcatcctcaagctgtttgaaaaatacgttctcagtgacgctgatctgttgtacggcgaagccaatcaattgctgattgccaccggcgtattgcctgagctcaaggcggtaccctcgcggcgtgcggtcgctcccgccgatttgcctgaagacacaccgccgattaccggccgtccagcagacgacagcgggcaggaagtattcgcggcactgcaagagttgctgtccgccgtgcgcggcagtgtggcgcccacccttgaggcgagcgccgagatgcagccaatttccacccgtgacctgctgcgcctgctctcccatttgcagcaatacgtacctgagcccgaagtgga

SEQ ID NO: 20291 - DNA, 448 bp, Zea mays
  Coding DNA Sequence Number=SeqID_5888
gccgtcggcccgctggaagatttcagcctggaagacttcgaccgtaccctcgccatcaacgtgcgcagcgtgtttgtcgccacccaggaagccgcgcggcacatgggtgaaggtggccgcatcatcaacatcggcagcaccaatgccgatcgcatgccgtttgccggtggcggcccgtacgccatgagcaagtcggcgctggtcggcctgaccaaaggcctggcccgcgacctggggccacgtggcatcaccatcaataacgtgcagccaggcccggtggacaccgacatgaacccggcaagtggtgatttcgccgagagcctgatcggcttcatggccgtgggccggtatggccatgtggaagagatcgccagtttcgtcgcctacctggtaggccctgaggccggctatatcaccggcgccagtctgaccatcgacggcggtttcg

SEQ ID NO: 20292 - DNA, 341 bp, Zea mays
  Coding DNA Sequence Number=SeqID_5889
aattgctgttcagcgagcgcctgcgctacctggaagacctgctgccggccagccgggtggtgttgcgcagcaccagcgtggtggcgcaataccatgccgcgctgcagggccagtcgctggccatcctgccctgcttcatcgcggcgcaggaccctcggctcaagccggtgctggaaaaggaagtggagatcacgcgctcgttctggatgtattgccacgaggacctgcgcaagctcaagcgcgtgacggtgctgtgggagttcatccgcaagtcggtgctgaagaatgccgacctgctggccggcaagcgcgggacgatgaaatacctgccctgaagccgg

SEQ ID NO: 20293 - DNA, 428 bp, Zea mays
  Coding DNA Sequence Number=SeqID_5890
ggacgcgccgtgcttttcaatggccacctggacgtcgtgccaaccggtccgcatgaactgtgggacccggcgccgttcgacggcgaattacgtgacggctggctgtacggccgaggcgcgggcgacatgaaggccggcatcatctgcgcgctggcggcattcaaggccctgcaggacctgggcgtgcaacccgccggcgccgtaggcttcaacggcgtgcttgaagaggagaacaccggcaacggcaccctggccacggtttcggcgctgcagagcgcgatcgccgcagccaagctcagcgccttcgacgcggtcgttattcccgagcccacgcatgagcgcatgatgagcgcccagctcggcgtgttctggatgtacgtggacatcgtgggccggcccgcacatgccgcctacatgaccacgggtgt

SEQ ID NO: 20294 - DNA, 537 bp, Zea mays
  Coding DNA Sequence Number=SeqID_5891
tcgcgaagtctcgttggcgtggcaaccctggcgtaccgtggcaacctggtatctgtggcgcagtctggaaccgacgccggtccaatactgacgcaatccaggtcgcccatctacggaaccacactacatgcgcaatacatttctggaatttgaacagccgctcgccgagcttgagaacaagatcgagcagctgcgctatgtgcaggccgattcggcggtggacatctccgacgagatcggacgtctgcagcagaagagccagtcgctggccaaggaaatctacgccaagctcacgccttggcagacggcgctggtcgcccgccacccccagcgtccctacacgctggactacgtgcgcgaaatcttcaccgacttccacgaactgcacggcgaccgcatgtacgccgacgaccagtccatcgtgggcggcctggcgcgcttcaacggctcgccctgcatggtgatcggccaccagaagggccgcgacaccaaggagcgcgccgcgcgcaacttcggcatgccgcgtccggaaggcta

SEQ ID NO: 20295 - DNA, 309 bp, Zea mays
  misc_feature (267)..(269): n is a, c, g, or t
  Coding DNA Sequence Number=SeqID_5892
agcgacacgccgttgacggcggtcaggccgccgaagcgccgggtgaccgcgtcggcggtcagcaggggatcaggcatggggctctccttggatcggcagggacagcggtttggcggcgggcgatgcggccggtgcggccggcgtgttcggggcgtggcgggcgcggcgccggcgccattgcgccggcaggccggccagcccgtcgggcagcagcgccaccagcgcgatgatggccaggcccagcggcaggtgccagtggcgcgcgtnnncgccgaacagcgcctgcgactggaacagttcctgcagcag

SEQ ID NO: 20296 - DNA, 321 bp, Zea mays
  misc_feature (41)..(43): n is a, c, g, or t
  Coding DNA Sequence Number=SeqID_5893
ctgctgcaggaactgttccagtcgcaggcgctgttcggcgnnnacgcgcgccactggcacctgccgctgggcctggccatcatcgcgctggtggcgctgctgcccgacgggctggccggcctgccggcgcaatggcgccggcgccgcgcccgccacgccccgaacacgccggccgcaccggccgcatcgcccgccgccaaaccgctgtccctgccgatccaaggagagccccatgcctgatcccctgctgaccgccgacgcggtcacccggcgcttcggcggcctgaccgccgtcaacggcgtgtcgctggcattgcaacg

SEQ ID NO: 20297 - DNA, 531 bp, Zea mays
  misc_feature (504)..(506): n is a, c, g, or t
  Coding DNA Sequence Number=SeqID_5894
gaagccgaaggacgcgcgctactgacgcgtggcggggcgagcggccggcttgccccgcgtcctacaatcggcgggtcatccttagtccgggcccgccatggaactgcgccagcttcgttatttcgtccgcgtcgtcgaagccggcagcatcggccgcgcggcgatgtcgctgggcatggtgacctccgcgctcagccagcagatcagccggctcgaaggcgagctggccacgcggctgctgcaacgcagcgccagcggcgtggtgccgaccgacgcggggctggcgttcttccgccaggcccagctcgcgctgcgccatgccgacgacgccgtccacgccgcgcagcaggcgcgcctggccggccatgtcagcgtcggcctgtcgtctaccaccgcgtccatcctgggggcgccgttcgtgcaggccatgaaccagcgctatccggatatccgcctgcatctggtcgaggcgctgtcgggccacctggccgacatgctcaacgnnngccagctcgacctggccgtcgtgtt

SEQ ID NO: 20298 - DNA, 546 bp, Zea mays
  Coding DNA Sequence Number=SeqID_5895
agaagtatttgccaccaccagccggcctggctggcatgagtcgggcgcgttcgtgctgcctgggcgaaccatcggcagcgccaatgtgcggtaccaggccagcaacaaggctcaggtacttttcagccggcgcggcgagctggcgctgtggcaatcggaggtagccgccaagtgcgcgggtaacccggtgctgacactagcgatcggctgctcactggccggcccactgctgagtttggtgggcgtgctgggcggtggtgttcacctggtgggcgatagctcgagcggcaagtcgctggcgcaactgatcgggtcgtctgtatggggcgacccgggcgtgttcgccgccagttgggacatgaccaagggcggcctggagatcgaagcgtcgagccgcaatgacaccatcctccccctggatgagatcaagcgtgctgatcccaagcgagtacaggaaatggcctactccctcgccaacggccagggtaaaggcaccatgacccgtgagcgcgaaggccgcgccaaattgagctggcgcctgctgac

SEQ ID NO: 20299 - DNA, 436 bp, Zea mays
  Coding DNA Sequence Number=SeqID_5896
cgcgttcacctgcaacaacatggaagccctgctgggcgcgaccatccaggggttcggcatcggctgcatgcccgatttcctggcgcgcgacgcgctcgcggccggcacgctgcgcacggtgctggacgcacaagtgcgcggcgcgggccgcttccaggcgttgtggccgtcgaaccgcaacctgtcgcccaaggtgcgcgtgttcgtggacttcctgggcgagcggctgttccgcgacggcgaccgcgcctagcccggcgcaggccctggcgccgctcggatcacgccaccggcatccgctcgcacagcaggccgatcgccgccaggtcgccctgccgcgccagacgctgcacttgctcgctgaaatccttgaaggccggatcgcgcgcctggatcgcgcgcgcccagtccatcaggtccgagatcccgccgatgt

SEQ ID NO: 20300 - DNA, 551 bp, Zea mays
  Coding DNA Sequence Number=SeqID_5897
aacattggccctacagcgaaatctaccaacgccagatgcaggccgaactgggtgaagacaccgaggtgcggctacgcatgcatgtatcaccggcgctctgggtgcgggccccaagcctgggcgaggactggctgaaggtgccgctgtatccgcatccattgcgggggcagaagatctggaacgtgttgggctggttcctggcgattggtttgctttccaccgcgtctgcctggattttcgtgcgccagctcaatcagccgctcaaacgcctggtgtttgcggcacgccagcttggtcagggccgtagcgtgcggctgcccatcagcgacacgccgagtgaaatgaccgaggtgtacagcgcgttcaaccagatggccgaggatgtcgaacaggcggggcgcgagcgcgagctgatgctggcgggggtgtcccatgacctgcgcacgccattgacgcgtttgcggctttccctggaactgatgggcaaccacaccgaccttaccgacgacatggttcgagacatcgaggacatggacgcgattctcgaccag

SEQ ID NO: 20301 - DNA, 509 bp, Zea mays
  Coding DNA Sequence Number=SeqID_5898
aggccgccttatcaacgagactgatgattactatcgaaccggtcgcctattggcttaccaaaacccattcctataatcgcctccactttccccctcccgtctgtcctcaggcgaaatatcctcccggaacccgacaccatgccaagcgcaagccgggcccctagcggcctccccgaacataatcaacaaaccgtcctgcaacagtggctggcgattctctcggttgccgtgggcgccttcgccctggtcaccagcgaattcctgccagtaggcgtactcaacgacgtcgccgccgacctcggcatcagcgccggccacgccggcctgatggtcaccctgcccggcatcatggccgccctcgccgccccgctgctgtcggtgggcattggcgccatggaccgccgctacctgctgatcggcctgaccctgatcatgatcatcgccaacatggtggtggcctacgccagcgacttcagcctgctgctgttcggccgcgtactgctgggcat

SEQ ID NO: 20302 - DNA, 378 bp, Zea mays
  Coding DNA Sequence Number=SeqID_5899
gcaaggcggtctacggcctgagctttttggtggtgtacccgatcgttgcctacttcctgctgcacggcgggatcttcggcatgaccaacgtggccaccagccaatggggcggcttgatgctgaccctggtgatcgccaccgtcggcattgccggggccttgcccctgggcatcgtgctggcgctgggtcggcgttcgaacatgccggcgattcgtgtggtctgcgtgaccttcatcgagttctggcgcggcgtgccgttgatcacggtgctgttcatgtcgtcggtaatgttgccgctgttcctgccggaaggcatgggcatcgacaaattgctgcgggcgttgatcggcgtgatcctgttccagtcggcctacgtgg

SEQ ID NO: 20303 - DNA, 347 bp, Zea mays
  Coding DNA Sequence Number=SeqID_5900
gccgcgcttcgggatgagacagatcggcgtagggaagacgcgccatgaaaactccgcagagggattagggccggttggcgccatcgatcctagggcttcccagcatcgaaaggccgaggcgcagcaaatgcacacattcgcaagaactttgacataatgacaacacattgcgcacctccaggacaagcctagaatgaatgcgccgacccagtcccacccgcccgtcaccctcgccaactgcgatagcgaaccgatccacgtaccgggcgcgatccagccgctgggcgcgctgctcgcgttcgacgccgcgggggtgctgcgctacgccagcgaaaacgcgccgcagg

SEQ ID NO: 20304 - DNA, 325 bp, Zea mays
  Coding DNA Sequence Number=SeqID_5901
atgcccagcacctgcggcgcgttttcgctggcgtagcgcagcacccccgcggcgtcgaacgcgagcagcgcgcccagcggctggatcgcgcccggtacgtggatcggttcgctatcgcagttggcgagggtgacgggcgggtgggactgggtcggcgcattcattctaggcttgtcctggaggtgcgcaatgtgttgtcattatgtcaaagttcttgcgaatgtgtgcatttgctgcgcctcggcctttcgatgctgggaagccctaggatcgatggcgccaaccggccctaatccctctgcggagttttcatggcgcgtcttcc

SEQ ID NO: 20305 - DNA, 151 bp, Zea mays
  Coding DNA Sequence Number=SeqID_5902
tcgccggtgatctcgatgcgcagcttctgggcggtcttgccctggcgtacatgcaggaagccgtcgcgcatgtccgtctccagaaaccgcagggtgtcggccggccgctggcccgccaggtaggccaggtccatggcgtcctgcagcggct

SEQ ID NO: 20306 - DNA, 179 bp, Zea mays
  Coding DNA Sequence Number=SeqID_5903
gtcgaggacgacacctatgcgcaggtctggaaggctgcggacgagccgctgcaggacgccatggacctggcctacctggcgggccagcggccggccgacaccctgcggtttctggagacggacatgcgcgacggcttcctgcatgtacgccagggcaagaccgcccagaagctgcgcat

SEQ ID NO: 20307 - DNA, 230 bp, Zea mays
  Coding DNA Sequence Number=SeqID_5904
tttgccgcgcgctacctggtgatggcctgggtcctgtgcctgctgccgtggctgcccgaggacaccgaactgacgctggacgcctccgatcccgccgtgtggcacgcgcgcctgcccgccccggccgacgccccggccgcgccggcgctgttcgaccctcgggacatcgaaaacctggcgctggcctcgggctggcgcctggaacgacaaccccaatgctggccgctgca

SEQ ID NO: 20308 - DNA, 211 bp, Zea mays
  Coding DNA Sequence Number=SeqID_5905
gccagcattggggttgtcgttccaggcgccagcccgaggccagcgccaggttttcgatgtcccgagggtcgaacagcgccggcgcggccggggcgtcggccggggcgggcaggcgcgcgtgccacacggcgggatcggaggcgtccagcgtcagttcggtgtcctcgggcagccacggcagcaggcacaggacccaggccatcaccaggta

SEQ ID NO: 20309 - DNA, 321 bp, Zea mays
  Coding DNA Sequence Number=SeqID_5906
gaaagcgccctggtgttgcatgatcaggtcgccgaagccgccgtggtgggctatccccacgacgtcaaaggccagggcatctatgccttcgtcacgcccatgaatggcgtcgagcccgacgaggcgctgaaaaaacacctgctggatctggtgagcaaggaaatcggcagtttcgccaagcccgagctgattcaatgggcaccggccttgccgaaaacccgctcaggcaagatcatgcggcggattttgcgcaagattgcctgcaacgaactggacagcctgggggatacttccaccctggccgacccgagcgtggtagat

SEQ ID NO: 20310 - DNA, 581 bp, Zea mays
  Coding DNA Sequence Number=SeqID_5907
cacttaagtactcatgaccgggtcccccttgccctctcccactttctggcgcgacaagcgcgttttgctgaccggtcacacaggtttcaaaggcggctggttggcgctgtggctgcaccggctgggcgcacgcgtcacgggcatctcccttccggccgaaacgactccggcgctccaccaggccgcgcgcatcgacagcctgatcgacggccggcactgcgacatccgcgatgccgccgccctgcgacaacaggtcctggaggcgcgacccgaaatcgtgctgcacctggccgcccaggcgctggtgcggcccagctacgccgaaccggtggacacgttcgccaccaacgtgatgggcaccgcgcacctgctggacgcgctgcgatcggcgccggacgccaaggtggccgtcatggtcaccaccgacaaggtctaccgcaacaacgaatggccctacccgtaccgcgagcacgacacgctgggcggccacgatccctatagcgccagcaaggcggccagcgaactggtcatcgcctcgtaccgcgacgccttcctgaaacaacaaggcctggcggtcgcca

SEQ ID NO: 20311 - DNA, 246 bp, Zea mays
  Coding DNA Sequence Number=SeqID_5908
aaaaatgcgaattccccatgcgtaccatcacgcggaaggatttacgatcctacataagaatggagagtccatatgaaatggtggtactacttatgagagctcagggagcagcctttcaagtttcgctttgtattttttgattttttggattttattgagtcgtgccaatctctgctcttcaggctttcgctaaagtagatcactgacgatgactgcacagaattttctattaagcggaaacgtgct

SEQ ID NO: 20312 - DNA, 455 bp, Zea mays
  Coding DNA Sequence Number=SeqID_5909
aaacttgaaaggctgctccctgagctctcataagtagtaccaccatttcatatggactctccattcttatgtaggatcgtaaatccttccgcgtgatggtacgcatggggaattcgcattttttcggggctaccgtctcgctgttcgctgtgcaagtggctcagcttacgccacttcgtcttttccacaaattttacctcatgctagggctggaaggttattttttgcggtaatggttcaggttcgtctggcggcattgagtttggaagcggagggggcatgaatttcatgtgaaccgatcattctctatctcgagccctcacacactctgtaacggcatcctttttgacagcgttcgctcatcgcctaagtttgaaaagcagcttcggaaaagctgcttttcccttatcgatgtcatggagcgtcaccaatgcataaagcgtatttctcctccc

SEQ ID NO: 20313 - DNA, 352 bp, Zea mays
  Coding DNA Sequence Number=SeqID_5910
acctggaaatcgacgccgggctgaccgtcgaggaaggccacaagatcgccgtgcaagcgcgccagcgcgtcatgcaacggcatcgtgtattgaacgtgatgacccatgttgatccctggagacctcccgacgcgcccaagcagggcgccgagggcagggcgattatcgaaccaggccgtccgtagcgcgctttgacgacaaggaagaaacatgaaaatcaagaactccaatactcagtatgcaggcctcgtgatcgccatgcactggctcatgctcgtggtcctggcattggtctacgcctgtatggaattgcgcgggctggccactaaaggcaccgatctgtacaacaaca

SEQ ID NO: 20314 - DNA, 347 bp, Zea mays
  Coding DNA Sequence Number=SeqID_5911
aaccccagcgagaaatgcagcgccttgatgttgttgtacagatcggtgcctttagtggccagcccgcgcaattccatacaggcgtagaccaatgccaggaccacgagcatgagccagtgcatggcgatcacgaggcctgcatactgagtattggagttcttgattttcatgtttcttccttgtcgtcaaagcgcgctacggacggcctggttcgataatcgccctgccctcggcgccctgcttgggcgcgtcgggaggtctccagggatcaacatgggtcatcacgttcaatacacgatgccgttgcatgacgcgctggcgcgcttgcacggcgatcttgtggcctt

SEQ ID NO: 20315 - DNA, 434 bp, Zea mays
  Coding DNA Sequence Number=SeqID_5912
gctcccaagccactggtttgatggactacattcgattaagggggctcatggaccgtttccaggaaatgcagattttcctcgcagtcgccgaagaacagggctttgccgcggcggcccggcgcctgaaaatctcgccccccagcgtgacccgcgccattgccgcgatggaagcgcgtatcggcacgcagttgctctcgcgcaccacccgcagcctgcacctgagcgaggctggccagcgttatctggatgattgccggcgcattctcgcggagctggttgaggccgaagaagcagcagccggtagcttctcgatcccatgggggcacttgacggtcaccgcgcctgtgttgttcggcgaattgttcgtcgcgccgatcctgggggagtatctggaccagtttgcccaggtcagcatcaacgccttgctggtggac

SEQ ID NO: 20316 - DNA, 382 bp, Zea mays
  misc_feature (335)..(337): n is a, c, g, or t
  misc_feature (339)..(339): n is a, c, g, or t
  Coding DNA Sequence Number=SeqID_5913
gcggtcgaattcctccagcccggtgggggtgcgcggcgtttcacgcgcctcgatctcggacaggctgcgcaccgggctgctggaggccagcggcgcatagcggtgcgaggccgcggcggccggcgcggccgactccacggtttcttccagggtgttccaggcgttgcagtgcggacacttgccttgccatttcggggtggtgccgccgcattcggcgcacacatagacggttcgggttttggccatgggcgcaagtttaccggcacacggcggcgcccgggagccgcggatgcgtcgccgcggcgcgccggaccggcggttttgccccgccctgnnncngccagctttcaattcgcttgcataaacagggacgtgtcacagt

SEQ ID NO: 20317 - DNA, 389 bp, Zea mays
  misc_feature (42)..(42): n is a, c, g, or t
  misc_feature (44)..(46): n is a, c, g, or t
  Coding DNA Sequence Number=SeqID_5914
tgtgacacgtccctgtttatgcaagcgaattgaaagctggcngnnncagggcggggcaaaaccgccggtccggcgcgccgcggcgacgcatccgcggctcccgggcgccgccgtgtgccggtaaacttgcgcccatggccaaaacccgaaccgtctatgtgtgcgccgaatgcggcggcaccaccccgaaatggcaaggcaagtgtccgcactgcaacgcctggaacaccctggaagaaaccgtggagtcggccgcgccggccgccgcggcctcgcaccgctatgcgccgctggcctccagcagcccggtgcgcagcctgtccgagatcgaggcgcgtgaaacgccgcgcacccccaccgggctggaggaattcgaccgcgtgctgggc

SEQ ID NO: 20318 - DNA, 228 bp, Zea mays
  Coding DNA Sequence Number=SeqID_5915
cggtcaacgagctgacgcccgacgtcatcgccatcaccggcgacgtggtggacggcagcgtcgagcagctggcggcgcaggccagcccgctgggccagctgcgcgcgcccttcggcgtgtacctggtgaccggcaaccatgaatattattcaggcgccgcgccctgggtggcggaattccgccgcatgggcttgcgggtgctgatgaacgagcatgccgtgatccatc

SEQ ID NO: 20319 - DNA, 168 bp, Zea mays
  Coding DNA Sequence Number=SeqID_5916
taaagcagcagcacttatacagaccaaaaggagatgcatgcacaactctaggaagaagacaaaagacatttgtggagaaagagcacaagtatacaaccctgtgtacaatctgtcaaacattaccgttgacttactagtgtccatatacatagtgttgtccaagactaa

SEQ ID NO: 20320 - DNA, 150 bp, Zea mays
  Coding DNA Sequence Number=SeqID_5917
atttgattatccttagtcttggacaacactatgtatatggacactagtaagtcaacggtaatgtttgacagattgtacacagggttgtatacttgtgctctttctccacaaatgtcttttgtcttcttcctagagttgtgcatgcatctc

SEQ ID NO: 20321 - DNA, 124 bp, Zea mays
  Coding DNA Sequence Number=SeqID_5918
gtgcttctgtcatatgttgtcgtgggtccccaaagcagaaagcactggtgacctggcccgttaaagaaggtctagcacaaacttctatataaagcgatgttgagtttgcagtccttctttggcc

SEQ ID NO: 20322 - DNA, 498 bp, Zea mays
  Coding DNA Sequence Number=SeqID_5919
tttgggggtggaggatcgccgatgtcgacggctcccaggcgtcccttccgaggccgcggcgccatgccctcgggcaccggctacgtccgccgcggccccgccccagggctccgccgacgccgccaaggcccctggcgcaagccccgtcttcaccaaccggcgaaccggctttccgccccccagaacacacgggccacacttcttcacagccccggcggtcatttgccggtcccggcaccggtccctccaaaaaaggccccttccacgggaaccctcgggcccgggaaccccggggttccccccgaaaggggccctcccgccccggagagaaaagggaaccccggggcaccccgggccctcgcgggcaccccggccccggcaaaaagaaaaaaggggtgttgaccccttttttggaaaagcccagaaaaaacaaacaggggggatcctttccccgcaaaagggcgcaaaaaaattggataattggtttccaagggggca

SEQ ID NO: 20323 - DNA, 555 bp, Zea mays
  Coding DNA Sequence Number=SeqID_5920
tgcccccttggaaaccaattatccaatttttttgcgcccttttgcggggaaaggatcccccctgtttgttttttctgggcttttccaaaaaaggggtcaacaccccttttttctttttgccggggccggggtgcccgcgagggcccggggtgccccggggttcccttttctctccggggcgggagggcccctttcggggggaaccccggggttcccgggcccgagggttcccgtggaaggggccttttttggagggaccggtgccgggaccggcaaatgaccgccggggctgtgaagaagtgtggcccgtgtgttctggggggcggaaagccggttcgccggttggtgaagacggggcttgcgccaggggccttggcggcgtcggcggagccctggggcggggccgcggcggacgtagccggtgcccgagggcatggcgccgcggcctcggaagggacgcctgggagccgtcgacatcggcgatcctccacccccaaaaccctagcggcggcggcggtggggtctggggtggggttgcagccgattcgagaagac

SEQ ID NO: 20324 - DNA, 172 bp, Zea mays
  misc_feature (127)..(129): n is a, c, g, or t
  Coding DNA Sequence Number=SeqID_5921
gtttcgtgctccttcgattttagatgtttactcgtttttgctctattagtgggtggtgcgcggggtgggttactaggttgtaaatttgatgtcggaggctggggtacacatgggcattctgtaccannngtggaaggctccggcgactatgacaaaccagtgtgtgtcatta

SEQ ID NO: 20325 - DNA, 312 bp, Zea mays
  Coding DNA Sequence Number=SeqID_5922
ttcccacattatctggccatgctttgggacccactggggatcatatccaactgcaccttgggtccccaaatgggggggaaacaatgtggccacaaagcgggggggttatcccagacattgctggtttcgttgccaggtattacaacccccctctggcagaagtttcttgggaacagtgtggcccccccagggattccgcgggggcataaacccctttggtccggcccaccaatttccgatcatcctggtgggggcgaggtttgggctatggaccctatccccctttttaaatttctcccgaatcctggcggg

SEQ ID NO: 20326 - DNA, 546 bp, Zea mays
  misc_feature (340)..(340): n is a, c, g, or t
  misc_feature (434)..(434): n is a, c, g, or t
  misc_feature (484)..(484): n is a, c, g, or t
  Coding DNA Sequence Number=SeqID_5923
ttccccgccaggattcgggagaaatttaaaaagggggatagggtccatagcccaaacctcgcccccaccaggatgatcggaaattggtgggccggaccaaaggggtttatgcccccgcggaatccctgggggggccacactgttcccaagaaacttctgccagaggggggttgtaatacctggcaacgaaaccagcaatgtctgggataacccccccgctttgtggccacattgtttcccccccatttggggacccaaggtgcagttggatatgatccccagtgggtcccaaagcatggccagataatgtgggaaccccgaagaaggaacggctttcagnccacgggggagggctggtgatgccagtaggagacccccagggagctggtccttgacggggtgcggcgtgaagtcgtcgtgcttgggcgcggcancgcggccttccaccaccccggccatctcgcggcgcttcccggatcaccgnaagcacgcgcgcgcaccacccccccggtaccctcgcgctaggtcgcgaatcgcaatgcgagc

SEQ ID NO: 20327 - DNA, 172 bp, Zea mays
  misc_feature (35)..(35): n is a, c, g, or t
  misc_feature (141)..(141): n is a, c, g, or t
  Coding DNA Sequence Number=SeqID_5924
aactgcggccaagtgctgtcccaaaggataaggcntatcaaagcggtttcttggtgagggaacatttgttgagcaggctgctggtgagggacgtgcagggaggcttgtgtgatggaatgggatatgttcttcccaaatggnaacgcaaaggtttcatcacttgtgtctcatg

SEQ ID NO: 20328 - DNA, 320 bp, Zea mays
  Coding DNA Sequence Number=SeqID_5925
ctcacccaactctgattagggttatgggttcacattccattagagctgatgtcagcgctccaggggtagaagatgtcgaacctggaactccgcttcctggtgaagacgggactgcaactacgaacacctcttcaggatcaaggcggtggccgccaacggacgtgctccacgtcatatcgggcatgtggaaggctcccgccgagatgttctcttcctctggattggtgtgttccggctgtcggagcccctaaaggtggccgactagctggttccccctttccacaccggcagaactcacgcgagtgattttgtcttgcatg

SEQ ID NO: 20329 - DNA, 278 bp, Zea mays
  Coding DNA Sequence Number=SeqID_5926
gataagaaaaagacaagccgggcaaggatggtggtgtccggtgtggtgggaggcgagccgcgagttggtggggaaggggtgggcggtggcagcgcaaacaagcaactccttcccaccttcccttcccctccccttctcatcctttctccgattgcctccaattacgattctccgatccccattcctgccccacaccctcgcgttcggctaatccggcggcatgcggcgcggcggcgtggctgcggcggcggcggacggtgatgtggagtcgcgtttcc

SEQ ID NO: 20330 - DNA, 593 bp, Zea mays
  Coding DNA Sequence Number=SeqID_5927
tagatttgtcctcatcatcaacatgctccacaatcccaaaatcttggatttgctgttgctcgattacatctctactacttattaatgctacaagagtagccgtctatcattcctagttctaccattccctgttcaatcattccatgttctccctttttatttccattccccgtcctctctctcgtgcccactgccgttcccattcctcgtcttctctctcgcgcccattgtcgttctcattcatcgtcctctctcgcgcgcccactgccgatcccattcctcttcctctctccactgccattctcattcactctcttttccattctcatggttttgctaccatggccgataaaaatggccaaaaagggacactttataggaatcgaactctaaccaacacatagacagcaaaactcgccccttctaaccaatagcgctatttttctttcctattgtactaaggagctttcatctatttataggctttcttagaaccatcaatgttcttcatgttaattcatcttattggataattcttcgctttgcttccttgtaacaaacctatgtggtggacctacatgtgcttgtactca

SEQ ID NO: 20331 - DNA, 135 bp, Zea mays
  Coding DNA Sequence Number=SeqID_5928
gaaatcaaccagaactctatgctccaatctgtaatctgagtgggtgggggagggcgccgacagaggattcagagccggagcgcggagggagagacgagacggagcggagattggacccgcgggtgtagggtgccg

SEQ ID NO: 20332 - DNA, 174 bp, Zea mays
  Coding DNA Sequence Number=SeqID_5929
aagttggagacagtcatttccactgtactcatgctgcaaattacccttgattccacagcctgctgcagattgggggcgcctgcatgaatggtctgagcttctgttgctcccacaacaagtcctcatatcaaaatacatttttactccattcttcaatatcagtagaggctcccc

SEQ ID NO: 20333 - DNA, 183 bp, Zea mays
  Coding DNA Sequence Number=SeqID_5930
gatccctgggtggacagctctcttccatggcaaagttgggggagcctctactgatattgaagaatggagtaaaaatgtattttgatatgaggacttgttgtgggagcaacagaagctcagaccattcatgcaggcgcccccaatctgcagcaggctgtggaatcaagggtaatttgcagcatg

SEQ ID NO: 20334 - DNA, 159 bp, Zea mays
  Coding DNA Sequence Number=SeqID_5931
gctggctcgttaacgtcagaaccgagcaaggatgtttcagctcgtgacaaaattcaaacgagccgatccgatccggaccatgaaccgagcgagccagcgagccacgagtatttcgtccagccctagatggagactggatgtagtgctctataatttttt

SEQ ID NO: 20335 - DNA, 441 bp, Zea mays
  Coding DNA Sequence Number=SeqID_5932
tgttcgacatccacagcaatgaggtgtggcggccatccagcctctggcgagcgtgcggccagtcaccagcaccagcatggacagcgccatagagtgtggagtgcccttgattcggtgctgctcctgatttgagtctgactgtcgacggagatgctggcgataccacagctgggctcgcagcgatgctggccagtggtgacaacctcaagcctcatccataagccttccttcatctgcatctcaccatcttctaaccatgtggtaaatagggccacaacccatctaggattgggcttgtcacttcttgaactcctgctgcaatggggcacaacccgttcataagtaggatacctcgtttgggtcggcgtacctggtacgcggttcacggctttgaacctgtgactttggctggaagagttggtgactatttgaatgccttta

SEQ ID NO: 20336 - DNA, 265 bp, Zea mays
  misc_feature (102)..(102): n is a, c, g, or t
  Coding DNA Sequence Number=SeqID_5933
aggatccctcgccaagaatggtagctcttggccctgttctgccgcttctcgatctgccgcttctaccgcttctcaatctgagacgggcgaccgtcagggccntggccctgatctcatgctccaaccacctgacgcgcttggcctcccgctccatacagcctggcgcgcttcattgatttcatctgtgtatttatctggcgctccatacagcctagcgcgcttggcttgtgatccacatgagcagcacaagcttgaatggacattt

SEQ ID NO: 20337 - DNA, 153 bp, Zea mays
  Coding DNA Sequence Number=SeqID_5934
gatctctgcgtcttgcccggcaacgaacactttcaacattgcatcatcaacaacatgtataacttcacgcatacgacggatgcgcagggaaatggtttgctctataccttttctgatgatttgcagatcgatgtcgctgttcttgacaagaac

SEQ ID NO: 20338 - DNA, 138 bp, Zea mays
  Coding DNA Sequence Number=SeqID_5935
taacaggcctgcttgcacaccaaagccaggtcctttgggcggttcagtcaaagaagtaaggcctccggctggctcacaccagaagcggccactccttggccctggttttggaactttcccagctctgagttcatcaat

SEQ ID NO: 20339 - DNA, 227 bp, Zea mays
  Coding DNA Sequence Number=SeqID_5936
aactggtcaaagaagcgtttcatgagtttcaaaaagatgagacccggctaaaacaaatcgaaaagcaagacggtatgacttccttctacaacacgcccccactgggacaaagaggaacctgcagctacttgacaaaggtggtgatgaactccctgctggagggagaagtcaagcccaccaatgaggactcgtgcctggttagctagtcaggccctgtagggagcata

SEQ ID NO: 20340 - DNA, 177 bp, Zea mays
  Coding DNA Sequence Number=SeqID_5937
ggaccatatagagtatgtaacatgtatactatcattgcaagaattcttgctcaatcctttctcaaaaatattgacaacctgccaagaccacctatttaggacctattcagatcagctatggctcccagtgcacaagccaagaccaccacaacaagaacatcacatgtccctgtctcg

SEQ ID NO: 20341 - DNA, 168 bp, Zea mays
  Coding DNA Sequence Number=SeqID_5938
tccgctcactcgtgcttgcgaatatggcgagacagggacatgtgatgttcttgttgtggtggtcttggcttgtgcactgggagccatagctgatctgaataggtcctaaataggtggtcttggcaggttgtcaatatttttgagaaaggattgagcaagaattcttgc

SEQ ID NO: 20342 - DNA, 276 bp, Zea mays
  Coding DNA Sequence Number=SeqID_5939
taaggccatctgacagtcgggtgcctatagacccacaccagacaagctgccggatgcgcagtgccccagtctcccaagtgggacacccacaccaccgctttcacacggatgggggacggttatgagttccaaccgcaccatcacgccccccattgcaatgcatatccaaccccgacatcacagacacggacggaaagtagagggagagaaacctgacggatcgtggccgcccctcgcggcggcctgcgtgggaagcgacgcgagagcccggagcat

SEQ ID NO: 20343 - DNA, 130 bp, Zea mays
  Coding DNA Sequence Number=SeqID_5940
tggcttagtcccctctagctggtctatgggtcctggatcctgagcggaccactgggttctagggcacctttgaatctgtctacgagatctctaagatatgagatgacatatccccccctattgctttgtt

SEQ ID NO: 20344 - DNA, 491 bp, Zea mays
  Coding DNA Sequence Number=SeqID_5941
tcctctcacctgtgtatgccgaatcccccctcggatccctcctctcccgacgtggtcgggctatcgttggccaagtcaggcgcctttgttaggcccctggcgacgtgtccaccaacctcgcctgtgccatccccatgcttggcaggtgctccgcctccatcggcaagttaagccagaagaaaaggcggaagaagagccagaattcccattagaagtcatctcaaatgctggaggtgtatccatattgatggatgaaactattgcgtttagttatgataatgacacaaaatcttccattcgaggacgttatgcaactctgtcatctgatctacaagattgttattaaaggttgtagagaatgatgacatttacacaaaatactccaacaaaatttatgacacatttaagtgggggtttatgctacaattacctcaaaataattcttgatgcattttacgtaaatttacaaaattcttgatgcgttttacgtc

SEQ ID NO: 20345 - DNA, 366 bp, Zea mays
  Coding DNA Sequence Number=SeqID_5942
gtcatcattctctacaacctttaataacaatcttgtagatcagatgacagagttgcataacgtcctcgaatggaagattttgtgtcattatcataactaaacgcaatagtttcatccatcaatatggatacacctccagcatttgagatgacttctaatgggaattctggctcttcttccgccttttcttctggcttaacttgccgatggaggcggagcacctgccaagcatggggatggcacaggcgaggttggtggacacgtcgccaggggcctaacaaaggcgcctgacttggccaacgatagcccgaccacgtcgggagaggagggatccgaggggggattcggcatacacaggtgagagga

SEQ ID NO: 20346 - DNA, 179 bp, Zea mays
  Coding DNA Sequence Number=SeqID_5943
atcatttcatttattcgacgacacagttcaccaaaaggcacgtctagccacagctctaccctggcctagggcatacatggcacggaagtgtacggacggaacagcagtataaagctccggctctgctagcgacctttcttctagctccggccggcttctgatctctgctggaggcggct

SEQ ID NO: 20347 - DNA, 159 bp, Zea mays
  Coding DNA Sequence Number=SeqID_5944
agccgcctccagcagagatcagaagccggccggagctagaagaaaggtcgctagcagagccggagctttatactgctgttccgtccgtacacttccgtgccatgtatgccctaggccagggtagagctgtggctagacgtgccttttggtgaactgtgt

SEQ ID NO: 20348 - DNA, 496 bp, Zea mays
  Coding DNA Sequence Number=SeqID_5945
gacatagaaacctccaagatgcattgggagtgtttgagctcatgcttgaaaatgggttgtctcccaacatcgtgacatgcacaatcctagttgacagctttagcaaagaagggctagttggtgaagctttcctattcctggatagaatgcatcagtcattgggaatcgtcccaaacctttgcatgtacagagttatgatcaatggtctttgcaagaccaacaaatatagtggtgtgtggaatgtttttgcggacatgataaagaggggctatgttcctgatgttgtcctgtacagtattattattgagggcttcgtgaaagctctgaagttgcaggaggcgttaaggttgtaccataagatgttggatgaaggtgtaaaacctaacatatttacgtattctagcctcataaatgggctgtgtaatgatgatagacttcctgaagctatgggattgattagggatatgattggggaagacctgttacttgacaatgt

SEQ ID NO: 20349 - DNA, 536 bp, Zea mays
  misc_feature (203)..(203): n is a, c, g, or t
  misc_feature (334)..(335): n is a, c, g, or t
  misc_feature (339)..(339): n is a, c, g, or t
  misc_feature (354)..(354): n is a, c, g, or t
  misc_feature (500)..(500): n is a, c, g, or t
  Coding DNA Sequence Number=SeqID_5946
tggatcgagggctctaagccgtgtctccgcaataccgggctggcctggcggcgattgctagggttttctggtcggatttcggcggaagagctgaggcgttgcttcgagtgcgggagctgtctgcaatccgccgcttgccttggcccgagtttggtgtttccgcagcaatgcctctccgattttagctcgccctggggttctgnaagggcgaaggggctggttgggcggtttgagcttgcaaggcgttggctggttcggtccaatgtccggggctagcgcgaggggggcggctgttcgccggcgtccagcgggcggcggagactcctgaacccgnntcancgggggggcagaccncgcctcgggtgtccgctggcctcgcggcaggaagccctcacgagggccccggggagagggattgtggcccgcgggcagcgggccgccgagggaaggaaaaagaaaccccgccagccgtgcttcacattggcaagccctcgctcagnggcgcccccgcagggaatggcgtccggcaggaagct

SEQ ID NO: 20350 - DNA, 260 bp, Zea mays
  Coding DNA Sequence Number=SeqID_5947
gatcttggtctcttctgtacagtgcctgcttggctcatgctcatgtttagagatggcaacggtacccaatcccgattcaccacggagaattcctctgttaggagatgagaataaggaagaaactttccctccggggatataaacggggaaaattcattccccgacgagtaaacgaggatgagaacgggcaagcattctccatccccgttttctgcgaggacccgttaaacttgcacatgacgatgtttttgtgtagtagt

SEQ ID NO: 20351 - DNA, 265 bp, Zea mays
  Coding DNA Sequence Number=SeqID_5948
agcggtctcttgacaaggtaattatttatttttatcctaaactactacacaaaaacatcgtcatgtgcaagtttaacgggtcctcgcagaaaacggggatggagaatgcttgcccgttctcatcctcgtttactcgtcggggaatgaattttccccgtttatatccccggagggaaagtttcttccttattctcatctcctaacagaggaattctccgtggtgaatcgggattgggtaccgttgccatctctaaacatgagcatg

SEQ ID NO: 20352 - DNA, 435 bp, Zea mays
  Coding DNA Sequence Number=SeqID_5949
ggcccttctccccatcttattgttgccgcccccgaagccccgtatgtgggggggtgtcgtccgggagccggccaggtcccaggtctttggaccgtcggcctcccaaatccccgtagcacgccgaccaccttgaatgctcccggccctccccctaaaggagggccgaactacaggcggctttccaaggcatagattcccgcgggggaggggtctgttcctcgtactctcttcacggggatgttctccaggaacacccgcaccaccccgtctgctctgggctacgggcgctcagttcccacccacaataggagtaacccctccctaacgccccctgtggctccggggccgccgcccccctcttccaggccacagtgcctcctccaatcaaacaaatttagttcactggccccccaatcagctcatagccgatgctgc

SEQ ID NO: 20353 - DNA, 221 bp, Zea mays
  Coding DNA Sequence Number=SeqID_5950
taatatcatgaccattgcgacgtttatatacttcaaattgaagaactcagtcataaaatggtgcattccaagctgctatctgaggagggctgggaaatattgggatcacaaagaatagttacctgcttccatcaaatagattcatttttgtgtatatgtgtgggacgaattttcatgggatgtcttcttgttgaaagtgcaaacaaatgctagttgaactt

SEQ ID NO: 20354 - DNA, 344 bp, Zea mays
  Coding DNA Sequence Number=SeqID_5951
gaaccggatctggaagcgaacctaagctgcgcggtttgtcattgaaaacagtgcgaagagtgagatgggtgaagctctgctaagagattcttcaggtttcttcttggggatggaatcattgccgtgtccatcttggtcagttgagttggagatgggtgcaaccctgaacaaggaattgagaactcgagattgttcgtggggctggaatgttgggcccatctgttccagctgccgaagatttcttttttgctatgcttgattgagaggcctgtgtcttgggctagtcactaatcctactgcgcttcttattttggctctctcgagcttgtactacttcggcggcg

SEQ ID NO: 20355 - DNA, 311 bp, Zea mays
  Coding DNA Sequence Number=SeqID_5952
gatcccgccgccgaagtagtacaagctcgagagagccaaaataagaagcgcagtaggattagtgactagcccaagacacaggcctctcaatcaagcatagcaaaaaagaaatcttcggcagctggaacagatgggcccaacattccagccccacgaacaatctcgagttctcaattccttgttcagggttgcacccatctccaactcaactgaccaagatggacacggcaatgattccatccccaagaagaaacctgaagaatctcttagcagagcttcacccatctcactcttcgcactgttttcaatga

SEQ ID NO: 20356 - DNA, 147 bp, Zea mays
  Coding DNA Sequence Number=SeqID_5953
taagttatgatggttgtgtgctgatttagtataaaatcacttgtacattcattcatttgatcaaagtaggatgctgctatctaatatctatgaactttccagcagatatttgagcatatttaggaattattgttgtagaatgcagaa

SEQ ID NO: 20357 - DNA, 151 bp, Zea mays
  Coding DNA Sequence Number=SeqID_5954
actacatgctgcattacatcaacagcaatattctgcattctacaacaataattcctaaatatgctcaaatatctgctggaaagttcatagatattagatagcagcatcctactttgatcaaatgaatgaatgtacaagtgattttatacta

SEQ ID NO: 20358 - DNA, 346 bp, Zea mays
  Coding DNA Sequence Number=SeqID_5955
caaatcattgtgcaaagttcagtaggatatttgaggaaattattttttttttctttctacacatgcacccgaatagaatttatgtgtttctcatatgtaattcttaaaattgtcagagagtaaactttcatcacggacgtcactcattgtcacgacagatatgcaaacttccactgctctaaatgatggagactacttgcaggacatgaatgcaaattagcaagacggtttacttttcaattaatgtgattaacaaggtttacttttcaattccttcacctaaatttgtgtgttctgtactgctacatacttgtgcacttatgagattactatcagcacgtgaaat

SEQ ID NO: 20359 - DNA, 339 bp, Zea mays
  Coding DNA Sequence Number=SeqID_5956
gttagggttctagcgctctctggtttctccctgcgtcgccgccgtggatgatgggctaggttattcctgtcctagaattttacatgtcgctcgtgcatctgtacgccatcgctgctcctgcctgagacgtcgggcgtgtacccccgttccttgatcctagatctgtgcggatccaatcgattggggcgcggcgcgggcatccggaacttcacctcgcgtgcttacgctaacgacggcggccctctgtattttactgggttggagatccgtccatcccaacttgagtcgatttatgtctggttccttttgttgcttgtgtaagcgaacggacgaaaattt

SEQ ID NO: 20360 - DNA, 289 bp, Zea mays
  Coding DNA Sequence Number=SeqID_5957
ctttggccggatcgtgtcttcccagccagattcgtcgctgtcgtggccttcccgactgtatccaccgttacccctactattctgccgcgagcgtggacaccatgaccgacatagacgtgtgcgctgtcgttggcctgcctggcggggttcctcgacatccgaacggtcaaagaagcaagaaggtcgacctgctggtactcttttgttgtgtcgccctcgccgatcgttgacactcgaacgtcgacccctcccgaagaacaggcttctgttgcatgtctcccgactgcgg

SEQ ID NO: 20361 - DNA, 551 bp, Zea mays
  Coding DNA Sequence Number=SeqID_5958
actcatgtctgacccatctgatggtccacgactactctctgctacccctcaatcaccaactttcgtcctagatacgaaatgatcaaagtcgtgatcgtgtatgacactatccctaataaagttatgtaatgccatacaagctacaataatcttcgattgcttccataactaaaaagaagggagactaagcaggattcgtcacttcatcttcaacactccaaatgatcgttctatgacattcctttgcgacaagtgggtatagttgaatacctctttcgcaccaacaagttgtcttccatgatgccatttggatatgtggtatttttgtccgttgtatggtgcagggtatcctttccggttggggtaaccggaatcaataagataatattcatctttttcaaaccgaagtcaggagcacaaagaggggaacatatctctagatctgtagataacggaagacgaatctatgaagaactctgaatcggcagcggcgaactcaacgagcaacgtctacaagaagaacaagtgctagtaaggtacctgggccgcgc

SEQ ID NO: 20362 - DNA, 592 bp, Zea mays
  Coding DNA Sequence Number=SeqID_5959
gtagacgttgctcgttgagttcgccgctgccgattcagagttcttcatagattcgtcttccgttatctacagatctagagatatgttcccctctttgtgctcctgacttcggtttgaaaaagatgaatattatcttattgattccggttaccccaaccggaaaggataccctgcaccatacaacggacaaaaataccacatatccaaatggcatcatggaagacaacttgttggtgcgaaagaggtattcaactatacccacttgtcgcaaaggaatgtcatagaacgatcatttggagtgttgaagatgaagtgacgaatcctgcttagtctcccttctttttagttatggaagcaatcgaagattattgtagcttgtatggcattacataactttattagggatagtgtcatacacgatcacgactttgatcatttcgtatctaggacgaaagttggtgattgaggggtagcagagagtagtcgtggaccatcagatgggtcagacatgagtgtgtttagagattcgattgctgccgcgttagtgtcttaacttaccatacttatgtaacctatgttgctgtaatggagt

SEQ ID NO: 20363 - DNA, 481 bp, Zea mays
  Coding DNA Sequence Number=SeqID_5960
gatcttggatcctgtacgaaccgtactcctttagttctttacggctgctaacaagtcggttagtcacatcggattccctttgtgttctgaatcagcagttacagtagtgatgtcttcatgttgccggacgcagtggcatgctataatgctagcgtgaccgtctaggtaaatgccaccgattagagatggcaatggtacccacgtttttttcttggatagagatttacgattcttcctactccatgacgttctcctccactacctctcggtcagttattaccatggcgacctcttttgccccaattacccttaaccatgctttcactcttcacctaaagaagaccaactatttgatttagctacacaatctaaacttagcccatcgaagcaatcaattgctaggaattcttgatggcacaatctcagcaccctttaggcagaaatgtcatagaagtactgacggcaatttactgaccctgta

SEQ ID NO: 20364 - DNA, 192 bp, Zea mays
  Coding DNA Sequence Number=SeqID_5961
gatctgtatccaagttatcaacctacataggatagagcacgacgaaatgctcgtcgtgtcggctcgtttgattcgtggtcaactcagcttggatcggttcatttgatttttttttttcgcgaggtggtgaaatgatatcctaagtcgaaaccagcccgcgacctaaacgaactatcatatttcagcaaaaca

SEQ ID NO: 20365 - DNA, 244 bp, Zea mays
  Coding DNA Sequence Number=SeqID_5962
taatacatagacacagttcaccaatcattagcatacatataacatgtttgtcaatcattacataaatgatatgcatatagtttgttttgctgaaatatgatagttcgtttaggtcgcgggctggtttcgacttaggatatcatttcaccacctcgcgaaaaaaaaaaatcaaatgaaccgatccaagctgagttgaccacgaatcaaacgagccgacacgacgagcatttcgtcgtgctctatc

SEQ ID NO: 20366 - DNA, 349 bp, Zea mays
  misc_feature (26)..(26): n is a, c, g, or t
  misc_feature (40)..(40): n is a, c, g, or t
  misc_feature (50)..(50): n is a, c, g, or t
  misc_feature (52)..(52): n is a, c, g, or t
  misc_feature (59)..(59): n is a, c, g, or t
  misc_feature (77)..(77): n is a, c, g, or t
  misc_feature (101)..(101): n is a, c, g, or t
  misc_feature (153)..(153): n is a, c, g, or t
  misc_feature (208)..(208): n is a, c, g, or t
  misc_feature (272)..(272): n is a, c, g, or t
  misc_feature (286)..(286): n is a, c, g, or t
  misc_feature (290)..(290): n is a, c, g, or t
  Coding DNA Sequence Number=SeqID_5963
ccccccccggagcgattcgagcttgngacttctactttgntgggagctgnangattctncccggcgactatggaggngttattgtctcatttggagcaacnaggaaatataaagtagtaaaacaatttctttacgaaagataaactttttcanggtcattgaaaattatgagtcaaaacctagagcataatcttcagaatggccttgnttttaataagtgattacctattttggtacagagccgaagagcatttaccaaacacattgggacnagctctaatttgcnaagnaatactctctaccttccttttaacttggttttttataaatccatatccctggacacttc

SEQ ID NO: 20367 - DNA, 471 bp, Zea mays
  Coding DNA Sequence Number=SeqID_5964
gtcggacccgggaatcggccatatggccggagagtagacgttgcagatgcagaaccccgctaaagacgcccaaccttctacaacgccaatggatccattttgatgcatcgagcctgtgctgctgtgctgcactgatgcgctgcaagatctgaccctgctcgggcggtatctctggtctctctctacgctaggtcgctagctccttgcatcgatcatggcagcggcggccttccaatcccaggcggatgcgctcttcaggaaaaatctcgcgatccagaggcgcgcttacaagacgaactgctgcctgatcctgttagaaacttgtgttgtctgagtctctttctcatcgaaataatgtatttgcaattatttgagttgaactagtatttgcaataattacagctcagaacaaataattacagctcagaacaatgtaattgtgtgaaccatgttggagttaccattggagtt

SEQ ID NO: 20368 - DNA, 430 bp, Zea mays
  Coding DNA Sequence Number=SeqID_5965
ggtaactccaacatggttcacacaattacattgttctgagctgtaattatttgttctgagctgtaattattgcaaatactagttcaactcaaataattgcaaatacattatttcgatgagaaagagactcagacaacacaagtttctaacaggatcaggcagcagttcgtcttgtaagcgcgcctctggatcgcgagatttttcctgaagagcgcatccgcctgggattggaaggccgccgctgccatgatcgatgcaaggagctagcgacctagcgtagagagagaccagagataccgcccgagcagggtcagatcttgcagcgcatcagtgcagcacagcagcacaggctcgatgcatcaaaatggatccattggcgttgtagaaggttgggcgtctttagcggggttctgcatctgcaacgtctact

SEQ ID NO: 20369 - DNA, 539 bp, Zea mays
  misc_feature (286)..(292): n is a, c, g, or t
  misc_feature (298)..(302): n is a, c, g, or t
  misc_feature (304)..(305): n is a, c, g, or t
  misc_feature (320)..(325): n is a, c, g, or t
  misc_feature (327)..(327): n is a, c, g, or t
  misc_feature (336)..(340): n is a, c, g, or t
  misc_feature (342)..(356): n is a, c, g, or t
  misc_feature (365)..(385): n is a, c, g, or t
  misc_feature (388)..(390): n is a, c, g, or t
  misc_feature (396)..(396): n is a, c, g, or t
  misc_feature (400)..(400): n is a, c, g, or t
  misc_feature (403)..(412): n is a, c, g, or t
  misc_feature (414)..(425): n is a, c, g, or t
  misc_feature (430)..(433): n is a, c, g, or t
  misc_feature (438)..(441): n is a, c, g, or t
  misc_feature (445)..(445): n is a, c, g, or t
  misc_feature (447)..(447): n is a, c, g, or t
  misc_feature (457)..(459): n is a, c, g, or t
  misc_feature (484)..(486): n is a, c, g, or t
  misc_feature (489)..(489): n is a, c, g, or t
  Coding DNA Sequence Number=SeqID_5966
atcgcaggacgcagcaaagccctgaaaccgcccccacgtccccctccccgcaccgcagagccagtcagaacaggaacaccggagcggcagctgcagcggccgagggcggagcacgcaaggcatggatagataccaaagggtagagaagcctcggaatgacacaccaatcagccagaatgagattaggattactactcaggggaggatgaggaactatatcagctatgggatgtcgctgcttgaggaaaatggacacgatgagattagtatcaaggccatgggcacnnnnnnnaaatannnnngnnatggttaccccccgnnnnnngnattgattannnnnannnnnnnnnnnnnnnatcaaaacnnnnnnnnnnnnnnnnnnnnntannntgatantgangcnnnnnnnnnngnnnnnnnnnnnntctgnnnntgctnnnngcangngacaccgtcnnnggcggaagttcaaggcatcatctcnnnttnctgaggaaaatcttgctgcagtggctgctttgaaggatgccacctcacct

SEQ ID NO: 20370 - DNA, 497 bp, Zea mays
  Coding DNA Sequence Number=SeqID_5967
atatgttgatagacaccctgctgattttgatgatcccataattgacatgctaacatgcaaaagagcttcagctcaagctcgtgtcctgtttggaggtttggagcaacagtggtagttgaggtggcatcttctatgtattactgagtgcaagattggttcacttgaatgagacaagacccgctttccctgctccctgctgaagtattttttgtttttctccatcatcaccatgatacacgaaccatgtagcaaatggcttatccagggaactggcatgatttgtttgtcttgttcagatgaagctgatgtggtattggttgttcactagttcagtagagatattcgtggcagcaagcgcccagagtcgtttggttaacgaagcatacctccaaacttgcctgagtaggtgaaattcggctaccctttcgttagacttttcaccggacctccagaacttgttgcttgccaagcagagctcatgcaataagcaatccatg

SEQ ID NO: 20371 - DNA, 129 bp, Zea mays
  misc_feature (32)..(34): n is a, c, g, or t
  misc_feature (58)..(61): n is a, c, g, or t
  misc_feature (72)..(73): n is a, c, g, or t
  misc_feature (93)..(94): n is a, c, g, or t
  Coding DNA Sequence Number=SeqID_5968
ataaaaaatgctttgtccaccacagtgattgnnngagcaataataccatgtgacattnnnngtcacggactnncggccacgtaatataatgcnnccgtgtagtagtatggtatttctcgtgacgtgcaa

SEQ ID NO: 20372 - DNA, 532 bp, Zea mays
  misc_feature (143)..(144): n is a, c, g, or t
  misc_feature (492)..(492): n is a, c, g, or t
  Coding DNA Sequence Number=SeqID_5969
aaagactgcttcatcgtgagtcccccatgctacgtaaaccaaactgctttcccctatgcgcatttctgactccatcatctatcttattagctagtcgagtacccgctgaaaacagacatggctgaatcctgcggaaaccttgnnaaggtagctacagaagtgtgaggtaagatcgcagcaggtgtagtaagtgaacgaagtttctggcgatcaaggtcgaagggcaggcgatcagcgtagcgagcgagggcgtccatgaggcgccgcaccagatcggcgagctcctcgtccttcccgcccccggcccctgcccctgccaccggggccgacaccgacgccgacgccatcgccggtgacgagaggtgagcgggattggcggctggggcagcggaaaccctagaaaagcgcgcgcaccggcgagcgggaggacagggatgggtggggtgcgagatgccccacaccaacaccacgacgaagaagaagaggagagangaagggagggagctctgcttcgcgtttttccttttgtcag

SEQ ID NO: 20373 - DNA, 228 bp, Zea mays
  misc_feature (95)..(95): n is a, c, g, or t
  Coding DNA Sequence Number=SeqID_5970
aagatgcagagggtgatactccgagggtctacttccaattattctgagacttattcgctaatgctgcttgcccctgccaatttggggggattttngaagtggggatgctttccccttttcatttttttgcaaggaggaaaaaaagaacggcccagggcgaaggccattcgggaaaaggggaacaaaatttggaaaaagcgcattgacttcccgcaaaggtggaagggc

SEQ ID NO: 20374 - DNA, 410 bp, Zea mays
  misc_feature (132)..(132): n is a, c, g, or t
  Coding DNA Sequence Number=SeqID_5971
ccttccacctttgcgggaagtcaatgcgctttttccaaattttgttccccttttcccgaatggccttcgccctgggccgttctttttttcctccttgcaaaaaaatgaaaaggggaaagcatccccacttcnaaaatccccccaaattggcaggggcaagcagcattagcgaataagtctcagaataattggaagtagaccctcggagtatcaccctctgcatcttcctcgaagtcgtttgggtggagcccgtagcgctccaggaaacgcctgcgctccctcgccgccgccgccgcggcgcctgatggtgccgcggaggctgcaacgggaagacggcgagcgggggttcgaacggatacgtgcttaaccttagcagggtccggggctcgtagtccgggaagagacatacg

SEQ ID NO: 20375 - DNA, 405 bp, Zea mays
  Coding DNA Sequence Number=SeqID_5972
gtataatgccatactctagctgagtacgtaaggtcatccccatcctgggcctgcactatatatacttcagctagccatgggccatggcgagacgatatttttcacgcatagtgcttgcgagagtgtcatgagttcatgtgccgcctgcgctgcggtctccttttggtgtagcactgctgtctgctgcccacccaccgcaataacgttcttcgtgtccaaacagttcggccgtaacgaatgaattgcccatggtagcaaacagtttggcccataaatggccataaccatccagggaccagggtccttgcttcttcttgtcgaacactgcacagcctcagcgtggggcccctgtgcccccagctagcgagcgaacgagatccacccgcatatcgagttgtcactgtt

SEQ ID NO: 20376 - DNA, 356 bp, Zea mays
  misc_feature (41)..(41): n is a, c, g, or t
  misc_feature (148)..(151): n is a, c, g, or t
  misc_feature (155)..(157): n is a, c, g, or t
  misc_feature (173)..(177): n is a, c, g, or t
  misc_feature (189)..(191): n is a, c, g, or t
  Coding DNA Sequence Number=SeqID_5973
ataatcgttggaactgtggtcccttagtttcaggtggaagngatggaggtaacaagacatttcattggttttggtgcaaagaaaacagaaaaagaaactcgaggagggacccggtaaaaaggtggcaagcgggtagttcaggcgaaannnnagtnnnctgtttagaagtagcnnnnnttttttgggaannnagatagtcagatgagatgtaaaacctgtgttgtaataatcgttggatttgcccccacttagtttccttctgcggcgatggaggtaacacgacatttcattgcttttgttgcatatgatgtcttgatctggcatggatgcatgctcacagcgaaaaccattggcga

SEQ ID NO: 20377 - DNA, 598 bp, Zea mays
  misc_feature (105)..(105): n is a, c, g, or t
  misc_feature (122)..(122): n is a, c, g, or t
  misc_feature (126)..(126): n is a, c, g, or t
  misc_feature (137)..(137): n is a, c, g, or t
  misc_feature (186)..(187): n is a, c, g, or t
  misc_feature (265)..(265): n is a, c, g, or t
  misc_feature (297)..(298): n is a, c, g, or t
  Coding DNA Sequence Number=SeqID_5974
ggtccacgacgctgaacaacatacagaccggcctgccgggtatattccaagccatagctgggttctcggggacagtggtcgaagctcttgatgtggtctgccgcngagctgggtctgtgcgntagnagaagctcttngccatcaggattaccaagagaccatttgctgcctctctttttctctttnngggtcattcagtagtttatttatatagggaaactgcaatatattatatatatagctcaaagtagagtggtcaagtatngaaaatggctcccccggatgttttgccctgtnnggatggtatcagttgtaaataatttgggtttgcccaggatttgttttttctgggtgattcagtagtttatttatataggaaactgcaatatattatatatatagctcaaagtagagtggtcaagtatagaagatggctccccgtatgttttgccctgtcaggatggtttcagttgtagataatgtgattttgcccaggatttgttggtctcctttttctgtagggagtgcgaggggagagatttataatgtacagacattaaggtagccttgcactctagcctcatgatcaagccctgtg

SEQ ID NO: 20378 - DNA, 291 bp, Zea mays
  misc_feature (256)..(257): n is a, c, g, or t
  misc_feature (261)..(261): n is a, c, g, or t
  Coding DNA Sequence Number=SeqID_5975
ttttgattttaagcgagcgtctccactcagtaactgcacaatttgatcgccttaggtccctgcgctttcaagaagctattaatagggtgatgccaagaaagaagatcaagaggaagccagatataaaacctactgaaccatccaagtcaaaccttgtattgaaatctgatgtctcgaaggttgaagaccgggaggtatcaactgcgcccttaagagttcaagaacaactcttggacgatgaaacacgagctctccnngatngagttgaccaatcttcttgatactgtccaa

SEQ ID NO: 20379 - DNA, 283 bp, Zea mays
  Coding DNA Sequence Number=SeqID_5976
gctaacatctgtgattacactcatgaaagctgtacgaaggagtccaatttccactttataagcttcggcaaacagtctcgttgctgcaaacataaggcacatatttcccggttgtaataagcgccggtagatccatcactaggactcaatattgtattttctagcgtcatcatatcgattaactgctggttcctaggaatccatgatactgattatctcaggacgaattccacattcaatcaagatcttcttaaatctgagagcactttcaactttgccgcat

SEQ ID NO: 20380 - DNA, 295 bp, Zea mays
  Coding DNA Sequence Number=SeqID_5977
ttttccccactgagcacttaaaaatagttgaaatcaaatgcggcaaagttgaaagtgctctcagatttaagaagatcttgattgaatgtggaattcgtcctgagataatcagtatcatggattcctaggaaccagcagttaatcgatatgatgacgctagaaaatacaatattgagtcctagtgatggatctaccggcgcttattacaaccgggaaatatgtgccttatgtttgcagcaacgagactgtttgccgaagcttataaagtggaaattggactccttcgtacagcttt

SEQ ID NO: 20381 - DNA, 487 bp, Zea mays
  Coding DNA Sequence Number=SeqID_5978
aggacaggcagctgcgactgacgccgccaggaagcaagcagagagagatcgaccagaagaaaggacgcgcagagggaaaaagaaagatagtaaggggtgaagccagcccagccgtggcagcaccagagcgagagaagaagcagcctcggcaaaggaatctggaaagaaaaaaacagagagagagcagatcgggcaaagaaagaaagggagagagaggccagagaaagcagcacgcaaaagaaaaagtagatcaaaaaagcaaccttcagccaccagttgctagcagatcaagaccagccactcgcagatcaagaaattttgcagccaccacagaaacaagcagccctcgtcgcatatcatagcaccagcacagtagtgaaacaccaacagcaacgcagatcgtcgccagatcagcctacaatcatatggcgtttacaatatctatgggtgagatcaatatttaatattttattgtctgcgcttgtta

SEQ ID NO: 20382 - DNA, 470 bp, Zea mays
  Coding DNA Sequence Number=SeqID_5979
acacaagtcttgtgcgcactttgacataacaagcgcagacaataaaatattaaatattgatctcacccatagatattgtaaacgccatatgattgtaggctgatctggcgacgatctgcgttgctgttggtgtttcactactgtgctggtgctatgatatgcgacgagggctgcttgtttctgtggtggctgcaaaatttcttgatctgcgagtggctggtcttgatctgctagcaactggtggctgaaggttgcttttttgatctactttttcttttgcgtgctgctttctctggcctctctctccctttctttctttgcccgatctgctctctctctgtttttttctttccagattcctttgccgaggctgcttcttctctcgctctggtgctgccacggctgggctggcttcaccccttactatctttctttttccctctgcgcgtcctttcttctggtcgatctct

SEQ ID NO: 20383 - DNA, 237 bp, Zea mays
  Coding DNA Sequence Number=SeqID_5980
ggcgctttgcgccaacggcgggaggggccagcaggcaggcaggcagcaggttgcgggattcggagcgcgatcgaagtaaaggcaactttctgagtttggaggcaaatcacccgttgccaatactgctttcgatactgcagaaatcaatggtatttgttcagaggcgcccgctatggcagagagttgcgcggcttgttgaggccttcttttagttgtgtttcgaggttgaacaatcta

SEQ ID NO: 20384 - DNA, 201 bp, Zea mays
  Coding DNA Sequence Number=SeqID_5981
gcggccgaggtacacgccattagattgttcaacctcgaaacacaactaaaagaaggcctcaacaagccgcgcaactctctgccatagcgggcgcctctgaacaaataccattgatttctgcagtatcgaaagcagtattggcaacgggtgatttgcctccaaactcagaaagttgcctttacttcgatcgcgctccgaatc

SEQ ID NO: 20385 - DNA, 235 bp, Zea mays
  Coding DNA Sequence Number=SeqID_5982
gatagagagcgattactcgtcttcagtaatataaaaggcaggccgcgggcctcttaccctgagactgtcttggaaggcgtctggttctcactcctctgtagctcaagacagtctggcttccgtatcctctggttgagtttaaaaaggctcttgattgcctgattgattgagtgcacctgggagggacaaccagagacacctgggtggggaggagttccctatgagaatcctctgg

SEQ ID NO: 20386 - DNA, 250 bp, Zea mays
  Coding DNA Sequence Number=SeqID_5983
gacgggcgcgactaccccagaggattctcatagggaactcctccccacccaggtgtctctggttgtccctcccaggtgcactcaatcaatcaggcaatcaagagcctttttaaactcaaccagaggatacggaagccagactgtcttgagctacagaggagtgagaaccagacgccttccaagacagtctcagggtaagaggcccgcggcctgccttttatattactgaagacgagtaatcgctctctat

SEQ ID NO: 20387 - DNA, 153 bp, Zea mays
  Coding DNA Sequence Number=SeqID_5984
cgggctagcccttcaagttccactgcttccagtgcccgttcacctgcaacgagaagacccacctgttcaaccacatgaagtacaacctctgcaaggactccatctctctcatggccaaactagggagagacaccggaccagctaaagccacca

SEQ ID NO: 20388 - DNA, 121 bp, Zea mays
  Coding DNA Sequence Number=SeqID_5985
gtggctttagctggtccggtgtctctccctagtttggccatgagagagatggagtccttgcagaggttgtacttcatgtggttgaacaggtgggtcttctcgttgcaggtgaacgggcact

SEQ ID NO: 20389 - DNA, 451 bp, Zea mays
  misc_feature (238)..(238): n is a, c, g, or t
  misc_feature (283)..(283): n is a, c, g, or t
  Coding DNA Sequence Number=SeqID_5986
agtgcggaggtgaacgtgacgtgacgctcctcctctataaaaggagacgcctgtgctgcagtgtgcacagcacagcccgtcgcgcgccgctgcgttgaggttgagccaaggcgcaatggcaacctccacctcagttcccgtcctcctgctcctcgccgccgccgccggcctcctcctgctccccggctcgctggcgtggcagagcagccactgtgcaccgggcgcgcccggcagtggnctcgccgacgtggccttcacccggctccggctccggcggcggccnacagcccgccccaccatagcaagccgcccaagcaccaccatggcaagccgcccaagtgcccgccgtgcaccctccgtacgtgcctcgacgctcgcccgtaccggcgtaagtgccacatatggcccggcgaagccttgggcataacaaccaccggagggcccacattag

SEQ ID NO: 20390 - DNA, 442 bp, Zea mays
  misc_feature (177)..(177): n is a, c, g, or t
  misc_feature (222)..(222): n is a, c, g, or t
  Coding DNA Sequence Number=SeqID_5987
gacgggacctaatgtgggccctccggtggttgttatgcccaaggcttcgccgggccatatgtggcacttacgccggtacgggcgagcgtcgaggcacgtacggagggtgcacggcgggcacttgggcggcttgccatggtggtgcttgggcggcttgctatggtggggcgggctgtnggccgccgccggagccggagccgggtgaaggccacgtcggcgagnccactgccgggcgcgcccggtgcacagtggctgctctgccacgccagcgagccggggagcaggaggaggccggcggcggcggcgaggagcaggaggacgggaactgaggtggaggttgccattgcgccttggctcaacctcaacgcagcggcgcgcgacgggctgtgctgtgcacactgcagcacaggcgtctccttttatagaggaggagcgtcacgtc

SEQ ID NO: 20391 - DNA, 562 bp, Zea mays
  Coding DNA Sequence Number=SeqID_5988
gatcgcgctcggaccaactaatccaacctcaagacatccggcccggaggaatttctcaacggagagtggcggtcactgtgacccacacctcgtcgtggtcggagcctagtaccccgaaatttgtgacacaatggttcgccaagctgcaatggctgtcaagtgcatgctgcttctgtactacaagaactgcagaggtcgtaactaccgtagacagggccaaatgttaacccttgtggagtaccttctgcttctttattcgtgctttgttgccaacttctgtttggtatcgtttctttctgaacaaggaatatgggagtctcttctcatctttagccactgggctgtatctgactttcaagttgacttcggtagttgaaaaggttcagtcattcttggccgcggtgaaagcactgtcacgtaaagatgtgcattatgggtcttatgcgactgcagaacaggtctctctacatgaacgatcctcgggagtcgcacctgagcatggtcaagcggattcttcggtacctctagggtattgtcgactacgggcttcatcttcagcact

SEQ ID NO: 20392 - DNA, 563 bp, Zea mays
  misc_feature (258)..(260): n is a, c, g, or t
  misc_feature (292)..(292): n is a, c, g, or t
  misc_feature (294)..(294): n is a, c, g, or t
  misc_feature (371)..(371): n is a, c, g, or t
  misc_feature (379)..(379): n is a, c, g, or t
  misc_feature (392)..(394): n is a, c, g, or t
  misc_feature (409)..(411): n is a, c, g, or t
  misc_feature (423)..(424): n is a, c, g, or t
  misc_feature (469)..(469): n is a, c, g, or t
  Coding DNA Sequence Number=SeqID_5989
atcaaattctactgcatgtgtcaagactggaaaatttatctggcgtctaggtgaactgccaatttgaactgaagaagctggtggaaacttgcatgctttatctaaaccctgatgcatctatcctgcagggatcaagacaagaaactcaccgtactacggagatcaatatgtccatttcaatgtcaacatccctatgaatttgacgtcaagacagcgggagctgatcgaggaattcgcgaaggaggagcaaggcgaagnnnagaaggacgcgaaggcagccggggcatcaggntngcctattttaggagccaatccacattccaatagtgccttagctgatctttataccgtgaggtagaataggctgctgnctgaaatncgcaggcaacatnnngctggttgcatggannnctggaatttccnncgcaacatatagatctttgtttgggattttgtagctggaataatnctagatcgcccgtgcctgatatgttcaatcctaagcctaatgctagcagggcgtgcaaggactcttgtacaattttgttgatcagggtgaccag

SEQ ID NO: 20393 - DNA, 221 bp, Zea mays
  Coding DNA Sequence Number=SeqID_5990
acctccgtgaacgtccatagcgattgggcgcgtcctctccggcgccagcgggaaatttcgattacacgccggcgcggctgccaagttattttattttagcaaagcaaagcaaagcaaaccaaaccaaagcaaagccaagcaagcaccctcgactcccacacaatatgaaaagaaacaccacacacacacaggtcttggccgtcgtcagtcgacacaacggc

SEQ ID NO: 20394 - DNA, 236 bp, Zea mays
  Coding DNA Sequence Number=SeqID_5991
tgcacttgcactccggcgccgttgtgtcgactgacgacggccaagacctgtgtgtgtgtggtgtttcttttcatattgtgtgggagtcgagggtgcttgcttggctttgctttggtttggtttgctttgctttgctttgctaaaataaaataacttggcagccgcgccggcgtgtaatcgaaatttcccgctggcgccggagaggacgcgcccaatcgctatggacgttcacggag

SEQ ID NO: 20395 - DNA, 534 bp, Zea mays
  Coding DNA Sequence Number=SeqID_5992
atggcgcgcgggaaatccgcgtttcccgggccccgcccgaggtcgagcgtgaggagcgctgctactgctgctgcttggagagtaggcgagcgcaagacgaggctgtgcagcgagtagcgaggacatagggcaccaccatggcgctgtccacgacacaatgctcacccgggcattttgtcgaacagccgatgggcaccacggagaacagcgaggagggttcactgttgtgcgcaaggaagggcgccatggagaaagatgaggctagcattggcttgagggtgagcctgtcggcgatgcagtgggcggagggggcgctggacggtgcccaaaatagagatgaacagagggaggagtcggtagaggagggcgcagggaactagtgaccatggacggggaaaagaccacaccatggggggggtgttcaccggcgcgagctcagaccagagggggccctgcgccgaccaagggagagtggaggtcggccatggccacactcaaggtgcgcagggcactgagaggagtagccatggccat

SEQ ID NO: 20396 - DNA, 462 bp, Zea mays
  Coding DNA Sequence Number=SeqID_5993
tttcttgcacctctagcagcaagggcctccatggccatggctactcctctcagtgccctgcgcaccttgagtgtggccatggccgacctccactctcccttggtcggcgcagggccccctctggtctgagctcgcgccggtgaacaccccccccatggtgtggtcttttccccgtccatggtcactagttccctgcgccctcctctaccgactcctccctctgttcatctctattttgggcaccgtccagcgccccctccgcccactgcatcgccgacaggctcaccctcaagccaatgctagcctcatctttctccatggcgcccttccttgcgcacaacagtgaaccctcctcgctgttctccgtggtgcccatcggctgttcgacaaaatgcccgggtgagcattgtgtcgtggacagcgccatggtggtgccctatgtcctcgctactcgctgcacag

SEQ ID NO: 20397 - DNA, 89 bp, Zea mays
  Coding DNA Sequence Number=SeqID_5994
tcgtccgctccgtggatcttcacggcctttgtcatctggatcctgggggagggactgctcttcctttcgttcatgaactgacgtgtgca

SEQ ID NO: 20398 - DNA, 123 bp, Zea mays
  Coding DNA Sequence Number=SeqID_5995
gaggatacacatatacgccggcgtgccacgtgcacacgtcagttcatgaacgaaaggaagagcagtccctcccccaggatccagatgacaaaggccgtgaagatccacggagcggacgaaggc

SEQ ID NO: 20399 - DNA, 84 bp, Zea mays
  Coding DNA Sequence Number=SeqID_5996
ctccttctgtagcaagacacgcgaacatactagagaggcctgcaagcggcggccgcgcacctaggacgaggtgaacttggtgac

SEQ ID NO: 20400 - DNA, 201 bp, Zea mays
  Coding DNA Sequence Number=SeqID_5997
ttgcccgggcactaagaggttttcttcttctcgtcgtatgtttttaagagagctatagattgccagagacaagagtctatatagtttattttttgtatatgggtagcgagacatgcttggtgaagtttattagcacgtctatatctctcagagtaaacgtgaactcctatgttgccgtgtcatgaatcaggattccttttt

SEQ ID NO: 20401 - DNA, 270 bp, Zea mays
  Coding DNA Sequence Number=SeqID_5998
ggcacggacaatagctgaatagcatttaaattaagtattagtagtttgaaaaaaaaggaatcctgattcatgacacggcaacataggagttcacgtttactctgagagatatagacgtgctaataaacttcaccaagcatgtctcgctacccatatacaaaaaataaactatatagactcttgtctctggcaatctatagctctcttaaaaacatacgacgagaagaagaaaacctcttagtgcccgggcaactacgatcgttgtccaca

SEQ ID NO: 20402 - DNA, 426 bp, Zea mays
  Coding DNA Sequence Number=SeqID_5999
attcgcatgatcctagccggctaactaaacccatatatatccatgtacatatatatcctgtcctgtcctgtagcatgcccatatacgataactggacgacgtacgatcccatcgtttccatgctgcccatctacaaggagctcattggagctggcctcaagatctgggttttcagtggtgacacggacactgcggtgccgctgaagcgcgaccaggcgctctctcgccgccctgggccttcccgtaaagaccagctggtacccctggtacatcgtgccgaccgaaggttggcggcggctggagcatggagtacgacgaagggctgaacttggtcaccgtccgcggcgccgggcacgaggtcccgctgcaccgcccgccggagcaggcgctcttcgtgttccagcaattcctgctgggcgaacccat

SEQ ID NO: 20403 - DNA, 557 bp, Zea mays
  Coding DNA Sequence Number=SeqID_6000
gagtctgaggatctctctgacatttttgagacagaatcagaggagcaggaagaggacaacaaggatcgccccttatatctcgataggctggataagtttccctcaggaaaaaatgataatgaaccagatgattttgaggagcatctgcggaggatcgcttcactttcagataagactgattcaccttcaaaagaactgaaagtgtcagagctcgatgagattgataaaatctttctgagagcaagttcattgttgaagaaaaggtgaacctttgggatttgtatatgacaatcgtcatatttatatgcactgtgaaaagtattttgtgcagttttaatggcatcttcagaaaaaagtttatgatcgtctagtgatagggccaaccctcaaagtttgtggtcaccattgttttccagtgattataatatacctggaattctgtggggttgtttgaatttgttgcctgataacttcgatgtgtcatccagcagattcttgttgtttcatgcttttgttcgcagttcctgatgttagttgtagccatcctttgtaagtgc

SEQ ID NO: 20404 - DNA, 262 bp, Zea mays
  Coding DNA Sequence Number=SeqID_6001
ggtactgatgtgtgccaaatgatttcagtcgactgtcctatatgcttcaacattctccaattttagagaagctcactctggagcagcatgacgagggtttgtcgctggggacggcatcaggaagaccagcgaggtgctctctcccaagctgaggaggagccgccgccctgtcaccagaagcagaggagccgccgccctgtcacccagaagaaccgagcagacacagagaaaatgggcctttttgcaattgtgagggcgtcga

SEQ ID NO: 20405 - DNA, 281 bp, Zea mays
  Coding DNA Sequence Number=SeqID_6002
gggcaggtactgaacctcctagtaaaccgcctcgacgccctcacaattgcaaaaaggcccattttctctgtgtctgctcggttcttctgggtgacagggcggcggctcctctgcttctggtgacagggcggcggctcctcctcagcttgggagagagcacctcgctggtcttcctgatgccgtccccagcgacaaaccctcgtcatgctgctccagagtgagcttctctaaaattggagaatgttgaagcatataggacagtcgactgaaatcatttggca

SEQ ID NO: 20406 - DNA, 506 bp, Zea mays
  Coding DNA Sequence Number=SeqID_6003
taggcagaccctcagtagtgtaacctccaagtgcatttcgtgaatgattagtcaactataatttatttactagattcaaaacatagcatggtatgcccccctttcgaattcttttggtccccggacatgtcttccattattgccgtccgcagcagccccgggtcccccccgcgttgacgctctagcagatcttccctccgggcctcggagttgctccatatcttccctccgggcctgttatataagaaacacaaacatttaagataagttcatttctaatgctacaaaattctgagatacagcacacatactgaggagaaaattcaaaagatatgtacccttcaagagcatatcgagcataatttgggaatgtatagcgaagtaggcgaatgacttcctccctggtgtacgtgtcaagtaaagggtccttaacacctttgaagcttgccttacaaatatcgttgatcaacttgttttcaatggaatgcatgcaaccaattcgcata

SEQ ID NO: 20407 - DNA, 544 bp, Zea mays
  Coding DNA Sequence Number=SeqID_6004
tttacttgacacgtacaccagggaggaagtcattcgcctacttcgctatacattcccaaattatgctcgatatgctcttgaagggtacatatcttttgaattttctcctcagtatgtgtgctgtatctcagaattttgtagcattagaaatgaacttatcttaaatgtttgtgtttcttatataacaggcccggagggaagatatggagcaactccgaggcccggagggaagatctgctagagcgtcaacgcgggggggacccggggctgctgcggacggcaataatggaagacatgtccggggaccaaaagaattcgaaaggggggcataccatgctatgttttgaatctagtaaataaattatagttgactaatcattcacgaaatgcacttggaggttacactactgagggtctgcctattaagctacggcagaacgattaaaagaccatgaccctctattgtaaattacatagcctcagtggcttgaacctggcgttggatgcttggagtcgctgctgcgcctgctgttatacagtttgt

SEQ ID NO: 20408 - DNA, 586 bp, Zea mays
  Coding DNA Sequence Number=SeqID_6005
ttattactgtaatggctcctctccctctatgccctgttgtcatttttacccagtaattaaatctatttgccgaatattcgcatgaaatgcgacccagcgtttatttcctgacttttaaaacccaacaatgtggcggcaactgattggaaaacaaggacgagctatgactgacacaacaacaacaagaagaatagtctgagggaaatatgagagaaacaacataataagaatgactggcatatccaccagacaaccccattttaaagttctgaattataatgaacaagcatagtcatttacacagtatttatggtgtgtctttggcatattaaggcctcagagagttcccatactggcgtctaaccgaggatattacagtgctgttgctttagccttatgatcctggtgctaaccttgagatatgaggaaaaacaaactccatctcccagactcataaagcagcaccaagtagacgagctgattcagtccgtgacctttcagttttaataaacagggctttgtgtatggacaaggaggaggctggcttgacccctagcttgacccctaggtcattagtactggtcac

SEQ ID NO: 20409 - DNA, 544 bp, Zea mays
  Coding DNA Sequence Number=SeqID_6006
ttggtgctgctttatgagtctgggagatggagtttgtttttcctcatatctcaaggttagcaccaggatcataaggctaaagcaacagcactgtaatatcctcggttagacgccagtatgggaactctctgaggccttaatatgccaaagacacaccataaatactgtgtaaatgactatgcttgttcattataattcagaactttaaaatggggttgtctggtggatatgccagtcattcttattatgttgtttctctcatatttccctcagactattcttcttgttgttgttgtgtcagtcatagctcgtccttgttttccaatcagttgccgccacattgttgggttttaaaagtcaggaaataaacgctgggtcgcatttcatgcgaatattcggcaaatagatttaattactgggtaaaaatgacaacagggcatagagggagaggagccattacagtaataagttaattccattgtgacggcctgcagagcctgtgctcacagaacaaaagccaattgagatctaaatgccacggcca

SEQ ID NO: 20410 - DNA, 409 bp, Zea mays
  Coding DNA Sequence Number=SeqID_6007
taccaggccccaccagtggtcccgggtcccgccctccccaaggtgcagcgcccggtgtgcatgatctccaactcccccagcgtcgtggaggtgttctcccgcatcaacagcaagttcgccctcatgtcccccaagcgcgcgttcgtccactggtacgtcggcgaggccatgaagcagggggagttctccaagccacgcaaggacctgccccccctggagaaggactacgaggaggtccccccaaaggccgccagtgatgccgccccccaggagaagaaatcctgatctgcttgcatgaatttgtttggctgtcgagccaggttgtggtgttgaaaaccctttgtttgtgtcctgggtaatgtttgggtgtttccttccatcatcgcttggtgaactgctatagtatttg

SEQ ID NO: 20411 - DNA, 442 bp, Zea mays
  misc_feature (50)..(50): n is a, c, g, or t
  misc_feature (128)..(128): n is a, c, g, or t
  misc_feature (211)..(211): n is a, c, g, or t
  misc_feature (213)..(214): n is a, c, g, or t
  misc_feature (254)..(254): n is a, c, g, or t
  misc_feature (297)..(300): n is a, c, g, or t
  misc_feature (322)..(323): n is a, c, g, or t
  misc_feature (367)..(367): n is a, c, g, or t
  misc_feature (390)..(393): n is a, c, g, or t
  Coding DNA Sequence Number=SeqID_6008
cccaactgtgatattccccatgttaaccgtactgaggaccagctgatttntatatcaaaggatggatttgtgagccttcttacttcagatggcaaccctaaggatgattttagactccccactgattnaactcttgtggcccagatcaaagaagggttttaaaacggcaaggatctttttgtggctgtccagtctgctatgggggaggaananntttgcgcccttaaagatgttggccccaagtaacttccccnccctggaaaactgtatctccaaaccttaatcgaaaaaaaaagnnnntccaggattggtacaaagacanncctctggcttgagctggcttttgctatggccaacccaaatgcangggtccctgggtgttgccccggnnnngccttatctgtgggtacattctgggccccggattttttatgcttttatg

SEQ ID NO: 20412 - DNA, 437 bp, Zea mays
  Coding DNA Sequence Number=SeqID_6009
atctttttagatctcgtgtcctcgctctagtcgtagcaatacaaacatacatggtatagataaaattaacatcacaccaaacataagaacatactgcataataatgatatactcgttgctacgagagaaacgcaacttgaacggatcaaatctcagttaaaacacgaaagatacgaatttccaagggttttatgtatttgatacgtaagaatataagaaataaactttagtgtctttttcatgttaaaacagagacacagtgtgataaacaacattattacaaaggtttaggaactagaaagaggattattggtcgcaatatgaattttccagagattaaatacaattctgaaatttatttcatatttaaaactatatcttcctttcctttttatttaattcacacggctctggaactgtcgcatgaaatctgagaa

SEQ ID NO: 20413 - DNA, 585 bp, Zea mays
  Coding DNA Sequence Number=SeqID_6010
agaagtccccggagaagttgcgactgtcacagcccatgcagcgcgcgggctcgctgatggccaccagcgtccttccaagcatggccggcaccaccmccgtbgtccttgtcccgtctcgcggctgctggtccagtgcgccgcccttggaagcccatacctcttacaccmcggacacggaaaggacgctgtaatcaaggtgacacctcatcgaggccgcaggagcctatcagattcaaccttctgcaagtatcgaagtggggcgcaaaatatctccaatytagaaatcagcaactttttatagttgcttccttcaaacatcagcaaacctgcaatatcaggtagtttgccaagagcatctatctgtttactcaagtgatgttagttataagaaactattatgtcggtagttgcatatattaggacatatgtcggtcatgattaaagtatgttgtaataatattacatgctcataatgaaagccggtaacatcaaaattaggccttgcagctgcagctccaatcagtaactcactgatgcattggattctccaagtaaatgcaaattctgctatgtttgcacttttgt

SEQ ID NO: 20414 - DNA, 116 bp, Zea mays
  Coding DNA Sequence Number=SeqID_6011
caggttccctccttgtagtagtccattaaagtttggttccctccccgtccttaaattaaagtaaggaggttgccccctttgtgtgggggcttggaaacgtcggctgtttttcctgc

SEQ ID NO: 20415 - DNA, 348 bp, Zea mays
  Coding DNA Sequence Number=SeqID_6012
agaccatcggtctccctctgcttggagctcgtcgccatggccgttgccttctgcctgctcggatcccagcgcgcggagcttttcccctagccgagcccctccatcgcaccgtgctcgtccggcgagtcgcgccctggccgcgtcgagctcccttgtcgtggtttgcttctccccctaccatggctgccgagttctttccccagccatggaactccctgcgcgcgctctgctcaccatcgcaaaccgtggctccctccaactcggcctctgctcgatgcccagcgcgccgtccctgctcctagcgctgtggctttctcctccccgagctccctcaccatggcgtgcgtc

SEQ ID NO: 20416 - DNA, 543 bp, Zea mays
  Coding DNA Sequence Number=SeqID_6013
atattgctacatggtgatcttttgaatctttgcacgtgagaacacgcagtgatatgaacagattatgctacgagagaagaggttgtttgttcgccaataattttagtggactttcagatagaagcaccagaaaattcgcaagttagcttacatatgctaaaaggtagaaaggaccttgaaaccttcgagaactctctcgtcaacatcttcacactttcggactttcagatagaagcaccagaaaattcgcaagttagcccttgaaaagctgttcatcgttagctgcccggggatcaaaatccttgtctcaagacacaaaaggcctcaccggtctgatgagactgtggatccgtaggtgccctgatctggagaggcgttgcgagacaggggaaggggaggactggcgcctcatctcccacgtccctaagttgagtattggccggtgaaatcacctctcctaagttgtgccggtgcttctcatcgtcttgatgtcaggactcacctcccttcaaatactccagatcagcgagtgcccgggcttcg

SEQ ID NO: 20417 - DNA, 574 bp, Zea mays
  Coding DNA Sequence Number=SeqID_6014
gccgaggtaccagacgatgcagtttttcaagggaggcgaggctgctcatcatcccctgtgggtaaggacgcgaagcccgggcactcgctgatctggagtatttgaagggaggtgagtcctgacatcaagacgatgagaagcaccggcacaacttaggagaggtgatttcaccggccaatactcaacttagggacgtgggagatgaggcgccagtcctccccttcccctgtctcgcaacgcctctccagatcagggcacctacggatccacagtctcatcagaccggtgaggccttttgtgtcttgagacaaggattttgatccccgggcagctaacgatgaacagcttttcaagggctaacttgcgaattttctggtgcttctatctgaaagtccgaaagtgtgaagatgttgacgagagagttctcgaaggtttcaaggtcctttctaccttttagcatatgtaagctaacttgcgaattttctggtgcttctatctgaaagtccactaaaattattggcgaacaaacaacctcttctctcgtagcataatctgttcatatcactgcgtgttc

SEQ ID NO: 20418 - DNA, 312 bp, Zea mays
  Coding DNA Sequence Number=SeqID_6015
aaacttgcagcttttaagacgtatgggctaagcacacccgatgatagtattcagcgcaggcaacacatatatggagtacacaggttcacagaaagtgaggtccgtagattgtgggtgtttgtatggtaagcgcttcaagatgcagctcttataattcttgctgtctgtgcgttcgtatcgctggatgttggcattgtggtggaagggtggccaaaaggtgctcatgatggtcttggaattgttgcaagtatcctcttggatgtgtttgtcgctgcaacaagtgactaccggcagtcactgcagttcaaggac

SEQ ID NO: 20419 - DNA, 358 bp, Zea mays
  Coding DNA Sequence Number=SeqID_6016
ttattagagattagagcgccccgcccggccaggtgcggtcagtggctcgagggagcggttcgctcacgacgatgctagacgagggtggggtctacgaagcgggccagatagggggctggcatagacgcgagcagagatgggagcgatggcatctgggccacgcgtggcacaggtagaggtgcaatcaaaggcgatcggggtggaggggaaacaagatcgaactcaaggagagagttgagatcggtaggtgaggagccagcacggggaaagacaactttataaaatacaacctgacgagagatgaggatgcaatgagtgaggaggtcaagacaacaataacccttgtggtcggaggagt

SEQ ID NO: 20420 - DNA, 187 bp, Zea mays
  Coding DNA Sequence Number=SeqID_6017
cccgcgggaatttcgatagtcgagcgaccgtgccgggggcgggccgggcgcttatgcgggaggcacggcacggcacggcatgacgagatgactgccactggtgtggtgggttgtgggcgcgaaacgggacaatgagtcacatgatggcgcaggcgtaggaggggtcctcctcgcagacgatccggta

SEQ ID NO: 20421 - DNA, 250 bp, Zea mays
  misc_feature (170)..(170): n is a, c, g, or t
  Coding DNA Sequence Number=SeqID_6018
tgaccgaggtgctcatgacggcgcccatcgacccgcgcgtgcacgccgccgtcaggaccgcgacgcgctcggctgcgactgcgcgtgatcacgacgccaagccttcttatctgaccgtcctggacagcacgggctgctcgactgttctccagataacaccacccagccgngtgacgcacgcatcgatgcctgacacggggtgcgagtgggcacctgctcaaatggagcctgtgacttctcgagcagcact

SEQ ID NO: 20422 - DNA, 489 bp, Zea mays
  misc_feature (81)..(81): n is a, c, g, or t
  Coding DNA Sequence Number=SeqID_6019
agtgctgctcgagaagtcacaggctccatttgagcaggtgcccactcgcaccccgtgtcaggcatcgatgcgtgcgtcacncggctgggtggtgttatctggagaacagtcgagcagcccgtgctgtccaggacggtcagataagaaggcttggcgtcgtgatcacgcgcagtcgcagccgagcgcgtcgcggtcctgacggcggcgtgcacgcgcgggtcgatgggcgccgtcatgagcacctcggtcacctcggccagcgtggtgacccgcgcgtgcagctcctccatcatagtgtccatgagcgtgttacagggcgtggtggggaggaggcgctcgaacaggtcggtgaggccgaggctgtccaccacccagttgtcgctgtgcacgtcgatgatcgtcttgtcgaagtcgaacaccaccacgatcccggccatgtgtgggtttagctggctggatgggtggctggctacgatgcttcgtgtggta

SEQ ID NO: 20423 - DNA, 293 bp, Zea mays
  Coding DNA Sequence Number=SeqID_6020
gctctcgaggcacaattcaatgtatctgagacaggaaagagggactcaaaagtccaggataaggaaacgagcctcaaggaagctgctgcagaaggcgtagaaacagcaggtagtggaagagattacgcgcctctcacctgagctagaggcgaatcatgctgcagagcttgcttcctctgggtccgtctgggtacaaaccctctggcatctcagagaagggaaaatttggcgacttggtgaaggccatagctggtgtgtcagtttccagcaacagcaaggaagcacgcgggcga

SEQ ID NO: 20424 - DNA, 344 bp, Zea mays
  Coding DNA Sequence Number=SeqID_6021
tccagtcgccgccacccaaaaatttctgccgccgcaccaatcgccgtccatagccgcgtgccctagccggccgaccgtaatcgccgtcccagccgtgcgcccaagccagccggcccccaacgtcgtccccacccgcgctcccaagcaggccggcccccagccgcgcgccctgctacgccaaacgtcgtcccctaccgcgcgccctgcttgcttcatccgaccggccgccaacagccgtccccagccgtgcgccctgctagagccgtgctccaaaccaccggcgccctgctataacgtggtagcttcagagtggagaagcgtccgcacaagaaaaggtttgatca

SEQ ID NO: 20425 - DNA, 587 bp, Zea mays
  Coding DNA Sequence Number=SeqID_6022
aattacccgccacattatctcattacacatggataaagaggaaggagatccctttatgctgtggcctgtggtcctacaaaagcgtggagggtactatgtccttgtgttgcctctggtggatcctcagccatttagagcatatgagaatctcttgaaaaggtctgattgtgggggttcggccaaggagaacaacaatctttcttcaatcctgttcaatcttccatgcataacaggagcatttatggttgcacaagttgttggggacataattactggtgatattgctgaacctgaggtgattgttagctctgggccatctgttggtggactcttggattcattgactggaagtataggtatttcagcacgagcgaagcctattgccgcacctgttgcagcaccaactgcatcagtctcttcccctgttggtgctgctcaatcagactccttaaaagggggtgtaaggccttttgacaaggatttactgcagaacttcatcattggtgcaatgccttttggcacacctcaagatctcaattatgccaatgttacttcgattagaactactggattttctggtgaccctc

SEQ ID NO: 20426 - DNA, 51 bp, Zea mays
  Coding DNA Sequence Number=SeqID_6023
acctactttcactggaatgcccgcggttcttatggcaaactacgggtccga

SEQ ID NO: 20427 - DNA, 556 bp, Zea mays
  misc_feature (30)..(30): n is a, c, g, or t
  misc_feature (32)..(32): n is a, c, g, or t
  misc_feature (40)..(42): n is a, c, g, or t
  misc_feature (54)..(54): n is a, c, g, or t
  misc_feature (56)..(59): n is a, c, g, or t
  Coding DNA Sequence Number=SeqID_6024
acctcgacaggttatacttcctcctcgccncnctctcgcnnntggacctcgccntnnnngtcgcctgtgccatgtggtacaagggcatcaagcttgacggcggcgacggcgataacaggagaaaggtctctgcgcacgtctagctagccactgcatactggacctcgggccttcagttttcaggttcagagacgtgccgggctggcccctggccgtatgcccgtatagtcttatagagagaggagagagagagagaggaaataaaatgtcaaagaatatgtaaccatccgctcggcgttggatggcccatgttgttatgtatctttggtcgggcatcaagagtaaccacgggtgaagtactaatgcaataattatatatgcgcagtacacgctagctgccgcataacggcacgtaattatatttaatgatgagtgattttagtgccgggctgatctataaccgtatgcccgtatagtcttagagagagagagagagagagagagagagagagagaaataaaatgtcaaaggagtggtatgtaaccatccgctcggc

SEQ ID NO: 20428 - DNA, 393 bp, Zea mays
  Coding DNA Sequence Number=SeqID_6025
ggactacacgttttggtcgcttacttggtacaacggcccgaagacggtgcggattccaatagcggtccgaatgacagtttatgatttctatgcagatgttgcataaataagttgaaacatacaggacgtatcgtttgggttattttcgtttctgaagggaataaagaagtgtttttagaaaatttcgagaatctggtgcctctatatatattatggatcttttctgaagccgttgacttggcaatcggatcatggactacctatagagttcattcacttgatctaacaatgtggacagctgattgtagtcctgatggcacacatgcagatttcggtgcgttgagcaagagcttaaatatttaaacatgcactattttttgcaacttgtttctg

SEQ ID NO: 20429 - DNA, 64 bp, Zea mays
  Coding DNA Sequence Number=SeqID_6026
gcttcgtcaacaaagtctaaatatgagaaccggtaaatcacctgcttatgaacctggaacctgg

SEQ ID NO: 20430 - DNA, 188 bp, Zea mays
  Coding DNA Sequence Number=SeqID_6027
accgcgacgcgtgcagccggagctcgtggcccaggacgtccccgctgccctgcccgcccaggttccaggttcataagcaggtgatttaccggttctcatatttagactttgttgacgaagcaactgctgttgctgttgttgttgttgttgctgctgctgttgctgctggcaattggtttctctgcaaa

SEQ ID NO: 20431 - DNA, 84 bp, Zea mays
  Coding DNA Sequence Number=SeqID_6028
tcgccgtgcatctcgaagcgtggatcgacttcaccgtgctcgccctagatgacgtaatttttatctcctcgattctcacaccaa

SEQ ID NO: 20432 - DNA, 273 bp, Zea mays
  Coding DNA Sequence Number=SeqID_6029
gggttcgtcgtctcaacgctgaatgcgaaatagtcattcgtatcgttggtcagacggactgagcaggatatcgtctgcttgttaggatccacaaggaaatgcagatcaagaggctcgatccctagcatgtcctccaagcaactgacttcctcgtccacttgttgaccactgcaatccatgccttccatcttgcctagggcagcaagtatatcacatacagaaggccttcgtattggttcgacttccttgcatctctgagccagatctatgcat

SEQ ID NO: 20433 - DNA, 299 bp, Zea mays
  Coding DNA Sequence Number=SeqID_6030
acacgatcgtttcaacgccagcaagtgattaaatgcatagatctggctcagagatgcaaggaagtcgaaccaatacgaaggccttctgtatgtgatatacttgctgccctaggcaagatggaaggcatggattgcagtggtcaacaagtggacgaggaagtcagttgcttggaggacatgctagggatcgagcctcttgatctgcatttccttgtggatcctaacaagcagacgatatcctgctcagtccgtctgaccaacgatacgaatgactatttcgcattcagcgttgagacgac

SEQ ID NO: 20434 - DNA, 432 bp, Zea mays
  misc_feature (75)..(75): n is a, c, g, or t
  misc_feature (109)..(109): n is a, c, g, or t
  misc_feature (143)..(143): n is a, c, g, or t
  misc_feature (145)..(145): n is a, c, g, or t
  misc_feature (168)..(169): n is a, c, g, or t
  misc_feature (173)..(173): n is a, c, g, or t
  misc_feature (177)..(177): n is a, c, g, or t
  misc_feature (187)..(187): n is a, c, g, or t
  misc_feature (196)..(196): n is a, c, g, or t
  misc_feature (199)..(200): n is a, c, g, or t
  misc_feature (275)..(275): n is a, c, g, or t
  misc_feature (331)..(331): n is a, c, g, or t
  misc_feature (383)..(383): n is a, c, g, or t
  misc_feature (397)..(397): n is a, c, g, or t
  Coding DNA Sequence Number=SeqID_6031
gtatactgcaaaaacaaaatcccatcatgagcacgtttgcttagtctatccccccacccccatgaaggtagtganttccaaaggcacccttatgccaacaatagcgtcngatagaacagcaaagcttttagaccccagaaacncnctagatccgccctccgtcgaganntcangacnggttgcttanttaaccacncanntagcttacatgttgccacctgcacacacgtggagcggagatctatccgaacacgggaattgattcatctggtggngttacaacatagggtttttgatatagcaatgggattactcatgtataaatgaacanaggttggagacagttggacctgacaattgccactttttacatgttttaactnattttttttctggnaaacaagtaattgtgaagccccttggaagtccttt

SEQ ID NO: 20435 - DNA, 335 bp, Zea mays
  Coding DNA Sequence Number=SeqID_6032
ggcgggcgagggatgtagaggaaaccgagggggaaggtgcggggcccaggagggaagtgggaaagtggaaaaaggaaagaagaaaggcgagagcggtccaggccttcgatccagggcgctggctgggattccgttcccccaagggccagcttcggccaagctgtgtacccgacccctgccatcgcctcacgggggacggtgcttaaccaccattcccgcgcgcgggggccgacgccccaccccgggttcaggggggaggatctttcctacacgggcctccggttggggaaccccacaaaccggacacccttcaccggaggcccttcgggcccaat

SEQ ID NO: 20436 - DNA, 528 bp, Zea mays
  misc_feature (341)..(341): n is a, c, g, or t
  Coding DNA Sequence Number=SeqID_6033
tattgggcccgaagggcctccggtgaagggtgtccggtttgtggggttccccaaccggaggcccgtgtaggaaagatcctcccccctgaacccggggtggggcgtcggcccccgcgcgcgggaatggtggttaagcaccgtcccccgtgaggcgatggcaggggtcgggtacacagcttggccgaagctggcccttgggggaacggaatcccagccagcgccctggatcgaaggcctggaccgctctcgcctttcttctttcctttttccactttcccacttccctcctgggccccgcaccttccccctcggtttcctctacatccctcgcccgcctgccncctggcggcagcttctccatcgtagcctcgacgggggcgaggacctcggataggaccagcggccttagcggtggcagacctggtggtcggggaggccttaaccggcgtgaaccctgccgccgatttgggctcgagcttccgcttcttgcccatagcaacggcgacacggcgtgggaagacgggaatt

SEQ ID NO: 20437 - DNA, 365 bp, Zea mays
  Coding DNA Sequence Number=SeqID_6034
aatccttaggtccctagccgtcgcgccgccgttcggcttcctaatctggcggcgccttccttcctcgccgctcatctcagttctcggcgcaaacgtggaaggcctcatccccggcggcggcggtttgtgctccagcctccagcgagcaagacttagagcactcggagggatcccacgccgctgggccaggcaagggcactggacgcgggcgtctgaaagaagccggctaggaggaccacgagtccacggctgggcagtggccgggcgctgcgcctgcgctgggcgtgtgggcggcccgtggtggggctggcctcggcccccggggtcgctagcggccggctgctgagaaccgtgaaccaataatt

SEQ ID NO: 20438 - DNA, 418 bp, Zea mays
  misc_feature (138)..(138): n is a, c, g, or t
  misc_feature (232)..(232): n is a, c, g, or t
  misc_feature (335)..(335): n is a, c, g, or t
  misc_feature (378)..(378): n is a, c, g, or t
  misc_feature (384)..(384): n is a, c, g, or t
  Coding DNA Sequence Number=SeqID_6035
atcctggcaaatggtagttcactcgtaggctacttaatgatcgggactttatcctatcccacattatttgatgaacgttcatgctggttgagtgttctaagttctcactaccaaatagatagttaccagaggggtggncctactgattgcaggtctctaggtgggatatttgcatgggcacagaaggaacccgatctattcaaacctacaaacgaactttaactctcattgnggttgctcagggggttctaccttgaagcacataaacttatcccattttccaaaatgctagtatatgaaccatgatgaaaaatttgggatacttctggcttaanctgcactgggcactgggatatgttttggggacgtagggagggntacagnctggtgatagggctataactaacaacctttgaat

SEQ ID NO: 20439 - DNA, 414 bp, Zea mays
  misc_feature (28)..(28): n is a, c, g, or t
  misc_feature (34)..(34): n is a, c, g, or t
  misc_feature (77)..(77): n is a, c, g, or t
  misc_feature (180)..(180): n is a, c, g, or t
  misc_feature (274)..(274): n is a, c, g, or t
  Coding DNA Sequence Number=SeqID_6036
ggttgttagttatagccctatcaccagnctgtanccctccctacgtccccaaaacatatcccagtgcccagtgcagnttaagccagaagtatcccaaatttttcatcatggttcatatactagcattttggaaaatgggataagtttatgtgcttcaaggtagaaccccctgagcaaccncaatgagagttaaagttcgtttgtaggtttgaatagatcgggttccttctgtgcccatgcaaatatcccacctagagacctgcaatcagtaggnccacccctctggtaactatctatttggtagtgagaacttagaacactcaaccagcatgaacgttcatcaaataatgtgggataggataaagtcccgatcattaagtagcctacgagtgaactaccatttgccaggataga

SEQ ID NO: 20440 - DNA, 371 bp, Zea mays
  misc_feature (84)..(84): n is a, c, g, or t
  misc_feature (118)..(118): n is a, c, g, or t
  misc_feature (195)..(195): n is a, c, g, or t
  misc_feature (201)..(201): n is a, c, g, or t
  misc_feature (234)..(234): n is a, c, g, or t
  misc_feature (237)..(237): n is a, c, g, or t
  misc_feature (239)..(239): n is a, c, g, or t
  misc_feature (246)..(246): n is a, c, g, or t
  misc_feature (309)..(309): n is a, c, g, or t
  Coding DNA Sequence Number=SeqID_6037
acttgataactctgctaggttagactcaggggactactgttaaggatatataccaggtgtacccaagaggtttccataatgaanatgttggcctatgggccaggtccggggaatccanacttggtcgagggagtcatactcggatattagggtactcgacgcacatgtcaaaacagaatccacctgtgcgggtcnttgacnaactccatggcggcaccgtagtagtcggcgtanatnancttcacnccggggtgctgcgccctgagccggtcgacctcgccgcgcagcgcccggttgtgcctctggganaagtcgttgaaccaccggaggcacccgtgctcgtcgtagtccgcgcggttgccgctcctgta

SEQ ID NO: 20441 - DNA, 541 bp, Zea mays
  Coding DNA Sequence Number=SeqID_6038
ccgctttgcatctccagataggtagggatgagctcatcagtgtggtgattaagccgtcaaatcagctcaaaatcacattcctagaggcaaaagatataactgatttgggaaatctaaaagaggcatccaagatatttgtaccagctggtgcaaaaatattctcagctcgaacaattaaagttaaggaagaggaggatattaggacatattacttctatgaattcagtctggacaagcaacacgttgctctgatggctaccgtgaatagtgggaagacgtacattgccggcgctaccgctccagaaatgaaatggggtgatgatggcgtgaagttacgttcggctgccgtatctctatcgatttcatgatttattgtgcaaaatataacaactaaaaaaatgtgatacaactctcggattcagcggtacgcatagagggatctattactgttctagtcattgaaagaaggtaaatagttgggttagtcgacaaaagcgacaaaagcactggatgagactgcaaggtttcagtcaagtctgta

SEQ ID NO: 20442 - DNA, 253 bp, Zea mays
  Coding DNA Sequence Number=SeqID_6039
acaaggagtcctttatcattattcttattatcttagtgtaaatattattatatattattaggggcgtttacagcgtagcaagttcactcttgcaagctagggacttttacaagagcatgtagctagttagtagttcatttggagtgtgaacatgtcttatttgcacacttgcttttttcccccccccgttattttctccatcttcagggatggctattagctcctttgcatgcgttcatggaattgtggtgca

SEQ ID NO: 20443 - DNA, 136 bp, Zea mays
  Coding DNA Sequence Number=SeqID_6040
ttgctcaagtcgtctcagaaaactagtgtcaacaaaaagtcaaaaactaacccatgatagagagtagtagatgattaggattagcgtccggagaactagggccgtgtgaatctagcatccgatcggtcgggcctca

SEQ ID NO: 20444 - DNA, 182 bp, Zea mays
  Coding DNA Sequence Number=SeqID_6041
ggaaactcatataaattaattgcactatacaaattgggacttgaggcagcggtagcagggacttgaggcccgaccgatcggatgctagattcacacggccctagttctccggacgctaatcctaatcatctactactctctatcatgggttagtttttgactttttgttgacactagttttc

SEQ ID NO: 20445 - DNA, 590 bp, Zea mays
  misc_feature (39)..(42): n is a, c, g, or t
  misc_feature (73)..(81): n is a, c, g, or t
  misc_feature (92)..(96): n is a, c, g, or t
  misc_feature (106)..(107): n is a, c, g, or t
  misc_feature (127)..(135): n is a, c, g, or t
  misc_feature (138)..(138): n is a, c, g, or t
  misc_feature (140)..(151): n is a, c, g, or t
  misc_feature (164)..(167): n is a, c, g, or t
  misc_feature (176)..(182): n is a, c, g, or t
  misc_feature (184)..(189): n is a, c, g, or t
  misc_feature (191)..(193): n is a, c, g, or t
  misc_feature (196)..(198): n is a, c, g, or t
  misc_feature (201)..(205): n is a, c, g, or t
  misc_feature (221)..(227): n is a, c, g, or t
  misc_feature (229)..(231): n is a, c, g, or t
  misc_feature (236)..(238): n is a, c, g, or t
  misc_feature (241)..(242): n is a, c, g, or t
  misc_feature (247)..(253): n is a, c, g, or t
  misc_feature (259)..(270): n is a, c, g, or t
  misc_feature (272)..(282): n is a, c, g, or t
  misc_feature (287)..(299): n is a, c, g, or t
  misc_feature (309)..(309): n is a, c, g, or t
  misc_feature (311)..(313): n is a, c, g, or t
  misc_feature (315)..(315): n is a, c, g, or t
  misc_feature (317)..(320): n is a, c, g, or t
  Coding DNA Sequence Number=SeqID_6042
agttcacattgtaacctgaataaggtcgagatacttagnnnnttttcatatgttgcaggtatacaaatacctnnnnnnnnnatcacccagtnnnnncaacgttctnnatgaaataaagcgtcattannnnnnnnntgncnnnnnnnnnnnnaggaactgcagcnnnnatttctcgnnnnnnngnnnnnnannngcnnngcnnnnnaagttttaaaaagcannnnnnntnnnggaannnaanngcatnnnnnnnatgtcnnnnnnnnnnnnannnnnnnnnnnaggcnnnnnnnnnnnnntgggaatttngnnnantnnnntaatggtagtccttattctaaaagaaaggttccattactcggaatcaacgtcaggcaaaaatctcttctctcttatttacatggggttatctacttgtaaaataagaaatcgaatgattttgcgcgaaatgagacagccgtgctgacggacgtctgttctgacccacaagcaattgtttttcctttgcttttgagatctgaactgacggttagcttcacgtttcaaatttgcttcgctaaaaaaagatagacccagtgttagcggcttcc

SEQ ID NO: 20446 - DNA, 150 bp, Zea mays
  Coding DNA Sequence Number=SeqID_6043
ctggccagctgggagcatcggatgccgatctcaagataagtagaagaatctgaactctaacctaatgttcttacagaatttttaattcctttcatgtttaggagtgatctgagtgcatcagatgcccatattagcgttcttccgagatat

SEQ ID NO: 20447 - DNA, 432 bp, Zea mays
  Coding DNA Sequence Number=SeqID_6044
gagccgagtgtgtttcttacgttagacacaacctgcccattctcgaacagcactttcttcttcagatacagacatccaaactgaggtggagagcaccgtctattcctacacctcgacgatcacggtgcctgcttccaagcgcttccttcgaggtgcagagggattgaaatttgatttcttcctcattcttactattcagttcaagctcatttgcgctacggtgtgtatatcgaatgattcgaatctaaaatgtgttttctttttccctctatatttagtctaggtattgtagttccgacttgccgtttcagattttttcttatacatttctctctgttaagaactacgtcaccacggatcactagatccgcttcctttccttccggcagcagattagacacgagaatatgtgaaagactcgtatcccttccc

SEQ ID NO: 20448 - DNA, 438 bp, Zea mays
  Coding DNA Sequence Number=SeqID_6045
gaggtccaaccttacatcatgtatcgtgtgtcgtgtttctgggaagggatacgagtctttcacatattctcgtgtctaatctgctgccggaaggaaaggaagcggatctagtgatccgtggtgacgtagttcttaacagagagaaatgtataagaaaaaatctgaaacggcaagtcggaactacaatacctagactaaatatagagggaaaaagaaaacacattttagattcgaatcattcgatatacacaccgtagcgcaaatgagcttgaactgaatagtaagaatgaggaagaaatcaaatttcaatccctctgcacctcgaaggaagcgcttggaagcaggcaccgtgatcgtcgaggtgtaggaatagacggtgctctccacctcagtttggatgtctgtatctgaagaagaaagtgctgttcgagaatgggc

SEQ ID NO: 20449 - DNA, 335 bp, Zea mays
  misc_feature (44)..(44): n is a, c, g, or t
  misc_feature (55)..(55): n is a, c, g, or t
  misc_feature (63)..(64): n is a, c, g, or t
  misc_feature (67)..(67): n is a, c, g, or t
  misc_feature (72)..(74): n is a, c, g, or t
  misc_feature (89)..(89): n is a, c, g, or t
  misc_feature (96)..(96): n is a, c, g, or t
  misc_feature (102)..(102): n is a, c, g, or t
  misc_feature (105)..(105): n is a, c, g, or t
  misc_feature (116)..(117): n is a, c, g, or t
  misc_feature (121)..(121): n is a, c, g, or t
  misc_feature (126)..(127): n is a, c, g, or t
  misc_feature (131)..(131): n is a, c, g, or t
  misc_feature (134)..(134): n is a, c, g, or t
  misc_feature (136)..(136): n is a, c, g, or t
  misc_feature (138)..(138): n is a, c, g, or t
  misc_feature (143)..(143): n is a, c, g, or t
  misc_feature (147)..(147): n is a, c, g, or t
  misc_feature (151)..(152): n is a, c, g, or t
  misc_feature (154)..(155): n is a, c, g, or t
  misc_feature (157)..(157): n is a, c, g, or t
  misc_feature (163)..(163): n is a, c, g, or t
  misc_feature (165)..(165): n is a, c, g, or t
  misc_feature (170)..(170): n is a, c, g, or t
  misc_feature (183)..(184): n is a, c, g, or t
  misc_feature (187)..(188): n is a, c, g, or t
  misc_feature (213)..(213): n is a, c, g, or t
  misc_feature (225)..(225): n is a, c, g, or t
  misc_feature (227)..(227): n is a, c, g, or t
  misc_feature (230)..(230): n is a, c, g, or t
  misc_feature (233)..(233): n is a, c, g, or t
  misc_feature (237)..(238): n is a, c, g, or t
  misc_feature (249)..(249): n is a, c, g, or t
  misc_feature (254)..(254): n is a, c, g, or t
  misc_feature (258)..(262): n is a, c, g, or t
  misc_feature (268)..(268): n is a, c, g, or t
  misc_feature (282)..(282): n is a, c, g, or t
  misc_feature (287)..(287): n is a, c, g, or t
  misc_feature (293)..(293): n is a, c, g, or t
  Coding DNA Sequence Number=SeqID_6046
cgataagattcaacgctgtacgagagattgttccccttacgcantgtggctggcngatagttnnatngggannngtgcgatagtgagtnacaattntagacnacncctctctgacnngaangccanngatnatncncnccganattnagcnnanntnatgganangatgnctgatcgccatcnnggnnctgtgatgaatcagagtgagccgtntgtctagcctcnangantcnccanntgttcgacaanccaangaannnnntcctgntgataagacagganatcgntcatcncccaacagcaaaggtaggcgaagcccattgaggaggatgtta

SEQ ID NO: 20450 - DNA, 272 bp, Zea mays
  Coding DNA Sequence Number=SeqID_6047
gggtaatccagtgcttaacacaggataaacagctgagaaatcaaagggagtaatttattgatagagtgagttggtccgtgctgtcagtgtgctgcgcagatcgtgtaacattacttcgtgagttcgaaaggcgtgtgacaattttgtttgcaaaagtgcgatgggcaggctaactgagccagtcttcttcccagttggttgatctgattgttgacagttgagttagctgaacgctttgtatgattgtgtcgtcacttgcgaaggtactcgaa

SEQ ID NO: 20451 - DNA, 284 bp, Zea mays
  Coding DNA Sequence Number=SeqID_6048
gttatgccaaacagacggaaacagaaacgtcaaacattcgagtaccttcgcaagtgacgacacaatcatacaaagcgttcagctaactcaactgtcaacaatcagatcaaccaactgggaagaagactggctcagttagcctgcccatcgcacttttgcaaacaaaattgtcacacgcctttcgaactcacgaagtaatgttacacgatctgcgcagcacactgacagcacggaccaactcactctatcaataaattactccctttgatttctcagctgtttat

SEQ ID NO: 20452 - DNA, 385 bp, Zea mays
  Coding DNA Sequence Number=SeqID_6049
gagcttcaaaacgatcgagtcactacctcaacatgtctgggcgaggaaaaggaggaaaaggtctgggaaaaggtggtgctaaacgtcaccgaaagatcctccgtgataacatccaaggaatcaccaaaccagccatcagaagaccagcaagaagaggaggtgtcaaacgtatctccggtcttatctacgaagaaaccagaaccgtcttaaaatccttccttgaaggtgtcatcagagacgctgttacctacaccgaacatgccaagagaaagaccgtcacttcccttgatgttgtttacgccctgaagagacaaggaagaaccctttatggtttcggtggttaatttcccgctgcccccctgtagtttgggcttcagcctcccac

SEQ ID NO: 20453 - DNA, 236 bp, Zea mays
  Coding DNA Sequence Number=SeqID_6050
aagcaacaagcaacacgcaaatcgtgatgactatttcagataggattgttggatttggattgctggtggtgacccttgccgtatttacttattacacaatttgggttattggtacgccattcatcgagcctcatcattttattcaccagtactttcttccgcgtgaatatgccatcagtattccattgagtgcactcgtagttgcattatcttgtgtcttctcatttatttcatgg

SEQ ID NO: 20454 - DNA, 244 bp, Zea mays
  Coding DNA Sequence Number=SeqID_6051
atatgactgttatctgctttttatcatcacccatgaaataaatgagaagacacaagataatgcaactacgagtgcactcaatggaatactgatggcatattcacgcggaagaaagtactggtgaataaaatgatgaggctcgatgaatggcgtaccaataacccaaattgtgtaataagtaaatacggcaagggtcaccaccagcaatccaaatccaacaatcctatctgaaatagtcatcacg

SEQ ID NO: 20455 - DNA, 571 bp, Zea mays
  misc_feature (169)..(169): n is a, c, g, or t
  Coding DNA Sequence Number=SeqID_6052
caacttaccaagagatgggtcgtgtaaaacatcaaaattcacgtcgaaattattatcaaaataaaaatggaaataatttcaattctaattcttcgaataatatgattcaaataggacaacatggattttttgttacatttacatcaacaaaagaatcatttgttcgaanaatggaaatttataatttattaaatcgttttgctgatcaattatttggtgcagaatttactgaagaaaaacaacttgatacaactgatcttaatgatttagattcagcattagaaaatgaaacaatgaaattaaacgcctcgaaaaaaaacatccgtcgttttcgaattaattaaatctggtacttcaaacacttcactcttttgttacacacaacattatcactctacgtctatcaatcaatttaattgaatctatatttcaaactagtattgattcaaaagaacaacatagtcgttatattgaacgtttattaccaattgcattcgtatgtaaagcttatgatgatgatttaagaaaattaattattaaaaaagaatttctcgatcaaatcttatcagtt

SEQ ID NO: 20456 - DNA, 578 bp, Zea mays
  misc_feature (433)..(433): n is a, c, g, or t
  Coding DNA Sequence Number=SeqID_6053
attatccgtttgattatcatttgcattaataactgataagatttgatcgagaaattcttttttaataattaattttcttaaatcatcatcataagctttacatacgaatgcaattggtaataaacgttcaatataacgactatgttgttcttttgaatcaatactagtttgaaatatagattcaattaaattgattgatagacgtagagtgataatgttgtgtgtaacaaaagagtgaagtgtttgaagtaccagatttaattaattcgaaaacgacggatgttttttttcgaggcgtttaatttcattgtttcattttctaatgctgaatctaaatcattaagatcagttgtatcaagttgtttttcttcagtaaattctgcaccaaataattgatcagcaaaacgatttaataaattataaatttccattnttcgaacaaatgattcttttgttgatgtaaatgtaacaaaaaatccatgttgtcctatttgaatcatattattcgaagaattagaattgaaattatttccatttttattttgataataatttcgacgtgaattttgatgttttac

SEQ ID NO: 20457 - DNA, 230 bp, Zea mays
  Coding DNA Sequence Number=SeqID_6054
gggtctgtccgctgcatgggctcggcgaccggattccctcctattcccccgctgcgttccggggaaggggggggggccgggcaccgactgaaatgggcccccgctgttcccctgggtgcaaattacgagcactgggctcatcggcatggaacaaaaccggggggggggagggggccacccaaggaagcaaaatggattgattggctaaatcccagaaccctttggcccag

SEQ ID NO: 20458 - DNA, 397 bp, Zea mays
  Coding DNA Sequence Number=SeqID_6055
cacctgggccaaagggttctgggatttagccaatcaatccattttgcttccttgggtggccccctccccccccccggttttgttccatgccgatgagcccagtgctcgtaatttgcacccaggggaacagcgggggcccatttcagtcggtgcccggccccccccccttccccggaacgcagcgggggaataggagggaatccggtcgccgagcccatgcagcggacagacccgacgccggcacgttgccgggcgggacggatggaagaggaggacgggaggcgccgagaccggaggcggaggagagagcgtgccgggcatgcggcgacgaggggtgcgcgctacggtggccatgggtggcgagggaagaggcagacaggctgttgactggcgcgac

SEQ ID NO: 20459 - DNA, 225 bp, Zea mays
  misc_feature (180)..(180): n is a, c, g, or t
  misc_feature (182)..(182): n is a, c, g, or t
  Coding DNA Sequence Number=SeqID_6056
gagcaccgagagcactctcgccgaagccacacagagaaaagagaaagatagagagagagacggggaagaagtatacaccgtcgtaaggcattcacagagggtttggaagaatttgttgaaccgcaccgcgtgtattcgaggagctgaggaagaaagaagagccagtggctgaggatcccncnggtggttcagcggatagaagttgatgagcaggaactcgttgaa

SEQ ID NO: 20460 - DNA, 549 bp, Zea mays
  Coding DNA Sequence Number=SeqID_6057
tatgcatgctgaggcgtgcgcgccttgtattgggacattgacctggagctgcacattacccttttggcactccagtttcatttgttagaggaggcacacggacgggtctgggataacgaaaaattccagaacagttcttcttctgcaaaaaaaaaaaaaaaaaacccgcggccgcgggttttttttttttttttttgctaaacatttcagaataattcggcatgccaaaccaaaaaaaggactgcggatattcaaacaagatttcagaaaacgctttaactgtttgataactgaccgatgctaaactcgccataagttaaagaaaagacctcttaataataagactcatacttcagatgtttgctgaaacagcaaaacattatcttctttgctgcaagaagactatacactagatatcctatgaaccatgatattttaacaatatcttctgaagaccaggagcagacaccagccaccccgtggtagatctactcttccttgaggcgcttctcggtctcttccaaagccttaatatccttgttcaatttt

SEQ ID NO: 20461 - DNA, 502 bp, Zea mays
  Coding DNA Sequence Number=SeqID_6058
cgagcactcatggatttggctttaatgccaaaaccagcgcactcgtggaacattgtgttcttgtcaagcttactgaaacagatctccacgttgtcgtcaccttccaactgcccgcccaatgcgaccgaagaaatcggtacggttgtcttgggacgtgcttccgccaaacgcaatggtggaggcgcgtcctcattggttgggacaggcatggaaacagtcacctcctcattgttcaaaatgggacatggctgaaacatctcgtcgtacgagccaggttgcttgtaatcagccttcattggcggcgagttttgcacaacatcgcgaaacttgtcatgcaactctcgaactttgaatttcctgaaggttgtgtagcaattcctcctcttgctgcgcacgcgtttgaaaaacgccggttggtccgaactgaaagcagaactgtagtaaacgaataccaagtaagctgccacataatcgacataatcggcgaaatccgaccgtgcgg

SEQ ID NO: 20462 - DNA, 557 bp, Zea mays
  Coding DNA Sequence Number=SeqID_6059
gatgttgtgcaaaactcgccgccaatgaaggctgattacaagcaacctggctcgtacgacgagatgtttcagccatgtcccattttgaacaatgaggaggtgactgtttccatgcctgtcccaaccaatgaggacgcgcctccaccattgcgtttggcggaagcacgtcccaagacaaccgtaccgatttcttcggtcgcattgggcgggcagttggaaggtgacgacaacgtggagatctgtttcagtaagcttgacaagaacacaatgttccacgagtgcgctggttttggcattaaagccaaatccatgagtgctcgttggaagattgattactggctcagaaccggtcacccgatttactttgatttggttcttcatgaactttctcaacaatctggccgcccactctgtgatcccgacgggaatccctatgtcgccaccctcgatcaagtcgccgccaagaagagagcttggttggacttgaaggcagcctaccaggaggtcggccgctgatcaacgaggaatcggtgtccgcaccgtaactcaacaatggg

SEQ ID NO: 20463 - DNA, 453 bp, Zea mays
  Coding DNA Sequence Number=SeqID_6060
atccaaatccaaacgaccgacacgaccaagaccaaccctagtgtggcggttcttttgactctggcgttcctgtggcggcgggcctcctccggcaagtcggcgccacctgcgctctgagctcaaagcctccaacctgcgaccacgatctcaggctccttcggcgaccccgcgacaaataccaacgcttgctgccctgctcctcctgctccaaagcctcagcagataccgtctaactctcaagaagcaagaaaaaaatgtaaggcctttgggaacaagtgaaaagaaaaccttaaaagctcaggcatatgcatctcagaagaccattgatagtctggaggtcgatggaaaaaaataacaacctccttcatcaactattaagcttcgattgaggccaagtgcctctatcttaagtctgatgacccctataggacctggaactttatggctgctata

SEQ ID NO: 20464 - DNA, 547 bp, Zea mays
  Coding DNA Sequence Number=SeqID_6061
gcaaatcctataacttcaactcaaagtattaagcatcaagcataattgaaaaaaatcctataacttcaaatccagagggattgtaactagctactatagcagccataaagttccaggtcctataggggtcatcagacttaagatagaggcacttggcctcaatcgaagcttaatagttgatgaaggaggttgttatttttttccatcgacctccagactatcaatggtcttctgagatgcatatgcctgagcttttaaggttttcttttcacttgttcccaaaggccttacatttttttcttgcttcttgagagttagacggtatctgctgaggctttggagcaggaggagcagggcagcaagcgttggtatttgtcgcggggtcgccgaaggagcctgagatcgtggtcgcaggttggaggctttgagctcagagcgcaggtggcgccgacttgccggaggaggcccgccgccacaggaacgccagagtcaaaagaaccgccacactagggttggtcttggtcgtgtcggtcgtttggatttggat

SEQ ID NO: 20465 - DNA, 183 bp, Zea mays
  Coding DNA Sequence Number=SeqID_6062
acaagaaaatcacagcagtacagcaccagaaacagaaaggtagtagatcaaggaacgccagtgcggcgacaatgaccggcagtggaagcacgggcgccaatggcaagagccagagatccagggccaaggcaatgctgttcggtgtctgaatgaagtgttttcttcagtggttctgctcaaaaa

SEQ ID NO: 20466 - DNA, 410 bp, Zea mays
  misc_feature (65)..(65): n is a, c, g, or t
  misc_feature (111)..(111): n is a, c, g, or t
  misc_feature (204)..(204): n is a, c, g, or t
  misc_feature (353)..(353): n is a, c, g, or t
  Coding DNA Sequence Number=SeqID_6063
ggcgtggcggacaagaagaacctcttcgtgggcgtgggaggcatgggcgacctcccgggctttancgccgtgggcggcgggtacggcggcggcttcggcaacaacggcggnggcgtcttcagcggcgtcacgggcccgctgggcgcgtcgggggcggcgtcggaggcgtcggcccgctgggcggcgtcggcgggttcgggcccntcggcggcggtggcggcggtatcccgttcggcggcttcgctggcggtggcacccccttcggcggctacggtggcgggggcgctggcggcgtcacgcttgagctggccctgggctgcggcaggtgcctgggtcgtgatttgagtgcagcnaccagcagcgtgcatggcgttcgcactattattctgcacagcaacgcatcaagcctt

SEQ ID NO: 20467 - DNA, 450 bp, Zea mays
  Coding DNA Sequence Number=SeqID_6064
gcggctgtatggcagatagtactatgtacgtgtagctggtgatctgtggcatgagatgagactatgagagtcctgcctgcgtacgtactgatcagtgatgcgaagtgaggttcgaagcgtttctttcagcacgtcgcgtcccgctcgcggctgatcaacagacggcagtggcatcgttaagattgacatcgctcatgatgtagttgaggtggttgtccaaaactgagttgataagcacaaggcgccccatggggttgaggacgcccgtctaccaacccgtcaggtatttatctaaagccgcctctagcacaccaacatttcaatttttcatacccgcatgtgcaggtatcatgatgatgttgttgtaactgtggtgttaatcagtaataaacgtgagaagtacatatgaacatgttgttgatggtggtacacgaggatgtaggactactt

SEQ ID NO: 20468 - DNA, 459 bp, Zea mays
  misc_feature (35)..(35): n is a, c, g, or t
  misc_feature (38)..(38): n is a, c, g, or t
  Coding DNA Sequence Number=SeqID_6065
gtattgttactactagacgtggtgaaagaagagcncancaatataatataagtagtcctacatcctcgtgtaccaccatcaacaacatgttcatatgtacttctcacgtttattactgattaacaccacagttacaacaacatcatcatgatacctgcacatgcgggtatgaaaaattgaaatgttggtgtgctagaggcggctttagataaatacctgacgggttggtagacgggcgtcctcaaccccatggggcgccttgtgcttatcaactcagttttggacaaccacctcaactacatcatgagcgatgtcaatcttaacgatgccactgccgtctgttgatcagccgcgagcgggacgcgacgtgctgaaagaaacgcttcgaacctcacttcgcatcactgatcagtacgtacgcaggcaggactctcatagtctcatctcatgccacagatc

SEQ ID NO: 20469 - DNA, 581 bp, Zea mays
  Coding DNA Sequence Number=SeqID_6066
tcaagcagaatctccacttccaagtcaaaaatcatcaccaacatttcctttacaagtcataaaacagcccaatattgtctgcattattaagcctcagaggtgcacagcttgccattcaaatccaaaaagcaatttattttacccgcaatttccatgcagctggaaaaagaatgaatatcatacaataaagacttgaaagttgaatttgacgtagatgctacaacaaatattgcaaagcaacattttagcctgtgcatccctcaaatcatttgcttataaaatctattctggataagttgtctcgacttgaatatttttaccttcaaacatcgtgagaagaccaaaccttaatctcaaggaatggttctgtgataataagcattatgtggcaaaaatatcgagcttcttgcatatggtatatagtaatataccatcccacacaatgtttcaaagatcctggtttcttatccaaggataaacaggttcatcctcataaaaggaagataacaaagcaacctctcctttgctgcgaaaatactgtctcaactcttcatcagaaatattttcatccgacttaaaga

SEQ ID NO: 20470 - DNA, 531 bp, Zea mays
  Coding DNA Sequence Number=SeqID_6067
gaagctcgatatttttgccacataatgcttattatcacagaaccattccttgagattaaggtttggtcttctcacgatgtttgaaggtaaaaatattcaagtcgagacaacttatccagaatagattttataagcaaatgatttgagggatgcacaggctaaaatgttgctttgcaatatttgttgtagcatctacgtcaaattcaactttcaagtctttattgtatgatattcattctttttccagctgcatggaaattgcgggtaaaataaattgctttttggatttgaatggcaagctgtgcacctctgaggcttaataatgcagacaatattgggctgttttatgacttgtaaaggaaatgttggtgatgatttttgacttggaagtggagattctgcttgaagttggtatcagttgcagcagactatggttcttgcaggaagaaatatatcatcaagttctgtaggtcagttggaggaagtcatcgataatatgtcgattttggttacccaaatagcgtgtgcaga

SEQ ID NO: 20471 - DNA, 135 bp, Zea mays
  Coding DNA Sequence Number=SeqID_6068
ttttaatttggattgtagcaccggcgggccggatgtaggtaaactattgtgggtggtggtctaaaatatctagtaaccgacggttgccccgattcattttttttttttttttgtatattcggctccgccttctat

SEQ ID NO: 20472 - DNA, 466 bp, Zea mays
  Coding DNA Sequence Number=SeqID_6069
atgcgaatcatacaacggtccaggtttccaaacggtacttggagacgacggggaagacctctcacgagcgagtcgcaggcgcggcggcgtgcctcatcctgtaagaaattttctttgcctccgacttcttcatgtggaaaccgtggtgctctcagtgtggattcctgcgaccctcgacagctcgacttatggattctaggggaactgtggcgtccttagcaaggtgctaaaaaaatcggcatggacgagatcctggtgcggcggtcctcatctctctccccttcggtgatggcgcaaagtgcatggtcccagctcgatctcgtggtagtagaggtggaggcgatctggatatttatgcatatgctccgtggaaaccggtgaccgttaagcggctgcgcggttgccggtgaggttgagcgacgcgcggagtcctcctagcttttctaacttcctaacgcggatggct

SEQ ID NO: 20473 - DNA, 278 bp, Zea mays
  misc_feature (108)..(110): n is a, c, g, or t
  misc_feature (131)..(133): n is a, c, g, or t
  misc_feature (161)..(166): n is a, c, g, or t
  misc_feature (172)..(174): n is a, c, g, or t
  misc_feature (189)..(191): n is a, c, g, or t
  Coding DNA Sequence Number=SeqID_6070
tccaccgtgctgtctccgtgcatcgcccgcagtcgcttgcatcgccgccttctccatctcctaccccgccatatagaccccatgccttcttcctgcctccacggaccnnngtcacaccatgaatgcgaagnnntcttcgccatcgaggcctccgtcttcannnnnnaaaagnnntccctggccttgagnnnaatggaggaggcggaggcatcaagcagcagtacgacttctggctaattgagcccatcaggtttagtggtgccggtagagacgacgcc

SEQ ID NO: 20474 - DNA, 200 bp, Zea mays
  Coding DNA Sequence Number=SeqID_6071
gctacagggacaatcctgatcggtcggcgcatccgcctagaggcccggggagtgacgagtcaacgcctcctcagccctcatcctcacgtcgtccccaccgaagatccgcccaacggccccctgacccgacaaggacgattatcttattgccagcaccgatggggggggggacaaacgcggaagcttgctttccaaaccgg

SEQ ID NO: 20475 - DNA, 584 bp, Zea mays
  Coding DNA Sequence Number=SeqID_6072
gcaaagtacggccaactagctagtatataataaagatgtgacattgatttctgccccatgagttatcatgggggagacttgatcctaacatacattggagacgcacccgagtttacccttaaatctgagtttgacaatggctcacatcaaacgatgcttattatatataaatattaatagtttttatatgtatatatatgtatacatatagtataactttggagattgattgtcttattgaaaacacattcttttttaactcaacttgtatatactaagaatggccttgctgtaggcctgtagcatgcatgtgcagatcacattttatgggggccaacgatataccggaggaggacgatgtggacgaaccttgggcgtagcgacgtcgaaaacaagtacgaagatggctgcaagtagtaccagaaggtgcccccggtgagttcttccgggtggatgactatgagaaggcatcaccatcgtttgcagaatgaattgcagtaaattaatcatatgcatgtataattgtatatacgtatatagggtttcttctattgccttgcagggtttatttcttggcatgcatg

SEQ ID NO: 20476 - DNA, 488 bp, Zea mays
  Coding DNA Sequence Number=SeqID_6073
aacgatggtgatgccttctcatagtcatccacccggaagaactcaccgggggcaccttctggtactacttgcagccatcttcgtacttgttttcgacgtcgctacgcccaaggttcgtccacatcgtcctcctccggtatatcgttggcccccataaaatgtgatctgcacatgcatgctacaggcctacagcaaggccattcttagtatatacaagttgagttaaaaaagaatgtgttttcaataagacaatcaatctccaaagttatactatatgtatacatatatatacatataaaaactattaatatttatatataataagcatcgtttgatgtgagccattgtcaaactcagatttaagggtaaactcgggtgcgtctccaatgtatgttaggatcaagtctcccccatgataactcatggggcagaaatcaatgtcacatctttattatatactagctagttggccgtactttgctacggtt

SEQ ID NO: 20477 - DNA, 407 bp, Zea mays
  Coding DNA Sequence Number=SeqID_6074
aggagagtaggagcccaaagccccaaacgctctttgtttcgctctgcgtgcatgcacgcgtgttcgatgcattaggacggactttgaagaggctagagcaacagttaccgtgtaggtgagctgaatgaaattggccaggagaggaaacaatcggtctataaaaaagtttatagctaatttagataagatcatactttcttatgattgaataattctatgtctgtgttctaactgtgtcctttctcagtgttatactgtcccaatttacagaacaacagatgaaccgtaatgagtcattccgaagatagttgaagtccagtgttattaccgcaattaatatctacctctccacattatggcccttatcttactccatcagtacgaatggctgatattaacgtgtctca

SEQ ID NO: 20478 - DNA, 280 bp, Zea mays
  misc_feature (27)..(28): n is a, c, g, or t
  misc_feature (222)..(222): n is a, c, g, or t
  Coding DNA Sequence Number=SeqID_6075
cgatgaagtacacgcaccttctgcagnnaaagcaggcgacaagcccggccttctcttgagaggcatttagacgactcttgatccatgactcaagataaaagggaaatatgccttgaatcacagttaacacccgcgctctgcaaaaaaaaacggtggaccagcctggccggcttcaaacaagactactttgtcagccattccatcgatgcgaccaaagaaacnggggtcttcctcggcttcaggtgaaatcctctcagtgactgatgaaccgaaaggcacc

SEQ ID NO: 20479 - DNA, 515 bp, Zea mays
  Coding DNA Sequence Number=SeqID_6076
aatgaaggttcaggcccacaatttgccgggaaatttaaagacagtttacacccccatgcaggacggaaagtttgccacaaaaaaatcaaccttgcccacaaagcattgcccggggtccacacatgaaaggacaccaccggttgttcacgattaaaacatagcccgcagaaggcaggggaggataactttggggagcgcaccagcacggccataagttgccaccgaacaggtaccccagggaaaagccaccgccaggagcagggtgaaccttgtttgaaggacggcccgtaaggaagttgccagggttctgaccataacccctggggaagttattggttgggttggaaaccccagaagaaacctgtttggccgaataagtttttgcagaaaatggtttctaaacagggggagcacttgcagttgggcccactgttggtttggggggctcaccgtttccaaagagataacccaaagaactttgaccaccaccggcattaccaccacggttaattttg

SEQ ID NO: 20480 - DNA, 531 bp, Zea mays
  Coding DNA Sequence Number=SeqID_6077
attaaccgtggtggtaatgccggtggtggtcaaagttctttgggttatctctttggaaacggtgagccccccaaaccaacagtgggcccaactgcaagtgctccccctgtttagaaaccattttctgcaaaaacttattcggccaaacaggtttcttctggggtttccaacccaaccaataacttccccaggggttatggtcagaaccctggcaacttccttacgggccgtccttcaaacaaggttcaccctgctcctggcggtggcttttccctggggtacctgttcggtggcaacttatggccgtgctggtgcgctccccaaagttatcctcccctgccttctgcgggctatgttttaatcgtgaacaaccggtggtgtcctttcatgtgtggaccccgggcaatgctttgtgggcaaggttgatttttttgtggcaaactttccgtcctgcatgggggtgtaaactgtctttaaatttcccggcaaattgtgggcctgaaccttcattttaaggtggtgtcgtatccc

SEQ ID NO: 20481 - DNA, 506 bp, Zea mays
  Coding DNA Sequence Number=SeqID_6078
agccgccatggcagtcataggatgtatggccgttgcgggctttctcggatggtgggtctactccaggttttgcagtctaagcgcgaagatggcttggcaagattatactagagacttgtatttctcagatccatatttggcttaggcggggaaaggagccgaactggggaacaagagagaaggaccccgctagccccatccttggtgggaggaagaagctagcaccaccattgcagcaggaggaggtggtggatccaagcctacgcgacgggttcagagcgaaggcgctcctcggtagacaagacaccagcatcactgatacctgctccctgtcctgacgagatttggacaccttacaaagggtaaggtgtcctgacgagatttggaccgacagcaacggcgacagcaacggtttttttttttttttgggtttggacacagtaatttcattcccaacaaataggagtagcagggagtcactgaaccttacaatttatggctactaa

SEQ ID NO: 20482 - DNA, 450 bp, Zea mays
  Coding DNA Sequence Number=SeqID_6079
ctgcgctgtttagtagccataaattgtaaggttcagtgactccctgctactcctatttgttgggaatgaaattactgtgtccaaacccaaaaaaaaaaaaaaaccgttgctgtcgccgttgctgtcggtccaaatctcgtcaggacaccttaccctttgtaaggtgtccaaatctcgtcaggacagggagcaggtatcagtgatgctggtgtcttgtctaccgaggagcgccttcgctctgaacccgtcgcgtaggcttggatccaccacctcctcctgctgcaatggtggtgctagcttcttcctcccaccaaggatggggctagcggggtccttctctcttgttccccagttcggctcctttccccgcctaagccaaatatggatctgagaaatacaagtctctagtataatcttgccaagccatcttcgcgcttagactgcaaaacc

SEQ ID NO: 20483 - DNA, 470 bp, Zea mays
  misc_feature (439)..(442): n is a, c, g, or t
  Coding DNA Sequence Number=SeqID_6080
aagtacttcagagctatcgagtggctccgtgtcattgaggtcagctgaggagtttggatcacctgttggtcgaattgtgaagagtgaggagtttctgaaggctgcaggacctgctatggaaacaaaaacatatgcaggacctggtgaacaatctcatcagctgtcagctataattacaaagctgactgaagaaaagaattctgctcttgagcaaaacagaaagcttcaagttgaattggaacttgtaaggtgcgaagccaggaaacagcaaagcgcgttctcgttggttctcctaatagcgtttgggctccttggcattgttttaggttacattgttaagaaatgataatttcatagtctaatcgagcaatcgctatggtaaataaaaggtaacatgtcgtgtgattcttacattcatcagccagctgccaatgctacnnnnaagtgcaagcgtcagttgacaaaccggg

SEQ ID NO: 20484 - DNA, 140 bp, Zea mays
  Coding DNA Sequence Number=SeqID_6081
taggctcaacgcctcgtctagacgtctacggtctacctcatccagccacaacgaccagcttggccaaacgccttgcttcgaatgttttacttctgaagttcgttataataacccttcgctttgttcaattattcatattg

SEQ ID NO: 20485 - DNA, 190 bp, Zea mays
  Coding DNA Sequence Number=SeqID_6082
ttcaagagttacctgttggagacgtgagggcacataaaacggttagaggaacctaggatcacttatcctaggattattataattgtaggtttgtgtaattctttttcttctcattgcttgctctaagttaagtcatgtcgctgcggtctttgtaaatatgaagcagccagtgctgcaaataaatctatga

SEQ ID NO: 20486 - DNA, 147 bp, Zea mays
  misc_feature (32)..(32): n is a, c, g, or t
  misc_feature (40)..(40): n is a, c, g, or t
  misc_feature (42)..(42): n is a, c, g, or t
  misc_feature (75)..(75): n is a, c, g, or t
  misc_feature (88)..(88): n is a, c, g, or t
  Coding DNA Sequence Number=SeqID_6083
tctccgattgtatacaggtaactactcgtggngaagtgangntcttacccgcaagacccgcatcctggatgtggnctatactctctgnctgttcgctacgccctacgcatctgtgctcgacgcctacccgcatgtgaaggcctggtg

SEQ ID NO: 20487 - DNA, 188 bp, Zea mays
  Coding DNA Sequence Number=SeqID_6084
gacggacggcgtggcatctgtggcttgggcgcgcccacctgtccctcagattagatatggcaataggtatatactccccgtactacctcatactcataccccccccataaaaataactttatcggatccctcatataccccggtgggtatggacttactccatacccatattcatgtaggtatgagtc

SEQ ID NO: 20488 - DNA, 167 bp, Zea mays
  Coding DNA Sequence Number=SeqID_6085
gggatgactcatacctacatgaatatgggtatggagtaagtccatacccaccggggtatatgagggatccgataaagttatttttatggggggggtatgagtatgaggtagtacggggagtatatacctattgccatatctaatctgagggacaggtgggcgcgccc

SEQ ID NO: 20489 - DNA, 536 bp, Zea mays
  Coding DNA Sequence Number=SeqID_6086
atcaccgataggaaggcactctgctccccctgtttgcctccatccgcaccccctttctcattgcgggcgtacgcaccccttctgttgtatgtgatacgcgttcattgtctttcaagtcgacgggaggcggcacactaccgccaacgagccggagctcaagatggtggttgtgccggcaattattccaatctgaatcccgaactcataaatcgtatccatcacactgattcggtctccgtggtcttcaacccgcaccatgtcttcgaaaaggttaattttacagcatcaggtctttgaattggtgtggcagcgattgtttgtttggactgctataatgttattggtttaccatttgttgtcgacctgtgtttcctttgttggcgaaactgacggcggtatggcattgccacgaagatctgattcgtttcttattacttgtgcttctcgtctcggctgaagatcatgttattgtgttcgtcaccgagcattagattgaacaggggtacattttgacaccatcatttgttcgtcagatt

SEQ ID NO: 20490 - DNA, 546 bp, Zea mays
  Coding DNA Sequence Number=SeqID_6087
caatggcacaaatctgacgaacaaatgatggtgtcaaaatgtacccctgttcaatctaatgctcggtgacgaacacaataacatgatcttcagccgagacgagaagcacaagtaataagaaacgaatcagatcttcgtggcaatgccataccgccgtcagtttcgccaacaaaggaaacacaggtcgacaacaaatggtaaaccaataacattatagcagtccaaacaaacaatcgctgccacaccaattcaaagacctgatgctgtaaaattaaccttttcgaagacatggtgcgggttgaagaccacggagaccgaatcagtgtgatggatacgatttatgagttcgggattcagattggaataattgccggcacaaccaccatcttgagctccggctcgttggcggtagtgtgccgcctcccgtcgacttgaaagacaatgaacgcgtatcacatacaacagaaggggtgcgtacgcccgcaatgagaaagggggtgcggatggaggcaaacagggggagcagagtgccttcctatcggtgat

SEQ ID NO: 20491 - DNA, 510 bp, Zea mays
  Coding DNA Sequence Number=SeqID_6088
ttcgcatcccttttacataaatccgatgttttctttctccgattcctttgaggaatcatcacgggtcagggcaggtgttctgccgtttgcccttttctttatattctccttagaagaaatatttagttggaggttggacatagccggaggaactaactaatcgagcggtgtactggcaaaacaaaaggagcggagcaagaaaggggagaaaaactagccaccgccgcagcgctattggccgcgttgggcctggaagcttgcatcaatacttccctcgccccgatttggttccaaaatcatacaagtctcaaagttgtcaagatattggaggtatgcaagcgacttggatctcaaaatagaagaaatttcggatctgagcacaaatctgagttgaaaaaactggaactcaaaatcatcaaaaaaataagaagaaagaaacgaatatattcgctcctcttctcagccgaacccaaaggaattgaatccaaaccctgggtaggcagacagtga

SEQ ID NO: 20492 - DNA, 263 bp, Zea mays
  Coding DNA Sequence Number=SeqID_6089
gccagacgaagtcgcgcccagactgagcagacgtcgtcggccgccagacgcagttggccgctctccaggtacgccgccggtcagcccatatggtatattggaggccttgtcgttcacaacagcagccataccgagggcagcgaagaaccctagccctccgcacagccacgccaacgcctcgtacttgccgatgtgcggggcaaggcggtcgatgcagggttccgggaagggcgtgccgttatcccataccaactcgtcgttca

SEQ ID NO: 20493 - DNA, 277 bp, Zea mays
  Coding DNA Sequence Number=SeqID_6090
ttatttagggatccaacagccccctccttttgtacaaaagacgggcagggtttgtccctcccgttgggaaaacccgcccatgggaaaacgggggctttttgctccgttgggaaaagagcgcccccaaaaccccggggggcaagggaaaaccccaggcctacaaagttttttttgccgatcgatctgttttgcaggtgggagaagttaccggacccttctacggccggccggacaaaaaccttatacataacggccgggattccttgccgggcctggg

SEQ ID NO: 20494 - DNA, 375 bp, Zea mays
  Coding DNA Sequence Number=SeqID_6091
accattagctccgaggccctgttggctttgggaggagcccgggcaaaggaccggcccccctgaggaggaatccccccggccgggtatttccgtaaagcccccaggcccggcaaggaatcccggccgttatgtataaggtttttgtccggccggccgtagaagggtccggtaacttctcccacctgcaaaacagatcgatcggcaaaaaaaactttgtaggcctggggttttcccttgccccccggggttttgggggcgctcttttcccaacggagcaaaaagcccccgttttcccatgggcgggttttcccaacgggagggacaaaccctgcccgtcttttgtacaaaaggagggggctgttggatccctaaata

SEQ ID NO: 20495 - DNA, 503 bp, Zea mays
  Coding DNA Sequence Number=SeqID_6092
atctgaagcctgattcgtccaaaacagagctaagacctgaaaccatgacgaaggaacaacttgattatgttagaaatctacacaaaaaagcatgagataccaacaatttaaatagaaataattcctaatgtatgtcctgttgtccataacagcgagcaacaaacttccttactcatttgtgttgttaatgcacatggtgctagggtcctagttcaggaaagatgtacgtaaaaagaatacaaggtagtctggtggcctgtttggataagaattttgacagcaagctgtaagaaaaatgtatagtgttgatacatcgccatgtaaatgtacaaaggaagcctttgctctaggcatcagtgatcctgactagcataagaacagttcatcgtccatccaattacttcacacaaaaaaatagtcatccgggtggtacctacaatacctacaagtgaacaccatgagtccaggtctgaggcaaaggccaatgaacacctctttttatt

SEQ ID NO: 20496 - DNA, 585 bp, Zea mays
  Coding DNA Sequence Number=SeqID_6093
aaaggcttcctttgtacatttacatggcgatgtatcaacactatacatttttcttacagcttgctgtcaaaattcttatccaaacaggccaccagactaccttgtattctttttacgtacatctttcctgaactaggaccctagcaccatgtgcattaacaacacaaatgagtaaggaagtttgttgctcgctgttatggacaacaggacatacattaggaattatttctatttaaattgttggtatctcatgcttttttgtgtagatttctaacataatcaagttgttccttcgtcatggtttcaggtcttagctctgttttggacgaatcaggcttcagatttaaaagagttccccttatcagagttccttaccttttgcacacatggaccttccaaacctcaggtccttatgaggcctcgttcgttttatatttaaaccatatggattttagaagaatgaaggggattgagtccttgagggttttgacgggacttaatctctctcaattttcatagatttggggtatagatgacttaatctctctcaatctacatagatttgggacaaatcggcctaacatg

SEQ ID NO: 20497 - DNA, 450 bp, Zea mays
  Coding DNA Sequence Number=SeqID_6094
gaagcaacgtaactcatcactatatactctgcgacgatatgattaatttagttgtgaaatgaaatgatccataatcttcttccgaactgcatgcgtgcgtgcgtgcgtgtgctctttcagcatccccctggaggccgtgtttcaggaaggcagccttcccccggcggttcacccggtcgtcaaggaggagaagtactgcggagaggtcaagctcgcgctcaccttcactccagcagcggtacacaacatttcttgccagctgcaatagccaagcaagccttccagtatatgccacaaattaaatctcagtcacagtgcatgcatgcatgcgactctaatctgatcttctccaggaaactcgccaccgccctgacgacaacgaggaggggccgccttacagcagctggagttgatctatctgccatgggatgcatgctgcatcatatcccc

SEQ ID NO: 20498 - DNA, 169 bp, Zea mays
  Coding DNA Sequence Number=SeqID_6095
gtgattttgaaagcacttataacaaagttagatgtgattttctggaggaggtcatggtctcaaaaaaaacccgtgggtcaagatggtgatgaacacagtcaaagactcaaaggtggtaaggtctatgcccctgcctaccacccagcatgggcgaagctagccaataaca

SEQ ID NO: 20499 - DNA, 165 bp, Zea mays
  Coding DNA Sequence Number=SeqID_6096
tcatgtaatggtgatgccaccgacagtgttattggctagcttcgcccatgctgggtggtaggcaggggcatagaccttaccacctttgagtctttgactgtgttcatcaccatcttgacccacgggttttttttgagaccatgacctcctccagaaaatcacatc

SEQ ID NO: 20500 - DNA, 390 bp, Zea mays
  Coding DNA Sequence Number=SeqID_6097
tccccaaggttgtccagggtagtcgggttataggtgatcccccaaaaaaccccgccaaagttataaacaacgggtgggcagctgggcggctaaccccgccgattgcaggaaaggaaaattttgttttcagctctaaaagggtccttaggcaaagatctagttttgttttcccttttctaacccttgaaaacggtaaataaaagtcctgcggatccaaaaaaaaaatcgttggagctttggcatttaaaacgaaagttttgtcaggaaaggaaaattccccctaaaaagtttggatttgaggattccccctgtaattttattcccaactgagggttcaaaaaaaaaaaattgccctgtaacaacatatatatactgccccaaaaatttgtg

SEQ ID NO: 20501 - DNA, 484 bp, Zea mays
  Coding DNA Sequence Number=SeqID_6098
gagctgcctatctctgtattaagaaaaatgagacaagagcccttacaacacacctacgctcttaagctcttagaaaaacatgcgcgccttttactaagacagaaaatacgaccacagattcacaaaaggaccccagcggctatctacaggctcaagggaagggaaggagcttccctgagccttcgcaagactccagtaacgatgttcctcacttgcaagcagcaatgctccagccaagttaagagtaccataaaaaacactcggttttgatggttccaaattgtccatgtcccaacgatgataagtgagtcgagtctttttttgtatgaaccatccattcttgactctgccttgacccaccattcatcaaaggaggattcatcctgttgtggcgaaagggtctgtttctgcagcaaaataaaccaaacctctcacgcgaatacacattatactaacatatgattgataatttcttcctctcgat

SEQ ID NO: 20502 - DNA, 403 bp, Zea mays
  Coding DNA Sequence Number=SeqID_6099
agaggtttggtttattttgctgcagaaacagaccctttcgccacaacaggatgaatcctcctttgatgaatggtgggtcaaggcagagtcaagaatggatggttcatacaaaaaaagactcgactcacttatcatcgttgggacatggacaatttggaaccatcaaaaccgagtgttttttatggtactcttaacttggctggagcattgctgcttgcaagtgaggaacatcgttactggagtcttgcgaaggctcagggaagctccttcccttcccttgagcctgtagatagccgctggggtccttttgtgaatctgtggtcgtattttctgtcttagtaaaaggcgcgcatgtttttctaagagcttaagagcgtaggtgtgttgtaagggctcttgtctc

SEQ ID NO: 20503 - DNA, 201 bp, Zea mays
  Coding DNA Sequence Number=SeqID_6100
acctgaggtacctttccatgggcaagcacactcatccccaccccactcccccaagttgctttatttatttagtgatgtcattggaatcaccttttgttctagcacaacaatctattgaaaaaatggcattcgcgcatcaaacagttgtatttgtctgtgaaatgtaatgtttatagtttcgggatcagtttgtggtagata

SEQ ID NO: 20504 - DNA, 176 bp, Zea mays
  Coding DNA Sequence Number=SeqID_6101
gttcagaggctcaaatcaggatatggcatattacagcagtatatctaccacaaactgatcccgaaactataaacattacatttcacagacaaatacaactgtttgatgcgcgaatgccattttttcaatagattgttgtgctagaacaaaaggtgattccaatgacatcactaaat

SEQ ID NO: 20505 - DNA, 405 bp, Zea mays
  Coding DNA Sequence Number=SeqID_6102
tgacccgtaagagaacagcagtagttaacatcgtctgcggctagcgccaaggaggctagcggatcgatctgacggacctgctctgccgtccgtgagtgtcgatggagcggaggggcgattcacggaccggatcttccgccggagctgctggagcgcatatcgtcgtcgatcgtccgccctcgtcgcttgtcatcttcccggagtagagcacggtttacaaagggagcggaggagggagccgatgggtccccaatccctaggcgcggctttcagatccgcatgcttcttttttgcaccggtgggtggacttgaccaccggctgacgggcgatggtgatttgctcaggattttactgctaccacgcactgtactgctccgtgtagcagtgatttgacttggccagat

SEQ ID NO: 20506 - DNA, 290 bp, Zea mays
  Coding DNA Sequence Number=SeqID_6103
gattaacaacagatctgaccgctcgtagcaatggtgaattagttaatcgcccccttagccaaccaacacgcgcgtaggggaagctacatatctacaagacaaggccggatgaggtcaagaagatgggaggtacggagggttaaggggagggaccgactacgatccagacgacgccgacgagggggcacagctccccgaagcaggccgtagacgagccccaccgcctagcagatccagtgcaccacatccagcagttggtcctgcaatagccaggccgagacgagagcgtc

SEQ ID NO: 20507 - DNA, 282 bp, Zea mays
  Coding DNA Sequence Number=SeqID_6104
gggtagctgctctcgtgctgacgctctcgtctcggcctggctattgcaggaccaactgctggatgtggtgcactggatctgctaggcggtggggctcgtctacggcctgcttcggggagctgtgccccctcgtcggcgtcgtctggatcgtagtcggtccctccccttaaccctccgtacctcccatcttcttgacctcatccggccttgtcttgtagatatgtagcttcccctacgcgcgtgttggttggctaagggggcgattaactaattcaccattgc

SEQ ID NO: 20508 - DNA, 100 bp, Zea mays
  Coding DNA Sequence Number=SeqID_6105
tagtttctatatttgtcaatttatatactaaaatggaataaaatgaagagactaaatattagtccctagaaaccaaacaccctctaaacttgaaactgct

SEQ ID NO: 20509 - DNA, 208 bp, Zea mays
  Coding DNA Sequence Number=SeqID_6106
aatacgttcataaatctgcttgacatcgatgacacagcatagtccaaacaaaaatgcaagaggaatagcttttgttacagaatatattgttcatgtgatcaaatccctgacagtcttttcccaagggacacaccccttgggaaaccctgtatccccttgtatataaacaagtatcactgcaataaagaataactgtctctggcatttg

SEQ ID NO: 20510 - DNA, 184 bp, Zea mays
  Coding DNA Sequence Number=SeqID_6107
tgtgcaaatgccagagacagttattctttattgcagtgatacttgtttatatacaaggggatacagggtttcccaaggggtgtgtcccttgggaaaagactgtcagggatttgatcacatgaacaatatattctgtaacaaaagctattcctcttgcatttttgtttggactatgctgtgtcat

SEQ ID NO: 20511 - DNA, 387 bp, Zea mays
  Coding DNA Sequence Number=SeqID_6108
tcgcccgcagagaggaattacttgagcagggagatgaggagggcaggaggcccatggctcgccggagcaacccatgggcaagaaggcacacgtcgattaggtggatggggttctagggaggcgcttcctcaggagctatccaaaatcctactagatggagaagatcatggcaacaaccatcgtatcgatgaccctgaagacgctggtttaacttgctccaacagtcctactagatggagaagatcatgacaacaaccattggatcggtgaccctaaagttgtacaagggcttggtgagtgtcgcatccctgaagagccctttcatccatgcaaggagacatttcctcgtttgaggacgaggaaatctatatccaggctaacgacgag

SEQ ID NO: 20512 - DNA, 511 bp, Zea mays
  Coding DNA Sequence Number=SeqID_6109
ggatatagatttcctcgtcctcaaacgaggaaatgtctccttgcatggatgaaagggctcttcagggatgcgacactcaccaagcccttgtacaactttagggtcaccgatccaatggttgttgtcatgatcttctccatctagtaggactgttggagcaagttaaaccagcgtcttcagggtcatcgatacgatggttgttgccatgatcttctccatctagtaggattttggatagctcctgaggaagcgcctccctagaaccccatccacctaatcgacgtgtgccttcttgcccatgggttgctccggcgagccatgggcctcctgccctcctcatctccctgctcaagtaattcctctctgcgggcgaggatacagagaggaggcagagacggcgacagtgggatccagcgggcgtgggcgacgagaggtgggagaattcgtcgccacctcagctcgccctcctgttcccgcgctgcgctcaagcccttggcttcgataatcagcg

SEQ ID NO: 20513 - DNA, 295 bp, Zea mays
  Coding DNA Sequence Number=SeqID_6110
aagtcaatctgggttatatctcccaggatcaacatttcaaaataaaacatatagagtgggtcccttacaatgatattttacatcttgaaaaactatctcacaatatatttgctattcaaaagattgagaaggaaaatgatttgctcgaacagaatatcaatacctggtgcacagggatatgtgagattgttatttttgaagatgtggttcttaaagcttcactgaagaatgtggcgcagagaacacttgcaggacgaccaagacaatatgcaactatccgataataacgatctca

SEQ ID NO: 20514 - DNA, 282 bp, Zea mays
  Coding DNA Sequence Number=SeqID_6111
ccgtggattaatagggcatgtcattctgagatcgttattatcggatagttgcatattgtcttggtcgtcctgcaagtgttctctgcgccacattcttcagtgaagctttaagaaccacatcttcaaaaataacaatctcacatatccctgtgcaccaggtattgatattctgttcgagcaaatcattttccttctcaatcttttgaatagcaaatatattgtgagatagtttttcaagatgtaaaatatcattgtaagggacccactctatatgttttattt

SEQ ID NO: 20515 - DNA, 496 bp, Zea mays
  Coding DNA Sequence Number=SeqID_6112
attcctatcatttatgtaccaagggatttaggaaggtatacccatcctatgttgaatatatcaatacttttatatttacattatcaaactccaataatccggccatttcaaagattcggactaaaaaaggaaaacccaacatctaaatatttccttctaatctcttttattaaaaccaggaaggacttgaggccctctccacactctgcaggtcgtttgcatgcatcttatcacgacatgtgccatgagtacggatccaactgaagtctggattacagttatgaattgttctagtttatgaagattatataaattactccatctgtcctaaaatatagatctttctagcctactttttggtatctacattcgttcgaataataatgaatataaatatacatgaaaactacattcatatattacttaataaatatgtaattaatcttaaataaattatattttaaaacagatgaagtactaacgatctctgagcgaa

SEQ ID NO: 20516 - DNA, 520 bp, Zea mays
  Coding DNA Sequence Number=SeqID_6113
ggtctattgcatgaaaaattcggatcctggttttcgctcagagatcgttagtacttcatctgttttaaaatataatttatttaagattaattacatatttattaagtaatatatgaatgtagttttcatgtatatttatattcattattattcgaacgaatgtagataccaaaaagtaggctagaaagatctatattttaggacagatggagtaatttatataatcttcataaactagaacaattcataactgtaatccagacttcagttggatccgtactcatggcacatgtcgtgataagatgcatgcaaacgacctgcagagtgtggagagggcctcaagtccttcctggttttaataaaagagattagaaggaaatatttagatgttgggttttccttttttagtccgaatctttgaaatggccggattattggagtttgataatgtaaatataaaagtattgatatattcaacataggatgggtataccttcctaaatcccttggtacataaatg

SEQ ID NO: 20517 - DNA, 507 bp, Zea mays
  Coding DNA Sequence Number=SeqID_6114
gaattctaagagtaaacggtcgaattgatgtactaattaattcaattaatactataaaactaattaagggtattggagtcccatttggtaccaaatggggaaaacattttattagtatatttttttcacccataaataaaaaagcctattcataggggtaatgaaataaaaaggtttattgcaatgggcctagttgatgtaaatgaattaggaaccagcccaataaaattagaaaaaaacacaaataaaaagattcttgtaaacataatttttgtactatctttataactttttaaagcaattcttagctgaattcctatttcttttagaagtattatgaataatattttagaccgcgagggataacaatataaagatagaaatataaagtaaagagaaaatagtataattattcagttcatttcttctattgggaatttaattcttgatttgggatcaaatgataaaaacagtcttatttttataatgttctttcttttattacct

SEQ ID NO: 20518 - DNA, 541 bp, Zea mays
  Coding DNA Sequence Number=SeqID_6115
atctttatattgttatccctcgcggtctaaaatattattcataatacttctaaaagaaataggaattcagctaagaattgctttaaaaagttataaagatagtacaaaaattatgtttacaagaatctttttatttgtgtttttttctaattttattgggctggttcctaattcatttacatcaactaggcccattgcaataaacctttttatttcattacccctatgaataggcttttttatttatgggtgaaaaaaatatactaataaaatgttttccccatttggtaccaaatgggactccaatacccttaattagttttatagtattaattgaattaattagtacatcaattcgaccgtttactcttagaattcgtttaatggctaatatagtatctggccacctcttacttactcttataggtaatacaataagattaaaaagaccctttatagtaataattttatcaatgattcaattacttttatcatcacttgaaataggagtttctataattcagcgcttatgtattttgta

SEQ ID NO: 20519 - DNA, 405 bp, Zea mays
  Coding DNA Sequence Number=SeqID_6116
accacacttggtttgtattgtttatgacctaataatgaaaccttaatgaaaatggcagccccaccactactaagttggcatcatgtcatggaattcatcctacaaaaaaagagaacagaagagaaggcagtctgtatctacacaagtatagtaaattaggcaaggcccagcctcttcttcatggattcaggcatgtctggtggaggtggtcgtggcatgcggagccacactttcactgcatcatagatgaaccactgagcggcagtgagggtaccaatcatgatgatcctgggaacaagacctccccacatacccttccagcctagtttcttggcaacatccattgctgtagatgacttgtctttgttaagcacagacacaacagtgtcagcagggtgagataca

SEQ ID NO: 20520 - DNA, 512 bp, Zea mays
  Coding DNA Sequence Number=SeqID_6117
caaatctttcttcgtaacctttcagatgtttaaaatttagtaggaattttactgtactcgaatctcactttcatctgtttaatttttaatttcctatctagtcagtaatcttcaaagtgtcttttttcatagacagattcattcagtattaatctcaagacaaagccgtctagtcagaataagacgaagtgtacaaactgtgccaaagccaaagtgtttcataaaattcttattatgtacttaatttaaaactgctcactcatcattttctagctaatgtacttacataatttgccttatgttgtgtgccaacctatggccccttagcagtaagtcgattatttctcttaaatctgttaagggacattttttaatcaatggacttgctacttaagatccctgtctattataaatggtttttgccaattatttaaggtttcattaagtatgaaatttattataaaactaagcttacaaattatttattgcagcgggcctgtcaaatcagaagt

SEQ ID NO: 20521 - DNA, 183 bp, Zea mays
  Coding DNA Sequence Number=SeqID_6118
acgatagctgtacggagactgtgaaacagggtttacgaatcatcatcgtccaccggcaggtccgggaccttgacgtcgctgttgctctcgatgaagtcgtagaaggccgagacgcgagtgaacacgacgggcttgccggtggtgcagctctcgggccggccgaaggacacgatgccgatcagc

SEQ ID NO: 20522 - DNA, 178 bp, Zea mays
  Coding DNA Sequence Number=SeqID_6119
acgacggcttcgtgcggaaggagctgatcggcatcgtgtccttcggccggcccgagagctgcaccaccggcaagcccgtcgtgttcactcgcgtctcggccttctacgacttcatcgagagcaacagcgacgtcaaggtcccggacctgccggtggacgatgatgattcgtaaaccct

SEQ ID NO: 20523 - DNA, 297 bp, Zea mays
  Coding DNA Sequence Number=SeqID_6120
gatgtcgtcacttacacgacggttctcactgcctactgtgccaaaggggatctcgagggtgcacagcagctctttgacgatattattgccagtgggcgtaggccagatgctactatgtacacagtgctcatagatgggtattgccatcgtaggaagttgcaagatgcagcaaggatcatggatgagatgggagctgctggggtgcagccaaatgaggatacatactctgtggtgaatctggggtggtcaaaggagggaaaaggagggaaaatccccattttgatgtgatttagcgag

SEQ ID NO: 20524 - DNA, 307 bp, Zea mays
  Coding DNA Sequence Number=SeqID_6121
accggtgcacaaattaaagtcttcagaactcaatgacaaattacagtagagctggaaccagaaacaccgcccatgtataacccaaaaaaacaaagtaacgacatcattattattttttaccatgtacacattaaaggaacgacaatatcgttcttcccttccaagagatttttaagataagttattaattacataatacaatcaatttttgaattggtactggttggggtgcgcctggtccagccaatagtgcaacggccggacgacgcttgaggaacccaggggcaagccactgttgtgattcctc

SEQ ID NO: 20525 - DNA, 359 bp, Zea mays
  Coding DNA Sequence Number=SeqID_6122
gtgtagtatctgttcgggtcagtttaatatctgatatgtggactatgtgtccccttcgatattaaatttattttttgtgggggaggaatcacaacagtggcttgcccctgggttcctcaagcgtcgtccggccgttgcactattggctggaccaggcgcaccccaaccagtaccaattcaaaaattgattgtattatgtaattaataacttatcttaaaaatctcttggaagggaagaacgatattgtcgttcctttaatgtgtacatggtaaaaaataataatgatgtcgttactttgtttttttgggttatacatgggcggtgtttctggttccagctctactgtaatttgtcattg

SEQ ID NO: 20526 - DNA, 491 bp, Zea mays
  Coding DNA Sequence Number=SeqID_6123
ctgctccaccgatggctgctatggtgcgaaggcggacctgaccatcctttcggggtctccgctggtggtggctgcggcgacggactcctgctgctagttgagaggagctgctggttgggaggagcgggaacctgtacgctttcattattgacatcatctccgacgaggtaggggtagagagaagaggacgacgctgctgctcgttactgttggaaagggctgctgcatatggataggagcatcatgaactaatggtgaacatcatttgcaaattttacttgaccaaggatcattctatacaacggaggaagatcacgagaagtaaaagtgttgtctaagatgtacattctttggctgtggagtctgtagactatacatatacacccattgttctggcgaggctgtgtacactgtacatcaaatgaattttacgatacttcttgttgcgtttacgcacaaaaacacaaaacgcacgttgtattgtacactac

SEQ ID NO: 20527 - DNA, 540 bp, Zea mays
  Coding DNA Sequence Number=SeqID_6124
ttgctgccgtggctaaaccagcttggggagaagagacagagcaggatgtcgagaaagaatgggtgaagaccagctcagcggacgctgcaaatcggcgcaccagaagccatgacccaatgcagcaggctatgaaaagaagttactctaacacaggggatactaatgaagagtctcgaagaatcaggccaaagcgaaacagatcaaattctcttaggaatcagggaggtacgaccgcagagggcgccgccaatgcagggagagcggggagggacttcccagacgggctccggacagaatttacagatcatccgccacttgggactaataacctgacattttcggacttggtttcaaagggtctgttcgatgatgaaccttctgtagctgctgctgctgaacacttcacttcaacctcttgtcaagctgactgggacaaacgtggatctggcatgtcatatccgtattctagtcagaatcagatggagatgtctcgtgtcaaggcagaacttatcgatgaacctgtcgctcttgagactgaca

SEQ ID NO: 20528 - DNA, 364 bp, Zea mays
  Coding DNA Sequence Number=SeqID_6125
aaacatctccatttatgtatccagatagataatttagtattcaggttccaactaatacccaatcaagttaatttagtactccaaatcacaaaaaatcatctacattcatgcatcaagatagataattgaaagcaccataatttagttctccaaatcataaaaatcatctccattcatgcatctacatcacaaaaaaatcacatcttcattcaggtgctacccaaggtccttggtctagccttctccttcctctatacttgcctgaggagacggagttgctagcatgcgaacccgaggtgacaccgacgtcggaggtgacgctgtgctgacagaggcggcggcgtgctcggataactccatgcga

SEQ ID NO: 20529 - DNA, 352 bp, Zea mays
  Coding DNA Sequence Number=SeqID_6126
gttcgtcttctctcgtcgcatggagttatccgagcacgccgccgcctctgtcagcacagcgtcacctccgacgtcggtgtcacctcgggttcgcatgctagcaactccgtctcctcaggcaagtatagaggaaggagaaggctagaccaaggaccttgggtagcacctgaatgaagatgtgatttttttgtgatgtagatgcatgaatggagatgatttttatgatttggagaactaaattatggtgctttcaattatctatcttgatgcatgaatgtagatgattttttgtgatttggagtactaaattaacttgattgggtattagttggaacctgaatactaaattatc

SEQ ID NO: 20530 - DNA, 531 bp, Zea mays
  Coding DNA Sequence Number=SeqID_6127
tggcagctaccagattttcgcgatgccggtgttcgacatgatggagacggtcctggtgaagaaactgcatttcccgcccggccttgccctccgtctcattgcccggagcacctatgtcgcgttcacgacgttcatagccattaccatccccttcttcggcgggctgcttggtttcttcggcgggttcgcctttgcgccgacaacctatttccttccatgcgtcatggtggcttgcaatctgcaagcccaaacggttcagtctcccatggttcgccaactgggcctgcattgttcttggagtagtcctgatggtcctggcgccaatcggagcactccggcagatcatcctgtctgccaagacgtaccgattctactcgtaagcaaactagctactcagccacagcgcgctgcgtgtcttctgtcgtaccaaccaaatagaagaggatagcctcctgtaaccagagcttgatccgtccgaatgagatgatagtcgtcagaggcatgttgtgagctagtgttcagttgctgatt

SEQ ID NO: 20531 - DNA, 590 bp, Zea mays
  Coding DNA Sequence Number=SeqID_6128
ggactcagtctagtacccatagtgcatatcattatcagactttaatggcttctaatgtcttacttaaggggttgatcattttatctaagtccaactccaccttacatactgctgaattataccttgtatagtataaaacaatattagtccaaatagttgctttaatcaaacaccaaaagtccaaacttaatgacaaatggggtatgttttcattacaatctcgttttttgtgcttgataacaacacaatcaaagcatgcaaataataaatataagaatcaaaattcactaactacttactaggatgcaacgcaagagcacgatcatatgatgctaaaagataccattgaaaagcaaaaagtaatgcttatcttgcctttgcctaactctataatccactttctacctttcttgatcatcacctaaaatagaaatatcgccatttaccaattgtagacttaaaattaaatttcaattgcacctggccctatcgagatgaatagctaccaaacacagctaagctgcaagcccaacatatcagtacgattttcatatattcttttttacataatatgacacttcttccgttct

SEQ ID NO: 20532 - DNA, 581 bp, Zea mays
  Coding DNA Sequence Number=SeqID_6129
gtgtttggtagctattcatctcgatagggccaggtgcaattgaaatttaattttaagtctacaattggtaaatggcgatatttctattttaggtgatgatcaagaaaggtagaaagtggattatagagttaggcaaaggcaagataagcattactttttgcttttcaatggtatcttttagcatcatatgatcgtgctcttgcgttgcatcctagtaagtagttagtgaattttgattcttatatttattatttgcatgctttgattgtgttgttatcaagcacaaaaaacgagattgtaatgaaaacataccccatttgtcattaagtttggacttttggtgtttgattaaagcaactatttggactaatattgttttatactatacaaggtataattcagcagtatgtaaggtggagttggacttagataaaatgatcaaccccttaagtaagacattagaagccattaaagtctgataatgatatgcactatgggtactagactgagtccggtaaagaaaagttcgagtggatgggtccatggactctgctatgagcccataagggaggtccacaaat

SEQ ID NO: 20533 - DNA, 384 bp, Zea mays
  Coding DNA Sequence Number=SeqID_6130
gttcctctcggctaagtacagtcaacttcgccgcctccttccgcgagaggaggccccttccacaactcataaacgatatggacacatcaagccctgcatgacttgacaatcgcatagattctaaacatgcttttagggcaaagagtgcaaacaggccgcacaaggccaacacagtgacgggggaacgcttgctcctcacccccatgatgggcatcaattgattttcaaaagcgccatggatgaacctgattaacactatatggaggtgtatggaattgctgacaacagctcaaaccatacgacgctgagataggcccatatttatgagcctgactttgagacacagactttaaattaattgcgcagcctgacaagtaacaagtt

SEQ ID NO: 20534 - DNA, 347 bp, Zea mays
  Coding DNA Sequence Number=SeqID_6131
ctcttcatcatgacctttgcagtaacatgcgcttgaacttgttacttgtcaggctgcgcaattaatttaaagtctgtgtctcaaagtcaggctcataaatatgggcctatctcagcgtcgtatggtttgagctgttgtcagcaattccatacacctccatatagtgttaatcaggttcatccatggcgcttttgaaaatcaattgatgcccatcatgggggtgaggagcaagcgttcccccgtcactgtgttggccttgtgcggcctgtttgcactctttgccctaaaagcatgtttagaatctatgcgattgtcaagtcatgcagggcttgatgtgtccatatcgt

SEQ ID NO: 20535 - DNA, 557 bp, Zea mays
  misc_feature (89)..(93): n is a, c, g, or t
  Coding DNA Sequence Number=SeqID_6132
caagcttgtggctcggttgtgacagaggagcaacctcatgcaatgctgataccaatggagtactttctcatgggatatggactgtacannnnnagccagataaactgtagccctcgtagccctctgaatccgttttgtatatcaccagagctcctctctcctgagagcatgggggttaagctctgatgaatcccctaatgattttggtaaaaatcattaagttaaggtggatacacatcttgtcatatgatcaaatggtttcgcgaaaaatcaataatcagacaacaagatgtgcgaactcgatattttacacgactctctttaccaattctgccccgaattacacttaaaacgactcaacagcttaacgttggcttgccacgcattacttgactgtaaaactctcactcttaccgaacttggccgtaacctgccaaccaaagcgagaacaaaacataacatcaaacgaatcgaccgattgttaggtaatcgtcacctccacaaagagcgactcgctgtataccgttggcatgctagctttatctgttcgggcaata

SEQ ID NO: 20536 - DNA, 476 bp, Zea mays
  Coding DNA Sequence Number=SeqID_6133
ggcaacccataatcatgttcctcgccatcctggccgaagcactgtaggaatgggagcgaggggggagcatggatggaaggcaaaaagcatggcaggagaacgcgagaagatgctagggttattgtccttttcatgccaactctagccggatatcttccccgatgccgctgcatattatttcggtcatcttcttgatccatgatttcgtgcagactctgacctcgattcctttatgaatgttttgcaacactgatttgtgaccaatccactctgtaaggcaagtgttttatatcttgttcatctcgcatcgacaccaggggtcgaccccctggccagaccagaaatggcgttgagccgagccgcagctgggcatgcgtgtgaggtgaaaggcgctctgatttgggggccgggatggagtgattacggataaaggtgagagccacgatccaaggctcttgatccccttcactggtgaa

SEQ ID NO: 20537 - DNA, 541 bp, Zea mays
  Coding DNA Sequence Number=SeqID_6134
ggaaccctaaatacaccactagttggcttcactctttcccagcccatctgcctttctgagccggcccacttgcatcatcagccacacatgctttctgtagaccatccatacagctgttgacagcgagcgtagtccaggcgcggatggcgagggccaagcagaggggaatgacatccagcgacacaagggcagtggtcgtgaactggtgaaggcgagctcgaggatctcaggcgcatcctgaggcttgtgctcgcacgggacctagcgaggtcggatagcgcggtggggagcacatggcggagctcagatcagggcaccaggagaagatccagcgtaggggcatccatggagggagctccgtttggtcgccatggaagaggagcaggggcactgggtgccgactaccgagcgccagtagagggcatcgtgcgccaagaagcctaggcactgaggttgtggagaaagggagccagcgccatggatggggtagaaggagaggagctcggctcctaggggaaggagacacgcgtccttggcgtga

SEQ ID NO: 20538 - DNA, 579 bp, Zea mays
  Coding DNA Sequence Number=SeqID_6135
tttctccacaacctcagtgcctaggcttcttggcgcacgatgccctctactggcgctcggtagtcggcacccagtgcccctgctcctcttccatggcgaccaaacggagctccctccatggatgcccctacgctggatcttctcctggtgccctgatctgagctccgccatgtgctccccaccgcgctatccgacctcgctaggtcccgtgcgagcacaagcctcaggatgcgcctgagatcctcgagctcgccttcaccagttcacgaccactgcccttgtgtcgctggatgtcattcccctctgcttggccctcgccatccgcgcctggactacgctcgctgtcaacagctgtatggatggtctacagaaagcatgtgtggctgatgatgcaagtgggccggctcagaaaggcagatgggctgggaaagagtgaagccaactagtggtgtatttagggttccggttgtggcttggggtagggaacgaacaaacagaacatattcttcttcctgctcaagctatcctttcattccttatctccatttccaatactatcctctcctataatacctattg

SEQ ID NO: 20539 - DNA, 285 bp, Zea mays
  Coding DNA Sequence Number=SeqID_6136
atctagttgtatttgcatgtttttattggaggttttgttcttactttgttttttttcgtatttattatgaagtctgtactattttttttcagattactgttttgtctttctcgctatctttcgggtttttctatggttttttatggtttgcttttcgttttagtattgggttagtatagggtagatgttttttatttgtatgttttttgactgtatttttagctggtgttaagagatctttgatggtatgaaacagtttctggatcaaccctttttagaattact

SEQ ID NO: 20540 - DNA, 524 bp, Zea mays
  Coding DNA Sequence Number=SeqID_6137
agactatgaacatgtgcatcgcacaatctgagcgtcgcacaaaaaaatcgagttcactccattttataggaactgtgctttcatgtccagcattaagtttgacatgaagatttctgtgaaccaacttcctttcaagaaaatttctaagaacagtttatacatccacaactagttggccaaccattgatcttcatgcatatttcatagtgctaactgctaacttgaacaagattgtagatcctatttatgttttgaatttgatgcttctgctgacttcttcttgaacataaaatacatgtggagcctatttggttcctcttgattattatggattttattttgcatttggtttgattaggttaactacatggttctaactagccccctatatcgccgctaagccactatagctatgctatatgattttcagagggcctaccactatgatattgtcatttgttcattattacatctaacgatgctttagctctgctaaacaccattatttggcttacccgtgaaat

SEQ ID NO: 20541 - DNA, 568 bp, Zea mays
  Coding DNA Sequence Number=SeqID_6138
gaatgaatgttttgactctgtcagaatcagcagtgctaaaccaatttcacgggtaagccaaataatggtgtttagcagagctaaagcatcgttagatgtaataatgaacaaatgacaatatcatagtggtaggccctctgaaaatcatatagcatagctatagtggcttagcggcgatatagggggctagttagaaccatgtagttaacctaatcaaaccaaatgcaaaataaaatccataataatcaagaggaaccaaataggctccacatgtattttatgttcaagaagaagtcagcagaagcatcaaattcaaaacataaataggatctacaatcttgttcaagttagcagttagcactatgaaatatgcatgaagatcaatggttggccaactagttgtggatgtataaactgttcttagaaattttcttgaaaggaagttggttcacagaaatcttcatgtcaaacttaatgctggacatgaaagcacagttcctataaaatggagtgaactcgatttttttgtgcgacgctcagattgtgcgatgcacatgttcatagtctt

SEQ ID NO: 20542 - DNA, 388 bp, Zea mays
  Coding DNA Sequence Number=SeqID_6139
acgcgccctggtatcaacttatgaaactacaatttgcatctttcatgttccctttctttcatcccctgcattagcggtcaatcaacaatgtgcatgcccgacatagcaagttctcctctctcacgcatttcatcaagcagcctcccagcaccctccaaatgtaaaacttcacataaccatcaaccgtcagcacccgtccacgcattcaaaatacattttacttgtgttgagttgacttgtttttccctaagaacaagaacaagcagacttctctagtggatgcgatgcggatgcggatgctagacaatttgccgtgggacctgaactcctactgcatgccggactttactgtgtaatagcagcaggaacacaacagctgccagcagaa

SEQ ID NO: 20543 - DNA, 353 bp, Zea mays
  Coding DNA Sequence Number=SeqID_6140
tggtctcactgctggaacgggagtcccttttgctttctgctggcagctgttgtgttcctgctgctattacacagtaaagtccggcatgcagtaggagttcaggtcccacggcaaattgtctagcatccgcatccgcatcgcatccactagagaagtctgcttgttcttgttcttagggaaaaacaagtcaactcaacacaagtaaaatgtattttgaatgcgtggacgggtgctgacggttgatggttatgtgaagttttacatttggagggtgctgggaggctgcttgatgaaatgcgtgagagaggagaacttgctatgtcgggcatgcacattgttgattgaccgctaat

SEQ ID NO: 20544 - DNA, 287 bp, Zea mays
  Coding DNA Sequence Number=SeqID_6141
ggctacatatagcaattcttggctttccagatcatctggaaatgtctcggccgttcttgatacacctcagtgcaggccaaagtgacagccccgcaggccacagccaacagaaaacaagagagcttcctgaatcagagctaactatataatgaccagatggatgttgtgagctctgatcatcgccatcctagtcaatgaaaccactggtttcctgagagttcttcacccgatgcagaaacactttgtcaattctcacatttgcagacactgcgaacagcatccactat

SEQ ID NO: 20545 - DNA, 295 bp, Zea mays
  Coding DNA Sequence Number=SeqID_6142
atggatcttcacctcgcaaagccaatatcgtggaagaagatagtggatgctgttcgcagtgtctgcaaatgtgagaattgacaaagtgtttctgcatcgggtgaagaactctcaggaaaccagtggtttcattgactaggatggcgatgatcagagctcacaacatccatctggtcattatatagttagctctgattcaggaagctctcttgttttctgttggctgtggcctgcggggctgtcactttggcctgcactgaggtgtatcaagaacggccgagacatttccagatga

SEQ ID NO: 20546 - DNA, 122 bp, Zea mays
  Coding DNA Sequence Number=SeqID_6143
atttactctctagtctattcgtagcatatgagagaatcgtaaaaactggaacatcaaacctccactaaaactaactccagagcatggcttatacaactaacgctaggtatacttacattaca

SEQ ID NO: 20547 - DNA, 107 bp, Zea mays
  Coding DNA Sequence Number=SeqID_6144
ttatggccggggtgttgtaatgtaagtatacctagcgttagttgtataagccatgctctggagttagttttagtggaggtttgatgttccagtttttacgattctct

SEQ ID NO: 20548 - DNA, 165 bp, Zea mays
  Coding DNA Sequence Number=SeqID_6145
atattgacaatatttatagctgtgaataaatttattacaagaatatactttaataatctatcgccaaattttatacccggccataacggccgacatgtttttttttttttttttttttttttttttttcggaaacatatagctgggttaaataagcaccattacg

SEQ ID NO: 20549 - DNA, 397 bp, Zea mays
  Coding DNA Sequence Number=SeqID_6146
gggcatcaagaaagcatccatctctcggtagagaaccatagccagcttccttcatccatggcgctactcaagataagcatcaagagtacactggttggttttcaccgtcacatggctgccgatgacactccttgctacggccgtgccaccagctggcaaccaggaagcggagaaccaagcggtctgcgcccaagtgaaaggcacctgtacacagaaggtgtgtggcggaatgtgtgctgagataggctccaaaggtgttgggtcatgcaagttgaatggcaaggtctcctactgctgctgccaaccaaaatcccccacaaacatcggtgtccactagctagtagctaggaaccagttaatttggttttttgatccatagtatggctgttaaattgac

SEQ ID NO: 20550 - DNA, 216 bp, Zea mays
  misc_feature (34)..(34): n is a, c, g, or t
  misc_feature (45)..(45): n is a, c, g, or t
  misc_feature (49)..(49): n is a, c, g, or t
  misc_feature (57)..(57): n is a, c, g, or t
  misc_feature (98)..(98): n is a, c, g, or t
  misc_feature (117)..(117): n is a, c, g, or t
  misc_feature (157)..(157): n is a, c, g, or t
  misc_feature (179)..(179): n is a, c, g, or t
  misc_feature (181)..(181): n is a, c, g, or t
  misc_feature (191)..(191): n is a, c, g, or t
  Coding DNA Sequence Number=SeqID_6147
tcccggtatttcaaagtgcgctcccatactttcngtccccttagncaanccaccatnttttgatggggaagattattatatgtggagtgataaaatgnggccccatttacccccctntacgaaagaatttgggatattgttgagtatggaccgcagntacttaaggcggggacaaagantncgattcggangaggcccgccccaaattaggccact

SEQ ID NO: 20551 - DNA, 504 bp, Zea mays
  misc_feature (31)..(31): n is a, c, g, or t
  misc_feature (68)..(68): n is a, c, g, or t
  misc_feature (78)..(78): n is a, c, g, or t
  misc_feature (84)..(84): n is a, c, g, or t
  misc_feature (88)..(89): n is a, c, g, or t
  misc_feature (92)..(93): n is a, c, g, or t
  misc_feature (98)..(98): n is a, c, g, or t
  misc_feature (104)..(104): n is a, c, g, or t
  misc_feature (106)..(106): n is a, c, g, or t
  misc_feature (125)..(125): n is a, c, g, or t
  misc_feature (138)..(138): n is a, c, g, or t
  misc_feature (145)..(145): n is a, c, g, or t
  misc_feature (157)..(158): n is a, c, g, or t
  misc_feature (169)..(169): n is a, c, g, or t
  misc_feature (171)..(171): n is a, c, g, or t
  misc_feature (174)..(174): n is a, c, g, or t
  misc_feature (182)..(182): n is a, c, g, or t
  misc_feature (190)..(191): n is a, c, g, or t
  misc_feature (194)..(194): n is a, c, g, or t
  misc_feature (197)..(198): n is a, c, g, or t
  misc_feature (203)..(203): n is a, c, g, or t
  misc_feature (205)..(205): n is a, c, g, or t
  misc_feature (217)..(217): n is a, c, g, or t
  misc_feature (219)..(219): n is a, c, g, or t
  misc_feature (224)..(224): n is a, c, g, or t
  misc_feature (234)..(234): n is a, c, g, or t
  misc_feature (249)..(249): n is a, c, g, or t
  misc_feature (259)..(260): n is a, c, g, or t
  misc_feature (274)..(274): n is a, c, g, or t
  misc_feature (282)..(283): n is a, c, g, or t
  misc_feature (285)..(285): n is a, c, g, or t
  misc_feature (288)..(290): n is a, c, g, or t
  misc_feature (301)..(301): n is a, c, g, or t
  misc_feature (309)..(309): n is a, c, g, or t
  misc_feature (312)..(312): n is a, c, g, or t
  misc_feature (335)..(335): n is a, c, g, or t
  misc_feature (337)..(337): n is a, c, g, or t
  misc_feature (342)..(342): n is a, c, g, or t
  misc_feature (348)..(349): n is a, c, g, or t
  misc_feature (354)..(354): n is a, c, g, or t
  misc_feature (360)..(360): n is a, c, g, or t
  misc_feature (362)..(362): n is a, c, g, or t
  misc_feature (381)..(381): n is a, c, g, or t
  misc_feature (386)..(386): n is a, c, g, or t
  misc_feature (397)..(397): n is a, c, g, or t
  misc_feature (410)..(410): n is a, c, g, or t
  misc_feature (441)..(445): n is a, c, g, or t
  misc_feature (449)..(451): n is a, c, g, or t
  misc_feature (453)..(458): n is a, c, g, or t
  misc_feature (469)..(472): n is a, c, g, or t
  misc_feature (475)..(476): n is a, c, g, or t
  Coding DNA Sequence Number=SeqID_6148
cattttatcactccacatataataatcttcnccatcaaaatatggaggtttgccctagggggacgganagtaatgganccgcantttnnaannacggngcatangnaaagaggcatcttactatncttcttgcgttcntggcgcnttataagcgacnnatgaactccgnanctngtacgcgnatggctgnnccnaanncgctngnctcccattatgnantaccnaccttttttncaaaacccccctttnattctttggnnccccctttttcccncatgggcnntnttnnnttggccactanaaacaggnccncccctaccccttggtcggctttngnaggtncaatannccccnttttgncngaaaaaggcccttaccacnaaganctgtggcgcgnctcattggaccancccaggcttctaaatttcttttcccctatgnnnnnttannntnnnnnntatttcaaaannnnaannaatttataacagttcaaagttatttctt

SEQ ID NO: 20552 - DNA, 594 bp, Zea mays
  Coding DNA Sequence Number=SeqID_6149
tcgtccgagtcgtagtctttgtcccccgccttaggtacctgcgctccatactcaacaatatcccaaattctttcgtagagtgaggttagatggtgcctcattttatcactccacatataataatcttcaccatcaaaatatggtggtttgcctagggggacggaaagtaatggagcgcactttgaaatacggggatagcaaagaggcatcttactatacttcttgcgctcatggcgcttagaagcgacagatgactcggagcttgatgtggagggtgacaaagagtcggtctcatagtagaccacctttttcaacttcttcttcttgtcacctttccgatgcgatttgatggacgaagaggattcctccttgtgtttgttgccagactcccttgagagagtcctccccgagcttgcggacttgtcgtctagtcatgattggattgtccttaagccaatagtaaacataaagggcatgaatgtaattttacacaggctgcgccctgtgcctataaatagatgaacagtacccccgtactgttcacgctgacttgtattcacttgtgcgtcacacttggacttttcaccttctatc

SEQ ID NO: 20553 - DNA, 506 bp, Zea mays
  Coding DNA Sequence Number=SeqID_6150
tgttgagacaatcagcccggaccaattgttaaaaagtctcgtgccccccccaatttccttggggggcccccccccccaaggtgggctgccgggcaaccagggagactttcttcccccccagcacaatcactccagcacaaaagggttttgcctcgatgccccagcttgggcatttgccatgacaagcttgatcagaaaccccacatttctccacgttatgggagacctcagtctttttgccactgctaggaggtctcatgttccaaaaaactgcactaagcgctcagcggaccgggggcataagcgctccaaaagcggcgcgaccgccttggtgaagcagcggctgctggctcccgctgccctcaggtggcgcgcggcgctgccgcccgggccgggcggcgttgacgatccaccggatgcgggaggggagagagagagagagagagagaggcacgcacgcagggtcaccggccggtgtgcgtagtaccgcaggtagaactcgccct

SEQ ID NO: 20554 - DNA, 308 bp, Zea mays
  misc_feature (26)..(26): n is a, c, g, or t
  misc_feature (121)..(121): n is a, c, g, or t
  misc_feature (135)..(135): n is a, c, g, or t
  Coding DNA Sequence Number=SeqID_6151
gttgtagactcctagtatcgtctatngattattcgataagaaaaaaaattgttctttgaattcttatattcacttggacttgtgagttagttccgtcgtcgaacgaaacgcagcatctgcngcgcccagcaagangcgcgtcgtctcctgcagggccgtcagcagcaggtcgctgtccatcatcaggtgcgagcagagcgcgaagaagggcggcgggccggacacatggctgggccgcgcggccatggtcggcttcgcctccgcgatcgccgtcgacggggccaccggcaagggcacgagtttgttgt

SEQ ID NO: 20555 - DNA, 392 bp, Zea mays
  Coding DNA Sequence Number=SeqID_6152
gaaaaatttttgatggtccgcgcgggagaggcagcagaggagcttcacgatgttgttgtgccggatgtggccgaggatgtccacctccgacgcgaactcgcgctccagcttcttgtccagactcccgccggcccagatgcgcttcacggccacggtccccgccgcttcgccgctgctccggctggtgtacgtgacgcgcgccccaagccgcccttgccgatgaggttctcgtcggcgagcccgcgcacacggaggcctcgccgaagtccacgggctggaaagcggtgagcttccagggctcctcggccagcgcgagccgccgcttccgcctcttgatgtcgcggatgacgaagatgttggatttttttatgggcttagttcatttattcaat

SEQ ID NO: 20556 - DNA, 392 bp, Zea mays
  misc_feature (260)..(260): n is a, c, g, or t
  Coding DNA Sequence Number=SeqID_6153
gaagagagagactcactaattcccccccccccccgtggttgggcaatcctgacacattatcctctccacctcttcagaatccggacctcggcagagtccagtccctcgtgcatctcggcctctccactctcctttccacgcccgtccaggcctctaatctgacccctcttctccagcgggccggagatggtctcgctgcgatgcacaaacgcgcaccactccctcctcgggtcgccgacctgcctcgcgcggcccgcggncgggggggggtggccccggtcatggggcgctggccggcccccgtgggagggccgggcggcggcaaggccaaaggtctcacttcattccgaaattggggaaggcgtggggaggtccctcttggctctttgggc

SEQ ID NO: 20557 - DNA, 122 bp, Zea mays
  Coding DNA Sequence Number=SeqID_6154
ctgtcgggcaaattagtttccagccccagttcctgcaacaaaataacatccagttcaacacttcgctgctacctccccaaaaccagcagaccgaacagttgaactggatgttattttgttgc

SEQ ID NO: 20558 - DNA, 247 bp, Zea mays
  Coding DNA Sequence Number=SeqID_6155
gccgcgggcgacatagaaagcgcaatagtgtgccaacaaggggggccaaaatattttgcctccttatgcgtccttggggtgtctgcgagggcgtggtacagggaccattttcccgcgaatgcgtcacaagctcctataggttcccttcttcccccggacctctcaccaggggtggcttcgggatgggaaaacccaattcttcaaccctacaggatccaacaggcgaatcgcgaggtggcatcttacc

SEQ ID NO: 20559 - DNA, 182 bp, Zea mays
  Coding DNA Sequence Number=SeqID_6156
aaggtaagatgccacctcgcgattcgcctgttggatcctgtagggttgaagaattgggttttcccatcccgaagccacccctggtgagaggtccgggggaagaagggaacctataggagcttgtgacgcattcgcgggaaaatggtccctgtaccacgccctcgcagacaccccaaggacgc

SEQ ID NO: 20560 - DNA, 405 bp, Zea mays
  Coding DNA Sequence Number=SeqID_6157
aagatactttccctccttatgcgtccttgcgtctttctgcgatggggtgcgtaacgcggacaattttccctcaaggcgtcacaagctcctataggttcccttcttcccccataccttccatcaatgggaggctcaggatgggaaaacccagctcttcaaccctataggctccaacaaggaatcggaggaaggaacatacctttatcacccttggttcaacaatcggcaggcctatctttggggcaggcattgggacaaaccatcaaggcgacaggaggtggagcaactcgggctacctgggatcaaccaaggagctctggcaaacctttctccctactatcagcaacaacaatttcttccattcaaccaactatctacactgaaccctggtggttatttgcggga

SEQ ID NO: 20561 - DNA, 574 bp, Zea mays
  Coding DNA Sequence Number=SeqID_6158
ggcttcgcttactgtgtgatcattaactttgtcagtccttggtccagtaacacaatgatatcatctgttatacaatggcatccaacaatctacatatccaatcaatagcttacttgaatcaaatagcaaatgcagtgcgagcattgtaccattaggatgactctcaagaaaaccgcagtggccaaaagtacagcatatcaaagccatctcaatcagtcagagccggtgtcatccagagccaggccattattagaacgaaggattatacatctgagatccacgtttagttcagagctattcccccatatcatatctttcccatagttacaactgggaaccagtcttagtcctatagagtttgaataaagtgcgggggtggatcatgtcaaagtccaagaatctaaagaaatcttactatatcagagggctacaatagccaaatctaatccagcaatgggcatctttgaaaatcttgtgacttgtcttttcatgtggttataaagtcccactttttgtgttatttctttgaaaaacagagaaccttttcggggcccatagagatccgacccaaaag

SEQ ID NO: 20562 - DNA, 589 bp, Zea mays
  Coding DNA Sequence Number=SeqID_6159
gatatgctgtacttttggccactgcggttttcttgagagtcatcctaatggtacaatgctcgcactgcatttgctatttgattcaagtaagctattgattggatatgtagattgttggatgccattgtataacagatgatatcattgtgttactggaccaaggactgacaaagttaatgatcacacagtaagcgaagcccaataagattaatgatattagaccccctatgataagaaagaccctgtgagaataacatgccatgagataataagagaaagaactgctccgagagagagataggtgcacagagatgcatgcgattcttgcacagactcatagggatcacccaagtgatgattaatgagcccatgacccaatggaaaagtaaatagattagatctgatatagattgtaatgaatgatgatgattagatcaatttctataagaattcagacaagtggatgatgggggtcacttcttcttcttagtcatagtcccatcaatcccttacatattctcacagatattaagaagtaatatgtaataatattaataacgctgcgctagtctccacctatgtaacagta

SEQ ID NO: 20563 - DNA, 411 bp, Zea mays
  misc_feature (32)..(33): n is a, c, g, or t
  misc_feature (70)..(70): n is a, c, g, or t
  misc_feature (80)..(80): n is a, c, g, or t
  misc_feature (90)..(90): n is a, c, g, or t
  misc_feature (112)..(112): n is a, c, g, or t
  misc_feature (114)..(116): n is a, c, g, or t
  misc_feature (143)..(144): n is a, c, g, or t
  misc_feature (180)..(183): n is a, c, g, or t
  misc_feature (215)..(215): n is a, c, g, or t
  misc_feature (220)..(220): n is a, c, g, or t
  misc_feature (222)..(223): n is a, c, g, or t
  misc_feature (227)..(228): n is a, c, g, or t
  misc_feature (232)..(234): n is a, c, g, or t
  misc_feature (238)..(242): n is a, c, g, or t
  misc_feature (252)..(256): n is a, c, g, or t
  misc_feature (258)..(264): n is a, c, g, or t
  misc_feature (266)..(268): n is a, c, g, or t
  misc_feature (272)..(276): n is a, c, g, or t
  misc_feature (278)..(278): n is a, c, g, or t
  Coding DNA Sequence Number=SeqID_6160
ttccccgtggccaaagcagggccgaccacccnncacaatcagggggccgacggcccccgcccaccacccnggccccccancccccacagncacggcacaccccgcggcaccngnnnaagagccccccgaatctccccccgccnncgggcccgacgagctcgatttccctttttttctccnnnntcgcccgccccaggctggactcccttcatttngagcngnnaacnnacannnacgnnnnntttgtgggcnnnnncnnnnnnncnnngggnnnnngncaggtgcctgtggacgacacagcctcagcccacagtgatgttatgtaactagaacggaggagtatgcaagggcgggcagggtcttgcccaagtcccaaccaaaccatgatgtcgccttgtaacatcccacggc

SEQ ID NO: 20564 - DNA, 465 bp, Zea mays
  Coding DNA Sequence Number=SeqID_6161
ctctacattcctttgaaagacaatttcagagtcatcagcattgcatatagacaaatggcatatataaaaaatacataaaagttacaaaaaatattcaaaatcttatgtacatgaaagacgttgagttgatcaaaacgaatgtgaaaaataattgactacttttgttgttgttttggaattcaaagaaattcaaaagttgtgtaaaaatttccacattcgttgaccattctggcagtgacgggtagcatgttaaaaatacaaataactagcgatctaacaaatacaaaaaatttacattgaaaaattcgaatcggcatagcggggtatgccaaattcagttgactatcatcggtttatacaactattggtatgtggtaggaaatggaacttttttacaaaaacagaagaatgaagctaaactataattgcaaaagtaatgatggaacttgcgtcaaaaaattctta

SEQ ID NO: 20565 - DNA, 488 bp, Zea mays
  Coding DNA Sequence Number=SeqID_6162
ctgggatcatagttcgggcgtcaaaaaaaatgaaaaaaacgccagtttttttaactttaagaattttttgacgcaagttccatcattacttttgcaattatagtttagcttcattcttctgtttttgtaaaaaagttccatttcctaccacataccaatagttgtataaaccgatgatagtcaactgaatttggcataccccgctatgccgattcgaatttttcaatgtaaattttttgtatttgttagatcgctagttatttgtatttttaacatgctacccgtcactgccagaatggtcaacgaatgtggaaatttttacacaacttttgaatttctttgaattccaaaacaacaacaaaagtagtcaattatttttcacattcgttttgatcaactcaacgtctttcatgtacataagattttgaatattttttgtaacttttatgtattttttatatatgccatttgtctatatgcaatgctga

SEQ ID NO: 20566 - DNA, 315 bp, Zea mays
  Coding DNA Sequence Number=SeqID_6163
aatgattcacccaacctactaaaagaacaaactcccacaatgataaaaaaacaaactaccaagctaaactcaaaaccatgttcgaccaaaaaaccaaccttcaacaggattcattccaaagcacaataaagactccaatcataaaccgttacattgttgtagtaatgtttttttaaagatcacataaattttaattcggcgatgatagtaggtgaattaggtaagtggtagtggattaatttagattggttggttgagagtcatttatttcgatcttgctctcatcttccttcttttacgcttgagtcttctttg

SEQ ID NO: 20567 - DNA, 298 bp, Zea mays
  Coding DNA Sequence Number=SeqID_6164
gacaaagaagactcaagcgtaaaagaaggaagatgagagcaagatcgaaataaatgactctcaaccaaccaatctaaattaatccactaccacttacctaattcacctactatcatcgccgaattaaaatttatgtgatctttaaaaaaacattactacaacaatgtaacggtttatgattggagtctttattgtgctttggaatgaatcctgttgaaggttggttttttggtcgaacatggttttgagtttagcttggtagtttgtttttttatcattgtgggagtttgttctttta

SEQ ID NO: 20568 - DNA, 245 bp, Zea mays
  Coding DNA Sequence Number=SeqID_6165
atgcagattaaatcggactgattggatagatacggctgcaattaatctataaagacaggaaaaacattatagaagcattagaagccggtacgtactaaagccaaacgagcaggctgtaaattagaaattatcaacgccaccattggatgaatatcgaaggtagagtatgattgtatatagtagtcaacgcctcaagctagcacatgggagacttgacagtgaaaactacacgtctctttctagaa

SEQ ID NO: 20569 - DNA, 235 bp, Zea mays
  Coding DNA Sequence Number=SeqID_6166
ttggtggtgcgtatgtggtttttctagaaagagacgtgtagttttcactgtcaagtctcccatgtgctagcttgaggcgttgactactatatacaatcatactctaccttcgatattcatccaatggtggcgttgataatttctaatttacagcctgctcgtttggctttagtacgtaccggcttctaatgcttctataatgtttttcctgtctttatagattaattgcagccgt

SEQ ID NO: 20570 - DNA, 486 bp, Zea mays
  Coding DNA Sequence Number=SeqID_6167
gatcacggctttattgtttgtcactatgttgaatcacttgatccccccaacaatgtgaacgacacggtatcgaggtggtcgcatgacatgacatagtatccaataacgaacaataaaaaacacacacacagaatcaacaaccatggcatagaaccacaaacattatgcgatacaaagatgatgtgggggatgacacgatgatgatggctgtgtgggtaccggagatgatacgtggcaaaacatgtggacgatgaaggagatgtagctgttgcagatataatgatcaaccgtggacatgttcatgtcactatactgtcaggattctactctatcaagtggtcatgagatgaacagttgtttggagggggaggcgacagatgaacgtgatcgcattggacgagaggccgaaccaaggggggcataaacccttacttggcacgagctcgcatctttcttcgtttacgtttgagacgtcgcatacgtttt

SEQ ID NO: 20571 - DNA, 484 bp, Zea mays
  Coding DNA Sequence Number=SeqID_6168
gttcttcgttcccaagacgcaagatgcgcgctaaatggagaaaaaaacgtatgcgacgtctcaaacgtaaacgaagaaagatgcgagctcgtgccaagtaagggtttatgccccccttggttcggcctctcgtccaatgcgatcacgttcatctgtcgcctccccctccaaacaactgttcatctcatgaccacttgatagagtagaatcctgacagtatagtgacatgaacatgtccacggttgatcattatatctgcaacagctacatctccttcatcgtccacatgttttgccacgtatcatctccggtacccacacagccatcatcatcgtgtcatcccccacatcatctttgtatcgcataatgtttgtggttctatgccatggttgttgattctgtgtgtgtgttttttattgttcgttattggatactatgtcatgtcatgcgaccacctcgataccgtgtcgttcacattgttggg

SEQ ID NO: 20572 - DNA, 559 bp, Zea mays
  Coding DNA Sequence Number=SeqID_6169
gatccgtgttctatcatcagacgcgaggcccttgtcatcgccgacccttacttgtacctccaagtcatcgatcttgccgaatgaaaactcgggaatgtctagatgccctttgatcttcttgttttcttctttgattaaccattcaccgctaaatctcaagcttagttcatagttatatcctactctcttcttgttgcgaacaatgccctgaaatgcctgcaaagcaaccaatggtttatactcggaagttgaatcatcacagtacagaactacggagatacttaaaagaaatataaatggctatcacaaacagatcccatccacggtaactaacagtatagttactcagctgctatgtgtgaatgtacctggaaaaacgtccggttcaaaacatttcattaattcatttaatcgcactgttctttttaaggaaatacttctaaggtgacaagagtcttagcaatatacttgtagggtgcaccaacacaaggcacaaataggctgaggaaggtacaatcaagttctcttcactgggcacaacttgagtagcccaggtgga

SEQ ID NO: 20573 - DNA, 290 bp, Zea mays
  Coding DNA Sequence Number=SeqID_6170
tccatgctcatgagatgcaagcacatttgattttctataagttcaacgggcactaatgttaactgaagtattttcctcgatggaggctgaagctgattttgatgttgaagattccagatcaaacaatgaactgcaggagttgtggccagttggtgagatagacccaaagggagggcgattcccttgttgcattgtctggactcctcttcctgtagtttcatggcttgctccttacatagggcatgttggaatctgtcaggaggatggatctgtcctggattttgctggtt

SEQ ID NO: 20574 - DNA, 467 bp, Zea mays
  Coding DNA Sequence Number=SeqID_6171
cgagatctgctgttgcatatggagaagggtaagaagttagggagggcgtacatttcttggaatgatgacatatttgtggagtactacaacaagggtgacagatgccaaaatgggtggaagtctcatgtctacaacggttgttatcaagaatgaccgagaaaagtgcaatatagatatcacaaaagactaaatcatgtccaggatcaatacttttgacaagctccacactattatcaatggtatgctagaaacaagtgactttggttaggcttggaacaagagcaagatattcgttgatagtgattctgcattattattactattcgcgtgatttatgttgcatgataaattgtaggggtaaaactagtctctaatctattgcacatgcaatgactcagcaatacacatgtgcatagcaaggcacatgtgtatgttggtgtgtacgagttgatgggtattgtgtacaa

SEQ ID NO: 20575 - DNA, 535 bp, Zea mays
  Coding DNA Sequence Number=SeqID_6172
cagcgaccgagccttggccgagccaccctcccccgacgcgcctgcaccgaccgcgcttcagctcggcgcccaggcggaccgacgtcggccacccgcccatgccccagctcttagacccctatccgcaggtcgcagcaccgccaacacccagatcccagacctcgccgtgaccacgccaccggagtctggtggccagccaaagccctcgcccacccgcgagccagcgagcgtgagccggtgagtccctggctccctgcgcgtgcgagactggagatccaggcagcggaagagccctgtttgttcccagccacatcgcgtccctggctccctgccctgtttgtctccctgcacaggcgagacagaacattctctgtagctgtatgagcatttggagccacatcgctggacaagggggcgatttattcattggagtaaactgcatttaggttgctcaagattcagttttgcttagaccaacaaaaacgtcggccggcgccgggagcatcgtgccccgcgtgccgtagatgacgccgat

SEQ ID NO: 20576 - DNA, 134 bp, Zea mays
  Coding DNA Sequence Number=SeqID_6173
ggaacttccaccacttggacagttgccccacctagaaaatctggagctctgcaagttggatagggtcaaaagaattggttgggaattctgtggtggcagtggcagaggtgcatttcgccgactgtcatccttct

SEQ ID NO: 20577 - DNA, 120 bp, Zea mays
  Coding DNA Sequence Number=SeqID_6174
ggcaggtaccatgcagaaggatgacagtcggcgaaatgcacctctgccactgccaccacagaattcccaaccaattcttttgaccctatccaacttgcagagctccagattttctaggtg

SEQ ID NO: 20578 - DNA, 124 bp, Zea mays
  Coding DNA Sequence Number=SeqID_6175
taacatatctagtagccagaactgcatgcattagactgagcctagtgataacatctgagtgatagtcgcgcactgctgctaaagatgacagtatcaaaaacatgactggtgcaaacatgatcat

SEQ ID NO: 20579 - DNA, 131 bp, Zea mays
  Coding DNA Sequence Number=SeqID_6176
gggaagttcataatttctgcgctacatgatcatgtttgcaccagtcatgtttttgatactgtcatctttagcagcagtgcgcgactatcactcagatgttatcactaggctcagtctaatgcatgcagttc

SEQ ID NO: 20580 - DNA, 301 bp, Zea mays
  Coding DNA Sequence Number=SeqID_6177
acgtcgtagtggcaagcaatactgtaatgacaattaaatttcttatcaatatcttgctttatacgtgattaaaatagttgtagtagttccattgatgtaggcggtaggctgcaacacattcttcaatagatgttcatctgtttaaagcttttcattttcctaatattatgcattatgtgtcttcaaattgtgtagttattccatcaagtgtcgcctctgcctctgtatcaaatgcagcagcaccacaagctattatcaactcagatgatgtagcttgggctcattgttttttcccagatgc

SEQ ID NO: 20581 - DNA, 115 bp, Zea mays
  Coding DNA Sequence Number=SeqID_6178
tactgctccgactacgtattcatttgatagggtatttcgttctgactgtaataccaaagaagtatatgaggaaggggccaaagcagttgctctctctgtacaagtgtttttgcat

SEQ ID NO: 20582 - DNA, 360 bp, Zea mays
  Coding DNA Sequence Number=SeqID_6179
acaggaacagagacagaggcatggtggtgaaggactgtactgtacctatacacctatatactacgacgtgcacctgtactacgacgtgctgctgtaccatactaatactagtgcgctgctgctcccttgccttcttgcttgcaccagccactcccgctttttttgctcgaacgatcgactgctcgtgtcgcgtcgggccacggccggtcgtcagtttgggtgtgtccactccactgtaaagctcctctcttttttttgggtactccctccatgccaaagttagcggacgtgtactaggtgtggttcggagcagcaggttgtattacttaccacccctctgtaatgtaagaacgcgttcta

SEQ ID NO: 20583 - DNA, 311 bp, Zea mays
  Coding DNA Sequence Number=SeqID_6180
ccaagccaaccatatccactctcggcggcgccgcgcatctctcctctcttcttgcccttccttcccccaacccacacagcctcactaggggtctaccggcggcggcaacgagatggtgcagcgcctcacctaccgaaagcgtcacagctacgcgacaaaatccaatcagaacccggggtcgtgaagaccccagggtgggaaagcttgtgtaccaatacaccaagaagaagggcgagcggtcccaagtgccccgttcaccggggaagaggaatccaggggatcccccacttgagacctgcgagggtaaagag

SEQ ID NO: 20584 - DNA, 427 bp, Zea mays
  Coding DNA Sequence Number=SeqID_6181
gagctcgcttccatctactaaaagttctctacgggtggttggtttacagtacagacagtttcctagctggcacttgagaagtgctcgtctagtttagtgattcctagcgtagaacccttctgtatgagaatagtttctagattatgaccttctcttttgattgagtgaatagccatgccagggattcctcttttctgggggaggtttaaaccttttacccttgcctttacatttccataaagaaagacagaggtattcgaaatactgccatgggttaattccctattttgcttgcagcaataattttggttcccgcaattccctctttcttacaaccaagaaggaatgatatcacgaagctacagtcatccttatatggttccctgatcctgttcttaaacgtaattaggcactgcgctgagcggga

SEQ ID NO: 20585 - DNA, 310 bp, Zea mays
  Coding DNA Sequence Number=SeqID_6182
gcgaagcgccgcaagtttttggagcgagacctggagcggacgccacccgctcccgatggtgactcggcgatcgccgctacagcgctactccttctcgccaaacaaacggcaagtcatcagctatgcacagcgccgacgtcgtcaccgccacactcacgtcacgccattccgtccgcagcaagtggaaatggcggcactggtgccggagtgggctaccaaggagccctgcctcatggggatcgacgaaggctggccgtggccctgtccttggtcctatggtgtatggatgtatgtactgcgcgtattctta

SEQ ID NO: 20586 - DNA, 254 bp, Zea mays
  Coding DNA Sequence Number=SeqID_6183
atacccctcggtggacaagtctggctttgaacttggtgatgaccgatgagcctggcttcatcatgcttggtgttgtagccccacttgaggttgatcggtcagacccgaggcggtagttcgacaagctcctaggtgtcattcgctttgatggaggtgaactcattgagcatggtttggtgtcagctcttgtgctcctgtgtctcattaaatgtcattggcttaacttcatttgccagcaacaactgctcatccaa

SEQ ID NO: 20587 - DNA, 235 bp, Zea mays
  Coding DNA Sequence Number=SeqID_6184
gggtcaccgcacatgagttggatgagcagttgttgctggcaaatgaagttaagccaatgacatttaatgagacacaggagcacaagagctgacaccaaaccatgctcaatgagttcacctccatcaaagcgaatgacacctaggagcttgtcgaactaccgcctcgggtctgaccgatcaacctcaagtggggctacaacaccaagcatgatgaagccaggctcatcggtcatca

SEQ ID NO: 20588 - DNA, 287 bp, Zea mays
  Coding DNA Sequence Number=SeqID_6185
tatagtataatgtccgtgcgttgcgacgatacaccaacctaatcatatttgatgacatagtgcaccagcagtgccaagttagtgtgacgggtcctcctcccaaaaaataaatttaaaattaatgtgaaccctccctccaaaaaataaatttaaaattaaagtgaatatatgccttgcataccggatattaaattgcggatactgcattttatcttagctaaaagctcagaaatatatgagttgaaaataagcctttcctttttttatagctcgatcagccgcgccgc

SEQ ID NO: 20589 - DNA, 261 bp, Zea mays
  Coding DNA Sequence Number=SeqID_6186
gcggcgcggctgatcgagctataaaaaaaggaaaggcttattttcaactcatatatttctgagcttttagctaagataaaatgcagtatccgcaatttaatatccggtatgcaaggcatatattcactttaattttaaatttattttttggagggagggttcacattaattttaaatttattttttgggaggaggacccgtcacactaacttggcactgctggtgcactatgtcatcaaatatgattaggttggtgtatcg

SEQ ID NO: 20590 - DNA, 198 bp, Zea mays
  Coding DNA Sequence Number=SeqID_6187
gaaaaatatgtcagattctcacttaacaattatacaatctaatctaaaaggagtttacgtgacagagaaaaactggtttaaaattcatcttgtttaaagttaaaataccgttaaaagcttatctataattgttggtctctcctctcactgaggtgaaaccctccaaaaatatttgtatgctgcttaatgcagcgagca

SEQ ID NO: 20591 - DNA, 160 bp, Zea mays
  Coding DNA Sequence Number=SeqID_6188
tgctcgctgcattaagcagcatacaaatatttttggagggtttcacctcagtgagaggagagaccaacaattatagataagcttttaacggtattttaactttaaacaagatgaattttaaaccagtttttctctgtcacgtaaactccttttagattag

SEQ ID NO: 20592 - DNA, 500 bp, Zea mays
  Coding DNA Sequence Number=SeqID_6189
caggcgcgagaggtttgatttccattttggtcaaattatcaatgcatgcccagatgttgtaggttacttgaatgaacatcataatcacttatggagcaggtctatgttatccactgaaataaaatgtgattatgtgaacaataatcttgctgaatgtttcaattcatggatcaaaaatatcaaagatttccccgttgttgatttagttgataggttgaggcaaatgacaatggaattatgttagaagaggagaaagattgcagataagctctctggtagtattctccctgctattataagtcaacttagagctaagactaaaggtttaggacaaatttcagtatgcaaaaatagacacaaagctgagatttttggaaattaccaggacatgacaccttggcggcatgaggtggatttgcatgaacacacttgcagctgtagagaatgggaagtgattgggaagccttgtcgtcatgctttggcgttcatacaaacagaga

SEQ ID NO: 20593 - DNA, 509 bp, Zea mays
  Coding DNA Sequence Number=SeqID_6190
ttataagtgctatccatctacctgtttgtcttttgggccaaatgatgagtcttttgggctattttgatgatcctccctgcgctattgctgcaggagctcttttatttgttttggcaagtgatgtgagtacctcttgatctctgtctaaatcacacatgctattatgcatattaaatacctcttatctcaaattttccttcacccagatgattacaaggtggataaaagctattaatttcccttgtgttttcccttttagctgcaaccacttctttcacattacaatgccacttgttttcacattgcaaggctagcatgttctataaaagaatcaaataagaaacaccatgattgaatctcgatattttgaatgtaaaaactaacttgaaatctgttggaaataaatctcaggcagtattgtcatttaaactttttcattagtttgacctaaatgactctctctaatatcgtactcgtttaaataccccgtttaagctggtgtagtagat

SEQ ID NO: 20594 - DNA, 528 bp, Zea mays
  Coding DNA Sequence Number=SeqID_6191
ttatctactacaccagcttaaacggggtatttaaacgagtacgatattagagagagtcatttaggtcaaactaatgaaaaagtttaaatgacaatactgcctgagatttatttccaacagatttcaagttagtttttacattcaaaatatcgagattcaatcatggtgtttcttatttgattcttttatagaacatgctagccttgcaatgtgaaaacaagtggcattgtaatgtgaaagaagtggttgcagctaaaagggaaaacacaagggaaattaatagcttttatccaccttgtaatcatctgggtgaaggaaaatttgagataagaggtatttaatatgcataatagcatgtgtgatttagacagagatcaagaggtactcacatcacttgccaaaacaaataaaagagctcctgcagcaatagcgcagggaggatcatcaaaatagcccaaaagactcatcatttggcccaaaagacaaacaggtagatggatagcacttataaatcattgtgctcgcata

SEQ ID NO: 20595 - DNA, 292 bp, Zea mays
  misc_feature (145)..(145): n is a, c, g, or t
  misc_feature (233)..(233): n is a, c, g, or t
  misc_feature (245)..(245): n is a, c, g, or t
  Coding DNA Sequence Number=SeqID_6192
atgacgcttcctgccctctgaactttcacacgcacaactttacctaccaccgtcggtcgtccaccttcgccttccacccgacgtcgagttctagactccccgttccaccgagcgccagctccggaccgcccacacttggctcggnggcacctccgagtcccaggccactcgcccggtcggacgagctcctcctcggttccaggcatctagcaagtcgaggtcctccccgcggntcctcccccggncgagctccacagtccgccctacgttgcagtgaccgattggtcgcatt

SEQ ID NO: 20596 - DNA, 480 bp, Zea mays
  Coding DNA Sequence Number=SeqID_6193
atgttcttctcatgcgctgaatatcatggttcaaactggactcaaggtcagtccaaatgcagttgaaagaatggggacattatcaaggtctgtgacatctacaccatctcgtttacaaatctttaattctattgttcaaacattgtgtgctagaaggaaatcagggctgaatcttgatgttccacatcgtcggaatgcaacctataatatgctaaatgaagcactaaattataagcttgctctcaataggcatgcagtagaggaacaccatgaatttctaattgaagaagattgagtaaaggtagaagctcttcatggtcctctataagagatcaacgatacaaccaaattattctcagctgtgagatgcctatctggatctagatcgcgagagatgttgctcgttacccgaggtgtgctacttggaactcaaatgaactccttatgagatggcaaatgctatgtatgacaagttccaga

SEQ ID NO: 20597 - DNA, 293 bp, Zea mays
  misc_feature (198)..(198): n is a, c, g, or t
  misc_feature (214)..(214): n is a, c, g, or t
  misc_feature (257)..(257): n is a, c, g, or t
  misc_feature (263)..(263): n is a, c, g, or t
  Coding DNA Sequence Number=SeqID_6194
ctccccgtcgcatctcagtatctcactccccagtcgccgccgcacatacaaatacgcgacgggaacggccagggccgaaaccctaaaaccatcgccctgcccccgcctccgctgatccccaatggcggctgtgcagcgcttccctccgggagtcggcccccggtggctcggcaaggcggcggcgggtcaggagggcgnttggaacgtcgcttgnggccggaagcaggcgccgtcttccgggccggctgggttcccanttcgcnggcggagcagaaaaagcaagggcgggccgg

SEQ ID NO: 20598 - DNA, 337 bp, Zea mays
  Coding DNA Sequence Number=SeqID_6195
ggtcacttttcgtaaccaaacaatggcaagtccaaacggggtaagggggccccctgggaactttccccccatggtttgactaagacccctcttgcgcgcgctctcccccccccaagaaaaccggtttttttttttccccccctcaaaaagaaaaacacccccccccccttgcggtgcgaccctttataaaacgaggggggcgccccccaaaaaccatacttcttctccggggggggcgccaccaacacatcccaccacccatggggggcgggggaaataatcctttctgccccccccgggcccccccccgcggtgggaacaataccctcccactgat

SEQ ID NO: 20599 - DNA, 407 bp, Zea mays
  Coding DNA Sequence Number=SeqID_6196
tcagtgggagggtattgttcccaccgcgggggggggcccggggggggcagaaaggattatttcccccgccccccatgggtggtgggatgtgttggtggcgccccccccggagaagaagtatggtttttggggggcgcccccctcgttttataaagggtcgcaccgcaagggggggggggtgtttttctttttgagggggggaaaaaaaaaaaccggttttcttgggggggggagagcgcgcgcaagaggggtcttagtcaaaccatggggggaaagttcccagggggcccccttaccccgtttggacttgccattgtttggttacgaaaagtgacctctaaactttgcaatatttttcctcaattcgacgtttgacacccgctctgccatccaatgcaccttcatgg

SEQ ID NO: 20600 - DNA, 383 bp, Zea mays
  Coding DNA Sequence Number=SeqID_6197
ggagtgtagctttcataatatttcatttctagaggaagggattaagcccggtttcgtatattaagccacaagaaactatacagggactcagggagaggttacttgacagaaattaatgaagggtttgtaccgaagctaacaaggaaagtcttgcggtactctatgagcttgtattagagtgatattgataaactgtttttcaggacgtgtagcttggctgcttgttcttaaatgattagattgtttcttcgtttcaaattttccaagcagcaataatgaaaattttcatgaagggattttgaaagtattgttttgccttccccatcatgctgaatccttttgttgattaacaattcgtttcttttcttgcaaggttctccgct

SEQ ID NO: 20601 - DNA, 569 bp, Zea mays
  Coding DNA Sequence Number=SeqID_6198
acatactggttgttgctcagacggatacgctggagctctgaatccttttcatcgatcaaaccacgggcatgttgaagttcggagtgcacttgattcatctcagcagtgagtgctcggagttcttgatcacgagttgctaaaagatgggcaagatcaacctgaggagtggttccagcagttctctggtatttgcttaagcattcttgcaagcggagaaccttgcaagaaaagaaacgaattgttaatcaacaaaaggattcagcatgatggggaaggcaaaacaatactttcaaaatcccttcatgaaaattttcattattgctgcttggaaaatttgaaacgaagaaacaatctaatcatttaagaacaagcagccaagctacacgtcctgaaaaacagtttatcaatatcactctaatacaagctcatagagtaccgcaagactttccttgttagcttcggtacaaacccttcattaatttctgtcaagtaacctctccctgagtccctgtatagtttcttgtggcttaatatacgaaaccgggcttaatcccttcctctagaaatga

SEQ ID NO: 20602 - DNA, 517 bp, Zea mays
  Coding DNA Sequence Number=SeqID_6199
agctctgaacttacttctaacctcatttatttccttttaggctcctccgcattttttgctataggactggatattttatctataccagtacatctttttgaacatggtattgttgtattgtagattaagatgcctatgattctccaaacttacatctgtcccattgttcgcatgctgtttttccttataaacactaacatacctgcgctaatttttctctgaaagactctcttagcatcttatttgctttttacttcagcggaattagcggtgccttttcgctataagatcttcattatcttaggaacgtctttgtagcttcctttcctttcactttcggcctaatcagcgttaacttttcgcagtattctctgcattccactaggaacgtctttggagcaactttcttgtttcaatcccttactcacagttgcttttgcagcctttacatttgcatctttgggggattttgctcttctagagataaaaaaggaaattacttgtgatggtcgcatta

SEQ ID NO: 20603 - DNA, 571 bp, Zea mays
  misc_feature (529)..(530): n is a, c, g, or t
  Coding DNA Sequence Number=SeqID_6200
agagccactgggattttgttctggaggagatggtctggatggcaaatgacttcacacaggagcgtttgtggaaaaatacagtcgcagcacagatgtcccattggatttcttctagaggtcgagcggtatttgaagaagcaagcattcagagaaagcagaaatctgttgctagagttctagccaatggtattatgaacttttggtgttcagtccatactttacgagctagtggtggtattcctaaaccaatgcaaatacagcaaccgaatgagctagaggaaaataagcttggtggggtcaaaaccagaaaagcggatgaggagtgtttggagcaagaaaagtcccgtcagtctcctattcagagctttgcacttaggcttcttgagtataacattaatgcatctgaatttctgccattagccgaagcaccatcaactcctgacaggctaaatgattttggcattttgaaagtacctgatcaactttcagaagcaaatctcttttatggcgtagcacccggtgcaatgcnngcatacagggagtctatggagcgtctccttatttataataa

SEQ ID NO: 20604 - DNA, 284 bp, Zea mays
  Coding DNA Sequence Number=SeqID_6201
gagaagctgggtcatttcgtcgcaagcttctccactttctttgctggcgtcataatcgcgtttatcagctgctggcaagttgcaatgctttccttcctggtcattccacttatcctcatcatcggagcagcatacacgaaaaagttgaatgtcttatctttgtcacgcaatgctattgtttcggaggcagtatcagttgtagagcagactttgtcacatcagttaaccgtcatctccttcagcgaggaaccttgggccatgaagtcctttgtccagtgcatgga

SEQ ID NO: 20605 - DNA, 262 bp, Zea mays
  Coding DNA Sequence Number=SeqID_6202
atattcataatgtgctgctatcggaaaatgatgattttgatgaggaagtgcctctcgatgatgggagcgaccaggaaggtaaaatggtcctctcaaagaagcgtttatctctccaaagggacgaccatgcttcagtagctggtctaccacacgaaacacacgcccttcaacagcacgaaggaagctatgaccgccatcatttcagacagccttctttatgtggccctcgctgccccggggaggcttgaggatcaccatcctc

SEQ ID NO: 20606 - DNA, 305 bp, Zea mays
  Coding DNA Sequence Number=SeqID_6203
gaagtctagcaggtagtccgtttccctggatgtatggaaaggtccccttgctacagcaattgaggacgttcgacctgccgggaggcgcgaaaaagctcccaggcctgctgcttactccaactggcgcaaaggagccatccctgatatccccttttgggctccccgggttctaaataggcttagggtttttctgtttccgaaacctttcagatttcttaaccacacccccctcggagctggctgttttccctggacaaacgcgacccagtctcccccaaggtcttggccttcccatgggaggccct

SEQ ID NO: 20607 - DNA, 454 bp, Zea mays
  Coding DNA Sequence Number=SeqID_6204
ctcccatgggaaggccaagaccttgggggagactgggtcgcgtttgtccagggaaaacagccagctccgaggggggtgtggttaagaaatctgaaaggtttcggaaacagaaaaaccctaagcctatttagaacccggggagcccaaaaggggatatcagggatggctcctttgcgccagttggagtaagcagcaggcctgggagctttttcgcgcctcccggcaggtcgaacgtcctcaattgctgtagcaaggggacctttccatacatccagggaaacggactacctgctagacttcttgccacccttagactccattagtacatcaaattcaaaacgccgaagctatgtgtggaacccccgattcgcgagcgcgcacgcgtgatctgtggaacagatcttaaacttctttcccttggagatcctcttgttcttcccgacagccatggtcg

SEQ ID NO: 20608 - DNA, 466 bp, Zea mays
  Coding DNA Sequence Number=SeqID_6205
agctaggtcaggttagacaccagttgtctgagaatatcttcctatatctgatgctactactattaagaagagatgttctgacggaagatgtggaagggggtgcacacctactcttctgtaactgggttgtggagtgacaggtcaagtgaatgggtgcgatggaaacatggtggtggatgggtgaatggggagcatacagagccattagaaagggatgtcgcagggcctttgtcaatggcatgctgcattttctcttctaccacttccagacagtcgtgtatgacagttgcagtgaatggccaagggaacgcatgcagaatcatcccatggccagatcagcgtgagtgtcctcaagttgcttttattagtcaatcacaggggcatcttcattgtatcagtgaattggttaaaggtagcgatttcagcttccctggtctatccatctgggttctcgaggactacgact

SEQ ID NO: 20609 - DNA, 487 bp, Zea mays
  Coding DNA Sequence Number=SeqID_6206
tatgcttcagaacccactctattgagtcgtagtcctcgagaacccagatggatagaccagggaagctgaaatcgctacctttaaccaattcactgatacaatgaagatgcccctgtgattgactaataaaagcaacttgaggacactcacgctgatctggccatgggatgattctgcatgcgttcccttggccattcactgcaactgtcatacacgactgtctggaagtggtagaagagaaaatgcagcatgccattgacaaaggccctgcgacatccctttctaatggctctgtatgctccccattcacccatccaccaccatgtttccatcgcacccattcacttgacctgtcactccacaacccagttacagaagagtaggtgtgcacccccttccacatcttccgtcagaacatctcttcttaatagtagtagcatcagatataggaagatattctcagacaactggtgtctaacctgaccta

SEQ ID NO: 20610 - DNA, 572 bp, Zea mays
  Coding DNA Sequence Number=SeqID_6207
aaatgaccagttccagcagaaagtggtatcgttttaggccttcctcttcccctcctgccacttgactctcttttattacttgatttaggtgaaatgtggataggcagttcagaatcatctgaaagagcacttttacacgcattaccctcacggtttaacaagctagccgaacaaagctcatgcattgataccgtgttctgtgcagatggcaaagcattctcaacagagactgcaggatcatttggaagaatttctgtggaacaaatgctctgtgattcaacaccagaaaccacagggcaatatagagcattagaaattgttttcttctcatccttccctctaatgctctggccttttgacttatcaccacaagttgcagtagatgaagatgcaaacggtgatgatgcatcaactgcaacaatgctaaaactagagttagactctgtgcaagcagtgtgatccatactgcgtccaaataaaacaggctgaccagttgtatctttccccaggtcaatcatagtgtctgaatactttcgaggcatcccccgtgttctctttggttgcttacgagt

SEQ ID NO: 20611 - DNA, 557 bp, Zea mays
  Coding DNA Sequence Number=SeqID_6208
gggatgcctcgaaagtattcagacactatgattgacctggggaaagatacaactggtcagcctgttttatttggacgcagtatggatcacactgcttgcacagagtctaactctagttttagcattgttgcagttgatgcatcatcaccgtttgcatcttcatctactgcaacttgtggtgataagtcaaaaggccagagcattagagggaaggatgagaagaaaacaatttctaatgctctatattgccctgtggtttctggtgttgaatcacagagcatttgttccacagaaattcttccaaatgatcctgcagtctctgttgagaatgctttgccatctgcacagaacacggtatcaatgcatgagctttgttcggctagcttgttaaaccgtgagggtaatgcgtgtaaaagtgctctttcagatgattctgaactgcctatccacatttcacctaaatcaagtaataaaagagagtcaagtggcaggaggggaagaggaaggcctaaaacgataccactttctgctggaactggtcattttgtggcttctgt

SEQ ID NO: 20612 - DNA, 282 bp, Zea mays
  Coding DNA Sequence Number=SeqID_6209
ttatttagatcgtccgtccggtcaggttcttcatccattaaagcttcatcttgttttgctcatcaagaaagagagttcagttaaacaactcgtcagcattgtagccagcaattgctctccaccttgtgcacatatcacttcaagtaccaacatgtctctccctatcaagaaagtttatcccgatccaacttctgcatcagcagctatcaagcagtcaatcaattttcctgaacctaggttaaagcctgcaaaagcattgttacaggtaaaaggtctcagttt

SEQ ID NO: 20613 - DNA, 564 bp, Zea mays
  Coding DNA Sequence Number=SeqID_6210
agttgttgcccttgatagatctcacaataaggtgatggatattctgaagttggcttctgagatggacttgagttgtattaaagcttataaacttgatgctctcaaatctgtacggaaaactgatgaagcaagaagccttggcatggctgataatcacagtgaagcaattgaaacaccaacagaggacccttgccatgcgacactaggtgggaaatctaccagtgtagacgaagacagctcaacaacaacagtggtgttttctgataacaaaaacctaaattccaaaagatacattagcaaggcagaactcaggaagaatttaaggcagatgaagaatggacctggaagaaataattgctctggtggtagagttgaaaagtcaaaaggattttgtcctaacagctttgatcgtgtcctccttgatgctccatgttctgcgcttggcttgagacctcggctctttgctggtgagacccattattatgacaggaaactctagaatcactgagggaacattcgaagtatcagaggaaaatgtttgatcaagctgtcaagctagttcgt

SEQ ID NO: 20614 - DNA, 427 bp, Zea mays
  Coding DNA Sequence Number=SeqID_6211
ttgggacgagataatggcaagccttgctgattctttcttggccgatctcgacgaactttcagacaatgaagcctaccctgaagaagacaatgctgaggcagtgggtatggatgaggatggtgacgatgatatgcctgaccttgagtctcttaattatgatgatcttgacagcgtctcaaaactgcagaagacacaacgttattctgacataatgcaaaaagttgaaggagcacttgagaaagacacatatttgtctaatcaagggttcatcctggaggaggatccagagtaccagcttattgtagattgcaatgccttatcagtagatattgagaatgagctcattataatacataatttcatccgtgacaagtataggctgaagtttcctgaactggaatcccttgtccatcatccgattgattat

SEQ ID NO: 20615 - DNA, 355 bp, Zea mays
  Coding DNA Sequence Number=SeqID_6212
taaagtccaaacgcggaacacccagcaccagcacggcaggtcggcagcacatccctctccggcggtccggccatccgtcgtcgcagcacggcggcacttccctctcccaggtgaccaggtcccagcctccggcggtccagccctccgccgtccctcatctggcgttctacttctgctgtccactgctgacgactcctcgctggctcgctgcaccagcacgcacggcaaccagcctccgtcgtctagacctccaggggacaggggttgccagacctggacaggggctaccagaaaattatctagtatagtattgtgagtatatatattggttctatatataatggcaggtggcggg

SEQ ID NO: 20616 - DNA, 497 bp, Zea mays
  Coding DNA Sequence Number=SeqID_6213
tactaatctaggatcatctgtcgcctaatattgtgggcgcggtcgcggccccggtacatcctgctggttgatcttcggatcagagagctcttcccataaggcgaaaggttaatggcccaccagcaaacattttgattatgttagaaaacatgcatattcagaactcaaaatgtgcttcgaaaatataattctttactggatccgaataacagcgtttcgccgaccaggctctcctttacatttacaaacatgcagatttcttttgggaaatttgaactgtttccttcaggttagatttcgtgtagttactgtccccaatggttaacaagatgaaaaccgtgcagcattttgaatcggcacttgttattcccgtgctagttagtgtcccatccattcccatatttcgaacgttccgacaaaaacgggaagactcattaaagagggcctcagagatcttggtggttcttggtcgtcaggcggagcctttgctccatcaa

SEQ ID NO: 20617 - DNA, 494 bp, Zea mays
  Coding DNA Sequence Number=SeqID_6214
atggagcaaaggctccgcctgacgaccaagaaccaccaagatctctgaggccctctttaatgagtcttcccgtttttgtcggaacgttcgaaatatgggaatggatgggacactaactagcacgggaataacaagtgccgattcaaaatgctgcacggttttcatcttgttaaccattggggacagtaactacacgaaatctaacctgaaggaaacagttcaaatttcccaaaagaaatctgcatgtttgtaaatgtaaaggagagcctggtcggcgaaacgctgttattcggatccagtaaagaattatattttcgaagcacattttgagttctgaatatgcatgttttctaacataatcaaaatgtttgctggtgggccattaacctttcgccttatgggaagagctctctgatccgaagatcaaccagcaggatgtaccggggccgcgaccgcgcccacaatattaggcgacagatgatcctagattagta

SEQ ID NO: 20618 - DNA, 399 bp, Zea mays
  Coding DNA Sequence Number=SeqID_6215
gctacaactctatgcagaggagcatagatatattgtcttttgtgctctctcttcgagtccgtgtgctatttgacaatgcaaaatgggcatatcctggtggattctcggaagaaaagcaggcgagaagggagctgaatgatccagagaatgcacttatctatgcttttgctgttttctcatcactggagctataacaactccccttgacgtcatgaagacaaggctgatggttcagggacaggggaaccaatacactggaattgtaagctgcgcgcggacaatcctcagagaggaaggccctaaggcattctcgaaggcatcacttgtgccaacagctttagtactcttaagatgggaaacaaacactagtgaaatggaaactcttttgtaaatggtcgt

SEQ ID NO: 20619 - DNA, 415 bp, Zea mays
  Coding DNA Sequence Number=SeqID_6216
aaaaatttgcttcctttgttgtgagttgtgactccttgcgggctgcgagaccgaatcgatcagcatcgccccgccccgccccgcgcccccgcccccgccccgtgcgccatgttcctgcggcggctgagaacgtccgccgccctccgccggggcgcgaccaccggcggagtcctggccgccgtccgcgccgagctggccaacgagctctcctcctcggctccccctccattccgttccgagctggcgcccgacttcgacaccgtgtctgacgccccgcgcgcgcaggacgtgctcctgcgccgccgggacgggtccgaggaggtcctcgtgtcggcgctgctcgccccgctgcagttcgtgggccgagacccgctgcccagggccgcgctcgtcaaggtcttcgtcagtaagcctg

SEQ ID NO: 20620 - DNA, 108 bp, Zea mays
  Coding DNA Sequence Number=SeqID_6217
ttagtaagtactacccctagcaaggtagtgtctcgacgggccaatgcttggcgaagttcctgcgtcagttttcctgccaattgctgataggccgacgcttgttctgca

SEQ ID NO: 20621 - DNA, 168 bp, Zea mays
  Coding DNA Sequence Number=SeqID_6218
gtcgatatcagcatgtctgcagaacaagcgtcggcctatcagcaattggcaggaaaactgacgcaggaacttcgccaagcattggcccgtcgagacactaccttgctaggggtagtacttactaaaatcaggaggtcctgcagaacagatatatccttgctacagaca

SEQ ID NO: 20622 - DNA, 436 bp, Zea mays
  misc_feature (174)..(174): n is a, c, g, or t
  misc_feature (213)..(214): n is a, c, g, or t
  misc_feature (220)..(220): n is a, c, g, or t
  Coding DNA Sequence Number=SeqID_6219
aaacttcactccttgatgagggaatatgggaattcaaagaattttgcacagaggggcaggatgcatatgccaagctctgctcaatgattgggccttcgatttatggccattctgatgtcaagaaagctattgcatgcttgttatttggggggtctaagaagagctacctgatgntgtacgtttgagaagggacattcatgtcttgcttctggnngacccnatccacagcaaaatcacagttcctcaaatttgtaaagaagactgcccctattgcagtctatacctctggcaaaggttcatctgcagctgggcttaaggaatcggaacttcggataaaacttcccgccaggtttttttggaaaggagaaccatggttttggctggggggggagaattttggtcccagaatttgaaaaatgcgccctgaaaacaaggg

SEQ ID NO: 20623 - DNA, 370 bp, Zea mays
  Coding DNA Sequence Number=SeqID_6220
tctagtttccttattgttgtgtccaatttttcatggacactattagtgatgaaaaaggtccaaatggcttttatttcttgataagcacgggcattgagcaaaagctggtaatagtatgttgtagcaaacatttaagtaataatatctgaatgaaaagttatgcttctaacagaaaacgtaagcattttatagttcatagtttataatatcaaacctcccaagttgacttctacacagcagccagttgtttcactggcatcaattactccttcccttagggaagcatgtatctatctgattctaaaacactaagttgtatattattttctttacagataagcaatagtgagacagaaaaaggtgcaaccaa

SEQ ID NO: 20624 - DNA, 362 bp, Zea mays
  Coding DNA Sequence Number=SeqID_6221
gggctgctttgttatgctttttgaatgattggttgcacctttttctgtctcactattgcttatctgtaaagaaaataatatacaacttagtgttttagaatcagatagatacatgcttccctaagggaaggagtaattgatgccagtgaaacaactggctgctgtgtagaagtcaacttgggaggtttgatattataaactatgaactataaaatgcttacgttttctgttagaagcataacttttcattcagatattattacttaaatgtttgctacaacatactattaccagcttttgctcaatgcccgtgcttatcaagaaataaaagccatttggacctttttcatcactaatagtgt

SEQ ID NO: 20625 - DNA, 246 bp, Zea mays
  Coding DNA Sequence Number=SeqID_6222
tcgagctgctgtgtggtggattggaggagactggtatggtggagtgtagcctgggcaggttgatggatcgagctgggaatgatggactaatttagtttagtttggatttaatatacgagatatctactctgttagattatgctgagggtcttggagatcatgttagagcatttgcaaaagctaccctaaatctatttttttaccttgggcctggggcgtgtccacgctcatggttgtgccgcgggc

SEQ ID NO: 20626 - DNA, 235 bp, Zea mays
  Coding DNA Sequence Number=SeqID_6223
gtcagcatgctctcgtccgccaaggcgcgcgaggaagctctcagggcgcggtggcgcccgcggcacaaccatgagcgtggacacgccccaggcccaaggtaaaaaaatagatttagggtagcttttgcaaatgctctaacatgatctccaagaccctcagcataatctaacagagtagatatctcgtatattaaatccaaactaaactaaattagtccatcattcccagctcgat

SEQ ID NO: 20627 - DNA, 240 bp, Zea mays
  Coding DNA Sequence Number=SeqID_6224
gcccgcccggccaggtacagatatgctgccggctgttggatagcgaggaatggggaatagagcaaccaatgtattttctctatatgggccaattccctgtatgcccctggaaaatatactcatcccttgtatgcccctggccccccatgtcatagcccccaaaaattatacctatatgccccccagtggcccccaagggatgcgcctaaaatctgatggcatcccaggaattttctctat

SEQ ID NO: 20628 - DNA, 157 bp, Zea mays
  Coding DNA Sequence Number=SeqID_6225
gaggtaccctaccacggatgcaatatcgttgcgtgacctgcgtggcggtatgcgcgtgcgagtcttcagtttaccgattcaaagtaaaattcgttttatttaatttaattaatagattcatacaatagtttgtatatgttttattactccgttactc

SEQ ID NO: 20629 - DNA, 144 bp, Zea mays
  Coding DNA Sequence Number=SeqID_6226
ggagtaacggagtaataaaacatatacaaactattgtatgaatctattaattaaattaaataaaacgaattttactttgaatcggtaaactgaagactcgcacgcgcataccgccacgcaggtcacgcaacgatattgcatccg

SEQ ID NO: 20630 - DNA, 462 bp, Zea mays
  Coding DNA Sequence Number=SeqID_6227
ggtaacggtcgaaatctagaatacgatcggtaaacagatcaatataacaagttcataatacaataaatatcgcaaggataacacatccatatcacaagttcataatacaataaagatcacaaaggtcataagtccacaattcaaaatataataaattcgcaaagttcacaagtttataactaatacaaattttatgatgcaggccaatcttatgatgctaagagattcttactgtatcctcacccgagctcgcaattggcgcatagttcatgtgacacacgaagcatggaactcgtgctttaaaagagtagatatagataaatgaaatccatatggtttcaatcaaaccagccatattaccttttaaaaaaatgaatttgatactgtttgatagtcaaaacatcaaggacagggaaactgtcatctggtcattactatggcttcttccaaacattgtgtaaa

SEQ ID NO: 20631 - DNA, 490 bp, Zea mays
  Coding DNA Sequence Number=SeqID_6228
gtagaagtctggtagccttgctattatcaaactgacatcatataattgaccatgttttacacaatgtttggaagaagccatagtaatgaccagatgacagtttccctgtccttgatgttttgactatcaaacagtatcaaattcatttttttaaaaggtaatatggctggtttgattgaaaccatatggatttcatttatctatatctactcttttaaagcacgagttccatgcttcgtgtgtcacatgaactatgcgccaattgcgagctcgggtgaggatacagtaagaatctcttagcatcataagattggcctgcatcataaaatttgtattagttataaacttgtgaactttgcgaatttattatattttgaattgtggacttatgacctttgtgatctttattgtattatgaacttgtgatatggatgtgttatccttgcgatatttattgtattatgaacttgttatattgatctgtttaccg

SEQ ID NO: 20632 - DNA, 474 bp, Zea mays
  Coding DNA Sequence Number=SeqID_6229
gtttctgtcacaaatcgccactaaaaccctagccttccgccatggccacctcccctgccgcctcgtcctcctccgctccgaccgcctccgcggtggctgcggctacgatggctgttgaggccaccgacgggccggtgctcagcgtagtatcgaagcgtctccgcgcactgcggaagaagtacaaccgaatcacgcagatggaggagtcgctcgccgccggcaagacgctcaaccgagagcaggaggaggttctccgctccaagcccgtcgtcgccgctctgatcgacgagctcgagcgcctccgccctccgctcgcctcagctctcgcggaggagctctccccccggctctgcccccgccccggctcccgcccccgccgccaccgattcctcctccgacccaaattcgtcaggcccaggaccctcctcgcggctcggactacttttggctcccctctttcgaatgtcaaaggaa

SEQ ID NO: 20633 - DNA, 484 bp, Zea mays
  Coding DNA Sequence Number=SeqID_6230
tatccgggctcggacagagacccgactgtcgccggatagccgatgatggggtcaggccggggtgtgctcattggtcttaccgtactggtcgaggtaccgcaagaactccagcacgtgcgcaccgttgcatcgcgccatgtacaacgacggccggtggttcctcaggtactgcccgaacgtgttccagtagcgccgcttctgcgaatcgtaccggctcggcgacgccagcgcagacgccgcgcccgcggatgacgcccccggcgacagcgccccggacgccgagccgccgccgccgccgctgttgtcggagtgcgggctgtccgggtgcggcaccaggtccatctcgcttcacttcacttcacttctcggtcgagaggcgagagctagctagcctccggccggccggacagccagcatgcggcaccaggctcgccgcctccaagatcgccggaaagatcccttgctcactcacggcaacagcatg

SEQ ID NO: 20634 - DNA, 209 bp, Zea mays
  Coding DNA Sequence Number=SeqID_6231
gtgctcaagcactaactagcttccacgtccatcaacagacaacagttgcttccgctcatcccaaacaaaaaagaaaacaactgttttaaatccggcggaataattgagatgtatacagtataccgcgacatgttgggtttgttaattgtttatcctgttgattcatccgctatagtctcacatcagcgtagtatcactatcacactatg

SEQ ID NO: 20635 - DNA, 472 bp, Zea mays
  misc_feature (316)..(316): n is a, c, g, or t
  misc_feature (340)..(340): n is a, c, g, or t
  misc_feature (343)..(344): n is a, c, g, or t
  misc_feature (357)..(357): n is a, c, g, or t
  Coding DNA Sequence Number=SeqID_6232
caagcgacccaagcctaggccaggccccacccccgcccccgcccctatccaatccgatggagggcggcgactcgtccggcgccggcgccggcggcgccgtggccgcggcggccaagtggcggagcgacgcgtcgcgggcgttccagtactacctggaccgctcgacgcctcacgctacggggcggtggctcggcacgttcgccgccgcggcaatctacgcgctgcgggtctacatggtgcagggcttctacatcgtcacctacgggcttgggatctacctccttcacctcctcatcggtttcctctcccccatggntcgacccgagctcgacccctccgncgnncgcgaggggccgncgctgccaacccgggggtctgacgaggtcaagcccttcatcaggggtttccccgagttcaaggtctgggatggaatcccaaaagttttggtggagcttttggggaggacttcctc

SEQ ID NO: 20636 - DNA, 417 bp, Zea mays
  Coding DNA Sequence Number=SeqID_6233
acttgtgatcaggataccggcaccaagttctgttccaaaactgagttcttagctgaaaagcagtcacatctttcaggcgaaccccccattgctgttcatgttgacaagggtgtctatgattatgtcaaagacgatgatggtgatagtttggaagaaaatgctgcctggatgctctgttctttatcagataataaatgtgctggatcaccaaggaagggaactgataggttgtcaaagagatctttttctcagatttcaaaccattttaagaattcatatggaaaaatcaaggatatatgcagtcctgctaggttgctgcggaagcgtgatggcaaagttccgttcttgaagcgtcgtcagcgtcggcatttttatgaagtcagccctagcgatgtggatccattctgcattgttaaa

SEQ ID NO: 20637 - DNA, 349 bp, Zea mays
  misc_feature (262)..(265): n is a, c, g, or t
  misc_feature (274)..(278): n is a, c, g, or t
  misc_feature (308)..(311): n is a, c, g, or t
  misc_feature (315)..(319): n is a, c, g, or t
  Coding DNA Sequence Number=SeqID_6234
gcaaaagaagctgtatgaggattgtctactcgaataaggtgataaatactaaagtatgcttgcacagcgcttcaggtacatctgccccctacacgcgtgctagggtgaaaaggcgtgcacataatatcgaatgtcgtgctcacatttaatgcgagccatgcagtagttatctcttcgcaaagcgaccatcataccgaatgtctggttgtcccccgaccagggttgggaccgtgacagcaatttgtgttacctgatttctgtnnnnttaacgccnnnnnatacgttgttcaggtttgcatatggatatnnnntggnnnnnaatgataatgcaaacctgaacaacgtatac

SEQ ID NO: 20638 - DNA, 60 bp, Zea mays
  Coding DNA Sequence Number=SeqID_6235
agcccacatgctcctgagactgctgccaggtgccaggctagtcttaggagcatgtgggct

SEQ ID NO: 20639 - DNA, 581 bp, Zea mays
  Coding DNA Sequence Number=SeqID_6236
aagagcttcgttttgagttcagtttgttgatattaaaggagaatggaggattcatacttaaatacttaacaaggattcatacttaaatttatctgatgcaatttttcaactgaacgtgaacttggcaggggtgagtacggagtagtgtacaagcgagttctgcattgagctgtcgtagagagcgtagacagacactctagccaacgttgttggctgggattggaacacaaaagcgagacaagggatgagaagcacaggaggagccaggtgaggtgaggtggcgacacacaggagtcgggcaagctcagctcatctcatctcatgctctactaaaaaggattagcccatctcaagagaaaagagtaacattgtcagcccactgcaataaccacactattaccagtcttgaaattcactttttgtttgtttgtcatagaaccagacattcatgacaggaaatgatctccttctcaagaccagaaaagagcatttaagttactaatcagtgtatggtttactagtttggcggcagcctcaaatcgggtctagaaggtaatcatggtggcgttaagtttggaatc

SEQ ID NO: 20640 - DNA, 493 bp, Zea mays
  Coding DNA Sequence Number=SeqID_6237
catcttgtgattgttttctctccgtatctaatcagatactaatccttgaccttgtaatatctatgatgggcatagaaataagcttgggactgaattaacagtctcccattatactcattcatcaacaagtttaggttatggccatgtcttgttcatttcatcgggccatgatctatttggctctctacttgtaaccattctgacaggtagagtctctttgtatattgtcatcatggctcaatctatttgtgtcgcgcgagatttcctattggttacgtctggcaatggtgttgtgactaaaactgatggtgccgcgacgagaccgagggcctcctgtggatgcactcactcggttgcgccgctcagcgggcgctggcatcacaggtgccaggcttcgtccgttatggctctgtagcggttggctatctcgtgcccttatgggtctgcccacctgggtttccccagtgctgccggttcggttgtggtctcccga

SEQ ID NO: 20641 - DNA, 545 bp, Zea mays
  Coding DNA Sequence Number=SeqID_6238
gtctgtaattcaattttgcgcatccattttattgtgtgtaatggaaataaaacaaaaataaagctaaatggatggaaaaagaaaatctgttaacactataactttagaggaccgaatttagagaacgttgctggagactgagaagatatagaggacagaatcttttagagtgtgatgtaaaagacagagaatattcctttaggggatagaatttagaggacgctgctggagacagccttaggctagacccgagctgcagccccttagctcgggccaaaaactaccgtttctatgagctgcctcggcgagcgcctgtgccaccttcagagacgctggcctcagccgcgtcgggctctaaagtccggaatctgaccggtcaccctattaggctggctccaaactctaaagggtcctctactctaaatatagaggatcaaatggttctctacgcactccagcagcgtcctctaaacggtcctctaaatttagagaacgctgctggattctctatatatagagtttctctaaacgttcctctatctata

SEQ ID NO: 20642 - DNA, 361 bp, Zea mays
  Coding DNA Sequence Number=SeqID_6239
agatatgcttggttcttccagtggcagtgttttgagttcaggaacagctccaatcacaacatcaggagcagccacatctgctcgcggggttgcagatagcatgtcaatgaagagatctgctgcaagcatgcttagtggaaagaagcctgtccaggcagcggctgctaccaagaaattctggaccgtccaaatccactgcagcaaaaaagacagatggtgggtcacagtctaaggcatcagctgctcttgagattgaagacgttgagccggcagaaatgagtttggaggaaatagaagagaggttaaagtctgttgtgaaagctgagacaatttcccagctaaagagctctgtctggaaaga

SEQ ID NO: 20643 - DNA, 464 bp, Zea mays
  Coding DNA Sequence Number=SeqID_6240
aaaatctgccccatactatcaaggtcttcataagttatagagattactcattaaacaagtcaatgaatgtttcaaagttcagactttgcatgaggtccatattgaagtagagagtgagactacaatactaagacaagtaaattgaaaagtaaattgaagagtgacaggtgtgaatgaatccaaacacctcttgatgggtggattagattttcataagattgccttttttactttaaatgatgaaaacttcgcgaaccaattaatggcaaccaacggtcaaaccgaccagttcttcagcatactagtcgataccgaccagtattgtactggcactgcagcaccatgctactgcacaccgaggtcgaaaccaaacctaggcgcggcgaggaccggaacgcctgccttaaggtttggaccaagagcgaacgaggagttggtgggcatctcttaactttggatctgac

SEQ ID NO: 20644 - DNA, 428 bp, Zea mays
  Coding DNA Sequence Number=SeqID_6241
ttagctgttgtcgattggctgctttgcctcatctcgttggtcagatccaaagttaagagatgcccaccaactcctcgttcgctcttggtccaaaccttaaggcaggcgttccggtcctcgccgcgcctaggtttggtttcgacctcggtgtgcagtagcatggtgctgcagtgccagtacaatactggtcggtatcgactagtatgctgaagaactggtcggtttgaccgttggttgccattaattggttcgcgaagttttcatcatttaaagtaaaaaaggcaatcttatgaaaatctaatccacccatcaagaggtgtttggattcattcacacctgtcactcttcaatttacttttcaatttacttgtcttagtattgtagtctcactctctacttcaatatggacctcatgcaaagtctgaact

SEQ ID NO: 20645 - DNA, 437 bp, Zea mays
  Coding DNA Sequence Number=SeqID_6242
agcgtgcctcgattctgtgagtaacatcaagagccttaggtgagtcgaagtacggccttgggaaaagcacctgggttgaaaacctacatgctatgtagcttcggactgcttgagtataggcggactactcaagcaaaagtaggtggtctgcaagactagactattgactaacatttggcagatgaacgtatcttaaagttagccgagcataccctgacttgtgtgccattcactcaatcgtttcacgtaatctcgttcgataccgtggatctgtgcatcgcgagtacagcgatggcttcactgtatcactctgagtctgacctggctcgtccatgcagctcctgtggataggtctggtcatgacatggcgaaggtcagcagctggatatgaagccattctggcccttgtcgcacacacggcaggactacttgagctc

SEQ ID NO: 20646 - DNA, 437 bp, Zea mays
  Coding DNA Sequence Number=SeqID_6243
gagctcaagtagtcctgccgtgtgtgcgacaagggccagaatggcttcatatccagctgctgaccttcgccatgtcatgaccagacctatccacaggagctgcatggacgagccaggtcagactcagagtgatacagtgaagccatcgctgtactcgcgatgcacagatccacggtatcgaacgagattacgtgaaacgattgagtgaatggcacacaagtcagggtatgctcggctaactttaagatacgttcatctgccaaatgttagtcaatagtctagtcttgcagaccacctacttttgcttgagtagtccgcctatactcaagcagtccgaagctacatagcatgtaggttttcaacccaggtgcttttcccaaggccgtacttcgactcacctaaggctcttgatgttactcacagaatcgaggcacgct

SEQ ID NO: 20647 - DNA, 483 bp, Zea mays
  Coding DNA Sequence Number=SeqID_6244
aaggatatgcccagctacatgcagcctcctcaggctggttcccttgcacagtttctacaaaccttcaaaacccagcctccatctctgccaccaatgtcgacgctgaattcttcaagcgtggaggagccacctcttcctactgttgcgttaaggagtgtatctgatggtagtgcctcgggggcgaccaagactcctggcacaccttctgatgctccaacggctacagtaaatgctggcatgctacttgtgatggttttcacagctttgctaatctgagaagccacatgagattgtatagtagacgactgaagctaatctgatctcccttggattaggtaagctttgactagtgatctggtactacccacacttggtttctttttccacctttcaaatttgcagtagaaaatgttaagatttccatttaagggtttgggggttaccccggtgtaattacccgcttacccctgtgtaatagggcaa

SEQ ID NO: 20648 - DNA, 466 bp, Zea mays
  Coding DNA Sequence Number=SeqID_6245
tatccactattctctaggaagcaagggaatcacatcgccatggcagccaagatgtttgcattgtttgcgctcctagctctttgtgcaaccgccactagtgctacccatatcccagggcacttgtcaccactactgatgccattggctaccatgaacccatggatgcagtactgcatgaagcaacagggggttgccaacttgctagcgtggccgaccctgatgctgcagcaactgttggcctcaccgcttcagccgtgccagatgccaatgatgattgccaggtatgatgccaccgatgacaatggatgccgatgccgaatatgattgccatccgatggatggtgcccgactatgatgtcaccaattaatgatggatggccgagtatgatggcccttcgacgatgaccgcccgagtatgatgccaccggataatgattgccaagtatgttacccaccggatgatgat

SEQ ID NO: 20649 - DNA, 592 bp, Zea mays
  misc_feature (82)..(90): n is a, c, g, or t
  misc_feature (93)..(95): n is a, c, g, or t
  misc_feature (101)..(103): n is a, c, g, or t
  misc_feature (110)..(116): n is a, c, g, or t
  misc_feature (125)..(125): n is a, c, g, or t
  misc_feature (190)..(190): n is a, c, g, or t
  Coding DNA Sequence Number=SeqID_6246
ttcctcgctgcgtattccatcgggatgttcttcgccggacacatcggggaccgcatagatctaaggatctttctgacgatcnnnnnnnnncgnnnctgccnnnttcacgnnnnnnntcggcgctngcgacctgctgaacgtgagcttctcctcctccatggacgaaccgtagatcgcttctagctgcgcnccggctgtggtctcctggtgacatggaatggtggcgggagagtagatcacctgtgattttaggcctggtgggactgtggcagcaggtgcgcagtgcgcttctgtcccggaactgtgggatcttgctcctgccgtgccgtgcttcaccgcttctggttcgtcatggtatatactagtaaattgctcgcgccccggcgcgagtctttgatagatgtgtttgtacagttaaaatagcattgctttacacatataggaccatcaatatatatggatatatacacataagagtggcagaattatctgtacagaaatttgtttgtagtagtagaataattcggtctgcaaatgtaacaacaatagtctattgcgcgtcctcgcgtcctcgtgcctgggcgaatcacat

SEQ ID NO: 20650 - DNA, 211 bp, Zea mays
  Coding DNA Sequence Number=SeqID_6247
tatactagtctcttcagttactctagatatcttccagctttgctcctgcgttcaggaaaagattggccaatgcctagttgccaatattcaccatggctacctcattatacctcggaccctgcggtctcagcttctcaatcaggctgcgcatctcagagaggtcatcatctgttagatcaacatcgcgtgaagcccagttctcctcaaggcg

SEQ ID NO: 20651 - DNA, 188 bp, Zea mays
  Coding DNA Sequence Number=SeqID_6248
aagccctcgcgccttgaggagaactgggcttcacgcgatgttgatctaacagatgatgacctctctgagatgcgcagcctgattgagaagctgagaccgcagggtccgaggtataatgaggtagccatggtgaatattggcaactaggcattggccaatcttttcctgaacgcaggagcaaagctgga

SEQ ID NO: 20652 - DNA, 214 bp, Zea mays
  Coding DNA Sequence Number=SeqID_6249
aggagtagccgctatcgcctccgcacttctcggtgagatgctcacaagcctgcttcagcacccattgaagcatgcggccccagctcctcagcctgtccatgggcaggatctcgagcgcgatcctccttcacacccgcttggcctcgtccctcaccagatcagaggctacgtatcgacattcaacaacattgtgattcgcgggcaatcctatgat

SEQ ID NO: 20653 - DNA, 220 bp, Zea mays
  Coding DNA Sequence Number=SeqID_6250
acgcgtccaggatcttgggactgcacgccctgcagctatcataggattgcccgcgaatcacaatgttgttgaatgtcgatacgtagcctctgatctggtgagggacgaggccaagcgggtgtgaaggaggatcgcgctcgagatcctgcccatggacaggctgaggagctggggccgcatgcttcaatgggtgctgaagcaggcttgtgagcatctcacc

SEQ ID NO: 20654 - DNA, 147 bp, Zea mays
  Coding DNA Sequence Number=SeqID_6251
ttctgatcctgggtgagtctgcctattatacttccgcaattgttcgtgcttataccctggatgcacgtattttttttcacgggcttgttgaacatgatgctcgaagagtgcactaaacatgccatgcacgtattttttttcacgggc

SEQ ID NO: 20655 - DNA, 198 bp, Zea mays
  Coding DNA Sequence Number=SeqID_6252
tgaagcggcatgtttagtgcactcttcgagcattcatgttcaacaagcccgtgaaaaaaaatacgtgcatggcatgtttagtgcactcttcgagcatcatgttcaacaagcccgtgaaaaaaaatacgtgcatccagggtataagcacgaacaattgcggaagtataataggcagactcacccaggatcagaaatcag

SEQ ID NO: 20656 - DNA, 184 bp, Zea mays
  Coding DNA Sequence Number=SeqID_6253
atcacccgcgatgcaggtgcatgctggtgcgcatttctcgtaagcaccaactagcgtttggagacccctcatccctgcttcggcttttccttctccccgggcgaagcttctttctccgaagggtcttccgtttcattctcctcttcctcgacgccttcttctaggtccatctgaagctcctcgg

SEQ ID NO: 20657 - DNA, 176 bp, Zea mays
  Coding DNA Sequence Number=SeqID_6254
ccgggcacacatcacggaggccgaggagcttcagatggacctagaagaaggcgtcgaggaagaggagaatgaaacggaagacccttcggagaaagaagcttcgcccggggagaaggaaaagccgaagcagggatgaggggtctccaaacgctagttggtgcttacgagaaatgcgc

SEQ ID NO: 20658 - DNA, 259 bp, Zea mays
  Coding DNA Sequence Number=SeqID_6255
gtggtcgcggcgagactttaaacgaatacagtagcttctgccagtggtagtaaaatatagtgtcagtttaaattaatatatgtcataacataccaaattacaaagaaattaaggtaacttgttgtcgcactatctagtcagattttttgttctttagcttaattggcatgttatacttacaaactgtaacaaatacaactcgtccatagcatatatatgaatatataactaaaacctcaacttcaaaattttctattgg

SEQ ID NO: 20659 - DNA, 555 bp, Zea mays
  misc_feature (143)..(143): n is a, c, g, or t
  Coding DNA Sequence Number=SeqID_6256
tttacagtcgggataccccttccatccctagaaataccaaagtcatttgagaatttatttcagtgttattccgatatgcagagtggaggaatagcatagtccccagcccccagagtaggaaagcaaaacatttatgagcttgnctcgcttggtttcctccttcttccgctgcagcagtagaagtgaggcagcttcactcggccgcagcacctgcagcgaataatgaccggcacagacttcaaggctttgggtccattcctcaaacccttcttgtacttggagacttcttcttagggacggccatgagctccatggctggcccggcggcggcgccgaggccggggaccacgagcgactgcgcctcggtgagagggccggggggaggaggcggtatgaggggaagtccggaaggcaggcggggcagcgacgccgccgccgccaccgcggggagctccagccatcccgccgccgccatggatccccttcgtggttccgggttaggagctctgggagtggcgtgggaatgttgttgatctggccgtagagtttttatcg

SEQ ID NO: 20660 - DNA, 319 bp, Zea mays
  misc_feature (199)..(199): n is a, c, g, or t
  Coding DNA Sequence Number=SeqID_6257
gtactatactttaatcagtcgtttgtcttttcattattccaatctttattttaatagttttcatttccagtttttttcagttctaattacaagatgatcatgatgcatatgttcctctgttttttacatactacaacgatgtctgtccaattatcaagaagtgctcaactcggaggtatggcatgcgtgcgccggcccnacccgctcatctgcatttgttgtaccgaaatgttgcccaagaagtaaatggtatttggttttataaccaacattactgtgaagctgtcgcaagcttttttggaagctggctaaatcttct

SEQ ID NO: 20661 - DNA, 238 bp, Zea mays
  misc_feature (125)..(125): n is a, c, g, or t
  misc_feature (139)..(139): n is a, c, g, or t
  misc_feature (166)..(166): n is a, c, g, or t
  misc_feature (181)..(181): n is a, c, g, or t
  Coding DNA Sequence Number=SeqID_6258
gaagctactcccgaagagtcgctctcctgcgtccacgcctcgcttgcggcgactagggcgactgccgccgccgcccttcgcccagctgccaggtcttcgtcgggcgctttaccggtgaagagcgnccaccataccaggncccgcacctttaacaagttccagtcgngggggcgaggcctantcttcttccggcgccggcgcggcgcgaaaatcttctgggatcgcgtcgccgaatttc

SEQ ID NO: 20662 - DNA, 306 bp, Zea mays
  Coding DNA Sequence Number=SeqID_6259
tgcaatcggcaagacacatgtggagtgtttgtgacaagaatgacaaacagtgcagtgtccaaagatttacaaagagctcaatcaatcatgcatgattaattgacgtataaaggttcacaagttattatcctctactgggtgggagatctatataaccaattatgaaagttatgaaatgttaagttccaagcaaaatagcaagatctaagagaaactattcatctagccgaagtctgtgcatacaagtagatatgatagcaactgttttggagatcgccaggtgcagtgtccggtgtggtgccctag

SEQ ID NO: 20663 - DNA, 292 bp, Zea mays
  Coding DNA Sequence Number=SeqID_6260
aagcagagccgtagctagggcaccacaccggacactgcacctggcgatctccaaaacagttgctatcatatctacttgtatgcacagacttcggctagatgaatagtttctcttagatcttgctattttgcttggaacttaacatttcataactttcataattggttatatagatctcccacccagtagaggataataacttgtgaacctttatacgtcaattaatcatgcatgattgattgagctctttgtaaatctttggacactgcactgtttgtcattcttgtcacaa

SEQ ID NO: 20664 - DNA, 238 bp, Zea mays
  Coding DNA Sequence Number=SeqID_6261
acgcacctcctcgacatgtgatgagccgcgccgctggaggaaaaaggagagaacgcgcgcgccgccggttgtcaattgtaatgtaacgagagaggtttagaggacaatcccaagctgtcaaatactagcgtcgtccgcgtttgtaatgatgcacgcatgcacacccacgtactgggcagtgagcatccatgcaggcggccgcaaaagttgcatgcagcagcctgtaaatttccaagaa

SEQ ID NO: 20665 - DNA, 202 bp, Zea mays
  Coding DNA Sequence Number=SeqID_6262
caatgcaattccctgcatcctattcctgctagcctagctactacctcccatgcagcatggtgacggtgagatcgcaggcggagtaggactcatcgaccttgtcgggcacccccccgtccttgtccgacgacgacgtgcactgcagcgtgaacgtgggcggcttgggcatcggcagcacggagctgtcgctgccgagcgccat

SEQ ID NO: 20666 - DNA, 194 bp, Zea mays
  Coding DNA Sequence Number=SeqID_6263
ggacatcccctacgtcgtcatggcgctcggcagcgacagctccgtgctgccgatgcccaagccgcccacgttcacgctgcagtgcacgtcgtcgtcggacaaggacgggggggtgcccgacaaggtcgatgagtcctactccgcctgcgatctcaccgtcaccatgctgcatgggaggtagtagctaggctagc

SEQ ID NO: 20667 - DNA, 573 bp, Zea mays
  Coding DNA Sequence Number=SeqID_6264
caaacactggtttgtcacgccaaatgtcatgaaatggcatgttggggtgctaacccagaatgcacttccatacaaacaatgacccccacacaacactgtgtggtcattcactctatcagtacctcggcggtacttgacaatgacaaccctttcgatagattaggtcgtcactgccaagtcgcggccttccaaggtccgcagccattcgactgttcgacgtctggatgagagaccataggtcacgataggaaatcctactgatgctgacattcatcagggaagggcctatcagacctacagaaactttccagcgtcaggtcgaactcgcccagtcgaggaatatcttgtactccccggggttggctctcactgatatgaggaaagttgctgtaaagtgattaactttacggacaactcacgcacgttgccgattcgatatccccctataaacccgggggcccggatcggtgcgtacctgggccgcctccccgccactcctatactctttcgagtagaggaataaatgatcagagacgcaggaagaggtatcagccccttccgagtagcgtatta

SEQ ID NO: 20668 - DNA, 590 bp, Zea mays
  Coding DNA Sequence Number=SeqID_6265
tatggtctctcatccagacgtcgaacagtcgaatggctgcggaccttggaaggccgcgacttggcagtgacgacctaatctatcgaaagggttgtcattgtcaagtaccgccgaggtactgatagagtgaatgaccacacagtgttgtgtgggggtcattgtttgtatggaagtgcattctgggttagcaccccaacatgccatttcatgacatttggcgtgacaaaccagtgtttgaaaatccataactccactaactgttgagcacgctaaaactcaacaccgtttgataacattggttacgttttcaaatggatttgtgtagcgcaggcgtaaaagacgtctgggttatccaaaggtcagtgtagtatttctattgaggctatctaagagactgaacatctatgatcggtaccctggttaacccaggagatacagtagtatagatccctgtgctctttatgccgttcaatgtgatccctattaaatccagggacggtgtaatcattaggtttctgtatctctttggtttaatcagtgttatctgattgccaatcgatctttagataacccttcttgatttccgtttg

SEQ ID NO: 20669 - DNA, 413 bp, Zea mays
  misc_feature (368)..(368): n is a, c, g, or t
  Coding DNA Sequence Number=SeqID_6266
gcttcaaatccatgctgcttgtcccgtgtgcgctcgctcttcgtccatcgggtttcgggcgtgctcgcgtttggctgctctagaaggaacccgtcatccccttatgaaccacacctcgccagctcgctccagacacgatctcgttgtcgttccgtgcgtcgtcaagaaattccaagcgtcgggtgaagacgaagctagccgcgtggtgttcaccaagtgcacgacaaaaagctcgaacatcctgcgcgactcaagttcgattcgtcaaaattatttagtcgaggagaagatcttcatcaattgattatcgaagaaaagaaggcccctggatgacgtcaaccggataccgtcatcgtgcttccgactancgcgtcaaagtagtcagggtacattaattaatcgtgtaatgcgga

SEQ ID NO: 20670 - DNA, 579 bp, Zea mays
  Coding DNA Sequence Number=SeqID_6267
ccaagttatacgtcgcgagctgcgccctcctcctaatcggtaaaattcgccattccgcctgccttcgtgcatatatatatatatatatatatatatatatatatatatatatgatcgaattactcatagagatagatcagctaatgagcggagaaagcacgctgtgtgtgaccgcaggcgtggtgctgctggggcagcagggtatagatggcgccgtcgctgcctgcccccagttctgcctcgacgtggactacgtgacctgcccgtcctccggctccgagaaactcccggcgagctgcaactgctgcatgacgcccaaaggctgcacgctccatctctccgatggcacgcagcagacctgcagctagctctgaaccaaagtgtgcgtgattcgatctgcgaataaagctttggcgcgtgtatatggctatccgaataaatgtgtgatcgtctatatagaaaagtgaaaaactagtcctttcccttttttttacagattgttgtgcagtgcatatttacctcctttagaatccggcctctatagcacagcccagagtttaccggagctcccaaaggcat

SEQ ID NO: 20671 - DNA, 400 bp, Zea mays
  misc_feature (42)..(42): n is a, c, g, or t
  misc_feature (63)..(63): n is a, c, g, or t
  misc_feature (77)..(77): n is a, c, g, or t
  misc_feature (94)..(94): n is a, c, g, or t
  misc_feature (182)..(182): n is a, c, g, or t
  misc_feature (282)..(282): n is a, c, g, or t
  misc_feature (284)..(284): n is a, c, g, or t
  misc_feature (286)..(286): n is a, c, g, or t
  misc_feature (300)..(301): n is a, c, g, or t
  misc_feature (314)..(314): n is a, c, g, or t
  misc_feature (317)..(317): n is a, c, g, or t
  misc_feature (364)..(364): n is a, c, g, or t
  misc_feature (366)..(366): n is a, c, g, or t
  misc_feature (374)..(374): n is a, c, g, or t
  Coding DNA Sequence Number=SeqID_6268
cccctgccgggtgtattactgggagaggttgagccaaagtcnaatgagcaacatgctaagggncgtgagcaatctantgagtccacttcagaanaagagactgaactacatgacgattttcaaacttctgcaactgaacatcaactagaagttaaattagatgggggagggaaagagagtgntgacaaagataaagagaagggaaaggatggagaaaaggaaaaaggaagagccctgggccggtggcaagtctggataacatcttgcagaggctaccgggangngnccggtcgtgatctnnttgatcagttganggntgagttttgctaccctaaattctaaaaggaaatcgaaagaaacttgngnggggcttnttcaatggtaaaaaggacctcccctg

SEQ ID NO: 20672 - DNA, 377 bp, Zea mays
  Coding DNA Sequence Number=SeqID_6269
atactctccactagtccttgttgaagcacccgcgaagaagtgtcacacccccttggcctgtgcaaggaccatgtgctttctatgagctagttcttcgtctcttcaacatggtgaaccgctcacaaccgtatacaaacttaagttagatcacccataagctctctagatgatcgttgcactcctgattgctatcgaaccatctagatgacgccaatcatcaagagtaacgagcacaaacttctcacttaaccttatcaaggctaataagaataatgggcccgcactagctactctcaatgtgttaatgaggctgctaatcaagtgattatcaactatcaagtctcactaggcaaagtctcttgctcacactcaaatag

SEQ ID NO: 20673 - DNA, 428 bp, Zea mays
  Coding DNA Sequence Number=SeqID_6270
gaggtacgcgggattctaacagctaaagaaacctatttgagtgtgagcaagagactttgcctagtgagacttgatagttgataatcacttgattagcagcctcattaacacattgagagtagctagtgcgggcccattattcttattagccttgataaggttaagtgagaagtttgtgctcgttactcttgatgattggcgtcatctagatggttcgatagcaatcaggagtgcaacgatcatctagagagcttatgggtgatctaacttaagtttgtatacggttgtgagcggttcaccatgttgaagagacgaagaactagctcatagaaagcacatggtccttgcacaggccaagggggtgtgacacttcttcgcgggtgcttcaacaaggactagtggagagtatcgactctttgatatcttat

SEQ ID NO: 20674 - DNA, 295 bp, Zea mays
  Coding DNA Sequence Number=SeqID_6271
ggcggctgatgtatatacactactattttgttgtcgaacctagaccacctggactatatattgctgaagaagaatgtgtgttccaggatgctgatactacgtttaaggggcaataattggagtgctgagtgatgacatagtagactcttatataacatgcgccactggaaaagagatgtgagatatattggattccaaatatggactatgtgacaccgataggtgagttgtatatcatggagcagttccatgactacaaaatgtcatatggtctttccacagtagaataagctca

SEQ ID NO: 20675 - DNA, 286 bp, Zea mays
  Coding DNA Sequence Number=SeqID_6272
ggccgaggtacatgtatctcatgagcttattctactgtggaaagaccatatgacattttgtagtcatggaactgctccatgatatacaactcacctatcggtgtcacatagtccatatttggaatccaatatatctcacatctcttttccagtggcgcatgttatataagagtctactatgtcatcactcagcactccaattattgccccttaaacgtagtatcagcatcctggaacacacattcttcttcagcaatatatagtccaggtggtctaggttcgacaa

SEQ ID NO: 20676 - DNA, 548 bp, Zea mays
  Coding DNA Sequence Number=SeqID_6273
gagtcctctctcgaccagtttgtaatccatcccttttaaagactcagtgcagggtacacaaatcactcaactggacgtaaggacattctgtccgaaccagtataaaatcattgtgtcttccttgcacaccattcgcaccagacgcgtaaagcacatagattactagcaagtggtttcaaaacatcgacatctggtgcatcaggtaggtgaatatttgcatcccacaacacaaattttaccacatggttgtggatggctgaaaatgtcgtcaactgggtcctgagtgctggcgtgcgctttgggggccttcgattttatcgtcaccgctatgggagttctggcgtgggtcattgcaggaaacgatgacgcctaagaggggaggggtgaattaggacttctaaaaactatctctagactaggctacaaataaattcttaggacaaaacctatataaataactcacctagattgtgcaaacaagattttgtctatgtgttgctatgactatcacaaaaggacttatgcaacctaagttccaatcctatata

SEQ ID NO: 20677 - DNA, 513 bp, Zea mays
  Coding DNA Sequence Number=SeqID_6274
taggcgtcatcgtttcctgcaatgacccacgccagaactcccatagcggtgacgataaaatcgaaggcccccaaagcgcacgccagcactcaggacccagttgacgacattttcagccatccacaaccatgtggtaaaatttgtgttgtgggatgcaaatattcacctacctgatgcaccagatgtcgatgttttgaaaccacttgctagtaatctatgtgctttacgcgtctggtgcgaatggtgtgcaaggaagacacaatgattttatactggttcggacagaatgtccttacgtccagttgagtgatttgtgtaccctgcactgagtctttaaaagggatggattacaaactggtcgagagaggactcgatgcctaagtctttggtgaactgagtggtggagctgagtggagtgctctgtttcttataagtgttggctgtatttgctaacttgttgcccctgtttttcaatcacggtcctcctcaacagggcaacaagacagcgcatat

SEQ ID NO: 20678 - DNA, 273 bp, Zea mays
  Coding DNA Sequence Number=SeqID_6275
tttgtttggtagatgtttgaattatgaaaaacactcatatggtttactttcctttttagaaaaaaatagtattttgaatgggggataagaattaaaagttacttcaaaattaaatattcatgtaaataaatgcttatggtgcatcatttaatgatatgcttaatcattaagttgaataggaaacttttctattacttgttttctaagatatctgaattttactattttatttctttatatattttttcttatacaaattttaggccttacagg

SEQ ID NO: 20679 - DNA, 370 bp, Zea mays
  Coding DNA Sequence Number=SeqID_6276
tcaacaatacgacagacacagactttggaatacggtgcggtggctggctttgggcgtgcagcaggtgtcggctagccgctttgggcgtgcggcgacacagcggcaccgacgcaccgtggtgggctggtggcactgcggcaggccggcagctgggcgctggcactgcggtctgcggcagctgggtgctggcactgcggtctgcggcagccgggcgccgacaggagcagccgagccctccggtcctccggtcctctgcgtctcctccggttctccctgcggcggtttcagatcagttaggaaatactgattgtgatccgtgacgatgtcaaacagtggaggcaagggatgtcgtccccgtgccaaatccatg

SEQ ID NO: 20680 - DNA, 508 bp, Zea mays
  Coding DNA Sequence Number=SeqID_6277
gagagaggtccggtgtccaatttatagagaatagggagggagaggaaaggtcgagtcttcatggatgttgatggcgttcatggaggagagggagtaatgggggagggagaggaacggacgcattgaagttccaataacgcacggacggcgcggggttcgtcggttggccttcggtccttggcagggtgtcttggcgcggacgtcggggaagctgcaggggcacggtgtcccgggcgtcgcggctgcgcaggcgtggggagctgcgcgcggggtggcacgcggtcctggcggctggagcgggcgggtcgcggggagtctcgatgtcgggtgcgcgcggggtcgatcggtgcggggcggcgagcgtccgctctgggcatggcgctgggcgtcggggcttggtgcttcgggcggccttggcgagttcctggcagctcaagtcgctcggctccgcgggcggggcgctcggtgtaggtggcgcggggcagggcgcggctgctactcgcgtgca

SEQ ID NO: 20681 - DNA, 600 bp, Zea mays
  Coding DNA Sequence Number=SeqID_6278
tgtgactggaggtccctgctccttccccgtcgccggcgaagacgaacacaagtcactgcgtccccttcgatggatccctgcccagaacgctgtccgccgcagtgaaaccgacccagtctctagtccgttgtctcctttgccgtggacgccaagacccggaggtagaagataattgatttctgttttggtccctaaattttgtaaatatggcgctcaccgaccgccgtcgacgcaactgcgcagcaccccggctggaccatacatcacttcgccgtgctcggaccgcccgtggaactcgccggaccgtccccctgccccttgccctcgccacgttcgtgccctgcttgccgaagcgatgccccctgtcgtgccaacccttcgcctagacgcgcgcccaagccccgtccgccgttcgtcgtaaggttgaaggcaacccaaatattttattaactccaaaatcccagtttgaattaattcatgaatttggtaattacttgtgttttggaatattgtgatttggaattcatatgtgtaaatgattgattttaagtatatgtgcgatgaattagtgaattgtagtagccatgatattggtttacg

SEQ ID NO: 20682 - DNA, 398 bp, Zea mays
  Coding DNA Sequence Number=SeqID_6279
tggcgaacgcatcctgcgtgtgtaagtacgacaatccccccgttttcctttccccctgaacagaatcccaaccggagcgaccatgaaagttttctacgacaaagactgtgatctgagcctcatcaagggcaagaccgtggccatcatcggctatggcagccaaggccacgcccatgcccaaaacctcaacgacagcggcgtgaaggtcgtggtcggcctgcgcaagggcggcgcttcgtgggacaaggtcggcaaggccggcctgacggtcaaggaagtgaacgacgccgtgaaggaagccgacgtcgtcatgatcctgctgcccgacgagcagatcgccgaggtctacaagaacaacgtcgagccccacatcaagcagggcgcctcgctggccttcg

SEQ ID NO: 20683 - DNA, 564 bp, Zea mays
  Coding DNA Sequence Number=SeqID_6280
gccgagccgagcttattcaggtatcgagccgcaccgtttccagtcctaggtggcaaggcctcttaataaaaataaatcgatttccataacgtctcgtttggattttggatttaaattttattctaataatagtaatttatgcacctatcaattaagctaaatatattactttattaagtaattttaattcctctaaaataaatggatgtaaaataaatcgattttattggcggttcttaattacctactgctctatacatgtaccgtttatgctgaaatttaagtatatagctacaatatcctaataatattttaatttcttcctaatatgtaatcaagaatcaagaaaccgaatcccattaacatttacctggaaatgcatctgactaattgattgcatttaatggatggctaaatcagacatcagcatttgatttgaatccaattgtagacactactagacagcaagacgggcggatattgatacgattaattcctgcttggatgcatacactatccatgtgtttggttgcctgtatttactggtgcttgcatcacgggatg

SEQ ID NO: 20684 - DNA, 594 bp, Zea mays
  Coding DNA Sequence Number=SeqID_6281
attaatcgtatcaatatccgcccgtcttgctgtctagtagtgtctacaattggattcaaatcaaatgctgatgtctgatttagccatccattaaatgcaatcaattagtcagatgcatttccaggtaaatgttaatgggattcggtttcttgattcttgattacatattaggaagaaattaaaatattattaggatattgtagctatatacttaaatttcagcataaacggtacatgtatagagcagtaggtaattaagaaccgccaataaaatcgatttattttacatccatttattttagaggaattaaaattacttaataaagtaatatatttagcttaattgataggtgcataaattactattattagaataaaatttaaatccaaaatccaaacgagacgttatggaaatcgatttatttttattaagaggccttgccacctaggactggaaacggtgcggctcgatacctgaataagctcggctcggctcgtccaatccacgagctggcgagagaggctcggctcgaccttggctcgcgagctgaaacgagccagctcggctcgcctcgctgcaacaacgagcttgaa

SEQ ID NO: 20685 - DNA, 379 bp, Zea mays
  Coding DNA Sequence Number=SeqID_6282
gtgtacatcaggctggcacatgatcgagcagacgggagagcagtacacgcgtgcgcttagctgtccagttcagaagtagcatacacgtacgtacgcacgtacatatatagctagaaacaaacgtcgagagacagtacatatgcaggcagacagtttggtgtggatcactactactgtactgacgaacaaaagctatctgaaacgagaacaagcaaagctcccctgcgttcagcatatcaatctatctacctatcaatcaatcaggagttacgtcacatggctgtgtcaagaagcgtccagagtcccagttcagctcgttatatttggcaaaagattcgtgcgtgtactgcatatatgcgcgcgtagtagggacaagaac

SEQ ID NO: 20686 - DNA, 314 bp, Zea mays
  Coding DNA Sequence Number=SeqID_6283
gttcgacatgaacttggactgagcaaagaacaaaaacagcaaagaacaaaacaaaacagcaagtcttggtctcttgacagcaacacgtcttggagacttggactgttggctgttgctgttagacagcacagcaccacatggcgtgcagcactgcagcgtgtgcactaggcactggcgggcactggcgggcttgctgcttggagtgcttgctgtcacaatgttacatcatctttgaataccgagtctttgaaaaccgagtacaagtatttgaagcctctatgagtgtcttgcccagtgcaccgtatctatggatt

SEQ ID NO: 20687 - DNA, 560 bp, Zea mays
  Coding DNA Sequence Number=SeqID_6284
actgtttcgacaacgtagggctcaataccctcttcattaatatgcaggaaagaaattaacaacaattaacttggcattgactattggtgtgagttcaagagtatctaatgagaagacatttacaatatattttgaaggaaccatacgaataatgtgtgtgacatgcccaccggatcaacggttctggccctctccccctaccgacgacaccaggcgatggcgccccgagtccacgacagcgggttcgtcggagatggccgagttggcgccccgacccataatcccggttgccagtgtgtgtaatatgaagagtaggccatggcgaaatggggacacacacccttaccggttgttaaggcgatggcggggttctcctcagggaggtgcagatccatgggggtgcttactctaatgagcaattcatcgagcaccagtgtggctccacacccgcgtagtccccgagcacaatcctgtaagtgcggtgatgctcccgaccccgtcggtgaatccctattgacggcgtaggcacgcgaccatgatgacgtccaggttttctccgc

SEQ ID NO: 20688 - DNA, 598 bp, Zea mays
  Coding DNA Sequence Number=SeqID_6285
aaacctggacgtcatcatggtcgcgtgcctacgccgtcaatagggattcaccgacggggtcgggagcatcaccgcacttacaggattgtgctcggggactacgcgggtgtggagccacactggtgctcgatgaattgctcattagagtaagcacccccatggatctgcacctccctgaggagaaccccgccatcgccttaacaaccggtaagggtgtgtgtccccatttcgccatggcctactcttcatattacacacactggcaaccgggattatgggtcggggcgccaactcggccatctccgacgaacccgctgtcgtggactcggggcgccatcgcctggtgtcgtcggtagggggagagggccagaaccgttgatccggtgggcatgtcacacacattattcgtatggttccttcaaaatatattgtaaatgtcttctcattagatactcttgaactcacaccaatagtcaatgccaagttaattgttgttaatttctttcctgcatattaatgaagagggtattgagccctacgttgtcgaaacagtgtcaatatgcgaagaaaccagaatcaagttttcctcagcttctgg

SEQ ID NO: 20689 - DNA, 463 bp, Zea mays
  Coding DNA Sequence Number=SeqID_6286
ataaccgcgccggtgaaatctccagccagatagccgccgaactcagcggccagtccctggacaacagcggcggcaagctactggccgggaccaccctgcaattgactgtggcccaggtgatcaaccaggccaaggggctggtgttcgcccaggaggcgcggtttaccggtacgcgcctggacaacgcccaaggcacctttgccggccagcgtgcgctggcaattcaactggcagcggggttggacaacacccagggcaagctcagcagcgaaggcaccctgacgctgggcagccaacgtatcgacaacaccggcggcagtatttccagcgccggtacactgggcatcaccagcgccagtgatttgctcaaccagggcggtatcgttgaaaccgcccaaggcctcacgctgactagcacccgccttgacaacagtcagcagggcctgctcaaaagccagggcgc

SEQ ID NO: 20690 - DNA, 558 bp, Zea mays
  Coding DNA Sequence Number=SeqID_6287
tgacggacccgaataaactcgcattcgccggcccattggcgggcgttgccggcaagaacaccggcaccggcacgttcacgccgccgcagttgacggtgccgctggatattcatggcggtgccgataccgcccaattgcgcaccgggatcgaaaactcgatgccggtgaaaatggtgttcggcgataaggccgcggacggcacacagccgtacaccgtcaccgacgcccaaggcttcaagatcggcaccggcagcatcattccgggccagggcaacaagatcaccatcaatgtgccgatgcgcgacgccaccggcgccgtgatcaccggcaagagcttcagttttgacaccaccgttggcggctcgccggccaataacgacagcaccaccttctccttcaacagtggcgccacctccgacggccgcaacgcccagtcgctgctggcgctgcaaaccaaggcaactgtcggtgtgacggacggcaacgggggcgtgagcctggtcagtgccaacagccgcctggtgtcccaagtgggttccaaggctgcccaggccaata

SEQ ID NO: 20691 - DNA, 467 bp, Zea mays
  Coding DNA Sequence Number=SeqID_6288
aaggcaagtccaagccactgtatatctacgaaaacagtgagccggctgccaaggctgcgccagacgcgtaagcgttgcgccgccgagctgtacaaaataaaggggccttgacgggcccctttgtttttactgcgtttaactgatgccattacgcttgttttttttgcaggcagcccccatcttggtttcaagcttactttcatctgtcatagaggcgaaatcatgaagacaaccatcgaattgcctctcctgccgttgcgtgatgtcgtcgtctatccgcacatggttatcccgctgttcgtggggcgcgagaagtctatcgaagccctcgaggccgcgatgacgggcgacaagcagatcctgctgttggcccaaagaaatcctgctgacgatgatccgggcgaagacgccctgtatcgcgttggtaccgttgcaacggtcctgcaactgctcaagctgcctgatgg

SEQ ID NO: 20692 - DNA, 502 bp, Zea mays
  Coding DNA Sequence Number=SeqID_6289
gctttgtcggcaccttgtactcaagcttgtgcttgatctttacctggtgcgattcgccgatttggctgaaatccaaggtgatcaccaccttcccggccttgccgtggtcaacaacaccggcggctacttcggaaagggcgtggccaatttggctcgcgaaggcgccgccgttgagttcttcaagaaactcggctgtatcggttgcggtggacatgggtgtatctccgggttggaattgattccgctggccggcagtgctagccaggtttgaagtttgcgctgctggatgtgggctatgcggcgcatgagtcgacgcgctggttcgtgaaggaaacaaggtcactggcgtgcaggctggggatgatattctcgaagcgaatgtggtgattctggctgatggcgttaactcgatgcttggccgctcgctgggaatggttcccgcttccgatccgcatcattacgctgttggtgttaaagaggttattggcctcacaccagaaca

SEQ ID NO: 20693 - DNA, 578 bp, Zea mays
  misc_feature (524)..(524): n is a, c, g, or t
  Coding DNA Sequence Number=SeqID_6290
ttggttttcgcgttgcgccagaaaccctcgaactgatgcgcgaactcagcaattcaggcgagctggaagccctgacacctgagcgcagctggaaagaaatttcccgcgccctgatggaagatcagccacaggtatttatccaagtgctacgcgattgcggcgcgttgaaaaccctgatgcctgaaatcgacgcgctgttcggcgtaccacaaccagaagcccatcaccccgagatcgataccggcatccacacgctgagcgtgctggagcaggcggccatccacgcccaaccactgaccgtgcgctgggcctgcctgctgcacgacctgggcaagggcctcacgcctgtggataaattgccgcagcacattgctcatgaacatcgcggcctggcactgatcaaggcggtgaacgagcgcttcaaggtgccaagggagtgccaggaactggcgttactggtggggcgaatatcacacccacggccatcgcgcgctggagctgaggccttcaacttttgctggggntgctgcaaagctttgacgtttatcgtcgcccgccgcgctttgaggaatttgtgg

SEQ ID NO: 20694 - DNA, 485 bp, Zea mays
  Coding DNA Sequence Number=SeqID_6291
ggcaatacctgttcaagcgcggcgacccgccgtgtgggttgtacgtggtgctggaaggctccttgcgcatcagcgcggtgaacgagcagggcaaggaggcagtgttgagcctggcggagttgccgtactggttcggcgagatctccctgttcgatgggttgccccgcacccacgacgcctgcgcggtcgggccttgtacgttgttgcaggtgccgcaaccggcgttgctgcagatcctcgaagagactccgcgttactggcgcgacatggccctgttgatgagccagaagctgcgcctgacctttatcaatatcgagcaattgagcctgatgccggcgtcggtgcgggtggcgcaccgcttgttgatgatcgccgaaggctacggcgacatcgagcaggcccgacacgtactgcaattgccccaggaagacctggccgcgatgttgagcctgtcgcgccagaccaccaatgcgttgctcaaggac

SEQ ID NO: 20695 - DNA, 457 bp, Zea mays
  Coding DNA Sequence Number=SeqID_6292
gggtcaacctggcagcagtgaactaccatttcggctccaagaaggcgctgatccaggccgtgttctcacgtttcctggggcctttctgtatcagtctcgaccgtgagctggaacgtcgccaggccaagcctgaaaacaagccaagcctggaagacctgctggaaatcctcgtcgagcaagccctggtggtccagcctcgcagcggcaacgacctgtcgatcttcatgcgcctgctgggcctggcgtttagccagagccagggtcacctgcgtcgctatcttgaagacatgtacggcaaggtgttccgccgctatatgttgctggtcaacgaagcggcaccgcgtattccgccgatcgaactgttctggcgcgtgcactttttgctcggtgctgctgcgttcagtttgtccgggatcaaagccctgcgtgcctttgccgagaccgactttggcccaaa

SEQ ID NO: 20696 - DNA, 475 bp, Zea mays
  Coding DNA Sequence Number=SeqID_6293
tggcccctcgtagtcggaggtgcttccctcacacgctctctcttaacgacgagccctaggggtccggggacaaaatccctgaaccctgaccctccatcattgtctactatgcaacggtttggtcggagggtggtgcacaggacataatccaggtgagggcgtgacacaatgagaagattttttaaccaagccagaaattcatcccgagggggattgaacccgagacttggaggtactatttgaaagtcttaaccattatgctagaggccctttcaccctttcaagccttaaatcactataaaaggccaatataaatataatacattaaataagtataaaaaactaaattataagagagtccaaaagctaaataattcatgacagattaggtgaaacgttttaataataaaataatgaaggcttaatttgaatatgcaaggaaaaggatagggaggtgacaataaatttaagccaa

SEQ ID NO: 20697 - DNA, 496 bp, Zea mays
  Coding DNA Sequence Number=SeqID_6294
tttggacttgtgttcatatgacctattgtatgaactttatgtattctggatatattttctttggcttaaatttattgtcacctccctatccttttccttgcatattcaaattaagccttcattattttattattaaaacgtttcacctaatctgtcatgaattatttagcttttggactctcttataatttagttttttatacttatttaatgtattatatttatattggccttttatagtgatttaaggcttgaaagggtgaaagggcctctagcataatggttaagactttcaaatagtacctccaagtctcgggttcaatccccctcgggatgaatttctggcttggttaaaaaatcttctcattgtgtcacgccctcacctggattatgtcctgtgcaccaccctccgaccaaaccgttgcatagtagacaatgatggagggtcagggttcagggattttgtccccggacccctagggctcgtcgttaagag

SEQ ID NO: 20698 - DNA, 550 bp, Zea mays
  Coding DNA Sequence Number=SeqID_6295
tattcactggtgtcgaaaccgcggcggcgtcgacccctggcttgcagcggctcgacgatgaactcctcgccgtgaagaactcccccgcgctactggactccttgcaggggctcgagcgatgatacagccaataatgacgacgacggctccctgcagaccctcttctcttcactctcggggcgcctgacgatgcctgggtctcgcgtggctatggcgacttggggaaaaaaattcggttacacaactagaacattatctgtttatacgctgctagggaatcctaacaaactccccatgatctacggaagtggttacatgtatacatatccaaatgggtcagcctgataatgggcccgtgacccggcacgagcacaggtccaacccgactagaagccgtgcccggaccgggccagcccgatagccgtgtcgggcttggaccggccgtttggcccgcgatacaggcacgggcccgccctagttaaagggtaggcacggtaacggtccgtttgagagactgattttgtaatggtcagtctgttttagctataat

SEQ ID NO: 20699 - DNA, 503 bp, Zea mays
  Coding DNA Sequence Number=SeqID_6296
gcacggcttctagtcgggttggacctgtgctcgtgccgggtcacgggcccattatcaggctgacccatttggatatgtatacatgtaaccacttccgtagatcatggggagtttgttaggattccctagcagcgtataaacagataatgttctagttgtgtaaccgaatttttttccccaagtcgccatagccacgcgagacccaggcatcgtcaggcgccccgagagtgaagagaagagggtctgcagggagccgtcgtcgtcattattggctgtatcatcgctcgagcccctgcaaggagtccagtagcgcgggggagttcttcacggcgaggagttcatcgtcgagccgctgcaagccaggggtcgacgccgccgcggtttcgacaccagtgaatatatgatttcacgctctccattgctttagaggtgtggccgtggtcaggctggtgcccagatgcatgccggcacggcgtcgtggcaaggttgtgcgccacgatgcc

SEQ ID NO: 20700 - DNA, 564 bp, Zea mays
  Coding DNA Sequence Number=SeqID_6297
ttcctttactcttcttatcagccatccccgccggctggcaaattcgaattaggagtgcccatatgccacttccttcgcttccaaaaccttggtatcttcccagttcaacaatgaatcccctcagaagacccacaggaatcggggaacggctcgaatgaaaccctcgaccggcagctctcctttctcggcgtcactcacaactaacgacgactggactcactcgatcgctttcggtcaggagcatggaggcgcggggcaggggatatttatacaaaatactactactctcactatcccgaatgcaattctagcacaatatcatggtgtagtatcttatgtttgacaaaatatagataaaaaatcgaatcgctatgtcacccaaaatgtattactgtcctgtaccaacatccgtgacaaaaaaaagttttatgaggttgtacatgttggagaatacctatggtctaactataaatggataatgtagtataaatataccgccaacaacttcaacatgcaaaggcatgtttgtcaaaaatactgtagagccgccctacagtaattgct

SEQ ID NO: 20701 - DNA, 84 bp, Zea mays
  Coding DNA Sequence Number=SeqID_6298
tcaagtggaacttttgctagatttcaggaacttgtagatgggcgcaccattgttaccgttgacgtcaacctacaagttcctgaa

SEQ ID NO: 20702 - DNA, 517 bp, Zea mays
  Coding DNA Sequence Number=SeqID_6299
gtacccacaaggtgctccgacgtgcggatcccccggacgcgcccgtgccggcgctcgtcccgactgctcccgcacctcggcttggccctccccccggtctgcctgtcgcggttcggcgcgccgacgagccgcccccgcgggggcccccgggcggggccgcgagcccggagctccgggacctcggcttcgtcggccgcccgccgcgccgggcgcccggccgcccgccggcggccccccgggggaagcgccacccgcccgtgcggcgggggcacatgcaggcgtccaccacggcggcggcgcctggccgcgcggactgcccggccgccgtccgcctgccccggccggcctgcgccgtccgcgcctgcgactgggtgtcttgctggcttgctccctcgcggggacgcgtgttcgttcgtactgcccagctgccgtgcgcatgccccggccggcctgctgtgtgtaagcaaactagtgttttttttaattaattaatttctctggctgatacgtaccccgg

SEQ ID NO: 20703 - DNA, 566 bp, Zea mays
  Coding DNA Sequence Number=SeqID_6300
gggtacgtatcagccagagaaattaattaattaaaaaaaacactagtttgcttacacacagcaggccggccggggcatgcgcacggcagctgggcagtacgaacgaacacgcgtccccgcgagggagcaagccagcaagacacccagtcgcaggcgcggacggcgcaggccggccggggcaggcggacggcggccgggcagtccgcgcggccaggcgccgccgccgtggtggacgcctgcatgtgcccccgccgcacgggcgggtggcgcttcccccggggggccgccggcgggcggccgggcgcccggcgcggcgggcggccgacgaagccgaggtcccggagctccgggctcgcggccccgcccgggggcccccgcgggggcggctcgtcggcgcgccgaaccgcgacaggcagaccggggggagggccaagccgaggtgcgggagcagtcgggacgagcgccggcacgggcgcgtccgggggatccgcacgtcggagcaccttgtgggtacggggtactcggggaagagcttggcgaggatgcggacgacgtcctcgcggtgg

SEQ ID NO: 20704 - DNA, 73 bp, Zea mays
  Coding DNA Sequence Number=SeqID_6301
cggcgagcagccagtagaagttgtcgaggcggcccttgttgaggtcgttggcgatccaggacatgcccttctc

SEQ ID NO: 20705 - DNA, 527 bp, Zea mays
  Coding DNA Sequence Number=SeqID_6302
acaactctaatctcatggctggctactcccgaaacggcgagctaaaatctcatctttcaacaactgaaagtattgctttgattggtcgtccattgtgcttgtgtcggttgtcatgattattttgtcatgctggtcttgctccaattgtagcttctttttctcaagctccaagaacttgtcatcacggtcctttcggtctttctcaatttctatccttgattctctcatttttttaacttcatcaatgaaaggatcagattcatcatcaccatgcttttttgcctttgccttttccttttcagcttttcttcctggtggcctttgaacaacaggatgaacttcaccagtgccattgttacattctggaagtgtcttgcctacatagtttgctttatttggtgaccactttggctccaacctaagaatgttccatgcatgaaaaagggagaaagcctttttgtgtagttctaggaacattgcctttgcttcaacaatcttggcattacttgtttttccactttcattct

SEQ ID NO: 20706 - DNA, 559 bp, Zea mays
  Coding DNA Sequence Number=SeqID_6303
tgtaggcaagacacttccagaatgtaacaatggcactggtgaagttcatcctgttgttcaaaggccaccaggaagaaaagctgaaaaggaaaaggcaaaggcaaaaaagcatggtgatgatgaatctgatcctttcattgatgaagttaaaaaaatgagagaatcaaggatagaaattgagaaagaccgaaaggaccgtgatgacaagttcttggagcttgagaaaaagaagctacaattggagcaagaccagcatgacaaaataatcatgacaaccgacacaagcacaatggacgaccaatcaaagcaatactttcagttgttgaaagatgagattttagctcgccgtttcgggagtagccagccatgagattagagttgtgaaacatctcatttataatttcagatattgtcttttcattagtgtgtgaacttatgttcagctgctgttttcaaagaaataaaccgaaattggaggtgctgttttcattagtgtgtgaacttatgttcagttgctgttttcatagaaataaaccaaaattggaggtgctgttttcat

SEQ ID NO: 20707 - DNA, 506 bp, Zea mays
  Coding DNA Sequence Number=SeqID_6304
acgcgtccgacgagaatcctgccttctgcaacttcaccaagggaccggcggccgttcaccccgcgttcgcgtggctgcgctgcgacagggaggacgtggaggactgcgcgagcttcctgcgcggccacgggatcctgacgcggagcgggagccagttcggcgcggacccgaggtacgtccgggtcagcatgctcgaccgggacgatgcctacgacatcttcgtcaagcgcctctcctccctgcactgaacaggccgggtcgggctacacgcatgcatggcatggagatgggaggaggatcgatgccatgccgcccggccggcgtcggcattgccggtccgtggaccagtgtgagcatgagccatgagtagtagagggcagcagtgttggtacttggtaggaccaagggcaggaggagaagcgcaggaggagcgacgatttgttttgcctttcctgctgtatgtttttgcggtgttccggatgtcgcatcgtctcaaaggtttcttt

SEQ ID NO: 20708 - DNA, 432 bp, Zea mays
  Coding DNA Sequence Number=SeqID_6305
ggcggcgagcgctgactgtatctaaacctcgatgatcatggtgtccgcttccaagcgcttctgctgaggcgcaatctacttcacatccagaagacaccgaagaaactcaagacatggacattgaaccaactgggtatgagtaagataaacttcattcttaccttctatactaaatcttaatatctttcaaataataccattttatattgaatttccataatgaactatatgtgtgtgtatgtgcataaaaagattatacttatttgattgatctgctataaaaatatatttgagttcattgaaatattgcatattagtttaacatatttattaacatctttaatagcttatgtcattcttacactatgaaccaccaagacataaatagtgacctcggagacaccatagcactcttatttcgcaaacgagcta

SEQ ID NO: 20709 - DNA, 504 bp, Zea mays
  Coding DNA Sequence Number=SeqID_6306
ccgccgatgccgacgtagaggtagagcaatgcgagtcctcccatgcggtcgagacgccatcgtcgtcagccaccagttcggaggaggtcgccgcggccagcaacgcggaggagatgagcgtgctgttcgacttgcccgaccttctgatggacctgagcgacggcctctggtcacccatctgggcggcagctccggcggcggtcgaagaatacgacggcggtgacagcctgagcgagccgcttctgtgggcccacgaacactgctggctggacgccgccgcgccggtgcagccggactagccgttccgttcggacgcaccggccgtcaactgccggtggttgcctgaaacggacgaccgatgccacgtgctttttgcttcgtgtgtgcgttgtgcaggctagagagatagaaacgcatggtttcctgtgccctgtgtggtctccggatggcaagtcgttgtaggatgcggtgaaactgtggcttgcctacttgcctgtatgaaca

SEQ ID NO: 20710 - DNA, 458 bp, Zea mays
  misc_feature (26)..(28): n is a, c, g, or t
  misc_feature (55)..(58): n is a, c, g, or t
  misc_feature (65)..(66): n is a, c, g, or t
  misc_feature (70)..(75): n is a, c, g, or t
  misc_feature (228)..(228): n is a, c, g, or t
  misc_feature (230)..(232): n is a, c, g, or t
  misc_feature (252)..(254): n is a, c, g, or t
  misc_feature (261)..(262): n is a, c, g, or t
  misc_feature (273)..(275): n is a, c, g, or t
  misc_feature (280)..(282): n is a, c, g, or t
  misc_feature (310)..(310): n is a, c, g, or t
  misc_feature (388)..(388): n is a, c, g, or t
  misc_feature (390)..(400): n is a, c, g, or t
  misc_feature (426)..(427): n is a, c, g, or t
  Coding DNA Sequence Number=SeqID_6307
cggcaaaacgcgtcatctcaacaacnnnttattcgatttcatggcatcaacaacnnnnaaaaccnnaagnnnnnnagaatagggaagtgagcgcatgaaattgcacgtccttgggtgtccatggggacgatgttgcacaggtcatcatcgcaaccgtcgaccccatccttgctttggactttgcctcatgaggcctcgaagttggtagagaatgggctctcctcctcnannntgttggattaagccacttcnnnggcttgnnagcctcttcannntatgnnncattgcttagtaaatctatctccttggncaattcacgtagaagttgcaaagttggtgtcgaccaagttaggggagggcaggagccggcgaccggcaggccgtgcgntnnnnnnnnnnntggggcgatggttggaggccatggtnnagggcgaggcgagccagtggagcaggcccat

SEQ ID NO: 20711 - DNA, 536 bp, Zea mays
  misc_feature (43)..(43): n is a, c, g, or t
  misc_feature (48)..(48): n is a, c, g, or t
  misc_feature (55)..(59): n is a, c, g, or t
  misc_feature (72)..(72): n is a, c, g, or t
  misc_feature (74)..(74): n is a, c, g, or t
  misc_feature (76)..(77): n is a, c, g, or t
  misc_feature (110)..(111): n is a, c, g, or t
  misc_feature (137)..(147): n is a, c, g, or t
  misc_feature (149)..(149): n is a, c, g, or t
  misc_feature (227)..(227): n is a, c, g, or t
  misc_feature (255)..(257): n is a, c, g, or t
  misc_feature (262)..(264): n is a, c, g, or t
  misc_feature (275)..(276): n is a, c, g, or t
  misc_feature (283)..(285): n is a, c, g, or t
  misc_feature (305)..(307): n is a, c, g, or t
  misc_feature (309)..(309): n is a, c, g, or t
  misc_feature (462)..(467): n is a, c, g, or t
  misc_feature (471)..(472): n is a, c, g, or t
  misc_feature (479)..(482): n is a, c, g, or t
  misc_feature (509)..(511): n is a, c, g, or t
  Coding DNA Sequence Number=SeqID_6308
tcactgccctctacgctagtcctgtcaacccccttctcttccngaccncgccttnnnnncatgtccccatcntngnncatgggcctgctccactggctcgcctcgccctnnaccatggcctccaaccatcgccccannnnnnnnnnnancgcacggcctgccggtcgccggctcctgccctcccctaacttggtcgacaccaactttgcaacttctacgtgaattgnccaaggagatagatttactaagcaatgnnncatannntgaagaggctnncaagccnnngaagtggcttaatccaacannntngaggaggagagcccattctctaccaacttcgaggcctcatgaggcaaagtccaaagcaaggatggggtcgacggttgcgatgatgacctgtgcaacatcgtccccatggacacccaaggacgtgcaatttcatgcgctcacttccctattctnnnnnncttnnggttttnnnngttgttgatgccatgaaatcgaataannngttgttgagatgacgcgttttgccg

SEQ ID NO: 20712 - DNA, 376 bp, Zea mays
  Coding DNA Sequence Number=SeqID_6309
aagcttgctctctactgtgcgcacagcgacgctggcactcctccgctcccgcgacattgcgttgcgtggttggcgggcctgttgtgcccgtgcggcgcggcttcatcgtggagcgggaggtgcctttcacctcaacggaggtcagcatcacgacattggcaggggctttgggcccaactcggtccgggccggaggtcggcggcacgaagccgggcggtcgattcggatccctggggtccttcctcacggagacaccacggcgatcggttttctggccacatggtgatgacagaagactagcctatttttggaagctacccctctatggctataggtaatatcggttagattcctgcgatggttggatttttattta

SEQ ID NO: 20713 - DNA, 387 bp, Zea mays
  Coding DNA Sequence Number=SeqID_6310
cattttgattccaattatccagttaaataaaaatccaaccatcgcaggaatctaaccgatattacctatagccatagaggggtagcttccaaaaataggctagtcttctgtcatcaccatgtggccagaaaaccgatcgccgtggtgtctccgtgaggaaggaccccagggatccgaatcgaccgcccggcttcgtgccgccgacctccggcccggaccgagttgggcccaaagcccctgccaatgtcgtgatgctgacctccgttgaggtgaaaggcacctcccgctccacgatgaagccgcgccgcacgggcacaacaggcccgccaaccacgcaacgcaatgtcgcgggagcggaggagtgccagcgtcgctgtgcgcacagta

SEQ ID NO: 20714 - DNA, 399 bp, Zea mays
  Coding DNA Sequence Number=SeqID_6311
tgcccctgttcgctggccgagcgaagcccccgtcgacgctgctgttcgccgacgccaggacgccccggtcgtctgtcgaccttggtgactgccccgacaagctcctcggtcgcgcctctgtgcccgacgtccttctctgccgccattgccgaggcccgaacgaccaacgtccttcattgttcccctgcccgttcattcacgttgcagcaagaagctgattgtgtggtagaggatccgaattcgtttgaggacgacccgtaggacacttttgtgcaagagggtgatgctggagactttgatggagattttatcgacgacgatgatttctaagtctaacgatgcgccggtcatcttcctgtgggagattgccccatgttatttatattccgctttactttg

SEQ ID NO: 20715 - DNA, 305 bp, Zea mays
  Coding DNA Sequence Number=SeqID_6312
gtgtcctacgggtcgtcctcaaacgaattcggatcctctaccacacaatcagcttcttgctgcaacgtgaatgaacgggcaggggaacaatgaaggacgttggtcgttcgggcctcggcaatggcggcagagaaggacgtcgggcacagaggcgcgaccgaggagcttgtcggggcagtcaccaaggtcgacagacgaccggggcgtcctggcgtcggcgaacagcagcgtcgacgggggcttcgctcggccagcgaacaggggcatggggagaggggcaaggtggccgggaactggctccacga

SEQ ID NO: 20716 - DNA, 381 bp, Zea mays
  Coding DNA Sequence Number=SeqID_6313
tcaccccacaaagcaataacccggccctctcctttcgtcaccatcacatccagccagccaacaaaaatgtcgcgcgtcacagctgcggtgctcttttacatcctcgccgttgctgccctcagcgcggccgaggccccggcagagtcaccgaaggaaggcagtgctgccaaggcacctgaggctgccaagagaactgctgcccccgctgaagcacccggagccgcgtactagctgtccgtagtcgagccccgctctccgtcgatccgtccccgtcacacgcacgaacccgaggttgatgacgacccaaatttattttatgtattttataaagcgcttttgattcgattcatgtgtatagtttgtttgttgtaatatatacac

SEQ ID NO: 20717 - DNA, 519 bp, Zea mays
  Coding DNA Sequence Number=SeqID_6314
gttctgccctcgtggagacattgcacgtgctcgttcagctcagccgtcgttcgtcgctcactcgccgtcatcgagatctcatcggtgtcttgctaccctgcatccccatcggtcctgtgctccgatctcctcgtgtaccatccgaagtggttgatctagtagttaagaatcaagatctattccgatccgtggaagaacctcaagttttcaataagcaaggcaagtggacttctccctctgcatactctgtttgatcccaaacaatacatttaataaagtttattcttttggatatatatgcataatttgacgggttacctatttagataacctttccaaccttattccttgatcaaacctgggaattatactttaccttcataggtatgctattgctacaacttaactttatgcagtcactcttatatgatactaatgttccaaatggtaagtttacattattgttgttaacccgatggttaaacaagattattgcatattaattggaacatgggagtg

SEQ ID NO: 20718 - DNA, 330 bp, Zea mays
  Coding DNA Sequence Number=SeqID_6315
agaggtgtttcgatcatgctgtgcccgttctctactcctcacaggtgatgtggataggtgacatggcaggtgatgtggaaaaatgatgtggcaagtgatgtggaaaggtgacgtgtcagctgaactggcgagtgacacattttatagtaatgccaaaacgcgtgttaacaaaagtagaaacaatactatagccacgtttgtattgtgtgcctacgcatatcaatacgttatatagtaacgtcaaagtgtgtattaagacctgtagaaacacttataaaagatgttttcacttataaaagatgttttgtacatacatctatatttgtttgt

SEQ ID NO: 20719 - DNA, 360 bp, Zea mays
  Coding DNA Sequence Number=SeqID_6316
gtttctacaggtcttaatacacactttgacgttactatataacgtattgatatgcgtaggcacacaatacaaacgtggctatagtattgtttctacttttgttaacacgcgttttggcattactataaaatgtgtcactcgccagttcagctgacacgtcacctttccacatcacttgccacatcatttttccacatcacctgccatgtcacctatccacatcacctgtgaggagtagagaacgggcacagcatgatcgaaacacctctcgaagatccttggccacggtgaggtggaaggatggctgctttggtcaccagataatggagtggcaattgatgaactggagagagctaactt

SEQ ID NO: 20720 - DNA, 398 bp, Zea mays
  misc_feature (367)..(367): n is a, c, g, or t
  Coding DNA Sequence Number=SeqID_6317
ttggaagaaccctgtttgaacttgtatataaggttcctctctgcaataaacatacaacagttattctgtctcattcatttgtctctctcaactctctttgtcactgaatattacaacaaattatcagcactgctcaagaaatcaaaggaagaaaggggaagaacacttgttgttcctatgcagcggcttcaaatcaacaggaaaggtatgtaccaaaccatttctcttcgcatccgtcgtatgcgtgaatctctccatgttgttgatgacgcactgttggaggtattcgctgttgggcaagacgcagcgatcccaccagtgcacgtcatccctgaacgccacgtacaagtgcaaaatgtggatttcngtgtgatccacggatggacagcgatcgtacc

SEQ ID NO: 20721 - DNA, 319 bp, Zea mays
  Coding DNA Sequence Number=SeqID_6318
ctggggctgccgcatatggatataaaaactgtcattgcagctaccatgtttcttaaaggctttggtggtcttctgttcatagtcagcagctcatttggagcatccctcctggttagcatctaagtattggttttttctggcatgcttagtgccttgtggttaaaaacataaagggcttatagagggtattgccaaaaaagggactaaatatactctcatatggaatttactaattggggactctggcggcatttctcccagggggcatctggatgtcaagatttcttgtagcatgtctttctcaacatcaaactatttg

SEQ ID NO: 20722 - DNA, 426 bp, Zea mays
  Coding DNA Sequence Number=SeqID_6319
gatattatgccctccattttagatatagattggaagtgtatgtgtggtgtataactgtatagaatttcttcaattcatggtgagattgttggaaagaaagaaagaaaaaactccttgaattaatccattgttgctgcccaatataatgcatggtcagaggtatccactcttgtcgactgaatatatatcctcccagcagctttgtatccaaatcagatcgaccaccgcatgcaaaaccccttgaactaatcaaccacgtcccagctaggcacagcatctcgtgtgcgtccacgagcagatgaaactgcacagcatgatctgatcgctagctgcttccatatatatgctgtggacacctcagatcatgctggcagcttcagctactagaggacacaccaaccaatcaacattcggagctcggagctc

SEQ ID NO: 20723 - DNA, 391 bp, Zea mays
  Coding DNA Sequence Number=SeqID_6320
ctccgagctccgaatgttgattggttggtgtgtcctctagtagctgaagctgccagcatgatctgaggtgtccacagcatatatatggaagcagctagcgatcagatcatgctgtgcagtttcatctgctcgtggacgcacacgagatgctgtgcctagctgggacgtggttgattagttcaaggggttttgcatgcggtggtcgatctgatttggatacaaagctgctgggaggatatatattcagtcgacaagagtggatacctctgaccatgcattatattgggcagcaacaatggattaattcaaggagttttttctttctttctttccaacaatctcaccatgaattgaagaaattctatacagttatacaccacacatacacttc

SEQ ID NO: 20724 - DNA, 390 bp, Zea mays
  Coding DNA Sequence Number=SeqID_6321
gcaccgtactactcggtatacccggccgtgacggcctactaccggccggggctgttccggtgggccggcgacgccagctcgttcacgggcgacgcctacatcgagctggtgtgctcgccgaacaaccccgacggcgccatccgcgaggccgtccttccctccggcggatccggcgtagcggtccacgacctggcctactactggccgcagtacacggccatcaccagacgggccgaccacgacatcatgctcttcaccgtgtccaagagcacgggccacgccggcacgcggatcgggtgggcgctggtgaaggaccgcgacgtcgccaagaggatggccaagttcatcgagctgaacagggtctccaaggacaaggagctgcgcgcgcgc

SEQ ID NO: 20725 - DNA, 265 bp, Zea mays
  Coding DNA Sequence Number=SeqID_6322
tctgggagcacagggtagccccgtcgtgcggtgatgggattttccatggagtaaattgaaaagggtaagcccaatttgagattaatgcttacgtgtactattcaattccatcgctgcaacgcttggttgaaaccaaaattcctccgtcatgtaatggtgagaggaaattgtgactcttgtcggcgatgggcatcaattgcagaggctgctgcgtcgcaacatgtccttctgttctttttcttgcgctcagtgaagaaacggtgct

SEQ ID NO: 20726 - DNA, 265 bp, Zea mays
  Coding DNA Sequence Number=SeqID_6323
tggtcgacgccaccatgtacaactactactagctagctagctagtgtccatcgtgctaaggctaagctatgcctgctgtgactactctgtgtgtctgctgctttgtctactctactctactcccggtcgggtcgtgttgttattggttgcttgggcacattgtggaaagcaggccaaagtagctagtagcccctactcttgtggtggtgtcatggtgtgtcactttatatataatagcgtgacatggacggcaaaagcaaagtat

SEQ ID NO: 20727 - DNA, 308 bp, Zea mays
  misc_feature (83)..(83): n is a, c, g, or t
  misc_feature (92)..(92): n is a, c, g, or t
  misc_feature (173)..(173): n is a, c, g, or t
  misc_feature (193)..(193): n is a, c, g, or t
  misc_feature (262)..(262): n is a, c, g, or t
  Coding DNA Sequence Number=SeqID_6324
gtttggaacatggtatttttctgcgaactcatatatggaccgtgccagtgggagctctcaagcagttgccctccaaatgttanggcttatgnccatggggcaaaagggacaagtggcgtttgaaaaagaaccaagggaaggcagagcggggagccctgatccaaatagattcnagggaaatgggttgggatgntggcctaaagagaaaaccggcctagctactcctggacatttttgccggcctggcgggaggtttatccanacaagggctgcagccaagctggggggcatcctttttacacaaaatg

SEQ ID NO: 20728 - DNA, 263 bp, Zea mays
  Coding DNA Sequence Number=SeqID_6325
tccccgtggcggaactgaaaaggagatgctgcccggaagctggcgaaaatccccggggtactggcggtgcacggggcttaacatcctcatggacggggggatccccccgggcccggacggcaaattgaaggcccccctaaaaaaccttgccggtttcccccgggaagggcaaaaggggattcccccccccccctcccccgggggccggggggaaacctggcccccctaaggggggtcccccaaatgcccctggattttcggcg

SEQ ID NO: 20729 - DNA, 564 bp, Zea mays
  Coding DNA Sequence Number=SeqID_6326
ggaggcatggcatacacctgaatcaaagagttcacacataatcactgcagacagggcattgccgccataaaacttcctcattccctattatttttttatcaaataaaccattttagataaaatcaatattctatatgcacctgcattctagctatagatgtagcatttcgtgggatgcttatttctgtgctgaatggaggctggctagagaaagaagccgcattgcaggaggacgcagctgggcgaccctgctgatgtagcactctcgtcaagctgtagcacattgcgctgattttggcatataagaatacttatatattcacctatattcatcaaaggatataaacaatttcattggttgtgagaagaaaatagaaggcatgcatatctttgaatatacatcacggctagcaatttaagatgataaataaaaaaaaccatgtaaattttgtctattatgttggagtgtgcataaaacagtagaatggtttattaaataatcttgaagatgttccttgaaactggtcgccaccccacatacgtaattggactgactgcttaatc

SEQ ID NO: 20730 - DNA, 506 bp, Zea mays
  Coding DNA Sequence Number=SeqID_6327
atcagcgcaatgtgctacagcttgacgagagtgctacatcagcagggtcgcccagctgcgtcctcctgcaatgcggcttctttctctagccagcctccattcagcacagaaataagcatcccacgaaatgctacatctatagctagaatgcaggtgcatatagaatattgattttatctaaaatggtttatttgataaaaaaataatagggaatgaggaagttttatggcggcaatgccctgtctgcagtgattatgtgtgaactctttgattcaggtgtatgccatgcctcctcctccatgtttctccctcacagcatcagtagaatggtggggatgggtgtggattcatggggaactcgacctcgaaattgaccgacgaattgggggtggattcgcggggatgaacatagaaagagcggaggagatcgagtcacagcggggatgaagaactctacgacgaacggactgtaggatgcagcacttgtcctcgtgttgcaggatgta

SEQ ID NO: 20731 - DNA, 544 bp, Zea mays
  Coding DNA Sequence Number=SeqID_6328
agaaccaggtcgtgccctggacggaggaggccgaggcgacgccgccgcccgtcgccagctccacgtccagcagcagccgtgaggcccccgccaacggcgcgagtggtggagagtgcgcaaaggaaaacatgccgtgctccacatcgcagacgggcgtgctgtgccacaactggtcgtcagcgcgccacggcggcccgaacggtgaggttcacgtctgccggaacggtgggcggttcctcgcctggggccacaggaagagatcaccctcagacgacattagaagatcacttttagtgtatcgaatactggggaagacgtggatcacgactagatcagcttccacaaggcatacaccttccttcggccatcgaatcggggcgtgcaacttttttcgcagtcaaccttgcacgttggggagttagttgtcagggcagctgcgcgaggaccatgatagtattcctaaatggtgacggttatgttggagattgtatatgtccccattactttgtgctgtttaaattccttgccgtcccttgtgtttgtg

SEQ ID NO: 20732 - DNA, 348 bp, Zea mays
  Coding DNA Sequence Number=SeqID_6329
gcgaaagcttttaggtcaaagaaagaaaagaagcgggcgcgcacgcacgcacggggggcactggcgcaaagcgaagcggtgcgcccggcttgccgacgcggacgccgggccccccccgccccccccccccatggaagggtggtggtggtggttggtgttggtgttgcgcgcgcggtggggctgcccgtgctgggtttgtgcggggagatgatatgatttgatttgatttgaccaggatcgcatcacgccattgtaaaatccgccatatatttttttctctttttttttgttgggtttgtaccgttgcgttcaacaaaagaaaaggaacgtacaagattgtttcgcaga

SEQ ID NO: 20733 - DNA, 501 bp, Zea mays
  Coding DNA Sequence Number=SeqID_6330
ttttgcttcgccaaacggcggaacgagcaggcagctctgccccagggcattgtccccttcgtcttcgcaaaggagtacaacgtgcaccctgacattctcagcaccgcgtaagttccccgtgtcggaagacacgagcacaccaagatcggacaaccagatctctccaagatctgtcaaagatcctgacaccagtcgcctgctgctaaccctttctttttcctgctcgccggatgcttggggagtcatttttggcatgctcatcgccctgccgatcacgctcgtctactacatcctactcggcctgtgaccgtctcatccccaattccccatggaggacgccaccccctgcattgctgcaactgtaaagaccactgctgccgtcacttcccgttcatgggagacaaggccaggaaggacgggagatagagctgctacgacattgtttggcgcttgcaaaagagtggcgtgttttctctctctctatctatctagaagtaggta

SEQ ID NO: 20734 - DNA, 171 bp, Zea mays
  Coding DNA Sequence Number=SeqID_6331
atggtccagttcgttgtgtggaaaacttttatgctgcagaaacttttatttttatggatttgcttttggattttttttttagggttttttttttttttgcaaggtacttttgcagcctgatgcagctataaatagaaccccttgatagctatttttggacttgaattccca

SEQ ID NO: 20735 - DNA, 564 bp, Zea mays
  Coding DNA Sequence Number=SeqID_6332
tcaggtttttcagccgctagcttatcttctacgcgccgcgcgtgcccaccctctgtcctcgccgccatgtcctcttcctgccggcgctcctccagggagcttcctagctcacccaggtcgccgccgttcgcctccagctcgcgacgccccctgcttttctctctctcccacacggccgcgccttgccaagatccgtgctgagctcccatcgccgcgcgcccccttctcctccatagccgtgcgagctgagctccctgctcgcgcccgtcgccctgcctgctcgagcgcgcgcccggccccagctccaaccttcctcccatggctctcgggcttctccaggtccgaccggagcttcctctatgcggcgctcctgctccccggcttgcccctctgcccgccccatctcccaggtgctggccgcgagctcctcgtccggcccggcccaccgacctgtctgtgctcgtcctggtctcggacgccaccgcgcctcaactcggcatgaccctgggtgtgtctgtccgctgctccagctcgttgggggtcatggcctcacccgggcttcag

SEQ ID NO: 20736 - DNA, 281 bp, Zea mays
  misc_feature (48)..(48): n is a, c, g, or t
  misc_feature (188)..(190): n is a, c, g, or t
  misc_feature (212)..(212): n is a, c, g, or t
  misc_feature (214)..(214): n is a, c, g, or t
  misc_feature (219)..(219): n is a, c, g, or t
  misc_feature (221)..(221): n is a, c, g, or t
  Coding DNA Sequence Number=SeqID_6333
gggaggtctgctcccctggaagctgccctcctggctccatgggctggncttaccttggcgagaccctccagctttacatcccaggaccccagtcttcttctcgcttcaaacagaggaaaaggtacggcgagaatctccaagacgcaccttccggggtgcccggggggtaatgtggaaaaccgaaaaannnccccggtttaatttgagggggngnggggncngtttttgcgccgctttccccccggcgcgggaggggtgtggtgggctcctcgtttcttttt

SEQ ID NO: 20737 - DNA, 327 bp, Zea mays
  misc_feature (110)..(110): n is a, c, g, or t
  misc_feature (161)..(161): n is a, c, g, or t
  Coding DNA Sequence Number=SeqID_6334
accccggaaggtgcgtcttggagattctcgccgtaccttttcctctgtttgaagcgagaagaagactggggtcctgggatgtaaagctggagggtctcgccaaggtaagnccagcccatggagccaggagggcagcttccaggggagcagacctcccatgnccggcgaagcggtcctttccccttttttgccagcgagtgtactggacgtaggaggcgatggctagcaagatgaggatgcacacgagggccaagaagaaggccatccaactcgcagactggcctacggagttttcttgcccggcttgcgcttgtgcgttctgtgtgt

SEQ ID NO: 20738 - DNA, 412 bp, Zea mays
  misc_feature (29)..(29): n is a, c, g, or t
  Coding DNA Sequence Number=SeqID_6335
aaagtacaccatcgagtatctccccgaanacccacctttccacccgcgtcataatctggacgtctatggtcgatgcttgacaagcgaggacgcagattcttgtgtttcttaccaaaggaggaagaatcagcaaccggatgggcctctacgcactagaatgccagcactgcgttgatgcaaactcatatgcagctcaagctcaagactcctgatgagctgcttcagccactcactgatcagtgccttctcaggcaagaggcctggcgctcgcatgggttttggcatcttgggtctgtaaggcagttacacgttgcggatgtcaataagactgtgcaagagttttccttggctaactatgacgcagaggcaactgctgcttttaatcaaaaggtgtctcatgcttctacaagga

SEQ ID NO: 20739 - DNA, 548 bp, Zea mays
  Coding DNA Sequence Number=SeqID_6336
tgttgtgaaccaaaaacctacaaataaccatgaatcaccttgttgtcttgctggcattccctaatctcgaggaaaagattctttttagtggggtagattttgtaacaccctaaatccatcaattaaaagaaatctagtttaatcatttagtttctattagaaaggaaagtatttgtgttttcaaataatgaaatgggatataattaaaccgcacaatttcttgaatagataaaattttaccaagtgattgatgcattcatgctgaagcatatgttttgtttgatttggatttcaaaaccaattcttgaattttattttgtgagaaaagatctcattctataaaataataatgagctgtgaaaatattattcttggactacacattttgataggctaataatttttgtttgtaggtatttatgaaagttctgttttattgttttttattttagagctcagtttatttaaataatagaaattgcgtaaaaattatttattataaattttatttattaaatattattattagatttggttatacttttgaa

SEQ ID NO: 20740 - DNA, 521 bp, Zea mays
  Coding DNA Sequence Number=SeqID_6337
ttagcctatcaaaatgtgtagtccaagaataatattttcacagctcattattattttatagaatgagatcttttctcacaaaataaaattcaagaattggttttgaaatccaaatcaaacaaaacatatgcttcagcatgaatgcatcaatcacttggtaaaattttatctattcaagaaattgtgcggtttaattatatcccatttcattatttgaaaacacaaatactttcctttctaatagaaactaaatgattaaactagatttcttttaattgatggatttagggtgttacaaaatctaccccactaaaaagaatcttttcctcgagattagggaatgccagcaagacaacaaggtgattcatggttatttgtaggtttttggttcacaacagacttttctaaatataaggaacttattgtttctttgttcgacaatgtatattatcaggcgaccttcatcatcgaagttataaaatggttaggcttctgaattattgcttggttcttgcttcacg

SEQ ID NO: 20741 - DNA, 523 bp, Zea mays
  Coding DNA Sequence Number=SeqID_6338
taatgagctggctcgagcttcctaacgagccgagccgagctagatgtttagctcgttagtataacgagccgagccgagctggctcgttacaataacgagctataacgagccgagccataacgagtcgagctggctcgatatccacccctagtcgtgacaattaggttgaagacgacgcgaaagtgatcgatcagtcgcgcagagtgtttcccaaaaactttattcgctctctcccaatgcgaaatcgttgagggggactgttctggagacctgctctcccgatcgcctatgcatgccaaatgatagggacgaagtagcgtacgcgtcgacacaatagacaggaagagacggggctagatacgttggttgttggtatgtttgatggcagcacatgtaggtaggtacttatataagaatatcacgtccgattcaaaaaatccgtaattgacagggaaccatatcaggtaaggatcgtaccagataaggacctgttgatccgatccacatctaataagccttgtca

SEQ ID NO: 20742 - DNA, 374 bp, Zea mays
  Coding DNA Sequence Number=SeqID_6339
aagccgaccagcctgatcagcgatgcccacaaggccggtttgttcgtccatatcttcaccttccgcaacgaagcgaagtacctagccggtgcctacaagggcaatccggcggccgaatacctggccttcttccgggcgggcgttgatggtgtatttacggacttcacgccgacggccgttgcggcccgaaacacctaccttaaagaagtcgcgcgctaaacagtcatcaaggtaaatggcgggcttctcgggcgcgctatagaagatacaattttatataccgcgcgtatgacacgatatatcttttatatagtgccacctaaataaaatacactgcgcgctttatacaacgtgactagtgaaaaaccctggtg

SEQ ID NO: 20743 - DNA, 355 bp, Zea mays
  Coding DNA Sequence Number=SeqID_6340
acaccagggtttttcactagtcacgttgtataaagcgcgcagtgtattttatttaggtggcactatataaaagatatatcgtgtcatacgcgcggtatataaaattgtatcttctatagcgcgcccgagaagcccgccatttaccttgatgactgtttagcgcgcgacttctttaaggtaggtgtttcgggccgcaacggccgtcggcgtgaagtccgtaaatacaccatcaacgcccgcccggaagaaggccaggtattcggccgccggattgcccttgtaggcaccggctaggtacttcgcttcgttgcggaaggtgaagatatggacgaacaaaccggccttgtgggcatcg

SEQ ID NO: 20744 - DNA, 530 bp, Zea mays
  Coding DNA Sequence Number=SeqID_6341
gagttgcgcctcaagatcggtgctggcgaaggcgccccaggtgcgtttggtcaccccaatgtcgccgggttgctgatcgagttcgggcaacaggtcggcccatcctggtggaaacacatcactgcgccgtggccgctcggtgcgcccgggggcgaagcctgtgacgttgaccagcaccaccggcatgccgcgctcgcggaaagcgtcgagcagtgcacgggagcgttccaccacgccgccgatggggtggatgaacgggtattcggcgatgcctttctgcaagtccacgatgatcagcgcggtgttgggatccagcaaggtgacggccatggaatgtcctcgaacgggtagggcggttcagaaatcagcgaggcgctccagcagctttaccgctgccgcgagttcagcttgctcttcggcagacagttgctcctgcagcgcccgcagcagccaatcgtccttggctgcgcggctggcgatgaggtgtttacgaaagccgggagtcagctcgatcagggtttggcgcccat

SEQ ID NO: 20745 - DNA, 557 bp, Zea mays
  Coding DNA Sequence Number=SeqID_6342
atcgagctgactcccggctttcgtaaacacctcatcgccagccgcgcagccaaggacgattggctgctgcgggcgctgcaggagcaactgtctgccgaagagcaagctgaactcgcggcagcggtaaagctgctggagcgcctcgctgatttctgaaccgccctacccgttcgaggacattccatggccgtcaccttgctggatcccaacaccgcgctgatcatcgtggacttgcagaaaggcatcgccgaatacccgttcatccaccccatcggcggcgtggtggaacgctcccgtgcactgctcgacgctttccgcgagcgcggcatgccggtggtgctggtcaacgtcacaggcttcgcccccgggcgcaccgagcggccacggcgcagtgatgtgtttccaccaggatgggccgacctgttgcccgaactcgatcagcaacccggcgacattggggtgaccaaacgcacctggggcgccttcgccagcaccgatcttgaggcgcaactcaaagcactcggcgtgacccaagtggtgatcaccggcgttgctac

SEQ ID NO: 20746 - DNA, 559 bp, Zea mays
  Coding DNA Sequence Number=SeqID_6343
tgaaagccgttgaccgggtttccatcgatatccaggacggcgagttcttttccatgctcggcccttcaggctcgggcaaaaccacgtgcctgcgcctgatcgccgggttcgagcaaccgagtgccggctccatccgtattcacggcgaagaagctgccggtttgccgccctaccagcgcgacgtgaacaccgtgttccaggattacgcgctgttcccccacatgaacgtgcgggacaacgtggcctacggcctcaaggtcaaaggcgtgggcaagaccgaacgtctcaaccgcgctgaagaagccctcggtatggtcgccctgggcggctacggcgaccgcaagccggtgcaactctccggtggccagcgtcaacgggtggcattggcccgcgcactggtcaatcgtccgcgcgtattgctgctggatgagcccctcggcgccctcgacctgaagctgcgcgaacagatgcaaagcgagctgaagaagctgcaacgccaactcggcatcacgttcattttcgtcacccacgaccagactgaggcgctgtcgatgtccga

SEQ ID NO: 20747 - DNA, 288 bp, Zea mays
  Coding DNA Sequence Number=SeqID_6344
caaagcctgaaagttgggtgcccctattcaaacaaatcctccgggcaatggggcttggcaaagcgaaaaaagggtctccccccttttgaaatccctaccccaaaaggcaagatatgccctccaaagacctggggggtttttattggaaagccccccaaaacgggggagcctaaagttgtgctggctcgggccaccttaaaacccctctggggaaagaacaaaaagtctaccacctttttccccctttaaagtgagaacctccttcgcaaggaggatttacggccaaaa

SEQ ID NO: 20748 - DNA, 507 bp, Zea mays
  Coding DNA Sequence Number=SeqID_6345
ggataagtaatgaccggcgctcagaagtggttgccaccttattcgacccctaataatcatttcccctcaactaattttaagattcaaggtcccaatcgctctgcccacggtgatagtgcgatcaacggataacctgaggcgttcccggtgatctaccccagtctagtgcaattggttgggtccatgagcttcaaggacatatcagagtactgaaacaaaggaacagagggtgggaatggacctgtaacgcgctggccatggtgagagtctttcacggcagcggaaaaccgatttgggggaagtgagcaattcagaggctcaggtgaacaattggaggctgtaacatcacaaaatcccacccaagatttgaaaccctaacctcctaaattcctcccccccttagtttacctttctcccttaaccctacccttagaaccccttctcatgtgcatacacttgaaataattagagcacctcacatagactatgtttctcactcaagatcac

SEQ ID NO: 20749 - DNA, 585 bp, Zea mays
  misc_feature (220)..(220): n is a, c, g, or t
  misc_feature (375)..(377): n is a, c, g, or t
  misc_feature (393)..(395): n is a, c, g, or t
  Coding DNA Sequence Number=SeqID_6346
cgcacagtacggtcctctgggaggtcgccttcggtcgtggcccagggtgtcacgcgcgacgagtcggcgcgtggtggagggtcgtcttctgctgcttctggctggattcctgggctattcaacagagaaagagggagcaaaaaatggtggtccaaggaagcaagctaatccgaaagatagcaagtgaagcgtttggccgggcgtttgggtggtgcccganagacaggcgaatttctgggtgatcaatgctggaatatggattctggaattggagatagcctttcttttggttgatgtattgaatcagggccttttgtgtttactgctctcttctgcagatcatcagtgtcgatctcagtgtgatggcatcctgtnnngtgaaaggactgcttnnnagtaaacactactgcccttggttactctaaagacggacatgttcttaggttcatcgcagtttgtaatccagtacatgattaattgaagactagaaattcctagcgtaaagctctgctgagagcgtttgtcctggctgttcgcctgattgttttattgactgtagctcaagtgtctgaccttatctggaaa

SEQ ID NO: 20750 - DNA, 501 bp, Zea mays
  Coding DNA Sequence Number=SeqID_6347
ccttgaagcgacagttggtggatactggccattgtcagcagagcagagtgaatttgaagcctatgaaaagagaagccaaagaagccaaatgtaaagccaaagaagaggccagaggcggagccaatggtagagacgccgctggcaaagctgcggccaggaagactggaacaagtaagtcaacaaaagaagatgccagagctgtggaaagtgctgtcgacaacacgggagaatatagtgccactgtttgtaacaccgatgctggatacgaggatgcggtcgcggacagcgagggaggagccacggatgcggaggctaactatgatgtcgagagtgccagacgcaaaggagcggggggcggacgctgccggccgtcaatgagttggtgctgtaataagaccgtagctgtatatgaagaataatgatattatataggtcctgtcatatcatggattgtgtctctgatgagtatattgtataatatgttatctgggctttggtggc

SEQ ID NO: 20751 - DNA, 569 bp, Zea mays
  Coding DNA Sequence Number=SeqID_6348
tagtatccccgctaattcaaataacatcaacccagatcataataatggaacagcaaccggtacctatatcatggcttcgcaaagggacacatactggataattttagctaccatcccaacgggcttatgcgcaaagtaattagctctataaactaggctatccccgatatatagcaaagcataatccggcggtatcaggtacatagactatctactacctaccccaccagaatgggccgcactctattactatccctagtacggcttattcaataccgactttacccaacacttattcttaccactactcgccattggccggcaaccatccgttcgaactgtcgcttcaaggttgctactttcccccagttatgacggtgacactccttcttattctccgccactgttactggggcggtttgggacgcacccggaagggtcactggcctcgaagtagccgtagactgcgggttgcgcgcaaaggccggagttctgtataaggttatataatagatcacttccaactagaaacgcgaaacttgccccgcttgaagcacgcactgaatgta

SEQ ID NO: 20752 - DNA, 167 bp, Zea mays
  misc_feature (111)..(114): n is a, c, g, or t
  Coding DNA Sequence Number=SeqID_6349
tgagcatcaaggacgtcaacagcggcaactcccgtgatgtggacgccaagttcgtgttcctcggcgccggtggcgcggccctgccgctgctgcaagcctcgggcatcgaannnngcaaaggcttcggcggtttccccgtaagcggccagtggctgcgttgcgacaac

SEQ ID NO: 20753 - DNA, 412 bp, Zea mays
  misc_feature (236)..(236): n is a, c, g, or t
  misc_feature (298)..(298): n is a, c, g, or t
  misc_feature (361)..(361): n is a, c, g, or t
  misc_feature (380)..(380): n is a, c, g, or t
  Coding DNA Sequence Number=SeqID_6350
agctagccagtagctggctgaatggtcctcgcgcgagccatggtgatggagcacaggaagaagtcgaattatcttgttgccctcgtcttggcttcgctcttgctctccgccatggcaggagggcatcggaagaagcttctgaacaaagacgacgcatcagaatcaatggagacattggaatccacgccagccagctgcaggaaagacgacgaaaatggctgtggcggcccacgaanagaatttctcaggcaaggcgaagatgaacgactaccgggagctacgaactccttcgccggancatgggctaagccctccacttccaagggaacctacccttaaccttagcccaggccccaattanccctacctatattactttnggagggggctcgcttcgggcaagccccaaggt

SEQ ID NO: 20754 - DNA, 405 bp, Zea mays
  Coding DNA Sequence Number=SeqID_6351
aacgctcggtactggccctgctcggtgcgccggtcctgcgccgcccgccaggaggggggcggatcccgcgatcaacaaggactccgaaaccaatcgtccgaccgcctgctttcaagaccttttgggcttgcgcgttccgcccacaggcgtccctccgcccgtacgaacacatgaatcgggcggacagggaaataccccaagggccccccccctctccgcacacctccaagacatccctgacgatccggtacggccccctcggcccccctttcccaccagcaataacgctgcccttcgccccacaatgtttatgccaccacggtatgtccctctctaagacctcgcctcgtgtactaagcccccacccaaggccccatacatagggcccgcaaatagtggcgtcgc

SEQ ID NO: 20755 - DNA, 325 bp, Zea mays
  Coding DNA Sequence Number=SeqID_6352
ataccgtggtggcataaacattgtggggcgaagggcagcgttattgctggtgggaaaggggggccgagggggccgtaccggatcgtcagggatgtcttggaggtgtgcggagagggggggggcccttggggtatttccctgtccgcccgattcatgtgttcgtacgggcggagggacgcctgtgggcggaacgcgcaagcccaaaaggtcttgaaagcaggcggtcggacgattggtttcggagtccttgttgatcgcgggatccgcccccctcctggcgggcggcgcaggaccggcgcaccgagcagggccagtaccgagcgtt

SEQ ID NO: 20756 - DNA, 355 bp, Zea mays
  Coding DNA Sequence Number=SeqID_6353
ggcgcgactcggaccgaatcttaggcccgcctgccgccgccgctggctccagatggaaacgagatactgaaactcaactttcacgagaggaaggagaacgcttgggaagattcaagctcagatgacatttctggtgttatcgcacgctttgatggtgctgaccttcaggtatatctggccgcgcttctgtcgtgatggggtcgcgcttcaagaagtccgggaagatgttcccagctggtgtcgtgtcccttgtatccctggtcatggtccgaggctacttccacggcattttgcgtagctcgcacgcctgattcacaacacctgcgcttcacattactattaggcaccgtttgtt

SEQ ID NO: 20757 - DNA, 316 bp, Zea mays
  Coding DNA Sequence Number=SeqID_6354
ttttttggatcgatcgctcagactctggctccctcgaccgaggaacgtggtagacggggcctctgcaccgggtcagctgcacggacgagcgagcagatctgtcgtccccggagcggcagcagcacgtcacggtgtggccgtggagctgaaccggactgccgctagatatccgacaaggcaggatcgcacgcgctgggcgatggatgggtcatgggtcggcgccgacttgggctgcttggacggctccagcagctccgcgccgttgctgccgtacaccgtcaccacgccgctgccgtcggacgccatgggtttggtt

SEQ ID NO: 20758 - DNA, 368 bp, Zea mays
  Coding DNA Sequence Number=SeqID_6355
gtacccctcgtctcaaatgcgcttgcttggttgttgttagtacttcgtggccgacgaaatggaaatgcgcgcatgtttgctgaacactttgtgttatcggagaacaatcgggaatttgagcttggtgtcgcgctcttcttggtcccttcgatttcgtcgcctcaagcattaaatttcgatcgatgaatgcgcaagtaatacggatcttccaaagtggttgggaacttgtccttgttcttcttttctctatttttccccctacgtcttacgagtccgttaaagaatttagctgcccacataaatgatccaggtatgaaaagggtaagtgtaaacaaaattatgaaagatgtattttgacgaacgaaacg

SEQ ID NO: 20759 - DNA, 437 bp, Zea mays
  Coding DNA Sequence Number=SeqID_6356
atacaattcatttacgtttcgttcgtcaaaatacatctttcataattttgtttacacttacccttttcatacctggatcatttatgtgggcagctaaattctttaacggactcgtaagacgtagggggaaaaatagagaaaagaagaacaaggacaagttcccaaccactttggaagatccgtattacttgcgcattcatcgatcgaaatttaatgcttgaggcgacgaaatcgaagggaccaagaagagcgcgacaccaagctcaaattcccgattgttctccgataacacaaagtgttcagcaaacatgcgcgcatttccatttcgtcggccacgaagtactaacaacaaccaagcaagcgcatttgagacgaggggtaccgatcttgatggtggtgacgcggaggccgcaggccttgagcacgacgccgatgct

SEQ ID NO: 20760 - DNA, 443 bp, Zea mays
  Coding DNA Sequence Number=SeqID_6357
atgaatgtgcatgcatcaggccaaatacaaacattcaggtcacacacgtactgtaataataatgatatttataacagagacaggatcatcgaaaacacacacaacaacaacaacatgcgatggacgacgagatgcattgcatgcatggacatataatactacaccatatatatcaacgtacgtatactagcttggacaaattatttagcctgcagatggatcgatgggcgtgatcagaagcactggaagcccgaggggacgcgcctgccgcagtagttgacgaggaggctgaggtcttgggcgggtgcgacggcttgggcgccttgggtttgtcgcagtcgcaggctacctcgtcgtctggcactgacagcgagaggatgggcgtcacggcggtggagagcccagcagcagcgtgaggaggaacggctggagcttcttgctgc

SEQ ID NO: 20761 - DNA, 322 bp, Zea mays
  Coding DNA Sequence Number=SeqID_6358
ttcaccgatgccatcttcatcaaggtcgacgtcgacgagctcgcggaggtcgcaaggacatggaaggtagaggcgatgccaacgttcgtgctggtcaaggatgggaaggaggtaggccgtgtgacgagcggtcgttgcccccgtggacgcgctgaagctgggcgtgtgcgccaacttgctgaacgggctgatcaacgcgaccctggggaccccgcccaggaccccgtgctgcacgctgatccaggggctggcggacctggaggcggcggtgtgcctttgccccgtcctcagggccaaagttttggggatcaacctcaacctg

SEQ ID NO: 20762 - DNA, 243 bp, Zea mays
  misc_feature (199)..(199): n is a, c, g, or t
  Coding DNA Sequence Number=SeqID_6359
gattcaagaggtctccgtttcaagtgttaatgcctcaccatctgatggtgtctactggaaacagagaagttgcttctaaagtcatggtagagtcgcaacaaaataatctcccaagggcccttgcacaatcaaggaaggacacaattggacagggtcccatacccggggataggcacttgatgtggaaaactggcctcangatcttaccatggtggtctttcagggaactggagcaacagaaga

SEQ ID NO: 20763 - DNA, 420 bp, Zea mays
  Coding DNA Sequence Number=SeqID_6360
ttgagggcgatctctccgggttcaagtgcggtcttggcgcatctgttcctgcagcacacaagtgcttccctgaccatcaatgaaaactatgactctgatgtgcaggctgacaccgaaacattccttaacaaaattgtcccagaggtctgctccttggaagcatactatggaaggacctgatgacatgccagcacatattaaatcttcaatgtttggttgttccctgacgattcctataactgatggacatctcaatacgggcacttggcaggtgagggaatggacatctgatattcaagcttagttcatgtatctcaatttgcattggtataccatgattagggcatatggctgtgcgaacataaaaaccatgccagccctcgcaaaattgtgattactctcagcggtgttgaacttgaa

SEQ ID NO: 20764 - DNA, 520 bp, Zea mays
  Coding DNA Sequence Number=SeqID_6361
accgtcgtgtggtggttgcttcttagtagtttgggtgaccctacctggttcaccctttaccaccggtggtgctggtgcctctttggtattttggctaatacccagtagttgctccattactaccagtggtggtgtgacctccttcctacattaggtagtgctagctagttagcccgttgctgctgcgggtagtagtacccgcctactattttggactgtattaaccggttggcccgttcctcctggtggtggtggtctctgcttactgctagctagttagcccgttgccgctggtggtagtacccgcctactactttggactgtgctcactggttggtccgttcctcccggtggtggtattctctgctttctcccttgggtaactctagcaggttggtcgacacttgctacatctggtagtactagtggtgtaaagtcgttgggtgcaaccgtcagtacaacccccgctttagttatcggtggtcacaccacctttatcgcccttgcgtggtaggtagta

SEQ ID NO: 20765 - DNA, 385 bp, Zea mays
  Coding DNA Sequence Number=SeqID_6362
gaacacccgaaccacagtcacgtgagccgctaggcctggaacccctgcacgccctgctacgcagagtagccgtcgccctcctagggctcctggaccaaaccatggtaacgtgcgaaccgacccaagaagttcattgacccaagtttttcctctcggtaggaccaggtgggtaaggagactacgatccgcataccctttgtgcacctgcaggttccactattcaaggtccaggtcaccacgaaggtagaagaggtcgaggacagtcgatttacgaaggaagaagatattgtctccttcccgaaggccgagacgttcgagtaggattacgaggagatatctcaagttcccgataatctagaggaggagctattattccggatcgaga

SEQ ID NO: 20766 - DNA, 381 bp, Zea mays
  Coding DNA Sequence Number=SeqID_6363
gatccggaataatagctcctcctctagattatcgggaacttgagatatctcctcgtaatcctactcgaacgtctcggccttcgggaaggagacaatatcttcttccttcgtaaatcgactgtcctcgacctcttctaccttcgtggtgacctggaccttgaatagtggaacctgcaggtgcacaaagggtatgcggatcgtagtctccttacccacctggtcctaccgagaggaaaaacttgggtcaatgaacttcttgggtcggttcgcacgttaccatggtttggtccaggagccctaggagggcgacggctactctgcgtagcagggcgtgcaggggttccaggcctagcggctcacgtgactgtggttcgggtgttc

SEQ ID NO: 20767 - DNA, 328 bp, Zea mays
  Coding DNA Sequence Number=SeqID_6364
cagctccgccctaagtcatttttgccactacaaacgatcgaatactgaacgtagttggtcgtacgtttgagtagttctaatcttcgtccacactacagccaccagtcacactctatcaaggaccgacccccacactcgtttaccaccacccacatctcatccatcctcgcccacagagttcagctttgcccaccacattgctatccacttcgccaggttaatatatttaaaacaatagactggaagaactggaaatgattctggtaatgctaataataacattggtaacaataatgctaataataacaacaacagatgtaatccggat

SEQ ID NO: 20768 - DNA, 324 bp, Zea mays
  Coding DNA Sequence Number=SeqID_6365
atccggattacatctgttgttgttattattagcattattgttaccaatgttattattagcattaccagaatcatttccagttcttccagtctattgttttaaatatattaacctggcgaagtggatagcaatgtggtgggcaaagctgaactctgtgggcgaggatggatgagatgtgggtggtggtaaacgagtgtgggggtcggtccttgatagagtgtgactggtggctgtagtgtggacgaagattagaactactcaaacgtacgaccaactacgttcagtattcgatcgtttgtagtggcaaaaatgacttagggcgga

SEQ ID NO: 20769 - DNA, 417 bp, Zea mays
  Coding DNA Sequence Number=SeqID_6366
gcgacgccggtcgtaccggttacatccccgctgcccagctccagggagtgatcgctgccggaaacctcaacttccccatctccgccgagcagcagatgattaggatgtatgacttcaatcggaatgtatccatgaagttcgaagagtttctggctcttataaattcctagagaaggtggaaaatgtgtttttccgccctggataggggtcgaggatttcttagtcttgaggaggcgtaccaggcagtaatcaaactgggcttctcgtgagattccccagccttctatactgtttgagagagctttgacgaaaccagaaagggtatgattcaattgattaaaactatatcactctggaatttttgggcagcccgcccgaaaccggttgaattcccttctatacaagtggccaggcaga

SEQ ID NO: 20770 - DNA, 536 bp, Zea mays
  Coding DNA Sequence Number=SeqID_6367
ttctgcctggccacttgtatagaagggaattcaaccggtttcgggcgggctgcccaaaaattccagagtgatatagttttaatcaattgaatcataccctttctggtttcgtcaaagctctctcaaacagtatagaaggctggggaatctcacgagaagcccagtttgattactgcctggtacgcctcctcaagactaagaaatcctcgacccctatccagggcggaaaaacacattttccaccttctctaggaatttataagagccagaaactcttcgaacttcatggatacattccgattgaagtcatacatcctaatcatctgctgctcggcggagatggggaagttgaggtttccggcagcgatcactccctggagctgggcagcggggatgtaaccggtacgaccggcgtcgccgcggtcaaaccacttccggagcgccaccccgttctccatctcttgcccccggcgtggggtggggacggggaacccgcaagcgcgaggagccgaccggagcgccgatcagtacaaagg

SEQ ID NO: 20771 - DNA, 53 bp, Zea mays
  Coding DNA Sequence Number=SeqID_6368
agctaaggagatagatccgctctgccatggtgggcctgctatcatacgttatt

SEQ ID NO: 20772 - DNA, 591 bp, Zea mays
  misc_feature (269)..(269): n is a, c, g, or t
  misc_feature (276)..(278): n is a, c, g, or t
  misc_feature (282)..(289): n is a, c, g, or t
  misc_feature (294)..(340): n is a, c, g, or t
  misc_feature (351)..(353): n is a, c, g, or t
  misc_feature (367)..(369): n is a, c, g, or t
  Coding DNA Sequence Number=SeqID_6369
gcctcctcatcatggaagctacaagaacactttgagtaggtgaagaggatttgcgacactaccacattgtctttggccatgcatcatctcagtgataagataacaatccaacttgatatttcaaaattgactgccaagctacggtaagggaaggtagactcaagtgcattgacaccaaaggagaagtatgaaacttggaaggagattaaaattatgagtttcagaaaaacagtttctcccatgtggggggcaacatcagcttatcttgnatggtannntttnnnnnnnnggtannnnnnnnnnnnnnnnnnnnnnnnnnnnnnnnnnnnnnnnnnnnnnnatccccttgtnnncaaatgaaccctcnnngcctctaacatccaccacctcgtggtccatataagggctttttcggttattcctgtccatgtggattagatgagattgtgaaaaaatatgaaggattttaacttgtttgagatttaaacccacccaatcccattcaatccacatggattgagagaaaagcgaacaaaccctaaatagaagaaaaacaaattactattggattaagttgtaaattttgatatg

SEQ ID NO: 20773 - DNA, 176 bp, Zea mays
  Coding DNA Sequence Number=SeqID_6370
caccatattaggcagaatctgacgcctttaatgtaaatggacacaagaccttcgttgcaatggatgattatcttgtcactgacaaaatcactgcattcatagtgcaaacggtacatgcagcaactgaagtcccgaaagactagcaacaaaaagactgtatgacatgtaccggaggg

SEQ ID NO: 20774 - DNA, 318 bp, Zea mays
  misc_feature (226)..(226): n is a, c, g, or t
  Coding DNA Sequence Number=SeqID_6371
gccaaagaggatgttgaatcagttcattcaaccaatgcaagcctatataagaatgttttcatatctagttttgcaggtcggttactggtgtgcatagtatggttatcataactaccttcaaaagcatgtgatgagttgctgaccaatgctgccatgttttctcgagaacagagatcccagggtcatttccgcattgcatgatcgtggatagatttcatcggaagcnagtcttgaatgggcaactacacactagctagaagtgctaacatccactgtggttctccctcttagatatactaacgctatttgagttgggaa

SEQ ID NO: 20775 - DNA, 91 bp, Zea mays
  Coding DNA Sequence Number=SeqID_6372
ttacctctgggtaccaatttggtcatcgcgggcagaaccctggagtaggggaagaagaattcccacactaccacccggtctttggcgatgc

SEQ ID NO: 20776 - DNA, 139 bp, Zea mays
  misc_feature (54)..(54): n is a, c, g, or t
  misc_feature (68)..(68): n is a, c, g, or t
  misc_feature (85)..(85): n is a, c, g, or t
  Coding DNA Sequence Number=SeqID_6373
agttcttgaaatgcccaagggagccatcaccgactctgtgtttgaagaggtacnccgagttttgttanacatagtaaaatgctgntgcaaatgctacccccagggacttagggaaagataccctcccattccaggcggg

SEQ ID NO: 20777 - DNA, 437 bp, Zea mays
  Coding DNA Sequence Number=SeqID_6374
atcgaaaaatctcctttctcccgtgcgcttcccagcctcgctccctctggcgctgtgggcccgacatgcaggcgtggttctcctccggctccgggccctcctcctcgtctgcggcgtcctcatcgcagccgtcgctgctcgcagagtggaactcctacgctgccgcccgctccgctgaggacgcgggcgatggcttcgggatcgacatcgaggcggccgtccgctccgccaacgaccgcgtcgccggcaccttcggcgtggtctcaaaaggtgttaaagggtttccaggcagaggagaccacaacggaaatatgacggcgtgagtttgagatcgtcgttaacggaaatatgacggcgtgagtttgagatcgtcgttacttgttaatagagttgtcatgttcattttagagtgttggctatacccagcttttctaaaa

SEQ ID NO: 20778 - DNA, 503 bp, Zea mays
  Coding DNA Sequence Number=SeqID_6375
ggatcgcttccgtcgtgtttccaagcttcgagagtgtgtggtggcgaggtaattcctcgtcggtgtatacacggcgtcgccagtccgccatgtgatgtcgccaaagccctgcactgcatgatttctggttgtccccactatactcagtgctcaggaggtgatgctggcaacatggaggactttgaggagttccaggactacgacgagttctagtttttcttagtggcaaacccccagtcagctgcctgtgaaggccttatcttctacgtttcgtattccacactttgatattaatgttaatgactttggctatgtattagactctgtggatgtctcggacatcttattgtaataaattacctttccgctatttactttgagcattgtgtgatgatgtccaattatgtaatcgctatatacgtgagtttctgatcctgacacgtacatggctcgcattcggtctgccttccaaaaccgggtgtgacacttctattacctaataa

SEQ ID NO: 20779 - DNA, 128 bp, Zea mays
  Coding DNA Sequence Number=SeqID_6376
atcctctctctttcgatcggcggagcacaaagctgagtccttgctgcacgcgtggcgtcgcagtaagtaagtaagtaagcaagtgacacgagaggtgcgtgcgcgtggttgcagagaagctgtcgcag

SEQ ID NO: 20780 - DNA, 438 bp, Zea mays
  Coding DNA Sequence Number=SeqID_6377
gacggcgacacgacaccaacaaagaaatctccctagtaccagtactactgaataccactccattttttttttttttttatcagtagcaaccagacggaatcatcactcacgatcacggcgagatagcagagtatctacaaggggatcagaatcagatcacacaaccgacaccacgacgcggtacaaaccctccgacaaagcctccgacacccaagccgaccccgccgacgtacaccccttctcccaagcctccgacgcccaagccgaccccgccgacgtacactccaagccccaagcctcccacacacccgacgcccaagccgaccccaccgacgtacaccccttccccaaagcctccgacgcccaaactgaccccaccgacgtagaccacttccccaaagcatccgacaaccaagctgaccccacagacgtagactc

SEQ ID NO: 20781 - DNA, 395 bp, Zea mays
  Coding DNA Sequence Number=SeqID_6378
gtattctgctcaagcacaccgcagaaaaagaaaaagaaaaggcaaaggcaaaggaatcccaatcaggcaagcaaaaaggaagaaccaggtgctgcggccggagatgtcgtcgcagctgatcgaggagcaccggtcgggcgcggaggtgcacgtcgggcacgagctgtgcgagcgcaagtcgcgcgagttcatggtggagctgggcctccccgacgggctcctcccgctgcccaggctcgacgaggtgggctacaaccggtcgacggggttcgtgtggctgctgtcctcacttttggctgtataagagaggattacgcaccgtttcattttatactactacttatctgttactagtgtattgcgcgcgcctatgcgcgcgtgctgaatagcaactt

SEQ ID NO: 20782 - DNA, 514 bp, Zea mays
  Coding DNA Sequence Number=SeqID_6379
ggacgccggtgttggttgcacaaaccctctaagaagttctgagccactttttatttcttttcttctcttagattcattcctcatgttcttcaaactaaccctgtcctatcgttggcatagtctcttttgtgagttagttttcgttgccgttctcttgtcgggtatttgttcttggtgagttgattttctatgcgaggtgatgatgcatgtatgaaagtctgtcaatcccctgatgtcataaagtgatgactcctcatacatcccgacaggctctgatcgcatctgcagccgctctacccgcctcgctctattggatttcgatcttccaagagcgcagctcgggaacagaactcagctctccaccagccttcagctagtctacagtgcaaatctgctggcataaaagtagtagtttaccatgataagagtaaattatattgtaaaaagggtaataaaataacttggcataaaaaactaacaaataaattaacgtgttacttgttaggcggtcaca

SEQ ID NO: 20783 - DNA, 156 bp, Zea mays
  misc_feature (41)..(41): n is a, c, g, or t
  misc_feature (83)..(83): n is a, c, g, or t
  Coding DNA Sequence Number=SeqID_6380
ggtgaccctaattggactgtcatggttgaattctttaacanatggacagcctttgatgccacccaggcactagtaggtgtagnggtctttcttctagcactggaggtacaactgtgttcatcaagtaacactgtcaccataacagtcttcccatcg

SEQ ID NO: 20784 - DNA, 230 bp, Zea mays
  Coding DNA Sequence Number=SeqID_6381
acggtgtgccgcacctgggcctttaacgacggcgcctacaacgcgctccagctctccccgggacacttcgacgagcgcgtcttcaaggcgctggacatggtggtcgtggaggcccggcggcacggcgtgcggctcatcctcagcctggccaacaacctggaggcgtacggcgggaagacgcagtacgtgcggtgggcgtgggacgaaggcgtcggcctcaccgcctccaa

SEQ ID NO: 20785 - DNA, 438 bp, Zea mays
  misc_feature (297)..(297): n is a, c, g, or t
  misc_feature (343)..(343): n is a, c, g, or t
  Coding DNA Sequence Number=SeqID_6382
gtctccttgctctacttttcattaattggcatgtcgctgctgctgtttcgcatttgattcgacgagttcgtgtccgtaaccggcgccgctgatagctttgttcagtccgattttgaactgaaaacaaacagctatcctcattaacctaaccaacacgtgacctgcgctttcagatcttcacggcttttacccgtttaaccgctcgatctagccaaaccctgccaataaagctttcgaggaatacgaaggcgggccccttttgcttcgcttgatttgttgcgaggatcctttcaccanaggtcccaacggattttaccctacctgatcgggggacgcgaccttntaactttgcacaaaactctcccgtgggccttcggagtggcgcgctcaccaaaggcagcgggtgggccggcgaatcaatgggcctccaaggtatcc

SEQ ID NO: 20786 - DNA, 459 bp, Zea mays
  Coding DNA Sequence Number=SeqID_6383
gtccggcgccattcgggaacgccgtcttccgggcgcccgatcatcgaaggtcgggcgccgttccgtcggaatccggccgaaactgcggccgggaggcggagggcaccgcgacttcccctctggagcaagcccccgaaaaggaagcccgcgcctggcgcatgggcgaggccggggtctttacttttgaggggcggcccggccgagactccttcaatccgcgggcgtacatgggcgccccccccccctgggccccgggcggaggtctaacggggcggggcagtccgggcgcccgtcgaggcggaggcgtcctcggggtacgccggtccacgaaatcccgcactagccctgttatgtcgggcccacctgtgcgggcgggttaccgcctctacacccccgaggaggtgtgtgtcgccgtagccgcgcggggagcaatatcaacgcatgcgaagggcctcgggc

SEQ ID NO: 20787 - DNA, 417 bp, Zea mays
  misc_feature (381)..(382): n is a, c, g, or t
  misc_feature (384)..(384): n is a, c, g, or t
  Coding DNA Sequence Number=SeqID_6384
aatttgtaagttttctccatgtcaatgaaatactcaaaagcaattacggtggtcaggtttttagtcagcagtattcatttgattgtgtataattaggtacccagataaagatgcccagtatcacttcttcaggaattatctgcaccctgatagacctagtgaggtatgtgaaacaaaaccaattgaaatctattcttggaattcaagttctttctgaagtaaatgaagctttctgttagtacctactctatgtaatatatatttgacgctatgagtagttccatctttgcttgttttttatgaagttagtaatacctccatatgtgccacatgtgtttgacattttgagcgttgttaagctttttttctgaacaaacatannangtctgcgtgccatttcattaacgccccgtttgg

SEQ ID NO: 20788 - DNA, 131 bp, Zea mays
  misc_feature (98)..(98): n is a, c, g, or t
  Coding DNA Sequence Number=SeqID_6385
cccgatttcatgtggcgcttatcatgtggctgtattgactttctaagaccgaggtgtacccttgggggaaaaggtgcaaatgggccggttaggtcatnggcgaatctgaggataaaaaactcccccattgg

SEQ ID NO: 20789 - DNA, 582 bp, Zea mays
  Coding DNA Sequence Number=SeqID_6386
atgaacccaggccatctcttgatcttttcactgcctatttaagaataaccgagggggaagaagtgggagtaaaggagagatccttacctatgtcatcaaccacggtgtgtagcttcaacatagttttgttgcctccccttacccaaactataccctggacacgcccaaattctctggtcaagtgactcaacgtgtctggtgaccacgtcgccgacgcctcaacctcatactggaggaggagcagagagcaagatggggtccggatctttcctcaaggtgctggccaagaacttcgatgtccttgccgggccagtcatatcacatgcttatcctctatatgcttctgttagagcgatagagacaaaaaatcctgtagatgatcagcagtggctcacttactgggtgttgtactcatttgtcactttgtttgagctaactttggctccaattatcgagtggtaaattacgcttttggtcatgtcccaatgtgttcatttttatggtttttgtggcctttgtgattatttgcaaacattattggtggtgcatggatatagatgtgtttggtgcatcaagttggta

SEQ ID NO: 20790 - DNA, 489 bp, Zea mays
  Coding DNA Sequence Number=SeqID_6387
tatccatgcaccaccaataatgtttgcaaataatcacaaaggccacaaaaaccataaaaatgaacacattgggacatgaccaaaagcgtaatttaccactcgataattggagccaaagttagctcaaacaaagtgacaaatgagtacaacacccagtaagtgagccactgctgatcatctacaggattttttgtctctatcgctctaacagaagcatatagaggataagcatgtgatatgactggcccggcaaggacatcgaagttcttggccagcaccttgaggaaagatccggaccccatcttgctctctgctcctcctccagtatgaggttgaggcgtcggcgacgtggtcaccagacacgttgagtcacttgaccagagaatttgggcgtgtccagggtatagtttgggtaaggggaggcaacaaaactatgttgaagctacacaccgtggttgatgacataggtaaggatctctcctttactcc

SEQ ID NO: 20791 - DNA, 159 bp, Zea mays
  misc_feature (50)..(50): n is a, c, g, or t
  misc_feature (76)..(76): n is a, c, g, or t
  misc_feature (85)..(85): n is a, c, g, or t
  misc_feature (88)..(88): n is a, c, g, or t
  misc_feature (115)..(115): n is a, c, g, or t
  misc_feature (120)..(120): n is a, c, g, or t
  misc_feature (127)..(127): n is a, c, g, or t
  Coding DNA Sequence Number=SeqID_6388
aaccacgcattctcgaagcaggagatcgtatcgctgtgcaccgcttctgncagctcgaccgtaacggtggcggatncggctccgntgncgagctcatgtcggtccgtgagtgcgncgganatccccnctcccagaggctcctgaggatgctggatgcct

SEQ ID NO: 20792 - DNA, 529 bp, Zea mays
  misc_feature (463)..(464): n is a, c, g, or t
  misc_feature (499)..(501): n is a, c, g, or t
  Coding DNA Sequence Number=SeqID_6389
acaagctgcgacacgcaggagtagacgacagatgttattattgccaacacatgcaattctttttgagaagctgagtagctgacaaccgaatgccacagatggataacgtgatatcacaagctcaggcaacactaggttctctcatgactcaacggtcaacattcggcggcatcactacaaagataagcaacgtcagcagccgacttccaacaattaaccatgtcctcgcgtctatcagaaggaagaaatccatggacactatcatcctttcccttgtcgcatcagtctgcgcgttcctcatcttcatctactggctgtcgaagtaggtttaccaaagcaaatgtattacggtgttgtaagcttgggatcacactaccggtacagatgatcgtgattggtgtttgtacaatattggttgattgaatgctattacgattcgggagtgctgtagccaccgtgtctnnaagctgtgattgattgggcgcatggattgagttgnnntatcagcaacttatattataatggaggg

SEQ ID NO: 20793 - DNA, 163 bp, Zea mays
  Coding DNA Sequence Number=SeqID_6390
gggttctggcatctctctattcatcgctaccaacatctgtgagaatatcatctggaaggcgtttagccccacaaccatcaacagcggacgtggtgctgaatttgaaggggctgtcattggattgttccatctgttgattaccagaactgacaaagtccgtgcc

SEQ ID NO: 20794 - DNA, 455 bp, Zea mays
  misc_feature (262)..(264): n is a, c, g, or t
  misc_feature (294)..(297): n is a, c, g, or t
  misc_feature (306)..(306): n is a, c, g, or t
  misc_feature (309)..(309): n is a, c, g, or t
  misc_feature (311)..(313): n is a, c, g, or t
  Coding DNA Sequence Number=SeqID_6391
gggacaggtggcttaccgcctcagtttgccccctaccagtcgtatacacgtaagtggtgtatgtgtctcaaaaacttgctcggggtttcaagggtctggatcctcttcctttacctgttgcgctacctgagttcagtgtgcttacccaagttattcattaccaaaggtaaccggctcatacagcaggttctggtgggcaggcactggtggcatggtctggtccttcgcccgagctggcaacttgggaagatcgcgaagcccnnngccagtgctttccctttgcgcctgcttggnnnnaagcaggtnctncnnnggtcgggagtgtcagcgatgccaaagtgctggacaagcaacaggaagacattgtaactgaaggacgcgggcgccgtattcgtcgcaagaatccccgtgtgtgtgggcccgagtggatgtaacctgttgtctcgggttggact

SEQ ID NO: 20795 - DNA, 426 bp, Zea mays
  Coding DNA Sequence Number=SeqID_6392
acccagcggatgcagaatcccaaggaaggtctgctcatgcccatctccacgtgctgctccagtgagaagtcgtcacaacacctctttcactgtgttccttgcccaagacaaaggctgtcaagatagctgctttagcaagatatatcctggtgctttgcacattcaaccaaaaattgactctccaaaagcattgaagatccttgtttcgtctgccttgaaaatccttctgtgggatatactatccgccatttgccttgctttcacaagttccataaagagtgtattgacgagtggcttagaagaaagaaactgtgtccagtctgcaagtttggggttaattgaagtttgttgtatcagtctagagttggagttctacttggtagtgtcagcgacgaggtgcttcaatttctaatacgagatgctttc

SEQ ID NO: 20796 - DNA, 460 bp, Zea mays
  Coding DNA Sequence Number=SeqID_6393
gcacagatcacagcaatacattgtttttttatcttagaccaaaaaaaacctctgcaggaaagcatctcgtattagaaattgaagcacctcgtcgctgacactaccaagtagaactccaactctagactgatacaacaaacttcaattaaccccaaacttgcagactggacacagtttctttcttctaagccactcgtcaatacactctttatggaacttgtgaaagcaaggcaaatggcggatagtatatcccacagaaggattttcaaggcagacgaaacaaggatcttcaatgcttttggagagtcaatttttggttgaatgtgcaaagcaccaggatatatcttgctaaagcagctatcttgacagcctttgtcttgggcaaggaacacagtgaaagaggtgttgtgacgacttctcactggagcagcacgtggagatgggcatgagcagaccttcc

SEQ ID NO: 20797 - DNA, 493 bp, Zea mays
  Coding DNA Sequence Number=SeqID_6394
ctcatcaggtgagggctcttgcaacatccaactctaaactgggaggcacacaatccactcatcaacctcagtaggagcaccacgaagtggtacaggtggagtagttcaacctcagcaagagctagctgcaggtgttggtgttcctactctcatcgacacagacatagctgatgtctgcgtccaactactggacgtgcaagacgaaaagctcttcctgatcaaccacgaaaagatggatgcatataacaacctgatatcaaagaaacaagttccatgaccgatgacgaaaagactaaactcattattagcatgaagtgtttgaggaagatgttttcccctaaagttatataattcgaccggggtccaggagagtaggagactgaaagcactgtcgagaagactgaaattatcacattgacatgaagaccaaagccatctcttacctacttatctttgtagcttatgtttctattttatccagtcatcaaaacta

SEQ ID NO: 20798 - DNA, 417 bp, Zea mays
  misc_feature (287)..(287): n is a, c, g, or t
  misc_feature (312)..(312): n is a, c, g, or t
  misc_feature (315)..(315): n is a, c, g, or t
  misc_feature (363)..(363): n is a, c, g, or t
  Coding DNA Sequence Number=SeqID_6395
ttggctggatatgcccgtcgaagctcggattcgctcgaggacccatcctgcacacgaagcctagaatagccctcccctgctccgccacctcctcggatcccgaccaccccacccccaccccagacaacaggttgatggaggctaagatgggacgcttcttcgagtccgtgagcaatttcttcaccggaggcgaccacatcccctggtgcgaccgcgacctcatcgccggctgtgaaggagaacttgtcatgctgcaatgaggaaagaggatgaaagccttatgaggntgcatgggccttgtgactccagganacncacgtgtaacggggatcacatgcttcaagctcttggataatctgcagnctctgagaatagggaaagtgacttgtggtgtgatctacggatggggatactcaa

SEQ ID NO: 20799 - DNA, 270 bp, Zea mays
  misc_feature (54)..(54): n is a, c, g, or t
  misc_feature (73)..(73): n is a, c, g, or t
  misc_feature (99)..(109): n is a, c, g, or t
  misc_feature (111)..(112): n is a, c, g, or t
  misc_feature (118)..(125): n is a, c, g, or t
  Coding DNA Sequence Number=SeqID_6396
agcgtaaacgccgtagactgtggaggcgtcggtgtcgtagaggcagtaggaccnctcgcgtcctgcctccgtnaccctctgcgccttcctcacattccnnnnnnnnnnntnnttcctnnnnnnnngccacttcttttaaaagtaggggccgcgcggacgcgtaccccctctgccacaaattatgacgtcctctcccacttgggaagatggtaggccagcgcacctgccaagtgcaatgcaggccactgacctagaccacgggccttattg

SEQ ID NO: 20800 - DNA, 416 bp, Zea mays
  Coding DNA Sequence Number=SeqID_6397
gggagtaagaaaccatcactacaattatagtttcaaattgtgattttcaatagtatatacatttgaattttttatatctttacaatgtattagaaaaaatatcacactgcatagttcacgctctgatagagtgatagtaacttgttttttttttggtttaatttgggtaggcagtttttttacccaactgcccattagcctcatcaatatctatggtcccttgcatttgaatggacctacatgttgttttcaagggctcctgatgacctcagacatatctacatgggcttgattctggcatacatctactatatgcattcaagttacaaaaatgattaatccacgtcccttgatttatgatacttcaatactcaggaagccattttagctaatggctctcagggtcagcctgataa

SEQ ID NO: 20801 - DNA, 473 bp, Zea mays
  misc_feature (430)..(430): n is a, c, g, or t
  Coding DNA Sequence Number=SeqID_6398
aaaccccagttatcaggctgaccctgagagccattagctaaaatggcttcctgagtattgaagtatcataaatcaagggacgtggattaatcatttttgtaacttgaatgcatatagtagatgtatgccagaatcaagcccatgtagatatgtctgaggtcatcaggagcccttgaaaacaacatgtaggtccattcaaatgcaagggaccatagatattgatgaggctaatgggcagttgggtaaaaaaactgcctacccaaattaaaccaaaaaaaaaacaagttactatcactctatcagagcgtgaactatgcagtgtgatattttttctaatacattgtaaagatataaaaaattcaaatgtatatactattgaaaatcacaatttgaaactataattgtagtgatggtttcttactccccgggntcgtctccaaggagaagcacatcgttctccctgtcgacaaata

SEQ ID NO: 20802 - DNA, 480 bp, Zea mays
  misc_feature (37)..(37): n is a, c, g, or t
  misc_feature (112)..(112): n is a, c, g, or t
  misc_feature (128)..(128): n is a, c, g, or t
  Coding DNA Sequence Number=SeqID_6399
tcgcctacaaggaacgtgagctgaggacggccggaancccgggccgacccacgcggccgtgcgaggtccgcccacgcgtccgggtagagactcgcagctgagctgacacggnccgagaagcagcttgncattgcaggcgtagtgacgtgacccagcagcacctagcactagcagtccatcggagcgacgatggtgagaaggacggtgctggcggcgctgctggtggtggccgccgccctcgccggcggcgcgcgggcgcagctcaaggaggggttctacgactactcctgcccacaggcggagaagatcgttaaggactacgtgaaggcgcacatcccccacgcgcccgacgtcgcctccaccctgctccgtacccacttccaacgactgctttcgtcagggggcttgcgacgcgtcagttgctgcttcaaacgcgaacggggccggcaacgaaggcggagaaaggaagcgggcggccca

SEQ ID NO: 20803 - DNA, 478 bp, Zea mays
  Coding DNA Sequence Number=SeqID_6400
ccccacctaggctaggactaggagccaccaaactctgccccgccatgccgggcctcgccgcctcaggcaactccgcccccggcgggcgttccattcagagaagccagtctctaggtacctcctagcttgacgcgcaccctccacaaccgagtgaccacgcgcgccaccccccccccacctgaaccaactacacccccggacctaccgcgctcacccccacattacctgccagtccgctcggtttctctgggcggacacctgtacatacgactacgacgcgcggagtccaacggaaattcacaccgccccaaaggtagcatgtaccgccccccccctgcatccctgctcccccccccctccccctctccctcctctccccctgcgcacctcccccctccctcctcacccctacgagccccgggccggtgccgccacctaccctgctctgctcccgccacgccacgggaggacgtaaaca

SEQ ID NO: 20804 - DNA, 516 bp, Zea mays
  Coding DNA Sequence Number=SeqID_6401
tgtggttcgtgtttacgtcctcccgtggcgtggcgggagcagagcagggtaggtggcggcaccggcccggggctcgtaggggtgaggagggaggggggaggtgcgcagggggagaggagggagagggggaggggggggggagcagggatgcagggggggggcggtacatgctacctttggggcggtgtgaatttccgttggactccgcgcgtcgtagtcgtatgtacaggtgtccgcccagagaaaccgagcggactggcaggtaatgtgggggtgagcgcggtaggtccgggggtgtagttggttcaggtggggggggggtggcgcgcgtggtcactcggttgtggagggtgcgcgtcaagctaggaggtacctagagactggcttctctgaatggaacgcccgccgggggcggagttgcctgaggcggcgaggcccggcatggcggggcagagtttggtggctcctagtcctagcctaggtgggggaggcgagcagacagctgctagctcggtg

SEQ ID NO: 20805 - DNA, 508 bp, Zea mays
  Coding DNA Sequence Number=SeqID_6402
acaaagggagccagctttcaggagggctgaaacagagaattgctattgcaagaacaatactgaagaggcctgccattctgcttcttgatgaggcaaccagcgcacttgatggtgaatctgagagggtggttatgagctctttagggaccaaggtgtggaaggacaaagatgagcaagccagtacgattacaagtatcacagttgcacatagactgtccacagtcataaatgctgatacgatagttgtgatggagaaaggaaaggttgttgaacttggtaatcaccaagagttgatctctgctgaagatggcgtttactcaagattgttccacttgcaaagcaacatgaaagaatgaccatctattcaagttccattatggccaaagaccaaagacacttagcaagaatagctttaggagattaagcattgctcaaatgcacttgctgtcacaagttgtaataacatagctatatcatcatatatcgatgatgcatagtccaccagtta

SEQ ID NO: 20806 - DNA, 259 bp, Zea mays
  Coding DNA Sequence Number=SeqID_6403
tgagggtttatgtttaggtttgagccctttctttggatgcttacactttacatggcatctgcaaagagatgatattgatgttttggattggtagctatgatgtgttcgcactgcacatacccatggaaaaatatatatataggtcaccagagttccctggattttatataattgtacttggacacatcaagaagcaaaatttcatacttaatccactatggtgcattggctacttggctgaagggttataaatgctttt

SEQ ID NO: 20807 - DNA, 327 bp, Zea mays
  Coding DNA Sequence Number=SeqID_6404
gacgtcgtccaaactgatggtcctggggagaccttgcagaaaggagtctagtttcccagcgccttcaatgatattttcaggtactgccttctcaactgcagctttaatatgatcttcaaaagcatttataacccttcagccaagtagccaatgcaccatagtggattaagtatgaaattttgcttcttgatgtgtccaagtacaattatataaaatccagggaactctggtgacctatatatatatttttccatgggtatgtgcagtgcgaacacatcatagctaccaatccaaaacatcaatatcatctctttgcagatgccatgt

SEQ ID NO: 20808 - DNA, 374 bp, Zea mays
  Coding DNA Sequence Number=SeqID_6405
gacctgttccggatcccctactaaggttctccaaatcaccactcgcaagtcccctggcgtgaaggacaaacacatgggatcgggttggagtcccgcatccccagaggggggatgacctaatccgctcccctgatgggtggaacaaatcccctcccccacattgaaccccgggttgaaggtaaggggccctttccccacgtgtaaggaacgaaattctccaaagggcctccaaatttttttctttggggccccgggggggcccaaaaaaaaatttggggttttttttaaaaaaaaaattttcccccccaataatttgggggaagggggtgggagaattagggccgcaacatgaaaattttgaccaaaactctttg

SEQ ID NO: 20809 - DNA, 579 bp, Zea mays
  misc_feature (409)..(409): n is a, c, g, or t
  Coding DNA Sequence Number=SeqID_6406
aaaattttcatgttgcggccctaattctcccacccccttcccccaaattattgggggggaaaattttttttttaaaaaaaaccccaaatttttttttgggcccccccggggccccaaagaaaaaaatttggaggccctttggagaatttcgttccttacacgtggggaaagggccccttaccttcaacccggggttcaatgtgggggaggggatttgttccacccatcaggggagcggattaggtcatcccccctctggggatgcgggactccaacccgatcccatgtgtttgtccttcacgccaggggacttgcgagtggtgatttggagaaccttagtaggggatccggaacaggtccctttaaccctcaaatgcttgtccttggctccctttaccaaattcgcacnaacttctccaaagtcttgacgttcttggatgagagtgtgatgcggatgcggttgagctgcagctcgggggcatcctcgacgccaagcttccccttgaagccgccgtatactgccgccgccgccatggttctcttgtgctcggggaaaagggagtcttcgcttagtcgctc

SEQ ID NO: 20810 - DNA, 370 bp, Zea mays
  misc_feature (131)..(131): n is a, c, g, or t
  Coding DNA Sequence Number=SeqID_6407
aactacgcgattgcttcaggactcatgagtatgtatattttacacaggtgatgttttacaagagcaaaaattaaggcgagaatcagataatcgtgtgagtagagtacaacgtcagacaatggctatctganggaaaatggggtggttcaagaagtcgactaaatggaagttactctgatcatcggagtaataatattgtcagcgcccccactttgtccaagatattacagatgcagtaacaccaggctaggaattaagatgacaacattttacagcctgatgacatggggccagtaagaaactgggcgcagaattgccgtttatcttcacgccacctcctcacagtgccatccaactcattattacttcg

SEQ ID NO: 20811 - DNA, 245 bp, Zea mays
  Coding DNA Sequence Number=SeqID_6408
tagttggtgtaaatgctgtaagtgccagctaattttcataaaaatgtctcttcagtgaaatagccaaatgagtgcaataagctattgctgaaattgagcctgtaacatcatgcatacacgattgggttagtcagcgaagcagggcagcaggcgtgggcagtcgggctggtccagggacgccagctcgcatctgacggtttccgtctgcaaaggtagcagcagacgtcgcctttgaccgtctgtgc

SEQ ID NO: 20812 - DNA, 297 bp, Zea mays
  Coding DNA Sequence Number=SeqID_6409
taacaacacggacaagcatctgcgggattgaggcacagacggtcaaaggcgacgtctgctgctacctttgcagacggaaaccgtcagatgcgagctggcgtccctggaccagcccgactgcccacgcctgctgccctgcttcgctgactaacccaatcgtgtatgcatgatgttacaggctcaatttcagcaatagcttattgcactcatttggctatttcactgaagagacatttttatgaaaattagctggcacttacagcatttacaccaactaacttgctctctttgctccat

SEQ ID NO: 20813 - DNA, 448 bp, Zea mays
  misc_feature (209)..(209): n is a, c, g, or t
  misc_feature (290)..(290): n is a, c, g, or t
  misc_feature (332)..(332): n is a, c, g, or t
  misc_feature (418)..(418): n is a, c, g, or t
  Coding DNA Sequence Number=SeqID_6410
gaggcacatttttactaaattatccctaaattatttgtattttttaaaataacatgtaatcttgttgatctggtttactcaagctgcatcgagtttgtacttggagaagaatcctggagttattttacttggtttccttgatttgtagagacatgccagtgaggagcagtttaatcggtctcttgctttatgaagtggatgcaattatnaaagaccgtccgagcgggccaacatcctcgcgggggcttcgcccttggggccatcggacctggcccccaccaccgatgccnaggagctctaaggaacgacgccctccccccccaaacgcccanctctccgacaactcatcggcccgcctggggtctccccgcccggggccctgcaattttggttttcctttattctggcaaatccaggntgtttttccctataattactcggcagggtg

SEQ ID NO: 20814 - DNA, 454 bp, Zea mays
  misc_feature (33)..(33): n is a, c, g, or t
  misc_feature (119)..(119): n is a, c, g, or t
  misc_feature (161)..(161): n is a, c, g, or t
  misc_feature (242)..(242): n is a, c, g, or t
  Coding DNA Sequence Number=SeqID_6411
cccaccctgccgagtaattatagggaaaaacancctggatttgccagaataaaggaaaaccaaaattgcagggccccgggcggggagaccccaggcgggccgatgagttgtcggagagntgggcgtttggggggggagggcgtcgttccttagagctcctnggcatcggtggtgggggccaggtccgatggccccaagggcgaagcccccgcgaggatgttggcccgctcggacggtctttnataattgcatccacttcataaagcaagagaccgattaaactgctcctcactggcatgtctctacaaatcaaggaaaccaagtaaaataactccaggattcttctccaagtacaaactcgatgcagcttgagtaaaccagatcaacaagattacatgttattttaaaaaatacaaataatttagggataatttagtaaaaatgtgcctcagtc

SEQ ID NO: 20815 - DNA, 354 bp, Zea mays
  misc_feature (68)..(68): n is a, c, g, or t
  misc_feature (70)..(70): n is a, c, g, or t
  misc_feature (79)..(79): n is a, c, g, or t
  misc_feature (249)..(249): n is a, c, g, or t
  Coding DNA Sequence Number=SeqID_6412
taagccacaacctgggcctgggccgcgcttttggcccatgcggggcgcctttaccacccgccgatatncntggctgttngctagatcaacggctcggattcttgcgcatgctagttatatattgcggtaaaatcggactcgaggccgggggccgggctaaccattctacttctttccccagccgccacaaaaaaatctggccggccgccaggatctattggccgacggtgcctatcctcctctctctgnattctattttctttctctcagccgcgcagaacttcaaccgcattgaaattctggttcctgggacccttagagttttggagttagtcaatccttcttttgcgcccc

SEQ ID NO: 20816 - DNA, 382 bp, Zea mays
  misc_feature (161)..(161): n is a, c, g, or t
  misc_feature (331)..(331): n is a, c, g, or t
  misc_feature (340)..(340): n is a, c, g, or t
  misc_feature (342)..(342): n is a, c, g, or t
  Coding DNA Sequence Number=SeqID_6413
aacagcacacaacccaggtagcacagcctgtggggattggtcgagcccggggaggggggcgcaaaagaaggattgactaactccaaaactctaagggtcccaggaaccagaatttcaatgcggttgaagttctgcgcggctgagagaaagaaaatagaatncagagagaggaggataggcaccgtcggccaatagatcctggcggccggccagatttttttgtggcggctggggaaagaagtagaatggttagcccggcccccggcctcgagtccgattttaccgcaatatataactagcatgcgcaagaatccgagccgttgatctagcnaacagccangnatatcggcgggtggtaaaggcgccccgcatgggccaaaag

SEQ ID NO: 20817 - DNA, 294 bp, Zea mays
  Coding DNA Sequence Number=SeqID_6414
ctggagcattgccattcacgacatgtggttcatcgtgatatcaagggtgctaatctccttgtgaataatgaaggggttctaaagatagctgattttggtcttgcaaatttctttgatcccagcaaaaaccatcctctgaccagccgtgttgttactctgtggtaccgaccacctgaactgctactaggttcaactcactatgatgcagctgtagatttgtggagtgttgggtgtgtgtttcctgagatgtatcgtgggaaacctgtgtttatgttctgtctcccacgttaccat

SEQ ID NO: 20818 - DNA, 536 bp, Zea mays
  Coding DNA Sequence Number=SeqID_6415
ggcccgtcgcgcgtagcggtgtggggcggcgttgccgggcccgggagcccgcgcgtctcttctgccgcgaccgctttcgcggcgctacggcgcgggtggcggtgggcgcactcgggcgcgccgacgctggagcgcgcggcccgcacgttcctcctggcctccgcggcgctcgtgctcgcctgcgcgctctacctctacgtgctccgctacgtcggccggggaggtcgcgccttcgccgccgcgggcttcgtcgggggctccggcctgggccttggcggcgaggcgtgcgatgtgttcgacggcgcatgggtacccgacgacaccggccgccacccgctatacaacagctgccagtgcccgttcgcggagcgcgggttcgactgcctcgccaacgggcggaacgacactgggtacctcaagtggcggtggaagccgcggcggtgtgaagtgccgcagtttgcggcccgcaccgcgctggagcggctgcgcgggaagcgggtggtgttcgtgggggactccatgagccgcacacagtg

SEQ ID NO: 20819 - DNA, 418 bp, Zea mays
  Coding DNA Sequence Number=SeqID_6416
aatattcttttctcaggcgtatacattttcgtgcatctattgttctaccattaccttttccctatggaaatccgatttggcactttcgtgcatttattgttctaccattcctttttgcctatggaagtccgatttggtgggtttcacaagatttgaaactccaggcttttggaagcgattaaggcgaagtaaatcttctttcctcaggagtatatacactttggtgcacctattgttctattgttccttttccctgtggaaatctggtttggtgggtttgtgatctattcggttctttgcattttgtttatccctcctataaatcctgctattccctcaccttctttttgggtttgtttgaaaattttgtttcgggtctcccctcttcatgtttttttgatacagttcgagttcgata

SEQ ID NO: 20820 - DNA, 542 bp, Zea mays
  Coding DNA Sequence Number=SeqID_6417
tatcgaactcgaactgtatcaaaaaaacatgaagaggggagacccgaaacaaaattttcaaacaaacccaaaaagaaggtgagggaatagcaggatttataggagggataaacaaaatgcaaagaaccgaatagatcacaaacccaccaaaccagatttccacagggaaaaggaacaatagaacaataggtgcaccaaagtgtatatactcctgaggaaagaagatttacttcgccttaatcgcttccaaaagcctggagtttcaaatcttgtgaaacccaccaaatcggacttccataggcaaaaaggaatggtagaacaataaatgcacgaaagtgccaaatcggatttccatagggaaaaggtaatggtagaacaatagatgcacgaaaatgtatacgcctgagaaaagaatatttacttcgccttaatcgctttcaaaaatatggagcttcgaatcaggtgcaagcagatctagtaaaatggaaagtcgatgacaaacaaacatgtttttagcaacttgtcccaatctggagttgaca

SEQ ID NO: 20821 - DNA, 145 bp, Zea mays
  Coding DNA Sequence Number=SeqID_6418
gagagcacgctcttcttgcttttcacccttggtgtcaagcaaatgatttgctgctgtaacaagatggatgccacaacccccaagtactccaaggctaggtacgatgagatcatcaagggagtgtctttctacttggaaaagaagg

SEQ ID NO: 20822 - DNA, 505 bp, Zea mays
  misc_feature (368)..(368): n is a, c, g, or t
  misc_feature (370)..(373): n is a, c, g, or t
  misc_feature (375)..(375): n is a, c, g, or t
  misc_feature (389)..(391): n is a, c, g, or t
  misc_feature (440)..(441): n is a, c, g, or t
  misc_feature (463)..(465): n is a, c, g, or t
  Coding DNA Sequence Number=SeqID_6419
agctgtggtgctcctcgagttaatattattccggccggccggccagccaacctcaacatctggtcagatcacaaggtgcatggacaaagttttgccaatgacgggtcagcgtgcttctcagactcgaccatcaccattaaacaagaggacagtttcagagaagatggtgactcctcgacaatgcaaatggttaaagacccacctggagtagcatcatttttctgcattatggtacgtaccggtggccggtgggtaaatataaatcttccaaactaacattactggagcttagcatcagaagacaatgctgcctcctgcctgcatttcgcatgagaccgtcaagagaccattgtaaattcacataaagntnnnncntctaactataaatnnnggaacatggacatacatagtgacatacattgacacgattggagaacggnntggaccgagttctctcagcctnnnaaggtgttgcatcttatcttctcgctctctttgtaaagtc

SEQ ID NO: 20823 - DNA, 553 bp, Zea mays
  Coding DNA Sequence Number=SeqID_6420
acccaccgatggagagctgggtgatgcattatcccctccgcaagtgcggagccctggccgctcgccggcgcgggtcatcacccgagggtggatcttctacaagccccgaacccatgggccacctctccagaaaaaaggccccccgggtgggggaagaagggactggggaaccttcctgtttcccacagggggggacccgaaaagggaacccgcgaaagggcgcttccagttgcctcataaggccgggaggggtccccgggaacaaaggggtccactctgggcacaaggccctacccgggtatcgccgcgatccagagctccggggtaaggggattcccccccgtcgcgcccgcccggggggccatatccatagaaaaggggccccttctgttctcgtcctaaccagccgcgggtaaaacacccttcccacaagggcgctcccacaggcaccacaatgtggtgaactaacgggaacaaaaagaacaacgcacgccggggaggaatagctttatatacgcagcccctaaaccgccccgcaattcacataataaag

SEQ ID NO: 20824 - DNA, 563 bp, Zea mays
  Coding DNA Sequence Number=SeqID_6421
ttacccgcggctggttaggacgagaacagaaggggccccttttctatggatatggccccccgggcgggcgcgacgggggggaatccccttaccccggagctctggatcgcggcgatacccgggtagggccttgtgcccagagtggacccctttgttcccggggacccctcccggccttatgaggcaactggaagcgccctttcgcgggttcccttttcgggtccccccctgtgggaaacaggaaggttccccagtcccttcttcccccacccggggggccttttttctggagaggtggcccatgggttcggggcttgtagaagatccaccctcgggtgatgacccgcgccggcgagcggccagggctccgcacttgcggaggggataatgcatcacccagctctccatcggtgggtgggaagcggaccccaggcgggagctgcagcgcgccaccgcagtccattcgatcgatcacctagctagtggcaacaggcggaggcggccgggcggattggagcttcgaaacgatcgaggagctgccgatcgctggaaagctgattgat

SEQ ID NO: 20825 - DNA, 248 bp, Zea mays
  misc_feature (110)..(110): n is a, c, g, or t
  misc_feature (119)..(119): n is a, c, g, or t
  misc_feature (149)..(151): n is a, c, g, or t
  misc_feature (167)..(167): n is a, c, g, or t
  misc_feature (172)..(172): n is a, c, g, or t
  misc_feature (211)..(215): n is a, c, g, or t
  misc_feature (218)..(220): n is a, c, g, or t
  Coding DNA Sequence Number=SeqID_6422
gtccacaagctatgtttttggatcagttaaccgatccacccaatagcacctgtgcacaagtaatccactcaaagtcagagatttgtaccaacaaatggttcccagataanatcaacacnactaaaagccaaaaaacactaatggtttgnnntgctcaaccgatgtgnattangcaattttacaaaataaataaacttgctggccattttannnnntannnttgatggttgatttcaaatgactttaag

SEQ ID NO: 20826 - DNA, 396 bp, Zea mays
  Coding DNA Sequence Number=SeqID_6423
tcaccactcaccagaagcgctgcagcgccaccccagtcccccaccggccaccgaccacttgccgattgccgttgccgcgtcggcgttgctggatcctcaagcagacagcccagtccgcccggacccgggaacccgcccacgcgcttattaataacggccacctcgttcccccgcccgccccgaaggccgagggaagcgtacgcgcctagcgaccagcacagattcgttccacgcctacctcgggcttcggaggtggtggaggttcgggtggtggcatcggtggtggactgtagaggtggcgggagcttggtgcgtgcacgttgagtgtgtgcatgccatgaaattaaaaagcgatacatggagtgtgtggtacggtatgggacatttgctagagtt

SEQ ID NO: 20827 - DNA, 427 bp, Zea mays
  Coding DNA Sequence Number=SeqID_6424
cacactccagttcgaatctaccgtaccttgtcgccaccggcctaccgtccctcctcttcgacgcccttcggatacagttgcgtagacgtgccaagaccgcgaatgatgctcgaagatccggcgggcctccttggaattaccatcccttactgaccacaagagtgttgtgaatgatctggagatgaaacttaagagattgatgggaactgaagcacctaaagagcagaaggcagatgacagttcgctgagtgatttgcctgaagagattgtcacacctgtagcattgtcagaagaagatattggagccgtaatctaagcctaaccagtgatctgatgtgctggcaagtgagaccagaatttctagagtagttcctgtaaaacaatattttgggtcctgaagtcaccaccatttggatcgacaattttc

SEQ ID NO: 20828 - DNA, 332 bp, Zea mays
  Coding DNA Sequence Number=SeqID_6425
gtgtcaatccaaatggcgtttcgagaaaattgtcgatccaaatggtggtgacttcaggacccaaaatattgttttacaggaactactctagaaattctggtctcacttgccagcacatcagatcactggttaggcttagattacggctccaatatcttcttctgacaatgctacaggtgtgacaatctcttcaggcaaatcactcagcgaactgtcatctgccttctgctctttaggtgcttcagttcccatcaatctcttaagtttcatctccagatcattcacaacactcttgtggtcagtaagggatggtaattccaaggaggcccgcc

SEQ ID NO: 20829 - DNA, 130 bp, Zea mays
  Coding DNA Sequence Number=SeqID_6426
tcaaccccaagggagggctgggcatcgtaaaagggaacgtccggggggtcggcgctccgccccatggtgtgtttcaaccccaacggcttccgcgtcttggtcaagggcctggtccgcgtcttctgggagg

SEQ ID NO: 20830 - DNA, 257 bp, Zea mays
  misc_feature (33)..(33): n is a, c, g, or t
  misc_feature (39)..(43): n is a, c, g, or t
  misc_feature (59)..(59): n is a, c, g, or t
  misc_feature (77)..(79): n is a, c, g, or t
  misc_feature (81)..(83): n is a, c, g, or t
  misc_feature (91)..(93): n is a, c, g, or t
  misc_feature (95)..(95): n is a, c, g, or t
  misc_feature (105)..(115): n is a, c, g, or t
  misc_feature (117)..(118): n is a, c, g, or t
  misc_feature (123)..(136): n is a, c, g, or t
  misc_feature (138)..(142): n is a, c, g, or t
  misc_feature (147)..(149): n is a, c, g, or t
  misc_feature (158)..(160): n is a, c, g, or t
  misc_feature (163)..(165): n is a, c, g, or t
  misc_feature (167)..(169): n is a, c, g, or t
  misc_feature (171)..(172): n is a, c, g, or t
  misc_feature (181)..(187): n is a, c, g, or t
  misc_feature (192)..(194): n is a, c, g, or t
  misc_feature (211)..(217): n is a, c, g, or t
  misc_feature (224)..(226): n is a, c, g, or t
  Coding DNA Sequence Number=SeqID_6427
gaggtaggcacgtgagctgaaatcacgacatcnatgacnnnnncagctggaactttaantacccataaaaattgaannnannnaccaaatnnntnctgaaagatnnnnnnnnnnncnntatgnnnnnnnnnnnnnngnnnnngaaannnctgaaaagnnngcnnntnnnanngatgagatnnnnnnnacagnnnaccctgatcaacacacnnnnnnnggggagnnnaaaactggcaagcaagaaaacataaacaatg

SEQ ID NO: 20831 - DNA, 399 bp, Zea mays
  Coding DNA Sequence Number=SeqID_6428
tggaagaaactagattgaccttgtttttgcatcatcacttgtctctgtttcaatcgttctgggatggtgaggtagccgcatctatgttcacgtttatggccaagccatgcatgtgtgtgtagtgcaaagataaataaggacgtcgagctaaatctatgcaaccctcgacgtggtgtgattgtattttaatttgtatttgaatcttgtgaagcatgtgtgtgtggtcatgtacttagaggtctccgtgagtcacgagtggcggtctaatacaaggattgacgtggtttagtgtttgtgatcttttattccatatcatgttttaagttgaagtttgtttgatccacaaatagttgggatgatgtgttatttgagttgtatggctatatgcatgaaaatgca

SEQ ID NO: 20832 - DNA, 369 bp, Zea mays
  Coding DNA Sequence Number=SeqID_6429
tgccacacttctccagggtgctagtgctggccctagcacctccaccgcaactccgacgcttggaccattccctcgcgtccgccccgccgccccccgtcgcaagctgagggcaccaggagacccttgtttgctactgctcaagttctacaggtaccaaaggttcacaataagccaataaaaagaccaagaaaagggttcaacaaaaagagcaaggggtaactgaagtgtgccctggtctggcacaccggactgtccggtgtgcaccagacagtgtccggtgcaccaccggacagtgtccggtgcaccagaggactccaagctgaacttcgcaccttcgggaaaactcagaagcgccgcgctataattcac

SEQ ID NO: 20833 - DNA, 133 bp, Zea mays
  Coding DNA Sequence Number=SeqID_6430
tcaattgatcgtctgttcctctgacccgcagcatctcaaccccatggcaaagattgaggtcgggtcctgtggtgcctgtggcgtcgtatgggttcatgtaaaggaaggcttgcatagtagacctaccaaatga

SEQ ID NO: 20834 - DNA, 401 bp, Zea mays
  Coding DNA Sequence Number=SeqID_6431
tgacaacggaaagcaccctgaagcacatctgctgcttatgatcttatctggtggaccaaacccaggcttttcaccctctcggggaatttggacgggcctttgggggcgcctccgggccccaatttccgcggggggttaggttttcccctggaacagggcccggccaaataacggggggggtaataaccccaccggggaaaattttccccccacccccctacaagcgtttgggataaaataccccgaaaaaacccggaaggggtttctcccaggggtttttattagaccccaaaacccaaaatattgggaaccctgcaagaataaccttcgcggggggggttgtcccccccccacccccgcaaaaaaaaaaaagggggggtgcacacccaaagagagaaaaa

SEQ ID NO: 20835 - DNA, 540 bp, Zea mays
  misc_feature (360)..(360): n is a, c, g, or t
  Coding DNA Sequence Number=SeqID_6432
ccccgcgaaggttattcttgcagggttcccaatattttgggttttggggtctaataaaaacccctgggagaaaccccttccgggttttttcggggtattttatcccaaacgcttgtaggggggtggggggaaaattttccccggtggggttattaccccccccgttatttggccgggccctgttccaggggaaaacctaaccccccgcggaaattggggcccggaggcgcccccaaaggcccgtccaaattccccgagagggtgaaaagcctgggtttggtccaccagataagatcataagcagcagatgtgcttcagggtgctttccgttgtcaacaaggctccttactttagaaaganacagcaggtgcagggggatttgtataattaccaggtgcacctgtccatagagtgtcatggttaagctggagcctctcagattcgacgcagccccagaccatggcgcctaggcgggcgttcccgatcggcggtgcgtcggtgaaagtactcagccggggagccgacagtaccacctagagc

SEQ ID NO: 20836 - DNA, 283 bp, Zea mays
  Coding DNA Sequence Number=SeqID_6433
ttttttgaccaccagaacaaagcatttatctttcgccagctacagttgtagtatggctacaccccaatgagagagagagagagagtagacgcaaaacttacaagaaagagaaagagccagaacaaggtcagagctcagctcagcttagcaagcgccttcccacacccacaggccacaacggcatggcatggcgcccaggcgcacgtcctcctctttcccctccattgttttgctccccgcctctctctctctctctcctgcctcgcgcgcttgtgcggttggg

SEQ ID NO: 20837 - DNA, 453 bp, Zea mays
  Coding DNA Sequence Number=SeqID_6434
cgtatgggacgaggccaaccccgatcaagtacaactggatccatgtcgctcacaactcctgtcatggcacctcgctaaaaaatggggcctcctgagaaactgtagaactaagtggaaagggtcattgaaaacaggctgcggggtcctccccatctggatgattgacaagggccacacctttcaaccttggtccaccaccggcaccttgggggcgttgggccacgagattctgccccccccaaggggggctacgtgcctcaggctgcacttagaacaactctggccattagaagaaaagcccttcagtatgtggtccccccgcgcatctatcaccccctctcatatataccctccactccaatggctgccagaaccgactgctctcccttctccccaccaacatccacacccccccgcccaccgcacccccggccgcagtgagttgacaccaaa

SEQ ID NO: 20838 - DNA, 542 bp, Zea mays
  Coding DNA Sequence Number=SeqID_6435
agagcagtcggttctggcagccattggagtggagggtatatatgagagggggtgatagatgcgcggggggaccacatactgaagggcttttcttctaatggccagagttgttctaagtgcagcctgaggcacgtagccccccttggggggggcagaatctcgtggcccaacgcccccaaggtgccggtggtggaccaaggttgaaaggtgtggcccttgtcaatcatccagatggggaggaccccgcagcctgttttcaatgaccctttccacttagttctacagtttctcaggaggccccattttttagcgaggtgccatgacaggagttgtgagcgacatggatccagttgtacttgatcggggttggcctcgtcccatacgtccagcgcggcgacagcccaccggtttccccttggggagcttggggtggtccggaagcgtccacgagaatcctgagctcaccatcggcaacaagacctttctttttttgcttctgcttttgccttgcctaacaagaagaactcttggcgagcgagcaa

SEQ ID NO: 20839 - DNA, 222 bp, Zea mays
  misc_feature (88)..(88): n is a, c, g, or t
  misc_feature (91)..(91): n is a, c, g, or t
  misc_feature (101)..(101): n is a, c, g, or t
  misc_feature (136)..(136): n is a, c, g, or t
  misc_feature (156)..(156): n is a, c, g, or t
  Coding DNA Sequence Number=SeqID_6436
agaagcgtgggcaatccggattctcgcgagctagcccaggcgaatagggataccgagaacagcttcatggcccaaaaaaggatttttnganacccggtttntagtgcgattgaaacgatgttcagttaccaagagnggaaaatccttgtgcactgnaaccctgtatccaattgtatccccccaccccccatataccggcaaattcttggttacgtaacaaat

SEQ ID NO: 20840 - DNA, 457 bp, Zea mays
  misc_feature (40)..(40): n is a, c, g, or t
  misc_feature (118)..(118): n is a, c, g, or t
  misc_feature (138)..(138): n is a, c, g, or t
  misc_feature (173)..(173): n is a, c, g, or t
  misc_feature (183)..(183): n is a, c, g, or t
  misc_feature (186)..(186): n is a, c, g, or t
  Coding DNA Sequence Number=SeqID_6437
ggcaaccgcctcaatgccctttttttcaagggatgttttnccaaaggggccatttgttacgtaaccaagaatttgccggtatatggggggtggggggatacaattggatacagggttncagtgcacaaggattttccnctcttggtaactgaacatcgtttcaatcgcactanaaaccgggtntcnaaaaatccttttttgggccatgaagctgttctcggtatccctattcgcctgggctagctcgcgagaatccggattgcccacgcttctcctcggcttgaatttcgttgcctgctaattagaattgcaaacaaacataaaaccattgccaggccaaaaaaaaaaaaacaggaccgcaacaatgctaccgaagtaggaaaaggtaatgggtacccgaaacctgatcagtttttatcatgttaagcctagtttgggaactccattttctctaagg

SEQ ID NO: 20841 - DNA, 146 bp, Zea mays
  misc_feature (54)..(54): n is a, c, g, or t
  Coding DNA Sequence Number=SeqID_6438
tcgaattcaatcctgagcgcgaacacacgaaatcgccgcaggctcgatatacgncagggctttcaccgcccaacagcatcttgcagcgactgtgcaccagttcggggggaaaaaggaaccgtatcaactgaatcccagcgcaccgg

SEQ ID NO: 20842 - DNA, 434 bp, Zea mays
  Coding DNA Sequence Number=SeqID_6439
aaaacagggtcgttgatctgccaccgctcgcgtctagagaaggctgtcgtcgtagcccacgcataggaaaagtcggcgtcgtcgcaggaggtgagatgccagtgtgtgccacttcggggctcgcgccttcaaggagccaacctcgcgcgtgtggatccaccgccgcgtgcgcacctctcagatccattgccgtcgcgctccgtgagagaacccccgcacacgccttggatgcacgttgccaccatgcacgcctcaggtggccgcagctgcggcacagcctcaaggagccaccgccgtcgtgcgaggtgaaggtgaccttcgcagatagcactgcggtgctcaatgccacagttgattcctctcgcttttgccatttctttaagcatcttgaggcagaagtacacgaggttgacgccgaactggagagtgccgca

SEQ ID NO: 20843 - DNA, 436 bp, Zea mays
  Coding DNA Sequence Number=SeqID_6440
aaagcttctcaggaacaccatgccactaccatggatcaatctgtagatctattttcaaatacgcttactgaaactccatctgctgataaggtgataccagcagctccttcaatggacaatgctgggtgggccacatttgatacacctccagaacaaaagcagcctgcattcactgggctttcttatgtttctgctacaagcatcgataaacaagctcttaatcatgatttgttttcatctgaatcaaatgatgagctaacatggttacggagctctaaggatgatgcttcggttaccaatcataatcagtctactgctacatctcttgatacatgcagttctgagccttggagtattttcgatgtctccagtggtagcacccagtacactgtcaagggagatctatcattaatgacttctagattgcaagagccta

SEQ ID NO: 20844 - DNA, 156 bp, Zea mays
  Coding DNA Sequence Number=SeqID_6441
tcctttggacttcggtctacttttgtttccctgttgacacttccacctgtaggcggtcgacaaaccgccaggggccgatctccacccggggctgcttgggctgcagccccgggcggcactcgcggcactgccatgcgcccagccggttagccagag

SEQ ID NO: 20845 - DNA, 593 bp, Zea mays
  Coding DNA Sequence Number=SeqID_6442
gaatccttcaatcaagccttttcttagtacttctaaagcaaaatatactactactcattgccataagagcacacaagattttcttgacaaaatccagccactattcttagttttaaggaagcatctggatggagcagtttcaatgatcaaagatggtaaccttctattccataatttttgcttcgtgttacttttacaatgtttgaattaataattagtgggctgagtcggtttcttaatggtcggggttgtatgtgctgggagggattacaccccctcctttgtggatcttttcttcttagtgaaatgacacaactttcctgcattgcttgagaaaaacaatgtccgcatttcgtataatccttcattgaatgtccttgctttcgattggtaacatgataagctactactcttcagaattagagagctgtttagatgactggagttcacattcatcttctgctggcaacccaaacataccatatgtgataacatgaagacctgttttttatgctagctgtttacgtgcaatttgttccttccacatcgtgattcgggtcgtggagattttgaagatcttatacattgcgggc

SEQ ID NO: 20846 - DNA, 107 bp, Zea mays
  misc_feature (26)..(30): n is a, c, g, or t
  Coding DNA Sequence Number=SeqID_6443
gagagctagtgcgtgccagcgcgcgnnnnngagagagagacccgcatctgcagctccaaaaccagctctccaccactagataatctcgtctcgccagggacgggaac

SEQ ID NO: 20847 - DNA, 77 bp, Zea mays
  Coding DNA Sequence Number=SeqID_6444
gttcccgtccctggcgagacgagattatctagtggtggagagctggttttggagctgcagatgcgggtctctctctc

SEQ ID NO: 20848 - DNA, 440 bp, Zea mays
  misc_feature (28)..(28): n is a, c, g, or t
  misc_feature (39)..(39): n is a, c, g, or t
  misc_feature (72)..(72): n is a, c, g, or t
  misc_feature (79)..(79): n is a, c, g, or t
  misc_feature (84)..(84): n is a, c, g, or t
  misc_feature (91)..(91): n is a, c, g, or t
  misc_feature (104)..(105): n is a, c, g, or t
  misc_feature (115)..(115): n is a, c, g, or t
  misc_feature (118)..(118): n is a, c, g, or t
  misc_feature (127)..(127): n is a, c, g, or t
  misc_feature (130)..(130): n is a, c, g, or t
  misc_feature (133)..(133): n is a, c, g, or t
  misc_feature (141)..(141): n is a, c, g, or t
  misc_feature (143)..(144): n is a, c, g, or t
  misc_feature (148)..(149): n is a, c, g, or t
  misc_feature (153)..(153): n is a, c, g, or t
  misc_feature (175)..(175): n is a, c, g, or t
  misc_feature (187)..(187): n is a, c, g, or t
  misc_feature (189)..(189): n is a, c, g, or t
  misc_feature (196)..(196): n is a, c, g, or t
  misc_feature (207)..(207): n is a, c, g, or t
  misc_feature (211)..(211): n is a, c, g, or t
  misc_feature (215)..(215): n is a, c, g, or t
  misc_feature (217)..(217): n is a, c, g, or t
  misc_feature (219)..(219): n is a, c, g, or t
  misc_feature (221)..(221): n is a, c, g, or t
  misc_feature (224)..(224): n is a, c, g, or t
  misc_feature (230)..(230): n is a, c, g, or t
  misc_feature (237)..(238): n is a, c, g, or t
  misc_feature (243)..(243): n is a, c, g, or t
  misc_feature (247)..(247): n is a, c, g, or t
  misc_feature (252)..(252): n is a, c, g, or t
  misc_feature (258)..(258): n is a, c, g, or t
  misc_feature (260)..(260): n is a, c, g, or t
  misc_feature (269)..(269): n is a, c, g, or t
  misc_feature (275)..(275): n is a, c, g, or t
  misc_feature (278)..(278): n is a, c, g, or t
  misc_feature (281)..(281): n is a, c, g, or t
  misc_feature (283)..(284): n is a, c, g, or t
  misc_feature (289)..(289): n is a, c, g, or t
  misc_feature (305)..(305): n is a, c, g, or t
  misc_feature (307)..(307): n is a, c, g, or t
  misc_feature (309)..(309): n is a, c, g, or t
  misc_feature (315)..(316): n is a, c, g, or t
  misc_feature (320)..(320): n is a, c, g, or t
  misc_feature (328)..(330): n is a, c, g, or t
  misc_feature (336)..(336): n is a, c, g, or t
  misc_feature (339)..(339): n is a, c, g, or t
  misc_feature (380)..(380): n is a, c, g, or t
  Coding DNA Sequence Number=SeqID_6445
taattttaacctgtttctgtttgcacangtttttagagnacatggatgacggaatagaaattaaggaacatncggaatnggtgnttgagcnttttcataaggannggttttattnggnttagctatngcnccntaaatgcntnnaatnngaantaaattggcattaatatagctnatggttagaacnanggttggnagccgaatagnaggngaangnananaanataggnagaaaannaatanagtntaaanttgagntnataatgaanttggcnganggnanngaganataaaaaatatattangnanaatggnngaanaaaacctnnncgtctngtntggaacaccctccaacttccgaagggagaccctcacatttnaggtggttgggttccgaggaacctaccacgcagtattggggaggtcatgctacgcgaagt

SEQ ID NO: 20849 - DNA, 527 bp, Zea mays
  misc_feature (33)..(33): n is a, c, g, or t
  misc_feature (44)..(44): n is a, c, g, or t
  misc_feature (82)..(82): n is a, c, g, or t
  misc_feature (84)..(84): n is a, c, g, or t
  misc_feature (88)..(88): n is a, c, g, or t
  misc_feature (97)..(97): n is a, c, g, or t
  misc_feature (104)..(104): n is a, c, g, or t
  misc_feature (115)..(115): n is a, c, g, or t
  misc_feature (119)..(119): n is a, c, g, or t
  misc_feature (122)..(122): n is a, c, g, or t
  misc_feature (124)..(124): n is a, c, g, or t
  misc_feature (140)..(140): n is a, c, g, or t
  misc_feature (145)..(146): n is a, c, g, or t
  misc_feature (148)..(149): n is a, c, g, or t
  misc_feature (151)..(151): n is a, c, g, or t
  misc_feature (154)..(154): n is a, c, g, or t
  misc_feature (156)..(156): n is a, c, g, or t
  misc_feature (161)..(161): n is a, c, g, or t
  misc_feature (166)..(168): n is a, c, g, or t
  misc_feature (176)..(177): n is a, c, g, or t
  misc_feature (179)..(179): n is a, c, g, or t
  misc_feature (182)..(183): n is a, c, g, or t
  misc_feature (185)..(186): n is a, c, g, or t
  misc_feature (188)..(188): n is a, c, g, or t
  misc_feature (191)..(192): n is a, c, g, or t
  misc_feature (194)..(195): n is a, c, g, or t
  misc_feature (197)..(197): n is a, c, g, or t
  misc_feature (202)..(204): n is a, c, g, or t
  misc_feature (206)..(206): n is a, c, g, or t
  misc_feature (208)..(208): n is a, c, g, or t
  misc_feature (212)..(212): n is a, c, g, or t
  misc_feature (215)..(215): n is a, c, g, or t
  misc_feature (218)..(218): n is a, c, g, or t
  misc_feature (221)..(221): n is a, c, g, or t
  misc_feature (224)..(225): n is a, c, g, or t
  misc_feature (239)..(239): n is a, c, g, or t
  misc_feature (248)..(248): n is a, c, g, or t
  misc_feature (254)..(254): n is a, c, g, or t
  misc_feature (257)..(257): n is a, c, g, or t
  misc_feature (266)..(267): n is a, c, g, or t
  misc_feature (269)..(269): n is a, c, g, or t
  misc_feature (282)..(282): n is a, c, g, or t
  misc_feature (284)..(284): n is a, c, g, or t
  misc_feature (287)..(287): n is a, c, g, or t
  misc_feature (294)..(294): n is a, c, g, or t
  misc_feature (296)..(296): n is a, c, g, or t
  misc_feature (298)..(298): n is a, c, g, or t
  misc_feature (302)..(302): n is a, c, g, or t
  misc_feature (304)..(304): n is a, c, g, or t
  misc_feature (307)..(307): n is a, c, g, or t
  misc_feature (310)..(310): n is a, c, g, or t
  misc_feature (313)..(313): n is a, c, g, or t
  misc_feature (318)..(318): n is a, c, g, or t
  misc_feature (320)..(320): n is a, c, g, or t
  misc_feature (322)..(322): n is a, c, g, or t
  misc_feature (325)..(325): n is a, c, g, or t
  misc_feature (331)..(333): n is a, c, g, or t
  misc_feature (335)..(335): n is a, c, g, or t
  misc_feature (337)..(338): n is a, c, g, or t
  misc_feature (345)..(346): n is a, c, g, or t
  misc_feature (356)..(356): n is a, c, g, or t
  misc_feature (359)..(359): n is a, c, g, or t
  misc_feature (365)..(365): n is a, c, g, or t
  misc_feature (372)..(373): n is a, c, g, or t
  misc_feature (377)..(377): n is a, c, g, or t
  misc_feature (381)..(381): n is a, c, g, or t
  misc_feature (385)..(386): n is a, c, g, or t
  misc_feature (388)..(388): n is a, c, g, or t
  misc_feature (396)..(396): n is a, c, g, or t
  misc_feature (404)..(404): n is a, c, g, or t
  misc_feature (406)..(406): n is a, c, g, or t
  misc_feature (408)..(408): n is a, c, g, or t
  misc_feature (413)..(413): n is a, c, g, or t
  misc_feature (415)..(415): n is a, c, g, or t
  misc_feature (417)..(417): n is a, c, g, or t
  misc_feature (420)..(420): n is a, c, g, or t
  misc_feature (429)..(429): n is a, c, g, or t
  misc_feature (436)..(436): n is a, c, g, or t
  misc_feature (448)..(448): n is a, c, g, or t
  misc_feature (479)..(479): n is a, c, g, or t
  Coding DNA Sequence Number=SeqID_6446
atgttccttaatttctattccgtcatccatgtnctctaaaaacntgtgcaaacagaaacaggttaaaattaaaaatagactncntctnaaactgttnaaaactnacctcaatatnaatnatnanaagttgacacactggngaaanncnngngancngattntaatnnntactgttnnanaanntnntnaanncnncnagacnnncnanccgnggntanacnaanntgaaaaaaaacaanaaaaaaaanaaacgntgnaaaaattannanaaaaagaaacaancnagncaaaaanananaaangnaancanagnaaagnananaantaaaannngnanntaatagnngaaatcgtgncanagaagnaaggttnntggntatnaacnncntaaccttngaatgatntntnttgcntngntgnagaaatgcnagagggngtacggtggtanagctcctttccgtcacccagcaagacgaacnacttggcgcgccgcgccagtcgccgagcttcggctctgtcgaggggta

SEQ ID NO: 20850 - DNA, 371 bp, Zea mays
  Coding DNA Sequence Number=SeqID_6447
cttccagaaaagtggtcatatcaaccagaacttatcaaggaagtgtgaagcattagttgtgtcaggtttggcagaatatggtgatgaaatagatgggattgtcccagctgatatcatgaagattcagcctatcctacaatggtcgtgatagatgagattcttcttgcaaacaagggagattgacctaaaattgcaaaacagttggtggatgtctacgcgcgcagtttaaggtttggatgcgtttcagctttctatagttgtttatgcttattgtgtgaatgatttgttagcctttatctttccttttttcttattaatataatgttgcaaaactctccatgtttgagaaacaaaaatcatgtcttccatta

SEQ ID NO: 20851 - DNA, 320 bp, Zea mays
  Coding DNA Sequence Number=SeqID_6448
agctgaaacgcatccaaaccttaaactgcgcgcgtagacatccaccaactgttttgcaattttaggtcaatctcccttgtttgcaagaagaatctcatctatcacgaccattgtaggataggctgaatcttcatgatatcagctgggacaatcccatctatttcatcaccatattctgccaaacctgacacaactaatgcttcacacttccttgataagttctggttgatatgaccacttttctggaagtcgacggactgggtgtcggccctgtactttcccacggggacctcctcgaaggccggcttgagcttcagcga

SEQ ID NO: 20852 - DNA, 584 bp, Zea mays
  Coding DNA Sequence Number=SeqID_6449
aaactggttcgctaagagctccgacaatggctgtctgcgcaactcactcctctctcatgatagcatacgccgcatccaaggaccttacaattccgtctcttttctcatctgccaacccaagacccaacaagttgagcgtcgcactctatccccctcttgttctccttgcggggagaagagcttcgaacccatccttcccggtggttgtctcagccgtagccgcagaggctgatgtcgacacggaggacgcggagcagaacgaagccacctccaccaccgccacagccgtcctcgatccgccaaagcctaagaaaggaaaagcagctttgcttctcaagagagatagaacaaggtctaaggaggtttctggaaatccaaaagctaagggaaaccaaaagggagtacgacgtcaagactgctatatctttgcttaagcaaaccgctaacaccaaggtttgtgggaagtcggtcgaagccccatttccgtctcaacttcgatcctaaggacaatgatcagcagctgcgagcaaccgtgagccctccctaaaggaacagggcaaactgttaaagtggctgttcttgca

SEQ ID NO: 20853 - DNA, 555 bp, Zea mays
  Coding DNA Sequence Number=SeqID_6450
aacagccactttaacagtttgccctgttcctttagggagggctcacggttgctcgcagctgctgatcattgtccttaggatcgaagttgagacggaaatggggcttcgaccgacttcccacaaaccttggtgttagcggtttgcttaagcaaagatatagcagtcttgacgtcgtactcccttttggtttcccttagcttttggatttccagaaacctccttagaccttgttctatctctcttgagaagcaaagctgcttttcctttcttaggctttggcggatcgaggacggctgtggcggtggtggaggtggcttcgttctgctccgcgtcctccgtgtcgacatcagcctctgcggctacggctgagacaaccaccgggaaggatgggttcgaagctcttctccccgcaaggagaacaagagggggatagagtgcgacgctcaacttgttgggtcttgggttggcagatgagaaaagagacggaattgtaaggtccttggatgcggcgtatgctatcatgagagaggagtgagttgcgcagacagccattgt

SEQ ID NO: 20854 - DNA, 321 bp, Zea mays
  Coding DNA Sequence Number=SeqID_6451
gcgttctcgagctgccccaaggctacgcccgccctcgtcttggcctggcgcgccgaacgggcggccggttacattctcgggacccaagacaataaggctggacgggttcgattccttccgctccggagtctgggcgccttccctctcctcctttgagccattccttctccccacaggggggccccccggggggggggactcgccccccctcaaggagatgaggcgaacgcaccccccgccccccccctcctgcataaaaggaatttacccctaggaacccccccgtgggggccgtttcctttgtgacgaacgccccgggag

SEQ ID NO: 20855 - DNA, 493 bp, Zea mays
  misc_feature (48)..(48): n is a, c, g, or t
  misc_feature (205)..(206): n is a, c, g, or t
  misc_feature (242)..(243): n is a, c, g, or t
  Coding DNA Sequence Number=SeqID_6452
aaaccaaacaagtatttcagacgctaatttaaccccaactcctgaacnaagcagccagcagctagctacccaatccaccatccttccttccttcctacccaatcttagttattcttctaacctaaagacatcagctttaccacttaagcgaaccccttaccagatgacttaacagaggaagagaagttggagcccctaaaaaatnnaaatgatgatcctaggattcgcctattgaaccggtnntacgcgaagaagcggaaagagctccaggagcgccagaagctggcggacgcgtgtacaagtacagaaggaggaaaaagatgagagatctttggatgagacactttgttttattaatggggatggaggttcaggaggtggggaaagtagtaccaagagtaagaaaaagaataaaagaaggaaggatcatgttgagaaccccccaaaagctgactctgagcctgtaaatgcgaatccttatgcaagatgatgc

SEQ ID NO: 20856 - DNA, 223 bp, Zea mays
  Coding DNA Sequence Number=SeqID_6453
tgatcatcgccgatccacagccgtacgtgcacggcgcacctacctacccaccgggccatgcccattattactatttactacgtactactgtgtcgtctcgtctgtcgcattatattccttaattattcacagcaaccgcatcgtcgagaccaaccaactcaagggaagcacaaacctccaattacattcagaataatcatccacgcattgctatatatgtacc

SEQ ID NO: 20857 - DNA, 329 bp, Zea mays
  misc_feature (122)..(122): n is a, c, g, or t
  misc_feature (153)..(153): n is a, c, g, or t
  misc_feature (156)..(156): n is a, c, g, or t
  misc_feature (260)..(260): n is a, c, g, or t
  misc_feature (263)..(263): n is a, c, g, or t
  misc_feature (275)..(275): n is a, c, g, or t
  Coding DNA Sequence Number=SeqID_6454
acgaagagacgacgaggatccccacgcggcagcgctctcgtcctggggcgcaccggcaccgacgcccgccttcagatcgtcgccggtccgaatgccccccggctccgcgtccaaagtgctgnagcaggagcccgaggtgctgccgtgcctcgncgnggactcgcccgttctcgcgaagccctcggcggcgggcaccccgcgcctcctcgcgggtcccggcatcaaggtctgggacccctgccacgttcttctgcccccgncgncggcgtttccgnacgcagggaggcaggttgacgccgccggccattgaaggtcgttggggcgccacc

SEQ ID NO: 20858 - DNA, 351 bp, Zea mays
  Coding DNA Sequence Number=SeqID_6455
cctaacgccgccaccaggagtccagccgtcggccaccgcccaccaggagtccagcgtccgtccaagcctccagtccagggcaccacgcccacactccaaggctccagctcgcaagtcgcaccacggcaccaggccaccagccgtcccagcgcacgggcgggatcccagcgcacggacgtcccgccgcagtgccgccgctgcacgtccacagctctagtactccacgcatggacgcacgcaccaggcgtcccgccgcccgcgtccaggacagaccgagtcccgccgccggccgcccgcgtccaggcagccgccagccatccgcgtccacctcaaccgcactagcagctgcca

SEQ ID NO: 20859 - DNA, 439 bp, Zea mays
  Coding DNA Sequence Number=SeqID_6456
gacgaccactactcctctaagaggaagtacgacgacccctcgccgccgccgcggagcacggggttctcttcgggcccgccgcctgcctcggcgctcgcgggcggcgccccgtcgtacaacagcgtgccaccgccccccgatgagatccagctcgcgaagcagcgcgcgcaggagatcgcggcgcggatctttaacgccgcagaggccaagcgtcctcgcgtcgaccacggcgacgatgacagcggcggctttcggtgtaggcctgggcagcactgggtggcggtggccgcatcggcgggggaggactcggcttctcgccctctggcgggggggggggcacggggctttcatcccacaattatctttctcaaagaggggaacctcagaactccccctttagggggggatccgggggaccagcaaaaagattggaattcca

SEQ ID NO: 20860 - DNA, 482 bp, Zea mays
  Coding DNA Sequence Number=SeqID_6457
ggtccgctcactccctctccaaagcggcagcctcacgcagtcacgcgctccaccacgccacctccctctactcactcatgttgttttccgtccatccgcccaccggttcgtagcccgcgccgcaaaaccctagccccgggaggatcgcggggcgcctccgcggtgccagcgacgtggctcgtttgatccgattgctggtcgagccccgccctcgctgccgcgcttcgctccggctgtgcagcggcgtgagcaccgagcacactcgcgaatggggaactgctagggtgcttggatcaaggatgggagccctcaccctggggcctcagttgtagcaagcacctcttgctttgagttctttgtgagtcaactttgctagtccaacagggggtgagggttgactgggtgtttgtatctcatatagctgagcctgacttgattcttctgtttgggtatccatatgtttcgtggcttttgattgtggt

SEQ ID NO: 20861 - DNA, 339 bp, Zea mays
  Coding DNA Sequence Number=SeqID_6458
ctactgcaaaaacgaaggacatcttattcgtgaatgccccaagaagcgtctggaccgactagagaagaaagctgccaagcatgacctaagcaatagttcagaagacccaccattttataagtatgatgatgaaggacgcttgattagtattcattgcggagcaaagaagtaaggaagttccttaagtttggaggagtccaatgagaactaagaacctacgaataaaccatgtatctcccttgctttcgtgctagcctttcctaatctcgaggacgagattctttttaagaggggtagattttgtgcccccaaaaccatcgtcgaaagaacatagtacaa

SEQ ID NO: 20862 - DNA, 331 bp, Zea mays
  Coding DNA Sequence Number=SeqID_6459
gcggacgctgcgtacgcgctgccttgaagttcctcgagcgattcgaggtactattatcagtggcagagactgctgaatcaaaggcagtcaccgcctgatggaaggaaaagtgcctggatcattggaccacaattggttttgggggggggacttttccctagggaacctgaattgaaagaaattttttcactttcccctcaggggagagtatggccccgggggccagggtttcaaagaaccttcccgggtattaaaaaaatgggggaaaaatagcccccgaaggggtccaaaaaagcggagggtttttgggcgccaacttttaagaagcctt

SEQ ID NO: 20863 - DNA, 274 bp, Zea mays
  misc_feature (139)..(139): n is a, c, g, or t
  Coding DNA Sequence Number=SeqID_6460
actctcatgggcctagcgggctgaaccttatgtttcccctgcctgctgcgagccgtggtcaggtgcccctgtttcggctacagtgcacattgctaaacgctcccggcagtcccgccgtctcgaagcccgccgccgggtnccttacgcaaggtccgcgacgtgcatcggcctggagaggctcccgtctcgccgccctgcggatctcatctcatctgtgcagccgcgcgtggcccaacggagccagaaagcaaagggggatatgtcgtcctgagga

SEQ ID NO: 20864 - DNA, 493 bp, Zea mays
  misc_feature (70)..(70): n is a, c, g, or t
  Coding DNA Sequence Number=SeqID_6461
actttgctttggtccgaagaacactgaaaaaactatgctttggtctaaaaaaaaaaaaaaaaaaaaaatncgcatgcctacaagggcccgtggccacatgtaccaccaccctctgctcgcccagcagagcaaatgagggaactggttcagaagtatggtaaaagatcatctgttcaagaaaaaaaaaaaaaaaaaaaatgcgcatgcctacaagggcccgtggccacatgtaccaccaccctctgctcgcccagcagagcaaatgagggaactggttcagaagtatggtaaaagatcatctgttcaagaaaaaaaaaaaaaaaaaaaatgcgcatgcctacaagggcccgtggccacatgtaccaccaccctctgctcgcccagcagagcaaatgagggaactggttcagaagtatggtaaaagatcatctgttcaagaaaaaaaaaaaaaaaaaaaatgcgcatgcctacaagggcccgtggccacatgtac

SEQ ID NO: 20865 - DNA, 276 bp, Zea mays
  Coding DNA Sequence Number=SeqID_6462
ccaaagtacagatggtcccagtgtttaccaacagagtttctcgtacgtaccgggccaaaatcagtgacagttccagatcacgggggttgatgtgtgtcctttggaatacaatgaggtatgtcccctgccatggtggagcctattttagcagcttgaagagcctggattcctctagggcatgagggatcttggaaaggatttgccctccctgggaaaaagcgggtgttttggtggggggccccccccccatggcctcccaagatccccttaaggtgg

SEQ ID NO: 20866 - DNA, 422 bp, Zea mays
  misc_feature (213)..(213): n is a, c, g, or t
  Coding DNA Sequence Number=SeqID_6463
ccagggagggcaaatcctttccaagatccctcatgccctagaggaatccaggctcttcaagctgctaaaataggctccaccatggcaggggacatacctcattgtattccaaaggacacacatcaacccccgtgatctggaactgtcactgattttggcccggtacgtacgagaaactctgttggtaaacactgggaccatctgtactttggnccctgaaggaatcgggcgatcgggggcgcgaagggggcagtacgagcgcaggggacgcggaggagccgaagagggtgccggcgtagaaagaagctgcgacgagagcgacgcccaggagcaggagctgcacggaccgcggctccacagccgccaacgccggcgaccaccaccgccgcatctcactactgcttaagagtcccgctcttcaa

SEQ ID NO: 20867 - DNA, 221 bp, Zea mays
  Coding DNA Sequence Number=SeqID_6464
tcgacctgaaagtccgtcgcacgggcagccggttcagtttcacagcaactgaccggcaaggataagagcaaggggatgcttcccaccaaccttcggggccggagggtccgctctgggcaacctgaaaaaacctcgggcctcatccgggatcatccgaatacacttgggaaagggccgtcaaaggaaaagatggaaaaagccttgggttggcatcaaaaggg

SEQ ID NO: 20868 - DNA, 324 bp, Zea mays
  Coding DNA Sequence Number=SeqID_6465
ttttgatgccaacccaaggctttttccatcttttcctttgacggccctttcccaagtgtattcggatgatcccggatgaggcccgaggttttttcaggttgcccagagcggaccctccggccccgaaggttggtgggaagcatccccttgctcttatccttgccggtcagttgctgtgaaactgaaccggctgcccgtgcgacggactttcaggtcgaggacctgaacgacgagatcggtcactgcgccgtcggagcccgccgacgggtgcgccagaatgtgagacacagcgaccggcgtcaccaacttggcagcgtccatggc

SEQ ID NO: 20869 - DNA, 432 bp, Zea mays
  misc_feature (333)..(333): n is a, c, g, or t
  Coding DNA Sequence Number=SeqID_6466
aatcttaatttcgactaaactgcgttggatgctcccacaggagtttgatgacatgtccggcatctagtatatgctggaaaccttgcaggtccatatggtaaaggaaatcagtggcgaagtctatctttttctcctcctgccgtacgtccgttccagcttgcaaagcgctcgcgagctgctgccatggccggcgccggtgcgcccgcagttccccaggccggtcgcccagcccccaactttcgacgtccatcgtggtgggcgccggcatcatgatcgtgggtgggcgccggcatcatgggcagctgcacggcgcacgcggcagcgtctcgcggncgcccgcggtcctggctgcttgaaagggtttcaaccttggtccacccgttggggttctccgaaggggaatcccgatttttccggaagcatatcgaagcc

SEQ ID NO: 20870 - DNA, 535 bp, Zea mays
  Coding DNA Sequence Number=SeqID_6467
agatcgattcggcactccctttgtcttttatcctaagagatgttcaagcaattgaggcatcccttcgatcctgtgttggcacataaattggttatgggatatgtagatccgtgagggctgttgaagaaatccaaactctctactaacaacacaaacagtcttgttttctttacttgtccagggaaaggttatccaaatgttgatttatattttcaaagagtttgagtaataaacttgaactgtatttttccctgtctaacagttctttatctttctatatttttggatctaatccatcttgtgaaggttatcttactagcttgatacaaatacttttcgtccatacagtgcaacttcttagaatgattcaagtaattatttcttcctttagttccttaacaattacacattggcaacccaaacggtgaccaaattgcgctatatttttaggattttacagccagaccaggagcgtcaagcaggaactaaagcgttattacagatcatgttagttaactcggcaaaggtcagatac

SEQ ID NO: 20871 - DNA, 563 bp, Zea mays
  Coding DNA Sequence Number=SeqID_6468
ttggtcccctctatgttcagagtaatagttaaattgacaagcgagatgtgctttggtggtatctgacctttgccgagttaactaacatgatctgtaataacgctttagttcctgcttgacgctcctggtctggctgtaaaatcctaaaaatatagcgcaatttggtcaccgtttgggttgccaatgtgtaattgttaaggaactaaaggaagaaataattacttgaatcattctaagaagttgcactgtatggacgaaaagtatttgtatcaagctagtaagataaccttcacaagatggattagatccaaaaatatagaaagataaagaactgttagacagggaaaaatacagttcaagtttattactcaaactctttgaaaatataaatcaacatttggataacctttccctggacaagtaaagaaaacaagactgtttgtgttgttagtagagagtttggatttcttcaacagccctcacggatctacatatcccataaccaatttatgtgccaacacaggatcgaagggatgcctcaattgcttgaacatctcttagga

SEQ ID NO: 20872 - DNA, 434 bp, Zea mays
  Coding DNA Sequence Number=SeqID_6469
taaataatggttccgtttgttgtaggaaaggcatagaagtgaacttgtgggatatcacatctagtagtaagacatggtctgctaaatctgtaagcactcattgacttctttaatttatctttgatactaatatagataccttcatcatttattaaatgattttcttcctttgtttcatctgaagccccgagcaaatagtcttggcatattcactcgaccttggttcactgctggaaccttcttgtgcaagaatgatcatcgtaaaattgttgcctgaataacatggtggttgagatggcagcccccttttgtcattagaacctttttagattgtaaacctgaaatggcatttttcattaatcccattttctccaagggcatctgcgtgggtcccatgctaacactattattgctctagagccatttatctcagt

SEQ ID NO: 20873 - DNA, 255 bp, Zea mays
  Coding DNA Sequence Number=SeqID_6470
ggcgatcaatcactccttttgtaatagtttcaataattaaaaacaaaaaccctgcatgtacgtacgtgcggccggcatgggatgatgtcggctatagctccaggtggtaacatcgcatcgcatgcatgtacgtgttgtgtgttaactacagcagttaattagcgcgagggagtagtgaactagtgacacatatactgtactagataggcgcggcgtacgctgtactgtatatgttcaataatattaccccaacgt

SEQ ID NO: 20874 - DNA, 432 bp, Zea mays
  Coding DNA Sequence Number=SeqID_6471
tccttctcgcccatgctgtcttcttccttcctctgccgacgctccctgtacatggcacccagatttttccagcctctctccccttggcgcaggttccaaacgcggcgcccctgctcctcttcctcctgcacgcacgccagggcagggagccctgcttcccacggcagcagcagggagccaccagcagccatggcgcccatgccctctgcttttccatggcgcccggcaggagctcctcccatggccgccgacgccctactctcctccatggccggcgctcgagctccactcctcaccatggcgccgtcctccctggcgctcgctccctgcaggagaacaggccggctcctcatcccctccccctttcttcttcctctgcccagcgctccctcttctccccggcattcagagcagggagctctgggcagagga

SEQ ID NO: 20875 - DNA, 326 bp, Zea mays
  Coding DNA Sequence Number=SeqID_6472
gatctggggcatgaccttcgggcctcgcctgctgcgccggtggaaatggattgcacggccggggcggtcccgctacgactttccaacgggtttcgggggcatctttccgtcccgtcgccggtgccggtccgattggcatgatccgtccccggccacgctccaccaaaaaagaaggcttcccaccccctcccgcaaagggttaatggaccaaaggggctgaagccgagggggggatgttttccaatgcgcaaacatggcccccacgggcggtggggaacactcaccccttacccccccacccccgtggggaaccatcggacttgtga

SEQ ID NO: 20876 - DNA, 513 bp, Zea mays
  Coding DNA Sequence Number=SeqID_6473
atcacgggtcacaagtccgatggttccccacgggggtgggggggtaaggggtgagtgttccccaccgcccgtgggggccatgtttgcgcattggaaaacatccccccctcggcttcagcccctttggtccattaaccctttgcgggagggggtgggaagccttcttttttggtggagcgtggccggggacggatcatgccaatcggaccggcaccggcgacgggacggaaagatgcccccgaaacccgttggaaagtcgtagcgggaccgccccggccgtgcaatccatttccaccggcgcagcaggcgaggcccgaaggtcatgccccagatcgagcccttacgcggccagttcatcaggtcgtccaccttagagaccacgaactcggccgtcttcgaccatccccggtgggggggcgcccccgtatggcgctggggacgtcggggaggcgcccgcagcagcggcagcggagtacgcccgcggggtggaaaggagggccaaccgcgcggtgc

SEQ ID NO: 20877 - DNA, 62 bp, Zea mays
  Coding DNA Sequence Number=SeqID_6474
ccgggttgctcgatcatcatgcttgcgacacggagcttattccggattttcaagtcccaggg

SEQ ID NO: 20878 - DNA, 164 bp, Zea mays
  Coding DNA Sequence Number=SeqID_6475
tcgcggtcgcggtcggacctcggaagcttccagagacaggagagcaggagaccacccgtcgctccccgtgcccttgacaaaaagaggtccccgtctcctcgacctcgagagagatcttcaccagctgacagcagatcaaagagtgcaagccccgccgagaacaa

SEQ ID NO: 20879 - DNA, 459 bp, Zea mays
  Coding DNA Sequence Number=SeqID_6476
ttctggtctcgcaggcgcagcagcgcaagtcacggacctacaccccgagcccatggggtgacttcttcctccaccacgtcccatgcactccgtcacagctcttgtccatgaaggagagggcaaagggccaaggagcaacaagtgaggcagatgatacacgaaaggatcgcctcctccgacctgcttcgtaagatggagctcgtggacacactacagcgcctcgggggtggactacccactaccacggaggaagacgaaccagttgctttgctctattctacgaccacccacgaagaggggggggagacgggcctccgaacgatctcctaacgcacccctccctggggggttctaattttgcccagggaacggatgggggtacacaaatctctttgaagaaggggggggaaatggttttccccggtccggactaataaaacctggagacttttgcggagg

SEQ ID NO: 20880 - DNA, 441 bp, Zea mays
  Coding DNA Sequence Number=SeqID_6477
ctccgcaaaagtctccaggttttattagtccggaccggggaaaaccatttccccccccttcttcaaagagatttgtgtacccccatccgttccctgggcaaaattagaaccccccagggaggggtgcgttaggagatcgttcggaggcccgtctcccccccctcttcgtgggtggtcgtagaatagagcaaagcaactggttcgtcttcctccgtggtagtgggtagtccacccccgaggcgctgtagtgtgtccacgagctccatcttacgaagcaggtcggaggaggcgatcctttcgtgtatcatctgcctcacttgttgctccttggccctttgccctctccttcatggacaagagctgtgacggagtgcatgggacgtggtggaggaagaagtcaccccatgggctcggggtgtaggtccgtgacttgcgctgctg

SEQ ID NO: 20881 - DNA, 443 bp, Zea mays
  Coding DNA Sequence Number=SeqID_6478
cggtgaggttgagcgcccaggcatcgtcggaggacggcgaggagacagatctgcagccaagtgttgagtattctaattatagcaatgattcagaagcagatttaaggacagtagaagcgtgggcatccaaatgaataatctccaacatattcagcttttaacacaggatggctgcaagcttatgtataacatgattgcttcctacaaccgcattttgcatatattattacttgccgtggagagctgacttccctaatgaataatattttggattccggctctcatcaagtgactcctccccctcacattgattttgcggacagatgtctcaattctagtggtggagctacgaacaacaatccgatgtcctgatcgagagcgatggagctaatgtttgaacttgtgtgtttgaacttatgaactatatgaatgtgaacttgtgt

SEQ ID NO: 20882 - DNA, 497 bp, Zea mays
  Coding DNA Sequence Number=SeqID_6479
tgctcgacgtattgcagcagcagcaacgcccttcgctgcgacgcgctcgctaagtcgagcctcacgccgtcgctctgtgcagcgtttctgcgttgtcgtcaaaacccatgcatgtgtygtygtcgcgcttctcgsgtcgtttytcgacaggaagccaaatcaacatgcatgcatgcacaactccacttgggtttcagccaggaccgaraggtggtgatcgtgcaagtgatgtggtgccmaccmcaaratgcagttggtggacgacccgaagaatggacttaaccagtggatgctygccaagcgagtaccccccagcaaacactatttaagtgttaaattaaaggkacctccttgattggttgatggtgtgacttgaccttcatccctgccaccagaatagatggtcaaragggttattgcttccgtaggagaggaccaggaggagtagcgtggctaggcttcmccatgttactcaattcttctcctttagttatttc

SEQ ID NO: 20883 - DNA, 160 bp, Zea mays
  misc_feature (63)..(63): n is a, c, g, or t
  misc_feature (104)..(104): n is a, c, g, or t
  Coding DNA Sequence Number=SeqID_6480
gctattgtggacatggatgcagtgcttattaattagctacgataagagtcgtcgtccatgcanctttgtagatcgatgtgtggctcggcttcagttgtggaccncggtgggctccgggcggtacatgggctccgggaccttgttggcgcgcgagcagcac

SEQ ID NO: 20884 - DNA, 288 bp, Zea mays
  Coding DNA Sequence Number=SeqID_6481
gttgttgtataagtacgaccgccacttcgccaccaagtacgagctggggaaggaggtgggccgcgaccatttcggccacacctgctcgcacgcgcccgcaagggagacatgagaggccaggtcatggctatcaagatgacaacggcaatatctattgaggatgtgcgcagagaggtgaaaattttgaaggcgttatctggacattccaatcttgtcaagttttatgatgcttctgaggacgcccttaatgtctacataatcatggagccattctaggcacaaactgaa

SEQ ID NO: 20885 - DNA, 553 bp, Zea mays
  misc_feature (61)..(61): n is a, c, g, or t
  misc_feature (94)..(94): n is a, c, g, or t
  misc_feature (214)..(215): n is a, c, g, or t
  misc_feature (231)..(231): n is a, c, g, or t
  misc_feature (255)..(256): n is a, c, g, or t
  misc_feature (289)..(291): n is a, c, g, or t
  misc_feature (441)..(442): n is a, c, g, or t
  misc_feature (526)..(528): n is a, c, g, or t
  Coding DNA Sequence Number=SeqID_6482
ttattacccagaagtactccctccaaaaggacataccagagagcaaaaattatgactatcnttgctaaccatcatcataaaagtaatcaaaagntctataaatcaaagaggatcccaaggccgctcataaccatgagcacggttgatataccagtttctaacccttttgcagaggttgcacactttacccacaagacgtgattccctctctagnncgggcttgcaagaccnttatccactcccaaggtgaatggnnagggattcactacgaagcctttacaaagattcnnnagaggtcataaccgcccgttaggtttctccagtttgataaacacagcaccactcctcgcagaggggtgactaacaaaagcaaaatgaaagaacctcggcacccagcctcggcagagcaagcactgtgcctggaccccattgacggcacgnnggcgaagcaactacatctctagtttctctaactaattagctaagggcatcccattccaccctcatggttgcactgtttttccgnnnggtcatcgaacgaataggtccttac

SEQ ID NO: 20886 - DNA, 173 bp, Zea mays
  Coding DNA Sequence Number=SeqID_6483
tttatcgcaactcaaaaacatacattctcctggatggacgcaactattcacttggcactgccggccgaacacatggcagtagctcacctgttcctgctagctccattgccttcggcggagagctgaggaagaaggtgagctactgccatggccatggcggcacgcacaagaaa

SEQ ID NO: 20887 - DNA, 493 bp, Zea mays
  Coding DNA Sequence Number=SeqID_6484
aaacctttgtccattatttttgcatgactaaaaatctaaaatactagtacaaatctactcactcatcactttgccttctctatcaggctgaatagagcagtctaaaagggacatgataaaggtgatacaaggtgtcataggcaacacacaaacatatctgtgattatgaacccttcaatatagaacaaaagttttggctcatatgagctaccagcgcatcagtaggcaattcgatttgttatcagcaatatttagatctgattctcaggggtcctgctagagtaacattttaccactgttgtttatgtatatcctttgatgttgtgttgtaccaatgtggaatttactttaggactagtttggacggggaaatggaggagacccatgggacagagatccccttgttaatttgaataacaagtggattcctgctccatatattccctttattttcctgttcaccaaaccagcctttatggagcaaccagacctt

SEQ ID NO: 20888 - DNA, 269 bp, Zea mays
  misc_feature (30)..(30): n is a, c, g, or t
  misc_feature (115)..(115): n is a, c, g, or t
  misc_feature (124)..(124): n is a, c, g, or t
  misc_feature (143)..(143): n is a, c, g, or t
  misc_feature (166)..(166): n is a, c, g, or t
  misc_feature (169)..(169): n is a, c, g, or t
  misc_feature (206)..(206): n is a, c, g, or t
  misc_feature (211)..(211): n is a, c, g, or t
  misc_feature (216)..(216): n is a, c, g, or t
  misc_feature (224)..(224): n is a, c, g, or t
  Coding DNA Sequence Number=SeqID_6485
ccttacggaggccagtaacgcacataagcnaaagaatccatggaaaccggactcaaaaacactactagagaccctaaaccctaaaccccaaaagctacctgccaaaactaattanagcatatgngtctcacataaaacaaccntattttcgttttgaaataaaaangtntacctggccctcctaatagcttctttcttttctattncctgngctgncctttganctcgaatctttgatatcatctccaatttttcaactgccatcggat

SEQ ID NO: 20889 - DNA, 279 bp, Zea mays
  Coding DNA Sequence Number=SeqID_6486
ccatcatcaacatactttgctagtcatgggagggtgtggttagatggcaaccacttgccctgccatgactagtatggagaacgggcgcattattaccaggctgtacattggcattactgaacattgttaacattgcaggaagacatggaaggcgaggacctgggcaggctggattcatgacttccacaccgcatgtatcaaacaatggctggttataaaaaacctgtgcccgcaagaaaacagcactggacacctaaaaacatggcttctaggaaaaag

SEQ ID NO: 20890 - DNA, 406 bp, Zea mays
  Coding DNA Sequence Number=SeqID_6487
tctcatcacggcgaggcgaagagagagaacattgtgccaccactagcaaatcgcggggtcaccgacgtggggtcctcgaaaaccgatcggggggcttcactacgatacaaggaggatcccattgtgcttccttggcaggattagtggctcgggttcccgagatttctcatcggcgagggaccttcgccgtcgcaccgccgcgtgccgtgggcagaccgcacccccgcccaaatcatgtacgtgtgaatgggttgccctgcaaggatgttaaggatgtcaaggtcgacgacttcttcctagcagccgacctcgacaagccaagggatactacgatgagcaaggtccacattgatcaatgtgatgaagctggccggcctaaacacattgggcatctccatagctagga

SEQ ID NO: 20891 - DNA, 362 bp, Zea mays
  Coding DNA Sequence Number=SeqID_6488
tgaacgtctgcatcctgcattgcagccttgcagcaggtcctccaaaccgagcaggtgaaagcctaaagccaacgcggaggcaagttaccccccgtcagctgtcctgctcggaagggaagggacaaagacctcacccaggccccagcgatttagcccggggaagccggcgccgccgcccccgcccccgtgtctaccctaacccctaccaatggaaaaccggagtgggatggaacagatgggacggaggagggcgtgggagagagcgcgattacctggaactctggagagctggtggagagtactgatgaaatcctgaggcgctggtggtgagtagcgaccgatgaactctggagcgacgagga

SEQ ID NO: 20892 - DNA, 121 bp, Zea mays
  Coding DNA Sequence Number=SeqID_6489
ctaacgcggagacactcggtccggtgaaccacaaacctgcgccggagcgacgtcgtccgccgggcgaggtgcgcgtacctgccgtcgatcgtcgccggatccatccaccatgggaagcaca

SEQ ID NO: 20893 - DNA, 569 bp, Zea mays
  Coding DNA Sequence Number=SeqID_6490
gaaaaggtgacctctaagctccccgcccctcccccgagatttcgccccctcccccctagaaacccctcttcgtttgttgtcccaccgcacacttcgtttccaaatccattccccactatccctgccctccccgctagggttttgccaacatggtcgccgctaccgctcggaggctcctctcccgtcgtgcctcctcgtcctccctctctgtgatcctccgccgtggtgctgtccaggagtagtcattgccgctgtgcccagccatcatcgcgacggcttccagggtggagcaagacgaggaggcgacagactccggacaagtggtgtgacagaggatggagaggacacatgcgagggagccctgtaggcacgtggtttcaatcatcatcgcgatgaggattgtcggcacattcacactatgccattgcagaacgttggagcctctcagaactctggaagctgcctaccaccgtgcaccctaagataggggcatatctgtgttagccgcctacaaacatactgaaatatgggcatatacaccatgtattcttctctcagcatggtaccat

SEQ ID NO: 20894 - DNA, 213 bp, Zea mays
  Coding DNA Sequence Number=SeqID_6491
ccatgcacaaaggtaggacacggaacagacatggacgcactattactagttccgcacaagtatttcgctttccggttgcaccgggtgctgttatcgttgctggcacggacggactttttgacaatctataccacaatgagatacgtggtgttatcgttgaagcgctccgggttggacttgagcctcaggttgcggcacaacaaattgccgccc

SEQ ID NO: 20895 - DNA, 497 bp, Zea mays
  misc_feature (437)..(437): n is a, c, g, or t
  misc_feature (443)..(443): n is a, c, g, or t
  Coding DNA Sequence Number=SeqID_6492
accatctgccgctcataacaatatagatcatcaattgtcattcatgattacataaggatttttatcatacacttcttattatgtaggttattaaagagggagaaaagaaagacaactacattggtccgtatgattcgatatgtggggctcgtcttcctcgtggtctcgatccacattctattccagcagaagaactgtcagcatctttggggttatacttcactctaactattttaaattattgctctaatggttacatctcctcgttcagttatttgcttgattaacattctataggcttaattaaattatttttaacatttctctatggcctatgacttatttatgttttgaacatcaatctaatgcacactgtcaaagtatttataaaactatttcatagagttgcttgcttctaaacattaataattggctgnctaggncatcgaaaattttttatattgagaccagtagcatttccttggtatctacaacca

SEQ ID NO: 20896 - DNA, 417 bp, Zea mays
  Coding DNA Sequence Number=SeqID_6493
gtcgtggtcgtgattatcatgggtcgtggtcgtgatcaaccgtggtggtcgttatgatcgtggtcgtggtcatgatcattgtggtggtcgtcatgatcgtggtcgtggtcatgatcattgtggtggtcgtcatggttgtggtcgtggtcgtggtcgtgatcatcgtggtggtcgtcatggtcgtggtcatgatcatccgacacggaggtggcaacggggctgatgctattcttcaatgcatcatcggcatcgtcgtcgtcgcacttcctcatgcaggacctgtagcacctgtggtacatgtggtggtcgtagtcctcccacaccgcagcggaggagagcgctcctgcgacggctaggagcgcggcgagcagcaccgctttggagcacgccattgctggctgcgcgacctcaaggaga

SEQ ID NO: 20897 - DNA, 565 bp, Zea mays
  Coding DNA Sequence Number=SeqID_6494
atgacgagtagttctgatctactaagaggaatagaggaatacacacctttgttgttgttgctatcttcataccgtcgccctgcagagaagcagcaggcatcgggatccgagccgctgtaggttgtcgcgtttccaaacactccgacgcctaggcgatgggggcctcttgaggactaggggtttggggcgatggtactagcggttagtctttcctgcgaccccttagtcctatatatatagcatcgtgtgtctgggggctccaaccgaggttagcatgggccctcccgatcaagggcccgattaaaggaacgatagttgggttaagcccaatccagtctctattgaccggctgtagaggacacacccaacaattatcaggataagaagggttgaatcgtgttccagcaacaagtggcaagggtcaggttcccaagaccaccagttgcaaggagagaagcaaaatttgggggctgcatcatcgattgtgcatgacgagcgatcgagggcgactccaatataatggcgacccatgctacatttgcacttaatctccagtagggcccaa

SEQ ID NO: 20898 - DNA, 509 bp, Zea mays
  Coding DNA Sequence Number=SeqID_6495
atccccaggcatgcgggcttgcaatggagctgctgcagcttgaagcgtccacgcgctggagggtgatgtatcgggtgtggctgggcatgctcttctactccgccagcatgtgcagggggcacgaggacgctaagagcttgggtgaaggtggcgagttcctttcctacgtctggctcgtcctctcgctcaagggggccaagaccctggccgacaagcttcagatgttggaggtggaaggggacgacaggcagggacgaaggcaaggacgaaagtgggttgagatgcggaatgaggagcttcagattcggggagacgacagggagccagcaccccgatcgatgcccaccactagcagcttgtttcaaacctgatcaaatcctccaatccaatcgccgatgccatgattttactatatatcaattctcctgtttgtttgttcgtttaaaaacaagccagcgttctccgacccaactactggccggtttgtttgtcgccttgcctttgtttaa

SEQ ID NO: 20899 - DNA, 440 bp, Zea mays
  Coding DNA Sequence Number=SeqID_6496
gttcatcgctcaatcgagcacccaactatttcaacctggcccaggtccatgcggccgggaccgccaagagcttcgacgggattgggctcgagaagatgctggggaagtagtacgcgcacaaagacgaggagtacgtctcgatgcttggggtggtccgcgagttcccgccccagctcatccttcccgacaacatcctcccacacaatgctcggagggcggttgcccgctgaaccttttctcaacccatgcttggcgttgttgcctgttgtcttggagcattttgacacgcgttcgttctctgtttttttatgaagcccattgggtttgggtcgggcactgttttgggttcgcccgcacacatccccccctctattttaaactgcattggactggtagctcggggtctcatttactcgtctttggcttctctctgtggcgca

SEQ ID NO: 20900 - DNA, 452 bp, Zea mays
  Coding DNA Sequence Number=SeqID_6497
cgccggtgtataggccggagtacctggtggacgggaaccagctggtagacatgcagtaccacatgggccccgtcgtgtcaggcgcgccgaccaacctgttcctcatctggtacggccggtgggaggccccggcgcaggctgtgctccgcgacttcctcgcctccctctccgctccggcgccgttccccgccgtctccgactggtgggcccgcacgccgcggctctacacggaccaatccggcgccaatgtcaccgccacattcgccatcgccggggagcactccgacgccgggtactcccacggcgcctccctgaagcggatcgacatgcagtccatcatccgcaccgccgtggtcgcgtacccggaccctctgccgctcgacccgtacaacggcgtgtacctggtgctctcctcaccggacgtgcaggtggaggagttctgccgcgccatg

SEQ ID NO: 20901 - DNA, 262 bp, Zea mays
  Coding DNA Sequence Number=SeqID_6498
ggtgggcgccgattcactccatggcgtgctccgacaactctcaaatcatcgacatccaccttgagcgatctgtattcggttcaagcggctttgatgcagctccagctgaccatcctcttgtcagtgggaatggttacgagcatacctcatgcactatttgctgagttaattggataagaggtttgcttatgcttgtgaggaagacaacaagagttcaattagtcgaacatgaaaatagtctaaatgcttgcgcttaagcggg

SEQ ID NO: 20902 - DNA, 469 bp, Zea mays
  Coding DNA Sequence Number=SeqID_6499
aggttccttgtgtctacatacgacgagttctggaaaaggtacaacgatatggattccaaaattcgccatcattatgaggttatccaggaggcttcgccttgccacatttactttgatcttgagtttgatacaagattgaacaagaagagagacacagatgaaatggtggatatattgattgctgttgtattcagtgctttgcgtgataaatattctattgaaggacatgaagagtggatcacagagctagactcatccactgaagaaaagttttcacgccatctaatcattcgtatacccaagattgcatttaaagacaactcccatgttggtgcgtttgtctgtgaggtctgttcacaaattgcagctcagcgtacaaccaatcatgaccttgataaactttatattacaaaagaaatcagctcaggtcctgttgatcggctctttatggatactgcagtttactctc

SEQ ID NO: 20903 - DNA, 310 bp, Zea mays
  Coding DNA Sequence Number=SeqID_6500
gcagaggtatgtaggaaagcttaactagttcaagatttgtcctttcggttattcagtctggctggctcacggggttccgaatcggtctgcggtttcagggcagggagcagcatcaggaggaggagcaggacgggagctggcgagccgggggaaggaggcggcgagcgcgtggccgcggtgcaatacctagaacggttgacccatggcgaaaagcgcttctgtgccgggagtctgaacgcggcgccccgcgtggcgccgccggcctgccggggttgcctcaggtcgagcttcatcagaatccggcgggaaa

SEQ ID NO: 20904 - DNA, 234 bp, Zea mays
  Coding DNA Sequence Number=SeqID_6501
gattatcgaggtaccgggacccgtgagcggcatcttcaccccagttgaaagacactagtagtagtagtagttccagtaccatcctgcaacggaaagacgaagggagaggcggtcaatgaatggaggcggcctatctgaaacgaaaccggttagcaactgaaagcgaagtctattaacagaatccctgaactctctgttgatgcggaggagcaagtgcgccgttaatgcagctgg

SEQ ID NO: 20905 - DNA, 149 bp, Zea mays
  misc_feature (67)..(67): n is a, c, g, or t
  Coding DNA Sequence Number=SeqID_6502
atcttgatttataaggttagcatttagcaattaaagtgctccttccgcctcagcacattataatagngggtatatacaatgtacatatacaatctacaatatatatgaatagtatatctgaaaatatagttgctacctatattaaaaaa

SEQ ID NO: 20906 - DNA, 220 bp, Zea mays
  Coding DNA Sequence Number=SeqID_6503
tccttggctgccgtctgcgaaatggctacaaacttcctagcacatgagaggatctggttcgacaagttcactcatgacgacgcagagaggagattctacgagcagatgaacgggcctgtggcaggtgcctcccgccaggagaacggcgccagcgtgatcctccgtgacattgcgagagccagagagagcatccagaaatccctggctggaagtcaggccc

SEQ ID NO: 20907 - DNA, 435 bp, Zea mays
  Coding DNA Sequence Number=SeqID_6504
aagcacctcatcatgtggtacttgttcttgacctggcacttgagattccaggtaccaacttgctcttcaggtgactcgtgatctcactgccaagattggagtgtcacgggtgcagtccacggcggcgggcagcaagcaacgccgcgcatctgaggcaatggccgctggcgcgattccccccaggcttcggatcaacgcgaggaggaagtagcacgacaccggcaacgcgcttgcatgaagtggccatgagcggcaccagagctagcatgcaacgcccctaggactgcaacagaaactccagcgaggatcaccgaacagccgttctttccggactcgacgatgtcgaatgcacacgatggcgttgggtttgctgcggccgcgcctgccgccgatgctgtcagcggggaagccatgcatgatgcatccgagccggat

SEQ ID NO: 20908 - DNA, 382 bp, Zea mays
  Coding DNA Sequence Number=SeqID_6505
taccaatctcctcgtggatccggctcggatgcatcatgcatggcttccccgctgacagcatcggcggcaggcgcggccgcagcaaacccaacgccatcgtgtgcattcgacatcgtcgagtccggaaagaacggctgttcggtgatcctcgctggagtttctgttgcagtcctaggggcgttgcatgctagctctggtgccgctcatggccacttcatgcaagcgcgttgccggtgtcgtgctacttcctcctcgcgttgatccgaagcctggggggaatcgcgccagcggccattgcctcagatgcgcggcgttgcttgctgcccgccgccgtggactgcacccgtgacactccaatcttggcagtgagatcacgagtcac

SEQ ID NO: 20909 - DNA, 164 bp, Zea mays
  Coding DNA Sequence Number=SeqID_6506
aagagcatccaagtgtgcagccagcgattgattcggacggccaccatcggcgctcctcgcatgttcttaggtcccgcaacactggagcggtggagccagcgactaatccattgggagcagcagcaaccgaaagtaggcacaccgcgaggcaaggtacgctagat

SEQ ID NO: 20910 - DNA, 591 bp, Zea mays
  Coding DNA Sequence Number=SeqID_6507
tcatactttatttagagacgtcccccagaaatggattgagggagggaactatgagctttgcatagaagacgtgagggatgaaatttgggacatggtgaaacccgcagatcctttcaggatttcgctatcagatttttttttttgcaagcaaggtgggactgttgccagcatgcttaaaaatgtgggtggcttttgggcccccgacaacagggagacccttttccaggaaaaggaaaagcaagtggaaaaggcatgagttttccaccccccaagtaaccgtacctggtgcctcaaaattgcaacatcctcggaactgcctgtaccccagtatcagtcattgtaccctaaaaagtgtattaaatctatcccccccagtttcctgaagcttgtttttaagtgtgccaaagtggttttcgaaacttgttgaggcaaacaagccccgtttggccatattgacatctatccgtgagggcctgattcctcggcagcctatatgtacatttaaatttgccccaagggggcaatcctgactacggcatcaccgcctgtaagcatatactccgtatgtaatccatcttaaaagttcgtcca

SEQ ID NO: 20911 - DNA, 180 bp, Zea mays
  Coding DNA Sequence Number=SeqID_6508
tgcttcctacacatcgtgcggctctctggtgcttgctctcgcccttggccatggagcagcaacaactatgaaacccccttcgtgtcgcgccctcgatgtgagcgagctccacctcgatctatgccgacccgatcaccacttcgtcgaaccccggtgagaactcgttgtttttcttgtgtt

SEQ ID NO: 20912 - DNA, 338 bp, Zea mays
  Coding DNA Sequence Number=SeqID_6509
tcataacatgttgcatacgcctcctcctacggtacctgatcttgaccgtactcagtgacgtaaaatttcctggcctcagtggacggcggcccaatggcagacgacatacaccggcgaggaattcaccagccctgatggatctttgggtcagaatctccatgcatacgttcttggcgcatggtgagtctctgattaccacccggcggcccagctccagctccattagcgctcacatcttggtcggccaggtgtctctccctccccaggaatcgtcggcgacggattttcaacaggaatccatggttagccatggtccttgcttcggtttggttacggca

SEQ ID NO: 20913 - DNA, 338 bp, Zea mays
  Coding DNA Sequence Number=SeqID_6510
tttgccgtaaccaaaccgaagcaaggaccatggctaaccatggattcctgttgaaaatccgtcgccgacgattcctggggagggagagacacctggccgaccaagatgtgagcgctaatggagctggagctgggccgccgggtggtaatcagagactcaccatgcgccaagaacgtatgcatggagattctgacccaaagatccatcagggctggtgaattcctcgccggtgtatgtcgtctgccattgggccgccgtccactgaggccaggaaattttacgtcactgagtacggtcaagatcaggtaccgtaggaggaggcgtatgcaacatgttat

SEQ ID NO: 20914 - DNA, 285 bp, Zea mays
  misc_feature (48)..(48): n is a, c, g, or t
  misc_feature (56)..(56): n is a, c, g, or t
  misc_feature (74)..(74): n is a, c, g, or t
  misc_feature (101)..(101): n is a, c, g, or t
  misc_feature (109)..(109): n is a, c, g, or t
  misc_feature (153)..(153): n is a, c, g, or t
  misc_feature (204)..(204): n is a, c, g, or t
  Coding DNA Sequence Number=SeqID_6511
gatcataatgtaatattaatcccaaaaccaggtaaagcaatgtcaaanctacccanaagttcagtggtaaacanggggtgggataaacaatactagggaantctattangtcccatcaaattaacctgaacatgtcacagtgattaacatganctttattgggtaaataagagtgatcaagggcacaactcgcctgagactcangattcccaagcaccagcttggtctttaagattttcgcgacctcacttctatttgtagcaatacatataaatagactaggag

SEQ ID NO: 20915 - DNA, 188 bp, Zea mays
  Coding DNA Sequence Number=SeqID_6512
tgcagaagccgagagcgaagagagagaagttgccgccgtaatatatctagacccgagcagctgccccgtcccggtgctcaccgaagcaggagttgggcgtcgtcatcgctgaagtgatctacttcatctaacaggcgaggttacgagaatctgaagatcatcctagtacctgaaacctaaagtctcag

SEQ ID NO: 20916 - DNA, 195 bp, Zea mays
  Coding DNA Sequence Number=SeqID_6513
agatgactcgcacctcgcgcggtttcgacgctgtcgctgccttgtccgcggcgaggctcttctttcctgcgaacttggccaatggcggctgggtcccttgcgtgatgaagtagcagggaaggtcgcggtcagaggcgggatccatatgcggtcggggcttctcctcacacaaggccatggtggagcccctctgca

SEQ ID NO: 20917 - DNA, 234 bp, Zea mays
  Coding DNA Sequence Number=SeqID_6514
cgtggtcaccaagcgtccaagcgtagccatgggggtgagtgcagaggggctccaccatggccttgtgtgaggagaagccccgaccgcatatggatcccgcctctgaccgcgaccttccctgctacttcatcacgcaagggacccagccgccattggccaagttcgcaggaaagaagagcctcgccgcggacaaggcagcgacagcgtcgaaaccgcgcgaggtgcgagtcatct

SEQ ID NO: 20918 - DNA, 516 bp, Zea mays
  Coding DNA Sequence Number=SeqID_6515
agcatcggtcgtccatctccctgagctccagcgcgcgcgttccttcctgttgcgcctctctccgtcgaagctccctgctgctcgccatggcatcttccagtctctcgctcgtcccctgctcctgtctttgcttggcgtccggcctcagtagctcgccctccccgttcagcagcaagcagctcctttcccctcgccatgcacgccgtcgatcccctgctgcagttcctccacatggtctggtcgtcgaccgcgcgcgtcacctgctcgtggttatgggaaaccagcgagcctctcctcacggcgtagtttcctcgcgtcatcgttcagcccgtggaggtaaatcctgtgagatttagatgataataaagctttagtgaggcgcttgccaagtgcttggtgaatcgcctcaaccagatgtggttgtcgatctcgcggagtcgagtttagtcgtggtaagtcgatccattgtttttgttagtcggataaatgattagttgtatggatatataaggcttg

SEQ ID NO: 20919 - DNA, 126 bp, Zea mays
  Coding DNA Sequence Number=SeqID_6516
cacgcgtccggagcattgcatggtagcattagagaactacgtcgcgtcggattcaggtgactggattctaagcgaggctactcatcgcccgtaactttggaagtgtcgatttataagaaggcagaa

SEQ ID NO: 20920 - DNA, 537 bp, Zea mays
  misc_feature (113)..(114): n is a, c, g, or t
  misc_feature (151)..(154): n is a, c, g, or t
  Coding DNA Sequence Number=SeqID_6517
gaatttttgttgtttggacttgctgtttggactgtgcacagttttaatatgcaggtagctaagtgaagtaaactttgttttctgaagagatgatatgcatataagttgtagcnnacttctttatcctggttgtgtaaaaattttatgaccnnnngtttagtagtttaggagttatgatttttcaagtccagtttcagaatctgtccagattctgtactgatttcgaaaatgaccttgtttgccaaattaaactgagaatcagctcttagtaattataggagaattgtagtactttgcttaagctttccaacaaattttggagcaccctttttggtggcctagagaccaagttacagctgtttgaactgtacagtctgaatctgtccaaatctggacagcaatgtttgtttgtattaactgactttgatacacattgaatcaccctgaaatgtttataaataaattgtagacaattctactagctttctaaaaagtctcggatcacctgatttggatgtctgaaactcaagttatgga

SEQ ID NO: 20921 - DNA, 173 bp, Zea mays
  Coding DNA Sequence Number=SeqID_6518
gtataggagaaacactgtcgccacagctaggttcgaccatgtcgctgctactcctgctaccagcaagggagagagatagaggactgttcgttgccagggggacttcgacaccgagcaatctggcgctaacatcaccgtcgtttcccagttcagcgtgaggttacgagttacct

SEQ ID NO: 20922 - DNA, 131 bp, Zea mays
  Coding DNA Sequence Number=SeqID_6519
taattgcctgtcttgcttcctctccatcgaaggtcaagccgtcaaggcatggggagcgtccatgggctaaggtgatacactgatacaacgacttgacttggacggtagtgcagaggctgaagcggatggca

SEQ ID NO: 20923 - DNA, 124 bp, Zea mays
  Coding DNA Sequence Number=SeqID_6520
tctacagtaccgtctgcttcggcctcagcgctgccatccgcttcagcctctgcactaccgtccaagtcaagtcgttgtatcagtgtatcaccttagcccatggacgctccccatgccttgacgg

SEQ ID NO: 20924 - DNA, 503 bp, Zea mays
  Coding DNA Sequence Number=SeqID_6521
gcgctgattcccagcttgaagcatctcgatggcgccgacgctgagggcaacgagcgtttggagatgggtgacgatgaggacgacgaggaggacaacgaggagggagaaggatggggagaggtgtctccctcggaggatggaaaagagggtgatggagaggaaatggatgaagcagatgacgaggatggtgaatgggaggatgaggaggaagatgaagacagtgaagacgatgaggacgaacttgatacagacgcagaggacaacgagaacatcgaaagcaaagtaggatcttccctgccaaataagaggaaacggtgtaacgaggatgatgccaatggagacaagtaaaacggtgaggtaaatattattttctttacttcggaagtgtttctgtgcactaatagtagactagggcatactgtttttaggtgattccatttttgaagtatcgtttggattctggaagttgactgacactgaaatcatgagtaggatgcgacccc

SEQ ID NO: 20925 - DNA, 588 bp, Zea mays
  misc_feature (544)..(545): n is a, c, g, or t
  Coding DNA Sequence Number=SeqID_6522
accttggcaagggtgcacgtaccaccagctaacacctggagcaaccgcgacgggcggaattcattgtcggtttctttacgccaccgccgtgccgcggctctgcgtgaaccacgtcgattgcgcccagattcacgaagagcccgtgcccgaggatcctggtgagcagcagatagaagtagctgagcaggagctcattgaaggagaagaacgggtggtttaggaggagccacaaagcgaggagtttgatcggatctaggtggcgtttctcagatgacttgcgccaaggatgatccttagttcgttttatatttatcttttattttgtaataagacttctactatgtaataaatactctgatgttattgtgacatttatctctatacactctgttattatatatgttgttgttgcgggccttcttcgccgaagatcctccaagcagaaacaccttcggcagggtgatatgcgagcaaacacaatacgaaggtataagccaaagctacaatccagggagcttcggtatgacgacgccttgagacgaanngcagcaccgacttaaagagtaaaagatcgtttagtccatgata

SEQ ID NO: 20926 - DNA, 90 bp, Zea mays
  Coding DNA Sequence Number=SeqID_6523
ctcattccacaccagattacgttatccgtggatcaatcgcttggtgaaacaattttctggagacttgtcgtcaccttgaagacttgtgaa

SEQ ID NO: 20927 - DNA, 559 bp, Zea mays
  Coding DNA Sequence Number=SeqID_6524
gtgtctaaacataaaagatacccatgcatttctaattacttgctaaatagtattaaaaagagagatagagactcttaatttttgaatcaattagaaactacaatctcaattacaaaccaaacttggtataatcctttttttctacaaatctcgaggacgagatttctgttaaggggggtagaatttgtaacacccaataatactattttcggatttatgaaaaaaatactcccaaggttttgaatcaaaatatgttctaataagaattttcttacctacgaaactactcttgaaataaatgtgcttctaatagaatattaaataaaaaaattcttatatgaattaaaattacccctatgtataattatatatatttaggaatattcactaaaatatttaataaaaagtatttattcataaaggatctacattagaaattgttacttttgtgtgcataaattatatatttaacgcatttttcttaattgattaaaatagtaaataagtaaatagaagtatatttttcattcgtattggagattttgattctacatttttt

SEQ ID NO: 20928 - DNA, 230 bp, Zea mays
  Coding DNA Sequence Number=SeqID_6525
gtatatgagagaacactgtcgccacagctaggttcgaccatgtcgttgctacgtccttagaaaccagttgggttaggaattcagtaccggagtaggagtttcgccatctgacagcatgacgttgatgagtgatattttctcttgcccccaccatcgaagcgaggttacgaagaacctgaaacactaattgcggaagtatttggagttgcaccaaaaagcagtgaggtcac

SEQ ID NO: 20929 - DNA, 577 bp, Zea mays
  Coding DNA Sequence Number=SeqID_6526
ataaatcatcaacaggcaccacaacaaaatcttttttttaacctacacatgttattatgttttgcacatatttgcaaacactatacaaaatcatccacaaaagtactaatgcttcaagtgattcgcaaaagccttcacaaaagcactccaacttcttgtatcctcttgttttaaggcacaagcttgtaggggttgtgatgtcaccatttacttgatgctaacaagatatttccttcactaaagccatcttcaacacttcgcccataaaaaagatcaattctcttttttaattgtctgttcaaaaattaaacccggaactgggaaagggtgtgaatctgatgcggcaaggaggcggagccgccacggattccattctgttccgttgcgcggcgtacgtcacagattccaatgcccgcaaatgtggcttcacggcgtggaggcatacaaaatttacagatgcctgcaaagaatttgtaaacctgtacagcttagcgcagcttgttgatcggctctgaattggagtaccagatgcagcctgaacttggagcgtcagattgcagattgcagcctgaccttg

SEQ ID NO: 20930 - DNA, 280 bp, Zea mays
  Coding DNA Sequence Number=SeqID_6527
aagttcagtctgcaatctggcactccaaggtcaggctgcaatctgcaatctgacgctccaagttcaggctgcatctggtactccaattcagagccgatcaacaagctgcgctaagctgtacaggtttacaaattctttgcaggcatctgtaaattttgtatgcctccacgccgtgaagccacatttgcgggcattggaatctgtgacgtacgccgcgcaacggaacagaatggaatccgtggcggctccgcctccttgccgcatcagattcacacccttt

SEQ ID NO: 20931 - DNA, 488 bp, Zea mays
  Coding DNA Sequence Number=SeqID_6528
caaatatcacgacagcttggcgacgagatgagcgagacaccaccgcgtgtggaatgagctcagggcgatgtcgagagcaccaatgatgctacctggcgaggctgatcacgttgaccaccagtgttgaactcgctagggagaggagggcaacgtcgagatgaacaacaacggtggtgtatgctggagcggctgggctggtgagttttgtgactgggaaagaatctcggcaagctagggctatgaaagccgggcgatgactagggaatttcgagggagccggcgagtagcagacaacgaccatggcgagctgatgccaagccaactgctgcagattcccgagcacgagcgttcaggcactcggctgggagacgacaagctgagaaagggtaggtgcgacgagtcgagctggagagacgagcgctggacttggcaacgtcgaacatcaagagggcaatacggcgtgagctgtcgagtctaggcgtacggca

SEQ ID NO: 20932 - DNA, 542 bp, Zea mays
  Coding DNA Sequence Number=SeqID_6529
gtgcctgaacgctcgtgctcgggaatctgcagcagttggcttggcatcagctcgccatggtcgttgtctgctactcgccggctccctcgaaattccctagtcatcgcccggctttcatagccctagcttgccgagattctttcccagtcacaaaactcaccagcccagccgctccagcatacaccaccgttgttgttcatctcgacgttgccctcctctccctagcgagttcaacactggtggtcaacgtgatcagcctcgccaggtagcatcattggtgctctcgacatcgccctgagctcattccacacgcggtggtgtctcgctcatctcgtcgccaagctgtcgtgatatttggctatagtttgtgctactgatggtggtgttaagtgccagtgggctcggccttcttataagtctaagtacttcttctatacttcttattaaggatggtcacttgagctagcatatattccaaaactataaataattcatagcagtttagagttatttctttgaatcacttttataaatcactccga

SEQ ID NO: 20933 - DNA, 187 bp, Zea mays
  Coding DNA Sequence Number=SeqID_6530
gcatcatgtggtcgactcatctttggtcctctgcatcacgtggtccactagcgtacctggcagaatcaaactcaggtcgcgtgtgtgctgtccacaggcttgggacttttgttgagcacgcgatgcgcgagacgcgacatcgacggaggacaagggtattgtgacgtcgcgggttagggctgcacag

SEQ ID NO: 20934 - DNA, 101 bp, Zea mays
  Coding DNA Sequence Number=SeqID_6531
tcgatgtcgcgtctcgcgcatcgcgtgctcaacaaaagtcccaagcctgtggacagcacacacgcgacctgagtttgattctgccaggtacgctagtggac

SEQ ID NO: 20935 - DNA, 166 bp, Zea mays
  Coding DNA Sequence Number=SeqID_6532
gtgacctcgcgcatcgtcggagggcggagaggaaagctagctgtagcacacggcggcttgaccacgaatctgggctccggtgtgaaattccgggttcatcgaccgtgtatctcccccgccgtgacgctgaccacttccccggaccatccatgaaggtcctaggcta

SEQ ID NO: 20936 - DNA, 179 bp, Zea mays
  Coding DNA Sequence Number=SeqID_6533
gacaaaatggttagcctaggaccttcatggatggtccggggaagtggtcagcgtcacggcgggggagatacacggtcgatgaacccggaatttcacaccggagcccagattcgtggtcaagccgccgtgtgctacagctagctttcctctccgccctccgacgatgcgcgaggtcacga

SEQ ID NO: 20937 - DNA, 131 bp, Zea mays
  Coding DNA Sequence Number=SeqID_6534
gtacctgttcttgacaacggattatgtacaagctccaatccccaaggcaatagcgctctgatagctggcgaggttgcagatttggagggataggggcgatggcctcagtatttatcctccggccaagaatt

SEQ ID NO: 20938 - DNA, 141 bp, Zea mays
  Coding DNA Sequence Number=SeqID_6535
ccacctcggcgaattcttggccggaggataaatactgaggccatcgcccctatccctccaaatctgcaacctcgccagctatcagagcgctattgccttggggattggagcttgtacataatccgttgtcaagaacaggta

SEQ ID NO: 20939 - DNA, 349 bp, Zea mays
  Coding DNA Sequence Number=SeqID_6536
agattccacactggcttgctcgtcttggttcacggcgacagcaggtctggccacggggagttgcggccgcgagcggatgctccacgatggtgagcaatttgttgcccggtgatcccagtcaacgcaccaattatggcggggaaacgtgcgacgaacgccagggatcgcacccctgctatgaattggggcttgggagctataattcccggagtcaaccccggcgaccggtcaccattgccttcactgctcgcgacgaaggaccagaggatggggtggatagcggcacacgcaaaaattgaagaggagggaggagagaggttgcggccggcttcttatggaggcgcggaac

SEQ ID NO: 20940 - DNA, 338 bp, Zea mays
  Coding DNA Sequence Number=SeqID_6537
gttccgcgcctccataagaagccggccgcaacctctctcctccctcctcttcaatttttgcgtgtgccgctatccaccccatcctctggtccttcgtcgcgagcagtgaaggcaatggtgaccggtcgccggggttgactccgggaattatagctcccaagccccaattcatagcaggggtgcgatccctggcgttcgtcgcacgtttccccgccataattggtgcgttgactgggatcaccgggcaacaaattgctcaccatcgtggagcatccgctcgcggccgcaactccccgtggccagacctgctgtcgccgtgaaccaagacgagcaagcca

SEQ ID NO: 20941 - DNA, 412 bp, Zea mays
  Coding DNA Sequence Number=SeqID_6538
ttattacatagctgaagtaccttaaaaaataaatgataacaataaagcaaactaataattattccttggcgccataaagctgactaggagacgccacctagataagctcgtattcctcgttgtagacctccacctgggctacctgctcttcaccttcaatgagctcctgctcagtattttccacctgctgtgtaccagggtcttcagtcgcttgctcgtaatgattacgaagtgcctttccctgcccatgacgtgcccaagatttgtggccatggtgtcaatttggcggcgcccatgtcacactccctcccagccaccacctcaacacgatcttggagcttggacggactctcccgaccgcgcacaaggcaccaattagtgcagttcacgccgaacgatggtggaggcctcc

SEQ ID NO: 20942 - DNA, 138 bp, Zea mays
  Coding DNA Sequence Number=SeqID_6539
tctctccaaccaaggaatcaggtgaagacgaggctagcatcacgatactccccaagtgttcgataaattgcttggaccggaaaatcgctaccgatcttgcggcttcgagtcagctgctgaaacggtacgataattgat

SEQ ID NO: 20943 - DNA, 526 bp, Zea mays
  misc_feature (218)..(220): n is a, c, g, or t
  misc_feature (222)..(226): n is a, c, g, or t
  misc_feature (230)..(232): n is a, c, g, or t
  misc_feature (238)..(238): n is a, c, g, or t
  misc_feature (240)..(242): n is a, c, g, or t
  misc_feature (252)..(252): n is a, c, g, or t
  misc_feature (254)..(258): n is a, c, g, or t
  misc_feature (262)..(263): n is a, c, g, or t
  misc_feature (265)..(267): n is a, c, g, or t
  misc_feature (317)..(319): n is a, c, g, or t
  misc_feature (373)..(382): n is a, c, g, or t
  misc_feature (412)..(419): n is a, c, g, or t
  Coding DNA Sequence Number=SeqID_6540
cggaggaaaagttccgccgtgtgctcgctcctcaccgtggtcagggcactgggctgcatacatctcgaagagcctgtgactgaggatcctggtgaccaacagatagaagtagctgagcaggagctcattgaaggcaagttgtccccttgaccactttttacccaataatgttctttaatatcatttattcatgcataggttaatttttatggtgttgnnncnnnnncgannncgctancnnncgctctagcntnnnnntatnncnnngcgccaacgggagcagaagaaccggcaaggtccacccttcgccttgcacnnnacgagacgaaggcctacgacgacgtcgccccatctcacatcctcactcgacctnnnnnnnnnntgggattcagcccattgtaacaggccccgnnnnnnnnagtgtgttacgggcccgatttgtaataacttttctgtaatgacagtatgtaaccctcctttgtaggaatattccggggatagtctagctgcctgagggtacatgcgt

SEQ ID NO: 20944 - DNA, 389 bp, Zea mays
  Coding DNA Sequence Number=SeqID_6541
ttgttagatgatgtccacgtggcgatcatctcacatcctggcgcttgatcagatcatccattcctctggtttattcgtcagcatcactttgaggttaatccaacacttttcctccacatcgtgcgatcaattaacgtacctccacaggctgaacgatgacgcgaggaaactacgtcgtgaggagaggctcgctggtttcccataaccacgagcaggtgacgcgcacggtcgacgaccagaccatgtggaggaactgcagcaggggatcgacagcgttcatggcgaggggaaaagagctgcttgctgctgggcggggagggcgacctactaaggtcggacgccagcggaccggaggcagaggaggcagccaagcacagggagttgagggc

SEQ ID NO: 20945 - DNA, 332 bp, Zea mays
  Coding DNA Sequence Number=SeqID_6542
gggcgtcacgcaatgcgcgcgcttttcgccgggtaggtgcaactaatcggccatgctatttccccgctgagatcctctccgctgaccggaacaaatccatcgggttgggagtataaaaccggcgccctgcaaccaccatcttcggatcgcgtcgcggagtggggaagctgggggtgggtcaccgtgtggagcgattgaatcctgcccgcgatccacctcatgccgcgggctgggtaccctccgactcgacgaacacgccggagcatcgcttcaccgaaccgcgcccatggaatcttcgtcgagcttcgtcgcaagtgagatcacgtgtcacc

SEQ ID NO: 20946 - DNA, 299 bp, Zea mays
  Coding DNA Sequence Number=SeqID_6543
atccgaggcggaccaacaagctacggttgtggcggcaacgcgtttcttggcgcaggtggccaatgaattttttctaggctcatgtgtggcgatctagtcgtcggattggttgtcgccagaatgtgtgtgctacttttgcttagcaagctggaggagggacccaagaagtggttagaattatggcgacgatgatgaatggttgaagcagagagaggcggccgcggatcattcgaggccgaagcaacatcaacctcgagtcctcgacctgcaggtctcgttgtcatctcccgtctgtcacg

SEQ ID NO: 20947 - DNA, 223 bp, Zea mays
  Coding DNA Sequence Number=SeqID_6544
aatatgaagccgacacaacacccaaaggggcatcattgttgtatgtgtccccaggcttgaactgggcattcagcagcaccgggaacttcatggacgacaacataaatgacgacaactacatagcaacaagtgcatcaaaattggccgtgcccaattcagatctgtacaacaaagcccgtctttctcctctttcgctcacatattatgggctttgcatgttaag

SEQ ID NO: 20948 - DNA, 96 bp, Zea mays
  Coding DNA Sequence Number=SeqID_6545
agaccactccacgtaatggtgtgatggatgtttgtcacaagctgacctgaatcttgaaaatagtgctactgagaaatggcacactgttgcaaaaaa

SEQ ID NO: 20949 - DNA, 333 bp, Zea mays
  Coding DNA Sequence Number=SeqID_6546
acgagcccaggctgcaggggattttgttgaggcatgggaggtgagcggctcatgcagggagaacggaggacacctaggagctgctgctggccgcggctcctcacactgcgatccatttccgagcttcgaggaatcgacggtcaagcttcggcgaccaagagaccaaactcctcaagttctacgaggctgaagatcctgaacatctgtttggtgaaggttgtccacattgcaaccactgctcaggagaagatgaagccgtggaaggagactcccaagagttccaagactacgactagttctaggtgtgggttggcggcaaactcccagtcagct

SEQ ID NO: 20950 - DNA, 420 bp, Zea mays
  Coding DNA Sequence Number=SeqID_6547
tttagtgctcgaataatagcatagaagagtattaacttattacatcacgatgtcatagacatccacatagtcatcaactcaacgagtaaatcaaagtgctaaacgaaacgcagtaaagatagggccttcacaggcagctgactgggagtttgccgccaacccacacctagaactagtcgtagtcttggaactcttgggagtctccttccacggcttcatcttctcctgagcagtggttgcaatgtggacaaccttcaccaaacagatgttcaggatcttcagcctcgtagaacttgaggagtttggtctcttggtcgccgaagcttgaccgtcgattcctcgaagctcggaaatggatcgcagtgtgaggagccgcggccagcagcagctcctaggtgtcctccgttctccctgcatgag

SEQ ID NO: 20951 - DNA, 476 bp, Zea mays
  Coding DNA Sequence Number=SeqID_6548
ccacatcgttttgctcctgtttttttggaaaatttaggagagagatgacgccatcgatctggacgaatggcgagctcgacgatctagagtcagatctggtggggaagaagactggtcggtcgttaccgacggcaacgctgactgtagagctgatcgtgccaccagcacaagagatcaaggagttctttgccatcgtcgaggcgaccagtacaagcgcttcgcttccaagaaataactcttgaccatgtgaaggcagttgtctttcttggagatggttttggcaccacaccagagatgagcaaatgaaacttgatatagttcatactggagacttgctgctccaaaggcccttacctcctgttctgctagcgaaatgaaattgtgtttgggatctttaaaaaggggggctaggggttatccagagatgacaaggcccttcgaaattggctttccagcactgggatccgaagcgatga

SEQ ID NO: 20952 - DNA, 267 bp, Zea mays
  Coding DNA Sequence Number=SeqID_6549
caagagggcatcctgtaattttgttgttcaaattgtaagaccggtcccaacggtcgtcggtactgtcgacggcctgcgatcggcaccgtctgcccctgagttccagccactgtcggtcgagctagcggtcggtgacgctgatgaccacccatgaaccgtagaccatctctgctgccacgtgtcgtcttttcattagtccatattatttttttatgtccaaaatattttaagaacctaaggaaatatttatgaaccatgtagcatcta

SEQ ID NO: 20953 - DNA, 246 bp, Zea mays
  Coding DNA Sequence Number=SeqID_6550
tagatgctacatggttcataaatatttccttaggttcttaaaatattttggacataaaaaaataatatggactaatgaaaagacgacacgtggcagcagagatggtctacggttcatgggtggtcatcagcgtcaccgaccgctagctcgaccgacagtggctggaactcaggggcagacggtgccgatcgcaggccgtcgacagtaccgacgaccgttgggaccggtcttacaatttgaacaaca

SEQ ID NO: 20954 - DNA, 448 bp, Zea mays
  Coding DNA Sequence Number=SeqID_6551
gcagcagcttgcaataggatgaataacatcgctagttttccccaacagaaaatgtacatagttcccagcacactattggtgcgtctgtagttgttttcttatcaatatacaaagccaataacgaatttttcccaagaagaagaagaagaagacgatggcgacgactctacttgcacgagcatcttgatcttatcaaatatagcacaatcctgttgttgttggtggattttgcacaagtgctaatagaccaaaggcttgcaaatcaaaatggcccattgcacagaactgttgcaaaaaatgtgccaaactcacatcacggtgagttagtgatcgattgtgttacttggatacgagagaatatcgccaacgaagagggcggacatcggtggaaggggccttgtgtcaccgccgtcacttcctccaaatcgcgttgccgtcattgcttcta

SEQ ID NO: 20955 - DNA, 164 bp, Zea mays
  Coding DNA Sequence Number=SeqID_6552
ctctcagactagagtcggtgttattttaggatgcgatcataccagcactaaagcaccggatcccatcagaactccgaagttaagcgtgcttgggcgagagtagtactaggatgggtgacctcctgggaagtcctcgtgttgcattccggaatttcttccattca

SEQ ID NO: 20956 - DNA, 494 bp, Zea mays
  Coding DNA Sequence Number=SeqID_6553
caggctatcatgtcttctaggaatagaaagtatgattctggttttgaaaggcataagaagaaacggagactagaagcagctgatcaatctcaaacgggttctatggacagatttgttgtgaaagactctcaacttaattccaaaaatcaaactccagaagctaatcgtgttggtgaaattgagagtcatggtgaccagggacagggagatgctaacattgcagtacaacatgaggctcaggttgaagaaattggctagggagatggtgctaatactactgaagaagttagtggccataccgatgatgtcgatacttattttcaacctgatatatttgatccaagaatgtgggatgcacttgatttttgtactttaggggcccatttctcgtttcgccccggggcctaaaaaactcggagacggccctgcccaggataaggagtactttgctgaacttgcagttgacgctgtattaaggcttaagggcagcacca

SEQ ID NO: 20957 - DNA, 560 bp, Zea mays
  Coding DNA Sequence Number=SeqID_6554
gttgctgtcgcccatagtcttaaatctgtgtccatagcagtgtttgcaacgaaagttttggcattctcaattctccaggtttcttcagaatttgaatggcttccaggttggtgctgcccttaagccttaatacagcgtcaactgcaagttcagcaaagtactccttatcctgggcagggccgtctccgagttttttaggccccggggcgaaacgagaaatgggcccctaaagtacaaaaatcaagtgcatcccacattcttggatcaaatatatcaggttgaaaataagtatcgacatcatcggtatggccactaacttcttcagtagtattagcaccatctccctagccaatttcttcaacctgagcctcatgttgtactgcaatgttagcatctccctgtccctggtcaccatgactctcaatttcaccaacacgattagcttctggagtttgatttttggaattaagttgagagtctttcacaacaaatctgtccatagaacccgtttgagattgatcagctgcttctagtctccgtttcttcttatgcctttcaaa

SEQ ID NO: 20958 - DNA, 546 bp, Zea mays
  Coding DNA Sequence Number=SeqID_6555
attcggcacgacgttttgattggatgctttatttttccccatatagctttgtgggtttgtatgttggagttagctgaaaatactaatgattttaccatgtatttggccctttgttctgtcagatgggctcgcaaattctataaggattcttctcgagttggcaatcagaaactgtgataatttccttggactggaagagaagtgccctgaaacaagtcaaaatctcattcaagcgcgcctgtatcctctaggctgcttggatcctgagaacttctgcaaataaagaagcccaacttcatctttagctgaccccgacggtggcgacgatgtcgttctccatcccggatgcgcgggagatccctacggcagtgggtcagaggggagggctgagctctgtcgcggtgatgggagggagtggtcgaggtgctcgaagctctcactgacaacagtgggggagaggatacaagtttactgcggctaggggaggagagagggagaggagagccccgctgaagaagccccccctcttcgccatagaaggtatgt

SEQ ID NO: 20959 - DNA, 559 bp, Zea mays
  Coding DNA Sequence Number=SeqID_6556
ttctttttcgttgttgttccatgctctcttagaacaacatttcatatctactaaacacataccttctatggcgaagagggggggcttcttcagcggggctctcctctccctctctcctcccctagccgcagtaaacttgtatcctctcccccactgttgtcagtgagagcttcgagcacctcgaccactccctcccatcaccgcgacagagctcagccctcccctctgacccactgccgtagggatctcccgcgcatccgggatggagaacgacatcgtcgccaccgtcggggtcagctaaagatgaagttgggcttctttatttgcagaagttctcaggatccaagcagcctagaggatacaggcgcgcttgaatgagattttgacttgtttcagggcacttctcttccagtccaaggaaattatcacagtttctgattgccaactcgagaagaatccttatagaatttgcgagcccatctgacagaacaaagggccaaatacatggtaaaatcattagtattttcagctaactccaacatacaaacccacaaagcta

SEQ ID NO: 20960 - DNA, 437 bp, Zea mays
  Coding DNA Sequence Number=SeqID_6557
atcgatcgatctccgtatcgccggccgcttcctctcccccgcctgtcccctgcggccgtcgactcagccgctttctttctccgatcatccattgctgacgactgccggacgacgactgccagtgccatggcgactcaagcacccgagaaccaccgccattctcctactactaaggacgagaggagtggtgcaggtgcggaggatcaggcgatcgacgactggctcccaatcacctcgtccaggaatgccaagtggtggtactccgcgttccacaacgtcaccgccatggtcggcgccggcgtgctcagccttccttacgccatgtccaagctcggctggtacgtgtgtgtgacactgtcatcatcgacacactgcatatgcatatgcatgccacattcttcaattcacaagggcgtcgtcacaacttgcacacaggg

SEQ ID NO: 20961 - DNA, 471 bp, Zea mays
  misc_feature (444)..(446): n is a, c, g, or t
  Coding DNA Sequence Number=SeqID_6558
ggtgctttcccatggcatgccccgagctcctcccagcccaaccgctccttcctctgctcctccctgtttgccatcgctctagctcgcctggtcgccaaactccaagaacctgcgccgctcgcctccctgtgccgacgtcgtattctggtggccgcgctccactcctgcacctccccttccatggctaccgccgcccccaagcctagggccttgtcgagctccctcagctcgcccccgaacacaaccatatgccaacctcgccttggctccccagcgtcgctcgcccttgctgttccctgtcgagcttgccctacttccgtgctcgtgcaacctgctggtggcccggctactcatcatcggctcccctgtccgatgcgccgtcagccaactcgctggcggactttgctgtggtctggctcggtcgcgcgctcggctacttggtgnnngaccggcgccactcctggtgccgat

SEQ ID NO: 20962 - DNA, 417 bp, Zea mays
  Coding DNA Sequence Number=SeqID_6559
aggagctagcatagtgttgcctcgacaaatcgccgggcttcatcaccatacacggagagaaaaaaaacggggcccccatctactgtaaaccccgccgtggtggccgttcgaagcatgcagcaggggtaggatgtaccacgtgcacgtgaggctcgtgcttggtgaaaccgcgggatgcgctccgccgccgcgtctggccatgggggaaaagttagagcttgcgcagagaatggaggaaggatgtgacgaggtccgccgtggactgattttcgtccacgcccgtgccagggcttcgattgtgaccaggtagcttcgcagtgtcgtggggaagcgattcctaccactgaatcgtcgtgtgggtggccggagctaggccaatggctcgacggagcaattggcgccgctgtggatcgctcc

SEQ ID NO: 20963 - DNA, 446 bp, Zea mays
  misc_feature (408)..(408): n is a, c, g, or t
  Coding DNA Sequence Number=SeqID_6560
tgccggtggtttcttgctgcgattcgtaggacgccgtccgtttcttgattccggttcttgctgccgcgcggcctcgccatggggaagagcaagaagagcaaggtccgcggcggcggaggggacgaccttctggacagcagcgacgctgacagcgtgggctcgtcgtccaccgcgctctcagatctctccatctcgtacgccaccgagaacgtcaactcgcacgagtttgttctcgacaagtacatcgacgctctctacgagaagaggggttctacaagagaggcagcgttggcttcattggttgatgcttttgaaagttttatgcttggtggtcttgttgagaacaaatatgccactctactgagtctattcaatacttcgatcaagaagggatctaccaaggaggcntgcctggcatctcgcgccattgggctactgtctattac

SEQ ID NO: 20964 - DNA, 465 bp, Zea mays
  Coding DNA Sequence Number=SeqID_6561
agatcaagccggtcatgacctgggccggcaagcccatgctgccgcacgtcatgtgccagggcacccacgccgagcccaacaaatcgctgcaggaacgctgccgccagctggaggccgacggcgtgctggcggcgtcggtgttcgtgggcttcccgcatgccgacatccgcgaggccggcctgagcgcggtggtctgtacggacgccaacctggcgcaggccgagcaataccgcgacgaactgctggagcgcgcctggaacgaccgcgccaagtgggtgttccatccggaaccgctggcccccaccatcgcccgcgccaaggccatcgagcaaggcccggtggtgctgctggaccacttcgacaacaccggctccggcggcaccatggacaccaccgcggtgctggccgaagtgctgcgccaggaactggacaacgtggtgttctacgccatctgtgatccgcagg

SEQ ID NO: 20965 - DNA, 527 bp, Zea mays
  misc_feature (40)..(40): n is a, c, g, or t
  misc_feature (57)..(57): n is a, c, g, or t
  Coding DNA Sequence Number=SeqID_6562
ctccctcagctgtgatttgtttggttgttcctccctcagnctcgatcgccaccaggnaggaggcatcccaatctcgcgagagtcagtagcggcgtccgccgcctcgctgagggtcgccccccacccacccacgggggcacccgacagtacgaaccccacccactctcgaggcgcgtggggcttaccatgccccaccctgacccagatatatatgagatccccaacattacaccaccagtagactcacccccccaccgcggcggggggcgggggtgctgatgccttaacattctgtgcagaagcacccttgctgaagggtagatagaatacatcggtaaccctcgccaccgaacttactagacccccccccgcacgacaagttcgcgtgtattccgcgacccggaattcttactgcccgcactacccgcctatcacagcaccacggacataatgggccgcgacacgagccgccgttacatgcgcgcggccaatcgagattgaggagtgaacagccagacaacgcgaaa

SEQ ID NO: 20966 - DNA, 282 bp, Zea mays
  misc_feature (31)..(32): n is a, c, g, or t
  Coding DNA Sequence Number=SeqID_6563
ttggcagccacatgattttctccctgacccnnaatctgaatgattgcttgttcctctcgctcgccagtcgccaccaggcagcaggcatccgatgcttgtgagagccagtagcggcggaggcgcttacggcttcccttcccattggcctccgggatggcgctccgcctccacgacgtcgcgctctgcctctccccgccgctcgccgcccgccgccgcagcggcggcagtttcgtcgccgtcgcctccatgacgtccgccgccgtctccaccagggtggagaac

SEQ ID NO: 20967 - DNA, 186 bp, Zea mays
  Coding DNA Sequence Number=SeqID_6564
aaggaatttcaatggcgtgaacacagatattgaatcacaaaatgtgccattgagaatttctgaaaattgcatgcatgatcttttttacccactggttatggaaggtccaaatgataacccttgcccttgccccaaaatcctgtcctgtgtcgactaggtgcgcgaaccatgtcaacatactctgaa

SEQ ID NO: 20968 - DNA, 494 bp, Zea mays
  Coding DNA Sequence Number=SeqID_6565
aatggctggcagaccacgtgttgcaaggccgttgggtgctggcggttgccggaacccacggcaagaccaccaccagcagcatgctggcctgggtgctggagcacgcgggcatgagcccgggcttcctgatcggcggcgtaccgcagaatttctcggtgtcggcgcgcctcggcgacaccccgttctttgtcatcgaagccgatgaatacgacagcgcattcttcgacaagcgttccaagttcgttcactaccgcccgcgcaccgcgatcctgaacaacctggagttcgatcacgcggatatcttccccgatctggcggccatcgagcggcagttccaccacttggtgcgcacaatccccagcgaaggcctggtgattcacccgaccaccgagccagccctgcagcgggtcatcgagatgggctgctggaccccggtacaaaccaccggcgcgggcggccaatggcaggtcaagcttctgagtgaaaacggttca

SEQ ID NO: 20969 - DNA, 362 bp, Zea mays
  misc_feature (319)..(319): n is a, c, g, or t
  misc_feature (321)..(321): n is a, c, g, or t
  misc_feature (332)..(333): n is a, c, g, or t
  Coding DNA Sequence Number=SeqID_6566
tgcgcgggtccagccattggcgcaatccggcgccggccggcagcgcgttggccgcccgcgccgccgcggccgacagcagcagcggatggcccggcgcgccgtccacgcgcgggcgcaggctgtctgcgccgggcgcgcaggcgcgccattgcgccagcaggtcggcgatggcgttcgcgtcgagcaggggcaggtcggccagcaccagcagcaggtcatggtcgggatgggcgcggacgtgttcgcgcagcgccaggcgctgggaatcggcgagcgaggcgtccggcagcgcctgcgccagcggcgcgatcgcggcgcntngcgccagcggnntcaggatatccgcataggggccgatgacg

SEQ ID NO: 20970 - DNA, 422 bp, Zea mays
  misc_feature (30)..(31): n is a, c, g, or t
  misc_feature (42)..(42): n is a, c, g, or t
  misc_feature (44)..(44): n is a, c, g, or t
  Coding DNA Sequence Number=SeqID_6567
cgtcatcggcccctatgcggatatcctgannccgctggcgcnangcgccgcgatcgcgccgctggcgcaggcgctgccggacgcctcgctcgccgattcccagcgcctggcgctgcgcgaacacgtccgcgcccatcccgaccatgacctgctgctggtgctggccgacctgcccctgctcgacgcgaacgccatcgccgacctgctggcgcaatggcgcgcctgcgcgcccggcgcagacagcctgcgcccgcgcgtggacggcgcgccgggccatccgctgctgctgtcggccgcggcggcgcgggcggccaacgcgctgccggccggcgccggattgcgccaatggctggacccgcgcagcgggcgccatgccgtcttcgacagcgccaaccgcgcctacgtcaccgacctggacacgc

SEQ ID NO: 20971 - DNA, 444 bp, Zea mays
  Coding DNA Sequence Number=SeqID_6568
tacgcggcctgcttcgccatcgtgtgcgcctgcgcgcgcgccgagaggaggaagaaggcctacctcgcgggcaccgacggcgccgcggaggagtggaagaagagctgagctgcttatctcgggatacacgactagatcagaattcgggactcagtagggatttgtctgaaaaagatcccaatatggttatggtgaaaactcggaatttaggaagaaaaggagggtataaaaggaaaaaaactggaagctgtgattcttttccttttctacatttattattattcatataatatgttccccctttcgtgttaagttattggttcgagtacagagggataataaactcataaacctgtatggaacgaccaggtttatttcatggatttcactggctctggccatgtcaacttcactgctcaaaacgtgaacgtgcatgtataagat

SEQ ID NO: 20972 - DNA, 243 bp, Zea mays
  misc_feature (27)..(27): n is a, c, g, or t
  misc_feature (97)..(97): n is a, c, g, or t
  misc_feature (124)..(124): n is a, c, g, or t
  misc_feature (177)..(177): n is a, c, g, or t
  Coding DNA Sequence Number=SeqID_6569
gtgttattaaaagtgcgccgttaaggngaatatggactatggttcttgatccaacaatagggaaggccatattacaggcagcttgaggaggtcgcanagggaatgttggatgatcacttcccanttgttatctggcaaactggctgtggctctcaaagcaatatgaatgccaatgangtaattgctttttgggccttcggttatccttggacacaagcgcggtgagatagtttgtgctcccca

SEQ ID NO: 20973 - DNA, 214 bp, Zea mays
  misc_feature (65)..(65): n is a, c, g, or t
  misc_feature (118)..(118): n is a, c, g, or t
  misc_feature (145)..(145): n is a, c, g, or t
  Coding DNA Sequence Number=SeqID_6570
gggagcacaaactatctcaccgcgcttgtgtccaaggataaccgaaggcccaaaaagcaattacntcattggcattcatattgctttgagagccacagccagtttgccagataacaantgggaagtgatcatccaacattccctntgcgacctcctcaagctgcctgtaatatggccttccctattgttggatcaagaaccatagtccatattc

SEQ ID NO: 20974 - DNA, 69 bp, Zea mays
  Coding DNA Sequence Number=SeqID_6571
gtttggtctaggtagtctggttgtctttatcgggctgttttctgtggggttgtactgcatcattctagt

SEQ ID NO: 20975 - DNA, 534 bp, Zea mays
  misc_feature (481)..(484): n is a, c, g, or t
  Coding DNA Sequence Number=SeqID_6572
aagaagaacgaagtggacctgctgagggaaggcgacctcaaggaggcggcgatggtggacgtatggacggaggtggacgcgcacacctacaacccggccatctcgccgatcgtgtacgagtgcctcatcaacccgctcatgcgcggcctgccgaccaaccaaacggtggtggacgagagcctggagaagctcaagaaggtgctggaggtctacgaggcgcgcctgtccaagcacgactacctcgccggggacttcgtcagcttcgcggacctcaaccacttcccctacaccttctacttcatggccacgccgcacgcggccctcttcgactcgtacccgcacgtcaaggcctggtgggagagaatcatggcgaggcccgccgtcaggaagctcgccgcgcagatggttcccaagaagccgtgatttgctaggcgggatctcgcatcgtgggatccgttccgatcgctgatctgtgtggcannnnctttgttggtgtcgcgaataaggcaataagcttgtgtggctggatttgca

SEQ ID NO: 20976 - DNA, 261 bp, Zea mays
  misc_feature (92)..(93): n is a, c, g, or t
  misc_feature (146)..(146): n is a, c, g, or t
  misc_feature (164)..(166): n is a, c, g, or t
  misc_feature (170)..(170): n is a, c, g, or t
  misc_feature (172)..(172): n is a, c, g, or t
  misc_feature (176)..(180): n is a, c, g, or t
  misc_feature (185)..(188): n is a, c, g, or t
  misc_feature (212)..(213): n is a, c, g, or t
  misc_feature (217)..(217): n is a, c, g, or t
  misc_feature (220)..(220): n is a, c, g, or t
  Coding DNA Sequence Number=SeqID_6573
cggcgcctgagaagaaagagctgcttgacctcagggaccccttcacatccgccgcgaacgagggagcctaggcgtcccttcctccatattcnntcattcaaacaaaagagacttagccagagggaccctggctataggattcagcnagtaccttcaaattcccnnnttcncntccnnnnnttttnnnnttaaagtaagggggggagagaggnncatnccncggaggggggaggagggcggaggaggctggaaggagtcccc

SEQ ID NO: 20977 - DNA, 600 bp, Zea mays
  misc_feature (479)..(481): n is a, c, g, or t
  misc_feature (505)..(508): n is a, c, g, or t
  Coding DNA Sequence Number=SeqID_6574
tagacagaacagtgcgcattgagttgctgccatgcatgccaggaccactccggccggccagccagagctgatgacctacttgcgttcccgttgccttgcagcaaaccaacacctccgacatgctggacttggccgtcgactacatcaaggatctccagaagcaggtcaaggtgttgaacgagagccgcgccagctgcacctgcccggcgagcaagcaccagcagcggttctccggctgaagcaccggccgggccggcagtccctatcggtccccggcggctgcgtagcacgctccactactgagaacctgactgagaccgagatagagaggaaccccgccatcgtctgcagtgcatgcgcgcgagcagcatgtacagcgccggagcgatcgaggctcgctggactgctggatcgagcagtgtgtggcatcatcaagtattcaagcgactggaggaaggaaggaagaatcgagtcatggnnncgaggaggaagaacgaatgaattnnnnagtgctgtttcctttttttttttttttgggctgtaacacttttgctacatctgtgctgctgcagcatatgccgttgctcattgtttactacg

SEQ ID NO: 20978 - DNA, 589 bp, Zea mays
  misc_feature (230)..(230): n is a, c, g, or t
  misc_feature (262)..(262): n is a, c, g, or t
  Coding DNA Sequence Number=SeqID_6575
acatgctctaatgctcttcgggactcttgcttaccgctgccatatatcccgacttgccgcctccgcctactatcgggctctccaatggtatccatgctatgcatcctcaggcccacggcgccggccccgctcgcggggcgccggggcagggaggccgcgccgcgcaccgggggggcgcccccggcgccccggcccggcgcggcggggcgcggcggggcggcgggcgcggngggccgcgcccgcgcggcggcgcggccgggcnccggttttttttccccccccccccggggggccgcctccctctctcctctccctgcctccccccggccggcccggcgtcggcctcccgcccctcgctccgcccccgccccctcccccttcctcctctccgctctgtgcttcggtgccccccccccctccgtcgccggtctctccttccttgcctctcccccccttcggcgtccccccccctcccgcgtctcctcgcccctcccgctccccccccccccctcgtcttctctccccctccctccctcccccctgtcttcttcgcgtcgtgtgccctgtgccgtcgcggtgttggcccggc

SEQ ID NO: 20979 - DNA, 409 bp, Zea mays
  misc_feature (148)..(148): n is a, c, g, or t
  misc_feature (180)..(180): n is a, c, g, or t
  Coding DNA Sequence Number=SeqID_6576
gggcaccgaagcacagagcggagaggaggaagggggagggggcgggggcggagcgaggggcgggaggccgacgccgggccggccggggggaggcagggagaggagagagggaggcggccccccggggggggggggaaaaaaaaccggngcccggccgcgccgccgcgcgggcgcggcccnccgcgcccgccgccccgccgcgccccgccgcgccgggccggggcgccgggggcgcccccccggtgcgcggcgcggcctccctgccccggcgccccgcgagcggggccggcgccgtgggcctgaggatgcatagcatggataccattggagagcccgatagtaggcggaggcggcaagtcgggatatatggcagcggtaagcaagagtcccgaagagcattagagcatgt

SEQ ID NO: 20980 - DNA, 430 bp, Zea mays
  misc_feature (45)..(45): n is a, c, g, or t
  misc_feature (62)..(62): n is a, c, g, or t
  misc_feature (73)..(73): n is a, c, g, or t
  misc_feature (112)..(112): n is a, c, g, or t
  misc_feature (123)..(123): n is a, c, g, or t
  misc_feature (129)..(129): n is a, c, g, or t
  misc_feature (135)..(135): n is a, c, g, or t
  misc_feature (180)..(180): n is a, c, g, or t
  misc_feature (182)..(182): n is a, c, g, or t
  misc_feature (190)..(190): n is a, c, g, or t
  misc_feature (196)..(196): n is a, c, g, or t
  misc_feature (229)..(229): n is a, c, g, or t
  misc_feature (235)..(235): n is a, c, g, or t
  misc_feature (237)..(237): n is a, c, g, or t
  misc_feature (239)..(239): n is a, c, g, or t
  misc_feature (246)..(246): n is a, c, g, or t
  misc_feature (258)..(258): n is a, c, g, or t
  misc_feature (276)..(276): n is a, c, g, or t
  misc_feature (293)..(293): n is a, c, g, or t
  misc_feature (297)..(297): n is a, c, g, or t
  misc_feature (306)..(306): n is a, c, g, or t
  misc_feature (343)..(343): n is a, c, g, or t
  misc_feature (345)..(345): n is a, c, g, or t
  misc_feature (395)..(395): n is a, c, g, or t
  Coding DNA Sequence Number=SeqID_6577
actagcaactgaagcgtaccaacaaaaaacgcccgattcgcctcncaaaatcgccgccgccntcggctactcnaccagacgccgataggtccgccttcctttcctgctgcgngcctgtcgccntggtgnaggggnggcttcccctcgaggacaaccccgacgtcatgaaccaggtcatgngngggactgngggtcnccgagggacgagatgatgctgcgatgatgtgcnaacatntncntgacgcngctcgctactgntgtcccactcggaagccntgattcatatttccaantcanctacatcgnctacctggagtaaatcagtcagcttcatctcataggnangggagatttgtcctgttgctagtcctcccaatagcaggaaatgcttcagntgccaaacaacgggatgagatggaccccaaactcc

SEQ ID NO: 20981 - DNA, 242 bp, Zea mays
  Coding DNA Sequence Number=SeqID_6578
gtcgcgcttctctcccagcaaggaggccaggccgcttgtttcgtgccgacgccgggtccagctccggcaccgccaggctcctccgcgacgaacacgaacgactcctccgctgctcctcggccagccaagcccagcgcattccaacccccaatggtgagtgggtactaccgatagtacaatcaaacacagtatcaagactgatccaatgaacgtgcctttgattttaccttggcaacaacgtt

SEQ ID NO: 20982 - DNA, 180 bp, Zea mays
  Coding DNA Sequence Number=SeqID_6579
tcccgaatcacctcccgcgggagggtcgtgcccgtggccctcgcactgggcggacccggaaggctggtggcgcgtgcaccagttacggcaaagggcgatggacatcgagcaccgtccgacgggcatgagggcttgctggtggaactcttcgggaggcctggatgggaaaatgggaattaa

SEQ ID NO: 20983 - DNA, 326 bp, Zea mays
  Coding DNA Sequence Number=SeqID_6580
gtgggattaattcccattttcccatccaggcctcccgaagagttccaccagcaagccctcatgcccgtcggacggtgctcgatgtccatcgccctttgccgtaactggtgcacgcgccaccagccttccgggtccgcccagtgcgagggccacgggcacgaccctcccgcgggaggtgattcgggagacgccgcgggagcgggtggccggggccgcagcgcgcagcgaaaatgcggtggcccattgggaggatcgggggtctggggtattcggagcgcagaggttcgcgccagcggtggtgggttgcgtttatagtcggaagagat

SEQ ID NO: 20984 - DNA, 120 bp, Zea mays
  Coding DNA Sequence Number=SeqID_6581
acaccagagtatatcgatgcttctaggaccttacgggcataacacagtgcgctggtgggcaaatagaaatgtcattgtctacatatatcgcattgaacgccaggactgccattctggtag

SEQ ID NO: 20985 - DNA, 491 bp, Zea mays
  Coding DNA Sequence Number=SeqID_6582
gtgggattaaaaatgcagatcttcgtgaaatccctaaggggggagaccataaccctcgaggtcgaaagcagcgacaccattgacaatgtcaaggctaacattcaagacaaggaaggcatccctccggatcagcagcgtttgattttcgccggaaagcaacttgaagatggaaggaccttgctcgattacaacatacaaaatgaatcaagccttcaccttgtcctcaggcttcgtggtggcatcatcgagccttccctcatggctttggctcgcatatacaaccaggacaagatgatttgccgcaaatgctatgctcgtctgcaccctagggctgtgaactgccgtaagaagaagtgcggtcatagtaaccagttgaggcctaggaagaagatcaagtaaattcctggctgggatattgttggcctctactttgcgttgtgttgtctctgaaccggggctgggtcgtggtatctatcgtatctggaatttga

SEQ ID NO: 20986 - DNA, 409 bp, Zea mays
  Coding DNA Sequence Number=SeqID_6583
ggttgtgaatgagcaagtactccggcctgcaatccgtggtcgctccacgacggcaggtgcgttggcgtgatctccaacaagatgaaggtgaggccgcccaatgggatggactcaactgtagctgaagtcatgacatctcctgcgataacgctgacactctacaagactgtcttggaagctgcagcgctgatgctcaggaatagctgccacagaagaccggttgtgaatgagcagcagcacgtgatcggaatcgtgactcgctccgacgtgttccaggctcttgaggccaccaacaaagcatgagagtgagtcagtgagggctttctcgccagatgttaccccctttatgtgtagtgatctcagcagagagtatagttatgctaccaatattggacgaagatggacagaa

SEQ ID NO: 20987 - DNA, 459 bp, Zea mays
  misc_feature (28)..(28): n is a, c, g, or t
  misc_feature (293)..(293): n is a, c, g, or t
  misc_feature (412)..(412): n is a, c, g, or t
  Coding DNA Sequence Number=SeqID_6584
aatggcgttagacccttagtgctagcancccccccccccaagaattttgtgtccaagaagtcgggccacccttttttgggctggttctgggagttttctggccattgttgctaccaggccattgctggggatttagaacttcccattaggtccccagggttttgctttatcaggcttttcttctgagattcttggctttatatctatgctcccttggatgctgtatcccccaccattcagtatagggagatggctttgcaggagaattccctatcccaagtgatccattcggncctatgttaggagagatgctagcaacaacaggagccccctgagaccttcatagaagaagcttcgtattgcggcctaaatgcttcaaaaggaggccggctccctaatgcgcgtagagttntaagtccatcagcatttgcaagtatcttaaaacccattgtctgctgt

SEQ ID NO: 20988 - DNA, 543 bp, Zea mays
  Coding DNA Sequence Number=SeqID_6585
gccaggccgtttccaaggaggttcggaacccccctttcccgggccccggttcgggagaaattcgggcgaccaaaggcggttcgaagccgggggcccgacccagccggggcggagtccccgggagcccgaagagccagggccccgggacctccctccggggccgaaggaggaaagggattcgagggaggggggcccgtcccagggcgaggggagaaggacgtcgtccggcttccgggaggtcggccaaggagttggcgcggccccggcgctggaaggcggtctgtggcgtctggcggcggcgggaaggagtgggatccggttcctggtcccggcggagcgagcggatggagcggccgatggaggacagcggcgccgccgccggcgaggaggaggaggaggaggaggagtcggtggccggcattgtgcctcgcatcgatcgaggcgggtgggagggctggggactggagcgtctgttgggctgggcgactgggtgatgattgctttgattggccgccgccgccgctgcgaatccaaatcgacgga

SEQ ID NO: 20989 - DNA, 310 bp, Zea mays
  Coding DNA Sequence Number=SeqID_6586
tccctcttgtgtcttccaccaggaacaagccgccgccgcacgcctccgcttgctcccacccgcgcccgccggtgcacccgccccggccccgcccgtcgcggctgcccccaccccgcccgcccctaccaccggcgcggccgcctccggccccggccccaaacgctgcacccaacagccccagccgtcccactcccagggtccatctcagtcgccgtcgcagaccacgcagcaggcgtcaccccagcagcagcaggtggcggcggtggcagcggcataggcacaagcacagacccaggcggcatgggtacga

SEQ ID NO: 20990 - DNA, 355 bp, Zea mays
  Coding DNA Sequence Number=SeqID_6587
aaatttaatcggctggcaatggaccacttatgccatgggacagggtaacttggggatcccactgaaacccgggaaggggcccaatttccgggccctgatcgcggattgatccacgggaggcacgagaacttaaaccccttgccaacccagtgggggccccaaaagaaaccgggggtgcaggggggggggcccctcccccccccccccgataccgggggggattaaatactaattttggactggaaaaccgccaccccgcgggggcccccctttttttaacaaaaaaaggggaaacttcaatttctccttcaccccgccttttcccgggtttaggaagcactaatgggcccccaaa

SEQ ID NO: 20991 - DNA, 549 bp, Zea mays
  misc_feature (409)..(409): n is a, c, g, or t
  misc_feature (416)..(416): n is a, c, g, or t
  Coding DNA Sequence Number=SeqID_6588
ggcccattagtgcttcctaaacccgggaaaaggcggggtgaaggagaaattgaagtttcccctttttttgttaaaaaaaggggggcccccgcggggtggcggttttccagtccaaaattagtatttaatcccccccggtatcgggggggggggggaggggcccccccccctgcacccccggtttcttttggggcccccactgggttggcaaggggtttaagttctcgtgcctcccgtggatcaatccgcgatcagggcccggaaattgggccccttcccgggtttcagtgggatccccaagttaccctgtcccatggcataagtggtccattgccagccgattaaattttaaaatttaaggtaaggccggtccgggtcctttttttttacctatatataatttcatcantggaatngtaatagcatcatctacgagcgtttgggtgatgatatagaggttagttctgatccatgcatcatatccacgcgagatcgtcttgcatgtgcttatcttctgatcatatgtgtgaaagggtcatgcatatacat

SEQ ID NO: 20992 - DNA, 235 bp, Zea mays
  Coding DNA Sequence Number=SeqID_6589
gcaccctataacaagtgtggtccctgggtccaggtatgggccacccggtttgcttggcctctgctactggacaagtcaattgacacctttggggatgtggcccaactgggggaaaaaaattgcacggtattactcctttcagcagaattccattacgtggccagcctttcaacctgggttctcccaacccccttcctattttgttttggccatggcccctctaacttttcctgga

SEQ ID NO: 20993 - DNA, 79 bp, Zea mays
  Coding DNA Sequence Number=SeqID_6590
aaaaaactcatcctctagcatgtaatagagtttttttttccttgatcccaatgcataaagcccaagttgctcattgctt

SEQ ID NO: 20994 - DNA, 590 bp, Zea mays
  Coding DNA Sequence Number=SeqID_6591
gctctctccgctcaaaagctggcgtcagcgcgcagctttcaaagcgttgggagagatggcagaggagacgcaaccagaggccgccgcagccgccgccgcgcccgccgcggacgaggtagtcgtgaccgaagctgcgccggcggaggcggaggtgcctgcggcgcaggaagctgaagccgaggccaaggatgagaagaaaggtgacgagctggagctcaccgccgatgacgcgggggtgcatgaccggctcgttcaggaggaaagcgccggggggaagacctcgcccgagccgcgaaataaaggagctcggaaaggtcacacggaggggaggggctggcggcccctccgcatggaaggccgcctccatcccctgacctccccccgatgactcccgcctacattccgagggcacccaaagtccccacaggctacctttcgcccggggtgccccggctatgagtggcggcgcgcggtcccccgcgctttacccggcgagggtgaggggggggaggggggtcccacagtggggcgccgcggcccctcccccacccacccagcggcagcccgcgaaacccaagcgaccgccggtg

SEQ ID NO: 20995 - DNA, 416 bp, Zea mays
  Coding DNA Sequence Number=SeqID_6592
gcaggcttaatcgttgtcctataaaacttgccttttagcttctgtggttccctcttgtcgtatagaacgacagatgcttgacgccacttcatccaccttgctttgattctatagctatcatatttatcaatatttccgtctctgtaacattgatcctaaatacctaaaaatgtccttcctaggaactatctaaccttccaaactaacatctccttcctcatgtgtagtgccgaatcacatctcataaattatgttttagttacactaagtctaaaacctttggattctagagtctcccgccacaaccctaatttcctatttagcgaaagagcctctagcctagtggttaaggacttccgagtagcacctccaagtcctgggttcgattcccctcgggagcgaattcttaggtttgg

SEQ ID NO: 20996 - DNA, 154 bp, Zea mays
  misc_feature (37)..(41): n is a, c, g, or t
  misc_feature (44)..(44): n is a, c, g, or t
  misc_feature (46)..(46): n is a, c, g, or t
  misc_feature (71)..(72): n is a, c, g, or t
  misc_feature (107)..(109): n is a, c, g, or t
  Coding DNA Sequence Number=SeqID_6593
gtggatgcgcccctagaatttggcctgtaccgaatcnnnnnggngnctttgcgtagtatcatactcataanntaaggcagtgaacctaaatagattgttcataagcnnntttttttattagttttgcctctattaaaacttcgcatctagaatc

SEQ ID NO: 20997 - DNA, 250 bp, Zea mays
  Coding DNA Sequence Number=SeqID_6594
ctcgaacgtgatgaccgacgtaattgtaccattatctgcaaccttggcaacagaggaacttttgaatccctcgaaagtcactctaagtttatcgcgctcttacatgaccattcatacactgtttatggtatgggctatactgcaacactaaacgctatggactgatatcaggatcctattcgcaccttgatgccgggtcgatgaaactcaaggagtttttttcaagcgcagctcaatcatgctttgaatg

SEQ ID NO: 20998 - DNA, 326 bp, Zea mays
  Coding DNA Sequence Number=SeqID_6595
caggcgttgggcaagttatcgattaggtcttgggagctccctacagctcgcagatcaagctgcactccctttaaatgctagacctcagcgatttcctaagggcaaggttcatgttcatctgcgtcatagtagtatggcagcatagcaaaaagcgccgttttagaacacaatccttgcacactcttggttgcaaatgaaccgcgagcttcgacgtttacccagctcatccttcacacaccttacccgttaggctcggaaacgttctgttcacccattgattgacgatgttcaccaaacctgcttcctaagcctagcccattgcgaag

SEQ ID NO: 20999 - DNA, 325 bp, Zea mays
  Coding DNA Sequence Number=SeqID_6596
tgctggccggcgctctctgctccagcagctcccatggcgagctcgtcctcccatctcctctgctccctgcgcggcttcctcctccctgctgcgtccttgcgttcggtgccccccctccatcagcggacgtgttcagtctcgctctcctcgtcgtggcatggccatggccacgacgtcatccttggtgagccccattgctgtgcactcgccgagctctcctcccttcgctcatcttcgtcggcgctcggccatgccggaactcggccgaccggacctccacttcgccatggccggttgctcgtgccctaggtacgccaattgatca

SEQ ID NO: 21000 - DNA, 326 bp, Zea mays
  misc_feature (64)..(64): n is a, c, g, or t
  misc_feature (71)..(81): n is a, c, g, or t
  misc_feature (88)..(90): n is a, c, g, or t
  misc_feature (95)..(97): n is a, c, g, or t
  misc_feature (99)..(101): n is a, c, g, or t
  misc_feature (107)..(111): n is a, c, g, or t
  misc_feature (115)..(123): n is a, c, g, or t
  misc_feature (128)..(145): n is a, c, g, or t
  misc_feature (147)..(150): n is a, c, g, or t
  misc_feature (153)..(177): n is a, c, g, or t
  misc_feature (189)..(192): n is a, c, g, or t
  misc_feature (198)..(204): n is a, c, g, or t
  misc_feature (209)..(219): n is a, c, g, or t
  misc_feature (225)..(232): n is a, c, g, or t
  misc_feature (238)..(238): n is a, c, g, or t
  misc_feature (240)..(240): n is a, c, g, or t
  misc_feature (242)..(250): n is a, c, g, or t
  misc_feature (255)..(257): n is a, c, g, or t
  misc_feature (263)..(267): n is a, c, g, or t
  misc_feature (279)..(284): n is a, c, g, or t
  misc_feature (288)..(293): n is a, c, g, or t
  Coding DNA Sequence Number=SeqID_6597
aggcggtggtgctcgatgtgtccgagcgccacgttgcgctggtggtgccgctccctgcccgcgncggcgtnnnnnnnnnnnaagttgnnnttgtnnntnnngtggtnnnnnatgnnnnnnnnngtgcnnnnnnnnnnnnnnnnnncnnnngcnnnnnnnnnnnnnnnnnnnnnnnnnctcctaatcggnnnngccatnnnnnnnctggnnnnnnnnnnnttcttnnnnnnnnaggcantngnnnnnnnnnctttnnnggctannnnntttctaggaacnnnnnnactnnnnnntttacaccacttgaacagatccagtttgctgaa

SEQ ID NO: 21001 - DNA, 452 bp, Zea mays
  misc_feature (34)..(39): n is a, c, g, or t
  misc_feature (43)..(48): n is a, c, g, or t
  misc_feature (60)..(64): n is a, c, g, or t
  misc_feature (70)..(72): n is a, c, g, or t
  misc_feature (77)..(85): n is a, c, g, or t
  misc_feature (87)..(87): n is a, c, g, or t
  misc_feature (89)..(89): n is a, c, g, or t
  misc_feature (95)..(102): n is a, c, g, or t
  misc_feature (108)..(118): n is a, c, g, or t
  misc_feature (123)..(129): n is a, c, g, or t
  misc_feature (135)..(138): n is a, c, g, or t
  misc_feature (150)..(174): n is a, c, g, or t
  misc_feature (177)..(180): n is a, c, g, or t
  misc_feature (182)..(199): n is a, c, g, or t
  misc_feature (204)..(212): n is a, c, g, or t
  misc_feature (216)..(220): n is a, c, g, or t
  misc_feature (226)..(228): n is a, c, g, or t
  misc_feature (230)..(232): n is a, c, g, or t
  misc_feature (237)..(239): n is a, c, g, or t
  misc_feature (246)..(256): n is a, c, g, or t
  misc_feature (263)..(263): n is a, c, g, or t
  Coding DNA Sequence Number=SeqID_6598
ttcagcaaactggatctgttcaagtggtgtaaannnnnnagtnnnnnngttcctagaaannnnntagccnnnaaagnnnnnnnnncnantgcctnnnnnnnnaagaannnnnnnnnnnccagnnnnnnnatggcnnnnccgattaggagnnnnnnnnnnnnnnnnnnnnnnnnngcnnnngnnnnnnnnnnnnnnnnnngcacnnnnnnnnncatnnnnnaccacnnnannnacaannncaacttnnnnnnnnnnnacgccgncgcgggcagggagcggcaccaccagcgcaacgtggcgctcggacacatcgagcaccaccgcctcgccggcgtcgtcctcttcgcgggcctcggcgacgtgttcgacctccgcttcttcgacgagctcaggggaatcaggtaccagccagccatcatcattgcttgcttcacggcgcgtacgacgtgtgt

SEQ ID NO: 21002 - DNA, 477 bp, Zea mays
  Coding DNA Sequence Number=SeqID_6599
ggagggcggctccatgttctactactctgcaccccaaactcgaatccacctgcaacggagacattatatggctgtttgttggacctttcatctgggagtggagctcctattctggatgcacaacaggtgtttgaggtaatgcccgttggatgtcccttttcctttttctttaatcaacattgctctaaatccgagcgcagacgcagcagcatcatctcctttctcgtcctacccagtctccacctcgccagctccaccccgctagctttttttccctttatttttcccacaacatgcaagctgtagttgaagccaccgaagatcaggcaggaacaatgcaacagcaacatccactcccgccggcttctcattgatttcccacaaggcgaaagctaaagctcaagccgctgtaggccaaccatcagcatttgcgttgttttactgtacctatttgaaatctaatgtttttcctttcct

SEQ ID NO: 21003 - DNA, 458 bp, Zea mays
  Coding DNA Sequence Number=SeqID_6600
gttgcagcatatctccctctacctaccggaccagggagcccgccgcccgagccctttccgccgccgccaaaatggtgaccgttcctaagcccaagaagccctcctccaagaccaaggagtccaagaacccccctctccccaaggttccccagtccaagaagggtaaggataccctgtctgcccagggaaacccccgttatgcccccaaccagccaggatatggtggccagaccaagcctgtcttccccaagaaggccaagccccccaagaaaatcgtgttgaacctccagtgccagacctcgcaacgccctcctcccagcccccaattaagaggtcgcaaccattttgagattggtggagccaagaaggcgcaagggaccatctctcttctaagtttctcactcgctcatctcgatgttggatcgaacctgtgggtctcctcctgttctaaaacctcg

SEQ ID NO: 21004 - DNA, 274 bp, Zea mays
  Coding DNA Sequence Number=SeqID_6601
ggagcaggtacaacgctgcacatttccctttgccgccgccaagatggtgaacgttcctaagaccaaaaaaacgttctgcaagaacaaagagtgcaagaagcaccccctccccaaggtggctcagtataaaaagggaaaggatagcctgtttgctcagggaaagcgccgttatgtcccccaacagtcaggatatggtggtcagaccaagcctgtttttctcaaaaaggccaagaccccccaaaagattgtttttaagctgcagtgccaaagctgc

SEQ ID NO: 21005 - DNA, 518 bp, Zea mays
  misc_feature (142)..(143): n is a, c, g, or t
  misc_feature (157)..(157): n is a, c, g, or t
  misc_feature (235)..(235): n is a, c, g, or t
  misc_feature (251)..(251): n is a, c, g, or t
  misc_feature (255)..(255): n is a, c, g, or t
  misc_feature (343)..(343): n is a, c, g, or t
  misc_feature (361)..(361): n is a, c, g, or t
  misc_feature (379)..(379): n is a, c, g, or t
  misc_feature (442)..(442): n is a, c, g, or t
  Coding DNA Sequence Number=SeqID_6602
tccagcctctccatccggataggtagccccggaccaggttcaacgctgcacattccccttcgcccccgccaagatggtgaccgttcctaagcccaagaagacgtcctccaagaacaaagagtgcaagaagccccccctcccnnaaggtgcctcagtntaaaaagggaaaggatagcctgtctgctcagggaaagccccgttatgcccccaaccagtcaggatatggtggtcagcncaagcctgttttccanaaanaggccaagccccccaagaagattgttctgaagctgcagtgccagagctgcaagccctactcacagcacgccatcaagagatgcaagcnttttgagattggtggggncaaaaagggcaagggcanctctcttttttaagcttctcgtccccctgtcttgttgttgagttaaagctgtgggtctactantactgttctaaaaccctctccccaaatttcaatgttaatgtagcaatgaaagcagcccgttctatgtatccaaatt

SEQ ID NO: 21006 - DNA, 142 bp, Zea mays
  Coding DNA Sequence Number=SeqID_6603
aaatttcgacacagctttctcactcacggatgaaaattcacgatactgcaacctccccttgatacgacaagactgcttagccaacaacaaacgcaacatcgtcctcgtcgaattggagactctagggttttcgagatttggg

SEQ ID NO: 21007 - DNA, 248 bp, Zea mays
  Coding DNA Sequence Number=SeqID_6604
aaggaggcagagatatgtttaaattaattatattaggaaaccggagggatgaaactaagcttttgtttacggtgtaataacggctgccaggcttttgtcttttagccggaaaatggctttccggcttggggttgacgccatatatccaggtggtctctgccatggggtgcgggaatgaaccacaggtctgtaccttctcttcgctgggagacgacacgagccatggatatccctagcgaaaaaatacg

SEQ ID NO: 21008 - DNA, 519 bp, Zea mays
  Coding DNA Sequence Number=SeqID_6605
gcgtccgtattttttcgctagggatatccatggctcgtgtcgtctcccagcgaagagaaggtacagacctgtggttcattcccgcaccccatggcagagaccacctggatatatggcgtcaaccccaagccggaaagccattttccggctaaaagacaaaagcctggcagccgttattacaccgtaaacaaaagcttagtttcatccctccggtttcctaatataattaatttaaacatatctctgcctccttagaaaggttccattattattcatttacaggtgcaaggatcacacttgcagtcagatccacacttgcatgcatcgttctcagcgacaccctctccagaagcctcgtactggttcttcatcgccggtgcaacgccgaagacaaaagtctcggtcgtggtcgactcgccggaaaagcccaagtccgggtacattttgcaacctccgcaaccgttgccgcacttgcagccagatccacaaccacagtttccaccacagcaagacattttc

SEQ ID NO: 21009 - DNA, 266 bp, Zea mays
  misc_feature (115)..(115): n is a, c, g, or t
  Coding DNA Sequence Number=SeqID_6606
tctcgattctttttgagcaaaagatataatacgttgttatcaagctgttaatactagttagttaccataccctagacactaaggaatggaactacacagttgtaaagtgtagtanaaacgattattcttttagttccatcctagtgtcagggaaaaaatgagagcccggaatggcatgttccttgtttgaacggcaatgcgtggttggtgttagttaagctctgctccatgttattttgttgtacccgtgaaaaaggtatcatgtt

SEQ ID NO: 21010 - DNA, 181 bp, Zea mays
  Coding DNA Sequence Number=SeqID_6607
ggaacataatgtctcttggcagggacctctcagacatttagatagtagtttagcctcatcctctctatagtagttgtctgtttctgctctaggaattcaacatatttgcttcaatcttctgttttctgaaaaggaaaatctttgcatgaataatacaatggtctccaacattggttcaaaa

SEQ ID NO: 21011 - DNA, 573 bp, Zea mays
  Coding DNA Sequence Number=SeqID_6608
gcagggcaggaggactacaacagattaagaccattgagttaccgtggtgcagatgttttcattctagccttctctctgattagtaaggctagttatgaaaatgtttccaagaagtggatccctgagttgaagcactatgctcctggtgtccccatcgtccttgttggtaccaaactagatcttcgggatgacaaacagtttttcatcgaccatcctggtgctgtccctattaccactgctcagggagaggagctcaagaagctaattgaagcgcctgcttacatcgagtgctcttcaaaatcacaagagaacgtgaagggagtctttgatgcagcgatcagagtggtccttcaacctccaaagcagaagaaaaagaagagcaaagcacaaaaggcttgctccattttgtaatagcttatggagaggctaagaagctctttgatgacagtatttggttttttttctttctttttgtttctcttctcttcttttcattgtgattgctgtctctttagttccttaaaacactatctattggtttaattgtctgtttcaactgatagttccctccca

SEQ ID NO: 21012 - DNA, 498 bp, Zea mays
  misc_feature (94)..(96): n is a, c, g, or t
  misc_feature (99)..(108): n is a, c, g, or t
  misc_feature (110)..(112): n is a, c, g, or t
  misc_feature (114)..(133): n is a, c, g, or t
  misc_feature (135)..(145): n is a, c, g, or t
  misc_feature (148)..(152): n is a, c, g, or t
  misc_feature (156)..(170): n is a, c, g, or t
  misc_feature (172)..(173): n is a, c, g, or t
  misc_feature (177)..(187): n is a, c, g, or t
  misc_feature (189)..(197): n is a, c, g, or t
  misc_feature (199)..(199): n is a, c, g, or t
  misc_feature (201)..(219): n is a, c, g, or t
  misc_feature (221)..(232): n is a, c, g, or t
  misc_feature (236)..(240): n is a, c, g, or t
  misc_feature (242)..(243): n is a, c, g, or t
  misc_feature (246)..(248): n is a, c, g, or t
  misc_feature (253)..(253): n is a, c, g, or t
  misc_feature (255)..(274): n is a, c, g, or t
  misc_feature (276)..(277): n is a, c, g, or t
  misc_feature (280)..(283): n is a, c, g, or t
  misc_feature (288)..(296): n is a, c, g, or t
  misc_feature (299)..(309): n is a, c, g, or t
  misc_feature (312)..(315): n is a, c, g, or t
  misc_feature (318)..(325): n is a, c, g, or t
  misc_feature (329)..(331): n is a, c, g, or t
  misc_feature (333)..(334): n is a, c, g, or t
  misc_feature (336)..(342): n is a, c, g, or t
  misc_feature (373)..(373): n is a, c, g, or t
  misc_feature (376)..(377): n is a, c, g, or t
  misc_feature (462)..(462): n is a, c, g, or t
  Coding DNA Sequence Number=SeqID_6609
gatacacagccatggtacacacagttgctagagcctgcatttttctctggtcgtacattgtatgtgatccagcctgagtgcacacctgtctatnnntcnnnnnnnnnnannnannnnnnnnnnnnnnnnnnnntnnnnnnnnnnngcnnnnntgtnnnnnnnnnnnnnnntnngatnnnnnnnnnnntnnnnnnnnntngnnnnnnnnnnnnnnnnnnntnnnnnnnnnnnnatgnnnnnannatnnntgaanannnnnnnnnnnnnnnnnnnnannatnnnnagtgnnnnnnnnngtnnnnnnnnnnnttnnnncgnnnnnnnnattnnnanngnnnnnnncttattattgcatggttcttattggtttatntcnngttgaaatagtatacctgttggggcatttttgttattttgcttatttgtacttcattgcattctcgatacagtgctttatgcgangccagtactaaaattcacttcgttaattaagcagga

SEQ ID NO: 21013 - DNA, 260 bp, Zea mays
  Coding DNA Sequence Number=SeqID_6610
atagcaccgatattttgggagggaacaatcgaagcttgccaggagagagaaagtgatctgccgtgggtgtcgatccgagtttgggggacttatcaaccttggggattgactatgggagtgttctggggtgctcgagacttccccatcaccgaggcttgccgcacaacgctggattgctcgccggggcctaggagctaccgcggcgccgcgaaacaccgtcgtcggcccactgctcgacccgactgccagtcaagaacagg

SEQ ID NO: 21014 - DNA, 438 bp, Zea mays
  misc_feature (39)..(39): n is a, c, g, or t
  misc_feature (100)..(100): n is a, c, g, or t
  misc_feature (119)..(119): n is a, c, g, or t
  Coding DNA Sequence Number=SeqID_6611
tacaagacaggcaatgaaagatcaaacctatgctgcacnaattcatgtaaacttatggttgcttcattcatagtttgcaagaaacacatatacgatcgantactcgtgctaatttcatnactgtaagttaaatcgcccatgaagcgtggacacgcggttgcaaggctcgagctcagtgctgttggtctcagtttgcaaggctatagttttctccaagacctgccgattggactgttttcttgtgagaattcctgctctccaaacagcacatggagtatcattctttagtggttatgaaactgcgtagtgcctgctaacaccatttattgtactatataaggcttgcctcaaactgcagaaattaccaaatattgttaaattctcaaagcttactggcagtggggcgaagacagcacaagctgatagtctcttaaaaaa

SEQ ID NO: 21015 - DNA, 242 bp, Zea mays
  Coding DNA Sequence Number=SeqID_6612
cagagccgtggcagcctcggcaaaccctgtagcttccatagctggctagcgagctcacacgaatcggtggtctgtctgcagaaccgtggtggctcggggttccattcacgaggtacgtgcgagccagcgtccttgtggaggtagagagaccggcggttcgatcgccatggacagggatctgttccggacggtgaagcaggggacgcggaaccaggccaggctcctgtaccaccgcctggtgt

SEQ ID NO: 21016 - DNA, 319 bp, Zea mays
  misc_feature (32)..(32): n is a, c, g, or t
  misc_feature (36)..(36): n is a, c, g, or t
  misc_feature (89)..(89): n is a, c, g, or t
  misc_feature (114)..(114): n is a, c, g, or t
  misc_feature (151)..(151): n is a, c, g, or t
  Coding DNA Sequence Number=SeqID_6613
ccacggtcccaccaatggaaaatctcgttccngganaccaggttaaagcctaggttgattaccaggggggtcgcattattatattaganggaataaagtttctgcttaggtaanttcggtattcgaattgaaggaaaatttgtactgaaanacagttagccacccagtcccagctctatgctccacaaccatgggatagttgccttcaaatgctaaggaaagaactcttcttcagtccaattattttgtaaggatgattctgtcagtatccaattttaaaaaggaaacggaaaggaatttcatgagaatacatactgct

SEQ ID NO: 21017 - DNA, 442 bp, Zea mays
  Coding DNA Sequence Number=SeqID_6614
aagcaagcctcacttcttcgtctgaccaccactgatcattagcgtaggcagcaccgggaagcaacctctctgctcaggctagcatggggaaggtgtgctgcagcagcgagtcggaggaggaggcgggcttcagcttcctggggctcctcgtcgcggccgtcatcgccttggtgttcatgctcctctgtaccccgccgaagcggcgctgcgtcaccatctacccgtgctgttgaggctgaggagtctccaaggatctctggttgctgggaggaacgttctgttgttcatgggagggagcaggccaggcaatggtccctggttttcttcggttcagaaaataatttctactactgaattgtaggactcgtcgaaactgtaagccatgtttatcggtatattaggctgtccatctctatctgtaccatgaactgatacatctggg

SEQ ID NO: 21018 - DNA, 471 bp, Zea mays
  Coding DNA Sequence Number=SeqID_6615
aggctcttccttctgagtaccttaaccatggagaagcagaggccatagtgccactttggtccaaggctctagctgatgcagcctctgattatcttgagagcaagaactctgatggattaaagagtgattttgggcatatgcaaggaaagggtggccgagttttaaaacggctggttcgggaatttgctgattctcaccgcaatattccaaatctaacttgagcactgaatggacatttttgtttattaattaaccaatgcgcttccacatgcaggttcaagagttcacgaggcacctttggtctttcctaacggtacctgtattatttgttgtaaattgatgagatatgtatagatgcgcgtattgtcaactgtggtgccctatttaaaatgcctcaccaatttccattactattatttttctgtatttttgccatctgtacagtatatgcccacaattttggccctcaaa

SEQ ID NO: 21019 - DNA, 341 bp, Zea mays
  Coding DNA Sequence Number=SeqID_6616
gggcttgttacaagtgcggagaacaaggtcacatggcgagagactgttcccaaggtggtggtggatacggaggaggtggcggcggtaggttcggcggtggaggaggcggaggcggagggagctgctacagctgtggagagtcgggtcatttcgcgagggactgcacaagcggcggtcgctaaataaaaagttaaaagcggcttgtagaagggtaaatcagtcatctcgccgcctgctatctatcctctatcgttatgtattaggactttgtcgttatgatggtacttgtgttgcttaaatatctggtttcatgtttgcatgttttatcattgttcttgctt

SEQ ID NO: 21020 - DNA, 356 bp, Zea mays
  Coding DNA Sequence Number=SeqID_6617
gagctcgagcttgcttgctcttctctgctgcaagccgctgatcggctctctccgggagggaagcgtcgggatttggctgctctgtcaggctggctcttgacatgttcagatcgaaggtccaggagatgatcctcaggaggaggtccaggtccatgaacggcgccgcgcagcacgccggcagctcgcccacggcttcgtgcgacgccggcggaggtggcaagggtgctgctcgcgcgccgtcgttcgccgcgccgaggctgctgcactcgtcgtcgctccccgccggcggccgcgccgcggtcgtcatcgggagccccgcgcgggacccagaggcgttgtccgcctacgccatgagc

SEQ ID NO: 21021 - DNA, 361 bp, Zea mays
  Coding DNA Sequence Number=SeqID_6618
aaaggtgttcttctggcttgacaacaaagaaatcctccccccccccccattctccttcgctcaaatcaaaagatgagtagcattggcactggatacgatctctcagtaacgaccttctcccccgatggccgtgttttccagatcgagtacgccgccaaagccgtcgacaacagtggaactgttgttggaatcaagtgcaaggacgggattgtcatgggtgtagagaaacttattgcttcgaagatgatgctaccaggatctaaccgcagaatccattctgttcatcgtcatgctggcatggccgttgctgggcttgcagctgacggcaggcaaattgttgcaagggccaaatccgaagcca

SEQ ID NO: 21022 - DNA, 527 bp, Zea mays
  Coding DNA Sequence Number=SeqID_6619
gagatgagcctcaactcacttgatatttcattagctctcatacaccttaaatgactagccaagggatatatatacagccccaattccaaaagtggtcgttggaggatgcacaagcattctacgcaggcacgattcatgttcggtgcattcacatcaactagacattgggattctagtcgttgccgatagatggagagttgttatccagcatgacatctcgtatgccatcgaacatgtctagtgcattatggccttctccaactcatgctagaactccctttgacttctttattcgatgtgagatccactatgtcaccagatgtactgtgcttgggattgggtgcacaccagcttgtctaatgccttggttgtaattccttgttcttacacaattcttatgttgtccgttgcatcactagacatgttcggtgcctagaatctgatgcacacttgactatcaagtggccctagttgcaaacttacacttccctattcttacatagtgtcgatgttgtccagtgctatca

SEQ ID NO: 21023 - DNA, 341 bp, Zea mays
  Coding DNA Sequence Number=SeqID_6620
tcaaatgggtctcctttcccttatgaagcagtggaaggacttgaggtttttcccccgcgacagcccgatgcggcccatagaccttcagtacaccagggaaaaccgataatcaaattgggcttcccgtctttaggcaaaaccaatggcaagtaataatggcttttccctacattgccaagaatttcagagccctttcggaaatttgagatgttaagttggggggttcttgttactttatgtcttatatttatatgctttttttagatgttgcatgatttcatgtaaaactcgtttggataagattaaagtaaagtgttcttgtttatggatcccaaaccctt

SEQ ID NO: 21024 - DNA, 584 bp, Zea mays
  Coding DNA Sequence Number=SeqID_6621
tagtagctatcccactcaagcacacgctcacgatggcatccagagctgctaccttcgtcgccctgagcctcctcctctccgccgtcgccacgcacggctgcggaccctattgccagccgccagtcgtcgtgccgacaccgcccgttgtcgttccgccgccgtaccatggaggaggagcgcacggccacggcgggcagtgctctatcgacgccctaaagctgagggtgtgcgccaacgttctcggcggcctgctcggcctcaaggtcggcgttccggcgcacgacgagtgctgcccgctgctccaggggttggtcgaccttgacgccgccgtctgcctgtgcaccgccgtcagggccaacgtcctcggcatccacctcaacgtgcctgtggacatcagcctcctcctcaaccactgcggcaagacgtgcccgtccgagttcacttgcccagcccattaacggacgcctactgctcacgggcgccgaataaaatttgctttcgatccgtacgtcgttgttattttcgtgtccacatttgaatccttgtaaccagtactactctttttgtaacaatcatcagccatc

SEQ ID NO: 21025 - DNA, 454 bp, Zea mays
  Coding DNA Sequence Number=SeqID_6622
agccggaggctcatgtaaattagtaccaaccgcttgccgcaaaagaacgaaccaagttcagccgagagtcaaaacccggtaattttggcttccctgatgaatccgctcttaaagataatggtccatccgagaacagattgctgaggacttcaaaagcacctgcccccaagaacacaacaagggagaggccacgcacacccgcatcaaccagatggagcatttatttgcccagacgcgacatgtactgtgtcgctccaagcactgaactactaaaaacgggtttgcgacgaaagctgtcctgaaatccttgagattcgtaaaacctgcaccatctgaaaagaaatcgctaccaacacatcaaaagaccaatgttagtgctgggatgcgaaaatcctaacgaatggatccaccgagaagccgtgtaaccagagaacaacttgactacaccagctcc

SEQ ID NO: 21026 - DNA, 578 bp, Zea mays
  Coding DNA Sequence Number=SeqID_6623
agctgcccctgcgaaggcggcaaatggccaggagccaaaggggttcgaggagatgtgcgagctgtatccgtacctggcggagcaggtgagggagctggatgcggcgaacccgggcatcttcaagaggcagttcgggatgatggacgacgacaaggcgcgcgcgatggacgagaagatcaagaggcagagggtggcgcagatgaaggtggagctgcgccgccacgacctggccagggaggtgaccaaggcgatcatcgacctggtcgactgatcggagcgtcatgggcttacaagttagtacaaactgaaactgtatctgtgatcacctgaagttggtgcgatgaaatgcggcgttttggtggagcaagaatgtttctgaaactatgatctagagtctgcggattgggctggctcgatgcatcagacatgtggtggaactgcaaattgtgcctcctgtttgtaagaatgcttttctcgtgtggccagagcaaatgctagaaatagcaaattaggggtgtctttatagtgtaagcatgatgagacatgtgctggaactgcaaattgtgctggtggattaa

SEQ ID NO: 21027 - DNA, 211 bp, Zea mays
  misc_feature (172)..(172): n is a, c, g, or t
  misc_feature (177)..(177): n is a, c, g, or t
  Coding DNA Sequence Number=SeqID_6624
aacggtcgccgccagcggacattagcaacctaaccctcgcccaaccgacacacttcaacacactgtacacccgaccggaccctcccaccacccatgggcctgtgcgtgtcgctcggcgggacggccggcgccgtaggccgcgcggccggcggcgcccagctgcacgtgccgnacggngctggggctcctgccccgggatgacacgtcgaag

SEQ ID NO: 21028 - DNA, 173 bp, Zea mays
  Coding DNA Sequence Number=SeqID_6625
aatactccgtactgtcaaatctccagtccgtataagcttggcgtggcgctcatagatacgcacaacgttagcgcggcgccgctccacagtcgctcacacggcatgaggttgccggaaaccatgttcagagccgtcgcacggagctgccggagccgcagaagccgctggtggac

SEQ ID NO: 21029 - DNA, 439 bp, Zea mays
  Coding DNA Sequence Number=SeqID_6626
ctttttggaggaattgcccggtcagttcctccagtacatgcgccctggggggatcaagccacagcgggctccggggcttgtttcagcgcccgttttcccccctcagcagtgcccagaagaaaacgtgcccgagctgatccatttccctcaactggggattccgcaagcgtcccgtcccggggtagccttacttttgttcatacggttttgggttagctttttttttgccccagttggtaaatatccatgctgtagaatttagttccagcccaaatagatagtaaacccctgctttcctttgggttaagctagaggatgtaaattcgtgctgcagattgccaagtattcaggttgtcgggaaacgtcattattatcccctgctttcatattaagtactatcttggtaatagtggatttggagcttgttctccgcaaaaaa

SEQ ID NO: 21030 - DNA, 372 bp, Zea mays
  Coding DNA Sequence Number=SeqID_6627
aacacaccatcgtaccttaccggtgaataccccggagactacggttgggacaccgccggtctctcagccgacccagaaaccttcgcgaagaaccgtgagctggaggtaatccacagcagatgggcaatgctcggcgctttaggctgcacattcccagagattctctccaaaaacggagtcaaattcggtgaagccgtgtggttcaaggcagggtctcagatcttctcagaaggagggcttgattacctcggaaaccctaacttgatccacgcgcaaagcatattagctatctgggcttctcaagttgtgctgatgggtttgatcgaagggtacagaattggaggtggacctctgggagaaggcttgacccgc

SEQ ID NO: 21031 - DNA, 464 bp, Zea mays
  Coding DNA Sequence Number=SeqID_6628
atctcatcttaactttgcctgtttctctctttcatttgagatcttgcttggagataaagatataaaagaatggctacttcagctatcccacactcctcttttgctggccaaacggccctcaaggcctccaacgatctcctccgcaaaggcggagcttccaacggtggccgcgaggccatgcgtcgtaccgccaagtctactcctcagagcatctggcacggaccagaccggcccaagaacttagggccattctcagagaacacaccgtcgtacctaaccggggaataccccggagactacggctgggacaccgccggtctctccggcgaccctgaaacctttgccaagaaccgagagctcgaagttatccacagcagatgggcaatgctaggcgctttgggctgcaccttcccagagattctctccaaaaacggagtcaaattcggcgaaagccgtgtggctca

SEQ ID NO: 21032 - DNA, 555 bp, Zea mays
  misc_feature (506)..(506): n is a, c, g, or t
  Coding DNA Sequence Number=SeqID_6629
atccgcccaagtgacgttgtactcgccgacctcctccccggtgatgcccagcgcgtcccagaccgcctgggaggcgtcgacgacgttgttgcggcacggcggctggaaggcgtgctcgcggtcgcacccgctcacggtgtcgcactcgtcgacgaccttggcgagcacggacctgccgttggcccggatccgtatgctcttgccgcagcgggagcccccgctgtaccaccccgtggacagcgccgccacgcgctccgagctgcggtggaacgcgccgtcgcactcggacgggtccccgccgtcgccgcccgcgtcgaagtcgttcagagtcatgaccgcccgggtggacgaggagaccggcggcgagcacctgtacgtcgggtacgcctgcccggccttgcagcagtcctggcacgcgtggctctgggtcggccggagcgtgccgctcggctcgcagccagcgccggcggcggtgagcagcaggtggctcgccgctagcgcgagcnagaaggcggccggtggacctcagcatctttgtgaagttacggctgagcg

SEQ ID NO: 21033 - DNA, 413 bp, Zea mays
  Coding DNA Sequence Number=SeqID_6630
ttgcagctgcagttctgggtgataatgccctcatggagaaagcatggcaagacacaggaatgctggctgaggccgttttacatgctcaagcccatggtcgtccatcgttaaggagctcagtcataacatggaacaagatgctgcaaaaggagctggatcacatgccaaccgtaaaaaccgatgctgcagcagcattcttggcttctcttgaggacccgaagctcactagtttgggagaaactgagaaaaagccaccaattgaaatacttcctcctggaatgccgcctctatctgcacctcccattattattaaaaaggctgctgcaaaacctgggcttcctaatgccgcacagaccccaggtgctcccatgaatcaaggcaccccaatggctcaaggtactcccatgaatcaa

SEQ ID NO: 21034 - DNA, 248 bp, Zea mays
  Coding DNA Sequence Number=SeqID_6631
tattcttctcctaggaatcgcatgtcgtagaggcccaataccgacatcatgcggcacggcggcggtttcccagctccgtcgagaaattgtggttgatttgggcctccccacggttaggaatccccacacacacctcccccgctccttgtgcttcaccatcggtctgattcgctaggccaaatcaaaggatggacatggtttcactcacggcgacatactgcttttctttgtccatggtggcgcgccga

SEQ ID NO: 21035 - DNA, 226 bp, Zea mays
  Coding DNA Sequence Number=SeqID_6632
gccgtcgcttcggaaggagtaccacttcctcggttgaaagccttgtgacaaaaaccctcaacaaggcacagagggagagcattatggagctgagaaaccaaggcaaggggacacaaggcaccaggtccaggggcagcaaggtgtggaccctcaaagcccccagcatctaggctgttcctggaatatgagctgcgcgacgtgttcggttgtcagaggtattagtttt

SEQ ID NO: 21036 - DNA, 489 bp, Zea mays
  Coding DNA Sequence Number=SeqID_6633
tgctttctccgctagggcgctcggcttctcgcttcgtctcaagccgtcgcctgccatggccgccgccggcgtcggcggcaacggcccccctaccgcgcatggagactcaataggatcttctaggattggagaggttaagagggtgaccaaagagacaaatgtgcacgtgaagatcaaccttgatggcactggtgtcgccgagtgtagcacagggataccgttcttggatcacatgctcgatgccttatttgtgcaaaagggtaggctcgtagttaacgtgaaggcatcttgatcaaatccataaattggactgatggaggcatcttcttctgaaaggaaaaaaaaatctttttgtataatgcagttaagaagatgtctactgctcttaggtcaaggagatgtttaagagagccagtagtaccatcacttttttttttttgagaaagtgatgtactgtacatggatggaaaactctaccacttttctagt

SEQ ID NO: 21037 - DNA, 38 bp, Zea mays
  Coding DNA Sequence Number=SeqID_6634
tagggaggaaggggcgtcgcaccgctctgcaagggcat

SEQ ID NO: 21038 - DNA, 430 bp, Zea mays
  Coding DNA Sequence Number=SeqID_6635
ttgactctgccgaacatcatttcgtcgtcgtagaagctccgatcatccaagaagaagatgccgtccttcaacccagggtactcacgtacctcgtaggacctggagcatcctcgccccacgaacagcatccggcccccccatgcattttccccgaaccagttccaggtcctaaggtactcatcagcctcctcgtcgtcatcgcctggctcgatgatatcgatagggtccatgtagaacaccttgaacgacgacgtcggcgcgtgatcatgggcagcgagcctgacgaccatatccagtgacgcgcgggattccacaaggtagcaagcgcggacgaccgcactaccaggatattcccacatgcaatcacggaagaagctccattccgggaagggcattaacttccacggcactagcaggatattcccactat

SEQ ID NO: 21039 - DNA, 340 bp, Zea mays
  Coding DNA Sequence Number=SeqID_6636
ctaattggtccttggcagggcccggggcggtcccttagttacctataaatacccctgtattgtggccattggtcgggggacagaaaaaaaacactggtgccccaacgctttggtggttagagggcatcaaactggtttccattctctcaccatcgggaattgggtggtcccccgggattaaacaaggttcccaacatttgggcgccccaccatttcgtgcgtacgaacaaaagcttcccccgcggatggccccccaagaagagcggatttttgaagggcccccgcctttcccgtcgacaaaaacaaggggaaagggaggcgcctccctaagcccaagaaa

SEQ ID NO: 21040 - DNA, 535 bp, Zea mays
  Coding DNA Sequence Number=SeqID_6637
agtgagaatggcagcgacgaccctctccatcacgagctcaaaccgctcctcttcttcttctcccactctcgcttcagttcatcacttcccttctcgatccacctccatcgaatttcccttacgcttcggtgcttcttctcccacgctcacccaccgtgcaacccacccccgtcccatcgccgccgtcgaagctccggagaaaatcgagaagatcggatccgaaatctcatccctcactctcgaagaagcacgcatcctcgtcgactacctccaggacaagttcggcgtctctcccctctccttagctcccgccgcagcggctgtagctgctccgggagacggtggcggtgcggcggctgcggtggaggagcagacagagttcgatgtggtgatcaacgaagtacccagcagctcgcgtattgcggtgattaaagcggtgagggcgttgactagcttggcgttgaaggaagcgaaggagctcatcgaaggattgccgaagaagttcagggcaggtgcgactaaggacgaagctgaa

SEQ ID NO: 21041 - DNA, 335 bp, Zea mays
  misc_feature (46)..(46): n is a, c, g, or t
  misc_feature (126)..(126): n is a, c, g, or t
  misc_feature (133)..(133): n is a, c, g, or t
  misc_feature (170)..(170): n is a, c, g, or t
  misc_feature (208)..(208): n is a, c, g, or t
  misc_feature (211)..(211): n is a, c, g, or t
  misc_feature (264)..(264): n is a, c, g, or t
  misc_feature (267)..(267): n is a, c, g, or t
  misc_feature (276)..(276): n is a, c, g, or t
  misc_feature (294)..(294): n is a, c, g, or t
  Coding DNA Sequence Number=SeqID_6638
gtttattcgcatccatcggagagagaaaacaatcaataagcgaccntgttgggggaccaagatcttctcaccggtgatgagcttctgtctgactctttcccttaccaggagattggagaatggaancctctgngaagtaaaagggaaagggggttactgtgggagcctgnagatggttaacattgggggccaatccatctggctgaanaanggggtgaggggatgaagggggtggatgactctggctccaaaagggtggttggncantggtccganaccctttccgaactttcnggagcaacccaacttattgacaaagaaagggatttccttcg

SEQ ID NO: 21042 - DNA, 582 bp, Zea mays
  Coding DNA Sequence Number=SeqID_6639
gagcttcagccttattcagagtggggagaaggagaaacaaggttagcaaaaaatggattatatgaatggaccagggagacaccatctgtttgtaccaggaccagtgaacataccggaacaggtaatccgggcgatgaaccgaaacaacgaggattaccgctcaccagcaatcccggcacttacgaaaacactgttggaggacgtgaagaagatattcaagacaacatctgggacaccatttatgtttcccacgaccgggactggtgcttgggagagtgccttgaccaacacgctatctcctggagacaggatcgtctcgtttctgatcggacagtttagcctgctttggattgaccagcagaagaggctaaatttcaatgttgatgtggttgagaatgaatggggacaaggtgctaatctccaagtctggcctcaaagctctcacaagatcaaaatcataccatcaaagccatttgcattgtccacaatgagaccgccactggagtcaccaacgacatctctgctgtccgaaccatcctcgatcactacaagcacccggctttgcttcttgtgggacgtgtc

SEQ ID NO: 21043 - DNA, 225 bp, Zea mays
  misc_feature (167)..(167): n is a, c, g, or t
  misc_feature (199)..(199): n is a, c, g, or t
  Coding DNA Sequence Number=SeqID_6640
gacactcgaccgcaagctatgggaagaccaagtcgtccttgggcgccagtgttcctgcccatattggataggatcaagggcttgggccatgggcggcctgacgttgatgcacgtgggtcaacgacctcctgaagcgccggaccgcaccgcctgcagaggaaacaacncctggtgttcttggttcaccggcccgaacganttcgaccggattcagcgcgggccggg

SEQ ID NO: 21044 - DNA, 240 bp, Zea mays
  misc_feature (49)..(49): n is a, c, g, or t
  misc_feature (101)..(101): n is a, c, g, or t
  misc_feature (169)..(169): n is a, c, g, or t
  Coding DNA Sequence Number=SeqID_6641
ggaagcggacggcaaggtatactggttggagcctttgggtacgttcagnatttcaattttgggtttggtcctggtttccaaggggagtttggcattcaagnccgaatattggctggcaaacggatgatgggctggggcctggcaatgcctgccggtgggactggtaacntaggggctaaaatgggtcgagtggttcccaagctaactcccagggaatggccccagtttggaatggcagaa

SEQ ID NO: 21045 - DNA, 539 bp, Zea mays
  Coding DNA Sequence Number=SeqID_6642
gtttatctttcacgtaagactcgaagaaaatggcaagcactgtaatgactacactgcctcagttcaatggtcttcgagccagcaagatctctgcagctccagttcaaggcctggcaactgttgtgcccatgagacgcaagggaaatggagctttgggtgcaaaatgtgacttcattggttcatcaacaaatctgataatggtaacgtcgacgactctgatgctggtcgctgggagattcggactagcaccatcagccaataggaaggcgacagctggacttaagctagaggcacgtgactcgggtctacaaacgggtgacccagccggggtcactctcgccgaccctttgccttgtggtaccggtggtcccatccatcggcgtcggagttggccttggccccaaaaacattggggctatttaaacatgttctttggtatccgtcgacttggagatttttaaaacaaaattcccaagaacctggggggagatctagcccatggttataatggttggatccccatatggatccccttttta

SEQ ID NO: 21046 - DNA, 537 bp, Zea mays
  Coding DNA Sequence Number=SeqID_6643
actccagttcaaacaatggctcctccacagaagctctttctcgccgccattgtctccgccgtcattgtagctgccaccaccggacacggacctaatagtactgctgaagatattgtacattcctcctgcgtgcacgcgagctatccatctctatgcgtccgtacgctctctacctactccggtccaaccatcacgaaccaacgcgagctagctcaagccgccgtcaagataagcctctcccacgctcaagcagctgcgaagaaactcgcggctgtgagagaaaccgtggggaagaaacgggtgaaagcggcggttgtggactgcgtggagatgattggagactccgtggctgatctgagccgtacgttaggcgttttaaagcatctccacgtctcgggcggttcggcgaacgagtttcaggtggcagatgagcaatgcgcagacgtgggctagtgccgcattgacggatgatgacacgtgtctagatgcgttttaaggggtcgaggccaaggttaacccggacgtgaagcagtggat

SEQ ID NO: 21047 - DNA, 587 bp, Zea mays
  misc_feature (555)..(555): n is a, c, g, or t
  Coding DNA Sequence Number=SeqID_6644
attttcgccgctgtcattgtagccaccaccaccggagatggatctaatagtgctggagaagatattgtacattcctcttgcatgcacgctagctatccatcgctatgcatccgtacgctgtctacttactccggtccgaccatcacaaaccgtcgtgagctagctcaagccgccgttaaaataagtctctcccacgctaaagccgctgcgaaaaaactcgcggcggtgcgagaaaccgtggggaagaaacggcagaaaagcggcggttgtggactgcgtggagatgattggagactcggttgatgagctgagccgcacgctaggcgctttgaagcctctccgcgatctcgggggtggtccggtgaaacgagtttcaggttggcagatgagcaacgcgcagaacgtgggcgagagtgcggcgttggactgaggaccacacgttgtcctcgatggggttttcaagggcaatcgaccggtgaaaccccgggccggggggggggggagtgcatgacaaaaggtggcagagggttacgagcaacgcgtctttacatgatncaccagctagcatgataaacgtggcaagcccc

SEQ ID NO: 21048 - DNA, 96 bp, Zea mays
  Coding DNA Sequence Number=SeqID_6645
gagcccctccgagaactggttattatgtgatcagaactaataatggttatatgttgagagagagatacaaactatgtcaatgtttcctgttgtctg

SEQ ID NO: 21049 - DNA, 359 bp, Zea mays
  Coding DNA Sequence Number=SeqID_6646
gaacttaagcgggagctgtcaaagctaaatacggtgttaaagctcccagataatgtattttttttggccacccagtcccccgaatattttttaaataaccatttagttgggggggagccccggagcatactccatgcgttcaacataaccttgggtgggggggctgttttttttttgaaatccccggagttggatcatggagaatcccttccccttgtttcagagggattgaattatgaatccaatggggctccctcataggcaggcttataggtttgtagtatcgttagggcgggcatttttctttaccaatataagcccccttttgtttatataccccatgggcatatataagtttt

SEQ ID NO: 21050 - DNA, 540 bp, Zea mays
  Coding DNA Sequence Number=SeqID_6647
gtatataaaggcttctctcttcaggagcagaagctccgatctcatcgagacagtgaagaaactcttagttgttcaagatggggcgtatgcattcgagaggaaagggtatctccgcatctgctttgccgtacaagcgttcacctccgacatggctcaagaccaccgccctcgatgttgatgagtcgatttgcaagtttgcaaagaagggtttgacaccatctcagattggtgtcattctccgtgactctcacggtatccctcaggtcaagagcgttaccggaaacaagatcttgcgtattctcaaagcacacggtcttgctcctgagattcctgaggatctgtaccatttgatcaagaaagcagttgctatccgcaagcacttggagaggaacaggaaagacaaggattccaagttcaggttgattcttgtcgagagcaggatccaccgccttgctcgctattacaagaagaccaagaagcttcctccagtctggaagtacgagtctactactgcctccacgcttggtgcctagaagagca

SEQ ID NO: 21051 - DNA, 374 bp, Zea mays
  Coding DNA Sequence Number=SeqID_6648
gtcgcagcccgaccaaaccgaagaagaaccttctcagagtaaagcaatctccgttaacttacgtcagcatggggaggctccactctaaaggtaagggaatctcagcatctgctttgccgtacaagcgctcacccccgagctggctcaagacaacctcccaggatgttgatgagtccatttgcaagtttgcgaagaagggtttgacaccatctcagattggtgtcattcttcgtgactctcacggtatccctcaggtgaagagtgttaccggaaacaagattttgagaatcttgaaagctcatggtcttgctcctgagatccctgaggatctctaccacctgattaagaaagcagtggctatccgcaagcacctt

SEQ ID NO: 21052 - DNA, 211 bp, Zea mays
  Coding DNA Sequence Number=SeqID_6649
tactacgatgggacgttacgggacaatgtggaagcttccccttgttcggaggcactgactctgcttcaagggtttgaagggaagcccaagagtgcaaaaacggagtacccctaccgcctttcttcaaggatcctccggattccaaaaacaaccggtcaagcccaggggcatcatgtttcttcgccctaacaaacaacccaggcgtcacccg

SEQ ID NO: 21053 - DNA, 328 bp, Zea mays
  misc_feature (48)..(48): n is a, c, g, or t
  misc_feature (90)..(90): n is a, c, g, or t
  misc_feature (160)..(160): n is a, c, g, or t
  misc_feature (180)..(180): n is a, c, g, or t
  Coding DNA Sequence Number=SeqID_6650
taccttctccggcacacagtggattcctttgtgtggaattcgagttgnagcacgggttgtgtttaccgtgagcacggaagcaccccccgnatactacgatggacgttactggaacaatgggggaagcttccccttggtccgaatggccctgcccctgctnccagggttgaagggaagccnaagagggcaaaacggggtaccctaaaccggctttcctcgggattcatcggatccgacaacaaccccgcaaagcccggtggatcaagttctttcccctacaacccacaaggtttcccgggtgtttaattcgcgttgaagaactttcaaa

SEQ ID NO: 21054 - DNA, 551 bp, Zea mays
  misc_feature (482)..(482): n is a, c, g, or t
  Coding DNA Sequence Number=SeqID_6651
aagctatctcactcttctaacattcacaacatttaatctcagccgttcgatctttctccgaccatgccgatcagaaacatcgccgttggacgtcccgatgaggccacccgtcccgacgccttaaaggcggcgttggctgagtttatttcaactatgatctttgtcttcgccggctcaggctcaggaatggctttcaacaagctcactgaaaatggagccaccactcccgccggtctcgtagctgcctcactggcacacgctttcggactctttgtcgctgtctcagttggcgccaacatctccggtggacacgttaaccctgccgtcaccttcggcgctttcgtcggtggtaacatcactctcctccgtggtatactctactggattgctcagctacttggctcagtcgttgcttgtctcctcctcaagttcgccaccggcggcttggttgtgccggcttttggcctctccgcccggggtgnagtgtcgaacgctttggttttcgagatcgtgatgacctttcggctagtttacacagtctacgccacccg

SEQ ID NO: 21055 - DNA, 288 bp, Zea mays
  Coding DNA Sequence Number=SeqID_6652
tgccctcccaggtttccgggataattaaagaaccggggggggggggggtgttttttttttccctccaccccgggggtagttgggggctttcaggtttttgctgcccaacccaaaaaccgtcgtttgggagggcccctttttcccccccttttgtttttggccgtttttttttggggccccttcaggccagggttttccaacggtttacccctttggaatcgtttttgttacaacctcgttcatccgggggggccctttttttttccatccccagggaggtacttgttt

SEQ ID NO: 21056 - DNA, 208 bp, Zea mays
  Coding DNA Sequence Number=SeqID_6653
tatccgaccggcaaggctccgcggagccttccgagaaagaggggaagtcgcggacctactacttcctggtggcgaacgccaagttcatgctggacgacgaagaacacttccaggagcagctccaggagaagctgcggctctacgaggagcgcagcaaggagcaggacttctggcttgtgatccgagcccaaatttctagacaggttcc

SEQ ID NO: 21057 - DNA, 570 bp, Zea mays
  Coding DNA Sequence Number=SeqID_6654
agaccgatgcggtatctcagaattggctgtaaaggtgaacattcaccgtgggcttaaggcactggctgccttgattgcccgggaagccggaacatgaaaacagacgatctggttgccatgctgagtgcgagcgtcgagccggtcggtcgtcgattggtcgtacggacgatttgcattgccgtagtggccgcgtcagtgttcgcgctcggcatcatcctaatcgggccgggcatccggccggatctgacgacagctcgcgccttcacgttcctgttgctgaagcttgtgttcacagttgtgattgtcggcgtggcgttgatctatctcacaaggttggcgcgcccaggcggagagcaaaaaaccccttcgattatggctgcaatgccgttcatcgtgattgtgttgcttgccgcaatcagcctcggattcgcgccgcgctcgcattgggatgcaatgattgtcggggatcaatggcttgaatgccttttttctattccgatcaccgctatcagtggctggtgcgattggcatcggcgagtggtttgaggcggcgacggtttcattcttctt

SEQ ID NO: 21058 - DNA, 342 bp, Zea mays
  misc_feature (279)..(282): n is a, c, g, or t
  Coding DNA Sequence Number=SeqID_6655
ggcccagcacgtgtgttttcaagtcaaagagaaaacggagtttttcggcaccgagttctccgagacggattcggagtatttcgcggccctcaaggagggcattctgggcgtccaggttggggggagcagcatcaacgagcgcatggaggaggtgcgcttcgagattttcggacttgaggcagagacgatttgtagcaagtggagcgaagtcgaggaagcgtttcctggtaacctgtttataaaatagatagatgtgacgcgacttgagcgtttttttcnnnngaagaatcacgatcagagagcttctatgtgtatttttgggtacagttcacttcagggttt

SEQ ID NO: 21059 - DNA, 90 bp, Zea mays
  Coding DNA Sequence Number=SeqID_6656
tggtcccccttcaacgggttggcataccagtttttaaaaaaacgtttaggggaggtggtcacagttcatacaacccccttgaaaaagcgg

SEQ ID NO: 21060 - DNA, 374 bp, Zea mays
  Coding DNA Sequence Number=SeqID_6657
aaggatacgatcttcggtcgtgaaggatttttgggtgtacaaaggtagagtagtaagcagtataagctcgttctgcaattgtcctatagcatgcaccacttcttggaagcatctctatccaataggaatgctccatccttctgtgtctaaaccaaaggaagcatcacacagcaacaactacaactagggatgctgctcgacgacgactgccaaaatcattctccatggtctatcagaaggtagcaaaatagttgtgttaataacatggtcttgctcttcaattaggtgcattttatgttattagtaccacatgttgttgcatcgtgagatgatcctccagtggcaaattatgcctgttatgtaatcattgacca

SEQ ID NO: 21061 - DNA, 501 bp, Zea mays
  Coding DNA Sequence Number=SeqID_6658
gaaatcgacggccacaaccagggcaaacaggaagtttcgcaaggatgccctggtgcacgattgatgagtctgaccctggtgttttcaccgagctgattcagcaaatgcaagtggaaggtgtacaggttagcttccagggttctgttcgtcccctgtctgaactgtttgttttctcatccttcgaactattgttgtacctgcaatagcagtatgcactcagcctgctcattcggtagtgtatttttcttcttctgaggatttgtttcttccccatgctgtgaaactgatagcaacctggaactctcgttttagaaactaccttactgtcgtactatctgactgtaggacaaacataattaatataaagcatgcttagctgattgtaaacttgtatggcaacaagattgtgaagacgtgcactttagtgtagagaagaataactgataatttgctgtcaatagtttttttacctttatgcaaccgccaactcaatttcaggag

SEQ ID NO: 21062 - DNA, 139 bp, Zea mays
  Coding DNA Sequence Number=SeqID_6659
ttgaagctagcaagcctcatcaagatcacgatagcacctctgataattggcgatccctgtacaggcccatgcatggaaatccccttttcaaccattgacaagccaaaacttctcagtgagctgacatcctcctgctggg

SEQ ID NO: 21063 - DNA, 96 bp, Zea mays
  Coding DNA Sequence Number=SeqID_6660
ctggtggacgaggtgaccgcggcctgaagtgaaggacccgaatgattgcttgcttgtatacggcagtgctacctgttatctgtgtttcttcttttc

SEQ ID NO: 21064 - DNA, 179 bp, Zea mays
  Coding DNA Sequence Number=SeqID_6661
gtatgttgtttcactttactgcatgaaaagaggcactaatatcttatgcatgctaccttatacaacaattaaactaagaactggtgctgaacaataatattagcgaaatgcatgcttactctgtcaccaggtctgcaacacctttacagtggatattgtaagttaacaacaacttccat

SEQ ID NO: 21065 - DNA, 542 bp, Zea mays
  misc_feature (366)..(367): n is a, c, g, or t
  misc_feature (476)..(476): n is a, c, g, or t
  Coding DNA Sequence Number=SeqID_6662
tggatgactgtcgtaaatgttgcacggaggattcagatgattctatcagcaagcttgtatactccggggcaattatcgaagtatgcatgagaaagctggtgttttatccagaagttgttggcttccttgaagaggataaagatgccttcccttatgtagaatctcggtatgcttatggctctccaccaaagctcataatgcttgacgacaagggtgaacagaaggagactataaggattgacaactggaagcgtgagcatattcggcaatttctcacagagaaggtgaagccggcgaaatcagagacctgaatactcgtgacgagttcctctccctgtagaaccatatatcgatatatggtatttnngttcttttgcacgcaaaaaactggtcacccgtgatcttaacctaaaccgggcagcatgtgtacacctcaactgttttaacaagacaacctgtcatgtatgaagtgcctngcactatgatccgtgaagagtagttaatgtgcgagttgttttgagttagtctctttttatgtgacc

SEQ ID NO: 21066 - DNA, 280 bp, Zea mays
  Coding DNA Sequence Number=SeqID_6663
tgtttttgtccattttgaagatgagaccaccattttttttgaccaaggtgaccccttcccggggggggaaccgtttcaagggatcaatggcaaggggcccttccctcaaaccccccaccctccattgggggttcccccaacagcctttgcccaagttacaccaatttttaggggggaagaagcgaccagggttcccccgtcggtttggcttttcccaaatcccattggaaccttgggtgtcgtcccttttgtttttggccttttcccagtccaggttgaa

SEQ ID NO: 21067 - DNA, 580 bp, Zea mays
  Coding DNA Sequence Number=SeqID_6664
agagcttctctctcattttatcatctccgcttatcgttgactctccttcttcttcttcttcttcttcttcttcttcttcttcttcttcctctctcgccgtcccttgcttcttctctccgactagtcttaaaccatcaagcgccagtctccccgcgacgtatttccacaggtactctcatcctcggagtctaacgtcttcgctcgccgccctaatgtctccggaaaactcggttctatcagatgtctgcgctacaggaatctccggcgtcgtcgcgttctcgtgcctcggtttctggggagagattggcaagcgtggcatcttcgaccagaaacttatccggaagcttgtgcacataaacattggccttgtttttatactttgctggccactcttcagttctggactccaaggagccctcttcgcttctcttatacctggactcaatattataaggatgcttctcctggggcttggagtctaccaagacgaaggaactatcaagtctatgagcagacacggagatcgcagggaactacttaagggaccgctttattatgcactctcgatccatcgggatga

SEQ ID NO: 21068 - DNA, 498 bp, Zea mays
  Coding DNA Sequence Number=SeqID_6665
ttcgatctctcccatttgcttcaggccagggagaatctgtggaagagcgtcaaatgcaggaatccaaataaggccaaagaagaacaggtctcgtcaccatgtctctgtcatgaatgtagccacagaaatcaactccactgaacaacaagtagggaagtttgattcaaagaagagtgcgaggccagtttatccatttgcagctatagtaggccaagatgagatgaagctatgtctcttgttgaatgtgattgatcccaagatcggtggtgtgatgataatgggagacagaggaaccgagaagtccacaaccgtcaggtccttagtcgatctcttacccgagattacggtagttgcaggcgacccttacaactctgacccgttagaccctgagttcatgggcgttgaggtaagagagagagtcgaaagaggagagcaggttcccgtcatcgccaccaagatcaacatggttgaccttcccctaggtgcactgaagataga

SEQ ID NO: 21069 - DNA, 535 bp, Zea mays
  Coding DNA Sequence Number=SeqID_6666
tttctgaccggtgacaccaaggcgtcgctggccaaaatattctagaaagacggtgatggaaaagagatcgaggtggacaatataaagtatgaagattgagaaggcagagatcagcaagtcctgagctaactcctctcgctgctataaaatgacatgttggttctagttacttcgatcaagatcgtagtgaagccaacagagatccaaggcgtcttgctttgcctaaaaaacaagagcaagaaccatcaatgtatggttgtttctaacaaataccaaaaagagtaatctatcagtttctgaatactttgaacaaatgaagtccttgggcgatgagatgtcaatagttggtcgatctctagaagataaaaaaaatcggtgaagtatattctcatagacctcaatgacgactaactcccactagtctatgttattacaccaggaagaagccaatcatagttagcgagttgtttgatcagcttctgaattccgagactggacttatctctaatagtagatttgtcaacgccacgagccg

SEQ ID NO: 21070 - DNA, 450 bp, Zea mays
  Coding DNA Sequence Number=SeqID_6667
ttgtttgtcaaaccagggagccggtaaatccccgaatgcaaaagatgattctccgtccgatcgtggggggggtgcccgttacccaggggggggggaggaggatgattttggtactgctttcaagtctcgcaagcaggggggcctttttaaggctttgaagatgggccaagaaaagaaaaagggggaagttgggcttctccagaagggaaaaaagaacgcgggttttggggctttttcccagaagcggccctgatgggtcccaaattttcctccccctgggggggcctctttagtagaaaagtttccctgatcagctttgggggcccatccccccagagggggggggggccctttgatatttgctatgtatgcttaagaggggttccagggtatgttccccggaacctgaatagaaaagttttggtttgtttttcgaagccctttggctcg

SEQ ID NO: 21071 - DNA, 342 bp, Zea mays
  misc_feature (67)..(67): n is a, c, g, or t
  misc_feature (114)..(114): n is a, c, g, or t
  Coding DNA Sequence Number=SeqID_6668
gattcacgtgcaatgggctatccgttctccacagccgtgattgctgaggtcggctctagcctgtggncgccgattctgaacatcctagaaccttcgtctatcattccgcgaganaaaacgccacgagcggacggtcggcggccgcatatttcttccgcattgacggtgggtcccgacgccggccacaccgccacagagagaagcgttaggacaggctgactggttgagaattgagaaccaaaagaagagataggaagacaggaagagagagggacagcgcgcgctgtcaaccagccagacagcccccaacggctggctcattttctgcacgcgcttccaggt

SEQ ID NO: 21072 - DNA, 409 bp, Zea mays
  Coding DNA Sequence Number=SeqID_6669
cttgtttgctgtgcggatggaccactcgtctatccaggtggcatcattgaatctcttgaactgctgaagctctgtctcgttgtccctgttgtttggccaacttgacgtgccaatctttgtattggaaggattcgcatagcgaaagtcatagtagcggtagaattggaagtattcctgccacgtgccgttgaccttgaactggacgcagccctcgatggtagagtcttggtcggcatacaccgacgaggccagaagacctgtgacggtgagaagtgaggaaactcgaaccatttcgctgagatgtgcttgagaaaaaaagattataccgagaaaggggaagaggaagaaggggaagactgtagtctacctgtggtgtgagctagggacgtgcctcaaagcagaacgctga

SEQ ID NO: 21073 - DNA, 142 bp, Zea mays
  misc_feature (68)..(68): n is a, c, g, or t
  Coding DNA Sequence Number=SeqID_6670
gttcatcagcgtcgtcggtttgtgaaaactcctcggaaaactcggggtgagctaactcagttaactcncctggatcgggggagtggccccatcgccggaatcggaaaagaaactcaaactccgttgatttgattgatacagc

SEQ ID NO: 21074 - DNA, 524 bp, Zea mays
  Coding DNA Sequence Number=SeqID_6671
acaacttcactagtcgtctgaatcggagctacgcttgcaaactccaatcatggcgagaggtttgaagaagcatttgaagaggctcaatgcccctaagcattggatgcttgacaaactcggtggtgcttttgcccccaagccatcttctggaccccacaagtcgagggagtgccttcccctcgttcttatcatcaggaacaggttgaagtacgctctcacctaccgtgaagtcatctccatcttgatgcaaaggcacatccaggttgatggcaaagtcaggactgacaagacctaccctgctggtttcatggatgtcgtctccatccccaagactaacgagaacttccgtcttctctatgacaccaagggacgtttccgtctccactccatcagagatgaggaagccaagtttaagctttgcaaggttcgaactatccaggtgggacagaagggcattccttacctcaacacatacgatggtcgcaccatccgttaccctgacccactcatcaagcctaatgaca

SEQ ID NO: 21075 - DNA, 273 bp, Zea mays
  misc_feature (192)..(192): n is a, c, g, or t
  misc_feature (217)..(217): n is a, c, g, or t
  Coding DNA Sequence Number=SeqID_6672
ccccagaaggttggctgccggccagctgactacctgcccagcgaaccacgttgcctccgccaccgctgtccgctacctctcgtcctcaaccccgtcgctgcttcgttttcctctgcggcctcgggcctctgccttctctaaaagggggattgccctacatttaagttcaaacttccaaaaacagcctcctanaccggatccctttcctctattttcnatcctgactaggaagggggagggggccaatttcttgctcttttcctttcccttagg

SEQ ID NO: 21076 - DNA, 550 bp, Zea mays
  Coding DNA Sequence Number=SeqID_6673
aaatggcggctaacggatctactcagctttcacagaaggaagctgacatcaagatgatgtgcgctgctgaggttcacctcggaaccaagaactgcaactaccaaatggagcgttacgtcttcaagagacgcaacgacggtatttacatctttaaccttggaaagacatgggagaagctgatgatggctgcacgagtcatcgttgctatcgagaacccacaagacatcattgtgcagtcagctaggccctatggtcagagagctgttttgaagttcgctcagtacactggagctaatgccattgctggaaggcacactcctggtactttcaccaatcagatgcagacttcgttcagcgagccaaggcttttgattcttactgatccacgtacggaccaccagcccatcaaggaaggtgctttgggaaacattccaatcattgctttctgtgacactgactctcccatgagggttgctgacattggtatccccgctaaaaacaaggggaagcacagcattggttgtctcttctgccgggttttgggccgaga

SEQ ID NO: 21077 - DNA, 343 bp, Zea mays
  misc_feature (177)..(177): n is a, c, g, or t
  misc_feature (179)..(179): n is a, c, g, or t
  misc_feature (279)..(282): n is a, c, g, or t
  misc_feature (284)..(284): n is a, c, g, or t
  Coding DNA Sequence Number=SeqID_6674
gcagagccgccgacaacgctctctaccgtccgagaccccaagcaccagcgcggcggcggggggcggcggcgaccatggctgtcggaaagaacaagaggatctccaagggaaagaagggtggcaagaaaaagaccgtcgacccttttctcctaagaaggattggtatgacatcagggnanccgtccgggtggttcagtgtgcgcaaacatcgggaagactctcgtatccagggacacagggttaccaggattggccttcctgagggtctgaagcacgaannnncnttttggagggtttggcctagcttgatcttcaggggcgacgaggatcaagcttacaggga

SEQ ID NO: 21078 - DNA, 564 bp, Zea mays
  Coding DNA Sequence Number=SeqID_6675
ccaattcattacaagttatctaaaaactttaacttgcaccacactctaacagcaatggccgcctctacaatggctctatcctctcccgctttggccggaaaggccgtgaagcttgctcccgcagcctctgaagtctttggaaccggccgagtcaccatgcgcaaaaccaccaaaccagccggcccatctggcagcccatggtacggatccgacagggttaagtacttgggtccattctccggagagcccccgagctacctcaccggagagttcccaggcgactacggatgggacaccgctggtctatccgctgaccccgagaccttcgcaagaaaccgtgagctagaagttatccactgcagatgggccatgctcggagccctaggctgcgtttttcctgaactcttggcccgtaacggagtgaagttcggagaagcggtttggttcaaggccggttcacagatcttcagcgaaggtgggctcgactatttgggcaacccgagcttggtccacgctcagagcatcttagccatttgggccactcaagtgatcctcatgggggct

SEQ ID NO: 21079 - DNA, 562 bp, Zea mays
  Coding DNA Sequence Number=SeqID_6676
gtttttactttacgccgcactgatcaaccgcaatggctgcctcaacaatggctctctcctccgctgctttcgccggaaaggccgtgaagacttctccagcggcttcagatgtcctcggaaagcggcgtgtgacaatgagggaaaaccgtcgccaagccgaagggtccatcaggaagccccatggtacggagcggagaagagccaaggactttggggcccatttcctccggggggggccccccgagtctaccttagcggggaaggtcccaggagactacggggggggaaccccgccgggtctctcagcgcgattcccgaagactttcccaagggagaaccgggggctaaaagaattttccccccggggggggggcgccatgtgtccggaagccccccggttgcgtcttcccccgagttgctggccaggaaaagggagtccaggttccgaaaaggcgggtttggtttaaagggttgcttcaaaaaatctttaggggaacggaagatctttaactactttgggaaaaccccaaggtttggttccatggcccaaaaccattttttg

SEQ ID NO: 21080 - DNA, 521 bp, Zea mays
  Coding DNA Sequence Number=SeqID_6677
tcccaaagtagttaaagatcttccgttcccctaaagattttttgaagcaaccctttaaaccaaacccgccttttcggaacctggactcccttttcctggccagcaactcgggggaagacgcaaccggggggcttccggacacatggcgccccccccccggggggaaaattcttttagcccccggttctcccttgggaaagtcttcgggaatcgcgctgagagacccggcggggttccccccccgtagtctcctgggaccttccccgctaaggtagactcggggggccccccccggaggaaatgggccccaaagtccttggctcttctccgctccgtaccatggggcttcctgatggacccttcggcttggcgacggttttccctcattgtcacacgccgctttccgaggacatctgaagccgctggagaagtcttcacggcctttccggcgaaagcagcggaggagagagccattgttgaggcagccattgcggttgatcagtgcggcgtaaagtaaaaac

SEQ ID NO: 21081 - DNA, 322 bp, Zea mays
  misc_feature (29)..(29): n is a, c, g, or t
  misc_feature (56)..(56): n is a, c, g, or t
  Coding DNA Sequence Number=SeqID_6678
ccgatctccgagaacattcgcaagggaancccgggagctaaaagtttatcccctgncaggggggccatgcctccggagccccagggtgcgggctttcccggaattgctgggcccaggaagggggttcaaagtttcggaaacgcgggtttgggttcaaagggggggtttccacatatttttcggggggcgggggggcccccctacaatttgggaaccccccgttggcccagccccaaaattttggcaatttggccacccaaggatttttgggggccccctgaaaggaaacaattgtggggaaccgccccctgttgaagaagag

SEQ ID NO: 21082 - DNA, 556 bp, Zea mays
  misc_feature (211)..(211): n is a, c, g, or t
  misc_feature (238)..(238): n is a, c, g, or t
  misc_feature (317)..(317): n is a, c, g, or t
  misc_feature (324)..(324): n is a, c, g, or t
  misc_feature (515)..(515): n is a, c, g, or t
  Coding DNA Sequence Number=SeqID_6679
aaatccttgggtggccaaattgccaaaattttggggctgggccaacggggggttcccaaattgtaggggggcccccccgccccccgaaaaatatgtggaaaccccccctttgaacccaaacccgcgtttccgaaactttgaacccccttcctgggcccagcaattccgggaaagcccgcaccctggggctccggaggcatggcccccctgncaggggataaacttttagctcccgggnttcccttgcgaatgttctcggagatcgggggaggagacccggcttgtgtccccccccgtaagtctccttgggacttctnccggttnaaggtagctcggtggctcgccggagaatggacccaagtacttgactctctcggctccgtaccatgggctgcctgatggtccctttggcttggccacggtcttcctcattgtcacacggccacttccgaggacttctgatgccgctggagaaaggttcacggcctttccggcgaaggcagaggaggagagangccattgtcgaggcagccattgcggttgagtgcggagtaaa

SEQ ID NO: 21083 - DNA, 473 bp, Zea mays
  misc_feature (319)..(319): n is a, c, g, or t
  Coding DNA Sequence Number=SeqID_6680
aaagaagaaacttcaatggcctcttcaacaatggctctctcctcccctgccttcgctggaaaggccgtgaagctttctcctgcagcatcagaagtccttggaagcggccgtgtgacaatgaggaagaccgtcgccaagccaaagggacaatcaggcagcccatggtacggtttcgaaagagtcaagtacttgggtccattctctggcgagccaccgagctaccttaccggagagttcccaggagactacggatgggacaccgcaggcctctcagccgatcccgagacattcgcaaggaaaccgtgagctagaagttatnccactgcaggtgggccatgcttggagccctaggctgtgtcttcccgggagttgttggctaggaacggagtcaagttcggaaggggccggtttgggttcaaaggccggctcacagatccttcaggcgaaggaggactttgactactttgggcaac

SEQ ID NO: 21084 - DNA, 576 bp, Zea mays
  Coding DNA Sequence Number=SeqID_6681
ttttactttactccgcactcaaccgcaatggctgcctcgacaatggctctctcctcctctgccttcgccggaaaggccgtgaacctttctccagcggcatcagaagtcctcggaagtggccgtgtgacaatgaggaagaccgtggccaagccaaagggaccatcaggcagcccatggtacggagccgagagagtcaagtacttgggtccattctccggcgagccaccgagctaccttaccggagagttcccaggagactacgggtgggacacagccggtctctcagccgatcccgagacattcgcaaggaaccgtgagctagaagttatccactgcaggtgggccatgctcggagccctaggctgcgtcttcccggagttgctggccaggaatggagtcaagttcggagaggcggtttggttcaaggctggctcacagatcttcagcgacggaggactcgactacttgggaaacccaagcttggttcacgctcagagcattttggctatttgggctactcaagtgatcttgatgggagccgttgaaggttacagagttgcaggaaacggccccttg

SEQ ID NO: 21085 - DNA, 142 bp, Zea mays
  Coding DNA Sequence Number=SeqID_6682
cccctcgagcttgtgctgtttatagcagtgctgaagtccagatcaacctgatggtgaactggagggggttgttgagtggggagattgctgtttatttgttgagaagtaatggttgcggttggcgggcgaaggctccgaagga

SEQ ID NO: 21086 - DNA, 495 bp, Zea mays
  misc_feature (397)..(397): n is a, c, g, or t
  misc_feature (401)..(401): n is a, c, g, or t
  Coding DNA Sequence Number=SeqID_6683
ttcaaaagattctccggcagctgccgctgctccggatggagctactgccaccaaacccaagccaccaccgattggtcctaagagagggtctaaggtcaagattctaaggagagaatcctattggttcaagaacgttggatcagttgttgccgttgatcaggaccctaagactcgatacccggttgtggtccggttcgcaaaagtcaattacgccaacatatcgaccaacaactatgcattggatgaggccgaagaagttgcagcttaaatgggagaattcaaaaactctgtgtatcctatacccggtaatccgtttggtacttgacccaaaccggatgtaccgcaaaagtttacaaattatttctcctcaaaaaaaaaaaaaaggaggggaaaatanaaanaaaaaactcgggggggggcccgggaacccaattccccaaaaggggagccgaataacaattcctgggccggcgtttaacacggtcgtgacggaga

SEQ ID NO: 21087 - DNA, 242 bp, Zea mays
  misc_feature (63)..(67): n is a, c, g, or t
  misc_feature (111)..(113): n is a, c, g, or t
  Coding DNA Sequence Number=SeqID_6684
ttttttgatccaaagcggtacattggtcgataaacaatgcagaggtaatcgcaacgtaaagtnnnnncaaggtggcgtcatggtgtaatagaggtgatcttgtttagagannngatagtaatatgcctgtctatgggatggaagcgacagctagcagggacgactgctgcggaagtgcggaggcatcaaacagaggccacacccagcagtgttgaaaaactagtggcctagacgaactgctc

SEQ ID NO: 21088 - DNA, 372 bp, Zea mays
  misc_feature (133)..(133): n is a, c, g, or t
  misc_feature (144)..(144): n is a, c, g, or t
  misc_feature (176)..(179): n is a, c, g, or t
  misc_feature (184)..(187): n is a, c, g, or t
  misc_feature (201)..(204): n is a, c, g, or t
  Coding DNA Sequence Number=SeqID_6685
accgaggaccgagtattccgtcttgcctcatctcacgctcctgtctggttttcacatctgctgtgctgccccttggcgcgcccaccaccacagttgaccacgctgaatagtactatgcctactcgactgagangaatcctgctnattgatctccaagtctgcactgtctagccaannnncttgnnnnccatcaactcagannnnttgaagctgctgtagcagtcttatgattgttttgctgatgcaattaatgcttaaccaaatccatgacaacttgctcatcgctgatgcttgaactacggcaatgacactcaaaatacctcctagatttgctttcttgcgatccgtgatccctttccctaatcaagtttt

SEQ ID NO: 21089 - DNA, 64 bp, Zea mays
  Coding DNA Sequence Number=SeqID_6686
ccgggagggcagtcacgaacttgcctcacttcatcttctactagggcctcgacaatgtgcacga

SEQ ID NO: 21090 - DNA, 155 bp, Zea mays
  misc_feature (34)..(37): n is a, c, g, or t
  misc_feature (80)..(83): n is a, c, g, or t
  Coding DNA Sequence Number=SeqID_6687
atgagagtaggcctttccgcgttctcttggatgnnnnccttattatgactacaactgggaaccgtgtctttgcagccctnnnngatagctttgcatgttgccctgcatattcctcccagcgacaacaggttggctggtttcaacatggatgacac

SEQ ID NO: 21091 - DNA, 112 bp, Zea mays
  misc_feature (40)..(40): n is a, c, g, or t
  misc_feature (42)..(42): n is a, c, g, or t
  misc_feature (66)..(69): n is a, c, g, or t
  misc_feature (80)..(80): n is a, c, g, or t
  misc_feature (84)..(84): n is a, c, g, or t
  Coding DNA Sequence Number=SeqID_6688
taaggccaaggcccaaaagggcgcgattgggggctcgggntngaaaaaaaggggaaaaaaatgaannnngtcccccgttnccantccctaaaggatgataaggcagctgtct

SEQ ID NO: 21092 - DNA, 340 bp, Zea mays
  Coding DNA Sequence Number=SeqID_6689
cccgcgagattcagaactccgtggggctcgtcctcccaggagaggtcgccaaaaacgccgtctccgagggaaacaagggcggcaccaagttcaccagcaattgggcagcctggagcggccacggatttgttaagtctccccttcttaaaaggggtcttcggcgtgggctctaaccctccccctccccgcctatgtatgtggtgtggaatcgttgatggtctcgtcgggtgaacaaagggcaagagctaacttggctggttcataaatcgtggcggattggaatgggcctcctaaattttacgcccccattttggaatatagttggatcggtggcttccct

SEQ ID NO: 21093 - DNA, 576 bp, Zea mays
  misc_feature (520)..(520): n is a, c, g, or t
  Coding DNA Sequence Number=SeqID_6690
aggactagagttaaaatggctgcacaagcccttgtgtcttcttcacttacctcctctgttcagaccgctagacaaatattcggcacaaaaccagctgtgtccgtgaggaagacttcctttgttgttaaggctgcctcaactccacctgtcaagcaaggagcaaacagaccattgtggtttgcatcttcacaatctctgtcttacttggatggcagcttacctggcgactatggattcgaccctcttggtctttcagacccagagggtactggaggattcatcgaaccgagatggttagcctacggagagatcatcaacggacggttcgctatgttgggtgcagctggagctattgcccctgagattcttggcaaagctggtttgattccagcagacactgcccttccttggttccaaaccggtgtgattccacctgcagggacgtacagctactgggcagacccttacacactctttgttctcgagatggctttgatgggattgctgagcaccggaggtntgcaggactggtacaaccccagaatcaatgggcaaacagtaactccttggccttaa

SEQ ID NO: 21094 - DNA, 232 bp, Zea mays
  Coding DNA Sequence Number=SeqID_6691
gtcagctcagccacggatgcaggcaggaatcaggttgatcagttcgcgacggagaaggctgaggacctgttcggttttcacggattgaagcttaggaatgatttctagccgaattatctctctaatttatggaaattttgatgagccgaaacgaatcccggttcattcgtcgacaagcgaatgggctctaaaagatctgcaaacacaggagtgcaagttccaatccaaaaaa

SEQ ID NO: 21095 - DNA, 386 bp, Zea mays
  Coding DNA Sequence Number=SeqID_6692
atgaccaagggtacccaatcatttggtaagagacaaaccaagactcacaccctctgcagaagatgcggacgtgttactttccacaaacaaaacaaggtttgcggttcatgtggatatcccgctgccagactcagaagatacgacggttggggtagaaagactgccagaagaagaggtcaaggaactggtagaatgagctatcttaagaacgttcctagaagagctaagaatggattcagaactggggttactcccagacccaaagtcagaaagaccatcacaaaataaatatagtaaacgatcctaatacgatttgagacttattccttattgtattctgtgttcatacaaggagcgaacgagaacctttgaacagcattgcttaa

SEQ ID NO: 21096 - DNA, 217 bp, Zea mays
  Coding DNA Sequence Number=SeqID_6693
taacctcgcgcggagatgaaagcactcatgattatgtccacgcatcccagcggcaagcggcgcgaggtgaagtacggcgacgaattattcggccctcaattgcttccgcgctcaactggtcgtcagtacgggtttgttgcacttagttccatacccacgaccaccctaggagacgaagtacggccatccgtggctattggctatggctgcaccacat

SEQ ID NO: 21097 - DNA, 86 bp, Zea mays
  Coding DNA Sequence Number=SeqID_6694
ggtataagaatctctgtgatcccattgatgatggcactcataacttggctagttggctctgcaatttcttactgggctatcatgga

SEQ ID NO: 21098 - DNA, 475 bp, Zea mays
  Coding DNA Sequence Number=SeqID_6695
tctctcgtctcatctgcaaatattccccgagactccaaatcgccgccatgttgagacaagcttcccgcctcatctcccgatccgccaccgcggcatcctccaaatcggtgacggctcgtgccttttcaacggagcttccgtcgacgatcgattcgactttcgtggagtcatggaagaaagtagcgccgaacatggacccgccgcagactccttcttccttcatgaagccacgtccttcgactgcttcttcgattccgacgaagctcaccgtcaatttcgtcctcccttacgcatctgagctttcctggaaagaggtcgacatggacatcattcccgcgacaacaggacaaatgggtgttttgcctggacacgttccaacaatcgctgagctgaaacccggtatcatgtccgttcacgaaggcactgacataaagaaatacttcgtcagcagtggtttcgcctttctccacgcaaa

SEQ ID NO: 21099 - DNA, 468 bp, Zea mays
  misc_feature (391)..(391): n is a, c, g, or t
  Coding DNA Sequence Number=SeqID_6696
aaatcagagcagagctatggcggaggaagagaacgggatcgtagcgaaaccaagagccaagaaagagattgctccagggaggttgatcgatacctatgcagcacaatgcgaaaactgtcaccagtggagagtcattgatggccaggaggagtacgaggacatcagaagtcgaatgatcgacgacccattcacctgcgacaagaaacaaatctcttgcgaagaccctgcggatctcgactacgactcctctcgaacctgggtcatcgacaagcctggtctcccccaaaaccccccaaggtttcaagaggaggcctggccctccgcaaagactacctccaagagggatacttactactcccctcctaccggcaaaaagcttagggacccgcancgaagtagcctccctaccgtggagcccatccctggattccgggggggcgccccttggaagacttccctttcacgtgg

SEQ ID NO: 21100 - DNA, 287 bp, Zea mays
  misc_feature (190)..(190): n is a, c, g, or t
  Coding DNA Sequence Number=SeqID_6697
gaagctcgctgtgctccagttctacaaggtggacggatccggcaaggtgcagaggctcaggaaggagtgtcctaacgcgacttgcggtgccgggactttcatggcgagtcacttcgatcgtcactactggtggtaagtgtgggcttacctatgtttaccagaaaggagggtgccgaggcatgatctattngaaccggtagattgatctctctctccctccgattttcggtttgggattttataaaggggaggtttttggtttatcatgtaaggggattcgaggtgcc

SEQ ID NO: 21101 - DNA, 325 bp, Zea mays
  Coding DNA Sequence Number=SeqID_6698
aaagcagcttctccccccagattattcacttccaaggcatttcatctttattcacttccaaaggggtaccctgagatcacaaaggatcacaaaactatggccaagggagttgcagttctgaacagcagtgagggtgttaaggggaccatcttcttcacccatgaaggaaacggtgccactactgtgacaggaactgtttctggccttaaacctggtctccatggtttccatgtccatgctcttggtgacaccactaacggttgcatgtctaccggtccacatttcaaccctgatggtaaaactcacggtgcaccggaggatgcta

SEQ ID NO: 21102 - DNA, 416 bp, Zea mays
  Coding DNA Sequence Number=SeqID_6699
cgtacgagctgatccgtgtatgtaacgagcttcaggggaggttcgaggaggtggaggtgccgcttctgatagtgcatggaggaggagacgttgtttgcgaccaagcgtgcgtagaggagcttcatcggagagcaagcagtggggataagacgatcaagatctatccggggatgtggcatcagatggttggtgaatcggaggaggacgttgatttggtgtacggtgacatcctgacatggctcaagacccgatcggaaagggccgctgagaggaaacgggagttgcgcgttggcggcggagctttagagtctttttgactctttgggtattgagttgtagcccaataggccagtgccatctggaagcaactatttatgggttatgcttaattgtttcgtagcacatggtttacagtt

SEQ ID NO: 21103 - DNA, 523 bp, Zea mays
  Coding DNA Sequence Number=SeqID_6700
agatccatctccgtcgcgaagaagcctcagcctagcaagatctcttccccgaggaggtgtatgtgctctccgacgacgcatcccggatccttccgatgcagtttgcataaaaacgtggcgaatccgcacgggcaaggaacggcgtcgtatccgacgaacagtttgaacatgcggagatccgcgatgacgaattcgctggtgaggatcggtggagttgagggagagtgggtgaggagagcgttgacgactttgataaggccttcgtcgcatcatctgagaaggagagctgcttatcagcctcgtcccagtaggctatcgatcatgtcgaaggccgccaccgagtgtaattgatatgatattttaggtttctggtttgttcttctctttaataaattaatagggctgcagatctgggaaggaaggatctgaatcgggcgagatctgcggcgattgtgggagagaatttcaaattcgaaatcgagttttgtaaaacgaagatcgaaagaagcactcaccatcatat

SEQ ID NO: 21104 - DNA, 591 bp, Zea mays
  Coding DNA Sequence Number=SeqID_6701
gaagaaagactactcccatcatctcctccagcttcttcttcttcgtctctgaaactagtttgattcagccatggctaatgcggcgtcaggtatggcagtccatgatgactgcaagctcaagtttctcgaactcaaggctaaaaggactttccgtttcatcgtttacaagatcgaggagcagcacaaacaagtggttgttgagaagctcggcgagcctggtcaatcccatgatgactttgcagcttctcttcctgctgatgaatgccgttacgccggtttcgatttcgatttcgtcactgctgagagttgccagaagagcaagatcttcttcgtcgcatggtctccggacacagcaagagtgagaagcaagatgatctacgcgagctctaaggacaggttcaagagagagcttgacggaattcaagtagagcttcaagctaccgatccaactgagatggatctcgatgttttcaaaagccgagccaactgaggaatacatcctccataaatgcatgggttgaatccacatttctccctactattactgaattgatatatgcttggtctttaacgttgctgggaacggcacca

SEQ ID NO: 21105 - DNA, 576 bp, Zea mays
  misc_feature (30)..(30): n is a, c, g, or t
  misc_feature (45)..(47): n is a, c, g, or t
  Coding DNA Sequence Number=SeqID_6702
acgtcatgtcgagagtacaccagaagcatnttaggagaagaaaannncgtttcttccacgggcttagcaggaagatgtgatcccactcccccctcatgatttctgatcaggagaaacccttagagccattggagagtgattacttgcgaaacgaagaatgttccaagactcggctatggcgaataaatggggtgtaatttcaaggaagcaattcactgatcgagaaagctaacttccagccgactgtaagttagcgacatatccacacgactcgcgagccgcttgatccccgctcgttcagttagcgacatatccacatgaaattaaaaatagggccaattcgaacccacgaccagtcatttgaagcccatgacgcgcaaccaactggaatatgtacctattgtgtttcctagacggattaacaggattttataccttactaactgagaatgggaaagaaaaacaacatcgcctttgacgagggaacaaattcatctagtccaggttttgtaaaggactgatgcatcatgttgtacttgtctctattttatagtgatgcacattttctagcaaaaa

SEQ ID NO: 21106 - DNA, 488 bp, Zea mays
  Coding DNA Sequence Number=SeqID_6703
gaatcttaggtaaatttcctccgattttcttcgtttttttcctctcgatttctcaaattcatctcgatagtggatctctctctctctctttcgaaccaaagcatgaagggaggtaaatcaaaggctgataccaagagctccaagctcgcggtgaacaagaagcctgcaaaggcaagcaaagcggctgcggctgctaaggatcctaacaaacctaagaggccttccagtgccttcttcgttttcatggaggatttccgtcagacttacaagaaggatcatcccaataacaaatctgttgctgctgttgggaaagctggtggacacaagtggaaatccttgtctgacactgagaaggctccctacgttgctaaggctgacacgcgcaaggttgactacgagaagaacatgaaagcctacaacaagaagctggaggaaggtccaaaggaggatgaggaggaatctgacaagtccgtgtctgaggttaatga

SEQ ID NO: 21107 - DNA, 329 bp, Zea mays
  Coding DNA Sequence Number=SeqID_6704
ggaataattaactatcagctttacgatcttgaaactattagggttgataccatggggttactagatcatctttgggatgataccgtcgctggtcctctgccagagaacggccttggcaagcttcggaaacaccatactttcagtttccggccaagctcagccaatgatcaatcggacgtgaggtcgtacggcggagattcaccggaagaggcagtgaaagtaacacgcagcatcatgataataaaaccaccaggttaccaaggcggttcagctccggtgtcgccggccggttcaactacacccgtatcccccagtcctttctctggagg

SEQ ID NO: 21108 - DNA, 301 bp, Zea mays
  Coding DNA Sequence Number=SeqID_6705
tctgatctcttatcactcactctctctctcccctaacctcgccaagcagctacaatgggccgttaccttctcagatctacacacagagcagggtgtcaagtccgtggaggagcacctcgccggaaaaacctacatctccggagatcagttgactgtggatgatgtgaaggtatacgctgccatcgtggagaaaccgagcgatgccttccctaatgctagcaagtggtacgattccgtcgcgtcccaccttgctaaaagtttccctggtaaggccgtaggagtttcaatcggtggctctgct

SEQ ID NO: 21109 - DNA, 520 bp, Zea mays
  misc_feature (140)..(141): n is a, c, g, or t
  misc_feature (401)..(406): n is a, c, g, or t
  misc_feature (435)..(437): n is a, c, g, or t
  Coding DNA Sequence Number=SeqID_6706
atagccttccttaccatatggtcgaatttgtattagacgattctcattgcaaggtgacagccagccttagatatgcagatctcatttcggtggttccaactcgaatttcagtactaacctggcgtatgttcaataaaaannctatgagtaggaaggaagttggactctcgggaagtcatttttgcacaattcgcctaacatatgcagaagatgccttacgcaccctgagtttttctgaagcatatcccgagattgtattcacctttccacaggcgattcggcagccgtatcatcaaaaagcccccgcttagagctttgccctttcagtagcctagatgcgtcggtaaaaattcttggtagagatgttaaatattagaaaatcaacttcagaattattaccnnnnnncgtagtcaaattgctcaggttgagttcannntgctgtaatattgtcatatagcatttagcatttgtaattcggcctctatggcctcgttattccttcaatacctactccggtgt

SEQ ID NO: 21110 - DNA, 277 bp, Zea mays
  Coding DNA Sequence Number=SeqID_6707
cggcggagttccgattcctctgtcttttgggcccccccccccgcttatcatctgtgtcctcccatcctggattaagccttcaattattttcccgtccccacaggcttctagcctctcctccgcacgtaatttccttctcacctctcccctctttttacccgtggctaccaaactcccacccctactcatcctttctatacacaccttgtgcccttcccctcccctactgttccgttttcgctccccgtgcgcgtatggactcgccctcctcgttatg

SEQ ID NO: 21111 - DNA, 561 bp, Zea mays
  Coding DNA Sequence Number=SeqID_6708
gaggagggcgagtccatacgcgcacggggagcgaaaacggaacagtaggggaggggaagggcacaaggtgtgtatagaaaggatgagtaggggtgggagtttggtagccacgggtaaaaagaggggagaggtgagaaggaaattacgtgcggaggagaggctagaagcctgtggggacgggaaaataattgaaggcttaatccaggatgggaggacacagatgataagcgggggggggggcccaaaagacagaggaatcggaactccgccgggggggggggggagcgtgtggtgccagtgaggcgcaaggcttgaggctgacgagtgccccttgctgcggtcgctgcgagggggcccaagcgcaagcgcgagcgcatggccgcctgacgcgcagagcagcagccgctgccgccgccacggagaaggacgcgatggcacttgcactcccggtcgccatatcagaccgaggtggactgctctggtggcggcggcaactgcagcggcggcgctccccgctagaacgaagtgaacagagcagagagaagttaactcaggcgtgaa

SEQ ID NO: 21112 - DNA, 332 bp, Zea mays
  Coding DNA Sequence Number=SeqID_6709
tcctcatcgcaagcatttcgtcagggtgaacaaaaaaatgagcggagccggtaagaaagtagcggatgtggcgttcaaagcttcgaggacgattgattgggaagggatggcgaaggtccttgtgaccgatgaggctcgaagagagttctctaacctccgtcgtgctttcgatgaggttaacactcagctccaaaccaagttcagtcaggagcctgaacccattgattgggatttctacagaaagggtattgggtctggcattgttgacatgtacaaggaagcttacgacagcgttgagattcccaagttcgtggacactgttactcctgaat

SEQ ID NO: 21113 - DNA, 452 bp, Zea mays
  Coding DNA Sequence Number=SeqID_6710
gaagcttccactcaactggagctaagaagatgagcggaggacatggccatgacgagccttactacctccacgccaagcacatgtacaatttggaccgcatgaagttccaaggtctcaagatgtctctcgctgtcttcaccgctttcagcatcggtgttggtgttcccatctttgctgttgtcttccagcagaggaagaccgcttctggttgaatttactcgagtctctctgcttcaataaatttgtatgagttatcaaacttttctctttctgcaagagagaatgtttcttgcttcttatggatcttagctacaagtatttgtcatttcttttctgtttcttcatcctttgctggctgtttgacgctggaataatgataatccgacaattatgtatttttttaatttggattcgggagcttctgtctgaatgttgttcagttcgagccaaaa

SEQ ID NO: 21114 - DNA, 503 bp, Zea mays
  Coding DNA Sequence Number=SeqID_6711
tctctcttctcgaagaaagctcgcccccacagctccacaatgatcatgtcagaggagaaccgcagagaaatctgcaagtaccttttcaaagaaggagttttgtttgcgaagaaagacttcaacctcgcgaagcaccctttgattgagtcagtaccgaacctgcaagtcatcaagctgatgcaatccttcaagtccaaggagtatgttagggagacgttcgcctggatgcattactattggtttctcaccaacgaagggattgagttcttgaggacttaccttaaccttccttctgatgttgttcccgctactttgaagaagtctgcgaagcccattggtcgtccctttggtggtggcccacctggcgatcgcccaagaggacctaggtttgaaggtggagaccgtcctaggtacgggaccgtgatgggtaccgccgtggtggtgaaggtgaaaagggtggagctccagctgattaccagccttctttcccaggaagtggtggt

SEQ ID NO: 21115 - DNA, 403 bp, Zea mays
  misc_feature (41)..(42): n is a, c, g, or t
  misc_feature (53)..(53): n is a, c, g, or t
  misc_feature (68)..(68): n is a, c, g, or t
  misc_feature (71)..(72): n is a, c, g, or t
  misc_feature (74)..(74): n is a, c, g, or t
  misc_feature (79)..(80): n is a, c, g, or t
  misc_feature (84)..(84): n is a, c, g, or t
  misc_feature (86)..(86): n is a, c, g, or t
  misc_feature (89)..(89): n is a, c, g, or t
  misc_feature (94)..(94): n is a, c, g, or t
  misc_feature (104)..(105): n is a, c, g, or t
  misc_feature (116)..(116): n is a, c, g, or t
  misc_feature (118)..(120): n is a, c, g, or t
  misc_feature (124)..(126): n is a, c, g, or t
  misc_feature (128)..(128): n is a, c, g, or t
  misc_feature (131)..(131): n is a, c, g, or t
  misc_feature (136)..(136): n is a, c, g, or t
  misc_feature (138)..(138): n is a, c, g, or t
  misc_feature (154)..(154): n is a, c, g, or t
  misc_feature (159)..(160): n is a, c, g, or t
  misc_feature (167)..(167): n is a, c, g, or t
  misc_feature (195)..(195): n is a, c, g, or t
  misc_feature (209)..(209): n is a, c, g, or t
  misc_feature (224)..(225): n is a, c, g, or t
  misc_feature (239)..(239): n is a, c, g, or t
  misc_feature (286)..(288): n is a, c, g, or t
  misc_feature (291)..(291): n is a, c, g, or t
  misc_feature (293)..(293): n is a, c, g, or t
  misc_feature (325)..(325): n is a, c, g, or t
  misc_feature (330)..(330): n is a, c, g, or t
  misc_feature (346)..(346): n is a, c, g, or t
  Coding DNA Sequence Number=SeqID_6712
ttccttaatttgcatttagggtgttctagggcagggttganntacaacagggntttaataatttccanaanntntgtannaatnanagngggtngacactatcnnattttaccttntnnnagannnangangcttngntaataaggatttcganctccnnaagaatncgttgattgatgtaccaaagctgcaagngattaagctcatgnagagtttcaagtccnnggagtacgttaggnagacatttgcgtggatgcattattattggtttctgactaatgaaggnnntgngntcttgagaacttatcttaaccttccttccgangttgnccctgctactttgaanaagcctgctaagccccgggtggtcgtccctttggagggcccccctggtgatcgccaa

SEQ ID NO: 21116 - DNA, 229 bp, Zea mays
  Coding DNA Sequence Number=SeqID_6713
caaaaaactctcaatggcagccatgaactcaagtgttctcacctgcagctacgcaatctctggtgctggatcagtagagctaaaccagaaagtgggtttggtgagttcatcagttgggtttggtcagaagaaacagacggttcctgtgatcaaagctcaaagagttggaggtgatgatgttgatgggtctagtggaagaagatcagccatggtgttcttagcggctaca

SEQ ID NO: 21117 - DNA, 85 bp, Zea mays
  Coding DNA Sequence Number=SeqID_6714
gcagcagaaggcgttctatcttcattcttcttcaagtatggagacaccattttgaacaaggattcgacgactgatgccgcgatct

SEQ ID NO: 21118 - DNA, 513 bp, Zea mays
  Coding DNA Sequence Number=SeqID_6715
ggcattgtcacagcatggatgtctttgctgatgatgtcgcatagcgcttgcatcgtatgcctcagatgctgtcggcctcgaacaggacgacgacgtagcacctcgggagattacaggatggctcggacggagtggatctgccgccagacatccggatggaaggcctgagggatgtcgctcaccaccaacgggaagaggaactttgcgacgaccacctccgtggtcttcaggcacttgaggtatctcgcccagaaccgcggttctgcgccagatcctgaggtacttcttcacacggagctgctgcatccgcaacctgcctcttcaccttctggtccatgagatcgctcgggacttcgccaccgatgtgcttgtccagagccacgccttgcatgagccttcatgatccccccgatgcctgacctcatctcgtctgtgccaggacaccaccctctgtgacgtccacgatcgagctgggtaccgtagtgcccagaggaggtactgctcgcccgacga

SEQ ID NO: 21119 - DNA, 561 bp, Zea mays
  Coding DNA Sequence Number=SeqID_6716
aaggcgtggctctggacaagcacatcggtggcgaagtcccgagcgatctcatggaccagaaggtgaagaggcaggttgcggatgcagcagctccgtgtgaagaagtacctcaggatctggcgcagaaccgcggttctgggcgagatacctcaagtgcctgaagaccacggaggtggtcgtcgcaaagttcctcttcccgttggtggtgagcgacatccctcaggccttccatccggatgtctggcggcagatccactccgtccgagccatcctgtaatctcccgaggtgctacgtcgtcgtcctgttcgaggccgacagcatctgaggcatacgatgcaagcgctatgcgacatcatcagcaaagacatccatgctgtgacaatgcccttcgcgaagatcccgcgtcagtgtatctctgcctgaggcaccagctccgtcgaagggaaaaaggagtactaatttgtcaccgtatgctgcttattcgatcacaggaggctggtggaagacccacagcatgaatcatcaataaaatctcagtcgtgcaatactgcttctacacc

SEQ ID NO: 21120 - DNA, 538 bp, Zea mays
  Coding DNA Sequence Number=SeqID_6717
gaacatcaacgccaagccaccaggagacgcggaaagcagaccaacgggaccaccaccgacgaaaccctaagcaccaccaccaccagagaactcgaaggcggaccacaaagtaagcagagagaagaagactttaccgggaaccagtgaagtcagaaccccaacaccacacgcagccccactcaccaccagacgccgccggaagagagataaagccgacgaggcattaaaaggcgcagcacgcgccaccaggctcggagatgcgaaccttcttcacgggaaaattgccggtaactccacgccagatagagaatgatcccgacgccggaagaagccgtcctcaaacaaccccaacaatcgagaagcctagatctgaacagcagaggaccagatctgcgacgaagaaacgcaacccctcagccgagaacaacgcaggtgacgggagagagaggagacagaacaccggaggaacaagcgtccggcggccgcgaaaagaggcggcggccgccggagaagggcacacgattagggttttggttag

SEQ ID NO: 21121 - DNA, 417 bp, Zea mays
  misc_feature (38)..(38): n is a, c, g, or t
  misc_feature (336)..(336): n is a, c, g, or t
  misc_feature (345)..(345): n is a, c, g, or t
  Coding DNA Sequence Number=SeqID_6718
tgctattgactctcattcaaggatagggcaaagcaccntcatgcctgttcttggctacatcacgcttggtataaaaaagaaaatagccttatcgtccagggagttagaagagaggaagcagcggcttcaaaagcttgagaaattgtatgcagccatggccttgcaaaaagaattgaagaaacctgggcgcaagaggaaactgaaactccatgaagatgaagagacggccaatcaaacatcccggcctgtttataagtggcgagcccagaggaaacgatgagatgatatgaatgggctatggagggagtaaaaggcaacatgttagtagtggaagtnctggtcagntggaaccgctccttcggcccttaaaatacttccctgtagaagtagccctccccaaagaactgtgtctttgtc

SEQ ID NO: 21122 - DNA, 377 bp, Zea mays
  Coding DNA Sequence Number=SeqID_6719
tctgctccatgtatcaccatctttgcttggaagtactagtaaattaatagtgtgctgtagtaaagagagagtgcaacttctcctcaccggccggagcgacgacttccgcctggtgctcactgtggagtgtggaccgatccgggactcctcagttgagaacttgagatgactggcgcaatggccatggactctggcgatttagcctccatgcatgctcatagctgacacgatctatgggcccggccggttggtatagttggtaccaactcagataggtcgataccgactgtcatgtatcgtcttttgattggtagtacatgatattttgatatccaaaaaactaaaagaatatgtttatgaactatgtatccctttag

SEQ ID NO: 21123 - DNA, 143 bp, Zea mays
  misc_feature (76)..(76): n is a, c, g, or t
  misc_feature (78)..(78): n is a, c, g, or t
  Coding DNA Sequence Number=SeqID_6720
ccccagcttactaaaggtgcagctgacaattaccaccgatcttggtggaaaagacatggagttgttcttgatggananatcgcagctctggttctttaagcatgggaaattttggacctgggtgggaaatcctagtgaaaaag

SEQ ID NO: 21124 - DNA, 128 bp, Zea mays
  misc_feature (65)..(65): n is a, c, g, or t
  misc_feature (67)..(67): n is a, c, g, or t
  Coding DNA Sequence Number=SeqID_6721
tttttcactaggatttcccacccaggtccaaaatttcccatgcttaaagaaccagagctgcgatntntccatcaagaacaactccatgtcttttccaccaagatcggtggtaattgtcagctgcacct

SEQ ID NO: 21125 - DNA, 581 bp, Zea mays
  Coding DNA Sequence Number=SeqID_6722
gaaggtccatcttgagcgcgcaacactagctcactttaggggtcgaccacaaacaaaataaagcgcgctgtcaagcttgaagaaatgagaaaccaagggtggtagtagcgtactatatagttagctatcactagacctcaacttgatggagaaccaccgggatgagctcatcagtgttagtgtggagaatagttgcaggagtagttgatgggcacgtgcagacgagtaactcctcttgcgaggggctttcacctgagggggtctcaggttatcttctccaagaccaagtagagagcggtatgtacaaggaattcctccggggcctcaagttgccatttcctaccatcaccagctttcgctccactccccatggcctcacccttgggctgtctgctgtcgagcgtacaggagagaaaccttcagcaagcagtagccgcccaagtacaggagagaaataagattgggaggagagaagcaagttttaccggcgtacaggaaaaaagcaagcagctacaggggtctggcgtacaagagagaagcaagcagctaaggggtcttctttaccgcgtgttttctctcct

SEQ ID NO: 21126 - DNA, 238 bp, Zea mays
  Coding DNA Sequence Number=SeqID_6723
gtacgtataatgctccgtgcaatctcgtgcatccgtatcgaatggagcattttgccattgcaagtctttaatacctgattaacgcaaacgaatggtgttcgaatggttggtgtcctgtgtaatgagattagttttcatgctgcataagtgccttgtcagttgtgttcttccatgttggggaattctcaaaagggagcaaaatcttgcccaacggacgggtgggttgaatttgaagcct

SEQ ID NO: 21127 - DNA, 502 bp, Zea mays
  Coding DNA Sequence Number=SeqID_6724
aggaatcgagttctggtccaacccggagcgatccgggtggctcacaaagcaaggcgattacatcaagacctggcgccgacgctggttcgtgctcaagcgagggaagctcctgtggttcaaggatcaatcctccgccttaacccgcggatccatcccgcgtggggtgatctcggtgggagactgtctgaccgtgaaaggagctgaggacgtggtgaacaagcctttcgccttcgagatttcgagcgggaacatcaccatgttcttcatcgctgataacgagaaggagaaggaggagtggatcaactctattggaaggtcgatcgtgcagcactcgagatcggttactgattctgaagtccttgattatgatcaaaggcggtgacttttctttttttttagctctatgctctatgttttgattccgtcgtcttacgtttattgtaccgtgtatgtatgtatgtatgcctctcaagttgttgatcagactctctatctcttgtgt

SEQ ID NO: 21128 - DNA, 442 bp, Zea mays
  Coding DNA Sequence Number=SeqID_6725
aagggatcacccacaatccttcgtacgaggacgtctgttccgaaaccacgagacacgccgaggtcgtcagggttcagtacgatcccaaaggctgcacctttgagtctctccttgacttgttctggtccaggcatgatcccaccaccttgaatcgccagggaaatgatgtgggaaccagataccgatccgggatctacttctacacaccagagcaggagaaactagcccgggagtcactagaacgtcaccagcagcgaatggagaggaagatcatgactgagatcttgcctgctaagaaattctacagagccgaggagcagcagcagcagtatctgtccaagggtggaaggtacggcatggggcagtcctgtgccaaaggctgcaccgacccaatccgctgttacggctaaaacctgagctcctctgcttctgaggatgttat

SEQ ID NO: 21129 - DNA, 224 bp, Zea mays
  Coding DNA Sequence Number=SeqID_6726
gctgttgtgctcagcgggcatcattcgtaggattatggcttgtcatggagcccgacgaaggaggggttatgatcagaagattttcttgtggggtctcttctctaggagtggagctcttttctggatgcacaacatcagttggaggtaatgtcccgttggatgctcctgtttcaactaatgtggtcagcgctctttattcactgtccccgcattttcggctcata

SEQ ID NO: 21130 - DNA, 490 bp, Zea mays
  Coding DNA Sequence Number=SeqID_6727
gatgccgtctaatgagttctctagaatctgcaaagatctcagtaccatcggtgacactgttgtgatatctgtgactaaagaaggggttaagttctctactgctggtgacattgggacagctaacattgtgttgagacagaacacaactgttgacaagccggaagatgcgattgtaatagagatgaacgagccggtgtcactctcgtttgccttgaggtatatgaattccttcacaaaggcgactcctttgtcagacacggtgacgatcagcttatcgtcggagctgccagttgtggtggagtataaggtggctgagatgggttacattcgttactacttggctcctaagattgaagaagatgaagaagacaaggcttaagatcccttttgtacccagagcttcttctgttcttactaaaatgtccaagattcagtcatgatgattatgatgttttcccgtttaatttccctctagaatcagttgttttgt

SEQ ID NO: 21131 - DNA, 493 bp, Zea mays
  Coding DNA Sequence Number=SeqID_6728
gagctcaatctcaaaaccgtttcgaaaagaaaaacagaaaaaccaaaacaaagaatctgagatcaacaaccacagaaactaacaccaccttggaaagagttttatgttttgtctctggtcttaaccaaatagatcaaaaccaaagtcaccttcctcctcttcagattcttccttcttcttctcttcctcctttgcggcagcggcggactcacctccaccactggctcctccagctgctgcaccacctccggcagcaaatcctcctccagagccaccgccgatgatcacctggaagacggcggaggtaggggagacgagggagaaggaagactgaactccaccggaggaatcggcggagagagcagtctgaacaagcttgcgctggagatcgtaggtggaagaatcggaagcttcgaggtctccctcgtgctgcttagcggtccattctccgcctttgcttttgcaaacgaatgtgaatactcccatcttcttc

SEQ ID NO: 21132 - DNA, 540 bp, Zea mays
  Coding DNA Sequence Number=SeqID_6729
aatctcgcagccgttaaagaagaaaggagaagaagatgggagtattcacattcgtttgcaaaagcaaaggcggagaatggaccgctaagcagcacgagggagacctcgaagcttccgattcttccacctacgatctccagcgcaagcttgttcagactgctctctccgccgattcctccggtggagttcagtcttccttctccctcgtctcccctacctccgccgtcttccaggtgatcatcggcggtggctctggaggaggatttgctgccggaggtggtgcagcagctggaggagccagtggtggaggtgagtccgccgctgccgcaaaggaggaagagaagaagaaggaagaatctgaagaggaggaaggtgactttggttttgatctatttggttaagaccagagacaaaacataaaactctttccaaggtggtgttagtttctgtggttgttgatctcagattctttgttttggtttttctgtttttcttttcgaaacggttttgagattgagctctatgattattatgcaatgt

SEQ ID NO: 21133 - DNA, 600 bp, Zea mays
  Coding DNA Sequence Number=SeqID_6730
tcctcctgtctcatgcagtgccggtcctgtgggtgatgatatgttccactggcaagcgactatcatgggtccaactgatagcccattctccggtggtgtgtttcttgtttccattcacttcccaccagattaccccttcaagccaccaaaggtttctttccgcaccaaggtttaccacccgaatgtcaacagtaacggcagtatctgtcttgacattctgaaagagcagtggagccctgcacttaccatatccaaggttcttctgtcgatatgttcattgctgacagatccaaaccctgatgaccctctggttccagaaatagctcacacctacaagacagaccgagtcaagtacgagagcaccgcccgatcctggacccagaagtatgcaatgggatgatgatgattggcaataataatccgcaccaatactttgcgcattgtctaagaatatgagaaataagattgaaaaaaaaacagtgtgtggcgttttgcttggttgctttattagttttatcatcatcttaagccgtgtgttggtttgtgtacatgagctttatattgagacattttgagagcttgcaatgctataaagccaat

SEQ ID NO: 21134 - DNA, 302 bp, Zea mays
  Coding DNA Sequence Number=SeqID_6731
tctggttccagagatagctaacatctacaagtcagaccgtaccaagtacgagaacactgcccgatcctggacccagaagtatgcaatgggatgatatgatgatggttggcaataatgatccgcaccagtaaattgcgcatttgtctaagaattggggaaataagaagaaaaaaacatggatttggcttttgcttgcctgcttgatttaattagttttattatcttcttatgtgttgggtgtgtacatgagcgctatttaagccttattgaaacatttgatatctttcttttaatccagtaat

SEQ ID NO: 21135 - DNA, 557 bp, Zea mays
  Coding DNA Sequence Number=SeqID_6732
ccgatggtgtgggttcttgcaacgcgtccgtcaccgagaaccggatctctgaaccatttttcaccgctcatcacaccattcctccgatagtctcactgtcacatggtaggtgaaatccaaggtggaggagcttcccactgagtcacgtgccccgccgtgaagagagccaccgtagatcttaaaaggtgaaactagatcaggcggttcacttagccctaaaaaccggcctccctcgcgactaccgcttcaaatcctcaccgctcctccaagacgtcgattgtcattacctttaaccgctaagggtcgccggtaaaggaaccgataggttcagagcagaaggtatatcggttctgaagtgaggtagaagaagagggaagcaaaggaaaaaaaagagacagggaaggaggatttacctccggctccggcagagcaccgggccggagtggaggcggctctgttttgaaagaggggtctttagagagaaactaggtttttacacttctttttacccacaagctttgttgttattttttccttgttaattgagttgttgttac

SEQ ID NO: 21136 - DNA, 236 bp, Zea mays
  misc_feature (36)..(36): n is a, c, g, or t
  misc_feature (53)..(53): n is a, c, g, or t
  misc_feature (110)..(110): n is a, c, g, or t
  misc_feature (176)..(176): n is a, c, g, or t
  misc_feature (178)..(178): n is a, c, g, or t
  misc_feature (180)..(180): n is a, c, g, or t
  misc_feature (189)..(189): n is a, c, g, or t
  misc_feature (209)..(209): n is a, c, g, or t
  Coding DNA Sequence Number=SeqID_6733
gtgcaagtatagtattggctagttcggctgctccgngcgccttgttcttttgnttctaaccatgggactgcaggaacgctactccgatctcatcagagaagtagctcacncggctggcagccggtcgcggcacccctcttcatgaagccggcacttcaggccctacatggccggangntngaaccacanggatcgcgccaaccccgggngcgccacctggacgaaccggggtacat

SEQ ID NO: 21137 - DNA, 420 bp, Zea mays
  misc_feature (29)..(29): n is a, c, g, or t
  misc_feature (49)..(49): n is a, c, g, or t
  misc_feature (58)..(58): n is a, c, g, or t
  misc_feature (60)..(60): n is a, c, g, or t
  misc_feature (62)..(62): n is a, c, g, or t
  misc_feature (128)..(128): n is a, c, g, or t
  misc_feature (185)..(185): n is a, c, g, or t
  misc_feature (202)..(202): n is a, c, g, or t
  Coding DNA Sequence Number=SeqID_6734
catgtaccccggttcgtccaggtggcgcncccggggttggcgcgatccntgtggttcnancntccggccatgtagggcctgaagtgccggcttcatgaagaggggtgccgcgaccggctgccagccgngtgagctacttctctgatgagatcggagtagcgttcctgcagtcccatggttagaancaaaagaacaaggcgcncggagcagccgaactagccaatactatacttgcacccgcagaagatgcaatggaactgaacagattaaaggcgaaatgaaagtaaaataaagatgtagctaaataaccagattaattgaaagctgcaagaaaaaagaggtggggaacttgagggctggtgcgatgagaaaaatcaggcgcacgtctcgcggtctccccaggtgctcgagatccggcgt

SEQ ID NO: 21138 - DNA, 349 bp, Zea mays
  misc_feature (72)..(72): n is a, c, g, or t
  Coding DNA Sequence Number=SeqID_6735
agaggtcttccggtggcttgtgcacctggctggactggtgcgcgttcaaatgaaatacctcctccagatttncacaccttttccgggagtgactattcccccctccgctgcctagacccatggtggaggctggacaaaaccagagtccaacaacactttccccaatggtcgttaaaataaccctcctgagaccttctgcgggcatcatcctggccccgggtgcgagctcaatggtcgaatcgggcgggttccggaattttgaaagcccccccgagtaacacaacgggggggtggaaagtatacttctggaagaaaaggggcctttacaaccactggcacacagaatggt

SEQ ID NO: 21139 - DNA, 499 bp, Zea mays
  misc_feature (282)..(282): n is a, c, g, or t
  Coding DNA Sequence Number=SeqID_6736
ccaaaccattctgtgtgccagtggttgtaaaggccccttttcttccagaagtatactttccacccccccgttgtgttactcgggggggctttcaaaattccggaacccgcccgattcgaccattgagctcgcacccggggccaggatgatgcccgcagaaggtctcaggagggttattttaacgaccattggggaaagtgttgttggactctggttttgtccagcctccaccatgggtctaggcagcggaggggggaatagtcactcccggaaaaggtgtgnaaatctggaggaggtatttcatttgaacgcgcaccagtccagccaggtgcacaagccaccggaagacctctgtgcaacacttgtgctggcacacctaattgcagcattcatcatttgagcatttgccccatgcctcttgagggcgccgagcccggaggcgactcggtacatggtcgccggttgctgcggccgagtgactcgatggagtcgtcgccga

SEQ ID NO: 21140 - DNA, 538 bp, Zea mays
  Coding DNA Sequence Number=SeqID_6737
cacgaaacctcgaaacttgcggcctcgcattagtagccggctgcagaccgagtttgccgacatcccggcagtggaggcgggcgcgggcgctgagtcgaagcgcggccacctctctctcgattatacctgcatgaagtgggtacagctatccagcaaggtgactagaagaagaggaacgctgtgagctcactgattgtgcttggtacaggcagtggtgatgtgctggcacttgatgtcgctgcgggacattggaagtggaaggtcagcgattgccaccctggagtcaaaaccacatccttggaagggaggggaggtcccccccgtccggtggcggagccaggcgcccggcaagcctgggcatgtccccgggctccagctctgccatgcgcacgcagagtgctcagctatgctctgctgcatgcacgacggcgacgagcgacgaaggtgctcggccgcgacggcttcaacgatcgggaggatggatgcaatggcagacaatgaacaacgttggctgcacagtgactgtggcttcaccttc

SEQ ID NO: 21141 - DNA, 583 bp, Zea mays
  Coding DNA Sequence Number=SeqID_6738
atggatgtccctgtcgcacatccaggtttcagcttatatattggcaaaaaagaaaaggaaaaggaaccaaaaaaatcaaggacccctgtcgctaacacgtactccctccagtgcagtaaaggtagtcgtttaggacatgattgtgcataccaaggagtgattaattatcatagagtttttcctgtttgcccctattaaatagggatatgggtgcattaatgtcactaaaacaatcaggcttgattggttgctgcagcagctccaaggcattctagactggaggtctcaagttcgattcctcttaaatgcatctttttttgtgcaattactaggggcaacaatgtccaaatcccagacctacgcgtgctatgacttcttttactgcaccggagggagtacgtacaacaccatggagctatagatggccaaacggatcggcacggcccgttgtcggcacggcccgccaggcccggctacaaaccgtgccgtgcccagatgggccggcgtgtgtagttgtgggggcttgaacccacaacctagtgcataagaggcttaaacgcatccatctaaccagtgcaactgc

SEQ ID NO: 21142 - DNA, 495 bp, Zea mays
  Coding DNA Sequence Number=SeqID_6739
tgggagaggagatgaagctccatctcctgctgaaggtcctgttcggccccgtgccggtctacttctcggcgctggccatcctcatcctgctgaccaacgcgcagtacttcgggctcggcggcgtcggcgtgccgcgcgccaccaagctggcctcctccacgcaggtggtgagcgtgatgaagtactgcgacatcttccgcggcgagtgggtgcccgacgcggaggcgccctactacaaccacaagacgtgcggcatgatccaggagcaccagaactgcctcaagtacggccgaccggacctcggcttcctcaagtggcgctggaggccgtccggctgcgagctgccgcgcttcgaccccgtccagttcctgcagttcgtccgccacaagtccctcgccttcgtcggggactccctggctcgcaaccatatgcagtccttgctctgcctcctctcacaggtggcgtatcccaaggacatctcggcgaacccgacgg

SEQ ID NO: 21143 - DNA, 208 bp, Zea mays
  Coding DNA Sequence Number=SeqID_6740
gaattattttgatcctgcataccccacacaagaatcctagatccgccacacacaccagctgatacaggaagattacttttatctatactccaccttctttcgtggctatggcactagcagctatctataaccttttcatcattaacaaatctggcggccttatatactacaaggactaatggttcagtatgggaggaaggataccaaa

SEQ ID NO: 21144 - DNA, 449 bp, Zea mays
  Coding DNA Sequence Number=SeqID_6741
gtcgacgaagctgatgaacctgggtccgtcgccgaccgcctcgagtggcgacacccatccatcctcctcaacgcacacgcgcacactctctctctcctatcactcccaattctccccctcttccacatccaggccagccaaccctagcgcggcggcgatggattcagacccggccacggcccctgacgacgcggccgcagccgagaatggccacgacaacgacaatggccacggaaacggcaacggcccgtccccgtcgaagcgcccccgggcggtgatcacggcggccgagatccgcgccgagttcgcgcaccacgacgccgccgtggcgcgcgtcaacaacggcagtttcggctgctgcccggcctcggtcctcgccgcgcaggcccactggcagcgcctctttcttgcgcagcccgacgccttctactttcacagcctccagcagg

SEQ ID NO: 21145 - DNA, 140 bp, Zea mays
  misc_feature (29)..(29): n is a, c, g, or t
  misc_feature (32)..(33): n is a, c, g, or t
  misc_feature (35)..(35): n is a, c, g, or t
  misc_feature (37)..(38): n is a, c, g, or t
  misc_feature (79)..(79): n is a, c, g, or t
  Coding DNA Sequence Number=SeqID_6742
tggcgacgagcaactaccaggcgacccantgnngngnncgagaacgtttccgcgggcgagaggccggaccccagtgaangaagatgatctgactaccgacgtacgcagaacgaggcgttcgttgacatcttcttctcctt

SEQ ID NO: 21146 - DNA, 380 bp, Zea mays
  Coding DNA Sequence Number=SeqID_6743
gcgggcgtgagatccccgacagcacggccctagcagcggccacccccggtgggcacggcttgtgcgcgaccgtcccggcctgtgcgcgggcgcggcgtggcccttgacggcgcgctggcaagcgccctgctggtgcacaggcgggcagccacgacggcgcgcgagcgaggacccccggcgacgcgtggccccggctccgatccagtctcgtccggcgggcgcgggccctgccccggcggctccccgtgaccctggtgcatgtctacgaacaacgggtaacagtagaatccaaggctacacaagatatgcatgcgtcccgacagcgagtgtgctgcaactgcagggccatgcaggaagatgttccatagtgctggaggtga

SEQ ID NO: 21147 - DNA, 472 bp, Zea mays
  Coding DNA Sequence Number=SeqID_6744
cacatggcctcgattgaagcttaattattgacyaaggaagtcgagcagatgttcttgctaaaattgaaacctggtccaaaaaaagcagtactcaatctgaagagcctaataggtcatacacaaattcatgagcaacattccttttgtaccatggmgttcactgttcagtccgagcatcaccagacaaaggtagtagcgggctataactggaagactgcaaaccttcyattgcaggcttggtacagmgctagccttgayagttagacgcgatctgatgagggctatggagcaggatagcaagcgctgagatttgccatgggctcaccgaaggagcatgagattgaggtcgcaggttcbaggcttggagctcgtagtgcaggtggcgtcgacacatcggaggagcaggagctcgatagaggaggccgctcgccgccatcggaggagcaggagctcgataaacaaggtgcctgac

SEQ ID NO: 21148 - DNA, 168 bp, Zea mays
  Coding DNA Sequence Number=SeqID_6745
ctcgtacattatccttggtctctacctacacctacatctcaacctaccgaacatcagctaccttgccaatgcaggaacgagaagacagggttagactttgtcgaaaccctcttcgctagtggaggtatcgaccaccactcgtcgctataccccgatggcgatcggcga

SEQ ID NO: 21149 - DNA, 316 bp, Zea mays
  misc_feature (202)..(202): n is a, c, g, or t
  Coding DNA Sequence Number=SeqID_6746
gagcacaatacaacaagccgctccccacaaccgtttatccccaccccccagcccaaccacaacttccctcaaacaaccctttcaggtcttcccccttaccacccgatacccccgtgtccccgagaccgcccgcataatcatacacaccccaacaccaagaagacagccaagtccctccccacaggccccactttatcaaccnaaaaccaccgtcacgccaccgcacttagaatccccccacccacccatactcccccaccttagtttcttctctccaccccccaaataacaacacgtgtgttgcctaggcatttcg

SEQ ID NO: 21150 - DNA, 529 bp, Zea mays
  Coding DNA Sequence Number=SeqID_6747
agggacttggctgtcttcttggtgttggggtgtgtatgattatgcgggcggtctcggggacacgggggtatcgggtggtaagggggaagacctgaaagggttgtttgagggaagttgtggttgggctggggggtggggataaacggttgtggggagcggcttgttgtattgtgctcggggcggggggtcgtacggtgccggggtgttcacaatctggtgagagcgggcctgtcggcgtggaggaagaagaatagacacaggcagtggtccccgaaggagtagaactttggtagaaggcgctgtccagggggggggggggggactccgcaagctgaggctgcgaggaggcggcggagggggaggggaggaggtgcgccaggaggacccgctgccgatcgatcgccttctccatggctgggttggctcgcttcgctttcgcttgccggcgggcgtcgtggttatccaaggagacggaagcggacggccggacgcggttgccggggagggtctggagaattgattgttcttt

SEQ ID NO: 21151 - DNA, 486 bp, Zea mays
  Coding DNA Sequence Number=SeqID_6748
gacccattgtggatttacgtacagaaactatcccgtaaatgattgcaccttttacagggcccaataaatattctgggatttgccgccctttggagtttggcaaataattatttgagagttgagttttgtgaaattttaccattttgtgctgtgcagtttttggagtaacagaattatttactacttctgcaagcaaggtaaacttatggttgattagaagaaacgaaaggcagcggctcaagttttgatgtagcttcttggaggaattcagacaacaagaaagcaaggaacagcggttcaagtttcctaaaaccaacgtgttatgtgcgttggtgtatggtgttacagaacacgttttttgtgcacacgcttatacaacagtctgtgtccagctatggtttccatggcaatttacaggattctttctgctcttacttcacaactattagcaattccagctatgatttcccctaccattctttctta

SEQ ID NO: 21152 - DNA, 236 bp, Zea mays
  Coding DNA Sequence Number=SeqID_6749
ggcaacagcgggaagcacaaccaattaccgattcatcatgcaacctacaagaagcacataaaaaagtaaaaggaaagaggcacaatcttgttggatacggcggccctgccctggcccctgccccctgggaaggaaagggcaccgggagctcatcgttattcggacacggcctcctcttcgtcttcgtcctcgtccggcccatcaagtaatggaaaacgctaataattctcctccct

SEQ ID NO: 21153 - DNA, 482 bp, Zea mays
  Coding DNA Sequence Number=SeqID_6750
tcaagaggcgcaaggtccctgattcccactgctctggttctgaagtaaatcgattagtttcctgcttttttctgtttcagcattgcagtatcattgaaggaaccttttcatgtcctctcatatttgcctgtaccataaccatacatgctctgctgcatagcatgatgaaaatcattcaagggtatctctcatgcattctccatcacttaaaggtgcctttacctttggatttgtgtctactgtttattcctgctcaagtctattacgataaatggtgattagtgccgctatatgcataacttcagtttgtttccaaattcactttctaatgttcaccaattttcttcatgtgaaccttttgcagactagatcatgctcacttcaaggttcagtgaagttgaggaacctatttgctgatcagccacacagaaaatttggtgacttcattaaaggagtatttgctctcttccacagatttggga

SEQ ID NO: 21154 - DNA, 568 bp, Zea mays
  Coding DNA Sequence Number=SeqID_6751
atctattctccgcaagtaacctctactcggtcggtaagaatgatgggtagtggacggggggcccgagcggcgggggtgaagcgagtcaggggaaaggcaggcgaaagataaggagggccagtagaagagcgggaggagggggagaaggcaggtgggcgacggcatcggagagagcatgtaggaacagggaccggcgccgaagagatcgtttataataaagttgtactgaggttgtggcggcgcggtgtggtatggcccccgtgacggcggtggggggggtggtgggcagatggggaggtggggggcgtgcgtacccccaggtagatgcggggaagggcgtgtggcaatcaggggcggtacatagtgccacccgggcggtgtcaccgcccacgatgaggtagtcgtagtaggacacgctgggcgccagcgccgcgtccttcacgaacgtgtagttcacgccacgtacttgtagcgagctgcataggagtacaaagaagaagctcgtagcgagaagggtggacattgtgaagtgccttgatcgtccagacattgtaaacgcgcaagcttt

SEQ ID NO: 21155 - DNA, 291 bp, Zea mays
  misc_feature (28)..(28): n is a, c, g, or t
  misc_feature (30)..(30): n is a, c, g, or t
  misc_feature (45)..(45): n is a, c, g, or t
  misc_feature (48)..(49): n is a, c, g, or t
  misc_feature (57)..(58): n is a, c, g, or t
  misc_feature (98)..(98): n is a, c, g, or t
  misc_feature (101)..(101): n is a, c, g, or t
  misc_feature (109)..(110): n is a, c, g, or t
  misc_feature (137)..(137): n is a, c, g, or t
  misc_feature (139)..(139): n is a, c, g, or t
  misc_feature (152)..(152): n is a, c, g, or t
  misc_feature (172)..(172): n is a, c, g, or t
  misc_feature (231)..(231): n is a, c, g, or t
  Coding DNA Sequence Number=SeqID_6752
tgcgctccgtgtcgccgactcgaatccntnatgaaggaggctcanatnnaagggcgnngccaaggccgatgcctgagctggcggtgaagagcaagggnttngagaagcnngccaagggcagtgaaagggaagggcgngnaaggaccccaacnagcctaggagggctcccagngctttcttcgtgttcatggaggaattttcgcaaggagttcaaggagaagaaccctaagnaacaagtctggtcgctgcggtggggaaaagctgctggcgacaggtggaaatccctggagc

SEQ ID NO: 21156 - DNA, 563 bp, Zea mays
  Coding DNA Sequence Number=SeqID_6753
aaagcttttagccgtcactgcctctcctatcgtctcctacatccttgcctcaagctttcacaaaacagcagccatggcagaacagactgagaaggcttttctcaagcaacctaaggtcttccttagctcgaagatatctggaaagggaaagcgacctggtaagggtggaaaccggttctcgaagaacatcggtttgggcttcaagactcctcgtgaagccattcaaggaacttacattgacagaaaatgtcccttcaccggaactgtctccattagaggtcgtatcttagccggtacttgccacagcgccaagatgcagaggaccatcatcgtgagaaggaactacctccactttgtcaagaagtatcagaggtacgagaagagacactcgaacatccctgctcatgtctcaccatgcttccgtgtcaaggaaggagaccatgtcatcatcggccaatgcaggcctttgtccaagactgtgaggttcaatggggttgaaggtgataccagcctggtgccttctgctttccccaaagaaggctttcactggaaggcaacaaggg

SEQ ID NO: 21157 - DNA, 570 bp, Zea mays
  Coding DNA Sequence Number=SeqID_6754
ttactttcatttcatcagtcgctgcctcgcctctcgcatctcatttcgcctcaatccatcagcggagagcagcagcagcaaccagtagccatggcggaacagacggagaaggcatttctaaagcagccaaaggttttcctaagctcgaagaaatcagggaaaggaaagaggcctggaaaaggtggaaaccgtttctggaagaacattggtttgggtttcaagactccccgcgacgccattgatggacattacattgacaagaaatgtccattcactggaactgtctctgtgagaggacgtatcttagctggtacttgccacagtgctaagatgcagagaacaatcattgttcgccggaactatctccacttcgtcaagaagtatcaaagatacgagaagaggcattccaacatccctgcccatgtctcaccctgcttccgtgttaaagaaggtgaccatgtcatcattggccaatgcaggcctttgtcaaagacggtgaggttcaatgtgctgaaaggtgatcccggcaggcgcatctgcctttgcaaagaaggcattcactgggatgta

SEQ ID NO: 21158 - DNA, 333 bp, Zea mays
  Coding DNA Sequence Number=SeqID_6755
aagcttttgccgtcgctgcctacaaccttgcctcagagcagaacagcagcagccatggccgaacagactgagaaagctttcctaaagcaacctaaggtcttcctcagctcgaagatatctggaaagggaaagagacctggaaagggtggaaacagattcgtgaagaacattgggttgggcttcaagactcctcgtgaagccagtcaaggaacatacattgacagtaaatgtcccttcactggaactgtttcgattagaggacgtatcttagccggtacttgccacagtgccaaaatgcagaggaccattatcgtccgaaggaactaccttcac

SEQ ID NO: 21159 - DNA, 331 bp, Zea mays
  misc_feature (65)..(65): n is a, c, g, or t
  misc_feature (69)..(69): n is a, c, g, or t
  misc_feature (100)..(100): n is a, c, g, or t
  misc_feature (105)..(105): n is a, c, g, or t
  misc_feature (109)..(109): n is a, c, g, or t
  misc_feature (115)..(115): n is a, c, g, or t
  misc_feature (123)..(123): n is a, c, g, or t
  misc_feature (133)..(133): n is a, c, g, or t
  misc_feature (158)..(158): n is a, c, g, or t
  misc_feature (169)..(169): n is a, c, g, or t
  misc_feature (213)..(213): n is a, c, g, or t
  misc_feature (236)..(236): n is a, c, g, or t
  misc_feature (238)..(238): n is a, c, g, or t
  misc_feature (242)..(242): n is a, c, g, or t
  misc_feature (251)..(251): n is a, c, g, or t
  misc_feature (275)..(275): n is a, c, g, or t
  misc_feature (285)..(285): n is a, c, g, or t
  Coding DNA Sequence Number=SeqID_6756
gaatccggcagcaccatgcagaaccccgtcgcgaaccctttcactgcggccgccgccgctgcggnaggnaacggcgtccaagcatcgggggctggagggnagcgnccgnaggacncgtcaaancaaaactggngaggtgacgagctcgatccaaaaangctgggcctgntcaccagttaacctcacggtctcctccttaaatctgcctccagntccccctcttcagggcctgatgngntggngcggactcnaacgatgcaaaactccccgagggngcaaatcagngcctatggaggcgtcatttgatcgacgatggaaaaacccgacgagt

SEQ ID NO: 21160 - DNA, 370 bp, Zea mays
  misc_feature (26)..(26): n is a, c, g, or t
  Coding DNA Sequence Number=SeqID_6757
agatcattttcttgaaatagagatancacacgagggataatggaacmttgakagatgccaatccaccacctgmaacttttgacktttgacaagaaaggattatgagggggccaaatkttcctcacaagcaactatwtgasaatccggaagtatatatacgagctgactgtwgagttkcagagagttacataagcccattagagatcaaggatttcttggaagaggtggagtaagttgtctgttgatgatttactgtttcaaacaagaatagcagcatcacttatgagcagccagcctgaagcttgtcttggttttatcactctgtaaactgatttgctccagcgacatgtggttcttacatttgaaaccc

SEQ ID NO: 21161 - DNA, 542 bp, Zea mays
  misc_feature (189)..(192): n is a, c, g, or t
  Coding DNA Sequence Number=SeqID_6758
gcacagttgaaccagcgagcccggttgattgccgacaacccgctgagccaggcgatctacaccggacgcggggatgagttcgggcgcatcgagttcgccatgcagatgctggaagcccaagtgggcgcggtggtgggccggattggcgatgcctcgcaacgcctgtccgggcacgccgccgcgctggtnnnnacaactggacagcagccacaccagcagtctcggccaacagtcccagacagatcaggtcgccgccgcgatcaatcaaatggccgccagcgtggcacaagttgccgagcatgcgctgcaagcctccaaggccgctgatcaggccggcagcgagacccgggaaggtcatcaacgggtggatgaaagccgcgacgcggtgctgcggttgtcccaggaactggcgcgcgccaccgacgtgatccatcaacttgaaagccacagcggcgatatttccggggtgctggaagtgattcgggcgattgccgagcagaccaacctcctggcgctcaatgccgccattgaagccgcacggg

SEQ ID NO: 21162 - DNA, 537 bp, Zea mays
  Coding DNA Sequence Number=SeqID_6759
aagaaaatggctagcttcactgcctctgcttccaccgtctctgtcgctcgtcctgctctccttctcaagcccaccctcgccatctccgctcctgttcttggtttgcctccaatggggaagaggaagggaggggtgagatgctcaatggagccaaagcaaggaaacgtctcagccgtgggggctggagtttccgcggcggcgacagcagctttaacggctgtgatgagcaacccggccatggcgttggtggatgacaggatgtccacggaaggaaccggactaccctttgggctgagcaacaacctcttggggtggattcttttgggagtgtttggtttgatctggacgttctactttacctacacttcatctctcgacgaggatgaagaatctggtctttctctctgaacatgaacatgtactactattatatatgtctcttttagtcttcatcagtgttcatctctctcattttccatttcatgtcaggacttgaatcaacaatgatcttcttcttctggtttcttgttgttaaat

SEQ ID NO: 21163 - DNA, 519 bp, Zea mays
  Coding DNA Sequence Number=SeqID_6760
acaacatcaatctaacacgtctaatcgattttgtcgcaatggaaaccaccggaaaagtgaagaaggctttcggaggaaggaaagcgggtggccccaagaccaaatccgtctcgaaatcgatcaaagccggtctccagtttccggtggggagaatcactcgtttcctgaagaagggacggtacgcacagaggctcggcggtggagctccggtttacatggccgccgttctcgagtacctcgccgcagaagttctggagcttgctggtaacgctgcgagagacaacaagaagtcgagaatcatcccgaggcatcttctgttggcgattaggaacgatgaagagttggggaaacttctcagtggagttacgatcgctcacggtggtgtcttgccaaacattaactctgttcttttgcctaagaagtctgctaagtcgtccgaggatgctgcacccaagtcgcctggcaaatctcccaagaaggcttaatcatctcgacgttacttgaattcacctggttggg

SEQ ID NO: 21164 - DNA, 579 bp, Zea mays
  Coding DNA Sequence Number=SeqID_6761
aatctccttccactataaccatcagtaatctttcagtcagcgcaaaccttcatcccgtgcaatggaaaccaccggaaaagtgaagaaggctttcggaggaagaaaggccggtggcccaaagaccaaatcggtttcgaaatcgatcaaagccggtctccagttcccggtcgggagaatcactcgtttcctgaggaagggacggtacgctcagagactcggtggtggagctccggtctacatggccgccgttctcgagtacctcgccgccgaagttctggagcttgctggtaacgcagcgagggacaacaagaagtcgaggatcattccgaggcatcttcttttggcgattaggaacgatgaggagttggggaagcttctgagtggtgtcacgatcgctcacggtggtgtgttgcctaacattaactctgttctcttgcctaagaagtctgctaaatcgactgaggaagttgcgtccaagtccccagctaaatctccgaagaaagcttaaaatggtcctcggggcgggttgggttcgccgacagagttaatgggggttccggtgttttatatgtagaaaat

SEQ ID NO: 21165 - DNA, 232 bp, Zea mays
  misc_feature (148)..(148): n is a, c, g, or t
  misc_feature (161)..(161): n is a, c, g, or t
  Coding DNA Sequence Number=SeqID_6762
gtggtgttcaactaaagtcccttctctcatgctagctgacatccacaaagatcagtgtgtgttttacaagaaaaaacacaccgagaacggatgaagtgtcatggcatatatacgttcaagtacgtacgggagcatcgttttggtttanacatttttttttnaacaccaccgtcatcatccgtagcatcaccaccaccattaggaggagggaggagctcgattcacttgttca

SEQ ID NO: 21166 - DNA, 599 bp, Zea mays
  Coding DNA Sequence Number=SeqID_6763
ggcaatctctagtagcactgttggtctgatatgaactttatttacatgtgatgcatatgcttctgctattattgtactgtcttgtccttttttttctgtagtggttactagtggaagtttagcacactgattccgtcatagtgggatccttgccaaatgaagtgtccatccaaccaacccaactaactgtactgaaatctcattgctttcagaatggtacggttagtaaattgaggttggtggtgggtttggtggccatactaggggaaggtacgtgtttgttctttatagatggtgacttggtttcaacctgagggttttgcccttgatgataggttgtcatagaattagtgggatatatgatggtttaatcacagtgactaaaatctggattctaaattgctaatagtagaaacagtagctatctagtgccggtagtgtttgggggtgtcttttgggctatgctgatgtggtgggttggagttgatattgtggttgttttgtatggcacattgttcaaatatcgctctctatgagctactttttatgtttcatttttcctcgaggtaggttagtagatgtctggaatggatattgcc

SEQ ID NO: 21167 - DNA, 108 bp, Zea mays
  Coding DNA Sequence Number=SeqID_6764
aggatggtgatgtagctcttttgcacgaaactattgttggttgggtctcttttgaagatataaccatagttgacctcaatgttcaaaggatggccagaaagccaggaa

SEQ ID NO: 21168 - DNA, 543 bp, Zea mays
  Coding DNA Sequence Number=SeqID_6765
ataacctatttctaagtaccgcaaggttctgacttcacatcaaatgaacatatatgtttttgatctctttttatggctgctggcgcagagtgcttgttattgacgtccctgtattatgcagaatgggatgaccaggaagaaggcaacgaagccgtccagcagtgggaggatgattgggatgacgatgacgtgaacgatgatttctcgctgcagcttaaggaagagctggacggaagcaacggccagaagagctgaagttttatttctctagtttgtagatgataaatgattgttatgtgctatatggatgggttgatatggttgtgctatgtgaacggcagaaagtttacggacatcagtcggcaatttgacagcactgtacctgttccggtggaacatatcgtcgttaggacaggtctctatccgaaacgctagaaaccccacattgagtatcttcaactgtttcctactaatgcccaatctcgttttttttagcgacatgagataaataccaagcttgttcggctggttttttcaagtaat

SEQ ID NO: 21169 - DNA, 462 bp, Zea mays
  Coding DNA Sequence Number=SeqID_6766
acaagcaccaccagcttgcaggtttcaagatggaagtggtaaaaactacacatgctgggcatgcaaaatctcttgtatcaactattgattttagtacctgtcctgatggtattgtatgtgtgggtggtgatgggattgtaaatgaggtcctcaatggtcttctatgcagagatgatcaaaatatgtctgcctctgtaccaataggtataatacctggctgggtctgataactcacttatttggacagtcttgggtgtcaaggatccaatttctgcagcattgtcaattggtcaggggaggtcttacacctatttgatggtttttttctgttgaatgggattcaaagtgggactattgcattatggtacaccgatcactaaatttttgggtttggggtaagcggatgttcttgagcttctcagagaagtatcagaaaggcattttgggccctttagcaaactt

SEQ ID NO: 21170 - DNA, 460 bp, Zea mays
  Coding DNA Sequence Number=SeqID_6767
gattatgtagacttcttccgggatgcaaacatgtccagtgacactgatatgagtaaggtgtttgaagacagaacgtttgtgtcatctatccttaattcgcaactctccagcggcgaggagaggaaggccgtggtgatggtggtggcggctgacatgccgcccgcgctgcagcgccgcgcgttctgctgcgcccatgacgagctcgcggcgatgccgcacttcccgcgccggctcgagcccaagcgcctcgcgctggcgctcaagaagctcatttggaaggttctcagagttgctgatcccaccattggcagttcaagtatcaagaggccattggtgacagaagctacaacatccatggttattagatgtacatgtcattttctttcacccttttcctgaataacttgttggcattaagatgcatgacactattaccttcttcctgaataactttgagcga

SEQ ID NO: 21171 - DNA, 229 bp, Zea mays
  Coding DNA Sequence Number=SeqID_6768
tgaggaactcgaagacgaccgcttcctcgagcagtactcggagaagagcgccgcgttcacgagccggagcatgctatgcgttctttctccgagaaagatattctttctctaattgctaaacttgtactaaggggtgttgaacaaaaagatttttgtcggaggcgttgcttgggagacaactgaagatttatatgagccaacaacttaatgattgcacccgctgaagttg

SEQ ID NO: 21172 - DNA, 528 bp, Zea mays
  Coding DNA Sequence Number=SeqID_6769
gatccttcgttgtcatccagcggcacggtttacggtttgaggactcctccatcgtgtccttgcctcttctccatcatctccttgcctcatctctcctctgagttctccctctggtcacggtcttggttgctctgttgcttttcattcaaatcgtcgtgcatccagatctggtgtctatttttgggccaaatgcttatttcttgcagaaaccatgcatcaagatctagagtgttctgagcacaaaagttgtacaggtatgacctattgatcaggaaagttgtaccagacacgttcgtcgtcacgaacatcgtcaagccgtgtgcctactgcactggccggtgagcatctgcaagacgtgtgactggtgcccctgaccagaactatgcgtctctgttctcacatgatgattagatgggatctgatcaccgcgtctctgaagacctgatcaccgggagctcttcatatgtaagaaggcatgcaacatcaatgcttggacaagagtttatggcgtgtacacatgattatggc

SEQ ID NO: 21173 - DNA, 541 bp, Zea mays
  Coding DNA Sequence Number=SeqID_6770
atgccataatcatgtgtacacgccataaactcttgtccaagcattgatgttgcatgccttcttacatatgaagagctcccggtgatcaggtcttcagagacgcggtgatcagatcccatctaatcatcatgtgagaacagagacgcatagttctggtcaggggcaccagtcacacgtcttgcagatgctcaccggccagtgcagtaggcacacggcttgacgatgttcgtgacgacgaacgtgtctggtacaactttcctgatcaataggtcatacctgtacaacttttgtgctcagaacactctagatcttgatgcatggtttctgcaagaaataagcatttggcccaaaaatagacaccagatctggatgcacgacgatttgaatgaaaagcaacagagcaaccaagaccgtgaccagagggagaactcagaggagagatgaggcaaggagatgatggagaagaggcaaggacacgatggaggagtcctcaaaccgtaaaccgtgccgctggatgacaacgaaggatcgcggtcgcgac

SEQ ID NO: 21174 - DNA, 318 bp, Zea mays
  Coding DNA Sequence Number=SeqID_6771
gggtcgcctctgtctcctgcttcagcggcgttcagcgccgccgggaatgggcgatcttcgtcgctctggtggaccaccccgacggcgggggcggagagcaactcaactaggaagtactttcccacggacgtgaatggacttctggcaagggttccgggcggagtccgttgctggcatctccgcgagatgcccccgacccatcattccatttcacgcgcccggaaaaaaagtaaataagaacccctttatctaccgggttccgcccaaaagaatttgaaacagctgcttgaaagggccactataggctaaatttgccat

SEQ ID NO: 21175 - DNA, 471 bp, Zea mays
  Coding DNA Sequence Number=SeqID_6772
aatttagcctatagtggccctttcaagcagctgtttcaaattcttttgggcggaacccggtagataaaggggttcttatttactttttttccgggcgcgtgaaatggaatgatgggtcgggggcatctcgcggagatgccagcaacggactccgcccggaacccttgccagaagtccattcacgtccgtgggaaagtacttcctagttgagttgctctccgcccccgccgtcggggtggtccaccagagcgacgaagatcgcccattcccggcggcgctgaacgccgctgaagcaggagacagaggcgacccgcgaggcgggggaggcgatgggtcggaggtgaagccgttggagcacgaggaggcggcgctaaatcaccgagagcagcagatccgaagggagcatgggagcaggcgagtagccaacgacgcatggtagatgaccggagcccggagcgagcagcatactgc

SEQ ID NO: 21176 - DNA, 110 bp, Zea mays
  Coding DNA Sequence Number=SeqID_6773
tttgaccttttgaaccttatgtatctaagatggtttcggtccatcaatcgactgacatatacaacatctaggatccagtagttgctcccgtgggttgctcattttaagcg

SEQ ID NO: 21177 - DNA, 355 bp, Zea mays
  misc_feature (102)..(102): n is a, c, g, or t
  misc_feature (294)..(294): n is a, c, g, or t
  misc_feature (301)..(301): n is a, c, g, or t
  misc_feature (303)..(303): n is a, c, g, or t
  misc_feature (305)..(305): n is a, c, g, or t
  misc_feature (324)..(325): n is a, c, g, or t
  misc_feature (328)..(328): n is a, c, g, or t
  Coding DNA Sequence Number=SeqID_6774
atagcaatcagctcatctgtcagcgccacaggtgaccggaaaaccacggccggcgttcctgctttctctacccggtccgaattgctgaccggatcaacccgnagaccttgcaggattatcgatctgattgcggcatgatccgcttcatcctgctgcagaaccgggcaggggaaagactcggactggcccaagtattacgtccccgctcgaggactcggaaaaggcacaaggttgggaatacgaggtacaccccgggcttcgtgggtcaatcgggggaaccctaagttcaccacntttttcngncngagggtttacctggatacnnaanatgaaatttattctttggctgggggag

SEQ ID NO: 21178 - DNA, 431 bp, Zea mays
  misc_feature (208)..(236): n is a, c, g, or t
  misc_feature (239)..(243): n is a, c, g, or t
  misc_feature (251)..(258): n is a, c, g, or t
  misc_feature (260)..(260): n is a, c, g, or t
  misc_feature (262)..(267): n is a, c, g, or t
  misc_feature (278)..(282): n is a, c, g, or t
  misc_feature (286)..(294): n is a, c, g, or t
  misc_feature (296)..(297): n is a, c, g, or t
  misc_feature (306)..(308): n is a, c, g, or t
  misc_feature (323)..(325): n is a, c, g, or t
  misc_feature (329)..(342): n is a, c, g, or t
  misc_feature (348)..(350): n is a, c, g, or t
  misc_feature (356)..(356): n is a, c, g, or t
  misc_feature (358)..(364): n is a, c, g, or t
  misc_feature (376)..(386): n is a, c, g, or t
  misc_feature (390)..(395): n is a, c, g, or t
  Coding DNA Sequence Number=SeqID_6775
gtgtggatctgcttcctcttcaatacttatgaaaataaaatggaatgtggaaatgtcattgggcctgctgtataacttataaaatagaaccgcagctgtgctgggatctgcactggcctttggcctgctgtagaacttctgctacttttgtttgggtcataggttgtattggaatctggaaatttcattggcctgctttaggattagnnnnnnnnnnnnnnnnnnnnnnnnnnnnntgnnnnnctgtgcgnnnnnnnngnannnnnngacgaagaccnnnnnatcnnnnnnnnncnnaggtagtannncgctagatatatagnnngagnnnnnnnnnnnnnngaaagnnncccagncnnnnnnnctccaaaccaannnnnnnnnnnccannnnnnagtccgagaagggtgagagaatataagtgtcttccc

SEQ ID NO: 21179 - DNA, 88 bp, Zea mays
  misc_feature (30)..(30): n is a, c, g, or t
  Coding DNA Sequence Number=SeqID_6776
aaaaagcggccccaggtgcacgatctcatntatattgcacatacgatgttccacagacgcagcattacctagcttattgtagaacatc

SEQ ID NO: 21180 - DNA, 243 bp, Zea mays
  Coding DNA Sequence Number=SeqID_6777
tttttgatcaaatagacttggattgatcaaggggagtgttacaaaatattatgtacaaagtgatcaatcctctctgacagttttctcacaaaagacatgtcccttgggagacactacatccattgtatataagagatcatatctgcaataaagtggacaaccgttacttcactttctcccttctctctatctcattaccgctgagtattacaacagttcagagtctaaccgatgtcggtggtg

SEQ ID NO: 21181 - DNA, 530 bp, Zea mays
  Coding DNA Sequence Number=SeqID_6778
caaagcaactggtcttatcaaggttgatcgtgttctgtactcctcagttgtgtacccacacaattatggcttcattccacgcacactctgcgaggataatgacccgatggacgtccttgtcctgatgcaggaacaagttgttcctggttgcttcctgcgtgcccgtgctattgggcttatgcctatgattgatcagggtgggaaagatgacaagatcatagctgtctgtgctgatgatcctgagtaccgtcacttcaaggacatcagtgaactccccccgcatcgcctacaagagatccgccgcttctttgaagactacaaaaagaatgaaaacaaagaagttgcagtgaatgatttcctcccagccgaagatgccatcaaagcaatcaagtactcgatggacctctatggctcgtacgtcatggaaagcctgaggaggtgatctgctgctgcttgattgtggatgctacgtaattttctcaactgctgatcgtttcagcatgaacagaaggtaatatcccttggtcatg

SEQ ID NO: 21182 - DNA, 302 bp, Zea mays
  misc_feature (149)..(149): n is a, c, g, or t
  Coding DNA Sequence Number=SeqID_6779
gccttctgttgtgctcagtggcggacccaggatttgaggacagcctaggcaagattaagttactatcctctatgcctgtgcttgcttgcttctctccattgccgtagattaagcgtatggtgcttgcttgcttctctccattgccgtanagcagcccaggccaccgcctgtggtgcctgggtggtgagtccgccgctggttgtgctggctttggtcattaatgagtttataatgtgagtgctctacctcttccatggacaataaatacatctatgcttctcttggtctactaactgtttcgc

SEQ ID NO: 21183 - DNA, 550 bp, Zea mays
  Coding DNA Sequence Number=SeqID_6780
aaagtactgcattacctgctggctgctacctaaagcagatcagcatccaaacaaaaacgattaatcgcccaaaaccagagtgaagcccagtactgtagatgggccaaaaaccagagtgaatcccagtaccaaaactgcaacgaccaaaaacgaccacgaagtgttcgaccagacgactaatcgcccaggtcgacgactagtcgaacgactaggacgactagaaaccctaatcgcgtcgtcctcctaatcgccctcttccaggcgaccagcccgactaatcgcgattaatcgcgattagtcggacgacttgtaaacactggcaattaccataaagataattgacaattgtgaccatacaagaaattttaggttatgagagattttcttgtgtttccatccagtccggtgcactgactattagagcatctccaagagctcctaataaatgtcccccaaaactagttttggcaaataaggcgaaaaaatcactgctccaacagtatccaactcgtagcccaatattttggcaacaccaaaaatcggcacagtt

SEQ ID NO: 21184 - DNA, 531 bp, Zea mays
  Coding DNA Sequence Number=SeqID_6781
aggcaggcctttgtcgaacgcatgaaccgggtcaataacgcagtcgtcgagttcgtcaacggcattccggtggtcaaggccttcggtgccatcggcaaggcccacgcaagctaccgcaaagcggtggatgatttcagcaaagccttcgttgaattcacccggccgctggtggggacgatggccaacgccaatgcaatgatcgccccggtgacggtgctggcaacggtgctgacgttcggcctggtgtttatcagcctgggctggatcagcgccgtagaggtgctgccgttcgccattgtcgcgccgggtatttgtgcgccgctgatgctgctgagttacatcactcacgacctgaacaacgccgttggcgccgccgagcgtgtacaggcactgctggcgacaccggtgctggcacaggtggaaccgggttccgagcggctgcccaaggacgccgaggtgcgcgtggaaaacctcgggtacgcctacgacccgcagaacccggtactgtcgaacatcagcttgaccctcaag

SEQ ID NO: 21185 - DNA, 327 bp, Zea mays
  Coding DNA Sequence Number=SeqID_6782
gacacggcacaaccttgacaactatatataatacgggcacaagagctttatttatttattttacacacgacggtgatgagcgaattgaaataaaggataatggaggatggagggtgatcaggtctatttgaaggtgtcgccacttcggggtatgaggagattcaaagtcaaaggaaagttgtcccctcgcttcattggacctttcttgatcttaaagcgagtgggagaagttgcatatcaactgaagttacccgatcatctgtcagatatacatgatgtatttcatgtgtctcagctaaagaagtacctcagggtacctgaggagca

SEQ ID NO: 21186 - DNA, 245 bp, Zea mays
  Coding DNA Sequence Number=SeqID_6783
gaggtactttccaagctccggcgggagcgcgccagtaaagcggttattgctaaacctaaatattgacagtgacggcaacgggccgatggtcgctgggatctcgccggagaagttgtttctgaagaggtacaggtttcggaaggtgagtttggtgaactgcgctggaagaactagcacactcgcagggttctccattgctttgcttcttgcttctttcgctttgctctccgttgtgttagttagcc

SEQ ID NO: 21187 - DNA, 374 bp, Zea mays
  misc_feature (158)..(158): n is a, c, g, or t
  misc_feature (261)..(261): n is a, c, g, or t
  misc_feature (343)..(343): n is a, c, g, or t
  Coding DNA Sequence Number=SeqID_6784
cttggttttccatttactctcagcctgctctctctctctcatggcggacgaactggggtgggccgtcgctaccaacggcacacccaggtattcttgggaccctgcgccggcgacgagcaccgcaagggaaatgatccagcacaggccctatgatcatnaatgttgatgtctatagctttggcatcgtcttgtgggagctaataaccggcatgcttcctttcaccaccatgacgggccgttcaggaagctttttgctgtggnaaataaagggtgctccgtccggtgatccctcaagactgcctatcttctctaagccacattatgactcgcttgctgggatggnaaaccctgaaagttcgcccgccattttactg

SEQ ID NO: 21188 - DNA, 309 bp, Zea mays
  Coding DNA Sequence Number=SeqID_6785
attagtgcttgcttctgatcttgctaaaggctgctcattaagagtcccatctcattgtgctttgaacggtgacaaaacacggctagctagctagctagctagctcgatcgatcaccatgacgccgcgtggaatcccaccgaattccatgctgcttcgagcaacgtcgtcgtggacggaagcagatcgacgacggcactccagcgcgcagcccatgcatgcttgtcgttgtcgccatatatatggcgcccatgcatgcggcatgccctccgagtggatcgtcgtctgcgatttgcattcatctcactcat

SEQ ID NO: 21189 - DNA, 311 bp, Zea mays
  Coding DNA Sequence Number=SeqID_6786
cgggccaattccagaaaacacctatccaaatccaccatcgggctaggcggcagaagcatgttggtcgtggagggagccgccgccggggactccggctagccgatgttgatccctagggagtgggccgtggggatggctgggtccaccaagaggtctctcacggcctcgcctggcgggattggaccggtggccagatcaccagcgcgggagctccatgtgaagcgtcctgtttgtgtggacagcctattcgtccccctcatctccgtgcggttacgaggatctgaggaatcaccctgttacctggatctcaa

SEQ ID NO: 21190 - DNA, 331 bp, Zea mays
  Coding DNA Sequence Number=SeqID_6787
aaaatgcgaaatggccgtctaccgttggatcatcatcgtgaggtcctagttgagtgcttgcacgattgaacagatgtgctgattgtgattacataccagtcgccgcctacatcacctgcccgcaccggaccctctacacatgtacgagagggagagggatgacgcttgctaatttcctactaggagcgtgcgagcgagccagagggagcggtcatttgcagcgacgacgtacgacagcttcgtcgtcttggtggcgtggcaccatgggcggcgcctactgccgccgccgctcgccgctcgagcagcaactcctcccggcagtgctggtgct

SEQ ID NO: 21191 - DNA, 259 bp, Zea mays
  Coding DNA Sequence Number=SeqID_6788
ccacaagccattttccctgccttcttctcctctcacgcgcagctcttctctgttcctagacgtgcgcaggggcagaagctccagcagccatggcgtccctctcctccagtcgctcccatggatggcgcccaagcccttcttccacctctagccggacctgcccagcgccactcctttctctccatggccggcgcacaggaagcccgcagccatggacgcccaggcccgacgccctacctgcgtacctccatggctggcg

SEQ ID NO: 21192 - DNA, 451 bp, Zea mays
  Coding DNA Sequence Number=SeqID_6789
gaacttatgtcttagtcttaccaatttacaagcagtgcagttaataagtatatccacagctagctgctgttaacaaggcaaacaataatgccgtacgcaagacatgcatgggcccatcgcggtagccggtagggatgcttcctccttggcgcacgggatgcgcgcgcgcgggcggcggcgagtttggcgcttgctttgccgcatgcatgcctgtgccagcgtgcacggtcttccggccgcgccaccagggtgaaagacgcctttgccctttcccctcgcgctggccactggccgcagcagcggaacttgcacgcgagttcgtgcttgcagaaacccggccgacgaagcatccagcggctcgcggtcatcaatggggcatgtcgatgatatgcacgcacgcacgcacgctcgacccttctggccagccatcggatatgctgacggacggacc

SEQ ID NO: 21193 - DNA, 364 bp, Zea mays
  Coding DNA Sequence Number=SeqID_6790
ataacacactttagggtttgatatttaaaacgtatcaatcaaacatcttttggcttccaataccataatattttcaaatactataatactacttcaaaactgcaaaaaataatgagattccaaaccgagcctaaaatcgcttcttctgcctcttcacgctccattctttcttcttcgcctagacgagtaggaagcctgcgcagactacgaagacggactagctagtgagttaacaagtggctctagggactcaccgtagaggagcatggtggtgggccgtgggcgtgccgcgtgcgcatggtccctgcgtggcgggtttcggcgacggcgcagccgcgcagcgacgctcggattcggaggcatc

SEQ ID NO: 21194 - DNA, 381 bp, Zea mays
  Coding DNA Sequence Number=SeqID_6791
tttttatgtccgacggtccttctgccagtcgtcgagcgtaggatattatgtccgacggttgctctgggccatcggatataatgttatctctggcggctgcctacgaggccatcagacataacagagccatcggaactctgtcgttttattgtagtgctcgccgttgccgtccaatggccacaccgatgttcgtcgtcggcggggatgggcagctggacgcccgcattggccgtcaccagcggccaccagatatgggcataggttgggtcagattggtggtcgtggtgatgatggacgctcccggcgacggctagctagcgatggtggcgagagccatggtcatcatcatcaatgctttttctagcatcctactggacgaca

SEQ ID NO: 21195 - DNA, 200 bp, Zea mays
  Coding DNA Sequence Number=SeqID_6792
tttttatatacccattgtacatattattgacattgtgtttttagtggtggtattaagtgaaccaactcaacaatatagatcacaataatattttggttccatccaatatctcaaagtttcctataccccttatatatctaaatatcaatacgacaacaatacatgagttgcatttgtgttttttggcatatatgtcttgc

SEQ ID NO: 21196 - DNA, 375 bp, Zea mays
  Coding DNA Sequence Number=SeqID_6793
aacaaactcatttcacttgacacaatttttacgtacaatttgctaaattacaattattcgttacaaataatgtaaaatgtaagtataaaaaccattatttatcacaaactcacactttttcactcccagtccttcctgagataattataggttttgtgcaaaaaatggcaccaatcgaataattcccacaaatgctccaaaaatcaccaaattagcgattacagagtcgcgggcctttttcttatcttcttcaggatcgcgagatccaaaattcggctggattcttcgcatttttaataattgtttatttttaataaaagtattttaattaaatcgatggtttttttgcagaaatccaattgaatttgaggcgta

SEQ ID NO: 21197 - DNA, 314 bp, Zea mays
  Coding DNA Sequence Number=SeqID_6794
caccatatggtgacaacgatccttcacaaccatagttgactgggagatgacgacctagacctctccgaacttatcgtagcatccttcatgctcctcgtcttgcggtaccgtgttttggagaccaggaccgaacttcccatgtcgtggagcggctccgcgacggtgccgttgctccagcgagcagttctccgagttccgttcgcgcttgagctacgaattccccgcagcagcgtccgccgcgcttcaacgaagctccctaggcactctgctaagcccaacacgcactgccatcacgattcgaccgtggtggccct

SEQ ID NO: 21198 - DNA, 451 bp, Zea mays
  Coding DNA Sequence Number=SeqID_6795
aattcttccatctctactttatagggatagtttggagtgtaggaattttataaagattaatttatcgtttatagatagtttggaatgcaagaatttactagtttagtttcgtagagaaaatatagagagataaaaagaatcccacatttcaaataaggctttagaggtatttggttccaccggaagtttaatttgtgtcacattaaatatttgaatgataattaagaatattaaatagtctaatctttctttattactacctctttaaagcatagttttgtgcatcatgtatgaaccttgtactccgtagttctgttcctctcctccatcagtttgatgcgtcgtgcaccacatacgaaacacatgtaacgtgcgaagcatgtaagggggtgtttggcagagctcatacaactccactcccagcgagaatcactctcacacagtcaaacga

SEQ ID NO: 21199 - DNA, 148 bp, Zea mays
  Coding DNA Sequence Number=SeqID_6796
tttatctactaacaattactcgtgaacccacaatacattgtttgagaaattaatagtgacacgctatatcagaaaggagagagaagggggccggcgcatagaggacgctgcaggggcagctgtgcggccgtaaagtgcccattcaggc

SEQ ID NO: 21200 - DNA, 328 bp, Zea mays
  Coding DNA Sequence Number=SeqID_6797
aggagacgccgcctatataagctcatactcctcattgtagacctcctcctggactacctgctcttcaccttcaatgagctcctgctcaacagtttccacctactgaacacctaggtcctcggtcacttgttcatcaatgagtaggccctcaacgatgccagccatgtgcggcatggattcccggaggcgcactgctccggtgaggaatccccaggtctctagtgatctccgtgccaatcttcttgttcgatcaaggcggaggatgtatcccgactccaccggacacagggtgggggttcaagcgatggcataagccaatgtcgatggt

SEQ ID NO: 21201 - DNA, 423 bp, Zea mays
  Coding DNA Sequence Number=SeqID_6798
gaaattttaccagtcatccatagaaatttaaaatggcaaagatgtcatatatagaaagcaaaaaaaaacaagaaactatcaatatactcactatcggaaacttcacacaaacaacatcatactccatacatcaacttcattcttcaactccaaattcacttcatgtctgccatgctgtacaacgaaaaaccgtgccatcatgtttggtgacttgcgcagtagccatcacgactgtcgcaacatatgagacaaagagccatgcttttttgcttttttggtttctcccgagtaatggagttccaacaacatccccttttttctctgctggcgtgggatgcgagccgcaccgacggttggcctgcactctgtccatggcattcgagcatccggtccatgacgagagtgcggatgcaaagctcctaa

SEQ ID NO: 21202 - DNA, 288 bp, Zea mays
  Coding DNA Sequence Number=SeqID_6799
atgagtaaagcaccgtgctcgcttcacaattctatcgattcaattattcacaggtaacctcaatattttaattcagaattcgattcatccctaaacgctaaatgcaaaagaaacgtacttcagcagaaaaactagtgtactgaaccacatttacatctgaatcgcaccaccgttgccaatccaccgaagcacgtcgatccaccaatgcataccgccgcatactgtctgcaggcccgccatttggcgcattggctgttatgccttgccgctaggctggtggccgcaaca

SEQ ID NO: 21203 - DNA, 352 bp, Zea mays
  Coding DNA Sequence Number=SeqID_6800
gatagctttgtctaaattttaaccataaaatttgggtattacaaaccttatatagagaggtgaacagttcaattatcctgacaccgccaggttacccgatgtgttacacgagttgtcacttctaaagttttgtatttgattctaatgtttgtggttgtcaccacaccttaaaccacccatcactatatacattaacacgcatgctagtattacatcaccacagacgccagcaatcatggggatacgcattagactaactcggacattgttacacaaactcaaaagttatttctaatctagtaactctgtctgtttaccttatcagattaacacctctaaataactttgacag

SEQ ID NO: 21204 - DNA, 225 bp, Zea mays
  Coding DNA Sequence Number=SeqID_6801
ttttttgcctttgcccactctgaaccaatacattaccttttactatcccacgcggcaccccactacccaagcagcaatgaagagtttaaaccgagtggaaatcgtggtttgaacaggtaaatcccttcatcacactgtcagattcgaagccattgcatttgcatcagtaatctaaccgcagttttttttatatatctccattgcattctaaagttcgtggaaccc

SEQ ID NO: 21205 - DNA, 257 bp, Zea mays
  misc_feature (191)..(191): n is a, c, g, or t
  misc_feature (226)..(226): n is a, c, g, or t
  Coding DNA Sequence Number=SeqID_6802
cgatttcgcaaatgtagtatgtagtggtagatggatccgataaattttctgtaattttgacgaggtaatcaggcaattgtctcgagattgttgttgtaaaaaaaaaaaaaaaaaaaaaaaagaaaaaaaaaaaaaaaaaaacttcccctcctgacctcctgtcctgtccagtcacacttgacgctcccggntcccgctcacctggtccctgtcctgtccatctgtnccgttccattccaattccatccccggaaagc

SEQ ID NO: 21206 - DNA, 522 bp, Zea mays
  Coding DNA Sequence Number=SeqID_6803
cttagctagatttcatcttcccttctcacttctccttcttttatttctgatcacagtcatacaaacccagggttgatataaatggagggtggtgcgagtgatgaagtagcagagagcagcaagaagatagggagagggaagatagagataaagaggatagagaacaccacgaatcgccaagtcactttctgcaaaagacgcaatggtctgctcaagaaagcttatgagctctctgtcttgtgtgacgctgaggttgctcttgtcatcttctccactcgcggtcgtctctacgagtaccccaaccacagtgtaagaggaaccatcgaaaggtacaagaaagcttgctccgacgctgttaatcctccttccgtcaccgaagctaatactcaataccatccgccagagtcatctaagctaccggagacagacccgggacatctcggaatccgaaccgacccattcttgccgaatcccctcccctcccttgaaactcaagggaactcaagaaaccttccaaagtag

SEQ ID NO: 21207 - DNA, 533 bp, Zea mays
  misc_feature (164)..(164): n is a, c, g, or t
  misc_feature (236)..(236): n is a, c, g, or t
  misc_feature (270)..(270): n is a, c, g, or t
  misc_feature (347)..(347): n is a, c, g, or t
  misc_feature (508)..(508): n is a, c, g, or t
  Coding DNA Sequence Number=SeqID_6804
ggtagctgacaaaattcgcaatgataagaaagtgactgttatagaaaggacaaatctgagatacctcccaggactcccacaaaaagtcgatgtagtgacgcttgacctctctttcatttccattcttaaggtgatgccagctattatgaatgtgatgaaagaanatgcgactttagttacccttgttaaaccccaattttgaagctcgaagacacaggtcgggaagggtggcatantgagagatcccgaagtacatcaagaaggttcttngagaaagataataaccggtgttgagccgctatggatttacccaccaaaggctttatcgaatctcccattaaagggcncagacggaaacataaagtcttggcttgctttaatcgaaggacaataaaacctgaagccgaagaatagtagacttatattccattactgagtgggaagtttgaaccttgtgtgatatggtatttgtttcttttttcacgtattccattccccaatctcattntaactcgtcctttgcatagggttaa

SEQ ID NO: 21208 - DNA, 517 bp, Zea mays
  Coding DNA Sequence Number=SeqID_6805
gaatattatagcagcgccgacgaggaagcaggaagaagaagaagaagaatcaggaataatggcgaccggcaaaacggtgaaggatgtctctccacacgagttcgtcaaggcttacgcggcccacctcaagcgctccggcaagattgagctgccaccgtggacagacatcgtcaagaccggcaaacttaaggagcttgctccttatgaccctgactggtactacatcagagctgcgtcgatggcaaggaaagtgtacctgagaggtggacttggagttggtgcgttccgcaggatctatggaggaagcaagaggaacggaagcagaccacctcatttctgcaagagcagtggtggtgttgctcgtcacattcttcagcaactccagaccatgaacattgtcgacctcgacaccaaagggggggaggaagatcacgtccagtggtgagagagatcttgaccaagtcgcaggaaggatcgctgctgctatctaaaatcgatgatcacaggcttttttttt

SEQ ID NO: 21209 - DNA, 365 bp, Zea mays
  misc_feature (26)..(26): n is a, c, g, or t
  misc_feature (58)..(59): n is a, c, g, or t
  misc_feature (144)..(144): n is a, c, g, or t
  misc_feature (158)..(158): n is a, c, g, or t
  misc_feature (250)..(250): n is a, c, g, or t
  Coding DNA Sequence Number=SeqID_6806
ttattatagcacaaacaaagtcatcnttgggggattcccccccccccaaaaaacaatnncccaaattagttccaatgtgggaagaaatgggttccaaaggtccaccccaaaagtttaaaaccccaagagccccctgatgttccntgtgtgaacaaccnatggatcctccacgggttacttaatgaacccgatttcccctgggggttgctacggaaaaccccgtcggccagcagttgagaccaaacttccntgattagcccaggggagtttccacacacacggcataagggagacccaggcccgtatttcttaggatgagaattccagacgttggagtgacccatgattgtcgactgctctctgct

SEQ ID NO: 21210 - DNA, 233 bp, Zea mays
  Coding DNA Sequence Number=SeqID_6807
attcctggctgcctagcgacgagagcgcgaccgagagaggggtgagaggaagagagccgccgcagggggatcttcgatttggctgtcgccctcaccatcagtggtgtcgaggccgctctgctcgcgattgactgccaacttcgccagaatttctcatcgtcgatctcggtcatccatggattcatttgatgccgtgcgcagtgctgcttagtcatcgatcacgacgagcaagt

SEQ ID NO: 21211 - DNA, 539 bp, Zea mays
  Coding DNA Sequence Number=SeqID_6808
agaaggcagcaattcgttgggagcaggtgagttcatcatgttctatcacttttcctcctttaatttcttcccatcctgtgaactgtgtgctcctgctccgttaatggtgtcgctgattgctacaaaaccacgagctccggcgatgaccagtgagacccccagcaggagcagagcgaacatggcgaagaagagcaccgggtcagcctcgccgctggagacagccgtgacggcacaggaagccatgacgagccccgcggtggcggtgctgcggcgcatgaacgccgcgagagcacgtgcactgtcgaacgccgtagggaaggtgggcgccgggttgtcgtcggccttgctgacgccaaaggcgacaaggttggcgccggcgaggatccccgtgaagctgaggagcaagccgaagccgcaggtgctgctgaagtggatacaaccgctgacggaaagcagcgtgatggtgaggccgatggccctggccctgctccccggcgtgctcatcggcggcggcggcgtggaaccgtagatagacatag

SEQ ID NO: 21212 - DNA, 530 bp, Zea mays
  Coding DNA Sequence Number=SeqID_6809
cgtggttttgtagcaatcagcgacaccattaacggagcaggagcacacagttcacaggatgggaagaaattaaaggaggaaaagtgatagaacatgatgaactcacctgctcccaacgaattgctgccttctcagtcagatccccgcccgctccaaccttgtcgcctttggcgtcagcaaggccgacgacaacccggcgcccaccgtccctacggcgttcgacagtgcacgtgctctcgcggcgttcatgcgccgcagcaccgccaccgcggggctcgtcatggcttcctgtgccgtcacggctgtctccagcggcgaggctgacccggtgctcttcttcgccatgttcgctctgctcctgctgggggtctcactggtcatcgccggagctcgtggtgagtaatcgggttttcagctcttacacaccagtcaagggaagtcgcagaacctggtgtcgaatcagggcagatctgaggatcctttgaactgaaagaaactacaatttaatttccttgagttgtccttcagag

SEQ ID NO: 21213 - DNA, 497 bp, Zea mays
  Coding DNA Sequence Number=SeqID_6810
gtccagggatgagacaacgctgctgccctctgtttacttaaataagctacctgatagattcccaaaaggatgtaatatactccttgtggatcctatgctagcaactggtggaacagtcactgcagcagttgatctggttaaggagcgtggagctgaaatcagtcagataagaatcatatcagctgttgctgctcctcctgcaatcaagaagctcaatcaaagattcccagggatttgtgtgtatacaggaactatggatcaaattgtgaatgagaaaggtttcatagttccaggccttggggatgctggagaccgcagctatggaacatgactctgctggcggtctggccctttgccgatgaccattgttaggaatttcagcaaaacccagatttatttagttgatgcctgcttattttcgtagaccagatttgtgtaataatgtatatatataataatgtaatatgtactcatagtttcaacctctaccgccgttg

SEQ ID NO: 21214 - DNA, 364 bp, Zea mays
  Coding DNA Sequence Number=SeqID_6811
ctccgggtgggaggatggcctgcctcagcaatggtgactttgagacagcaccaaagtggtggttttggtaaaatctggcttctgttggctgaggggtgcatcgtcaatcccctgggttggacgatcaacggggcacggtttgaactcccatttcagcagggccacaccaggggtggcatgatcctgattggtccccacaggggggaacccatgcagtaaagggctaggggaaatggatgccttagcggtgggggcaagggggggggaaccgtttgaagaaagggtttccggaggaatggcttatccacatttccaggggggtggccccggaacctgtggcaccaacttgggagggcacttggaa

SEQ ID NO: 21215 - DNA, 511 bp, Zea mays
  Coding DNA Sequence Number=SeqID_6812
tttccaagtgccctcccaagttggtgccacaggttccggggccacccccctggaaatgtggataagccattcctccggaaaccctttcttcaaacggttcccccccccttgcccccaccgctaaggcatccatttcccctagccctttactgcatgggttcccccctgtggggaccaatcaggatcatgccacccctggtgtggccctgctgaaatgggagttcaaaccgtgccccgttgatcgtccaacccaggggattgacgatgcacccctcagccaacagaagccagattttaccaaaaccaccactttggtgctgtctcaaagtcaccattgctgaggcaggccatcctcccacccggagccgccgaggccgggcggacgggcgccgccaggagaagcagggccagcaatgcaagtctcttcctcgccgaatctgcctccatctcctcgccccctccgcgctccctcgcagctcacctccctccaacccagagcacaggctgcagg

SEQ ID NO: 21216 - DNA, 453 bp, Zea mays
  Coding DNA Sequence Number=SeqID_6813
caatccccgcttgaatcagtagcagcaactctctccctctccgttcttggagagccgagacccttggccgtccgctctgcctcacctcctccggctcttgcttcccttgccggccggtgccttcccgaggtgtcagctgcgggaccggcctctagaaggaaggagttctagaccaccgccccgggctacaacaggccccggtatcctttgcccccccgacggaggggggtccgcttccgggggaacttttcggggcgggccccttacacggcctgcccgggggtggccccccccgacgtttccccgcccccccggtgggccccggcgggtcccccgggcgccccattggcggccgggggtatacactagcggcccccccccccgggtctgttcgggcccctccctgcccccaaggcggccccacacgggcccgagagtacttcctcgtccggg

SEQ ID NO: 21217 - DNA, 180 bp, Zea mays
  Coding DNA Sequence Number=SeqID_6814
ctgtgctcgtgctcatgtgccaattgtacctctcaaaaaccctgcaccacgtgtcgcatcatgagaccagctgtgctgtatacacatcatctcctcttaatgccggacacgcctgcatccccccacccccctctgcacccaccctcctatcactctgctctatgatctttaccaccgcca

SEQ ID NO: 21218 - DNA, 466 bp, Zea mays
  Coding DNA Sequence Number=SeqID_6815
tggcggtggtaaagatcatagagcagagtgataggagggtgggtgcagaggggggtggggggatgcaggcgtgtccggcattaagaggagatgatgtgtatacagcacagctggtctcatgatgcgacacgtggtgcagggtttttgagaggtacaattggcacatgagcacgagcacaggggggggaccccgcatggacctaatgttgctgatggggggggcgtgcggcacgctcgctccggcgacccgcgcgcggcgccgcgcgccgccggccggcaagggaagcaagagacggaggagtgaggcagagcgtacggccaagggtctcggaccaccaagaacggagagggagagagttgctgctgctgattcagcggggattgtagtgtaaaaagaggaattttatatctgcctgaatgctcaaaaggcgcttggaacacggagcgagtcaagcagcgcaaccaa

SEQ ID NO: 21219 - DNA, 389 bp, Zea mays
  Coding DNA Sequence Number=SeqID_6816
ccccgatactggtggagcgttggcagtagctgatacgctgaactgaatggactccgcacatccagagggaagtgttaaaacgtttggcatcatttatagctggctggactggagtatattctgttagcgtttgttcggttaagaatggattaattgagattaaatttcctcatgagagctagtttagtgactagagatcatgggtgaatagcaaggggattcttttccatggatcctctcgtgatggatcaccaaattagcccttacgaggggatctaatccctttcaatacgaaaaaaatttgtcaagacattatggcatggagtataggaagtcaatttttttattgatgattgaattattttcagaacggaatatggatcctgcaa

SEQ ID NO: 21220 - DNA, 479 bp, Zea mays
  misc_feature (29)..(29): n is a, c, g, or t
  misc_feature (33)..(33): n is a, c, g, or t
  misc_feature (40)..(40): n is a, c, g, or t
  misc_feature (45)..(46): n is a, c, g, or t
  misc_feature (50)..(50): n is a, c, g, or t
  misc_feature (62)..(62): n is a, c, g, or t
  misc_feature (70)..(71): n is a, c, g, or t
  misc_feature (75)..(75): n is a, c, g, or t
  misc_feature (89)..(89): n is a, c, g, or t
  misc_feature (94)..(96): n is a, c, g, or t
  misc_feature (99)..(99): n is a, c, g, or t
  misc_feature (103)..(103): n is a, c, g, or t
  misc_feature (107)..(107): n is a, c, g, or t
  misc_feature (109)..(109): n is a, c, g, or t
  misc_feature (115)..(115): n is a, c, g, or t
  misc_feature (133)..(133): n is a, c, g, or t
  misc_feature (138)..(138): n is a, c, g, or t
  misc_feature (151)..(151): n is a, c, g, or t
  misc_feature (156)..(156): n is a, c, g, or t
  misc_feature (162)..(162): n is a, c, g, or t
  misc_feature (166)..(166): n is a, c, g, or t
  misc_feature (169)..(169): n is a, c, g, or t
  misc_feature (172)..(172): n is a, c, g, or t
  misc_feature (175)..(175): n is a, c, g, or t
  misc_feature (177)..(177): n is a, c, g, or t
  misc_feature (179)..(181): n is a, c, g, or t
  misc_feature (190)..(190): n is a, c, g, or t
  misc_feature (198)..(198): n is a, c, g, or t
  misc_feature (212)..(212): n is a, c, g, or t
  misc_feature (214)..(214): n is a, c, g, or t
  misc_feature (221)..(221): n is a, c, g, or t
  misc_feature (233)..(233): n is a, c, g, or t
  misc_feature (237)..(237): n is a, c, g, or t
  misc_feature (239)..(239): n is a, c, g, or t
  misc_feature (243)..(243): n is a, c, g, or t
  misc_feature (273)..(273): n is a, c, g, or t
  misc_feature (357)..(357): n is a, c, g, or t
  misc_feature (376)..(376): n is a, c, g, or t
  misc_feature (413)..(413): n is a, c, g, or t
  misc_feature (417)..(417): n is a, c, g, or t
  Coding DNA Sequence Number=SeqID_6817
ctatgctctgaattgccaatgtgctcgancaangatcacntccgnncctnctcctctccganggggacgnnggtntcacgctcggctanttccnnnagnagtncaancnacgcgnccgcccagctacacgagntggangacctcgccaacntcatnaggctntacncgnaanggnantnnngcctgatcncctactantccttcgaacagtncntgcgcanactcgagaaatnggtngncggnaaccgcgtcaggggagtgagaagtaagaanataataaaaaaagaagatatggctgccctgccactggccaccgccgaagtatgcgacgctaaccctcacctgatcatgaacggngagctccgcgcgctccagnccatcttccagatctacggacggtgccaggtcttcgncggncccatcgtcacgctcaagggctagggagggacaacgttcctggttccgcgagttcctcgagg

SEQ ID NO: 21221 - DNA, 401 bp, Zea mays
  Coding DNA Sequence Number=SeqID_6818
atagccgcttggcagtaggccacacttctctttgtacttgctctttcttgctcctttctttgttctttggatccggtcgactccctcctctcttcttctattgaacaccagtgacaaccggtggtcggacttggccggcaagacaaggacgggccccacatgtcgtatcgctggcgagcgcatccttgcgggcgggtgcgtcaccatcggcagggcactcatgatggtcccacaatggtgaggtgagaactccggccatcttggtcgtgtctgtgaactcactcccgaattacaaccacaatgactcgattcccttttctatgtgaatgaatgtatcagatgatatctaatgtaaagttgggatcaaagtcatggggttttagcgcgtaaatccaggcctc

SEQ ID NO: 21222 - DNA, 565 bp, Zea mays
  misc_feature (63)..(63): n is a, c, g, or t
  misc_feature (419)..(419): n is a, c, g, or t
  misc_feature (432)..(432): n is a, c, g, or t
  Coding DNA Sequence Number=SeqID_6819
tcggctcgagcttctcggatcgagactagggttagggtttcgtcactcccgccccgattcgancaggtcgagcttggccccagggtttccatgctccggccccgcatcgaaccaggacgcctcggcctcgggcgcgccattgccgccggcaacatcgtggcgcacttccctgacatgggcgccgccctctgcttcccagcctcgatcactcctccgcgcccccgcctcgggcttcctcgcaaccgtctccaacgcccagcccccggcgcagccgcctacaccaactttcaccgcgtcttctcgcgcgtcctcagcgcctacccggaccaccgctcggagctgtctgtttctctccggggtctcctccacgaccgtcccgacgactccgctccctggtccagttctctcggcttcaacgncttctcgcccggnaccgccaagccgcttgccctctcgcccctgtcgtttccgagctcttcacgccaacaagccgggaggaagaccgaaaccctcggtgagggcggcctcagctacataagaatttgaagaacgtctgcccctctca

SEQ ID NO: 21223 - DNA, 588 bp, Zea mays
  misc_feature (154)..(154): n is a, c, g, or t
  misc_feature (167)..(167): n is a, c, g, or t
  misc_feature (523)..(523): n is a, c, g, or t
  Coding DNA Sequence Number=SeqID_6820
ggtcaggttgcgtgcgcacgtgagaggggcagacgttcttcaaattcttatgtagctgaggccgccctcaccgagggtttcggtcttcctcccggcttgttggcgtgaagagctcggaaacgacaggggcgagagggcaagcggcttggcggtnccgggcgagaagncgttgaagccgagagaactggaccagggagcggagtcgtcgggacggtcgtggaggagaccccggagagaaacagacagctccgagcggtggtccgggtaggcgctgaggacgcgcgagaagacgcggtgaaagttggtgtaggcggctgcgccgggggctgggcgttggagacggttgcgaggaagcccgaggcgggggcgcggaggagtgatcgaggctgggaagcagagggcggcgcccatgtcagggaagtgcgccacgatgttgccggcggcaatggcgcgcccgaggccgaggcgtcctggttcgatgcggggccggagcatggaaaccctggggccaagctcgacctgntcgaatcggggcgggagtgacgaaaccctaaccctagtctcgatccgagaagctcgagccgaatt

SEQ ID NO: 21224 - DNA, 456 bp, Zea mays
  misc_feature (238)..(238): n is a, c, g, or t
  misc_feature (245)..(245): n is a, c, g, or t
  misc_feature (272)..(273): n is a, c, g, or t
  Coding DNA Sequence Number=SeqID_6821
tttggatgagggtaccgttttgacaacaatgcccccggagtcatcatctcagaacccaggcgtgcaaatagcagttttccgccatgtggtctctggaatattattacacaataccatatatgaagttgttcccctttctagcaagttagcagttttggacactcagctacctgttaaacaggcatttaaaataatgcatgacgagggtcttgctctggttcctttttgggatgaccancaggganccataacaggcatgctcactgcattannttttgtattaatcttgagaaagttgcagagaaacattcaagttattggcaacgaagagcccatttctgcttggaaagaagcaaagctacagttctatggtgggcctgatggtgctgtcatgcagagaacgccattaatccatacggtacacacaggcaacattgatctgagggccaagaaact

SEQ ID NO: 21225 - DNA, 76 bp, Zea mays
  Coding DNA Sequence Number=SeqID_6822
aacggtcctgccaacgagcacctccatcaccaggcgatggagctgttccccgacgggccttcgtgcggctgcagag

SEQ ID NO: 21226 - DNA, 291 bp, Zea mays
  Coding DNA Sequence Number=SeqID_6823
gacgaggacgaggtctcatccgtcaccttggcgcgaggggagaggaagcaggaggccgctcctgctcctgcttcctctgccgtgctagctgtggaggcgcccagggagaaggatcaggatggggagagggtggagaaggagaagagggacaaggagagggaaatgcagaaggagcgggagagggtggatgaggtcggctacatgagcggaggatggaagagtgtggatggaacgctgaattgtggatattcaagttttagaggaaaaagggcaagcaacggcgacgtctat

SEQ ID NO: 21227 - DNA, 435 bp, Zea mays
  misc_feature (181)..(181): n is a, c, g, or t
  misc_feature (262)..(262): n is a, c, g, or t
  misc_feature (282)..(282): n is a, c, g, or t
  misc_feature (315)..(315): n is a, c, g, or t
  misc_feature (326)..(326): n is a, c, g, or t
  misc_feature (335)..(335): n is a, c, g, or t
  misc_feature (340)..(340): n is a, c, g, or t
  misc_feature (379)..(379): n is a, c, g, or t
  Coding DNA Sequence Number=SeqID_6824
tacattgcacgtcactattccatagttgacaactaatataaaaatacaatacacccttcggtgaagatcattcccatcccccatgcaatgtatttttacttctccaatgagagcaacagaataccttgctcatgcattaactgcgccttgtaatctgtctaagtctgtctggtccacacanaagtcatactccacgagtccaccaacttttggtagtactcaggctccttatctatcattgcttgaagcgggggtccaatanccttgttgtaggccttggtntcccatccccgtgaacgtgatcctatgctcctnaggtgcatcgngatcttggngttgngtacaatggcagaggacgaatttttttttggtatggctntacacaactttgattttgctttgcttactgttacagctcggaaggcacaggcgcgt

SEQ ID NO: 21228 - DNA, 503 bp, Zea mays
  misc_feature (157)..(162): n is a, c, g, or t
  misc_feature (165)..(170): n is a, c, g, or t
  misc_feature (174)..(174): n is a, c, g, or t
  misc_feature (181)..(181): n is a, c, g, or t
  misc_feature (183)..(189): n is a, c, g, or t
  misc_feature (191)..(191): n is a, c, g, or t
  misc_feature (195)..(197): n is a, c, g, or t
  misc_feature (201)..(203): n is a, c, g, or t
  misc_feature (210)..(213): n is a, c, g, or t
  misc_feature (245)..(247): n is a, c, g, or t
  misc_feature (255)..(260): n is a, c, g, or t
  misc_feature (262)..(265): n is a, c, g, or t
  misc_feature (294)..(294): n is a, c, g, or t
  misc_feature (296)..(298): n is a, c, g, or t
  misc_feature (300)..(302): n is a, c, g, or t
  misc_feature (343)..(345): n is a, c, g, or t
  misc_feature (347)..(349): n is a, c, g, or t
  Coding DNA Sequence Number=SeqID_6825
cccacgtcctgctaaataaaacttgtgtgggcgggcggggggaccaacaccccgtgtccttttttctcctcccccccctttacgaaccgccgccgccaaatattatcatccccaaccctccccaacccccttgcatataaagctgaaaatatgcttnnnnnntannnnnncgancccatgntnnnnnnntngagnnncgannncataaannnnctctcgttatcgtgttttagtgttctgtttannncatggtcnnnnnncnnnntgtcacatagttctggatgtaaagataantnnncnnncatgcccgagagaagttttttttggggggtgttaacacacnnncnnnctgaattggccatgctaaggaaaatgatagaagtgcaaagagaagtatatgtctttttctttttctgaaagcccagatcgtttggctctagccttgatgtatgcagaacaagtgattgtaatggattctgagtatcctcatcgtctaaaaaaaa

SEQ ID NO: 21229 - DNA, 131 bp, Zea mays
  Coding DNA Sequence Number=SeqID_6826
gaagatcaaccaaagtaatgtgacaaacaccagtaagggtcaacctgtagccccaaaaggatgaaacagctgaccccgtgggttgccaaacaatactggtctacctgaatttacatagattctgaatttct

SEQ ID NO: 21230 - DNA, 384 bp, Zea mays
  Coding DNA Sequence Number=SeqID_6827
tcaaaggcagtgtaccgaggcacctcccattggaatggcgagtgctgatctgaatgggagatatttctattactgagattcagactccaatacaatataggtgggtgtaccaatttacttagaaggaacaaaagctatggaagaggcaaaaatcaagaatattgaaagctgactgtaccagaaggttctttttgcaacctcaatttgagatttaaggtcggattaccaccagaggcagtatacaatatcataatcgaggcgggcaacaagggcttgtggatgctggacatcctcaagaagttgctgatggcccccaacatcgccaccaaggtcgtgcgcaccctcgtggcaagcgggcttctcaaagaggtcagcgacgtgcgc

SEQ ID NO: 21231 - DNA, 529 bp, Zea mays
  Coding DNA Sequence Number=SeqID_6828
atgaagatcttcctgctgcggtggcgcacgtcgctgacctctttgagaagcccgcttgccacgagggtgcgcacgaccttggtggcgatgttgggggccatcagcaacttcttgaggatgtccagcatccacaagcccttgttgcccgcctcgattatgatattgtatactgcctctggtggtaatccgaccttaaatctcaaattgaggttgcaaaaagaaccttctggtacagtcagctttcaatattcttgatttttgcctcttccatagcttttgttccttctaagtaaattggtacacccacctatattgtattggagtctgaatctcagtaatagaaatatctcccattcagatcagcactcgccattccaatgggaggtgcctcggtacactgcctttgactcaattaccctctttgcaaaagaggacaaacagaatgatgtcgtgtggatctccgagttgtagaacttaaggggtccttttgatttcgtagaatgttcatcctcctcggtgttgaaaacag

SEQ ID NO: 21232 - DNA, 464 bp, Zea mays
  Coding DNA Sequence Number=SeqID_6829
agctacactgcagcacacagcagatacctacgacgccagctcggagcagatagagcacctagctagcgctagctagttagtcgcaacgcaagagtgtgtgacttgtgagaaccgagtgaacgaccatggcggcgtctctgcaaggcccatacaccgggggcagcggcttgggcgggagggtcgtccacgccaggagcggtgatcgccggtcagctgcggcggtgaagcggctgctgtcgaggttgacgcgctcttggagaagacgcacggcgcggccgaggcgaaccgcggtgcggttcaggtatgacctgcatagctactaccagaacttcgacgacggcactgcctcctgcgcccaccaccgcttgtagctcattgactcattgtacaggaccgctcactcgtagagaatagctataaaactatggtggagttaaatttttacatgtggtttcagttatcaa

SEQ ID NO: 21233 - DNA, 398 bp, Zea mays
  Coding DNA Sequence Number=SeqID_6830
aaaattcattcgcagccacaaacaaaccctaaacccctaaaccgccgccgccgccgccgccgccgccgccatggccaaaaagaaatctgccaccgtcaatggcaacggtaaccacgccgccgcagaggaagtgccgccggcgaaggccgcggaggaccggaaggcagagcagctgaaggcgctgaacaccatgctcctcaaggaggcgacggagcggcgcggtcaggtggcggcgctcacagcgcgccttgacgagctctccgccgacgacgtcgcgctgtccgccgccgagcgcgtggtggcgcaggccgccctcgccgcgccactccgcgcggccgccgacgaggtcgccgcgctccgtgcctgcctcgccgccgtccagggttcgctccgggacg

SEQ ID NO: 21234 - DNA, 413 bp, Zea mays
  Coding DNA Sequence Number=SeqID_6831
tccgcaacgtcgtgcttgtggcgcggtcgtcttcccgcctcgcggcttctctgctccagtcaccccgccttggcccccgacgcttcctccgccgccccgccctccatcgtcgccggcctcctcgactacctcaacgaatcatggacgcagttccacgccacagctgaggccaagaggcagctgctcgacgcgggcttcaagctcctcagcgagagtgatgactgggacctgcagcccggcggccgctacttcttcacgcgcaacatgtcctgcttggtcgcctttgccatcggggaaaacacagtgaatactgatgggttcaagcctaacctagagactcatcttgttccacttcttgccacaaaacatgaagacacacctacaaattctgatgaaaaaagctctaactctac

SEQ ID NO: 21235 - DNA, 437 bp, Zea mays
  misc_feature (41)..(41): n is a, c, g, or t
  misc_feature (398)..(398): n is a, c, g, or t
  Coding DNA Sequence Number=SeqID_6832
aagggcaggaaaactctgtcccgcgcgctgccgcgctgganagaggtacaggcgaagcttgccggacaggttggcgaggacagcttccggtcggcggtcgagctgatgaagggaatcgtgcgttcgggcgaggcgctgctcgatcattcgatttcgtaggaggacccgatgcccgtccgttggatcgatccgtcgccggtgctgcgtgtcgagcgcttcggcagctttgacgaatttcgtccaaacgatgttctcggcggaatgacaagcacgccgctgggttcctcggcgatcgcggtttcgcggagcatactggcgcttccggactgccttctcggctgcagcgatcattcgcccggcggatggagggagagctcggagccgatcgcggggacggnctcgtcgttccgctggtttcacgcaaccttaatgcaccg

SEQ ID NO: 21236 - DNA, 538 bp, Zea mays
  misc_feature (511)..(511): n is a, c, g, or t
  Coding DNA Sequence Number=SeqID_6833
gacatggtcgaatcctcgatcgatacattacgccgcgaaggtgtcagctcgatcaatctcgacctcgtctatggcttgccccgccagacagttcatggactgacgagaacgatcgaacagatcgtcgatctcgcacccgaccgcatagcgctttttggctacgctcatgttccgtggatgatgccgaggcagaatctcatcaaggatgaagaccttccggatgcgcggcagcgttaccggcaacagctcgtggccgccgacaagctggaggaagcaggttacgtccatattgggctcgatcatttcactctgcccaccgacgaccttgccattatggcggataacggcctgctcagacggaatttccaaggctatacgagcgatcaggcggcgaccgtgatcggtcttggcgcctcctcgatcggtagcttcgaccagggttttgtccagaatacgccgaataccggcaaatggcgcgacgccatcggcaaagggcagttcgcaacctgtngcggcgtggtgcttaccgacgaagacc

SEQ ID NO: 21237 - DNA, 561 bp, Zea mays
  Coding DNA Sequence Number=SeqID_6834
gagattcagcagcagcttaccaacgaggtcaagctcttcaaccgctggagcttcgatgacgtttcggtcacagacattagtcttgttgactacattggtgttcagcctgctaaacacgcgacctttgtcccccacactgctggaagatactctgtgaagaggttcaggaaggctcagtgcccaatcgttgagaggctcacaaactctctcatgatgcacggaaggaacaacggtaagaagctgatggctgtgaggatcatcaagcacgccatggagatcatccatctcttgactgacgccaaccctattcaggttatcattgatgccattgttaacagtggtccacgtgaagatgctaccaggattggatctgctggtgtggttaggaggcaggctgttgatatctctcctctaagacgtgtgaaccaagccatcttcttgctcaccactggtgcacgtgaagctgcgtttagaaacatcaagacaatcgctgagtgtcttgctgatgagctcatcatccctgctagggatctcccaacagctatgcctccaaaagaagtg

SEQ ID NO: 21238 - DNA, 457 bp, Zea mays
  Coding DNA Sequence Number=SeqID_6835
cggctgtaaccggagctgtgctcagtgggcttggttcttcgttcctctccggaggcaggaggagtatcaccgctttgggaaccggcgtaggcactggagctgcgagagttggccggaaaactctgattgtcgccgctgctgctgctcagccgaagaaatcgtggatccccgccgttaaaggtggcggcaacttcctcgaccctgaatggctcgatggctcgctacccggagatttcgggttcgacccgttgggtttgggaaaggacccggcttttcttaaatggtacagagaagcagagctgatccacggccgatgggcgatggcagcggttcttgggatctttcgttggccaggcctgggagcggcgtgccatggttcgaagcccgagctgatccacgtgccatcgcacccttctcttttcggatcgcttctccggacccagttgcttctcatggg

SEQ ID NO: 21239 - DNA, 251 bp, Zea mays
  Coding DNA Sequence Number=SeqID_6836
gatctcggtcagggcaccacggcgacggcgacggtctttcacaacgggttcttcaatttgagcgacacgctgagcgtgacgccgcccaccgtggcgggatgcccgccggggacgttcccgagcgactcgctcggaggcgatcgcgagacgcagcccaactcgaatccacgctcgtgcaagccgccattcgatgccggcaagctcggcggcgacggaggcggagccaaccaaggccaacagcaggcgcaggc

SEQ ID NO: 21240 - DNA, 321 bp, Zea mays
  Coding DNA Sequence Number=SeqID_6837
gtattccggtggtgaccctggtcaccgatctgccccacagcgagcgcatcggctacgtaggcatggataaccgcaccgccggacaaaccgccgcgtaccttctgtcccgctggctgtcaccccaaccccaggaagtggcggtggtgattggcagtgaattgttccggggcgaggaagaacgtgaaatgggttttcgcatgtggctgcgcggccgtgcgacgcacctgcgggtactggatatcagcggtgggtacggcgtgtatgaccgaacgtttgcccgggtcaccgatgcgttgaagcagcatcccgaactgaaggcgg

SEQ ID NO: 21241 - DNA, 379 bp, Zea mays
  misc_feature (259)..(259): n is a, c, g, or t
  misc_feature (347)..(347): n is a, c, g, or t
  Coding DNA Sequence Number=SeqID_6838
tactctactgcgcagtggaacagtccgagtaacagccagcgacagcctggctcaaactcatcgtttcaattacctccgctgcgaacttcaacgcctccacaaccatcagggcttggcttacgtcccgccatgtcgcgtcagggaagcttcacagctgaggttatgcagatacctgctgaaaggaagctgtccactctgatgaaggtgtgccgcaacttgccaagcagatccggtcgggggcaagtcattgccgtcgaangccccatcgatggacctgcgctgggacagatcaagtcacatcgttgagcaagccttgcaaacttgccgaacactgcgtacgaagctgnctggagataatcagcgttatgcgagaagcgat

SEQ ID NO: 21242 - DNA, 344 bp, Zea mays
  misc_feature (73)..(73): n is a, c, g, or t
  misc_feature (260)..(260): n is a, c, g, or t
  Coding DNA Sequence Number=SeqID_6839
atcaaatcctagtgctcccatctgttccacggtaagtgcagcaaagagggaaaaatagggcgaaacaaaaggnacaatcctcaccggctattgtggcgcagagagtcccatcgaaggtcaggtgtgagccacggcaagaaattggctccgaggaagaattatgcccgcatccctcacctgtttacttaggcgcggtaattgtacatcccagggaactccgtgaagctcacgagccctctcgtacgccgaacgacatcttnggcgagaatccacggcagtgttgatttctgaatcccttctctacttgagccgctactcctttcttctacttgcttgcccagatg

SEQ ID NO: 21243 - DNA, 350 bp, Zea mays
  misc_feature (154)..(154): n is a, c, g, or t
  misc_feature (217)..(217): n is a, c, g, or t
  Coding DNA Sequence Number=SeqID_6840
catcaggtgcagttttatataaattattatttatgtaggggctcccttggtttacatggttttccagtttagatagcaacgtccatagaaaagatgcttttgttttcagctggcattaatagtaaattgcagagctgagatccttcatgcggcnttgtaaaaagtaaaagagatgaaaatacatgtataattttgtcataactttgaggtggctacnatgtctgtttcatatagtttgctagtgtgtagtagtagcaattaagagcttcacaaaatcgatcgctgtaaagtttttcaaacaccatctccgttttgtgcaatacatgaaccaagatatgtcaaagcttcta

SEQ ID NO: 21244 - DNA, 360 bp, Zea mays
  misc_feature (26)..(26): n is a, c, g, or t
  misc_feature (59)..(59): n is a, c, g, or t
  misc_feature (69)..(69): n is a, c, g, or t
  misc_feature (79)..(79): n is a, c, g, or t
  misc_feature (104)..(104): n is a, c, g, or t
  misc_feature (207)..(207): n is a, c, g, or t
  misc_feature (259)..(259): n is a, c, g, or t
  Coding DNA Sequence Number=SeqID_6841
gagggccagatcttggcagtcttctnccccctataatgttaggagtgggcccccactancccagatcanccccaaaaanccagtggcccgttaactcccaaccnctgcccatggagtaactttggcggcttgggcttggccccaatataggagcaccaatccaaacccccaccccctgctcccatcacatctcacaaccgtttgatncctagggaacacaaaaacagtttcaatataatcagattatttataacaaganctctgtgcagaaaaaaatgtcaaactagacatccattggatcctcttttagaagtgttttttatgctaagaaaaacactaaaattagtccagtgaagctta

SEQ ID NO: 21245 - DNA, 270 bp, Zea mays
  misc_feature (85)..(85): n is a, c, g, or t
  Coding DNA Sequence Number=SeqID_6842
tggcccgcccggtagaaatttccagggggggggggggctgggaacaaaatccaccccccccgagggaccttggggccaaggaatntccttagcccagccggggccattttccgggaccggtccaggtgattagggccatccccaaaagctaaaggggaccaaagaaggaaatatgaaccttgttcggaattcccttatcgttttatggtttgagaaaccagtttcaaggacccttcccaagaaatggctggaaaatgattgaaacctatg

SEQ ID NO: 21246 - DNA, 503 bp, Zea mays
  misc_feature (26)..(26): n is a, c, g, or t
  misc_feature (33)..(33): n is a, c, g, or t
  misc_feature (46)..(46): n is a, c, g, or t
  misc_feature (48)..(48): n is a, c, g, or t
  misc_feature (57)..(57): n is a, c, g, or t
  misc_feature (59)..(59): n is a, c, g, or t
  misc_feature (62)..(62): n is a, c, g, or t
  misc_feature (69)..(70): n is a, c, g, or t
  misc_feature (73)..(73): n is a, c, g, or t
  misc_feature (82)..(82): n is a, c, g, or t
  misc_feature (93)..(93): n is a, c, g, or t
  misc_feature (98)..(98): n is a, c, g, or t
  misc_feature (121)..(121): n is a, c, g, or t
  misc_feature (127)..(127): n is a, c, g, or t
  misc_feature (135)..(137): n is a, c, g, or t
  misc_feature (157)..(157): n is a, c, g, or t
  misc_feature (163)..(163): n is a, c, g, or t
  misc_feature (168)..(169): n is a, c, g, or t
  misc_feature (178)..(178): n is a, c, g, or t
  misc_feature (189)..(190): n is a, c, g, or t
  misc_feature (192)..(192): n is a, c, g, or t
  misc_feature (196)..(196): n is a, c, g, or t
  misc_feature (204)..(204): n is a, c, g, or t
  misc_feature (206)..(206): n is a, c, g, or t
  misc_feature (209)..(209): n is a, c, g, or t
  misc_feature (217)..(217): n is a, c, g, or t
  misc_feature (220)..(220): n is a, c, g, or t
  misc_feature (230)..(230): n is a, c, g, or t
  misc_feature (232)..(233): n is a, c, g, or t
  misc_feature (240)..(240): n is a, c, g, or t
  misc_feature (249)..(249): n is a, c, g, or t
  misc_feature (278)..(278): n is a, c, g, or t
  misc_feature (281)..(281): n is a, c, g, or t
  misc_feature (291)..(291): n is a, c, g, or t
  misc_feature (296)..(297): n is a, c, g, or t
  misc_feature (300)..(300): n is a, c, g, or t
  misc_feature (304)..(304): n is a, c, g, or t
  misc_feature (311)..(311): n is a, c, g, or t
  misc_feature (388)..(388): n is a, c, g, or t
  misc_feature (424)..(424): n is a, c, g, or t
  misc_feature (450)..(450): n is a, c, g, or t
  misc_feature (459)..(460): n is a, c, g, or t
  Coding DNA Sequence Number=SeqID_6843
atgccaggacgcctgcgaatgaccgngatccgngcgccctgctccngnatgatgatncnganaaccaannccnccactgggnctgctgaagancgctncctcctcaaggcaccactctcancgcctngcttgtgnnnagtgatgattcataccaacncagggnggcanngccctgctnccttgctgcanncnccangatatctntnccnaaaatggncgncaagcatggncnnatcttgnagataaaanaaacaacataaaacttgatttgactgacnttnttatgcccgnggaanntgnaatntctctgntgaggataatcatgagccacaatattctcattgaacattccaaatgattatcatgatcttcagagacgatagctacngagtacatgccttttatatgtgcagccattaagggngcgtgtgtgacctcttttagtgcaancactatgcnncaagcacatgaacttggggaaccctcttggatattatgtactg

SEQ ID NO: 21247 - DNA, 580 bp, Zea mays
  Coding DNA Sequence Number=SeqID_6844
agaaacccttagaagctccagagaggcgagttccgtgtttgttttctctttgttggctcctcctcctcgtgatctcaggcgaaaatggcgtcgtttgatgaagcaccaccaggaaactcaaaggccggagagaagatcttcaggaccaagtgtgctcagtgtcacaccgttgacaaaggcgcaggtcacaaacaaggtccgaacctaaacgggctgtttggaaggcagtctggaacaacagctggttactcttactctgctgctaacaagaacaaagctgtggaatgggaagagaagaccttgtacgattacttgctcaaccccaagaagtacattcctggaacgaagatggtcttccctgggctcaagaagcctcaagaccgtgctgatctcatcgcctacttgaaggaatctactgcttagttaatcaatcagtggtcatgacttttgagtctctcagatcagatattcttttgacaaataaaatctccaaacttttggtttttgccttttttcctttttaaaggccctcatcttcaaataacggttttgggggagattcgggcttttgagttccaat

SEQ ID NO: 21248 - DNA, 327 bp, Zea mays
  misc_feature (43)..(43): n is a, c, g, or t
  misc_feature (48)..(48): n is a, c, g, or t
  misc_feature (82)..(82): n is a, c, g, or t
  misc_feature (106)..(106): n is a, c, g, or t
  misc_feature (123)..(123): n is a, c, g, or t
  misc_feature (126)..(126): n is a, c, g, or t
  misc_feature (138)..(138): n is a, c, g, or t
  misc_feature (141)..(141): n is a, c, g, or t
  misc_feature (149)..(149): n is a, c, g, or t
  misc_feature (175)..(175): n is a, c, g, or t
  misc_feature (177)..(177): n is a, c, g, or t
  misc_feature (197)..(197): n is a, c, g, or t
  misc_feature (205)..(205): n is a, c, g, or t
  misc_feature (222)..(222): n is a, c, g, or t
  misc_feature (226)..(226): n is a, c, g, or t
  misc_feature (263)..(263): n is a, c, g, or t
  misc_feature (270)..(270): n is a, c, g, or t
  misc_feature (277)..(277): n is a, c, g, or t
  misc_feature (281)..(281): n is a, c, g, or t
  misc_feature (284)..(284): n is a, c, g, or t
  misc_feature (288)..(288): n is a, c, g, or t
  misc_feature (290)..(290): n is a, c, g, or t
  misc_feature (297)..(297): n is a, c, g, or t
  Coding DNA Sequence Number=SeqID_6845
atatataccccctggcctgcgcgcagggggaagtttatgaaanaaagnatctgctttggggacttctatgggctaggcctgntattgctaaagcaatggttgatgnttcccaaggaaattggnggnggatgcagttgnccntggttgcnctggaaaagggaaaagatcagggtcncntttgagcttacattctatgntttaaaanccggaacttaaaggggngggncccttggaggggaggggggatatttcaggacgggganatgcttnttgaatntgcnaanaaananaaagggncctgttccaggtttcaaaaaaatcaatata

SEQ ID NO: 21249 - DNA, 130 bp, Zea mays
  misc_feature (71)..(71): n is a, c, g, or t
  misc_feature (77)..(77): n is a, c, g, or t
  misc_feature (89)..(89): n is a, c, g, or t
  Coding DNA Sequence Number=SeqID_6846
attttcgactgtcccagacaacactcaccgatagcgaagtaagcgccgccgacgtttcatagagcacgagngatccnagctagtactancgtcgcacctcggctgtcctatctattttcaggcgacgata

SEQ ID NO: 21250 - DNA, 170 bp, Zea mays
  misc_feature (32)..(32): n is a, c, g, or t
  misc_feature (35)..(35): n is a, c, g, or t
  misc_feature (42)..(42): n is a, c, g, or t
  misc_feature (47)..(50): n is a, c, g, or t
  misc_feature (60)..(60): n is a, c, g, or t
  misc_feature (63)..(63): n is a, c, g, or t
  misc_feature (65)..(65): n is a, c, g, or t
  misc_feature (73)..(73): n is a, c, g, or t
  misc_feature (75)..(76): n is a, c, g, or t
  misc_feature (80)..(81): n is a, c, g, or t
  misc_feature (86)..(86): n is a, c, g, or t
  misc_feature (93)..(93): n is a, c, g, or t
  misc_feature (142)..(142): n is a, c, g, or t
  Coding DNA Sequence Number=SeqID_6847
cggtcgcatacagagaatgagattgatgctcnccnagattcntggannnntggctcttcnatngnacaaaacnannagtnncgtangaactancagcatgtgaaccttatcctggaataccgtgatgaatatcgaggctgtnactgatgaatatctgtgatgtcatcctg

SEQ ID NO: 21251 - DNA, 233 bp, Zea mays
  misc_feature (33)..(33): n is a, c, g, or t
  misc_feature (36)..(36): n is a, c, g, or t
  misc_feature (51)..(51): n is a, c, g, or t
  misc_feature (120)..(120): n is a, c, g, or t
  misc_feature (148)..(148): n is a, c, g, or t
  Coding DNA Sequence Number=SeqID_6848
gcctggcagggaaatttccgggccacccagggnagnaggctccacctaagnttcccccccccccccccccctcctttcccttttcacccttcccaaaaatttccggcccggaatggaagncttggaatttggcttaaacggcttggcntttaacattccggggaaacaacccctggggaaaaaaagggtaattcccttttggccggggccaggaatggaaatccaaacctggg

SEQ ID NO: 21252 - DNA, 481 bp, Zea mays
  misc_feature (121)..(121): n is a, c, g, or t
  misc_feature (146)..(146): n is a, c, g, or t
  misc_feature (316)..(316): n is a, c, g, or t
  misc_feature (344)..(344): n is a, c, g, or t
  misc_feature (367)..(367): n is a, c, g, or t
  misc_feature (371)..(371): n is a, c, g, or t
  misc_feature (376)..(376): n is a, c, g, or t
  Coding DNA Sequence Number=SeqID_6849
gttagcgctctgttacattgtttgtgtaagtgcgatatcgattagtgattctcgtatgtcacattagttttaaattaattatttgtatgttacgaattctgtgcaacacattatgcattanaaatatagttttgtgtgttaatggngcaaatcttccgaagctcataattttccatttgtatctccgttttccacggttctttttctcacatgaccatagaagcaagctttatgtcacgttgcatgttttaatggcttactcttttggatggtctatttatggaggatacatatcccctaggtcctcataaacacnaaaatgtgtcatggtccgcctgacaggncttctactgggtcgtcctatggnatangccancaaggtgtaccctggctgagcgacgacgaacaccgacgcccggtttaagcgccatgggagcacgaatatatcaggtggagtagttgggcacacccgacaggttaa

SEQ ID NO: 21253 - DNA, 115 bp, Zea mays
  Coding DNA Sequence Number=SeqID_6850
ccacgcgcacgaaaatactcctagtactaattcgagagccagtgagtctagggtcgagtcccggctggggatgacgagccctcgccggcgatggacttgccgctagccctcgcag

SEQ ID NO: 21254 - DNA, 160 bp, Zea mays
  misc_feature (118)..(118): n is a, c, g, or t
  misc_feature (135)..(135): n is a, c, g, or t
  Coding DNA Sequence Number=SeqID_6851
aagcagccactcactctcaggttatcactgacacagcaaccaagctcgggacaagggggaaatggaagcccgctccggtctcggcgaagcccaccctccgcgtggtcgctctcagcgnctccctccgcagcaaantcgtggtaaccacggcctcatccgc

SEQ ID NO: 21255 - DNA, 399 bp, Zea mays
  Coding DNA Sequence Number=SeqID_6852
atatcacgccgtcaagcgcacgtacgtgaagcaggcgtgaaggcaagtgaaggcggtggcggcgacgcgagatttcccctccggcatcgatctcttccggcggccaccttctccccggtattcttattcctcctgtctcttctatcgcaactaggatctcctccggcatcgatctcctcaagcatttagggttcttgtttcttgcgtcgatgtcgtcgcggagttctatcaccaccgggagcaactccatgacttcaatcggtcgtgacctgaccctcaactaactcctccggctatctcggtccgactacggctcggtggcctccctcagccgggacttccgctccatggtccgcaacggggagatctactgcctgcgacccatatcgggagcgctag

SEQ ID NO: 21256 - DNA, 292 bp, Zea mays
  misc_feature (31)..(31): n is a, c, g, or t
  misc_feature (33)..(33): n is a, c, g, or t
  misc_feature (50)..(50): n is a, c, g, or t
  misc_feature (61)..(61): n is a, c, g, or t
  misc_feature (64)..(64): n is a, c, g, or t
  misc_feature (72)..(73): n is a, c, g, or t
  misc_feature (78)..(78): n is a, c, g, or t
  misc_feature (88)..(88): n is a, c, g, or t
  misc_feature (98)..(98): n is a, c, g, or t
  misc_feature (107)..(108): n is a, c, g, or t
  misc_feature (132)..(132): n is a, c, g, or t
  misc_feature (190)..(190): n is a, c, g, or t
  misc_feature (200)..(200): n is a, c, g, or t
  misc_feature (202)..(202): n is a, c, g, or t
  misc_feature (212)..(213): n is a, c, g, or t
  misc_feature (216)..(216): n is a, c, g, or t
  misc_feature (218)..(218): n is a, c, g, or t
  misc_feature (223)..(225): n is a, c, g, or t
  misc_feature (227)..(227): n is a, c, g, or t
  misc_feature (237)..(237): n is a, c, g, or t
  Coding DNA Sequence Number=SeqID_6853
agaacgaagctgctgcagatcacggccgaangnggagtgctatcgcgccnacaaccttccnggngatgtggnngccgntgatcatcgngatggaccgngagcagcanntcaactacctctagctgcagcagnagacgctttctggtcggggagaactccgccgccgccgtttgaccatgtagatagatcngtgcatcgancntttcgacccnnctntncatcnnnanaggtatctgntactgtcaagttcatgattcgagttactatgatgttcatcattcgagtggagctg

SEQ ID NO: 21257 - DNA, 400 bp, Zea mays
  misc_feature (128)..(129): n is a, c, g, or t
  misc_feature (131)..(131): n is a, c, g, or t
  Coding DNA Sequence Number=SeqID_6854
ttcgtggaatcagcttcatcctttcttttatacttattatcctctcgctgctgtgtgcatttgcttcatctcaatcgttgaaaatgtcgaaagaaggagaaccggtgatcggagtaccgtattacgcnngncagaacccgtaccaggcggggatcgtgccgccgaacgctatctatggagatccgatgggagctccgatccagcaaacgttttatcgggatactcctgctcctttcaattgcctctattgcggcaatactggtctcacccatatcagatcaaaaccgggtgtagctgctgttgtggcttgcatgactccgtttatgcttggattctgttttctctgcccttcgatggattgcctttggaacaaacagcatcattgccctcagtgtgggaa

SEQ ID NO: 21258 - DNA, 364 bp, Zea mays
  Coding DNA Sequence Number=SeqID_6855
gggttccagtttagctctcgccgtagcgcttctcctggtgacggtggcaaacattccggtggcggagggagtgacatgctcgccgacggaactgacttcatgttcgccggcgtttatgtcagcttcgccgccgtcagcaacgtgctgcgccaagctgagagagcagaagccatgcctttgtggatatctgaggaaccctaccctcagccagtacgttaactctccaaacgccaagaaagttgccagcagttgcaatgttgcaaccccgaaatgttaatcatgattaattagtgacaagtttcgctgatcatgagtgcttaattactagttaaaatgggtctggtcttcgacactactgtttaga

SEQ ID NO: 21259 - DNA, 317 bp, Zea mays
  Coding DNA Sequence Number=SeqID_6856
ggctcccgcggtggatttgccagtccttccgttatgaactcttcaccggaaaaactaatttcacttctaggttggaaaagcatctcctcaccactcgaaacaagtggcacccccacctcaccccacggacctggggggtgtaattcccttccccgaactaacggatcggcgttggattactccgatcgcctcaacaaactactcgaggatacggttcctctactcttgtggctgtgacatacaaatcttttcgatacaactgaaaaagcacccgcatcaaaattatgcgctcgagtaccacgtaacccgttgcgctc

SEQ ID NO: 21260 - DNA, 484 bp, Zea mays
  misc_feature (278)..(278): n is a, c, g, or t
  Coding DNA Sequence Number=SeqID_6857
agataagtgtttcccagagagaagagagagagagagagacaagtctcaatggcgtctgtagcttcttcaaccactctcatctcctcctccgctagtgttctcccagccaccaagtcttcgcttcttccatctccctccctctctttccttccaaccctctcctctccttccccatccgcttctctccggctcgctcgtccctctcccctcacctcaatccgctcctcttctcgccggagcttcgctgtcaaggcccaaaccgatgatcttccattggnttggaaacagggcgcctgattttgaggcagaggctgtggtcgatcaggggtgtcatcagggtcaagctctctgagtacattgggaagaagtatgtgattctcttttttctacccctgggactccactttcgtctgcccaacagagattaactgccttcagggggccgggatgtgcagaatttgggaagctgaacaccccaagaggt

SEQ ID NO: 21261 - DNA, 554 bp, Zea mays
  Coding DNA Sequence Number=SeqID_6858
ggaacgtggagctcacatactaaacaagatccgatctaaccccggttctcgtcggaatctcttcacggttaaccggcgttcctcatccaccttttcgttatggaagacggcaagggaaaggagcttgttggtgatactcctccttcagttgaacaaaatgataacaagaaggtttcaggtgaaacggagattcataaggagccatcacgtgagagtgaggaaaatgcgatcaagaagaagtatggaggattgttgccaaagaagattcctttgatatccaaggaccatgagcgcgcgttttttgactcagctgattgggcattaggcaagcaaaaaggacagaagccaaaagggcctttggaagctctccgaccaaaactgcagccaaccccgcaccagcaaccaagagcgagacggatggctttatcttcaggcgacaacactgaagacgctgaggctgacaccaacgaacctatcgatgaccaacaagctagcgcatcagctgttgacaatgccaaggatgatggaggcatcgatgatgctgacgccaaaga

SEQ ID NO: 21262 - DNA, 573 bp, Zea mays
  Coding DNA Sequence Number=SeqID_6859
acctctccagatcttgcgtcggaaaggatcgttcagagcaatgtctccggctaaagttgataccacgaagaaggccgacccaaaggccaaggccctgaaggctgcaaaggcagtgaagtctggtcaagccttcaagaagaaggacaaaaagatcaggactaaggtcaccttccacaggccaaagaccttgaccaaggctagagatcccaagtaccccaggatcagtgcaactcccaggaacaagttggaccattacggtatcctcaagtacccactcaccaccgagtctgccatgaagaaaattgaggacaacaacactcttgtcttcattgttgacattcgtgccgacaagaagaagatcaaagatgctgttaagaagatgtacgacatccagaccaagaaggttaacaccctcatcaggcctgatggaacgaagaaggcttacgttaggctcacaccggactatgatgcgttagatgttgctaacaagattggcatcatctaagtttatctacctcctgctattatatgaaaggggcttgggggtttggcccctcgagtagccaaaacggg

SEQ ID NO: 21263 - DNA, 531 bp, Zea mays
  Coding DNA Sequence Number=SeqID_6860
aaagagcaaaccttttcgaatctcaaatggctcgtaccaagcaaaccgcgagaaaatccaccggaggcaaagccccgaggaagcagctcgcaaccaaggcggcgaggaagtcggctccggccaccggaggagtgaagaagccgcacaggttccgtcccggaaccgtggcgctgagggagatcaggaagtaccagaagagcaccgagcttctgatccgcaagctccccttccagcgtcttgtccgcgagatcgctcaggacttcaaaaccgatctgaggttccagagcagcgccgtcgcggctctgcaagaggcggcggaggcgtaccttgtgggtttgttcgaggatacgaatctttgcgcgattcacgctaagagggtaacgatcatgcccaaggatattcagctcgcgaggaggatccgcggtgaaagagcttgaagactcttcgttgatgggcaaatctgtttctggggaattttagtttgtcttttagtttatgtgttcctttgttgaaagcttgggcctccgggtt

SEQ ID NO: 21264 - DNA, 518 bp, Zea mays
  misc_feature (52)..(52): n is a, c, g, or t
  misc_feature (60)..(60): n is a, c, g, or t
  misc_feature (87)..(87): n is a, c, g, or t
  misc_feature (90)..(90): n is a, c, g, or t
  misc_feature (98)..(98): n is a, c, g, or t
  misc_feature (100)..(102): n is a, c, g, or t
  misc_feature (104)..(105): n is a, c, g, or t
  misc_feature (108)..(108): n is a, c, g, or t
  misc_feature (111)..(111): n is a, c, g, or t
  misc_feature (114)..(115): n is a, c, g, or t
  misc_feature (118)..(118): n is a, c, g, or t
  misc_feature (122)..(122): n is a, c, g, or t
  misc_feature (130)..(131): n is a, c, g, or t
  misc_feature (133)..(134): n is a, c, g, or t
  misc_feature (136)..(138): n is a, c, g, or t
  misc_feature (140)..(140): n is a, c, g, or t
  misc_feature (142)..(142): n is a, c, g, or t
  misc_feature (144)..(145): n is a, c, g, or t
  misc_feature (147)..(147): n is a, c, g, or t
  misc_feature (149)..(149): n is a, c, g, or t
  misc_feature (156)..(156): n is a, c, g, or t
  misc_feature (166)..(166): n is a, c, g, or t
  misc_feature (172)..(172): n is a, c, g, or t
  misc_feature (181)..(181): n is a, c, g, or t
  misc_feature (186)..(186): n is a, c, g, or t
  misc_feature (188)..(188): n is a, c, g, or t
  misc_feature (223)..(225): n is a, c, g, or t
  misc_feature (249)..(249): n is a, c, g, or t
  misc_feature (252)..(252): n is a, c, g, or t
  misc_feature (264)..(264): n is a, c, g, or t
  misc_feature (266)..(267): n is a, c, g, or t
  misc_feature (272)..(272): n is a, c, g, or t
  misc_feature (274)..(274): n is a, c, g, or t
  misc_feature (277)..(278): n is a, c, g, or t
  misc_feature (290)..(290): n is a, c, g, or t
  misc_feature (292)..(292): n is a, c, g, or t
  misc_feature (305)..(306): n is a, c, g, or t
  misc_feature (344)..(344): n is a, c, g, or t
  misc_feature (356)..(356): n is a, c, g, or t
  misc_feature (374)..(375): n is a, c, g, or t
  misc_feature (380)..(381): n is a, c, g, or t
  misc_feature (383)..(383): n is a, c, g, or t
  misc_feature (394)..(394): n is a, c, g, or t
  misc_feature (398)..(398): n is a, c, g, or t
  misc_feature (409)..(409): n is a, c, g, or t
  misc_feature (411)..(411): n is a, c, g, or t
  misc_feature (415)..(415): n is a, c, g, or t
  misc_feature (417)..(417): n is a, c, g, or t
  misc_feature (419)..(419): n is a, c, g, or t
  misc_feature (435)..(435): n is a, c, g, or t
  misc_feature (445)..(446): n is a, c, g, or t
  misc_feature (454)..(454): n is a, c, g, or t
  misc_feature (459)..(460): n is a, c, g, or t
  misc_feature (477)..(477): n is a, c, g, or t
  misc_feature (481)..(481): n is a, c, g, or t
  Coding DNA Sequence Number=SeqID_6861
gacaagctccgccaggttgctgtgttaagtccaagcttatcacatggattcnacactatnttttttttccaggacattttctataanggngcgggcancnnntnnttncanccnngcncctncttgttgnnannannncnananncncngcccccntgaatttttnccggtncgacccccncgtcncnccacgcgtccgggctgatccggatttccgccagcnnncgcctgcggatgggagttctgccntcnccccctatttancnnaacgncnccnncggatgttgttncntctgaaaaaaggnnttagcccttcggcccccctgcccttacctgtccctgtntccccttttgtncgtgctgatacttgttcnnatttnncnagggccgcgcnccgnctgatcggatncntccngncngacgccctgctgaccntccttagcanncggcgccnttatnntccaacaatttgctggntgcnccggcgctatgatattgtcgttcctaccctggctctc

SEQ ID NO: 21265 - DNA, 505 bp, Zea mays
  misc_feature (477)..(477): n is a, c, g, or t
  Coding DNA Sequence Number=SeqID_6862
gtttcttcgtaaagttactctccagatctttctcccggatcctcttgagaccctcttctccggagaaaaagaactcttgtcttttcaatccaatgaaaccgttcttctacttctgtcacctgtttgaatccgttataacaagggtatcttgaacttgtaagtaatggacaacttaagtagattgcctgatgaactgttggtgaggatactatcgttagttccaacaaaggttgttgtatccactagcatcctctctaagcgatggaagtttctttggatgtctttgcctaaacttgagttcgttgatagagacgagtctctccttgtacttaagaactttgtcaacaagaatctgccattacacagagctccggtcattcaaagcttccttctttccttgtacgagtcaagagagaaaaacattaaacctgaggacatcagacaatgggttgagattgctgtatcccgccatctacngtgagctggacgtttcttattcttctga

SEQ ID NO: 21266 - DNA, 489 bp, Zea mays
  misc_feature (57)..(57): n is a, c, g, or t
  Coding DNA Sequence Number=SeqID_6863
gctgttgggaaccatgttttctttattatcagaagaataagaaacgtccagctcacngtagatggcgggatacagcaatctcaacccattgtctgatgtcctcaggtttaatgtttttctctcttgactcgtacaaggaaagaaggaagctttgaatgaccggagctctgtgtaatggcagattcttgttgacaaagttcttaagtacaaggagagactcgtctctatcaacgaactcaagtttaggcaaagacatccaaagaaacttccatcgcttagagaggatgctagtggatacaacaacctttgttggaactaacgatagtatcctcaccaacagttcatcaggcaatctacttaagttgtccattacttacaagttcaagatacccttgttataacggattcaaacaggtgacagaagtagaagaacggtttcattggattgaaaagacaagagttctttttctccggagaagagggtctcaa

SEQ ID NO: 21267 - DNA, 553 bp, Zea mays
  Coding DNA Sequence Number=SeqID_6864
tcagacttctcatctatccgtgatagatccggtggtttggttctcgcggtagtcgatctggtgtgacggcgacgattggtgcaagggactgtcggtggagtcggctacgtgggtggttggtgccgtatgtatctttgctggagctcctgcagtagatctgttggtaccgaggcggtgttctagaggttagcgctaggaccagcgtcgatcctctctcccgctttcaggtcgcaggattttctctcagctttttcctggatctagggttccgaccatgagagcgacggcgcgtggagtttagatgagatttctaccctgcggttcttcattgtcacgcttccttggtggctcgagtgaggtttgtgtctcatggctgggtttttatgtctgggttttttggatccgtccagagcctctctacttttgggagatcctgttactggttctcagttatggggggtgggtgtgaggtgttctttcctttcgggggttgtcgtccaaagcttggaggttcctgtgacagtacgtaacgagtcacgagacagcatccgcg

SEQ ID NO: 21268 - DNA, 479 bp, Zea mays
  Coding DNA Sequence Number=SeqID_6865
aaaagtgtcttctacctcctgagatcacgaaagagcaacaccgccggagatggccgctactcccaccgccgccgctgcttcgtccatcatgggtactcgggtggttcccgatatccgctccggttcgggtagaatcacagctcgttttgggttcgggaagaagaaggcagctcccaaaaagaccaagactaccgtgactacggacaggcctctgtggtacccaggcgccaaatctcctgagtggcttgacggttctttggtcggagattacggctttgatcctttcggtttaggtaaaccggccgaatatctccagttcgatatagattcgctagaccagaatctggctaagaacttagccggagacgtgatcggaacccgcacggaagaggccgcccccaaatcgactccgtttcagccgtacagtgaggtgttcggaatccagaggttcagagaatgcgagctgattcacggtcggt

SEQ ID NO: 21269 - DNA, 572 bp, Zea mays
  Coding DNA Sequence Number=SeqID_6866
tgggcgtagctgttctaaatccacaggactgtctcaaacaacctttctcccacatgaagtatcctcgtaaccacaccgcatgccccaacaggcatcagaagaagccggttccaaaccgcacgcgccggagccctccgcgcaatcagacaaccagatctcctcctaaagcgccgcctccgcctcctcaacgcgccgccgtctcttcttacgtcccgaagggaacggttgagaagagtcccaccaaaaacgtcgtcgttggtcaggttaggatcctgaagcgcggcgaggagatccctaagaagacattagaattggtcgtggaaaagacaaatctggtcgtggagaagacagatctggtcgtggagaagccagatctggtttctactcagcggatcggaccagatccgtgtctgattccgagccagatccgtctctccgaccgtaaatcgaagaagaccaccgtagttccgttttacgccggtcctgtgaccatgacctcgccgcctccgagcgacgtccctcttccagccttcttcaccacggaagaaggacgctacaaaccatatcatcaa

SEQ ID NO: 21270 - DNA, 582 bp, Zea mays
  misc_feature (505)..(505): n is a, c, g, or t
  misc_feature (523)..(523): n is a, c, g, or t
  Coding DNA Sequence Number=SeqID_6867
gccgctattacctctcagatttttacttagccatgggtaaagagaagtttcacatcaacattgtggtcatcggccacgtcgactccgggaagtcaaccaccacggggcacttgatctacaagctcggcggtatcgacaagcgtgtgatcgagaggttcgagaaggaggctgctgagatgaacaagaggtctttcaagtacgcgtgggtgttggacaagcttaaggctgagcgtgagcgtggtatcaccattgatattgctctttggaagtttgagaccaccaagtactactgcacggttattgacgctcctgggcatcgtgatttcattaagaacatgatcactggtacctcccaggctgattgtgctgttttgattattgatcccactactggtgggttcgaggctggtatctctaaggatgggcagactcgtgagcatgctcttcttgctttcacacttggtgtcaagcagatgatttgctgctgtaaccagatggatgctanctacccccaagtactccnagggcgaggtacgatgagataattcaggggagtgtcttcctactttgaagaaaggttgg

SEQ ID NO: 21271 - DNA, 539 bp, Zea mays
  Coding DNA Sequence Number=SeqID_6868
cagaacaagctcatgcgtaccggtgttgtttctcatgacattcacggttacacttcctctttccagaggcgtgcaacgtacggaaactacaccaatgctgcgttccagtaccctctcgccgccacttcgcggattgtggctactactaccactacctctcccgtgtttgttcaagctccaagtgagaaaggattctctagctttgctattgatttcctcatgggtggtgtttccgctgctgtgtctaagaccgctgctgctcctattgagcgtgtcaagcttttgattcagaaccaggatgagatgcttaaggctggcaggctctctgagccttacaagggtattggtgactgtttcggcaggaccattaaggatgaggggtttggttctttgtggaggggaaacactgctaatgttatccgttacttccccactcaggcgttgaactttgcgttcaaagattacttcaagaggcttttcaacttcaagaaggacagggatggccactgggaggtggttgccgggtacctgggacctct

SEQ ID NO: 21272 - DNA, 556 bp, Zea mays
  Coding DNA Sequence Number=SeqID_6869
tcttctcagttttcatcgctagcgaatttactttacgatcaagatgcagatcttcgttaagactctcaccggaaagaccatcaccctcgaggtggagagctcggacaccatcgacaacgtcaaagccaagatccaggataaggaaggcatcccccccgatcagcagaggttgatcttcgccggaaagcagttggaggatggacgtactctcgctgactacaacatccagaaggagtctactctccacttggtgttgcgtctacgtggaggcatgcagatctttgtcaagacactgacgggaaagacgatcactctagaggtcgagagttccgacactattgacaatgtgaaaaccaagatccaagacaaggaagggatccctccggaccagcagcgtctcatctttgccggcaagcagcttgaggatggtcgcacccttgccgactacaacatccagaaggagtctactctccacttagtgttgcgtctgcgtggaggtatgcagatctttgtcaagaccttaaccggaaagacatcacactggaggtggagagtt

SEQ ID NO: 21273 - DNA, 562 bp, Zea mays
  Coding DNA Sequence Number=SeqID_6870
gaaacgctttcgcaagaatcctcttccggcctcggattctgattgatgtgagcaagattgatatgacaacaaccgtcttgggtttcaagatctccatgcccatcatggttgctcctactgccatgcagaagatggctcaccctgaaggggaatatgctacggctagagctgcctctgctgctggaaccatcatgacactatcgtcatgggctacttccagtgttgaggaagttgcttccacagggccagggatccgttttttccagctctatgtatacaagaacaggaatgtcgttgagcagctggtgagaagagccgagagggctgggttcaaagccattgctctcactgtagacaccccaaggctaggtcgcagagagtctgatatcaagaacagattcactttgcctccaaccttgacattgaagaactttgaaggtcttgaccttggaaagatggacgaggccaatgactctggcttggcttcatatgttgctggtcagattgaccgtaccttaagctgggagggatgtccaggggctccagacaatcactaaaatgc

SEQ ID NO: 21274 - DNA, 540 bp, Zea mays
  Coding DNA Sequence Number=SeqID_6871
aaccagatcaatcaagatggcaccaaaggcaggaaagaagccagcagagaagaaacccgccgccgccgccgagaagccagcggaggaggtagccgagaaagccccggcggagaagaaacccaaggccgggaagaagctgccgaaggaggccggggccatcgacaagaagaagaagcggaacaagaagagcatcgagacgtacaagatctacatcttcaaggtgctgaagcaggtccaccctgacatcgggatctcgagcaaggccatggggatcatgaacagcttcatcaacgacatcttcgagaagctcgcccaggaggcctcgaagctcgctaggtacaacaagaagcccacgattacttcgagggagatccagactgctgttaggcttgttctccccggtgagctcgcgaagcacgctgtgtctgaagggaaccaaggccgggactaagtttactacctcttggaatggcggtttcccggtttaagggatctagatctggtcgcttttggttttatctacttaaataaatcggatgg

SEQ ID NO: 21275 - DNA, 420 bp, Zea mays
  Coding DNA Sequence Number=SeqID_6872
aaaacctaaatctcaattcaattcaattcaatggcaccaaaggcaggaaagaaacccgcagagaagaagcccgccgccgccgccgcggcagagaagccggcggaggaggtagcggagaaggccccgttggagaagaaacccaaggcggggaagaagctgccgaaggaagccatcggcgcgacggacaagaagaagaagcggagcaagaagagcatcgagacgtacaagatctacatcttcaaggtcctgaagcaggtccaccctgacatcgggatctcgagcaaggccatggggatcatgaacagcttcatcaacgacatcttcgagaagctcgcccaggaggcctccaagctcgcgaggtacaacaagaagcccacgatcacctcccgcgagattcagaccgctgtgaggcttgttctc

SEQ ID NO: 21276 - DNA, 537 bp, Zea mays
  Coding DNA Sequence Number=SeqID_6873
tcaacttctcctccgtagtcgaaaccaacacaatgtccagccatttctcctccctcgctcctcccccaaaacaccattcttcgtctcctcctcaccgtctctccgtcaacactctacttcagcctcagcttccaagaacccatcggaagctttcacggctgcgacgacgacggagaacaagaaacagccggagaagaagcatttgagcgaggaggaagaagcagaagaggaagtagaggaggatatgctgtggattcaagagaaggcgttaaacttagtcgagttcaccggaacggtggctcaggcgattccaggcccccgagttggagataccaagctgccgtggatgctcgctgttccgttaacttacgccgtcaccactttggtcaccaccgccgttaaaaccgttaataacttctcttctcctaaagctcaacgcaagaaactggtgaatcagaatgcaatgatttgtaaatctatcgacgagctgttacagagagaaggcactgtgagtagctttgagctcaaggcacttga

SEQ ID NO: 21277 - DNA, 519 bp, Zea mays
  Coding DNA Sequence Number=SeqID_6874
cgcatccgcagcctgaatcagaagactccaccacattgtccgccacggcggatcagacatcggatgaaacctcaaaagccgcagatctgaagaaggaagaatcagtcgcagagacgaagccaggatccatctcgctccgcatttggccgccgacgcagaatactcgcgacgccgtcttgaaccgcctgatcgagacgctatccaccgagtccatcctctccaagagatacggaacgctcaactccgacgaagcttccgccgtcgcgaaatccatcgaggaggaagcgtacggcgtcgcatccgagcgctgtgtccgacgatgacgatgggatcaagatccttgaggtttattcccaggagattagtaaaaggatgcttgagacggtgaaagatcgatctgcagccaccgccggaaacggaaacaacgaaaccggggaaggatgcaaccgacgctacgaaagagtgaggcttgagtcctggcccactcttggtctgattccgttacaattaggtttgctt

SEQ ID NO: 21278 - DNA, 593 bp, Zea mays
  Coding DNA Sequence Number=SeqID_6875
atctctctgagaatccctaaatccacttgaaaaaaatggcagaaaccgccgaaacaatcaacaccaccgtctcaccgccgcattccgaatccgagggctccaccacattgcccgcgacgacgccagatcagacatcggatgaaacctcaaaagccgcagatctgaagaaggaagagtccgtcgcagagacgaagccaggaggaggcaactcgctccgcatttggcctccgactcagaaaactcgcgacgccgtcttgaagcgcctgatcgagacgctatccacggaatccatcctctccaagagatacggcacgcttcaactccgacgaggcttccgccgtcgccaaatccatcgaggaggaagcctacggcgtcgcgtcgaacgctgtgtctgacgacgacgatgggatcaagatccttgaggtttactccaaggaaattagcaagaggatgcttgagacggtgaaggatcgatctgcagccgccgcgaacaaggaagcggttgaggatgtgaagacggaagctacgaaagacgatgaagctcctgagtcggagaagagtgaggcgtaactcggtcttgatccttaccttat

SEQ ID NO: 21279 - DNA, 588 bp, Zea mays
  Coding DNA Sequence Number=SeqID_6876
atcatcgactgtctcgccaagtgcttcaccagaccatccatcttctctccttgcaaaatgtacagatccatgcttgtccgatcctccgcctcggcgaagcagtcccttctccgccgcagcttctcttccggatccgttcccgagcgtaaagtcgcaatcttgggcgccgccggtggaatcggtcagcctctcgctctcctcatgaaactaaaccccctcgtctcaagcctctccctctacgatatcgctaacacaccaggagtcgccgctgacgtcggtcacatcaacaccagatctcaggttgttggatacatgggagatgatgagttggcgaaagctcttgaaggagctgacctcgttatcattcctgctggtgtccccaggaagcctggtatgacccgtgatgatcttttcaacatcaatgctggcattgtcaagaacctttgctctgccatcgccaagtactgccctcatgcgcttgttaatatgatcagcaaccctgtgaactccactgttccaattgcagctgagatcttcaagaaggctggtatgtacgatgaaaagaagttgtttggtgtacccactctt

SEQ ID NO: 21280 - DNA, 291 bp, Zea mays
  Coding DNA Sequence Number=SeqID_6877
acataaaactaaaagagcatctcctcttagctcttgcttccttctcgagcgtaaaccctagatcccatctccaaaatgttcagatccgtgctcgtccgttcctcttcatcggcgaagcaatcgcttctccaccgcagcttctcctcctccgtccccgagcgcaaagtcgccatcctcggggccgccggtggaatcgggcagcctctcgctctcctcatgaagctcaaccccctcgtctcaagcctctccctcttcgatatcgcaaacacccctggagtcgccgctgatgtc

SEQ ID NO: 21281 - DNA, 267 bp, Zea mays
  Coding DNA Sequence Number=SeqID_6878
aaactctaaaagacatatcctctagatcttctttctctcatctcaaaatgttcagatccatgcttgtccgatcctcctcgtcggcgaagcagtcgcttatccgccgtaacttgtcttccggatcggtcccggagcgtaaagtcgccatcttgggagccgccggtggaatcggtcagcctctggctctcctcatgaaactcaaccccctcgtctctagcctctcactctacgatatcgcaaacacacctggagttgccgctgatgttg

SEQ ID NO: 21282 - DNA, 444 bp, Zea mays
  Coding DNA Sequence Number=SeqID_6879
tctaagttcacttctgcgaaaccacttgtcagttctcatcatcagattccgttatcaacaacgggagctaaactttctaggtcggaacattccatggctgcttcctccgaacccaaatccatctatgatttcaccgtcaaggatgcgaagggaaacgatgttgatctaagcacttacaaggggaaggttctgttgattgtcaacgttgcttctcagtgtggcttgaccaattcgaactatactgagcttgcacagctgtaccagaagtacaaagaccatgggtttgagatccttgcattcccctgtaaccagtttggtaatcaagaacctggttctaatgaagagattgttcagtttgcttgtacccgtttcaaggccgagtaccccatcttcgacaaggttgatgtgaacggtgactcggctgctccaatctataagttcctg

SEQ ID NO: 21283 - DNA, 495 bp, Zea mays
  Coding DNA Sequence Number=SeqID_6880
acatttcattttcattcatcctctcgcttctgacctgacctgacctaaatcatcatcatcgaaaatggtttccgcgcgtgaggagttcgtgtacatggccaagctcgccgagcaagccgagcgctacgaggagatggtggagttcatggagaaagtgtccgcctccgtcgacggcgacgagctcaccgtcgaggagcgtaacctcctctccgtcgcctacaagaacgtgatcggcgcgcggcgcgcctcgtggcgcatcatatcgtcgatcgagcagaaggaggagagccgcggcaacgacgaccacgtggcggcgatccgcgattacagggggaagatcgagacggagctcacggggatctgcgaggggatactgaagctgctggactcgaggctggtccccgccgcagcgtcgggggactcgaaggtgttttatctgaagatgaagggggattaccataggtacttggctgagtttaagaccggtcaagagag

SEQ ID NO: 21284 - DNA, 564 bp, Zea mays
  Coding DNA Sequence Number=SeqID_6881
tcaatcaatcacatcagatctcagatctctgatctctcaaggaggaagaagatggcggtttctgcgcgtgaggagttcgtgtacatggccaagctcgccgagcaagcggagaggtacgaggaaatggtagagttcatggagaaagtctccgccgccgtcgacggcgatgaactcaccgtcgaggagcgtaacctcctctccgtcgcttacaaaaacgtgatcggcgcccgccgtgcctcgtggcgcatcatttcgtcgatcgagcagaaggaagagagccgcggcaacgacgaccacgtcacggcgatccgcgattacagatctaagatcgagacggagctctctggaatctgcgacgggatccttaagctcctcgattcgaggctcgtccccgccgctgcttccggcgattccaaggtgttttacctcaagatgaaaggtgattaccacaggtacttggctgagtttaagactggccaggagaggaaagacgccgccgagaacactctctccgcttacaaagccgctcaggatattgcgaatgcagagctagcaccactcacc

SEQ ID NO: 21285 - DNA, 569 bp, Zea mays
  Coding DNA Sequence Number=SeqID_6882
tcattgatcctctcggcgataaacatcagatctcagatctccgaaagagaaaagaaatggcggtttccgcgcgtgaggagtacgtgtacatggccaagctcgcggagcaagccgagcgctacgaggagatggtggagttcatggagaaagtctccgcggccgtcgacggcgacgagctcaccgtcgaggagcgaaacctcctctccgtggcgtacaagaacgtgatcggcgcccggcgcgcctcgtggcgaatcatctcctcgatcgagcagaaggaggagagccgcggcaacgacgaccacgtcaaggcgatccgagactacagggggaagatcgagacggagctctcggggatctgcgacgggatcctcaagctgcttgacgataggctcgtccccgccgctggttccggtgattcgaaggtgttttacctgaagatgaagggggattaccataggtacttggcggagtttaagactggtcaggagaggaaagacgccgctgagaatactctctctgcttacaaggctgctcaggatattgcaaatgcagagcttgctcccattccc

SEQ ID NO: 21286 - DNA, 563 bp, Zea mays
  Coding DNA Sequence Number=SeqID_6883
tctcatctctctcctaaagctagggtttcgcacagcctccttgtttccggcggtcgccaccgtcatctcaggtgaccgccgggccttctctcttttttttctttttttcgtagtctctgtgtcctcgtcgtcgtctcctcctctgtctctctgtggctgcttgatgcgacgacggttgtccggttcagatccggagctttgcttgtttcagggtcagatctcggaggttgcagcacttgaggacggtgctccgctcctccttacctctgtttcttcgtggccagttgaggctctgtccggatggttttgtatgccgtcgttgtgtttaggcttgagtggtggcgcgtggtggttgtgggtgctcggatctgctgtaggtgtgctcttccggctttgtttgcagcggtggagtccctggaggctgagccgtgtaagctctgtgatttcgcgggatctagggtttcttcccctactccttgctggtggtctccggcaaacgtgcgtgagctcttccgggaggggggctgtccctcttccggcgtgcccagtggaaacttggcgta

SEQ ID NO: 21287 - DNA, 551 bp, Zea mays
  Coding DNA Sequence Number=SeqID_6884
aagtcttacgccaagtttccactgggcacgccggaagagggacagcccccctcccggaagagctcacgcacgtttgccggagaccaccagcaaggagtaggggaagaaaccctagatcccgcgaaatcacagagcttacacggctcagcctccagggactccaccgctgcaaacaaagccggaagagcacacctacagcagatccgagcacccacaaccaccacgcgccaccactcaagcctaaacacaacgacggcatacaaaaccatccggacagagcctcaactggccacgaagaaacagaggtaaggaggagcggagcaccgtcctcaagtgctgcaacctccgagatctgaccctgaaacaagcaaagctccggatctgaaccggacaaccgtcgtcgcatcaagcagccacagagagacagaggaggagacgacgacgaggacacagagactacgaaaaaaagaaaaaaaagagagaaggcccggcggtcacctgagatgacggtggcgaccgccggaaacaaggaggctgtgcgaaaccctagc

SEQ ID NO: 21288 - DNA, 529 bp, Zea mays
  Coding DNA Sequence Number=SeqID_6885
ggaaggtcccataaatctcaccacgtggacggagacacgatgtcgttttcatgagattcaacgtctcccccttgagtcacttggccttcatctcctttgctcctcaaatctcgatttcaaaaaccctaacagggatttcgaatgcacatcggtggaggtgagtgatctcgagttactatggcgcggagatcgccgccgcagcttcacacgtcacgtcgcggcgtcgtgtcgtttcgatggaatctaatcactgctctctccgcctctctatgcgtactagctctcttcagtatctaccaccgtcagtctcgtcccgttccgtcgctatcagcggcgagatccagaatcccgctccagaaatactccggcgaccgtccgaagatcgcgttccttttcctcgctcgacatgacctgcctctcgatttcctatgggacagattcttcaagggtggagatgagaggaacttttcaatctatgttcattcaacacctggtttcgtattcgatgaaggcaccactcgatcacact

SEQ ID NO: 21289 - DNA, 558 bp, Zea mays
  Coding DNA Sequence Number=SeqID_6886
ttgattttgattgtctctctctccgctgtcggaacaagccaaaagcaaaaggataagaaaaaacaatggagtccagcagaggtcaaggtgggatccagcagttgcttgctgctgaacaggaagctcaacacattgtcaatgctgccaggaccgcaaagatggcaaggctgaagcaagcaaaggaagaggctgagaaggagattgctgaatacaaagctaaaattgagcaagacttccagaggaaacttgaggagacaagtggagactcgggtgcgaatgtgaagaggctggagcaggagactgatgccaaaatcgaacagctgaagaacgaagcatccaggatctccgaagatgttgtggcgatgctcctcaaacatgtcaccactgtcaagaactgagagagattcctctgtaataatcaaaaagccatttatgagtttatgctcctctgttactgcattgaatctcagagactcagtctcatatgaaatgtgtttattgtaatttattctctaccatctttcttcttgttggtgtattcatcatttcccttttgga

SEQ ID NO: 21290 - DNA, 245 bp, Zea mays
  misc_feature (29)..(29): n is a, c, g, or t
  Coding DNA Sequence Number=SeqID_6887
gccgggccgtctccatacatacacacacncgcccgccgacacctctcacagagacacgcacgacacacacgagcttggactcacgcgcgccagaccagtctgattcatattttggagcaggagccacgtatccagcgcggatctagcagaagaggtagccggaggcggcggcgcagagggaggccgcggcgaggggtacggcggccgccaccgcggggagctccagctttcgtcggacgcgggag

SEQ ID NO: 21291 - DNA, 247 bp, Zea mays
  misc_feature (216)..(216): n is a, c, g, or t
  Coding DNA Sequence Number=SeqID_6888
tcccgcgtccgacgaaagctggagctccccgcggtggcggccgccgtacccctcgccgcggcctccctctgcgccgccgcctccggctacctcttctgctagatccgcgctggatacgtggctcctgctccaaaatatgaatcagactggtctggcgcgcgtgagtccaagctcgtgtgtgtcgtgcgtgtctctgtgagaggtgtcggcgggcgngtgtgtgtatgtatggagacggcccggcgcg

SEQ ID NO: 21292 - DNA, 431 bp, Zea mays
  Coding DNA Sequence Number=SeqID_6889
ttttttcctcagagtctataccgcgcccagcctccattcttctccctcaccgtcgcgggctccagctcggccgcccatctcccaatgctcgacttccctctgttccttccctgctttcgctcggtttccagctcgtcgccattgccgtcgcgccccttctgctccagctcgcttctgcctggcgggttggccgtggaggcacagtcggccgtggcagccaacgcgtgcaggccacggaggagcgcgcgacgggactggccgtcccagctccatggtcgagctccctgcgtgcagccgcgcgctcctctactcggtgagaaatttgctattatggatgtcctcagatgcggcttcgacgatttggaggcgtaggcgagggattagctgatatggaaaagcagggaataggccactcgccaaaacgaacaaag

SEQ ID NO: 21293 - DNA, 469 bp, Zea mays
  misc_feature (125)..(125): n is a, c, g, or t
  Coding DNA Sequence Number=SeqID_6890
gcacaggtaactttggccactatccaaacacactaatcataccaaaaacgtcgcttggagggcaggcaggcaaggcaagggtggacgtggacaagacaagaggacgggaggaagagcggcgcgcngagggactcgggagcagcggtgtggacgcaacacaatcgtgggagctccgaggaccgaggcttcgagcggagcaccggttggagcgacgcaaaatcaatcctacgaaaccgtgatccaaggcaagtttgttcttgttccgttggggttagggatggcttcgatgctttttgttgtccagattcttgccatcgacgagatactcttgctccaaagtgcatgatggggttgcgaccggctgtggctccgcctgctgtcgccgcatgaccgcgcggccatggcaaaggccacgctcgtcggtgccctggtcggggccgcgcaaccaagcgctcgagccgcgacatgg

SEQ ID NO: 21294 - DNA, 526 bp, Zea mays
  Coding DNA Sequence Number=SeqID_6891
aaatatagatagctcgccaccctcgaaacttctcttattctctctgtatgctttattctcatctctttttgccgacaaaagtttagtctctcaactctcgaaaataagacatggacgccgccgcgaccgcgagtttgatccgatcttccgtcttaccacttaaaacttccgacaacggtgctggatctatgttcctcaccgccagtggccctgggttcacgcgttttggtccgggacgtcaacttcgtttcaggcaaaatgcgtttgctagattctcgagaccgttgcaaagctcaacaactcggagaagctttgtggtaaaagcttcagcatctaatgatgatgcttcctcctctgctgctaaaccgatcgcgccgcttcagcttgagtctcctgctggtcagtttctgtctcagattctggtgactcatcctcatctcgtccctgccgctgttgaacagcagcttgagcagctccagactgatcgtgactccgagggtcagaacaaagatgcatcgtccgcgcc

SEQ ID NO: 21295 - DNA, 551 bp, Zea mays
  Coding DNA Sequence Number=SeqID_6892
cactcactctatcttgattctgttcactcatttcaaaaaaacacttaccaatctcggagccctagatctctcctctccgtttccaccgaagatgcgtgagatccttcacatccagggaggccagtgcggtaaccagatcggtgccaagttctgggaagtcgtctgcgccgagcacggcatcgatcccaccggtcgatacaccggagactcagatctgcagctcgagcgcatcaacgtctactacaatgaagcaagctgcgggagattcgtccctcgcgccgtcctcatggatctggagcctggaaccatggacagtctcagatctggaccttacggtcaaaccttccgccccgataacttcgtcttcggccaatcaggagccggtaacaactgggccaaggggcattacactgaaggagctgagctaatcgattcagggctcgatgttgttcgtaaggaggctgagaactgtgactgtcttcaagggtttcaggtttgccattccctgcgaggaggaactgatctggatggaacccttctatccctaaaat

SEQ ID NO: 21296 - DNA, 531 bp, Zea mays
  Coding DNA Sequence Number=SeqID_6893
attagagtctccctttgaccctcttcgccgtcagtctgtagcaatggcacccaaaaagggagtgaaggtggttaccaagaagaagacggagaaggtaaccaacccgttgtttgagagaaggccaaagcaattcggtatcggtggagctctgcctcctaagaaggatctgactcgttacatcaaatggcccaagtccatccgtctccaaaggcagaagcgtatcctcaagcagaggctcaaggtccctcctgctttgaaccagttcaccaagactcttgacaagaaccttgcgacccagcttttcaaggttcttatgaagtacaggcctgaggacaaggccgcaaagaaggatcgtcttttgaaaaaggcccaagccgaggctgagggaaagccttctgaatccaagaagcctatcgttgtcaagtacgggctcaaccacgtgacttacctcatcgagcagaacaaggcgcagcttgtggtcattgctcacgatgttgaccccatcgagcttgtcgtctggttacctgctct

SEQ ID NO: 21297 - DNA, 536 bp, Zea mays
  Coding DNA Sequence Number=SeqID_6894
cccctcagcttcaaacaatggtgtttgtgaagccctccaagtcgaacgcttacttcaagaggtaccaagtcaagttcaggagaaggagagatgggaagactgattacagagcaaggatccgtctcatcaaccaagacaagaacaagtacaacacaccaaagtaccgttttgttgtccgcttcaccaacaaagacatagtcgcacagatcgtgtctgcaagcatagccggtgacattgtcaaggcttctgcctacgctcatgagttgcctcagtatggtctcaccgttggtcttaccaactacgctgctgcttactgcaccgggcttcttttggctcgccgtgttctgaagatgctggaaatggatgaggagtacgagggcaaccttgaggctaccggagaggacttttccgtcgagccaaccgagtccaggagaccattccgtgctcttcttgatgttggtcttatcaggaccaccacaggaaaccgtgtctttggtgcactcaagggtgccttggacggaggacttgatatcccc

SEQ ID NO: 21298 - DNA, 544 bp, Zea mays
  Coding DNA Sequence Number=SeqID_6895
tacattactgtgttgaccgtcatgggcgtgaagagggcaccgaacatgtgtgcttctgtcggaatccaaggtatcgcttgggccttcggtggtatgatcttcgctcttgtctactgcaccgctggtatctccggtggacacatcaacccagctgtcacgtttggtcttttcttggccaggaagctttcgcttacaagagctgtgtactacatagtgatgcagtgcttaggagccatctgtggagctggtgtggtgaagggtttccaacctaagcaataccaagctctaggaggtggagccaacactgtagctcctggttacaccaaagggagtggtcttggagctgagattattggaaccttttgtcctcgtttacaccgtcttttccgccactgacgccaagagaaacgctcgggactcccatgttcccattcttgcacctctcccaattggattcgctgtgttcttggtccacttagccaccatccccatcactggaactggaatcaacccagcaaggagtcttggagctgccatcatcttc

SEQ ID NO: 21299 - DNA, 560 bp, Zea mays
  Coding DNA Sequence Number=SeqID_6896
tctctgctaatctcatcttcgatacactcaccatgtctaacggtaagatcaagatcggaatcaacggattcggaagaatcggtcgtttggttgctagagtcgttctccagagggacgatgttgagctcgtcgccgtcaacgatcccttcatcaccactgagtacatgacgtacatgttcaagtacgacagtgttcacggtcaatggaaacaccatgagcttaaggttaaggacgagaagactcttctcttcggtgagaagccagtcaccgtcttcggcatcaggaaccctgaggatatcccatggggtgaggctggagctgacttcgttgttgagtccaccggtgtgttcactgacaaggacaaagctgctgctcacttgaagggtggtgccaagaaggttgtcatctcagccccgagcaaggatgctcccatgtttgttgttggtgtcaacgagcacgagtacaagtccgaccttgacatcgtctccaacgctagttgcaccaccaactgcctttgctccccttgccaaggtatcaacgacaggttcggaaattgtgag

SEQ ID NO: 21300 - DNA, 524 bp, Zea mays
  Coding DNA Sequence Number=SeqID_6897
ttctccttccgagtggtcgttagatcagatctcttcgtgttttacatttccaatggcgtcctcctgtgttgctaatctttctctgtcaggtgtgtctcaatctcattatgtcaaggcaaatggaatgtctaccgcaaagctcaactcgatttgtaaaacctctgcattgagtatccagaagagatcaaaccggagtcgcaagttttcagtttctgcagagtatgggagtaggagaggaagtggtggtggtgatttcgtagctggttttcttcttggtggtgctttgtttggtgctgcagcctatatctttgctccacaaatacgaagatcgataatgagtgaagaagatgagtatggtttcaagaagccagatcaaccaagttactacgatgaaggtttagagaaaacaagggagaccttgaacgagaaaatcggacagcttaactcagctattgacaatgtctcttcgcgtttaagaggtcgagcaaagaagacttcttccccggtcgaaactgatccagaag

SEQ ID NO: 21301 - DNA, 398 bp, Zea mays
  Coding DNA Sequence Number=SeqID_6898
tccccttctacttccgatgtgaaagggaaatctgacctgaaagactttctggccatagatgattttgacacagagaccatcaagaagattctagacaaggcttcagaggtgaaagccctgttgaagtcaggggagaggaactatctgccttttaaagggaagtctatgtctatgatctttgcaaagccctccatgaggactcgtgtttcctttgagactggctttttcttgcttggtggacatgcactgtatcttggacccaatgacatccagatgggcaagcgagaggagactcgcgacgttgctcgtgtcctgtcgcgctataatgacatcattatggcccgtgtttttgctcatcaggacattcttgatttgctaactactcgagtggaccggtt

SEQ ID NO: 21302 - DNA, 591 bp, Zea mays
  Coding DNA Sequence Number=SeqID_6899
actacacacttctcattttgcaaacagtcaaaagcccctaaaactaagaaaaaatggctggtctagtgaagttggcatgcttggtcttggcctgcatgattgtggccggtccaatcgcaacgaacgcggctctaagctgtggaaccgttagcggtaacttggcagcatgcattggctacttaacccaaaatgggccccttcccagagggtgctgcaccggcgttactaatctaaacaacatggcccgtacaaccccggaccgtcagcaagcttgccgttgccttgtaggagccgctaactccttccctactctcaacgctgcccgtgctgctggacttcctaaggcatgtggagtcaatattccttacaaaatcagcaaaagcaccaactgcaacagcgttagatgagcagcggtcggatgaagaaactcaagcggacgtacgaatctaatataatgtatgagagagtactaaataagatgttgttttttctagggttttaaaatttcatgtttcccctctgtggtggcgttcctttactttggccgtatgtactatggtcgtaatcaacgtccgctatatgaagttcata

SEQ ID NO: 21303 - DNA, 191 bp, Zea mays
  Coding DNA Sequence Number=SeqID_6900
tgccgttgcctggtaggagcccgctaacgcctttccctactctcaacgcttgcccgtgcagctggacctccctaaggcatgtggagtccacctttccttacaagatccgcaaaaccccccacctgcaaccggggggaaatgggccgccgggccgaatgaacctatatgccaaccttccaagaattttgggt

SEQ ID NO: 21304 - DNA, 408 bp, Zea mays
  misc_feature (223)..(223): n is a, c, g, or t
  misc_feature (263)..(263): n is a, c, g, or t
  Coding DNA Sequence Number=SeqID_6901
gcatataggttcattcggcccggcggcccatttccccccggttgcaggtggggggttttgcggatcttgtaaggaaaggtggactccacatgccttagggaggtccagctgcacgggcaagcgttgagagtagggaaaggcgttagcgggctcctaccaggcaacggcaagcttgctgacggtctggggttgtacgggccaaggttgtttagactagtaacgncgctgcagcacgctctggggagggccggcgcacctggggnccaggtagccaatgcacggtgccacgtagccgctaacggtgccacagctcagagccgcgttcgatgtgattggaccggccacgatcatgcaggccaagaccaagcatgccaacttcattagaccagccatatttctctcttagat

SEQ ID NO: 21305 - DNA, 415 bp, Zea mays
  Coding DNA Sequence Number=SeqID_6902
ttgagtctctgatcctcatctccttgagtctttctttctttctttctccatagatccgtgcgaaaatggcgccgaagttcgacacggagaagatgcaggaacgccagaacttccgtaacgtctggcacactgatctcactcacaccatccagggcgatactccctattgctgttttgcattgtggtgtgccccttgtgcatcatacttgcttcgcaagcgtgcgctttacaatgacatgtctaggtacatatgctgcgctggttacatgccttgtagcggcaggtgtggagaagccaaatggcctcaactttgtcttgccactgaggtcttttgctgctttggaacctctgtggcatcgactcgtttccttctgcaagatgagttccaaattcagaccacacaatgtgacaactg

SEQ ID NO: 21306 - DNA, 521 bp, Zea mays
  Coding DNA Sequence Number=SeqID_6903
atgatgctcaggcaagctgcgaagaaggctctaggccttacgtcacgccaatcgacgccgtgctccgtcggtatctcccgatcctaccacgagaacgtcatcgaccactacgacaacccccgcaacgtcggctctttcgataagaacgatcccaccgtcggcacgggcctcgtcggggctcccgcctgcggtgatgtgatgaagctgcagatcaaggtcgatgagaagaccggtcagatcgtcgatgctcgcttcaagacctttggttgtggctccgccatcgcctcttcatctgtcgccactgaatgggtgaaaggcaaagctatggaggaagtcctgaccatcaagaacaccgagatcgccaagcatctttctctcccacctgtgaagctccattgcagtatgttggcggaggacgccatcaaggcagctgtcaaagactacaaggagtagcgtgtgaagacaaacggtgctggagaaccatcgcaggcgtgattccttctgctcatggttataccatt

SEQ ID NO: 21307 - DNA, 476 bp, Zea mays
  Coding DNA Sequence Number=SeqID_6904
agagatctctctacattctgttcctctttggagtagagcatgttctgtttataatggggacgatcaagactcttttctactctaccctgagcttctttcctctccattgaacaagtctcttgtgatcaaaacctttgattcgtctggcgttgtctctgtcggagaatacaaagtcaaagctagtctttcctcccactcttcagagtatttttcgacaagtatggtgacattgcatcagattccaagatccagtctctctccacacggacgtaccatctcgagacttctagccgaggttggtcctgaactccagtcaacgcctctgcatcggctggctgaatcccgagctagggagattcttccgattgtttaggacatagaaaccgcgaagatcccagtaaagttggtcccgcttctgttctttgagggaggttgttgaggcaaccgggtttaataaaaagcctggtccgcgtcct

SEQ ID NO: 21308 - DNA, 454 bp, Zea mays
  Coding DNA Sequence Number=SeqID_6905
ttaggacgcggaccaggctttttattaaacccggttgcctcaacaacctccctcaaagaacagaagcgggaccaactttactgggatcttcgcggtttctatgtcctaaacaatcggaagaatctccctagctcgggattcagccagccgatgcagaggcgttgactggagttcaggaccaacctcggctagaagtctcgagatggtacgtccgtgtggagagagactggatcttggaatctgatgcaatgtcaccatacttgtcgaaaaatactctgaagagtgggaggaaagactagctttgactttgtattctccgacagagacaacgccagacgaatcaaaggttttgatcacaagagacttgttcaatggagaggaaagaagctcagggtagagtagaaaagagtcttgatcgtccccattataaacagaacatgctctactccaaaga

SEQ ID NO: 21309 - DNA, 511 bp, Zea mays
  Coding DNA Sequence Number=SeqID_6906
atggatgggaccttgagctctgcttcccttctctctcctaaattcgtgaactttctctctcttcgttagtttgatcttctactgtgttcgtcttctctctccagataaagatctcatgacttatcaattgcaaagtgtggacaaggagggtttgggtacagcaacttgtctgaaggaacgcaactacttgggtttgtctgattgctcctcctctgttgacagctcaaccgttcccaatcttgttctagatactgacaagaagagcagtctcaacttcaaagctacagagctaaggctaggtcttccagaatcgtctcagtctccccagagagaaactgacttcggtttgctgagtccaagaacgcctgacgagaaacttctcttcccgctgcttccttgtaaagaccatgcttcaggcaacaaaagaggatatcttgctaagagtggctccaacaatgcacctgcttccaaggcgcaggttgttggttggcctccaatcagatcttacggg

SEQ ID NO: 21310 - DNA, 407 bp, Zea mays
  Coding DNA Sequence Number=SeqID_6907
aagaagccattgtgttcttcccgtaagatctgattggaggccaaccaacaacctgcgccttggaagcaggtgcattgttggagccactcttagcaagatatcctcttttgttgcctgaagcatggtctttacaaggaagcagcgggaagagaagtttctcgtcaggcgttcttggactcagcaaaccgaagtcagtttctctctggggagactgagacgattctggaagacctagccttagctctgtagctttgaagttgagactgctcttcttgtcagtatctagaacaagattgggaacggttgagctgtcaacagaggaggagcaatcagacaaacccaagtagttgcgttccttcagacaagttgctgtacccaaaccctccttgtccacactttgcaattga

SEQ ID NO: 21311 - DNA, 585 bp, Zea mays
  Coding DNA Sequence Number=SeqID_6908
gaactactatatgttgtctctctctctcgataactcctcccagccccaggaaacctataaaattccttagatccaaactcagagaatggccggtggatttaccatcaacataaacattccggctggtgaaggacttaacattagcattaacccaaactctgctgcagctggtaatctatgtacgaatccgtcctctcaaaagcccctagaatgctctccaggaaaggctaacccaaaggttttctttgatatggcggtgcgcggcaaagctgttggtcggatcgtgatggagctctttgccgacacgaccccacggacggcagagaatttccgcgccctctgtacaggcgagaaaggcatggggaagaagggtaagccacttcattacaaaggatcaatcatccaccatatgtgccccgattatatcattggcggaggagatttcacttacgaaaggaaaggatacggaggcgaatcaatctacgccggaggttttttcgaggatgagaacttcatcaaaaagcacacccggtccgggtatcctctccatgaacaacaatggtcctgacacaaaccaatctcagt

SEQ ID NO: 21312 - DNA, 524 bp, Zea mays
  Coding DNA Sequence Number=SeqID_6909
gagaatggcacttcttcacttgtctctctccctcttctcatgtctcttccttgtcctagctccgacttacgttgcttcctctcatgtctccgaccctgaactcgttgttcaagaagttaaccaacatataaatgcttctaggaggaatcttggtgtcctctcatgtgggaccggaaatccaatagacgactgctggagatgcgaccccaagtgggagaaaaaccgacaacgactagctgattgcgccatcgggtttggcaaacgcgcaataggcggccgtgaaggcaaaatatacgtggtgaccgacccgagcgacaaagacgcggttaaccctaaacccggaacgctaagacacgctgtgatccaggaagaaccgctatggatcatcttcgcacgtgacatggtcataaagctgaaagaagagctgatcatgaactcccttcaagaccatagatggacgtggagcgaacgtccacatcgctggcggcgcgtgcatcactgtccagtacgtgactaacatcctc

SEQ ID NO: 21313 - DNA, 557 bp, Zea mays
  Coding DNA Sequence Number=SeqID_6910
ctcgcctggtattcctggaggccgccgcctccaagcttctccctcccacgtgtgcttctctccctcccttcccttctctctgctgcgcacgtcggcctctagctcgtggagctccctcctctccctccacctctcctcccatggcgcgtcctctagctctggtgccgcgcgcactccttccctattgccgcgcgtgccccatctccctccacgcgcccctggctcggaccccggctcggccttctccccagtgcccggccggagctccctggctcgcccctgcgctcgcccagcccctgctcctcgctcctcccggcgcccagccgagctcgcccccggccccttgctcctccatggccggcgtttccccggcttgggtctcaccaaggtcgcccgccgtttccctgtgccgaggtctcgcccagccacaaccccgctcgacttggccgcgacctcgccgtggatgccgtcctcgcctcgccctacggccaacttcgccggtcgagttcctctgccctctcccacgaccgccgtcgattctctctagccggggcgcg

SEQ ID NO: 21314 - DNA, 540 bp, Zea mays
  Coding DNA Sequence Number=SeqID_6911
gcgagctttgctgttgggagggcatggcagccatggcgagcaggagcaggggcccggtccgcgccccggctagagagaatcgacggcggtcgtgggagagggcagaggaactcgaccggcgaagttggccgtagggcgaggcgaggacggcatccacggcgaggtcgcggccaagtcgagcggggttgtggctgggcgagacctcggcacagggaaacggcgggcgaccttggtgagacccaagccggggaaacgccggccatggaggagcaaggggccgggggcgagctcggctgggcgccgggaggagcgaggagcaggggctgggcgagcgcaggggcgagccagggagctccggccgggcactggggagaaggccgagccggggtccgagccaggggcgcgtggagggagatggggcacgcgcggcaatagggaaggagtgcgcgcggcaccagagctagaggacgcgccatgggaggagaggtggagggagaggagggagctccacgagctagaggccgacgtgcgcagcagaga

SEQ ID NO: 21315 - DNA, 558 bp, Zea mays
  Coding DNA Sequence Number=SeqID_6912
aaaaaatggcgaccgcgtctctcgtcccgacatcaaacatcttccatgtctctccgtcagttagaacaagagctagcgtcattgttgcatcatctcatcaacaacaaccaagaaggagagacttactgctgaaaacagcggtggctattcctgcgattttgaacttgaaggaagctcctatctctgaggcgcgtgaggtggaagtgggatcgttcttaccaccttctgagtctgacccttccttcgtcctcttcaaagccaaaccttctgatactcctgctctccgcgcagggaacgtgcagccgtatcagtttgttctaccaccgaactggaaacagcttcgaatagccaacatcttgtcaggcaactactgccaaccgaaatgcgcagagccatgggatagaagtgaagttcgagaacgagaagcaaggggaagttcaagtagttgcttctcctttgattcgtttaaccaacaaagccaaacgcaactattgaagatctcggtgagcctgagagagtgattgcttctctcggtccctttgtcactggaaactctta

SEQ ID NO: 21316 - DNA, 585 bp, Zea mays
  Coding DNA Sequence Number=SeqID_6913
acagagcgagtcgaactccgagtcacccgccgagtttctctcactctcccctcctcgataaaatctctcgttttcagatctcgaatctcacctctatacttccgtcgccagcttttcagagatggaaacgtttctattcacatccgagtccgtcaacgagggacaccccgacaagctctgcgaccaagtctccgacgcgatcctcgacgcctgcttagagcaagaccccgagagcaaagtcgcttgcgagacgtgcaccaagaccaacatggtcatggtcttcggcgagatcacgacctctgctaaagtagattacgagaagatcgtcagatccacttgtcgcgagatcggtttcatctccgccgatgtcggtctcgacgccgacaaatgcaacgtcttggtcaacatcgagcagcagagtcccgacattgctcagggagttcacggtcatttgaccaagaagcctgaagacatcggagcgggtgatcagggacatatgttcggttacgctaccgacgagactcccgagctgatgcctttgactcatggtcttgcgaccaagcttggcgcgaggcttaccgaagt

SEQ ID NO: 21317 - DNA, 408 bp, Zea mays
  Coding DNA Sequence Number=SeqID_6914
atccttgcgcttctctaaactttttgtcatcgatacctttagatctcgcttctggcgacgaatcttttatttattgcttctgtttgtgatagcgagtcctccgatctacacaacggtgttgattttccagcaatttaaccgttttaagtcctttcatcggtagatctgacgcagatctcatgaaacctatacttcctctacggatctgccggtgggatcatcgcgtgaggggtgtctatgatgcgagtcggttgcgttgaagcgctttgaggttgaatcgaattcgttatggacgtgaagcggtgttcttgtgtgggttaagttaaaattaggatgtagaagatgttgaattgcatcttttgtcatccgacctttgccatgtcaggtgcgcttgcatggcaggtcaaa

SEQ ID NO: 21318 - DNA, 500 bp, Zea mays
  Coding DNA Sequence Number=SeqID_6915
aatagagtgtgtgaaagccgagagcaagacacgcccccccaaggagaggagaacccgggataaaaaaaaaataacccggtgcgaactccctcccccccccacaaaatatatatttttattaaggatctgtttttgacctgccatgcaagcgcacctgacatggcaaaggtcggatgacaaaagatgcaattcaacatcttctacatcctaattttaacttaacccacacaagaacaccgcttcacgtccataacgaattcgattcaacctcaaagcgcttcaacgcaaccgactcgcatcatagacacccctcacgcgatgatcccaccggcagatccgtagaggaagtataggtttcatgagatctgcgtcagatctaccgatgaaaggacttaaaacggttaaattgctggaaaatcaacaccgttgtgtagatcggaggactcgctatcacaaacagaagcaataaataaaagattcgtcgccagaagcgagatcta

SEQ ID NO: 21319 - DNA, 544 bp, Zea mays
  Coding DNA Sequence Number=SeqID_6916
aatgggttcgatctctctgtcaaattctctgcccataccgcgacttccactacatacatcatcactcaatccatgccttccttcctccttccctcttcctcctcgtcgctccactttttcaccgcgaatctccgcctctgccgtcttcgcagctccttccggcgttaataactctgtcccgggtaaaaacgggggttacacagttggtgatttcatgacagggaaacagcatcttcatgttgttaagccctctacgtcggttgatgatgcattggaacttctggttgagaagaaggtcacgggcttgcctgtaattgatgatgattggagtctggttggcgttgtttctgattacgacttacttgcactcgactctatttctggccggagcagccaaaatgatacaaacatgttccctaacgtggacagttcatggaaaacatttaacgaacttcagaagctgataagcaagacacatgggaaagtgggttggagatttgatgacgccttcccctctggttgtccgtggctctaccaatttaga

SEQ ID NO: 21320 - DNA, 502 bp, Zea mays
  Coding DNA Sequence Number=SeqID_6917
agacttgtttttgcgttggaatccgtgaggaacagaggaggataagccatcatgggttcggtctctttctcaaattctatgcccataacgcgacttccactacttacatatcaatcccttcttcccacttcttcatcacttcctcctctctccaaccgtcgtcgctccaatgtttcacagacaatcaccgcctctgccgtcttctcagctcctgccggcgttaatgactctcttccggcaagaaacgagggttacacagttggggatttcatgacagggagacagcatctgcatgttgttaagccctcaacatcggtcgatgatgcattggaacttctggttgagaagaaagtcactggattgcctggaattgatgatgattggaaactggttggtgttgtttctgattacgacttgcttgcactggattccttttctggccgctccccaaatgaaaacaaacttggtccctaaacgtcgacaggcaccctggaaaaacgtt

SEQ ID NO: 21321 - DNA, 585 bp, Zea mays
  misc_feature (546)..(546): n is a, c, g, or t
  Coding DNA Sequence Number=SeqID_6918
actggtctatagattcccggaaaataaatagcaccaacaagaagtctctctccactctaaagaaaaaggcgatttccggtgaaaacgttcgcctctccggtggtgggcttcggccgtcactgccgtgagagggctccctctctgtgtctcctctcctccacccttcgctgtgtctcctttccggatctcgaaatctaagctagcgttgtgagagtggagctttcaaggcggttgtgtgtttgctcggcggtggggaggtttggccggggctctagcttcatgtggtagatctgaggggtcggattaagcgcgtggaccccaagctctccctggttctctcatcctctcccacggcagtggagtgctctccggtgaagaggcgtggcgggtagggcttcgtttcggggtggcttgacgcgtaagggctggtctctctggatctggaactccggttgactaactatcagtttgtttgcctgctatgaggaccgcaggctctgctgagaaggagaaagctcgaggcgtggaggcgagtggttttccggngtgcggcctagaccaattcaggcggctgctccggactgg

SEQ ID NO: 21322 - DNA, 542 bp, Zea mays
  misc_feature (49)..(49): n is a, c, g, or t
  Coding DNA Sequence Number=SeqID_6919
gaggtatcgccagtccggagcagccgcctgaattggtctaggccgcacnccggaaaaccactcgcctccacgcctcgagctttctccttctcagcagagcctgcggtcctcatagcaggcaaacaaactgatagttagtcaaccggagttccagatccagagagaccagcccttacgcgtcaagccaccccgaaacgaagccctacccgccacgcctcttcaccggagagcactccactgccgtgggagaggatgagagaaccagggagagcttggggtccacgcgcttaatccgacccctcagatctaccacatgaagctagagccccggccaaacctccccaccgccgagcaaacacacaaccgccttgaaagctccactctcacaacgctagcttagatttcgagatccggaaaggagacacagcgaagggtggaggagaggagacacagagagggagccctctcacggcagtgacggccgaagcccaccaccggagaggcgaacgttttcaccggaaatcgcctttttctttagagtg

SEQ ID NO: 21323 - DNA, 551 bp, Zea mays
  Coding DNA Sequence Number=SeqID_6920
tcccctctgcaacaatcacttagataattcagccatgggtaaagagaagttccacatcaacatcgtggtcatcggccacgtggattccggaaaatcgacaaccaccggtcacctgatctacaagctcggcggtatcgacaagcgtgtcatcgagaggttcgagaaggaagccgccgagatgaacaagaggtctttcaagtacgcgtgggtcctggacaagctcaaggccgagcgtgagcgtggtatcaccatcgacattgctctctggaaggtcgaaaccaccaagtactactgcaccgtcatcgacgctcctggccatcgcgatttcatcaagaatatgatcaccggtacctcccaggctggattgtgctgttctaattatcgatcccaccacccggtggggtttgaggctggattctctaaggatggtcagacccgggagcatgctcttctcgctttcaacggcttggtggtaagcaaatgattttgctgctggaacaagatggatgcaccgactccctagtactctagggctaggtacgtggagtttt

SEQ ID NO: 21324 - DNA, 472 bp, Zea mays
  Coding DNA Sequence Number=SeqID_6921
gtttctttaacctagatctcgttcgccggcagcagaatctgctgttttcgtcgctgctgccggcccccacccctttgtttgatttgttctttccttttgttgctccacttgtatcttcttcctgtccgatatgcttgagccctgttctcagtttggaatggtgtttcggtgaggctgggttagaggaagtggtggctgtggcacggaatcgggagatctatctttagctgctcagttccggtggtatttggttagatctggttcacttttggtggttcaaggcgtttggggactgcgtctctgttctctggtggctttcagacgaaatcggttccttttggacagttttgcgagcgataaagtagatctcggatggggtgggaatgggtctgtcgatggtttcagttcagggtcggagtttcagggaaagtggctagtttctgctgtagattccgattcagatctgggcctc

SEQ ID NO: 21325 - DNA, 551 bp, Zea mays
  Coding DNA Sequence Number=SeqID_6922
agatagagaactccaaccccggcagccatcaggggaaatagaaagacaccagcccccccctgccagctttctccaccaccctgagccagaggcccagatctgaatcggaatctacagcagaaactagccactttccctgaaactccgaccctgaactgaaaccatcgacagacccattcccaccccatccgagatctactttatcgctcgcaaaactgtccaaaaggaaccgatttcgtctgaaagccaccagagaacagagacgcagtccccaaacgccttgaaccaccaaaagtgaaccagatctaaccaaataccaccggaactgagcagctaaagatagatctcccgattccgtgccacagccaccacttcctctaacccagcctcaccgaaacaccattccaaactgagaacagggctcaagcatatcggacaggaagaagatacaagtggagcaacaaaaggaaagaacaaatcaaacaaaggggtgggggccggcagcagcgacgaaaacagcagattctgctgccggcgaacgagatctaggt

SEQ ID NO: 21326 - DNA, 520 bp, Zea mays
  Coding DNA Sequence Number=SeqID_6923
gatggcgatgttaccggcgctcttctcttctccctcgattctcaccagaagagtcagatgcggagccaccgcgaaaagcggcggcgcactctcgtctgcatctcccgactccgaccctaggagaggcgtctccgtttataaacccaaatcgtacgaagttctagtctctgacgccgcgaactctctcgccttcgctctccaggaatccaaatctcgtttggaaatcgatttcccacctttgcccagtagcatttcttcatacaagggctcttcagacgatttcattgatgccaacatacaactggctttgtctgttgtccggaagcttcaggagaaagtagagactagagcgtgcattgtctttcctgataagcctgagaaacgcagagcttcgcaactcttcaaagcagcgtttgattcgattgatggcataagtatccgttctctagatgatatacctggcacttctgtcaccaatttcttcaggtctataaggagtaccttgggactttgattttga

SEQ ID NO: 21327 - DNA, 546 bp, Zea mays
  Coding DNA Sequence Number=SeqID_6924
ccttcaccttctctgatttggattttgtcaatctcatcgattcgattcttctcccaatcaaatctctctccaattctctcatcaggaaagttcaaatttttctccatcattctctctctttggtgctttcccctcgttaaaaaaaaaacgaaaatttgagataaagagaaaccttccatggcagcagctatgagcgagaaggaagctatggttgatcctttcctggtcgaagctcttcagaaccctcgtcatcgtctcacaattctgcgtatggagctggacatacaaaagttctttcaaagcccagagcagcagcaatacgagttccctccttacccaacctcctacctccgcctcgctgctcaccgcgtggcccaccactacggcctcttcaccactgccttagacggtgctgctctagacggctccgggaacaggatcctcgtcaccaagaccggtgagagcagctacccttacgtctgtttgtctgagattcccgtgaagcagcctgaggctaacgggaggaggcctcagggcttcaagctc

SEQ ID NO: 21328 - DNA, 503 bp, Zea mays
  Coding DNA Sequence Number=SeqID_6925
gggtctcaagacatctatcaactttaggattcagaatcacaagatgaagctcgttgaaatggaaggatcgcacgttcttcaaaacgattacgactctcttgacgttcacgttggccagtgctttggcaccatagttaccgcgaatcaagaacctaaagattactacatggtagcatcctctaggttcttgaagacggttattacgacgaccggacttctccgctacgaaggaggcaaaggaccggcctcttcacagctcccggctggtccggtcggatgggcctggtcgttgaaccagttccgatccttcaggtggaacttgaccgctagtgcagctaggcctaaccctcagggatcttaccattatggaaagatcaacatcacacgcacaatcaagctcgtgaacactcagggcaaggtcgatggtaagcttaggttcgcattgaatggagtctcccacacagaccctgaaactcccttgaagcttgccgagtactttggta

SEQ ID NO: 21329 - DNA, 585 bp, Zea mays
  Coding DNA Sequence Number=SeqID_6926
cttgctaacctaatctcgaatctcgaatctcaaatttgtgcttttcacctctagaaagaatcaatggcgcccaaggcagagaagaagcccgcggagaagaaaccagcctccgagaagccggcggaggagaaatccaaagccgagaaagctccggcggagaagaaaccaaaggccgggaagaagctccccaaggaagccggcgcgggcggtgacaagaagaagaagatgaagaagaagagcgtcgagacgtacaagatctacatcttcaaggtcctgaagcaggttcaccccgacatcggaatctcgagcaaagcgatggggatcatgaacagcttcatcaacgacatcttcgagaagctcgctggcgagtcctccaagcttgcgaggtacaacaagaagcctaccatcacttctagggagattcagaccgcggtgaggcttgtgctgcctggagagttggcgaagcacgctgtctcggagggaaccaaggcgggtacgaagttcacgagctcttgagctatgaggtagggtttttctccttggttcgaatgtctgaattagataatggcccatgtttgatttttc

SEQ ID NO: 21330 - DNA, 542 bp, Zea mays
  Coding DNA Sequence Number=SeqID_6927
ttgtgatatattcttcatcttcttcgcattggtgtcccctttagctcagaatcagatccgcttccttcgtcgaggtctctttcggatcagcagagaaagaaagctctctttcattcttactattcagcttccggctttcaagaaatcaccaaatggacggaggtggtgacgtggcaacgcctgtacaaaagcgagcacacgaggcgtggaggctttacaaatactatctcgacaagacgacacctcactcgacctacaggtggatcggcacgctcgtcgtcttcctcatctactgcttgagggttttctcaattcacggattctacatcatctcatacggcctcggcatctacctcctcaacctcctcatcggcttcttgtcccctctcgttgaccctgagctcgatgcctctgatggtggtgcttctctccccactcgtggctctgatgagttcaagccctttatccgccgactccctgagttcaaattctggtactccatgactaaggccttcggcattgcctttccgataacgttcttc

SEQ ID NO: 21331 - DNA, 470 bp, Zea mays
  Coding DNA Sequence Number=SeqID_6928
tgctcgattccttaccaggcaaagagagatctgagatttgggtttctatggcggtttcaaatgccttggtgggttgcccaaagcttgagactttattgaatctatcgtctacgtctactttgcaaacaccattgggtctcattggtgttccgaggaacaacagaaccagacgtggtctcatccatagagcacgttgcgagctttctccgtctgattctgcaaccatctctgctctcgaacaactcaagaactctgcgcccgacagatatacaaaggagagaagtagcattgtggtgattggtctcagcattcacacagctcccgttgagatgcgtgagaagcttgctatccctgaagctgaatggccccgagctattggtgaattgtgcggtttgaatcacatcgaagaggctgctgtcctcagtacttgcaaccgtatggagatttatgttttggctctttctcagcac

SEQ ID NO: 21332 - DNA, 491 bp, Zea mays
  Coding DNA Sequence Number=SeqID_6929
aagtcttgttcactcgatgtattgatctcaaacccagattcggtacaactccggcgagtttccccacctcttccgttctcaatccagcgacgcttctatttcttgatgaccacagtagcctccggcttcgtatctttctcgctggcgctgaatctggagagacaaatcgaccaagattcatcaaatctccttcttacactacctgttttctctaaccacctctccaattcaatagattttcaggccaaatctcgacggtcatgtcccaacatccgaactcagtctgcatgtcttcccgtggtttcagcatcgttaacccaaatcgaagtagacacaacaacaacaacaacaagcctctgttcaagtattgtctcgtcaaaaccaatctcggaggccttgcttaacatatctctagcagatctggatccaggaactgcaaagcttgcgattaggatcttgggtactgccttatcagctttcgggtttctctt

SEQ ID NO: 21333 - DNA, 561 bp, Zea mays
  Coding DNA Sequence Number=SeqID_6930
tttgctgcacttctcaatgtctcattgtttcctgcctcaatagcaccactcaaatctgcagttgcatcagctctcttggagtaactgataacaatcctcaaaataaagagaaacccgaaagctgataaggcagtacccaagatcctaatcgcaagctttgcagttcctggatccagatctgctagagatatgttaagcaaggcctccgagattggttttgacgagacaatacttgaacagaggcttgttgttgttgttgttgtgtctacttcgatttgggttaacgatgctgaaaccacgggaagacatgcagactgagttcggatgttgggacatgaccgtcgagatttggcctgaaaatctattgaattggagaggtggttagagaaaacaggtagtgtaagaaggagatttgatgaatcttggtcgatttgtctctccagattcagcgccagcgagaaagatacgaagccggaggctactgtggtcatcaagaaatagaagcgtcgctggattgagaacggaagaggtggggaaactcgccggagttgtaccgaatct

SEQ ID NO: 21334 - DNA, 540 bp, Zea mays
  Coding DNA Sequence Number=SeqID_6931
agtgctccaatcattattccagcgatgatgaaagcaaaccagaaagcgaaaccacacgcgccaccgcgtcctctcttctcctgcggcttcttccgccgctgcacacagtccgtcctcagtccaacctctcctcaccgtaagccgaccaccaccccttcctcctcttcgtcctcatcaacctccacctctcaaagcttcactcaatggcgtttcccgcatcacgctgaccaaactccatccaccgtcactcttcctcccactcctccccctccgccgcctcttccggtcgccaccactctccaagaaacgttccagatcgctgagcttcacctcgcatccgtctcccagtccgacaagctcctcgctctccagctgctcgagcgagtcgtcgtacccgacccgccgtcgaatccgacttgcccgccgggtctcatgcgaggcctcgtctcttgcctccgcagcaacaacatcgtaacccgccaaatacgtcaccaagatcctcctcgcgctctgcctcgccgaaggtaaccgacaagtggc

SEQ ID NO: 21335 - DNA, 129 bp, Zea mays
  Coding DNA Sequence Number=SeqID_6932
gaattcgaaaaaagccagatctagatccaccttaaggagagcgtcttcatacacgcccttccgtctcttcctcctcctcgcgaatcttgttttctacagatctattcttctccgaaaacgaaaatgagg

SEQ ID NO: 21336 - DNA, 482 bp, Zea mays
  Coding DNA Sequence Number=SeqID_6933
accgtcttcgctggtgccaatgagcgcgctcactcgccgtccgtcgttttcccccggagaaatcgccgtttctcgttctgatttcagagtcagagtcatcgatgcggaagacgagttggatccggagacgagtgagggaggaggatctgctctattgatggcggaggaagcaatcgaatctgtggaggaaacggaggctctcaagagatcgctggtggattcgttgtacggcacagaccgagggttgagcgcatcgagcgagacgagagccgagatcggagatctaatcacacagctcgagtccaagaaccctacaccagctcccaccgatgctctcttccttctcaacggcaaatggatccagattaagttcgaggaaaggtgtgatcggcactcctcagctaacggattcgattgagatcccggaggttaggttggagtttcttgggtcagaagattgatcttacttccggaatcagagg

SEQ ID NO: 21337 - DNA, 502 bp, Zea mays
  Coding DNA Sequence Number=SeqID_6934
ccctgcaaaacacgagtccaaagctcagcaaactcaaaacccctctccaagccaccgtcgctggtgccgacgagcgcgttcactcgccgtccgttgttctcccccggcgaattcgccgtttctcgtgcggatttcagagtcagagtcatcgatgcagaagacgagtttgattcggagaggagtgagggaggatcggctctattgatggcggaggaagcaatcgaatccgtggaagagacggaggttctcaagagatcgctggtggattcgttgtacggcacagaccgagggttgagcgcatcgagcgagacgagagccgagatcggagatctaatcacacagctcgagtccaagaaccctacaccagctcccaccgatgctctcttccttctcaacggcaaatggatcctcgcgtacacatcgtttcgttggtttgttcccgttgctttccacgagggatcgtgccgttagttaaagtcgacgagatctcacagacgattga

SEQ ID NO: 21338 - DNA, 542 bp, Zea mays
  Coding DNA Sequence Number=SeqID_6935
caacgtttcagatcgccggcggagtctcagatcccccacgttaccatcctccgaagattgtaacttttctacaaatctacgcttttgtacgttgacttcgaaaaactggtggttataagtcaaaatctctctctctctatatctctcgtcttctttgcagaaaccttttattccgatccaataaaaactctacaatggcagacaccacaggatccggttcgtttatgtcggagaaatccgcaaagatcttcgtcgctggacacagaggacttgtcggatccgcaattgtccgaaaactccaagaatccggtttcaccaatctcctcctccgaacccactccgacctcgacctcactaaccaatccgacgtcgaatccttcttctccacagagaagcctgcttacgtcatcctcgccgcagccaaagtcggtggcatccacgccaacaacacctacccagccgacttcatcgccgtcaatctccaaatccaaaccaacgtgatccactccgcttacactaacggcgtcgagaaactcctcttc

SEQ ID NO: 21339 - DNA, 502 bp, Zea mays
  Coding DNA Sequence Number=SeqID_6936
ttttctagggcgtcacgatgcagcagccaccacaaaacgccgccggagcagggcagcagatcccttctgaccagcaagcctatcaccagcagcaactctcgtggatgatgcaacagcaacagggccagcaatggaaccagcagtcagcgccgtcacagggtcaacagccctacggatctcagaatccaggatccgataacgagattcgctccttgtggatcggcgccttgcagccgtggatggacgaaagctacatcatgaccgtcttcgctcaggccggcgagggttcaatcggctaaagtgattcgcaataaactgactggtatgtgcgagggttacggatttcgttgagtttgccaaccacgctgcagctgagcgtgtgttgcagacctacaacggtactcagatgcctaactctgaccagacctttaggctgaactgggctcaggccggggctggtgagagacgccaagctgaagggcctgagtacactatccttggg

SEQ ID NO: 21340 - DNA, 518 bp, Zea mays
  Coding DNA Sequence Number=SeqID_6937
ctagtttttctaatcggtttgcgcgagagagtttagagtgtaaaacggcgagagcttctctcatcttctcactcaggcagcttctattccaaccgaacaatgtcgctggtagcaaacgaggagttccagcacattctgcgtgtgctcaacaccaacgtcgatggcaagcagaagattatgtttgctcttacctccatcaagggtattggaaggagactagccaacattgtctgcaagaaagccgatgtcgacatgaacaagagggccggtgagttgtctgcagctgagatcgacaacctcatgaccatcgtagcgaacccgaagcagtacaagattccagactggttcttgaacagacagaaggactacaaggatggaaagtactcccaggttgtttccaatgccctcgacatgaagctcagggatgatcttgaacgcctcaagaagatcaggaaccaccgtgggctgaggcactactggggtctccgtgtccgtggacaaccaccaagacaactggt

SEQ ID NO: 21341 - DNA, 563 bp, Zea mays
  Coding DNA Sequence Number=SeqID_6938
gcgtgtttaacagtctcaaatagtctaaccagaagaagaagatcatagcaacaatggcttcaagctctgcgtctcttctcaaagcctcaccggtgaaatctgattgggttaagggacagagtctcctcatccgtcaaccatcctcagtcgcagctatccgcagcaacgcagcaccttccgctctcaccgtccgtgcggcctcttacgccgacgagctcgtcaaaacagctaaaacaatcgcgtctccgggacgcggaatattggcgatggacgagtcaaacgcgacttgcgggaagcgtttggcgtcgattgggctagagaacacggaggctaaccgtcaggcttaccggacgctgcttgtgtcagctccgggattgggacagtacatctccggagctatcctcttcgaggaaactctctaccagtccaccgttgacggcagaaaaaatggtcgatgttctggtcgaccagaacatcgtccctggaatcaaggtcgacaaggggtttggtgcccgcttgttgggtctaacgacgagtcatggtgccagggactccaccggttg

SEQ ID NO: 21342 - DNA, 409 bp, Zea mays
  misc_feature (372)..(372): n is a, c, g, or t
  Coding DNA Sequence Number=SeqID_6939
ttgcaaggctagaggatccgatcttagggttcacttcaagaacactcgggaaacagcgcacgctatcaggaagctaccattgctcaaggcccagaggtaccttgaggatgtgatagctcacaagcaggctattcccttcacccgtttctgcagaggtgttggaaggactgctccagccaagaacaggcactccaatggtcagggacgttggcctgctaagtctgctcagtttgttcttgatttgctcaagaatgctgagagcaatgctgagagtgaaaggtttggatggtgatgccctctttatttcgcacatccaagtgaccaagctgccaagcaaaggaaaaaggacttacccgggtcatggaaagatcnacccttacatgggccacccatggccatttgaactaat

SEQ ID NO: 21343 - DNA, 393 bp, Zea mays
  Coding DNA Sequence Number=SeqID_6940
ttttcctcttttctacacattcaaatggccactgctgatgttgaacaagtgactccagccgcagctgagcacgtcgagatgacaccaccaaagacagtggagcctgaggaaaccgccgccgccgttgtgaccgagtctgctccagctcaggtaacagaaactgaagctcccgtggaagaaacagagaaaccaaccgaagaagcagatgaaaccaaaaccgagacgaaagaggaagaagctccagtcgaagtaaccacaaaagacctccccgtcgaagaaacagagaaaccagctgaagaaacagaggaggccaaaacagaaactgaagagatcaagaaagaggaagaagctcccgtggaagtaaccactaaagacctccctgttgaagaaaca

SEQ ID NO: 21344 - DNA, 466 bp, Zea mays
  Coding DNA Sequence Number=SeqID_6941
ttcttcctctttcttaggctctacaacttcctctgttttgctctcttcctccacaaccgccggagcttcttcttctttcttgatttcctctgtttcttcaacagggaggtctttagtggttacttccacgggagcttcttcctctttcttgatctcttcagtttctgttttggcctcctctgtttcttcagctggtttctctgtttcttcgacggggaggtcttttgtggttacttcgactggagcttcttcctctttcgtctcggttttggtttcatctgcttcttcggttggtttctctgtttcttccacgggagcttcagtttctgttacctgagctggagcagactcggtcacaacggcggcggcggtttcctcaggctccactgtctttggtggtgtcatctcgacgtgctcagctgcggctggagtcacttgttcaacatcagcagtggccatttgaatg

SEQ ID NO: 21345 - DNA, 538 bp, Zea mays
  Coding DNA Sequence Number=SeqID_6942
gagtgcaaaaaacttcccatcagtgtaaggtttgattttgtggataacgctgagataaaagacgtaacctcgttagatgccaaaaatttccacttcaacgttatcagcggcaagaacatgacctttgataacatcaagatcatcgctccagctgaaagccccaacactgacggtatccatttgggaagatgtgagggagtcaagatcctcaacactaagatcgccacaggagatgactgtatctccgtgggagatgggatgaagaatctcctcatttgagaaagttgtgtgccgtccaggacaccgaatcaagtgttggaagccttggaagggacggatgggagccagatgtcactgacattacggttaagaactggaccctcgagggaaccgacaacggtctgaggatcaggacatggccatctgccgcttgcaccaccaccgctgccgggattcattttgtaggatatctcccttaacaaagttagcaaacccattcctcttcgaccaggaggactggcccttggaaccatggcaa

SEQ ID NO: 21346 - DNA, 475 bp, Zea mays
  Coding DNA Sequence Number=SeqID_6943
gttatccaaacacacacttctcagtcctttcttggcgatagaaatggcttctcaatcttttactttggcgaatctaaggatctcccaaatcgattccttctacagtcagaaaccatcttctccaatacacttcttctccactagaaatccagtaaaatccctgaacctgacgaatccatggatggccggtgattcttctctctctctcgattcttccgcctccgtcttgcgaactaactcgacaacgcgcagaaagatcccaatcgccgtcgttgccagcttacccaccgcgaatccagaatctgcggtttctgatgcgaaaaagccaaaatggtcgtggagaggaatcatatcatttgcaatgggagagctcgaagctaggaagctcaagtatcccaacaccggtactgaatcacttctcatgggtatcttgattgaaggaactagttttacttccaagtttttgagggcgcat

SEQ ID NO: 21347 - DNA, 471 bp, Zea mays
  Coding DNA Sequence Number=SeqID_6944
ctctctcacacctatctatcaaaatgggttcttcttctacagctcaagaagagcctcaactagtagatacacctgccattgttccttctccgttagctcaggaacctgacaacgatgtaccggcgccgggaaaccagtttgctgagttcgccgccggttgcttctggggggtggagcttgcttaccagaggatccctggcgtgacagagactgaggttgggtacactcagggtatctctcacaatccttcttacaaggatgtctgcaccaacacaacgaaccatgcagaggttgtaagggttcagtatgatcctaatgagtgcacctatgagactcttcttgatttgttctggtctaggcatgatcccaccaccttgaatcgtcagggaaaacttgtgggagctcaatatcgttcaggtatatacttctacacgcccgagcaagagaaactagcacgcgagtctcttgaga

SEQ ID NO: 21348 - DNA, 572 bp, Zea mays
  Coding DNA Sequence Number=SeqID_6945
catcacatcgttttcttcgtcgaaaatcaatttaaaaagcaaaaaaaaaagaaggaagaatcgtcttcttctcttcaaacgaacgccttctcagatatcctctttgcacacccgattagcccagcgatcatggctcaaaccgatctcaatcagccgaaactcgatatgactaaggaggagaaggagaggttgaagtatttggagtttgttcaagctgctgctgttgaagcagtgcttcgctttgctctcatttacgccaaggctaaggacaagtctggccctttgaagccaggtgttgaatccgtcgaaggagctgtcaagactgtcgtcggtcctgtctaccagaagtaccacgacgtacccgtcgaggttctcaaatacatggaccagaaggttgacatgtctgtgaatgaacttgaccgccgcgtcccaccagtggtcaagcaagtctctgcccacgccatctcggctgctcagatagcacccgtcgtggcacgtgccttcgcctccgaggttcgacgtgctggcgtcgtggaaaccgcctccgggatggctaagtccgtctacaccaa

SEQ ID NO: 21349 - DNA, 570 bp, Zea mays
  Coding DNA Sequence Number=SeqID_6946
caggttgcttcagcttctctgaagtaatagaaggggcttacagatacgggttcaaaagatccggtatacgacccgtaaccatcgacttgaaagacggaaccgtggtccatttctgggtatccaagacccgagacgagtccaaacccaacctcctcctcatccacggactcggagcttctgccatctggcaatggtacgacgtcgcacgacgcctctctcctcatttcaacctcttcatccccgacctcgttttcttcggcggatcctccacgacccgacccgaaagatccgacgttttccaggcccagacgcttatgcgggccttagaggcccagtccgtgaaacgtttcagcctcgtcggtcttagctacggcgggttcgtcggttaccgaatgccgtcgatgtacggagacgccgttgagaagggggtgatatgctgcgccgccgtgtgcgtggaggagatgacatgagggaccgcgttttcgccgtctcggatcttgatggagctcccaagatccccgtggcggagtctggtgaagagctacgggaacttatcggttacatctctac

SEQ ID NO: 21350 - DNA, 582 bp, Zea mays
  Coding DNA Sequence Number=SeqID_6947
aaaaatcgatctctggtctcaactatcgatttccaggcatctacaaatggctgtatgcaccaaactcggggttttacagaacagaaatgttccagtgacatcaatgctccgctacatgtccacaaaacttttcattggtggcctatcaccaggaactgacgaccagtccttaaaagatgctttctctaccttcaatggagtgacagaggcaagagtcatgacaaacaaagtgacgggaaggtcaaggggttatggatttgtcaatttcacaagtgaggattctgccaaatctgctatttcagctatggatggacaggagttgaatgggcgtaacatccgcgtggatgttgcaaaagaatggccgagcttgccgttttcttcggttgaaggtacagaagatgagaagaaaggcaataagatggtgagccgatctgtatggaaagatccgttcgttgacgccttcttgatgaagaagaaaaacgcagctctgaacaggaaatatggtccagggagtcgacgattctgccagagtatggtgattcgtcggtgagaatctaacatggcaaaactcacgtgcgttgt

SEQ ID NO: 21351 - DNA, 362 bp, Zea mays
  Coding DNA Sequence Number=SeqID_6948
gaatttcatttttccgatttgcctccgccaagctgaatccaagagagacaatgggagctttcgcatctagattttggttcatgatgttccctgcaaaagagtacaagattgtcgttgtcggtttggacaacgccggtaaaacgacgacgctttataagcttcacttgggtgaagttgtcactactcatcctaccgtcggaagtaatgtcgaagagctcgtttacaagaacatccgcttcgaggtgtgggatcttggtgggcaagataggctgagaacatcgtgggcaacgtactatagaggaaccaacgctgtaatcgtggttatagatagcactgacagggccagaatctctctcatgaaa

SEQ ID NO: 21352 - DNA, 523 bp, Zea mays
  Coding DNA Sequence Number=SeqID_6949
acttcgtatctatctcgcaatcaaagaaatcttacaaggcgtatagtttctgctcttccaagcccgtatggtgattcactgaaagctggactttcgagtaatgtctctggcaacaaggatcctcgtaacattgctccaagatctggagttatagtggcgaagaaaggaaacccgcctgtaatgccatcagtgatgacccctggaggacctttggacctctcttcagtgttattccgtaaccgcataatcttcatcggacaaccaatcaacgcacaggttgctcagcgtgtcatatctcagcttgtaaccctcgcttctattgatgataaatccgacatcttgatttacttgaattgtcctggaggcagtacttactcggtcttagcaatctatgactgtatgtcttggataaagcctaaagttggaacagtagcgtttggagtagcagcgagtcaaggagcacttcttcttgctggaggggagaaaggaatgcgctacgcaatgccgaacactcgtgtcatga

SEQ ID NO: 21353 - DNA, 537 bp, Zea mays
  Coding DNA Sequence Number=SeqID_6950
ggttcctgtcctaaaagaggctctttcttctttccagcttccaagttgtttgctgttggcaatggcgaggataaagcctcaggctcttcttaatcaaagcaagaagaagaagggtccaagtcgtataagtatctccacgattgtcgtgtgtaatcttgtagttgctgtagtcgtactatccttggtcactacttaccgccattggtcccagaggtcaataaacgttattgaaacccagagtcaaagattcgaggacacaaatgctgcttcagaacaaaagagttacgatcttcctggttatgccgatataagcacatcaaaaggtctcataactgtggaactctttaaagatgcttcccctgaagctgtggaccggtttctagatctatgtcaaaaagatcacttcaagggaatgccgtttcatcgggttataaaaaactacttggtaacaagctggtcactcccagagctccatacctggttgaagaatggacatctaaaggaaagctccgtggtcgccttaacactagcccaaaa

SEQ ID NO: 21354 - DNA, 512 bp, Zea mays
  Coding DNA Sequence Number=SeqID_6951
gcagttttcaatctttatcgccgtcgccttcatcgtcttctctgcatcaacaaacgccaaaaccgcgagcccaccagctccaatgctaccaccgacacccgctccagcaccggccccacaccacgtgaatctcacggagcttctaagcgtagctggtccgttccacacgttcctcgactacctcctctcgtcaggagtcatcgaaacattccaaagccaagccaacaacactgaggaaggcgtcacgatcttcgtcccaaaagacgatgctttcaaggctcagaagaatcctcctctgtcgaacctcaccaaggatcagctcaagcagctcctccctctcccacgctcttcctcactactactctctttccgagttccagaacctgagcccatccggccccggtagcactttcgccggtggacagtacccttttgaaggtcactgatgtttccggtaaccggtcggatcgagacgcctctggaccaggactaaagtccccagcagcggtttc

SEQ ID NO: 21355 - DNA, 493 bp, Zea mays
  Coding DNA Sequence Number=SeqID_6952
cgttttcttcttcaatcagacttttccaatcgccgacaccgttttaacttcgatggttccgtcaccgttaaacccgcaacagatccaacaattcctctcctccgtcctctcacagcgcgggcccaactccgtcccctacgacgagtccaccaagtggctaatccgccaacatctcctcaacctaatctcatcctacccttccctcgagcccaaaacggcgacgtttatccacaacgacggccgttccgtaaacctcctccaagctgacggaaccatcccgatgccttaccacggcgtcacctacaacatccccgtcatcatctggctcctcgagtcctaccctcgccaccctccttgcgtctacgtgaaccccaccgccgacatgatcatcaaacggccccacgcgcacgtcaccccctcggggctcgtctctctcccttatctgcagaactgggtttaccctagctccaatctcgtggatctcgtctccgat

SEQ ID NO: 21356 - DNA, 500 bp, Zea mays
  misc_feature (262)..(262): n is a, c, g, or t
  Coding DNA Sequence Number=SeqID_6953
gaaaggattcggattctctgtcaattagggaagagaagagaagttatcagcagtattgggataagatagatagatgagttcatctctacctatgaggctcctcgtgcctctcacacttcccttgattcctcctcctccttcttcttcggattctctagcgctcagatcgaaaaatcctaactttagtctccgatcctcttcttcttgtacctcttgctcttcttccctgtggcagctattcccccggagatccagatcctcnttctccttgtgttcccatgtgcacgaaagatcaagacaggacagatattttgagaaatgaagatggatctagttacgtgtgggcttgaatctgatgaagattccggaggcctccggattcctactcaggctcaggccatcgtggaaggagcaccgcggtcacagtggctgtctctgagctcaaaccttcccctgggatgttgattacattcaagagctactggcgatacagcagcaag

SEQ ID NO: 21357 - DNA, 482 bp, Zea mays
  misc_feature (251)..(251): n is a, c, g, or t
  Coding DNA Sequence Number=SeqID_6954
tggttctaggcccttgctgctgtatcgccagtagctcttgaatgtaatcaacatcccaggggaaggtttgagctcagagacagccactgtgaccgcggtgctccttccacgatggcctgagcctgagtaggaatccggaggcctccggaatcttcatcagattcaagcccacacgtaactagatccatcttcatttctcaaaatatctgtcctgtcttgatctttcgtgcacatgggaacacaaggagaangaggatctggatctccgggggaatagctgccacagggaagaagagcaagaggtacaagaagaagaggatcggagactaaagttaggatttttcgatctgagcgctagagaatccgaagaagaaggaggaggaggaatcaagggaagtgtgagaggcacgaggagcctcataggtagagatgaactcatctatctatcttatcccaatactgctgataacttctcttctctt

SEQ ID NO: 21358 - DNA, 515 bp, Zea mays
  misc_feature (466)..(466): n is a, c, g, or t
  Coding DNA Sequence Number=SeqID_6955
tggccatcatcaagatcagctcacgaggttttactaattgttcttccatatctccactcactcttcgagcttctctccatgaccggcgtttcacgctccttaagagacgcgatcagagacgaaacagctttatggacaaagatcgttgttgaaccacccctgcgttctcgtctaaccgatgatattctacgggagatcacttccaaatccgccggaaaattaaacactctgattctccgacagtgtcttaggatcaccgacaagggacttcgacgtgtggtggacgcaaatcctctgataagaaagataattgtgcccggatgcactgaactgactccagaaggaatcattggatgcgttgaaagcttagccaccgtggagacacttcacatccacggcgtacatcgcttcactaaagaccatctctcagcactctccacttaccttcctcacgggggcgccatangatgtcgaggtctgtcccaaatgtgacctagtcaagatgattccctcat

SEQ ID NO: 21359 - DNA, 566 bp, Zea mays
  Coding DNA Sequence Number=SeqID_6956
tccctctctcgattccgaaactattccgcagagtgaagaaggatggggttgtctttcgggaagcttttcagcaggctttttgccaagaaggagatgaggattctgatggttggtcttgatgctgctggtaagaccaccatcttgtacaagctcaagctcggagagattgtcaccaccattcccactattgggttcaatgttgaaactgtgcagtacaagaacatcagcttcacagtctgggatgtcgggggtcaagacaagattcgtccgttgtggaggcactacttccagaacactcaaggtctcatctttgtggtggacagcaatgacagagaccgtgttgttgaggctagagatgaattgcacagaatgctcaatgaggatgagctgcgtgatgctggtctgctcgtgtttgctaacaagcaggatcttcccaatgccatggacgcagctgagatcaccgattagcttggcctccactctcctcggcagcgtcactggtacatccagagcacatgtgccacttcaggcgaggggctttacgaaggtctggactgggtgcccca

SEQ ID NO: 21360 - DNA, 529 bp, Zea mays
  Coding DNA Sequence Number=SeqID_6957
aaagctgatacaccaagctggttataaactctactttctcagtttcagacatacaaaaacaacagaaaaatgggaacagagatggtcatggttcacgaggttccttttcctccacagatcatcacttccaagcccctctctcttcttggccaaggcatcactgacatagagatccatttccttcaagtgaagttcacggccataggagtttacttagatccttcagatgttaaaacccatcttgacaaatggaaaggcaagaccggaaaggatcttgccggcgatgacgacttcttcgacgccctggcctccggggagattgagaaagttataagggtggtggttataaaggaaataaaaggagctcagtacggagtgcagctagagaattcggtgagagatcgtttggctgctgaggataagtacgaggaggaagaagaaaccgagctcgagaaagttgtgggattttttcagtctaggtacttcaaaactcattccatcatcacttaccgtttctcagccaaagatg

SEQ ID NO: 21361 - DNA, 489 bp, Zea mays
  Coding DNA Sequence Number=SeqID_6958
aaagtagttgtctctctctggatctagctgcgcaacattgcagctgatacttgcttgttaagctatggtgacgatccggagcgtttcagtgtttatccttgttctactcgctatatcatccctggctttggttgcgaacggggaagacaagacgattaaagtgaagaaagtgaaggggaaggaggtgtgcacgcagggatgggaatggtgtctggtggtccgagtactgctgtaaccagaacatatcagattactttcaggtttaccagtttgagcagctctttgccaaaagaaacactcccatagctcatgctggtggtttctgggactaccagtccttcatcaccgccgctgctctcttcgagcctctccggtttggtaccactggtggaaagctcatgggacagaaagaaatggctgccttcctccgtcatgtcgccagcaaaacttcctgttggatacggagtcgcgacaggagggcctttagct

SEQ ID NO: 21362 - DNA, 589 bp, Zea mays
  misc_feature (561)..(561): n is a, c, g, or t
  Coding DNA Sequence Number=SeqID_6959
aaaatttgcttctctgttagctcaaagatcaaccatggaagctaccgccctaagctctgcggccaccatcgtctcttcctcatcttcgtcgctatccatcttctctccgaagaagagaacatactcatcttcgccaagaatcgtccggctttctaagagtaaacaaccttacgcataatatgctatttcattgcttacgatcatctctcagggttactttgattcttctcttttcttattttgattcagaggacgacaaagattatgatcccaaattcgaatcggattccttgagcctcgttcctctattccaaaatcgaactctctcgaatgatgaggccatgggattggtcttgagcgccgcctcggtcagaggctggaccaccggttccgggatggaggggccgtctcttccggcaaaggccgatgcggagacgatttcaacatttccgtggtcactattcacgaaatcgcccccgtaggcgtatgcgcgttgccttcacttgcaacgtttgtggacagagaactacacgagccataaatccacatgcctacactgancgcaccgtcttcgtgcagtgttgcggat

SEQ ID NO: 21363 - DNA, 419 bp, Zea mays
  Coding DNA Sequence Number=SeqID_6960
ggaaagcagcttgaagacggcagaactttggccgactacaacatccaaaaggagtctacgctccacttggtcttgcgtctacgtggaggcatgcagattttcgtcaagacgttgaccggaaagactatcactttggaggtggagagctctgacaccatcgacaacgttaaagccaagattcaggacaaggagggaatcccaccggatcagcagaggctcatcttcgccggaaagcagttggaagacggcaggaccttggctgattacaatatccagaaggagtctacgctccacttggtcttgcgtctacgcggaggcatgcagatctttgtcaagactttgaccggaaagactatcacttttggaggtggagagctctgacactattgataatgtcaaggccagatcctcggttggga

SEQ ID NO: 21364 - DNA, 565 bp, Zea mays
  misc_feature (76)..(76): n is a, c, g, or t
  misc_feature (457)..(457): n is a, c, g, or t
  misc_feature (518)..(518): n is a, c, g, or t
  Coding DNA Sequence Number=SeqID_6961
aatcaaaaactcttctcaattctctctcaatcgcaagtttcaatcaagatgcagatctttgtgaaaactctcaccnggaaagaccatcacccttgaggtggaaagctctgacaccatcgacaacgttaaagccaagattcaggacaaggaaggcattcctcctgatcagcagaggctcatcttcgccggaaagcagttggaagacggcaggaccttggctgattacaatatccagaaggagtctacgctccacttggtcttgcgtctacgtggaggcatgcagatcttcgtcaagactttgacccggaagactatcactttggaggtggagagctctgacactattgataacgtcaaggcccagatcccaggataaggagggaatcccacccgaccagcagaggttgatcttttgccggccagcagttgggaagatggggggactcttgctgactancacatccaagaggaggctacttctccatctcggcctcagggctccggggggggatgcaaantttttggcaggacttttgacgggggagaactatcactttgggaggtg

SEQ ID NO: 21365 - DNA, 534 bp, Zea mays
  Coding DNA Sequence Number=SeqID_6962
tcgtcctctctttctagaatctcaactctccagaatcatatctcccctcttgaagccaacaacaagctacggagtctggtcaagatatctccacaagtgtctgaagccatagccagtggacgtgctgtggtcgctcttgagtcaaccattatctcacatgggatgccttaccctcaaaacctgcaaacagcaaaagaggtggagtcaattgtgagagagaatggagcagtccctgcaacaatagctatattaaacggagtaccttgcataggtctgaacgaagaagaactagaacgtcttgcatctctgggcaaaagtgtccaaaagactgcaggcagggacataccacatgttgtggcgacaagaggagatggtgcaactacagtctctgcaacgttgttttttgcttcaatggttggcatccaagtctttgtaaccggcggggataggaggtgtgcatagacatgccaaccatactatggacatatcatctgatcttactgcactaggaaggactcctatagctgtgatatc

SEQ ID NO: 21366 - DNA, 503 bp, Zea mays
  Coding DNA Sequence Number=SeqID_6963
tttcgatttcgtttctctgatcatcgattctttttatctctctgtaggttttatgactcggatagtgttttgaatggtagaaacaactcctattgccagagattttatgctctcccattgcataaccgcaagggcgagctttctattccctgtctccaccccatcttggtacttctgttgcatcggtctcgacccttgaagaataaaaaaaaactccatcagagtgttagattcctttgtttttttggtatttgtgaaattttattataaagatggtgtataacaagcagaagaaagcccataaatctaagataaacaaattcctcgttagcatcagtttcataggaagtgctggacccattcgttttgttgtcaaagaagatgaaactgtttcacacgtgattgagtatgctctcaaatgctacgcccctgaaggcaggcttccacttctcggatcagattccagctatttcctactttaccggccttactgggcagctgaa

SEQ ID NO: 21367 - DNA, 508 bp, Zea mays
  Coding DNA Sequence Number=SeqID_6964
aacagaggaccgatgtgcacaacccccaggaaaaaactcaaatgggttttggggaaatatttttgatctccccttcagctgcccagtaaggccggtaaagtaggaaatagctggaatctgatccgagaagtggaagcctgccttcaggggcgtagcatttgagagcatactcaatcacgtgtgaaacagtttcatcttctttgacaacaaaacgaatgggtccagcacttcctatgaaactgatgctaacgaggaatttgtttatcttagatttatgggctttcttctgcttgttatacaccatctttataataaaatttcacaaataccaaaaaaacaaaggaatctaacactctgatggagtttttttttattcttcaagggtcgagaccgatgcaacagaagtaccaagatggggtggagacagggaatagaaagctcgcccttgcggttatgcaatgggagagcataaaatctctggcaataggagttgtttctaccattcaaa

SEQ ID NO: 21368 - DNA, 579 bp, Zea mays
  Coding DNA Sequence Number=SeqID_6965
taaactctcgtaaatgctctcttgagattgtctcttaagaaatgagtcccgtcggagtatctgccctctcttctccggctaaattccaccgccgccgggaaaaagcacagacttttactccgacccacttccctaatccaaatgggtttccatctccgtggataaagtctcgacctttcgctcccaaactctcccaatccctcaatttcgcttccccctctccacatctccctctcatacgctcctcgacgtctccttcttccaaggacttccttcagattctagcgagaaaagcagcgatctttctcgtcgggtcgtttgttttcctagggttctgttcttcgaagcctgctttagcgctgcccactgcgactgcgagctctcaatcggagctagaggacgaggcaatgttcgagaaggttctggagagtgagccggagaatatggaggcgatgaaggctgttttgtataagaagatgaggagagggaaacctgaagacgccgtcaagtacgttgagaagctgatgaagttagagcctcgtgaagtggagtggaagcttctagaagcgctttgctatg

SEQ ID NO: 21369 - DNA, 501 bp, Zea mays
  Coding DNA Sequence Number=SeqID_6966
tgcacaccactaccaacagagctaaattgctacactgtaaaaaagaagatgtttggacaaagcttcccggaggatattgattgtggcaacttctttgacaacatggacgacattcttgactttcccggttgtgatatggatgtcggtttcaacatcggtgactccgactctttccctaacatctggaccaatcatcaggacacatggcccgccgcttctgaccctctcttctcttccaacacaaactctgactcatcacctgagctctatgttccgtttgaagatattgtgaaagtggaaaggccagcaagctttgtatcggagtctttggtcgcgaagaaggaagattcgttttccacaaacacggactcatcttcttctcacagccagttcaggagctcaagtccagtgtcggtactcgaaagcagctcctcatcgtctcaaaccaccaacgcaacctcacttgtccttctcgggaaagcacgggtcgtccacccacaa

SEQ ID NO: 21370 - DNA, 592 bp, Zea mays
  Coding DNA Sequence Number=SeqID_6967
attacttaacccattttgccaatcaatcactcttcacttcttcccactcctacttttttcctttctaagcaatctctctctctcatactatctgcacagcactactaacagagctatttgctatattgtaaaaggaagatgtttggacaaagcttcgcggaggatcttgattgtggcaacttctttgacaacatggacgatcttcttgattttcccggtggtgatatcgatgtcggtttcggcataggtgactccgactcttttcctaacatctggactactcatcaggacacatggcctgcagcttctgatcctctcttcgcttccaacacaaactctgactcatcacctgagctctatgttccgtttgaagatattgttaaggtggaaagaccaaaatgctttgtagaggaatccttagttgagaagaaggaagattcgtttttcacaaacacggattcatcatcttctcatagccaattcaggagctcaagtccagtgtcggtactcgaaagcagctcctcatcgtctcatacaaccaacacaacctcacttgtcctcctggaaaaagcacggtcgtccacgcacaaaa

SEQ ID NO: 21371 - DNA, 503 bp, Zea mays
  Coding DNA Sequence Number=SeqID_6968
acgttttgtgcgtggacgaccgtgctttttccaggaggacaagtgaggttgtgttggttgtatgagacgatgaggagctgctttcgagtaccgacactggacttgagctcctgaattggctatgagaagatgatgaatccgtgtttgtgaaaaacgaatcttccttcttctcaactaaggattcctctacaaagcattttggtctttccaccttaacaatatcttcaaacggaacatagagctcaggtgatgagtcagagtttgtgttggaagcgaagagaggatcagaagctgcaggccatgtgtcctgatgagtagtccagatgttaggaaaagagtcggagtcacctatgccgaaaccgacatcgatatcaccaccgggaaaatcaagaagatcgtccatgttgtcaaagaagttgccacaatcaagatcctccgcgaagctttgtccaaacatcttccttttacaatatagcaaatagctctgttagtagtgctgtgca

SEQ ID NO: 21372 - DNA, 420 bp, Zea mays
  Coding DNA Sequence Number=SeqID_6969
tgatcgcaaccaccgtttcatttccctccagcgcgagatctcgcagcctccgaagagccaccctccgcgtacgatccgcgctgatcgagccagacggcgggaagctggtggagcttgtggtcccggagacgcgacgaagggagaagaagcacgaggcggcggatttgccgagagtgaaactgacggcgatcgatttgcagtggatgcacgtgttgagcgaaggctgggcaagtccgcttagagggtttatgcgggaagctgagttccttcaaactcttcatttcaattcgcttcgtctcgacgacggatccgtcgtccaatatgtctgtacctatcgttctcgccatcgatgatgaacagaaagctctaatcggagaatctaaacggggcccccttggtgattcccatggtaaacccaac

SEQ ID NO: 21373 - DNA, 562 bp, Zea mays
  Coding DNA Sequence Number=SeqID_6970
gtatttttactcgtagcctcctatagatttcagctccggtggttgacggtgccttatcaaccgtcggccgccaccccctccttcccctctttcttgctagcctcataatctgtcgtttaagcggttatttcactttttccttgctttaacatctgtggatttccaccggatagcggccggatccggtagatctaaacggtagctgggtgggtgctcagcttccctggagtgttggcgatgtcgtgcttggccgcttatcatcaggaagctccaacttgaggtcagatcttgactcgatttcggtcagatctgggtcagatccgccgtggagggtttgccggaaacaaagcgtcgctgcctttgtctctctggtcagttgttcagcctcctcttgtctctagttatgtcctctgttggttgctactgtagaacttccccatcgagatcttccgatctatgatgttaaaggcgaaccgaggcttcgctggggacttctttagtttcggattctggttgcagcaagcgtggtggctgtgtgtgccgcctattgggttttggagtt

SEQ ID NO: 21374 - DNA, 537 bp, Zea mays
  Coding DNA Sequence Number=SeqID_6971
tccaaaacccaataggcggcacacacagccaccacgcttgctgcaaccagaatccgaaactaaagaagtccccagcgaagcctcggttcgcctttaacatcatagatcggaagatctcgatggggaagttctacagtagcaaccaacagaggacataactagagacaagaggaggctgaacaactgaccagagagacaaaggcagcgacgctttgtttccggcaaaccctccacggcggatctgacccagatctgaccgaaatcgagtcaagatctgacctcaagttggagcttcctgatgataagcggccaagcacgacatcgccaacactccagggaagctgagcacccacccagctaccgtttagatctaccggatccggccgctatccggtggaaatccacagatgttaaagcaaggaaaaagtgaaataaccgcttaaacgacagattatgaggctagcaagaaagaggggaaggagggggtggcggccgacggttgataaggcaccgtcaaccaccggagctgaaatctat

SEQ ID NO: 21375 - DNA, 441 bp, Zea mays
  Coding DNA Sequence Number=SeqID_6972
gtaacacacacctgatccgattatcagaagcacaagcttggtatatattctccgagtctgagctatggctttggtgatgcactcgtacaagggaaacaaaaactctgacaaggcattcattgccgcagagttcgctggtgtgaagatcgatatgccttctggctttgagatgggtgtcaccaacaaaacccctgagttcctcaagatgaaccctctcggaaagattcctgttcttgagactcctgagggtcctatctttgagagcaacgccattgcccgttacgtaagcagattgaacggtgacaactccttgaacggatcctctctgatcgaatatgcacatattgagcaatggatcgatttctcctcattggagatttatggaacatctttcactggttcgtcccaaggaatgggctttatggccttacagggttcccg

SEQ ID NO: 21376 - DNA, 464 bp, Zea mays
  Coding DNA Sequence Number=SeqID_6973
tccctctccggttattacgttatggccaagatgggtttgaaacccgacccggttactcctaacccgacccacaataatgccaaggagattcgttacagaggcgtgaggaagcgtccttggggccgttacgccgccgagatccgagatccgggtaagaaaacccgcgtctggcttggcaccttcgataccgcagaggaggcggcgcgtgcttacgataaggcggcgcgtgatttccgtggcgctaaggcgaagacgaattttcttgagctgaatgagaaggtgctctccggtggaggcggtttcgcgcggagccctagccagagcagcacccttgactacgcttctcctccggcggtgactgatgggattgttccaccctcaacttgagctaagtcttggcggcggcggtggcgcgtgttaccagatcccaatggcgcgtcctctctactttttggacctttatg

SEQ ID NO: 21377 - DNA, 521 bp, Zea mays
  Coding DNA Sequence Number=SeqID_6974
aaagattctctacgctttgaagcgagatcctgtctttggtatctggagctgtatctggttccagagacatggacaacaacaacaacaagaacaatgaagagaacggaaacacgtccaaaacggcgtcggacgacgagggtgttggatccgtggggagacagatgagcgagtcttctctttgcgtcacggaggaagaagaagaagacgattccaaattacatttggctcctcagtacactatcaaggagcatctcgagaaggacaaagatgatgagagtctgaggaagtgcaaggaacagcttcttggaagtgttgatgtcaccaacattggagagacacttgaccctgaagtgaggatcattagcctggtcatcttatcccctgggagaccagacattgttcttatggtacctgagaatggaaacccaaaggggatgtggtttactttgaaagaagggagcaggtactgtttgaaattcacgtttcacggtaacgacaacattgtctctggtcttaggcac

SEQ ID NO: 21378 - DNA, 466 bp, Zea mays
  Coding DNA Sequence Number=SeqID_6975
gagcacaccggcttgcaattcattgctccttcatcgacggcgtccacaaccacccaagtgctcacagcgcgaatccaccctctcgttatcttcaacgtctgcgactgcttcgtgagacgacccgactcagctgaacgagtcatcggcactctcctcggatctatcctacccgacggaaccgtcgatatccgcaattcttacgccggacctcacaatgaatcttcagatcaggttgctggggatattgattaccaccacaacatgggagcttcacaccttaaggtgaatccaaaggaaggaatcgttggctggtactctactggttctggtggcaatggcgggtagggcactgattcatgacttctttgctagagaagccaccaaccctattcacctaaccggggacactgggttcactaatggtgaagggaccatcaaagcttacgtctcttcgaacctttcactt

SEQ ID NO: 21379 - DNA, 513 bp, Zea mays
  Coding DNA Sequence Number=SeqID_6976
aacaatctcttgctggaatcattacagagagagattatctgaggaagatcatagtgcaaggcagatcatccaaatcaacaaaagtaggggacattatgactgaagagaataagcttatcaccgtgacaccagagaccaaggtcttggtcgctatgcagctgatgacagataacagaatcaggcacattccagtgatcaaagacaagggcatgattggaatggtgtccataggagatgttgtccgccgagtggttcatgagcatagagaggagcttcaacgcctaaatgcgtatattcagggaggttactagatcttgaataatggaaagaaaagagttccctgttgtgtcgtctggtcttgtgctgctgaatctgaaaagcttccagatcagtgtaaatatgcagtcctcgttgttattgttgttgttgttgtgtttgatgttttgtgttgtttcgttgtttaacttgtcaaaactaaggccttgtgctgcttctcttcttgcgcttacttag

SEQ ID NO: 21380 - DNA, 574 bp, Zea mays
  Coding DNA Sequence Number=SeqID_6977
tgggaaatttcttcgactccatcggttccttcttcagcggcggcgataagatcccttggtgcgaccgtgatgtcatccttgaatgtgagaaagaagttaagacagcaactgagggtgactcggaagaccaaaagaaagagagcattatgcgattgtcttgggctcttgtccattcccgacaagccgaagatatccagcgtggaatcgccatgctcgaagcttctctagcaagtagtagccctcctttgcaggaccgggagaagatttatcttctcgctgttggttattatcgcactggagactactctagaagcaggcagctcgtggaacgctgtctcgaggttcaacctgattggaggcaagctttagccttaaagaaaaccattgaagacaaattgcaaaagatggtgttattgggataggcatcacggctacggccgttggcctcatagccggtggaatcgctgctgctttggctcgcaaaaagtgacctcgcagattccctgtgcatataataacatatgctttcttttaagtcctttttttttttggtttttcagctttccagatgtcc

SEQ ID NO: 21381 - DNA, 471 bp, Zea mays
  Coding DNA Sequence Number=SeqID_6978
ggaaactcacaaaaccaaggtctgcatcgtcggaagcggccccgcagcgcacacggcagcgatctacgcagctagggcggagctcaagcctctcctcttcgaaggatgggatggctaacgacatcgctcccggcggtcaactaaccacaaccaccgacgtcgagaacttccccggcttccccgaaggcatcctcggcatcgacatcgtcgagaagttccggaagacaatcggagcgattcggcaccaagatcttcaccgagacgggtaataagggtgatttctcctcgaagccgtttaagctgttcaccgattcgagaaccgtcctcgccgacgccgggatcatctccacgggagccgtggcgaaacgcctcagcttcgctggatctggggaaggcgccggtggtttctggaacagagggatctcggcgggcgctgggtgccaccgagctgctccgatttttagaacaagc

SEQ ID NO: 21382 - DNA, 596 bp, Zea mays
  Coding DNA Sequence Number=SeqID_6979
gaagctgtccctctcagatctgaaacctccttccccttgaagcttgaacaaaaaaagagagagaaaatggcggcgagggaagagtttgtatacctagcgaagctggcggagcaagcggagcgatatgaagagatggttgaattcatggaaaaagtggcggaaggcgtggaactcagcgtggaggaacggaacctcctctccgtggcttacaaaaacgtaatcggcgctcgtcgtgcctcgtggcgcatcatctcctccatcgaacagaaggaagagagccgcgggaacgatgaccacgtcaccacgatccgtgactaccgaagcaagatcgagtctgagctctccaaaatctgcgacggcattcttaagctgctcgattcaagactcattcccgcttcttctgccaacggagactccaaggttttctaccttaagatgaagggagattaccataggtacttggctgagtttaagaccgctcaggacaggaaagacgccgccgagcataccctcaccgcttacaaagccgctcaggacattgctacctctgaattgcctccaacccaccccatccgtcttgggctcgctttgaactt

SEQ ID NO: 21383 - DNA, 509 bp, Zea mays
  misc_feature (382)..(382): n is a, c, g, or t
  Coding DNA Sequence Number=SeqID_6980
gagctgatcaagacggccaagtacattgcaacaccgggaaagggaattttggcggcagatgagagcacaggaaccattgggaaacgattctccagcatcaatgttgagaacattgagtccaaccgccaagctctccgtgagcttctcttcacttccccaggcgctctcccttgcctctccggtgttatcctcttcgaggaaaccctttaccagaaaacttctgatggcaagccttttgtcgagttcctccaggagaacggagttatccccggaatcaaagtggacaaggggtgtggttgatctagcaggaaccaatggtgagaccactactcagggtctagactcgcttggtgcacgttgccaggagtattacaaggcaggnagccaggtgggccaaattggcgtgctgtcctcccagattggtgccaccgagccgagcgagctctcgatccaagagaacgcccaaggggctggcacgttatgccatcatcgcccaggagaaacggact

SEQ ID NO: 21384 - DNA, 512 bp, Zea mays
  Coding DNA Sequence Number=SeqID_6981
ggccgcgcgtattactactgaatcgacgacgatgtcgatgtcgaagagctccaagatgctccagttcataaactacaggatgcgagtcaccatccaagacggacggcagctcgtcgggaaattcatggccttcgaccgccacatgaacctcgtcctcggcgactgcgaggagttccgcaagcttccgccaggcaaaggcaagaagatcaacgaagagagagaagagcgccgcacgctcggcttggtcttgctcagaggcgaagaagtcatctccatgacggttaaaggaccgcctcctcccgaagagtctcgcgctaaggccggctcagcagcggctcttgctgggcctggagtgggccgtgctgctggacgtggagtgcctacagggccgcttgtccaagctcagcctgggctttctgggcctgttcgtgggagttggtgggccttcgcctgggatgatgcagcctcagatctctcgggctccgggtaatgagacctcctgggcagatgct

SEQ ID NO: 21385 - DNA, 586 bp, Zea mays
  Coding DNA Sequence Number=SeqID_6982
aaatatctgagtcgtggtcttctaaattcgttgctagtaaattgatcgaccagtcagctcctcgaccagcgaaaatggacgtgcgagaatcaatctcactgcaaaaccatgtctccttgagcctcgccaagaacgtgatctccaccgtctctaaaaactccaacgtcatcttctccccggcatcgatcaacgtcgtcctcggcataatcgccgctggatccgccggcgctaccaaagaccagatcctctccttcctcaacttcccttcaatcgaccacctcaacaccttctcctccgatatcgtctccgccgtcctcgccgacggcagcgctaacggtggccctaaactctcggcggctaacggtgtatggatcgataagtctctgtcattcaaaccttccttcaagcagctcttggatggttcttacaaagctgcttctaatctagcagattttcagacaaagggctgtggaagtgattgctgaagtgaattcatgggctgaaaaggagacgaatggcctcttataccgaggttctaccgggaaggatcaccagacagtttgcccagactgatttttgcaaatgc

SEQ ID NO: 21386 - DNA, 409 bp, Zea mays
  Coding DNA Sequence Number=SeqID_6983
cttcggcgattttagggttctgactggtcacatccaccaaagagacaaaaaatgccggcgggacatggagttcgtgctcgaacgagggatctgttcgctagagggttcaggaagaagggtacaattccactgtccacctacctcaggaccttcaaggtcggcgaatacgtcgatgtcaaagtgaacggcgccatccacaagggtatgcctcacaagttctaccacggtcgtactggtcgtgtctggaacgttaccaaacgtgccgttggtgtcgaagtcaacaaacagattggaaacaggatcataaagaagaggcttcatgtgcgtgtggagcatgtgcagcagtctagatgcgcggaggagttcaaactgaggataaagaagaacgatgagttgaaagctgcagcca

SEQ ID NO: 21387 - DNA, 431 bp, Zea mays
  misc_feature (309)..(309): n is a, c, g, or t
  Coding DNA Sequence Number=SeqID_6984
cttctccaactctcaatcatggttgaaccggcgaataccgttggaatcccactgaaccacgccgcgctgctgaaggatgagctcgacatcgtgatcccgacgatccgcaacctcgatttcctcgagatgtggaggccttttctccagccttaccatctcatcatcgtccaagacggagatccttccaagaccattggctgtccccgaagggttcgattacgagctctacaacaggaacgacattaaccggtatcctcggtcccaaagcttcgtgcatctccttcaaggactctgcttgtcgctgcttcnggttacatggtctcctaagaagaagtacatcttcaccatttgacgacgatttgctttcgttgccaaggatccatctggggaaaagcagtgaacgctctcgagcaacacatcaagaaccttct

SEQ ID NO: 21388 - DNA, 580 bp, Zea mays
  misc_feature (550)..(550): n is a, c, g, or t
  Coding DNA Sequence Number=SeqID_6985
gtcttgttcctcatatactcttcgactcgcttcgcttctcgatctcgatctccgccgtttcagtttgatcatcgatggctttaccaaaccagcaaaccgtggattaccctagcttcaagctcgtcatcgttggtgatggaggcacagggaaaacgacgttcgtgaagaggcatcttactggagagtttgagaagaagtatgaacccactattgggtgttgaggttcaccctctagacttcttcactaactgtggcaagatccgcttttactgctgggatactgctggacaagagaagtttggtggtcttagggatggttactacatccatgggcagtgtgccgtcatcatgtttgatgtcacagcacgtctgacatacaagaatgtcccaacatggcaccgtgatctttgcagggtctgcgaaaacatcccgattgttctttgtgggaacaaagttgatgtgaagaacaggcaagtgaaggcccagcaggtgacattccacaggaacagaattccccgggcctacgagatctctgccaagagcaactacnatttcgagaagccattctttgtacttgcta

SEQ ID NO: 21389 - DNA, 551 bp, Zea mays
  Coding DNA Sequence Number=SeqID_6986
gaatacttccatataaaccatccccttcctatctcgctttaccaatcactcttcagagattaagtaaacaaactagtaatggctatcacacgtctaactctagctcctctcctcctcatcgccgccgtgattctctcgactgagacatcagctcagccggcagcacccgctccaggccctgctggtcctatcaacctcacggcaatcctcgaaaaaggcggtcaattcactaccttcatccatcttttgaaaatcactcaagttggggaacaagtgaacactcaagtcaacagttcatccgaaggcatgaccgtgttcgcgccaacggacaatgctttccaaaacctccaggccggcactctaaacaagttgagcgcagacgaacaggtcaaactcattctctaccacgtcagccctaaattctacactttggacgatctcctctcagtaagtaacccggttaggactcaagcttctggccgaggacacggggggttccgtcttaacttcaccggtgaagctaaccaagtcaatgtctcaacgggttacgt

SEQ ID NO: 21390 - DNA, 520 bp, Zea mays
  Coding DNA Sequence Number=SeqID_6987
taggttttggatatggcgtcgaagcggatcttgaaggagctgaaggatctgcagaaggatccacccacctcatgtagcgcaggacctgttgctgaagacatgtttcattggcaggcaacgataatgggtcctaccgacagtccttatgctggaggtgttttccttgttaccattcacttccctccagattaccctttcaagcctcctaaggttgcctttaggacgaaggtgttccatcccaacattaacagcaacggaagcatttgcctcgacatcttgaaggagcaatggagtcctgcactcaccatttccaaggtgctgttatcgatatgttctttgttaaccgatccaaacccagatgatcctttggtgcctgagatagctcatatgtacaagactgacaagaaccagtatgagtccactgcacggagctggactcagaagtatgccatgggctgaaaggaaggatcctaaactatctctttttatgggaaaaatctgccgtaatttctagtgtatg

SEQ ID NO: 21391 - DNA, 581 bp, Zea mays
  Coding DNA Sequence Number=SeqID_6988
ctccgcctttgttgatttcacgttatacggattcctcccactcccactcgcagtcgcaggcaggcgtgtgtgttcttgtttagaaaatggctcttgtccagcgaatacccagtttctcatccaatcttcgaaattggaagaacaccaattcgacaaaccacaagcctgtttcttctctccattacaaaacccagatcactgcttcttcttcgcccttcacggagaagcactctgtcgagagataccaaagagatcaatggctgtacaaagcatccactccatcgccaccttcgaatcagcaagatgaagtctttgttagagaaaacgacatcgcgtcgcagcttccggagctgaagaagctcttggaggttctgagagagaagagagagagtgggtgcagaggcggtgattgcggaccaggagatgtgtttttagtcgggacagggccaggagatccagagcttttgactttgaaagctgtcagagtcattcaaagcgctgatcttctgctttacgacaggctttgtctctaagatggtgcttggagttggttgctcctgatgctaggcttctctatgtcg

SEQ ID NO: 21392 - DNA, 558 bp, Zea mays
  Coding DNA Sequence Number=SeqID_6989
aaagcacgcactttggctactatgcgttctggtgttaccggcgatagcctggggcaggaatcctgagaagaaggcaacgacttcgtccgggaggaaggaagatgacctggtaaccggtttgcctggccaaccaccggttaacttcagacattacgccggctacgtcaatctcgggccacgacagaagcaaaaggcgcttttctactggttcttcgaagcccaacgaaactcctcaggtcgtcctcttgtcctctggctcaacggaggacctggttgttcatcgatagcctatggagctgcacaagagctaggccctttccttgttcgcgccggcggtgacaaccttaccttccataagttctcttggaacaaagaggccaatatgttgttcttggaagcaccggttggggggttgggttctcgtataccaataactcaatggatcttcataagcttggagatcaagttagtgcagaggattctcttgctttctttgatcaactggttcatgaaatttcctgagtacggatcccacgagttttacatcgcccggagaga

SEQ ID NO: 21393 - DNA, 550 bp, Zea mays
  Coding DNA Sequence Number=SeqID_6990
aagggacaccaaggcaaatgctttgcactcgtcctgttactatgcttctttagttcaactttggcacgcagggttctcaaggatctctcaatgatggagatgaaccatgttgtgaagcctgggatggttagtttgagcgtgcaagatcatgagatgttcaatgtagaatctgagcacatagtgaagcctgaccataagctgcagtccatgccgggtgaaccggaagagcctgaggacaggatcatgcctgatcgcaaaatgcaatccatgccgggtgaaccagaggagcctgaggacaaggtcatgcctgatcataaactccagtccatgccgggtgaaccagaggagcctgaggacaagatcatgcctgatcataaactgcaatccatgcccggggaaccagaagagcctgaggacaaggtcatgcctgatcataagctgcagtccatgccgggtgaaccagaagagcctgaggacaaggtcatgcctgatcatgaactgcaaaccatgtggggtgagctagaagaacctgatcctaaaactatgctcg

SEQ ID NO: 21394 - DNA, 513 bp, Zea mays
  misc_feature (362)..(362): n is a, c, g, or t
  misc_feature (436)..(436): n is a, c, g, or t
  misc_feature (453)..(453): n is a, c, g, or t
  Coding DNA Sequence Number=SeqID_6991
ggatgcttgcgaacagtgtcctcctccctcaaccttcgattttccttcccgtttcttcttctcgaagcagcagatcaatccgaagaaccctagtcatggtcaaagcctcctccaaaccttccgactctgtctcagcgtccaccaaatccaaatccaaatccagcgacgctgtgttcactgctcctcccggtttcaagcctcccgagccgaaacgcttcgccgttaaaccgggaaagctcttagatgtactgggtgctgcaatcggagtgcttctccgactcggcgctggcgttttcgtttctgggtactctgcttctttcgtgtctaaggatgcgattccagctgatcagtatgcgttgcgnaattggggggatcacggtgaaggaaccctcaaagcttgggcctcgtcctgagaaacccattgagatatatgagngttgagggctgtccctntttgccgtaggggtagggaaaatggttcacagcgctgggatcttggtattcctctacttt

SEQ ID NO: 21395 - DNA, 539 bp, Zea mays
  Coding DNA Sequence Number=SeqID_6992
tcatgggtagaggtcgttgccgcatggtaatgtgttgtgaacccaatgagtttacagaaccccgtccataccgacctcccgcactcaaacgtatcctcttccaacaaaagagattggccggactacgtgaaggatctcaagtctcgttggagatccaatcagataagagtctgaagggaactgatcaggatcagaccactcttgtctctggaattgatattcaggaaaagtcgtcgtctgatgttgttgctagcacctcgaagcctcagacgccatcatcgagtttggtcgggatgaagaaaacactaggttctcaagtctcgttgctacgttgttctgcctgtatgcaaataatccagtccgataagagtctaaagggatcttctgatcaggatcagaccactcttgtctcccaaattgatattcaggatcagaccactcttgtctcccaaattgatattcagggaaaagttgtcgtctgatatcgttagtaacacctccaagactcatcaaggtaagcttctccgatcaagttcaaa

SEQ ID NO: 21396 - DNA, 519 bp, Zea mays
  Coding DNA Sequence Number=SeqID_6993
gaacttgatcggagaagcttaccttgatgagtcttggaggtgttactaacgatatcagacgacaacttttccctgaatatcaatttgggagacaagagtggtctgatcctgaatatcaatttgggagacaagagtggtctgatcctgatcagaagatccctttagactcttatcggactggattatttgcatacaggcagaacaacgtagcaacgagacttgagaacctagtgttttcttcatcccgaccaaactcgatgatggcgtctgaggcttcgaggtgctagcaacaacatcagacgacgacttttcctgaatatcaattccagagacaagagtggtctgatcctgatcagttcccttcagactcttatctgattggatctccaacgagacttgagatccttcacgtagtccggccaatctcttttgttggaagaggatacgtttgagtgcgggaggtcggtatggacggggttctgtaaactcattgggttcacaacacattaccatgcggca

SEQ ID NO: 21397 - DNA, 305 bp, Zea mays
  Coding DNA Sequence Number=SeqID_6994
tgcattctcgatagagccagtcaagcagtcagcagcaccaccggtctcctccacgacaaaaaacagatattctatcgtcagcaatcctgcgttccctgcccgacggaggtgcttccctcgttgctgcgttgcactgcggcggcctcgcgcttgttgtcgattccagctccatgcgcccatgatttactttacttgtgtaagatcaccaatctccagtctctactgctattcccccctttgcgttgctggaaaataattggtttgccatttagattcactaattttatgcgtctttccaattctag

SEQ ID NO: 21398 - DNA, 593 bp, Zea mays
  Coding DNA Sequence Number=SeqID_6995
gtttagctttctaccgacgaaaatgggcgctttcaggtttcaccagtaccaggttgtcggaagagctctcccgacagagaaagatgtgcagcctaagatctacaggatgaagctctgggccacgaacgaggttcgtgccaagtccaagttctggtacttcttgaggaagctgaagaaggttaagaagagcaacggtcagatgctcgccatcaacgagatctttgagaagaacccaacaaccatcaagaactttggaatctggttgaggtaccagagcaggactggataccacaacatgtacaaggagtaccgcgacaccaccttgaacggagccgtggagcagatgtacaccgagatggcgtcgcgacaccgcgtcaggttcccttgcatccagatcatcaagactgccactgtcccggccaagctttgcaagagggagagcaccaagcagttccacaacagcaaaatcaagttcccattggtgttccgcaaggtcagaccaccaaccaggaagctcaagaccacctacaaggcctccaaacccaacttggtcatgtgataggagtctctggttgacgctcacataccttttt

SEQ ID NO: 21399 - DNA, 553 bp, Zea mays
  Coding DNA Sequence Number=SeqID_6996
atcgtcgtcgcgtctctcttaagcttctctcgcagatcctccggtgcagagtttaaaaggaaaaaaaaaatggggttgagtttcgcgaagctgtttagcaagctctttgcaaagaaggagatgaggattctgatggttggtcttgatgctgctggtaagaccactattctctacaagctcaagctcggtgagattgtcaccaccatccccactattggtttcaatgtggaaactgtggagtacaagaacatcagtttcactgtgtgggatgtcgggggtcaggacaagatccgtcctttgtggaggcactacttccagaacactcagggtctgatctttgtcgtggacagcaacgatagggacagagttgttgaggctagagatgaacttcacaggatgcttaatgaggatgagctgcgtgatgctgtgttgcttgtgtttgccaacaaacaagatcttccaaacgctatgaatgccgccgaaatcacagataagcttggccttcaactccctgcgtcagcgtcactggtacattcagagcacatgcgccacg

SEQ ID NO: 21400 - DNA, 585 bp, Zea mays
  Coding DNA Sequence Number=SeqID_6997
tgaaactcaatgtcgccggatcactccttctccttctaatctcaaccgccacgcgttgtccgccgtcagacctccgtgcactcctagctttccgcgcagcactccacgagcacatacctcggcattttcaactcatggacccgccaagactgctgccacaactggtacgccgtgagctgcgacgccgtcactcaccgagtcgccgacatcaacctccgcggcgagtcagaagacccaatcttcgagcgagctcaccgaaccggttacatgaccggccgcatctctccggcgatatgcgacctcgctcgcctctccgccttaacaatcgccgactgggaacgcatctccggcgacatccccagatgcatcacgcgcctctctttcctccgtactatagacctcatcggaaaccgaatccccggcgagattccgaacgacatcgggagattacaccggctagctgtcttaaacgtcgcggataaccggatatcccgcttcatcccgaagtgcgtaaccaacctctctagcttaatgcacttgggccgccgtcacaccttaatgaaccgtgttagtccaaactgagtt

SEQ ID NO: 21401 - DNA, 564 bp, Zea mays
  misc_feature (476)..(476): n is a, c, g, or t
  Coding DNA Sequence Number=SeqID_6998
aaactccaatcattctgcgactcttcaaaccaactctttgtgactcacattcatccaactctctctagctatgtcaacatccgagaacaaagtggagatagtcgacagaggccacaaggaggaggaagaaaaagaagaaggcaaaggaggcttcctcgacaaggtcaaagacttcatccacgacatcggcgaaaagatcgaaggaaccatcggcttcggcaaaccaaccgccgacgtctccgccatccacatccccaagatcaacctcgagagagccgacatcgtggtcgacgtcctcgtcaagaaccccaaccctgtccccatccctctcatcgacatcgactacctcgtcgagagcgacgggcgaaagctcgtctccggcctcatccccgacgcaggaaccatcaaggcgcacggggaagagaccgtgaagatacccttgaccttgatctacgacgacatcaagagcacttacnacgacatcaacccggggatgatcataccttacaggatcaaagtcgaccccatcgtcgacgtgctggtcctagggaggctgacgcttcc

SEQ ID NO: 21402 - DNA, 486 bp, Zea mays
  misc_feature (461)..(461): n is a, c, g, or t
  Coding DNA Sequence Number=SeqID_6999
aacagtttttcttcagctccaatcaaattttaacggaagaaatcgatctaccggtggagtttgaggaggagatggtgtcacccgaaaacgctaattggatatccgacctgatcgatgccgactatggaagcttcaccatccaaggtcctggtttctcttggcccgttcaccaacctcttgccgtttcttctaactccagcgcgggagttgatggttcggctggaaattcagaagccagcaaggaacctggctccaaaaagagggcgagatgtgaatcatcctctgccactagctcaaaagcatgtagagagaagcagcgccgagacaggctgaatgacaagtttaccgaattgagtgtaattttggagcctggaaaccctcccaaaacagacaaggctgcaatcttggtcgatgctgtccgcatggtgacacagctacgcggcgaagcccagaaggtgaanggacaccatttcaagtcttcaggga

SEQ ID NO: 21403 - DNA, 536 bp, Zea mays
  Coding DNA Sequence Number=SeqID_7000
gcgcatgggcgagtccttttgtgatgaggccgaggattgctctgaacctcaagtctgttccctatgagttcctccaggagacgtttggagcaaagagcgagttgcttcttaaatcaaacccggttcacaagaagattcccgttctgattcatgctgacaaaccggtttgtgagtctaacatcatcgttgagtatgttgatgagacttggagcgcatctggaccgtccatgctaccttccactccttatgatcgagccatcgctcggttctggggcggcctacattgacgaaaagtggtttccctctctaaaagtatccttaaaagctgagggagaagaagagaagaaagcggtgttagctcaagtggaagaagggaacgcgcttctcgagaaggccttcaacgattgcagcaaaggaaaagcgttcttcaaccgtgaacacatccgttacctcgacattgcattccggtgcttcttggcttgggtgaaagtcaccgagttggcaggggtcataaactttcgatgggtcagactcct

SEQ ID NO: 21404 - DNA, 512 bp, Zea mays
  Coding DNA Sequence Number=SeqID_7001
tgaatcgctaatctcgtcattcgtctctcgaatccttaaaaagaaccgtaggaaggagccatggatccagctgagatgaggtacttggaagaagaggacggccccatgatgaagaccatcaaaggcagcgtgactggcttcgccgccgggaccatctacggaaccattttggccacgtggaaagacgttccgagggtggagaggaacgtggctcttccggggctcatcaggaccctgaagatgatgggaactcacgggctcactttcgccgccattggaggagtttacatcggtgttgagcaggtggttcagggctatagaggcaagagagattttttcaatggtgctattggtgggtttgttgctggagcttctgtccttggctacagagcaaggagcatcccaacagcgatagctgcaggtgcaacactagcggttacatctgctttgattgactctggaggtcagaccacaagagtagaccacggcagagagtattatccttacgcccc

SEQ ID NO: 21405 - DNA, 591 bp, Zea mays
  Coding DNA Sequence Number=SeqID_7002
actctgtaactcttcccttatatgagatctatagtttaacctaaacctaaaggtttatatatcaataatgatgctttcagtgatcgttgcaatccttgtctgccttgcaagctacatttaccgatcattgaagcctccaccgccgcgagtctgcggcgttcctcacggtcctccgattacttctccgagaatcaagctcagtgatggaagatatcttgcttatagagaatctggcgttgatagagccaatgctaatcacaagatcatcgttgttcatggatttaacaactccaaagacatggaacttcccatctctaaggatcttattgaggaactagggatatattttctgtttttcgatagagcagggtatggagaaagtgatccacaccctacacgtacggtcaaaagtgaagcatatgacattcaagaactcgctgataaactcaacatcggaccaaagttctatgttatagggttatcagtcggtgcttactcggtttatagctgcctcaaatatattccccacagattagctggagcagtcttagtggttccatttgtcagctattggtggactaaagtgcctca

SEQ ID NO: 21406 - DNA, 457 bp, Zea mays
  Coding DNA Sequence Number=SeqID_7003
gcgagttccatttcttcgatgtcaacacgtttttgtttcatccttaacaacaatggtagtcacaaaccaaacccatggctctatcaaccatcgttaagctcgaacagtctcatattctattcaaagcatcatcctcatcgtcgtccactatcttcttcttcccagattcccgtcgtagagactgatgaaggcgacgaccaagatggccttacattcagtggttgcagcggatgcgggaaggaggtgaaggagaatggttgcaacggcgacggacggattcaaggaggcattgccactgtccctggcttcggttggtggcccattaaggcttaccggccttgtcccggtttcgttgaggccggaggtagataccgccgcatagggcagagcatggatgaggttgcctttggtcgcggtgactctaaatcctccaccgattcctagctttatggctcag

SEQ ID NO: 21407 - DNA, 566 bp, Zea mays
  Coding DNA Sequence Number=SeqID_7004
gagtaagattcgttctctatcagcagcaaatggctcgtaccaagcaaaccgcgagaaaatccaccggaggaaaggctccgaggaagcagctggcgacgaaagcggcgaggaaatcggctccggccaccggaggagtgaagaagccgcacagattccgtcccggaacggtggcgttgagggagatcaggaagtaccagaagagcaccgagcttctgatccgcaagcttcctttccagcgccttgtccgtgagatcgctcaggatttccagacggatctgagggtccagagcagcgccgtcgcggctcttcaggaagccgcggaggcttaccttgtcgggctgttcgaggacacgaatctgtgtgcgattcacgccaagggggtcaccatcatgcctaaggacatccagcttgccagaagaatcagggggtgagaagggcttaagaagagataaagaaagaacagtggttttttaggaatggcttgggttgtttagttggttgggtaaatcctcttttaaaatggtccgctggtgttagtgttggtttcagtcttttgatttgatgaa

SEQ ID NO: 21408 - DNA, 565 bp, Zea mays
  Coding DNA Sequence Number=SeqID_7005
gatggctctcgaagtctgcgtgaaagccgccgttggtgcccctgatgctctcggcgactgccctttcagccaacgggttctcctcaccctcgaggagaagaatcttccctacaaaatgcatctgatcaacatctccgacaaacctcaatggttcttagccattagtcctgaagggaaagtaccagtcctcaagaacgacgaccagtgggtgtctgattccgacgtcatcaccggcattctcgaggagaagtatcctgagccatctctcaagactcctcccgagctcgcctccgttggatccaaaatcttcggtaccttcgtgaccttcttgaagagcaaagactccagcgacggatccgagaaggccttgcttgatgagcttgaagctctcgagactcatctcaagactcatgacggtcctttcatcgccggagggaaagtcagtgctgtggatctaagcttagcaccgaagctttaccatctcaaggtcgctcttggccactacaaaagctggtctgtccccgagagcttgcctcatgttcatggctacttggaggctttggtc

SEQ ID NO: 21409 - DNA, 447 bp, Zea mays
  Coding DNA Sequence Number=SeqID_7006
atctgcctactctgtctgtttgtctgtgtgcaagtaagtaatgtctgaagcagcagcacaaaaggcggctttcctcggtggacttgttgtctcattcaaggaacaaatgcacactgatgttctcgttcatcctggtgatcaatctccccccatcccgacccacaaggccatcctctcgtcaagatctaaggtcttcaggaacatgctagactccgatgaatgcaaggcctctgctgaggaatcgatcactctccccgacttgaaccacgacgagctccattctcttctcgagttcctctactccggcaacttaattgctccatacaatcagtaccgagccctctatctggctgctgacaaatacgacatcgcttatctccaagacgtttgccgcgaccatttcattgcatctctcacctctaggaacgtccttgacatcctggagct

SEQ ID NO: 21410 - DNA, 548 bp, Zea mays
  Coding DNA Sequence Number=SeqID_7007
atttaggcctgcactcctttcttcttccctgtcgccgcaacaaaaagagaaacgcaataggctttttgtaactaactcttcactgcaacatgactttcaagcgtaggaacggtggcaggaacaagcacaaccgtggtcatgtgaagcccatcaggtgttccaactgcgggaaatgctgtcccaaggataaggctatcaagaggttcatcgtcaggaacatcgttgagcaggctgccatcagagatgttcaagaagccagtgtctacgatggttacactcttcccaagttgtacgctaagacgcagtactgtgtctcatgtgctatccactctcacgttgtgagagtccgttcccgcaccaaccgtagggttcgtaccccacccccacgtttcgtcagacgcaaggaggatgctcccaagcccggacaacctggtcaggctgctcgccctgctggtggtgcccctgctgctcctcgtgcctaaaaactgcaagaagctggcaacacaaacctctttatattctcgtgtctcgcgcagggttgtctagaa

SEQ ID NO: 21411 - DNA, 529 bp, Zea mays
  Coding DNA Sequence Number=SeqID_7008
cggactttgctttctgtctacagaaaattatcaaagcccagtggtgtgtgtgtgtatctgactccgtttcgctcatcttctatcagaaaaatggcagaaaatgctgatttggtggagtggccaaagaaggataagcgtcgttttctccatgttgtgtaccgcgttggtgatcttgatcgcactatccagttttacacagagtgctttggcatgaaggtgttgaggaaaagagatgtccctgaggagaagtactctaatgctttccttgggtttggtcctgaaacctccaacttcgttgtcgagctcacttacaattatggtgttagctcatatgacattggaactggatttgggcatttcgctatttcaactcaagatgtttctaagatggttgaggcggttcgtgccaagggtggaaatgtccccagagaggctctggcccggtcaaaggtggagagcaggggcctttgcctttggccaaggaccctgatgggtacaccttttggagcttaaccacagagaggtccac

SEQ ID NO: 21412 - DNA, 566 bp, Zea mays
  misc_feature (435)..(435): n is a, c, g, or t
  Coding DNA Sequence Number=SeqID_7009
agtcgccggcgaaaagtctcatctcaccgccactcgattccgtgccctgaagtcctccgacatttctctctcttctccgagaagatttcgactggcgatgggagacgagaagccgacggtggtgatggccaatcgagaaagagatctggagcttctgatgcccgttgctgataaagaggaaggttctacttcgaagccgtcttcctcttcctcttcgcatcatcaggctagccacgagactttaagcttgttcataaggggttgggcctcaaagaagttcatgactggctgtgttatcctccttcccattgcgattacattttatataacatggtggtttattcactttgttgatggtttcttctctcccatttatgctcaacttggaatcaaccttttttggtttcgggttcttgacttcatccgcattcatcnttcttgggtcggggtgttcatgtcctcaatggtgggggggcttcggttctgacccgggggggagtggtttatcaagcgggatgccattttgttcgtcacatcttacaacgcttccaagcaattcagcactg

SEQ ID NO: 21413 - DNA, 511 bp, Zea mays
  Coding DNA Sequence Number=SeqID_7010
aaacccaaatcgattacacgcgctgattccattgttccgttgtttccactgataatccctaaaatggcgagtgagagttcccaatcgtcgtcgccgtcgccgggcgatacgttcattgggagcttcatcagtctaatttctaagtccgagatccgctacgaaggcattctataccacctcaacgttcacgactctacgctaggtctgaagaaggtaagatcttgtggtacagaggggaggaagaaagatgggccgcaagttccaccgtctgatgctgtttacgattacattcttttccggggaagtgacatcaaggatctgcaagttaacccttctccatctgtacaatcaagaaaggatattcaaagcgaaaaggacatcagtcagtcctctcagtctaggccagctgtgagctctccgcctactggatatgaagaagggttatgggtttggggagaggagggacaatgggtccatacacctgctttgactagtaatccggttcctacca

SEQ ID NO: 21414 - DNA, 585 bp, Zea mays
  Coding DNA Sequence Number=SeqID_7011
ggaacttgcaccaactaggtcaccataacgtcttgatcacgtggcggaatcccccagcaaaacgctgaaacatggagagactttcaaggaacctccgatgtttacagagcaaaagcaagctccagcgttgttggtacacaaaagatcgagtcacttatacagaaacggaagcccaagtttgacactaacaagttgcagcaagtagcaacggatgataaaggattgtggattgctgtcgtggggttggtgctgatgtcatcatgacttcagagtcttgcagaaatggtactgagctgtgcagcgaagcaatagaaaatctggagaagaagtatgatgtggtccttaacattcaaggagatgaacaactcattgagcctgtgattatagacagtattgtcaaagcacttcaggtagcacctgatgcagtatttagcacagcggtgacgtcattaaaaccagaagacggagatgatcctaaccgagtcaaatgtgtggtggacaaccgtggctatactgtctatatctccagtggtttggttccgtataacacgagtggtaacgtcaatccagatttccttacatgct

SEQ ID NO: 21415 - DNA, 567 bp, Zea mays
  Coding DNA Sequence Number=SeqID_7012
tcatctttctctgactcggacaaaaaaagatgtggtttttcggaaagaaaggagcatcaggattctcggctcgttccacagcagaagaagtaacacatggtgttgacggaactggcctcactgccattgtcacaggagcatcgagtggtataggagtggagaccgcgcgtgttcttgcactgcgtggtgtgcacgtggttatggcggtgaggaacactggctcgggtgctaaagtcaaagaagatattgtcaaccgggtccctggagctaaacttgatgtcatggagttagatctcagctcaatggactctgtcaggaagtttgcatctgattacaaatcatctggtcgtcctctcaacctcttggtcaacaatgctgggataatggcatgtccctttatgctctccaaggacaacattcgagcttcagttcgcacccaaccatttaggtcattttctgttgacaaagctactgctagatacaatgaagaacacatcacgtgagagcaaaagagaaggcaggattgtgaatctatcatcggaagctcatcggtactcgtaatccaga

SEQ ID NO: 21416 - DNA, 543 bp, Zea mays
  Coding DNA Sequence Number=SeqID_7013
accgcttgcttggttcacaatcacagacagactcgagaggagactgtgaggatgaggataatctcaatggcctccaccatccgaccttccttgctaggctgcgtctctgcatctcctcgcttccccgtcgtctccaggaatctctctcgctccaccctctctttctcccatgttactcagtcaaagcttttgactttaagaagaagcgtaagctgcttaggagtagctgaatctggaaacgcaagcacggccgctactgaagaggatcttctcaagtgggtgaaagatgataacaggagaatgcttcacgtcgtttacccgtgttggcgatttagacccggaccataaaattctataccgaatgtcttggaatgaagctttctacgcaagcgtgatataccagaagagaagtatacaaatgcttttccttggttatgggcccgaaagattcacactttgtcattgagctcacttataattatggaggtgacaagtatgacattggagcaggttttggtcactttgggtatggctggtcgacga

SEQ ID NO: 21417 - DNA, 474 bp, Zea mays
  Coding DNA Sequence Number=SeqID_7014
caaaacctgctccaatgtcatacttgtcacctccataattataagtgagctcaatgacaaagtgtgaatctttcgggcccataaccaaggaaaagcatttgtatacttctcttctggtatatcacgcttgcgtagaaagcttcattccaagacattcggtatagaattttatggtccgggtctaaatcgccaacacgggtaaacgacgtgaagcattctcctgttatcatctttcacccacttgagaagatcctcttcagtagcggccgtgcttgcgtttccagattcagctactcctaagcagcttacgcttcttcttaaagtcaaaagctttgactgagtaacatgggagaaagagagggtggagcgagagagattcctggagacgacggggaagcgaggagatgcagagacgcagcctagcaaggaaggtcggatggtggaggccattgagattatcctcatcctcacagt

SEQ ID NO: 21418 - DNA, 324 bp, Zea mays
  Coding DNA Sequence Number=SeqID_7015
aagttggcacccaccattggtatctctcttgaccatcgtcgcaagaacagatcattggagggtcttcaatccaatgtccagaggctgaaaacttacaaggctaagttggtcatcttcccgcgtcgtgccaggaaggtcaaggctggtgattctactgcagaagagttggctaatgccactcaagtccagggagattacatgcctatcgtccgtgagaagcaagcaacggagctagtgaagctgacctctgagatgaaatcggtgaatgcttacgacaagattcgtctagagcgccacaaacaaggagacatgccagggtgctaa

SEQ ID NO: 21419 - DNA, 560 bp, Zea mays
  misc_feature (349)..(349): n is a, c, g, or t
  Coding DNA Sequence Number=SeqID_7016
gcaaccttttctctgacattcatctgaggtgaagaaatgaagcacaacaatgtcatccccaatggtcatttcaagaagcactggcagaactatgtcaagacttggttcaaccagcctgccaggaaaaccaggagaagagttgcgagacaaaagaaggctgtgaagatcttcccccgtcccactgctggacctcttcgccctgttgtgcacggtcagactctcaagtacaacatgaaggtccgaaaccggtaaaggtttcactcttgaagagctcaaggctgctggaatccccaagaagttggcaccaaccattgggtatctctgttgaccatcgccgcaagaacagatnctctcgaggggtcttcagtccaatgtccagaggctcaaaacctacaaggggctaagttggtcatctttcccgcggcgggccaggaaggtccagcggctggtgattctactgctaagaagagttggccattgccactcaaggtcccaggggactccatgccctttgtggtccgtgagaagcacccaaatgaagctttgtgaagctgaccctc

SEQ ID NO: 21420 - DNA, 374 bp, Zea mays
  Coding DNA Sequence Number=SeqID_7017
accaatcatggttcgcctcgcatggcactctgctggaacatttgattgcgcctcgaggactggtggtccgtttggaacaatgaggtttgacgatgagctagctcatggagccaacaatggtctccacattgctcttaggttgttggagcctatcagggagcagttccctaccatctcccatgctgatttccatcagcttgctggtgttgtggctgttgaagtcaccggtggacctgaaattcctttccaccctggaagagaggacaagccccagccacctccagagggtcgtctccctgatgccacaaagggctgtgaccacttgaggcaggtcttcttaaagcagatggggtttaactgaccaagacattgtc

SEQ ID NO: 21421 - DNA, 586 bp, Zea mays
  Coding DNA Sequence Number=SeqID_7018
tcatctctttgatcgtcatcacacagatcctccattctcttttcgttcagatcttggaaggtcctcagctcaaggagaggagaagaggaacgtaaagactttgaaggatgtcttcattcacaggaactcagcagaagtgcaaggcttgcgagaagacggtgtaccctgtggagcttctctctgctgatggtgtcagctatcacaagtcttgcttcaaatgctctcactgcaaatccaggcttcagctgagcagatactcatcaatggaaggtgtgctgtactgtaagcctcattatgagcagctcttcaaggagtctggtagcttcaccaagaactttcagtcccctgttaaacctgcggctgagaaatcaagtcctgagctgacaaggacccctagccgagttgccggtatgttctcaggcacacaagaaaaatgcgccacttgcagtaaaactgtctatcctatcgaaaaggtaacagtggagagccagacgtatcacaagtcctgcttccagtgctcacacggaggctgcccaatctcgccttcaaactacgcagctcttgaaggaatcctctactgccagca

SEQ ID NO: 21422 - DNA, 524 bp, Zea mays
  Coding DNA Sequence Number=SeqID_7019
gaataattctctgtccgtcgaatcattttttgtttcagcgtggaaagagatgaccatggcagcaaacttggcgagacggctgatcggaaaccgatcagcgcagatcctcgggacggcgaactccacctcaaccgcagccacttccgccgctaggactttctgctcctccaccactccaatcaccgcaaccttgttccctggcgacgggatcggccccgagatcgctgaatccgtcaaaaaggtgtttacaacggccggtgtgccgattaactgggaagaacattatgttagcactgagattgatccgagaacgcagagcttcttgacgtgggagagtctcgaatccgtgcgtagaaacaaagttggtctgaaaggtccaatggcgactccaataggaaaaggtcaccgttctttgaacttgactcttaggaaagagctgaatctatacgccaatgttaggccctgctacagtcttcctggttacaagactcgatacgacgatgttaatctcatcaccattaggg

SEQ ID NO: 21423 - DNA, 573 bp, Zea mays
  Coding DNA Sequence Number=SeqID_7020
ttgcattagggttttcacttcggctgctgctagtgagtgagcaacgaatcttcaaccccaaccatggcgacgaaacaagccaaagcgtccgtgcaatgcttcggaaggaagaagacggccgtcgccgtcacccactgcaagcccggctgcggtctgatcaagctcaacggctccccgatcgagctgttcaacccagagatcctccggttcaagatcttcgagccggtgctcctcctcggaaagcaccgtttcgccggcgtcgacatgaggatccgcgtcaacggcggtggtcacacttctcaggtctacgcgattcgtcagagcatagccaaggcgctcgtggctttctaccagaagtatgttgatgagcagtcgaagaaggaggtgaaggatattttgataaggtacgataggactctgctcgtggcggatccgaggaggtgcgagccgaagaagtttggtgggcgtggtgctcgttctcgtttccagaagagttaccgttaaaacataatctggtttgtgtttttttttctgatctcaaccgttttgagactttaattatctttttgagtt

SEQ ID NO: 21424 - DNA, 548 bp, Zea mays
  Coding DNA Sequence Number=SeqID_7021
agggttttctcttcttctcatctatcacttcggctgctgcaagtgagccatggcgacgaaaccagctaaacaatccgtgcaatgcttcgggaggaagaagacggccgtcgccgtcacccactgcaagcccgggtgcggtatgatcaagctcaacggttccccgatcgagctcttccagcccgagatcctccggttcaagatctacgagccggtccttctcctagggaagcaccgtttcgcgggtgtcgacatgaggatccgtgttaacggtggtggtcacacttcacaggtctacgcgattcgtcagagcatcgccaaggcgttagttgctttctaccagaagtacgttgacgagcagtcgaagaaggaggtcaaggatatcttgataaggtacgataggactcttctcgtggcggatccgaggaggtgcgagccgaagaagtttggtgggccgtggtgctcgttctcgtttccagaagagttaccgttaatcaaaatctggtttgttcattgctcaaaatgagacgttagactctcatttgcgtttt

SEQ ID NO: 21425 - DNA, 569 bp, Zea mays
  Coding DNA Sequence Number=SeqID_7022
atgactgatccttattccaatttcttcacgggctggttcaagtccaatccctttcaccactaccctaattcctcaactagcccttcgcctcctcctcctcactcttctttcttcttccctcactccggcgacctccaccgtccaccgccagcaccaactcctcctccttcccctcctctccgtgaagccctccctctcctcagcctcagccccgccaacaaacaacaacaccaccatgaccatcaaattcaagaaccaccttcaatctccatggatgttgactacgatcatcatcaccatcaagatgatcataacctcgatgaccatgaccatgacgtcactgttgctcttcacataggccttccaagccctagtcctcaagatatggcctctttgctcatgatgtcttcttcctcctcttcctcgaggcccactactcactatcttgaggacatgaacggaaagaaagatcttgacaacgactaccatcaaggcggcgttggaggaggagaagatgacgatgaagattcagtcggtggagacggcggatgtagaataagcagactcaa

SEQ ID NO: 21426 - DNA, 561 bp, Zea mays
  Coding DNA Sequence Number=SeqID_7023
gggatccaatattgaccccttgttgagtctgcttattctacatccgccgtctccaccgactgaatcttcatcgtcatcttctcctcctccaacgccgccttgatggtagtcgttgtcaagatctttctttccgttcatgtcctcaagatagtgagtagtgggcctcgaggaagaggaggaagaagacatcatgagcaaagaggccatatcttgaggactagggcttggaaggcctatgtgaagagcaacagtgacgtcatggtcatggtcatcgaggttatgatcatcttgatggtgatgatgatcgtagtcaacatccatggagattgaaggtggttcttgaatttgatggtcatggtggtgttgttgtttgttggcggggctgaggctgaggagagggagggcttcacggagaggaggggaaggaggaggagttggtgctggcggtggacggtggaggtcgccggagtgagggaagaagaaagaagagtgaggaggaggaggcgaagggctagttgaggaattagggtagtggtgaaagggattggacttgaaccagcc

SEQ ID NO: 21427 - DNA, 554 bp, Zea mays
  Coding DNA Sequence Number=SeqID_7024
ttcttctctgcgatcttccgcgaaacgaaaatgagggagtgcatctcgatccacatcggtcaagccggtatccaggtcggaaacgcctgttgggagctttactgccttgagcatggcattcagcctgatggccagatgcctggtgacaagactgttggcggaggtgacgatgctttcaacaccttcttcagtgagaccggtgcaggcaagcacgtcccgcgtgccgtctttgtcgatcttgagcccactgtgatcgatgaggtcaggaccggtacttaccgtcagcttttccaccctgaacagctcatcagcggtaaagaagacgcagctaacaacttcgctcgtgggcactacaccattgggaaggaaattgttgatctgtgcttggaccgtatcagaaagctcgctgataactgtactggtctccaaggcttccttgtcttcaacgctggtggtggagaaactgggtctgggtcttgggtcgctcctcctcgagagactttctgtcgactacgggaaaaggcccagctccggggttcactgtttacccatct

SEQ ID NO: 21428 - DNA, 540 bp, Zea mays
  Coding DNA Sequence Number=SeqID_7025
cacaccaccagatctagatttattttttcccaggagagcgtcttcatacacgcgccccccttcgtctacgaatctgaaacgaaaatgagggagtgtatctcgatccacattggtcaagctggtatccaggtcggaaacgcctgttgggaactttactgccttgaacatggcattcagcctgatggccagatgccgagtgacaagacagttggcggaggtgacgatgctttcaacaccttcttcagtgagaccggtgctgggaagcacgtcccacgtgccgtctttgtcgaccttgagcccactgtgatcgacgaggtcaggaccggtacttaccgtcagcttttccaccctgaacagctcatcagcggtaaagaagacgctgccaacaacttcgcccgtggacattacaccattgggaagggaattgttgatctgtgtttggaccgtatcaggaagcttgctgataactgcactgggtctccaagggttccttgtcttccacgctgttggaggaggaactggatctggtcttggatcact

SEQ ID NO: 21429 - DNA, 567 bp, Zea mays
  Coding DNA Sequence Number=SeqID_7026
cattaactacgatctacccttcaattcgagtttctcatctgcaaggcggtctatctgcgattagccttcctccaataaaattcatcttcccagttcgttaaaacaacaaagtaaatttatttaccgacaaatggctgatttcaaagttcttctttctgatttgaagtcaatcgcggttgggaacttatatgctcttactagatgcaaagttgctttgttgatgacatagaagaaaagaagggagggagcagaaggagagtattgttaatggtatcagagagactgtcaaaaatataactctgtccatgtttctcttttgaaaacatgaaaaatatcaaattcaaggagtttagacaacagtttagacacaacgaaaggttcttcctcggctagaacaaattgatgcagtttgctcttggtccttctgcttgggatgaaatccatcctgccatctttaaagcttccaagattcttcatggtgagatgactgcttattacagatatgccaaaggaagacgttgaaagcttattttgactcttatgaagatcaccccttttacagggcgg

SEQ ID NO: 21430 - DNA, 494 bp, Zea mays
  Coding DNA Sequence Number=SeqID_7027
aacgtcttcctttggcatatctgtaataagcagtcatctcaccatgaagaatcttggaagctttaaagatggcaggatggatttcatcccaagcagaaggaccaagagcaaactgcatcaatttgttctagccgaggaagaacctttcgttgtgtctaaactgttgtctaaactccttgaatttgatatttttcatgttttcaaaagagaaacatggacagagttatatttttgacagtctctctgataccattaacaatactctccttctgctccctcccttcttttcttctatgtcatcaacaaagcaactttgcatctagtaagagcatataagttcccaaccgcgattgacttcaaatcagaaagaagaactttgaaatcagccatttgtcggtaaataaatttactttgttgttttaacgaactgggaagatgaattttattggaggaaggctaatcgcagatagaccgccttgcagatgagaaactcg

SEQ ID NO: 21431 - DNA, 593 bp, Zea mays
  Coding DNA Sequence Number=SeqID_7028
gtcgtgtcatcagagctcaacgtaagggagcaggttccgtcttcaaatcccacactcaccaccgtaaaggccccgccaagttccgcagcctcgactacggcgagagaaatggatacctcaagggcgtcgtgacggagatcatccacgatcccggccgtggtgcgccgctcgctcgcgtcgccttccgtcatcctttccgttacaagaagcagaaggagctcttcgtcgccgccgaaggcatgtacaccggacagttcttgtactgcggtaagaaagcgacgctcgttgtcggaaatgttctcccgcttagagctatccctgaaggagctgttgtctgtaacgtcgagcatcatgtcggtgaccgtggtgtgctcgctagagcttctggcgattacgccatcgtgatttcgcacaaccctgacaacgacactactaggatcaagttgccatctggttcgaagaagattgttccgagtggatgcagggccatgattggtcaggtcgctggtggtggaagaacggagaagccgatgctcaaggcgggaaacgcgtaccacaagtaccgtgtgaagagaaactcgtggcctaagggt

SEQ ID NO: 21432 - DNA, 496 bp, Zea mays
  Coding DNA Sequence Number=SeqID_7029
aatcacggacccaaattcgaatctgaagaaactcatcggagcttgattctctccgtcgtcgccgagatcgattccatcctgtggcggctccgaatcgagtggggagagtatggattgggagaacgttgcagcagaggacgtgatcgaggcgctgagagaagtggagtggtcgacgcctcctcgctcattcggcgaattcttctctagattcgcgttcccgcgctctttctctaagtggaggagccgtctcaaatgccatctctactactatcggacgaattactttatcctggtgattcttgttctaggtcttgctctgattacaagaccattggctattcttggtgctgctttcaccgccttgagcttagctttccttaacgatagttttgcggctacttttaatgagaagtttataaggactattaggcttttctctccacacttggcagctaagatgaggcctccccacatgcctggcatacgtgggagatca

SEQ ID NO: 21433 - DNA, 547 bp, Zea mays
  Coding DNA Sequence Number=SeqID_7030
tcaagattctcaattctacccgacgcttcttcagattctctttgtcatcggtttcaaaacaatcggagagatcaaatcaatggcttcgctcgattccgacgtcaccatggttcccgcaggagaatcctcaagcagcgtcgccccatcgtcgtcgtccaccaagaaggcgaagagattcgaagttaagaagtggagcgccgtggctctctgggcttgggatatcgttgttgataattgcgctatctgcagaaaccacatcatggatctgtgtattgaatgtcaggctaatcaggccagtgctacgagtgaggagtgcactgttgcttggggagtttgcaaccacgccttccactttcactgcatcagcagatggctaaagactcgtcaagtttgtccattggataacagtgagtgggagttccagaagtatggtcactaaaccaactaatcgtaccggcaaatcatttggttggcgcatatgagatgctgatatttcgctcgaaaggtccttggggttttttttttttccggcttggccgcaaagttg

SEQ ID NO: 21434 - DNA, 156 bp, Zea mays
  Coding DNA Sequence Number=SeqID_7031
attttctttcgatcgtctcgcatcgacttttattagggttttcgtttcctgagagatcaatcaatcaatcgatatggcttccctagattccgacgtaaacatgatccctgctggtgaatcctccagctccgttgccgcttcttcgtcgagcaagaa

SEQ ID NO: 21435 - DNA, 509 bp, Zea mays
  Coding DNA Sequence Number=SeqID_7032
gatttgtttcccctattttggctatgcagttcctcatcatacatagtgtttcttcattgaaccttaccaatgagtatctcaaccacaaatgcttccttgatcaagggatatataatactggaagtgagtacgaggacagcctcaacattattttacgtagtgttcgtactggtagttattataagaacggtttcatgcgcacaagcaagggtcgtgaacctgctcctgatgctgtcaccgtcatgttccagtgtcgtggtgactcttatgggtctaaatgccgtacatgtgccgacaccgcagtcgcagggtttcgtagaagatgtctaaggaacaaaggaggaataatatggtacgaccaatgttttctctgggttagtgcaatcggtgaagacatgccaatcaatactaattacaagaatattttttctatgtacaacccaaataacgtaagaggggatgcaaaattgtttgccaagagggtgggccggatgttttctctgagctaa

SEQ ID NO: 21436 - DNA, 542 bp, Zea mays
  Coding DNA Sequence Number=SeqID_7033
aagaaacatctctcctctctttgaacaagaacatcaagaacaatggcttgtactaatctaacaacaatgtgggtttcatcaaaactatctatttctgattcctcttccttgtccttccgttctattctcaacccacttcctctcccaaaccacaactcatctccttcaagatcttcctctgtctctccaatccagtcctctcttcgtgagctccgagaccgtatcgactcagtcaaaaacactcagaagatcactgaagccatgaagcttgtcgctgcagcaaaagtcaggagagctcaggaagctgtggtcaacggccgaccattctcagaaaccctagttgaagttctttacaacatcaacgaacagcttcaaaccgatgatatagatgtgcccttaaccaaaatcagaccggttaagaaagttgcactcgttgttgtaacaggagaccgaggattatgcggtggattcaacaacttcatcatcaagaaagcagaggcaaggatcaaagagcttcaaggcctaggtcttgactacacagt

SEQ ID NO: 21437 - DNA, 564 bp, Zea mays
  misc_feature (424)..(424): n is a, c, g, or t
  misc_feature (437)..(437): n is a, c, g, or t
  Coding DNA Sequence Number=SeqID_7034
tcgagaatgacgattgctccttccttgttgtcatcatcttcctcagcctctcaattcctccctagattcccaaccgccgctaggttcaatgtagccgcttcacggagcagagccgtcaccgtcgtcgctgcatccgtcaccgacctatccagcgttgacagcacgaccatcgccgtactcggaggcggatcagtcgcagctctggcgacgatcgtttccttgacggacccggagaggaggcggaaactgcaggcggaggaagtcggaggaggcgacaaggaggtggtgagggagtatttcaacagcacggggttcgagcggtggaggaagatctacggcgagactgacgaagtgaaccgcgttcagaaggatatacgaatcggccacgccaaaacggttgagaaaacgatgctcatgctgacgngaagaaggttcgnttagccggcgtaacggtctgcgacgctggctgcgggacaggtctgctctcgattccacttgctaaggaaggtgcgatcgtctccgctagcgatatctctgcagctatggtcgccgaagctgagatga

SEQ ID NO: 21438 - DNA, 571 bp, Zea mays
  Coding DNA Sequence Number=SeqID_7035
tatcttcgtcttcaatctctgaaaatctaaacaagcaatggaatttcaggaggtcgagggaaacgaatcgttatgaggaaccttgatgtcaagctttgattgcgttgcttggtcgtctcctacgaaacgttacgagagttattgattcatccactttaaccaacttgataagcaaaatttctcattcaatgctacttctaggcggtgcatctcaacctataaaaaggcgggtctttgttcttccgccgttgaggtgggactgctccgattctgcaaatcaagaaatgtatgcacttcctagatgcaaaggatgtgactggtcagaaactcaggctgcaagattcctctctattgattcgattcagtgattcaccctctttcgatgagtaacgaaccggtctccccaatacctgaagaatattttaggttccgcaatcacagtgagatgcttgattactttgacaatgaatacatcagcagcatcattgctgaggggctatgccaaggtttgaacctcgctctgatcgtagctgagcttaatgaattatcatcactcgggtcatacatctat

SEQ ID NO: 21439 - DNA, 574 bp, Zea mays
  Coding DNA Sequence Number=SeqID_7036
caaaccctgccatattctaaactattaaacatatatatagatgtatgacccgagtgatgataattcattaagctcagctacgatcagagcgaggttcaaaccttggcatagcccctcagcaatgatgctgctgatgtattcattgtcaaagtaatcaagcatctcactgtgattgcggaacctaaaatattcttcaggtattggggagaccggttcgttactcatcgaaagagggtgaatcactgaatcgaatcaatagagaggaatcttgcagcctgagtttctgaccagtcacatcctttgcatctaggaagtgcatacatttcttgatttgcagaatcggagcagtcccacctcaacggcggaagaacaaagacccgcctttttataggttgagatgcaccgcctagaagtagcattgaatgagaaattttgcttatcaagttggttaaagtggatgaatcaataactctcgtaacgtttcgtaggagacgaccaagcaacgcaatcaaagcttgacatcaaggttcctcataacgattcgtttccctcgacctcctgaaattccattgct

SEQ ID NO: 21440 - DNA, 581 bp, Zea mays
  Coding DNA Sequence Number=SeqID_7037
gtcgagagtcgaagcagttaccaaaggcggcttgcctgtagtcccttcccagtacatccaaccaccggaagctcgccccaacctccaccacgccggcgacgctgctccaatcccaaccatcgacctctctaactccgattccgcaaaagaatccatcggcgaagcttgccgcaactggggagccttccacgtggtcaaccatggcgtccccatccatctcctcgatcgaatgaaggctctaggcctatccttcttccaagactgtccgttggaagacaagctccaatacgcctgcgactcaacctccgcggcctccgaaggttacggaagccgtatgctcctcggagccgaaggcgacgtcgttttggattggagagattacttcgatcaccacacgttccctctctctcgccgcaacccctctcattggccgttacgtcctcctgactacagacaagtagtggaagagtatggtaacgagatgaagaaactagctcaaaagctgttggggataatctcagagagcttgagtcttccatgctcatctatagaggaagctgttggagaatctatcagaactt

SEQ ID NO: 21441 - DNA, 536 bp, Zea mays
  Coding DNA Sequence Number=SeqID_7038
aacggatccgatctagggcgtctcttcttcttcttcttcttcttcttcgatatctatctccatcgtggatcgaagagctaaggtggaacatggacaaaggcaaagcagtgatgggtgctggccggagatgggccgtcgatttctccgatcaatctaccggtccatcttcccgcgacatcctcgatccggcctggcttctctcgggctcctcccgaacagggatgattcagcaacgagccgccaaaagaaagacgctgaggctagttggaaacttcagaaagcatgggaagtaccgcagtcaccgtttaagaatctggggatgatggggttcaggatgtggatggctggggacactgttcacctctttagcattgggatcactttccctgctctttgggagcctctcagcgccctccagaggggtggcaagatttttggagccttcagggataacaagggggggccttactatgcgccaaactagtggttctttggcctaaaccttgggggggctaagttctgggtatccggaacct

SEQ ID NO: 21442 - DNA, 504 bp, Zea mays
  Coding DNA Sequence Number=SeqID_7039
ttctcttctccgtctcttcgcttttctctccggcactgagcgacgtgcctctcgagctgccaattcaaaaaggcttgagcttaaggagaaaaagatggtgagaatcagtgtactcaacgatgctctcaagagcatgttcaatgcggagaaacgaggcaagaggcaggtcatgatcaggccctcctcaaaagtcatcatcaagttcctcatcgtcatgcagaagcacggttacattggtgagtttgagtacgtcgatgaccccccttccggcgggggcggtgtggagttgaacgggaggttgaacaaatgtggcgttatccgcccttcgttttggtgttggtggttaggagattgaagggtggacctgcccgtctgcttccttccagacaggttgggtaactttgggttgactacttccagctgggattatggaccctgaagaaccccggaaaaaatggccgagggaaattcctccgtttcttctattgaaaacctctatttggg

SEQ ID NO: 21443 - DNA, 304 bp, Zea mays
  Coding DNA Sequence Number=SeqID_7040
tgcctctcgagctaaccaacctaagttatttagcagaggctttgagtttttgggagaaaaaatggtgagaatcagtgtgctcaacgatgctctcaagagcatgttcaatgccgagaaacgtggcaagaggcaggtcatgatcaggccttcttccaaagtcatcatcaagtttctcatcgttatgcagaagcacggttacatcggtgagtttgagtatgtggatgaccaccgatccggcaaaatcgttgtcgaattgaacggaaggttgaacaagtgtggcgttatcagccctcgttttgatgtt

SEQ ID NO: 21444 - DNA, 518 bp, Zea mays
  Coding DNA Sequence Number=SeqID_7041
aaatcgaaatacaatcttctcaattctctctctctctcgcgaattacgatcaagatgcagatcttcgttaagacactcacgggaaagacgatcacccttgaggtggaaagctctgacaccatcgacaatgttaaagccaagattcaagacaaggagggtattcctccggatcagcagaggctcatcttcgccggaaagcagctcgaggacgggagaaccctagctgactacaacatccagaaggagtcgactcttcatctcgtcctcaggctccgtggtggcatgcagatctttgtcaagaccttaacgggaaagacgatcacactcgaggtggagagctccgacaccatcgataacgtcaaggctaagatacaggacaaggagggaatcccgcccgaccagcagcgtttgatatttgccggcaagcagcttgaggatggtcgtacattggccgactacaacattcagaaggagtcgactcttcatctcgtgttacgtctgcgtggaggcatgcaaat

SEQ ID NO: 21445 - DNA, 483 bp, Zea mays
  misc_feature (315)..(315): n is a, c, g, or t
  misc_feature (384)..(384): n is a, c, g, or t
  misc_feature (422)..(422): n is a, c, g, or t
  Coding DNA Sequence Number=SeqID_7042
tctcgacaccgttcgattcgatcgacctgctgctaacggaaacctagagtggattgctccgggatgtcgaacggcacagatcacgcccaaccaccgtcggaaaagttgagtcttccgatggaatcgaggccgaagaagcgtgcgtcaccgggggataactgggcgcctcctccaggttggacgaccgaagaaaaggttcgaacctccggtaccaaagctggtttggtggacaagttctactacgaacctgttacaaatcgcaagttccggtcaaggaccgaggtgatgtactacttggaacacggaacgcctaanaagaaaaacaagaaatcggttaacaacagtgacaccaaatcacaacgttctgaagacccgagaagctantagcggctgaccccaatccacacaaagcctaacgaagnagccacccccccaacccacccccaccccaatgccgctggactttgattttgggatggcccc

SEQ ID NO: 21446 - DNA, 568 bp, Zea mays
  misc_feature (161)..(161): n is a, c, g, or t
  misc_feature (199)..(199): n is a, c, g, or t
  misc_feature (268)..(268): n is a, c, g, or t
  Coding DNA Sequence Number=SeqID_7043
agggtcgttcccattttgcggacagttctgaatgttgtacccccaggggaggcccccaagcttccgtaaaccgttggtcccgttccaaatgaccttctgggggccatcccaaaatcaaagtccagcggcattggggtgggggtgggttgggggggtggctncttcgttaggctttgtgtggattggggtcagccgctantagcttctcgggtcttcagaacgttgtgatttggtgtcactgttgttaaccgatttcttgtttttcttnttaggcgttccgtgttccaagtagtacatcacctcggtccttgaccggaacttgcgatttgtaacaggttcgtagtagaacttgtccaccaaaccagctttggtaccggaggttcgaaccttttcttcggtcgtccaacctggaggaggcgcccagttatcccccggtgacgcacgcttcttcggcctcgattccatcggaagactcaacttttccgacggtggttgggcgtgatctgtgccgttcgacatcccggagcaatccactctaggtttccgttagcagcaggtcgatcgaatc

SEQ ID NO: 21447 - DNA, 485 bp, Zea mays
  Coding DNA Sequence Number=SeqID_7044
ggagacgcgccagaaacttttgccacgacggcgccgttagctccggtgactagtgagcgaaaagtacgtagcgacttggaggagaaactaccaaagccatatttggcaagagcactagtagctccagatacagagcatccaaatggaacagaaggtcatgacagcaaaggcatgagtgttatgcaacagcatggtgctttcttcgaccaaaacggcgacggtattgtctacccttgggagacttatgctggattccgtgacctcggtttcaacccaatctcctctgtcttctggagcttaatcatcaacttagcgtttagctatgttacacttccgagttggttgccatcaccattactgcctgtctatatcgactacatacacgaagccgagcatgggagtgattcaagcacctatgataccgaaggaaggtatgtcccattttatctggagaacatatttagcaagtacgcactaacggctgc

SEQ ID NO: 21448 - DNA, 489 bp, Zea mays
  misc_feature (188)..(188): n is a, c, g, or t
  misc_feature (197)..(197): n is a, c, g, or t
  Coding DNA Sequence Number=SeqID_7045
atggcgtatggttctttcgctatctcatcgaaagctctagtcttttgccgtccttgctatggtggctccatcagagatctccctttctccctccgcacgcctacgattgggcgttgcggatgcgttggagcaatcgcggcaccgagaaacctggtgaagccacgcaaggaagagagcacggaaaaggnagattaggnggaggaagggagagtaaggataaaacgacgccgtggaagaagttagatgctaatgagtttggtatacagaggtccatgatccctgaatctacacgcatggttctcaataagctcaggaaaaaagggtttcaagtatacctagtggggaggttgtgttcgggatcttatactagatagaatccccaaggattttgatgtcatcacttctgccgaaactcaaagaggtacggcaagtatttccccgatgccaaatcgttggaagacggtttcccatctgccatgtttatgtcga

SEQ ID NO: 21449 - DNA, 467 bp, Zea mays
  Coding DNA Sequence Number=SeqID_7046
ctcaggaagacgtcgctgctgctgctgctgctgctaacggtgctaccacggcggtggagaagtccgttacgttcacggcgtacaagcctcagctgattgtggaagcacagaaggtcggtgacgctgttgcgttctacaaggctgtgtttggcgccgtggagactggacgctctctctaccccaagcgtaaggctgaccaagagctccctcacctcgtctcttccgagctcgagctcgccggaacaaccgtagtcgtttctgacgtatccgttaactctggccctgatgcgaagacggggactatgcctgcgatcctcgaaaccgatgacgtggaagctgccgttgcgaaggccgttgcggctggagctgtcaaggaggaggaggaggaggaggtctcggagggtggagtcaaggggaaagtgacggatccgttcgggttcacgtggatctttgttgctccggcgaaa

SEQ ID NO: 21450 - DNA, 495 bp, Zea mays
  Coding DNA Sequence Number=SeqID_7047
aagatccacgtgaacccgaacggatccgtcactttccccttgactccaccctccgagacctcctcctcctcctcctccttgacagctccagccgcaacggccttcgcaacggcagcttccacgtcatcggtttcgaggatcgcaggcatagtccccgtcttcgcatcagggccagagttaacggatacgtcagaaacgactacggttgttccggcgagctcgagctcggaagagacgaggtgagggagctcttggtcagccttacgcttggggtagagagagcgtccagtctccacggcgccaaacacagccttgtagaacgcaacagcgtcaccgaccttctgtgcttccacaatcagctgaggcttgtacgccgtgaacgtaacggacttctccaccgccgtggtagcaccgttagcagcagcagcagcagcagcgacgtcttcctgagccattgttttagagagagagagagattcgttggttagtagctga

SEQ ID NO: 21451 - DNA, 505 bp, Zea mays
  Coding DNA Sequence Number=SeqID_7048
ggcgacgactttaacgttgactctcttcctccttttttcaacaaaacttccggcgtcagtctccggcaagtgcaccaccaccacatccacaaaaaccttcgagaaatgcatctctcttcccacacaacaagcttcaatcgcgtggacataccatccacacaacgcgaccctcgacctctgcttcttcggaacattcatctcgccttccgggtgggtcgggtgggggatcaacccggatactccctcccagatgaccggctctcgagtcctcatcgcgtttccggatcctaactcgggtcagctcatcctcctcccttacgttcttgactcttctgtcaagctccagaaaggccctctgctttctcgtccccttgacctcctccgtctctcctcctcctccgcttctctgtacggagggaacatggcgactatacgcaacggcgcctccgttcagatttacgcatcggtgaaactctcgtcgacaacaccaagatccaccatgttt

SEQ ID NO: 21452 - DNA, 552 bp, Zea mays
  Coding DNA Sequence Number=SeqID_7049
gcaggtcactgaatacactccgtactcgccacctcgttttgtcagggaaagctttgcagggatctcatctctctgggctgcagtcccgtgctatttcttacggctccaagaaagatgatgaagaagaggagcaacttgccaaggaaatctccaaggactggaatactgtctttgaacggagcataaacacactgtttctcactgaaatggtccgtggtttgtccctgaccctcaagtacttctttgatcccaaagttactatcaattatccatttgagaagggtccactgagccctcgcttccgtggtgaacatgctcttcgtcgttatcctaccgggggaagaacgctgcattgcctgcaaactctgtgaagctggatgtccagctcaagcaatcacaatagaaggcagaggagcgggaagatggtagccgtagaaccactaggtacgacatcgacatgacgaaatgcatttactgtggtttctgccaagaagcttgccccgttgatgcaattgccgaaggccctaactttgaattcccaaccgagacaca

SEQ ID NO: 21453 - DNA, 531 bp, Zea mays
  Coding DNA Sequence Number=SeqID_7050
gatgattctagagtggttcctctacgtctcctcccccaaatcctctcgctagggtctctcctccttcgtctctcagactctcctcctcctcctcctccaaatccatcattctacacgaagaggctgattatcaaatgagctgaagcttcttcttagggattcgattcaaccagtggatttctttgtttttttatcttattttgagaaagctgaggatatgtcaagcggtagaaacacccactggtgtcacagatgccaacgtgctgtccgtctccacgccccagaccctgtatgttcttattgtggaggaggattcgttgaggagcttgtcacacctcaagccatagccaacccatttgatatctttagatctcacagggatgttgcagaacgtgatcccgcttttgatctcatggacgcattctccgccttcatgagaaaccgcttagccgaccgagaactcagaaggaagaacatcacttcccgtcctgaaagcttccccggcttagcctcctttgttggatctttggg

SEQ ID NO: 21454 - DNA, 584 bp, Zea mays
  Coding DNA Sequence Number=SeqID_7051
tctccaccttcgatctatagatcctcttcttcaccaccggagagctcagccgtcgcactgaatcaaatcaaccgagaaagcaatctctagatctgtcgtctccttcacatcttctaccagagatgtataataatatgggacctcagcctgggatggcaatgcctcaggcaaatcctcagcctaacccatttgggaatgccttctctggtcctggctctggacttatccggagtggcttgggagcttatggggagaagattttcggatccagctctgagtatgtgcagagcaacataactcgttacttctccgatcctcaatactattttcaagtgaatgaccaatatgtgaggaacaagttgaagattgttctacttcctttccttcacaggggacactggactagaatctcagagccagttgggggtagactttcatacaagcccccgatatatgatattaatgcaccagacttatacattccacttatggcatttggcacatacgttgttcttgctggtttgtcactaggactctatggggaagttttctccggaaagctctgaactggctttttgtcaaag

SEQ ID NO: 21455 - DNA, 467 bp, Zea mays
  Coding DNA Sequence Number=SeqID_7052
tctgggtcagggttatgctcgaagcgtgtcgtggtcgacgcaaggcaccacatgctgggctgtctagcttcgatcatcgctaaggagttgctcaacgggcagagagtcgttgtggtcagatgcgaggagatttgcctgtcaggtggattggttcgtcagaagatgaagtacatgaggttcatgaggaaacgcatgaacactaagccttctcacggtcccattcacttcagggctccctctaagatcttctggcgcaccgttcgtgggatgatcccacacaagaccaagcgtggagctgctgctcttgcacgcttgaaggtctttgaaggagtcccacctccttatgacaaggtcaagagaatggttattcctgatgctctcaaggttttgaggctccaggctggtcacaagtactgcttgttgggacgtctgtcttctgagggtggctggaacactacgataccatt

SEQ ID NO: 21456 - DNA, 527 bp, Zea mays
  misc_feature (278)..(278): n is a, c, g, or t
  Coding DNA Sequence Number=SeqID_7053
tactgagtctctgttagcttcttcttcttctagatctgatcgcgattttcgccggaagaggtcttgttatatctatgggtcgtggaaacagctgtggtggaggtcaaagctcactcaattatctctttggtggtggtggtgatgctcctcctcctaagcccgctccagctccagctccagctccttctgctgagccaaccaaggctactgcacctgcacctgcacctgtagctgtgactgcaactgctctcaccaccgctactaccagcgttgagccntgcagaggtcaacaagcagatcccctgctggtatcaaaactcctggttaacaactatgctcgagctgaaggacagaaacaccggaaacttcctcactgaccgtcctttcggaccaaagtccatgcagctcctggaggtggatcatcctttgggttatcttttcactggtggcgcagtaaagtataataaaaacattatgtgtaatgccaatgcgtatccattggctccttgttgcattcgcacactata

SEQ ID NO: 21457 - DNA, 537 bp, Zea mays
  misc_feature (288)..(288): n is a, c, g, or t
  Coding DNA Sequence Number=SeqID_7054
ttctactcatcaaagcctggctcacatcaaccattttttatagtgtgcgaatgcaacaaggagccaatggatacgcattggcattacacataatgtttttattatactttactgcgccaccagtgaaaagataacccaaaggatgatccacctccaggagctgcatggactttggtccgaaaggacggtcagtgaggaagtttccggtgtttctgtccttcagctcgagcatagttgttaaccaggagttttgataccagcaggggatctgcttgttgacctctgcanggctcaacgctggtagtagcggtggtgagagcagttgcagtcacagctacaggtgcaggtgcaggtgcagtagccttggttggctcagcagaaggagctggagctggagctggagcgggcttaggaggaggagcatcaccaccaccaccaaagagataattgagtgagctttgacctccaccacagctgtttccacgacccatagatataacaagacctcttccggcgaaaatcgcgatcagatctaga

SEQ ID NO: 21458 - DNA, 458 bp, Zea mays
  Coding DNA Sequence Number=SeqID_7055
ttcttctctctgtcacattgatttgtgaagaagaagagtggcagagaaacccatggctatggcggagatggcaatgaagtcttcagtaacaactgcaaaactcactcttcctccttcttcttcgtcttgtaagaagagagcgaggcaagtctctgtcgcacttccgacaacaacttcaatctctctgttatctgtcttctcatctcctcctcctgaagccaaagctgctgtttccatttccaaggaccagatcgtctcctctctcactgaagtggagaagacaatcaaccaagttcaagaaactgggttcgagtgttttcgacgcaacgcagcgtgttttccaaggtggtaggagacgctctcaaaccagccttggacactgctttgcccatcgcaaagcaagcccggtgaagaggcctttgaagcttgcttctcctgctttctcagaggcttcgaag

SEQ ID NO: 21459 - DNA, 476 bp, Zea mays
  Coding DNA Sequence Number=SeqID_7056
aaagacaggctctgcatcaattaccaagagccttgccatgcttcctgagctttcttcgaagcctctgagaaagcaggagaagcaagcttcaaaggcctcttcaccgggcttgctttgcgatgggcaaagcagtgtccaaggctggtttgagagcgtctcctaccaccttggaaaacacgctgcgttgcgtcgaaaacactcgaacccagtttcttgaacttggttgattgtcttctccacttcagtgagagaggagacgatctggtccttggaaatggaaacagcagctttggcttcaggaggaggagatgagaagacagataacagagagattgaagttgttgtcggaagtgcgacagagacttgcctcgctctcttcttacaagacgaagaagaaggaggaagagtgagttttgcagttgttactgaagacttcattgccatctccgccatagccatgggtttctctgccactc

SEQ ID NO: 21460 - DNA, 544 bp, Zea mays
  Coding DNA Sequence Number=SeqID_7057
acagcagtcgagagacagtgtcaaaaaaaaaaaaaaaactcatcaaagagaaatggctacctccgccgcacgtcctctcgtcaccatccaaggcctagacggcgacatgaccaccgaccaatcctccaccatcgtcctccccgacgtcatgacagcccccgtccgtcccgacatcgtcagcttcgtccacgctcaaatctccaacaactcccgccagccctacgccgtctccaagaaggccggtcaccagacctccgccgagtcgtggggaaccggacgcgccgtctcccgtatcccccgtgtccccggaggaggtactcaccgtgcaggacaagctgccttcggaaacatgtgtcgtggtggacgtatgttcgctccgaccaagatctggcgcaaatggcacaggcgcgtgaacgtcaacatgaagaggcacgctattgtctctgccattgctgcaactgctgttcctgctcttgtgatggcgcgtgggcataagatcgagaatgttcccgagatgccactcgtggtgagtgactctgctgaa

SEQ ID NO: 21461 - DNA, 582 bp, Zea mays
  Coding DNA Sequence Number=SeqID_7058
tctaactctcttaagattcaaaaggacttttgcttctcttcgtaaagtcaccatgtctggggaagaagctgctcctgctgttgttcctccggctgctgagccagctgcaattccagaggacatggatctgttgactgcattggagctgactctaaggaaagcccgtgctcacggtggtgtgactcgtggtctccatgaaagcgccaagcttatcgagaagcgtgttgctcagctctgcgtcttggctgaagactgcaaccagcccgattacggcaagcttgccaaagctctatgcgctgatcacaacatcaacttgcttactgttccaagtgccaaaaccctcggggaatgggctggccttcccagaatgattccaaggttaaggaaagaaaatttttggaagcctccgcctttggggcaaggattacggtagggaaaaattggccccaaacccgggaaaaagtttttgatttctacaaaaaccgcaaggccaaatttcaaggggttttcccccctttttcttttttttttttgggaacacaaaccttttaatgggatatacccgaaaaaatgttggcgcaa

SEQ ID NO: 21462 - DNA, 549 bp, Zea mays
  Coding DNA Sequence Number=SeqID_7059
atgagttgatcgctaacgccgcctacatcggcacacccggaaagggtattctcgccgccgatgagtccaccggaaccatcggaaagcgtcttgcaagcatcaacgtcgagaacgttgagaccaacagacgtgctctccgtgagcttctcttcaccgcccctggtgctctcccttgcctcagcggtgtcatcctcttcgaggaaactctttaccaaaagagctccgatggcaagcttttcgttgacatcttgaaggaaggaggagtactcccaggtatcaaagtcgacaagggtaccgtcgagctagccggaaccaacggcgagaccaccactcagggtcttgacggcctcggtgagcgttgcaagaagtactacgaagctggtgcacgtttcgccaagtggcgtgcggttctcaagatcggcgagaacgagccatcagagctttccatccacgagaacgcttacgggttggctaggtacgctggtatctggccaggagaacggtcttgtacccatcgtcgagcctgagattctagtcgacggtcccatg

SEQ ID NO: 21463 - DNA, 195 bp, Zea mays
  misc_feature (54)..(57): n is a, c, g, or t
  misc_feature (70)..(70): n is a, c, g, or t
  misc_feature (72)..(72): n is a, c, g, or t
  misc_feature (74)..(74): n is a, c, g, or t
  Coding DNA Sequence Number=SeqID_7060
ctcgatctttccgtctaaaaccatgtctgccttcaccagcaaattcgccgatgnnnnagttgatcgcatncngnctttaacgccgcctacatcggcacacccggaaagggtattctcgccgccgatgagtccaccggaaccatcggaaagcgtcttgcaagcatcaacgtcgagaacgttgagaccaacagacgt

SEQ ID NO: 21464 - DNA, 534 bp, Zea mays
  misc_feature (267)..(267): n is a, c, g, or t
  misc_feature (469)..(469): n is a, c, g, or t
  misc_feature (471)..(471): n is a, c, g, or t
  misc_feature (473)..(473): n is a, c, g, or t
  misc_feature (486)..(489): n is a, c, g, or t
  Coding DNA Sequence Number=SeqID_7061
aaagctctagatgggctcgttctcccccccatctttgggaaccccccccccccctttgggggaaacgtgcccccaagcttggtaagtacttcttgcaaccgctcaccggaggcggtccaaaggcccctgagtggggtgtctccccggttgggttccgggcctagctcggacggtaccccttgtcgactttgatacctggggagtactcccccttcccctcaaggatgtcaaacgaaaaagcgcttgccatcgggagctcttttggtnaaagagtttcctcgcacgaggatgacaccgctgaggcaggggagagcaccaggggcggtgaagagaagctcacggagagcacgtctgttggtctcaacgttctcgacgttgatgcttgcaagacgctttccgatggttccggtggactcatcggcggcgagaataccctttccgggtgtgccgatgtaggcggcgttaaagncngnatgcgatcaactnnnncatcggcgaatttgctggtgaaggcagacatggttttagacggaa

SEQ ID NO: 21465 - DNA, 498 bp, Zea mays
  Coding DNA Sequence Number=SeqID_7062
gattttatctgtcatttgcttcaactgttactatcgaccaatctcggtgttcgtagccatgagtcttcttacagatctcgttaaccttaacctctcagagaccactgacaaaatcattgcggaatacatatgggttggaggttcaggaatggatatgagaagcaaagccaggactcttcctggaccagtgagtgacccttcggagctaccaaagtggaactatgatggctcaagcacaggccaagctcctggtgaagacagtgaagtcatcttatacccctcaagccatctttcaaagatccttttccgtagaggcaataacattcttgtcatgtgcgatgcttacactccagcgggcggacccattccccacaaacaaaagacaccgctgccgcctaagggcttttagccacccctgatggtgtacctgaaagggccagggatttggtttggaccaagagtatacctttacttcagaaagatgggaccgggccctct

SEQ ID NO: 21466 - DNA, 560 bp, Zea mays
  Coding DNA Sequence Number=SeqID_7063
tggttgccctagttttccaaatcgccgtgtctcactaaagaagacgaagccatggtgcacgtttgctactaccgcaactatgggaaaaccttcaagggcccacgacgtcctttcgagaaggagcgtctcgactccgagctgaagctcgtcggcgagtacggtctccgcaacaagcgtgagctctggagagtccagtactccctgagccgcatccgtaacgccgccagagatcttctgacgctcgacgagaagaatcccaagaggatcttcgaaggagaggcgcttctccgtaagatgaacaggtacgggcttctcgacgagagccagaacaagctcgattacgtcttggcgttgaccgtggagaattttcttgagcgtcgtcttcagactattgtgttcaagtctggtatggctaagtcgattcatcactcccgtgtcctcatcaggcagaggcatatcagggttggaaagcaattggtgaacattccatcgttcatggtgagacttgactcgcagaaacacatcgactttgctctaaccagtccctttgggtggtggcg

SEQ ID NO: 21467 - DNA, 519 bp, Zea mays
  Coding DNA Sequence Number=SeqID_7064
aaccgctctcgaattcctttttcattcggaacatcacccaattctctagcaatttccacatgacttcagatgctctcaacataccatccgagcttgaatctgcgttacggctcaggacggtacaatactttatcacaaagaggccttggcttgatctctatggagtccatgtaaggcccgtggcaccattcggaagcacaagcagtaaaccacaatttgatcctgctttgattcatcgctccttgcctgatgagcttcttttcgaggtgtttgctcggatgttgccttatgaccttggcagagcagcttgtgtctgcagaaagtggaggtacactgttcgcaaccctgtcttctggcgtaacgcctgcttgaaagcttggcagactgctggggttatcgaaaactataggatcttgcagtctaaatacgatggatcatggaggaaaatgtggcttcttagatccagagttcgtactgatggtatttatgtgagtagaaacacttatatccgagctggaa

SEQ ID NO: 21468 - DNA, 520 bp, Zea mays
  Coding DNA Sequence Number=SeqID_7065
tgcttccacgcttctaattgtgtgttgcaaaattggacccgattcgacacaagattgatgctgattaattagtatcgagctttttttgaataaaaaaaaaagttagaattatataggtgcatctaccgtctgtccgttccaatccgacggctgtggaacacgccgtacaatttagactcaatctgacggtggaacaaaacagaaaagatcgcacaatccctcaaatctaatagttgtgttgtgttgtgtgtgtgaagccgaaacgaacagagaaatggcagccgcagctatctccgccggaccaaaccgccttattagctcagcatccgatgttcccccccatctcctcaccaccaagctcaatcccctcttctttccttccgggaagactcagcatctgtggcgctcctcatcgattctcctgcctacgccgccgcgatgcgcggcgccgccgcctagagccagttctcgagctgacgattctccgccgttcgacatgtcccgggaaacggctctgaaa

SEQ ID NO: 21469 - DNA, 542 bp, Zea mays
  Coding DNA Sequence Number=SeqID_7066
gtattcgtggaagggagctccctcaggggccccggagtaccctttcagagccgtttcccgggacatgtcgaacggcggagaatcgtcagctcgagaactggctctaggcggcggcgccgcgcatcgcggcggcgtaggcaggagaatcgatgaggagcgccacagatgctgagtcttcccggaaggaaagaagaggggattgagcttggtggtgaggagatgggggggaacatcggatgctgagctaataaggcggtttggtccggcggagatagctgcggctgccatttctctgttcgtttcggcttcacacacacaacacaacacaactattagatttgagggattgtgcgatcttttctgttttgttccaccgtcagattgagtctaaattgtacggcgtgttccacagccgtcggattggaacggacagacggtagatgcacctatataattctaacttttttttttattcaaaaaaagctcgatactaattaatcagcatcaatcttgtgtcgaatcgggtccaattttgcaacaca

SEQ ID NO: 21470 - DNA, 497 bp, Zea mays
  Coding DNA Sequence Number=SeqID_7067
gagcttttctataagatcccagacgaagaagagacgattgatttgttctaaccatggagagactacagcgaatattcggcgccggtggcggtctaggccacgcatctccagattctcccactctcgacacctcggagcaggtttacatctcctctctcgccctcctcaagatgctcaaacacggaagagctggagttccgatggaggtgatggggttgatgctcggagagttcgtggatgagtacactgtgagagttgtggatgtattcgcgatgcctcagagtgggactggtgttagtgttgaagctgttgatcatgttttccagactaatatgcttgacatgcttaaacagactggcagacctgaaatgggtggtgggttggtatcattcgcatcctgggtttggctgctggctttccggtgttgatattaatactcaacagagttttgaagctttgaaccagcgagctgtagcagtggtgggtgatccgattca

SEQ ID NO: 21471 - DNA, 550 bp, Zea mays
  misc_feature (273)..(273): n is a, c, g, or t
  misc_feature (417)..(417): n is a, c, g, or t
  Coding DNA Sequence Number=SeqID_7068
gaaccactaaatcacactttatctatcacacaatgggcgacctctctctccgtctccagactcatctcttcatccgccatctccgtcgccaaaccgctactctccccaacctccgccttcaccgccccaatctccttctcccgctccctcgctcccaacctctccctcaaatcccacacccgccgcgcctccatctccgccgtcagatccttctcaacaaccaccatctccgcctccatctccgtcggagacaaactccccgaactctacccntctcctacctcgatcccgccaccaacgatgtcaaaacagtcaccgtctcctccctaaccgccgggaagaaaaccatcctcttcgccgtcccgggcgccttcactccgacctgctcgcagaaacacgtccctggattcgtctccnaggccggagagctcagatccaaaggcgtggacgtcatcgcgtgcgtctccgtgaacgccgcgctcgtgatgctggcgtggaggaaggacctcgggatcgaggacgaggtgatgctgctgtccgatgggaacgg

SEQ ID NO: 21472 - DNA, 513 bp, Zea mays
  Coding DNA Sequence Number=SeqID_7069
gagtcaacactttctctcctgaaggcaggctcttccaagttgagtatgccattgaagctatcaagcttggttccactgcaattggagtgaagacaaaagaaggagttgtgcttgctgtggagaagcgtatcacctctcctttactggagccgagcagtgtggagaagattatggaaattgatgaccatattggttgcgccatgagcggtttaattgctgatgctcgtacacttgttgagcatgcaagagttgagactcaaaaccacagattctcgtatggtgagccaatgaccgtggagtccacaacacaggcgctgtgtgatctggctttacggtttggtgaaggagatgaagaatcaatgtcccggccatttggagtatctcttctcattgctggccatgatgaaaacggaccgagcttgtactacacggacccgtctggaacattctggcagtgcaacgcaaaagcaattggttcagggtcaaaaggagctgatagttctcttccagagc

SEQ ID NO: 21473 - DNA, 472 bp, Zea mays
  Coding DNA Sequence Number=SeqID_7070
gcacgacgatttagcagggcttcgacgaaccccgatccaggtggttttccgtcgatctcgctctccccagatttcagaatcatccttgatcgttttctccgcgatgagttccaatacggcgtcgtcgagtgccggatcgggagattcttccgctgccaggaagaattcgaagcggcccaagtattccaagttcacacaacaggagcttccagcttgcaagcccattcttacgcctggctgggtgatttcgacatttttgatagtcagtgtcatctttattccccttggagttatctctcttttcgcttcccaggatgttgtggagatcgttgatcggtatgataatgattgcattcctgcacctgctaggactaacaaggttgcttttattcaaggagctgctcctaaatcttgtaaccgaactctaacagtgaccaagcgtatgaagcagcctatctatgtttactaccag

SEQ ID NO: 21474 - DNA, 548 bp, Zea mays
  misc_feature (523)..(523): n is a, c, g, or t
  Coding DNA Sequence Number=SeqID_7071
tatccaaaactgtctcaagctccaatggctcttcttcgtctccctcccatttccctccaatatctaggtcacaaatctgaacaaaaaacccctaatcccggagtttcgctcaccaatttctctctcacatggtctactccttcactatctcgtctccatctagcgaaacccagaaatcttacctcttactccttcgctactacccaggagccaatcctcgagccttcttcttcggaagagatttccaaaaccagattgattgctcaaaacgttccttggacctctacacccgaagacataaggtcgctgttcgagaaatccggcagtgtcgtcgacgttgagatgtctatgcacaagaaggaaaggaatcgaggtttggttttcattgaaatggcttctcctgaagaagctgcatcagctcttcaagctctcgaatcctatgaatatgaagggtcgtcgtttgaaggtagcctatgcaaaggccaaaaagaagaaaacttatgctcctcgtgagaagcctacngccggtgcctacgttcaaatttgtt

SEQ ID NO: 21475 - DNA, 509 bp, Zea mays
  Coding DNA Sequence Number=SeqID_7072
aaaggagctcagtttggcagaaagaagcaaagaagaaaaatggccgcaacatttggaaccccatcgacggtgataggtctcggaggatcatctgtttctcccatcaaggccaaagctctctcttcatcttttctaaaaccaacattaagagcgaagaacgctctgaaagtcgctggagcatcgggcggaagattcacttgctttgagaggaactggctgaggagagatctgaacgtggtggggttcgggcttgtcgggtggctagctccgtctagcattccggcgataaacgggaagagcttgacgggtctcttctttgagagcataggaactgagctcgctcacttcccaacacctccagctctcacttctcagttctggttgtggctgatcacttggcacttgggcctcttcatatgcctcaccttcggacaaatcggatttaagggcaggactgaagattacttcaagaaataaatcattccctcttgttccatctgtacttatta

SEQ ID NO: 21476 - DNA, 496 bp, Zea mays
  misc_feature (415)..(415): n is a, c, g, or t
  Coding DNA Sequence Number=SeqID_7073
gcgagaagctctgatatcccttaaaattaaaattacacttttctcgtcttcttcgtcaaaaatcctcttcaccgagtcatcttctctccgatcaaaaagtcattcaagtgatcaggttacacaggaagtaagatttgaggtttgagaagcacaagagaacaagaaggaacctaatcagtctcaatttactcggcttgatcaaattgaaactgcagctaatggcgcttaaccctcagttgatgcctaatgggatgcctgttccctttgttaatgagatgtttgttcttgtccgagaacggcgttgagtttgaagtcgacaagattcctggaggacatggaggtcatgttaaggccaagggagtgatatacttgtctaacattcggatgggtctttgttgcaagcaagcctgttgangaactttgttgctttcgacatgcctctgctttacatccacgccgagaaattcaatcagccaatcttccactgcaacaatat

SEQ ID NO: 21477 - DNA, 553 bp, Zea mays
  misc_feature (42)..(42): n is a, c, g, or t
  misc_feature (138)..(138): n is a, c, g, or t
  Coding DNA Sequence Number=SeqID_7074
tgaatacagtgctctgtgctcgttctctggtaccacaggctncgacttgtccagatatattgttgcagtggaagattggctgattgaatttctcggcgtggatgtaaagcagaggcatgtcgaaagcaacaaagttcntcaacaggcttgcttgcaacaaagacccatccgaatgttagacaagtatatcactcccttggccttaacatgacctccatgtcctccaggaatcttgtcgacttcaaactcaacgccgttctcggacaagaacaaacatctcattaacaaagggaacaggcatcccattaggcatcaactgagggttaagcgccattagctgcagtttcaatttgatcaagccgagtaaattgagactgattaggttccttcttgttctcttgtgcttctcaaacctcaaatcttacttcctgtgtaacctgatcacttgaatgactttttgatcggagagaagatgactcggtgaagaggatttttgacgaagaagacgagaaaagtgtaattttaattttaagggatatcagagcttctcgct

SEQ ID NO: 21478 - DNA, 525 bp, Zea mays
  Coding DNA Sequence Number=SeqID_7075
tccggtgtaccgatatgcttcatgtgttctggtccattgttgactatctcttctccgcctcctgctcatgagggagcttggactgagagggtcgtcaatctctggaattccggtgaggtgcgtctcggaggcagagtgaagctagtcggcttttgggtcaagatttgtctggttccttgtcactttagatctacgacaaatcttggcgtttggtggcgcgtgctctcgtgtggagactcctccgtaccagatctgttcttcatcgtcgtgtttctttcatcgaagttcggacggagtggagcggtggcacgtgatgcattccttcgcttggcgtctcgtcggaggaggctcgtgtggctaccgttcaggtggtttctgagtggttaatccacaaaggcgcgtccaaggtgtaggattcgttgtgtgtcggctcctccgctttgacgatggcgcgtgttgttcaatgcacggtgtcggtgatgagtcgtctatggctctgttatcctgccgtgacagagatgcttc

SEQ ID NO: 21479 - DNA, 422 bp, Zea mays
  Coding DNA Sequence Number=SeqID_7076
ctccatctctgatcagccattattaatctcttctgttgttcctgatgaagaagaaagctgcccttacactgtgattgtcaccacgagctgtttctcccctgatttgtcaagggatcagatcacattcgctttgggtgacgctgacggcaacaaggtggtcgcaccgagactagatgaaccgttaactggtggaggaggtttcgagaaatgttcatcagacacattccaagtcaaaggtcagtgtctcgacaccatctgctctctctacatctaccgttccggtctagacggttggatccccgagacagtcgagatctacgaggaaggttccaagtctgtgaaattcgatttcaacaaaaacgtccctgataacacttggtacggccacaactattgcaacaacactgggtttgcaccacctt

SEQ ID NO: 21480 - DNA, 516 bp, Zea mays
  Coding DNA Sequence Number=SeqID_7077
gaaaccaaaccatctccgaaacagactatgcagttcttcggcggatccgagataagcccgtcgcctcccgtcccaacggcgagtgcgaacaacgcgcacatgatgtacgtgttcaaccgcagcggcgtgtgtctcctctacaaagagtggaaccggcctctccgctcgctcaaccctcagcaagatcacaagctcatgttcggtctcctcttctccctcaaatccctcaccgccaaaatggaccccaccagtgcggataaggggaatctaggggttccacagttgccagcacaaggatgctctttccatagtttcagagccaatacttacaagcttagcttcagggagactccctctggtattaagattattttgctaactcatccaaagactggagatttacgcgcatcccttaagtacatctacggcttatacgtctgagtgtgtgggacaaaaccctatctacggcccaggctcctccaatcaagtcagagttgttcaacactgcacttggcc

SEQ ID NO: 21481 - DNA, 576 bp, Zea mays
  Coding DNA Sequence Number=SeqID_7078
gattccgatcgaaactcaaataactattctctctatctcctccttctgggtttcatcaaaatcacaaatactcgcgacaatcattcagaggatatggctgccgtaggagtggagtcgatgcgtcccgagtcagcgatggaggaaacctgcaacgtcaagatagcggcggcgaaacaaggggaggggcttaagcagtactatctccagcacatccatgagctccagcgccagctccgccagaaaactaacaacctcaatcgccttgaagctcagaggaatgaactcaattctcgagtacgaatgctcagagaagagttgcagctgcttcaagaacctggttcctatgtcggtgaagtggtcaaagtgatggggaaaaacaaggtcttggttaaggttcatccagagggtaagtatgttgttgatattgacaaaagcatagacataacgaagatcacaccatcaacaagagttgctctccgtaacgatagctatgttctccacctcgtcctgccgagtaaagttgatccgctggtcaaccttatgaaggttgagaaggtccggactcacatatgacat

SEQ ID NO: 21482 - DNA, 593 bp, Zea mays
  Coding DNA Sequence Number=SeqID_7079
gaaagacagagaggcccatcttccttgcatagttgatcaaacatggctgctgctgctataggtgctgcagtctcctatccttcatccaagtcctcttctcttccctccaaaacttccttcgtctcccctcaaaggattttcctcaacaacaagagcacactgtgctacagagaggcatgtatttataggggaagagtgaaggctcaggtgtcaacagaggcgccagtgaaagtagccaaggagtcaaagaaacaagaagaaggaatagttgtcaacaaattcaaaccaaaggacccttacactggtcgatgcctcttgaacaccaggatcaccggcgatgacgctcccggtgagacctggcacatcgtcttcaccaccgaaggtgaggttccttacagagaagggcaatcgataggaataattccagaaggaattgacaagaacgggaagccacacaagctgaggttatactctatcgccagcagtggccattggtgactttggagactccaaaaccgtttctctctgtgtcaagaaggttagtttacactaacgaaagccggagagatttgggttaagggagcctgcctcca

SEQ ID NO: 21483 - DNA, 582 bp, Zea mays
  Coding DNA Sequence Number=SeqID_7080
aaaatggcttcgctttctttactcagcggcggtgctctccaggctcgttgcgcaagacatgcacatgttagcccacgcgcggcgcatgctaccaaagccgcgcctccgtcctcctctctaaccggcgcctctcgcaggaacctgctgttttccctgacggcagcgacggtggtgacgggactgcagcctgcatcaatggcggagactattccgttattcgggatcagaaagaagctgaagaaggcagaagaagaagcggtggagatcgtgaaggaaggcttcgagacggcggagaaaggactagagacggcggagaaaggaatagaggcggcggagaagggagtagagacggcggagaaagaaatcgagacggcggttagttacaacggattgacacaggcgggagcagtcgtgggctgctgaagttcgtggggagttcttgtcgcaaactttcggccggtcaacgggcatttttaggaccggaaagccccagaaagcccgtagacttttaatccatttccaagactgaaaggcctttgtgctttaagtgtaatattgtgtctaaaaagtgtgtcattacgc

SEQ ID NO: 21484 - DNA, 532 bp, Zea mays
  Coding DNA Sequence Number=SeqID_7081
tattcctaaggattctcaccattggagatggtctaattagttcgggaacataataagcgaggtctcttgtgagctctatcttcttccctctttcgatttcctgagcttcagattaacaaacatggccaccgctggaaacaagaacatcaacgccaaactgataacattctcaacgcaattgctaagctgggatttactgagccaacaccaatacaagctcagggatggccaatggctttaaagggtagggatttaatttggctatttctccaccttctccgactacaagcaatgtgtcatctccttctccttgtgatgttaaagtaggtgaagaacctgtttctttgactaagagaagattcaggtctaataatattgaacctatacattttgggaaaatgaaggtaattgagaaaaaaacttaaagctttacacttttttgtggacacatttagtttcttaattttgcgatggaggcagcaaagagaggaagtgagccgagatggccaacgaacatgaccgaatgccttgg

SEQ ID NO: 21485 - DNA, 507 bp, Zea mays
  Coding DNA Sequence Number=SeqID_7082
caaggcattcggtcatgttcgttggccatctcggctcacttcctctctttgctgcctccatcgcaaaattaagaaactaaatgtgtccacaaaaaagtgtaaagctttaagtttttttctcaattaccttcattttcccaaaatgtataggttcaatattattagacctgaatcttctcttagtcaaagaaacaggttcttcacctactttaacatcacaaggagaaggagatgacacattgcttgtagtcggagaaggtggagaaatagccaaattaaatccctaccctttaaagccattggccatccctgagcttgtattggtgttggctcagtaaatcccagcttagcaattgcgttgagaatgttatcagtttggcgttgatgttcttgtttccagcggtggccatgtttgttaatctgaagctcaggaaatcgaaagagggaagaagatagagctcacaagagacctcgcttattatgttcccgaactaattagaccatctc

SEQ ID NO: 21486 - DNA, 594 bp, Zea mays
  Coding DNA Sequence Number=SeqID_7083
gtagtcttctacttcaatcgcttttggtatcccactctctgtttgttccaaaaatggcccttcaagctgcttctttggtctcctctgctttctctgtccgaaaagatggaaaactgagtgcttcttcagcatacttcaaggactcgagtctctttggtgcctccattaccgaacatggttcttcctcattaagattcaagagagaacttagcgtgagaaatgtagcgataagagcccaaaccgctgcaacttccagcccatccatcacaaaatcttcagttgacggcaagaagaccttgaggaaaggtaacgtggtggtcacgggagcttcgtcagggttaaggtctggccacggccaaagctcttgccgagacagggaaatggcacgtgataatggcgtgcagggacttcctcaaagccgaaagagccgccaagtccgcagggatgcctaaagacagctacacggtgatgcatctagacttagcttcgttagacaggcgtgagaacagttcgttgataacttcaggagatcggagatgcctctcgatgttttggtctgcaacgctgctgtctaatttcccgacgctaaagagc

SEQ ID NO: 21487 - DNA, 487 bp, Zea mays
  Coding DNA Sequence Number=SeqID_7084
gaggcagcgtctctttccgaagaaagcttgaagcttgagctcgacgatctgcagaaacagctcaacaaaaagctgagattcgaggcatccgttcgttctatccattctctcctccgtgatcgctacacttcctcctctccttctctccgcaaacagttctatacagttgtgtctcgtgtggcgacggttctcaagacgagatacacagctactggcttttgggttgcgggactgagccttttcgaggaagctgagagacttgtctctgatacttctgagaagaaacacttgaaatcttgcatcgaacaagcgaaggagcagttaaccgaggtagatattcagccgacggagagctcacaaggctatcttttcgagggacatctgacggttgatcgcgagccgccgcagcctcagtggctggtgcagcagaatctcatgtctgctttctcttccatcgttgccggtgaatcctctaatgctgctgctg

SEQ ID NO: 21488 - DNA, 388 bp, Zea mays
  Coding DNA Sequence Number=SeqID_7085
ttcgtccgtaacgtcgcggttactgacgacttctcggtcgaagaagacggcatcttcgctgacgacgacgctcctcctcccccgcggcgggagcaatccttctcttctgacctcaagctcttcgtcggtaacctccccttcaacgtcgacagcgctcagctcgctcagctcttcgagagcgccggaaacgtcgagatggttgaggttatctatgacaaggtgacagggagaagcagaggttttgggtttgtgactatgtcttcagcctctgagggtcagacagctgaacagcaggtcaatggctatgagttggatggtagaccgttgagaggtaacgccggtcctccctccaccgagaggggagactccttctctcagagacctagaa

SEQ ID NO: 21489 - DNA, 565 bp, Zea mays
  misc_feature (521)..(521): n is a, c, g, or t
  Coding DNA Sequence Number=SeqID_7086
atattcagctccgactcacgaggacctctcactctcactctcgatctctctcgctattccttcgatcgtctcgactactggattttgatactgcacactagtgtgttattcaaaatgtttcgccgcaagactacttcgcaagctgaacaagagaataatgaagcagctctcagagaggcaaagatcaaagagctcaagactctcataggcgagctctctggaaggagttcactctactgttcagatccctgtctcaagaggtatcttgaagctaggagctggaacgttggcaaagccaagaagatgcttgaagagacgctgaaatggagatcaaccttcaaacctgaagagatccgttgggatgaagtttcaggtgaaggtgagactgggaaagtctacaaagctggattccatgacagaagtggaagaacggttcttatactcagacctggattgcagaacaccaagtctttggagaaccagatgaaacatttaagtgtatctctttgagaatgctattnatgaatcctcccggaggtcaaagagcagatggtctgggctcatt

SEQ ID NO: 21490 - DNA, 425 bp, Zea mays
  Coding DNA Sequence Number=SeqID_7087
aacgtctcgccttccgcagttgcagcaacagtctctcttctcactctctcgccgtcgcaaacatgggtaagacacgtggtatgggagctgggcgcaagctgaagaggcttaggattaaccagaggtgggctgacaagcagtacaagaagagtcaccaaggaaacgagtggaagaagccttttgctggttcttcccacgctaaaggaatcgtccttgagaagattggtattgaagctaagcagcctaactctgccatccgtaaatgtgctagagttcagttgatcaagaacggcaaaaagattgctgctttcgttcccaatgatggttgcttgaactacattgaagaaaacgatgaggtgttgattgctgggtttgggcgtaaaggacatgccgttggagatattcctggagttaggttcaaggtg

SEQ ID NO: 21491 - DNA, 569 bp, Zea mays
  Coding DNA Sequence Number=SeqID_7088
agcctcttcttggtaacttactaagccatgaaatagctcgcaaagccttttcttcctctacgtttctaattgccttcgacgaagatctaccgtagagaagtctacctcgtagaccaatctctcaaatttgattccctattctcgttgccaacgtcaaatatgcgtctctcttgtagtcttacacccttcattctcctcttttttctcttccttgtcgcaccagccgtatcttctggtgtagctatcttgagaacagattattaccaaaagacatgccccgatttcaacaaaatcgtgcgtgatgccgttatagccaagcaaggtcaacaaccgacaactgcggccgggacacttcgtctcttctttcacgattgtttcctcgaaggctgtgatgcgtctgttttgatagcgaccaactcgttttaacaaagcggaacgtgacgatgatctccacgactcccctcccaggagatgcttttgacattgttaatcgcatcaaaacagctctagagctgtcttggcccggtgtgggatcatgcgctgatattttagcgcaggctacgcgtgac

SEQ ID NO: 21492 - DNA, 585 bp, Zea mays
  Coding DNA Sequence Number=SeqID_7089
taacacggcttgactcagagaggctaaggatccagagtcatgcagtatctatcgaactctcgtagaatcgctcgggctctgaaaccccttgcactcctcgaggctgatgtgagattcgcttctcatgttgttgactctacccaatggcagaaccatcgatctccttcagtctctgtctctccagggatgaacactcagtcacacatgacggggcttatgatgctgagatcaagcttttcctctgaagcaaaacttgtcgaagatcctacggaggctgtcaaggagctacatggtaagatacttgattctgtgaatgtcaagagatcccatgcctccaaatgctttgttgtggtcgttgattggggattgtcgcagggaggatgacattagtttcctctttgatgctctccagaatctccggagatttaggtggtccaatcctccgtatacgtggacaactttaatttgcaatctatggcccggcaggttggctaagacccgggggaccgggggggagcaaattaaccctgggataacgggcctctttggaaacctaagggtcatgggttgactcctagcgttgca

SEQ ID NO: 21493 - DNA, 564 bp, Zea mays
  Coding DNA Sequence Number=SeqID_7090
gatgcaacgctaggagtcaacccatgacccttaggtttccaaagaggcccgttatcccagggttaatttgctcccccccggtcccccgggtcttagccaacctgccgggccatagattgcaaattaaagttgtccacgtatacggaggattggaccacctaaatctccggagattctggagagcatcaaagaggaaactaatgtcatcctccctgcgacaatccccaatcaacgaccacaacaaagcatttggaggcatgggatctcttgacattcacagaatcaagtatcttaccatgtagctccttgacagcctccgtaggatcttcgacaagttttgcttcagaggaaaagcttgatctcagcatcataagccccgtcatgtgtgactgagtgttcatccctggagagacagagactgaaggagatcgatggttctgccattgggtagagtcaacaacatgagaagcgaatctcacatcagcctcgaggagtgcaaggggtttcagagcccgagcgattctacgagagttcgatagatactgcatgactctggatccttag

SEQ ID NO: 21494 - DNA, 571 bp, Zea mays
  misc_feature (397)..(397): n is a, c, g, or t
  Coding DNA Sequence Number=SeqID_7091
gaaaaacgaagacgctctctctctctctcttcctactcctttgcttctaaatagcccaacttaagagcttctcttccatttctaaatcctgttcccctgaagtcttctcttttgtttgtgggtctaaggtaaagaagctgaactaatgtttagaacattgttgtagtgaaaatttagaaacataaaataaataaaaactgtagaagacattaaaccctttttggtgtcatgatgaaaagactaagcagctcagattcaatgtgtggtctagtctccaattctccagatgagcagagtccacgagggtacggaggtaatttccagtctatgctcgacggctacgaagaagacggcacaatagtcgaggaatattccggcaaccaccaccactggggcnctatcggagaagaagaggaggctgcgtgttgaccaagtcaaagctctcgagaagaatttcgagcttgagaacaaactcgagcccgagaggaaaaccaaactagcgcaagagcttggtcttcagcctcgccaagtagcggtttggttccaaaaccgccgtgcacggtggaagaca

SEQ ID NO: 21495 - DNA, 545 bp, Zea mays
  Coding DNA Sequence Number=SeqID_7092
ctcacagtcccctctagaaatatgtcttcagcttattgttcctccgccgtggcggtttccaccgcagccaccgtttcctccgccactacctttaacccactattctccttccattcgaatttcaaactcttctatcgcatcacaccaaaacccttcaaactcgtcgccaaatgccctactcctcctctcttcctccatctaaatacccatcgccaccgcctcttctgcgccgccgaagacgaaatcccgccgtcatccgaagaagacgaggaagaaaacgaagaagacgaagacgcagatgagacacagacgacgcacgctagcgttgaggaagggaggctgtacgttgggaacttgccttacacaatcactgcctctgagctctcccagcttttcggagaagctggaaacgtcatcgatgttcagattgtgtacgataaagtcactgacagaagcagagggtttggattcgtaaccatgggaaccatcgaagaagctaaagaagcgattcagatgttccacagctctcaaatcggtggaaggac

SEQ ID NO: 21496 - DNA, 558 bp, Zea mays
  misc_feature (371)..(371): n is a, c, g, or t
  Coding DNA Sequence Number=SeqID_7093
tgttctgcttctccgaactctgaaacggctcgagttatggttttataaatatgcgaccataacgcaggccaccattaatgctaaccggcgtccaacattccgacctagactcacggccggttcgatgtgtttcgatgtgttcaacagccggtactatgatagggttcgtgttttacaaaaatgttaataaatctgtaactgtcgaataaatacacatcagcaatcactattatgttgataatcagagccattgtagctaaacctttcattgcagtacccttagatctgtgagaaatgctctgagtaatggtgaacaaacagatagaaagagttcgaggatctaggtcccagcgaggtgagtagtaacacangaaaaagtttgggcgctgacagaacacaccaaacggtcacgttgacacgagagtctcgagctccggtgatcataccgaccttgcatcacaattatctcacgtgaggggccccttccttaagaggaaatctttgggcccaaacatgattcttatcttgccccccagcatgcgagctccaagaacttgg

SEQ ID NO: 21497 - DNA, 552 bp, Zea mays
  misc_feature (200)..(200): n is a, c, g, or t
  Coding DNA Sequence Number=SeqID_7094
gggcattctcttccaagttcttggagctcgcatgctggggggcaagataagaatcatgtttgggcccaaagatttcctcttaaggaaggggcccctcacgtgagataattgtgatgcaaggtcggtatgatcaccggagctcgagactctcgtgtcaacgtgaccgtttggtgtgttctgtcagcgcccaaactttttcntgtgttactactcacctcgctgggacctagatcctcgaactctttctatctgtttgttcaccattactcagagcatttctcacagatctaagggtactgcaatgaaaggtttagctacaatggctctgattatcaacataatagtgattgctgatgtgtatttattcgacagttacagatttattaacatttttgtaaaacacgaaccctatcatagtaccggctgttgaacacatcgaaacacatcgaaccggccgtgagtctaggtcggaatgttggacgccggttagcattaatggtggcctgcgttatggtcgcatatttataaaaccataactcgagccgtttcaga

SEQ ID NO: 21498 - DNA, 545 bp, Zea mays
  Coding DNA Sequence Number=SeqID_7095
attatcttctttcctctttagcttcttcttttccagtctcccaatggcttcttcgaaatacaaacctataaacttcatatttcatgttttttatttgatttttattttctccgcccatagttccacggcggagctcaagaggctactgcaaccagctaaaccagatggtagagtaagctttctcgtcatcggagactggggaaggggaggctcctataatcagtctaacgtagctcttcagatgggagaagttggagaaaagttaaatatagattttgtaatatctaccggagataatttttacgacaatgggttacttggcttggatgatcctgcatttcaagattcttttaccaacatttataacgcgtcgagcttgcaaaagccttggtatactgttttacgaaaccatgactatagaggtgacgtcgaggcacaacttagccctatgctaagagctatggacaacagatgggtctgcatgagatctttcgtcggtaatgctgagatcgtcgagttttttgtcatcgacacaactccatttg

SEQ ID NO: 21499 - DNA, 552 bp, Zea mays
  Coding DNA Sequence Number=SeqID_7096
cgagttaactcgctcttgcctgactcaccgagtcatggcgcttctcaggcctcaccttcatcgcttccactccaacgctctccaccaatcagcccctcatactaaatcaaccgccgacgctggcggtggacttgtcgtctaccccacctatggtcgtcgtcgtcgtcaccgttgctccgcgattgcgatcgacgctccgtcgtctctcgccggcgtgacgcctatccgatgggggtacacgagcgttcaagggttcagggaggagatggaggacgacatcgtcatccgctcggaagcgctcgacagcttctccttcgccgcggttttcgacggccacgctggatcctcctctgttaagttcctcagggaggagctgtacaagggatgtgttgaggcgttgcaagttggatctttgttgaaaggtggtgactttggtgcgatcaagggaagctttggtcaggcctttgagagtgtggatcagagtttgcttaaatggctagaaacaaaaggtgaagaagatgagtctggttcaacggctactgtgatgctctt

SEQ ID NO: 21500 - DNA, 579 bp, Zea mays
  misc_feature (462)..(462): n is a, c, g, or t
  misc_feature (501)..(501): n is a, c, g, or t
  misc_feature (553)..(553): n is a, c, g, or t
  Coding DNA Sequence Number=SeqID_7097
acacgctttcgttactcaatcaatctgttgcaaatgtcgaagagcaacggagctcgcagctgtctaggctcgatggacgacatccgccgagtcttccagcgcttcgacaaaaacggcgacgggaaaatctccgtcgacgagctcaaggaagtgatccgcgcgctcagccccaccgcgtcgccggaggagacggtgaagatgatgaaacagttcgatctcgacgggaacggattcatcgacatggacgagttcgtctctcttttccagatccgagtgaaccaaggcggaggaggagagaaaacagcaagaacgatctgaaggaaagcgtttgagctgtacgatctggacgggaacgggcggatctcggcgaaggagcttcactcggtgatgaaggatctgggaggagaagtgctctgtgtcaggattgcaggaagatgattagccaagttgatactgatggtngacggttgcgttaacttcgagggagtttaagctgatgantgaaccacggcggcgctggatgatcgtcttttaaggattgtgttgatagagnaaatctagagggtctgttaatgttcc

SEQ ID NO: 21501 - DNA, 498 bp, Zea mays
  Coding DNA Sequence Number=SeqID_7098
gagacgggcatttctaaaccctcgtcgtggctggctcggtgttacaacacatctaccgatcaagccaaagctctggcgggccagcgagcggccatgtcgtggatgaaaggagatttactttccaaaaccaggaggcttgttggtggactcgctacccgtgagcccgtttggcttaaagccatggaagcatcacctcctcctgtctttcctcgctctaatgggaacctcaagaagattgttctccctgaagatccctacgttcgtagattcgcccgcaagcatcctgaagccaaactcgtcgaccccatcaaggcttcggcgtttattccagatccagctcgcgtatatggttgccgggtccttgaactgaccaagaatggcatcagcgaggatgacgccatgtctgttgctaatatggagtaccttgcggagaggaaggaaatgaagaaagcatacaaacgcctaaaggagcttgcggtactgcaagacaagtctcct

SEQ ID NO: 21502 - DNA, 572 bp, Zea mays
  Coding DNA Sequence Number=SeqID_7099
agccgctacactgagattcatttgacaagtagctatgggtaaagagaagtttcacatcaacattgtggtcattggccatgtcgattctgggaaatcgactaccactggtcatttgatctacaagcttggtggtattgacaagcgtgtgatttgagaggttcgagaaggaagctgctgagatgaacaagaggcccttcaagtatgcgtggggtgttggacaaattgaaggctgagcgtgagcgtggtatcaccattgacgttgctctttggaagtttgagaccaccaagtactactgcacagtcattgatgctcctggacatcgtgatttcatcaagaacatgattactggtacctcccaggctgattgtgctgccttgatcattgactcccccactggtggtttcgaaagctggtatcttccagggatggtcagacacgtgagcatgctctccttgctttcacccttggtggcaagcagatgatttgctgctggaacaagatggatgccaccactccccagtacctctaggccaggatacgatgagagtcatcgaggaggtggcttcctacc

SEQ ID NO: 21503 - DNA, 577 bp, Zea mays
  Coding DNA Sequence Number=SeqID_7100
acagtcccggacactccaaaaaatggcagccgccgccgcacgccctctagtcaccgtccaaggcctcgacggagacatgacaaccgacaaatccaccaccgtctgcctacccgacgtcatgacagctcccgtgaggccagacatcgtcaacttcgtccacgcccaaatctccaacaacagccgtcagccttacgccgtctccaagaaggccggtcaccagacctccgccgagtcctggggaacaggacgcgccgtctcccgtatccctcgtgttcccggcggcggaacccaccgcgcaggtcaagcggccttcggaaacatgtgtcgcggcggtcggatgttcgctccgactaagatctggagacgctggcaccgtcgcgtcaacgtcaacatgaagaggcacgcgatcgtctcggcaatcgccgccactgctgtgccctctctcgtgatggcacgtggtcacaagatcgagaatgtccccgagatgcctctcgttgttagcgattcagctgaggctgtggagaagactagtgctgcgatcaaggttttgaaacagatcggtgcttatgatgacgcc

SEQ ID NO: 21504 - DNA, 527 bp, Zea mays
  Coding DNA Sequence Number=SeqID_7101
ctgccccaaatctctagatccgaaaaatggcgttgatcgttgagaagacgtcgagtggccgtgagtacaaggtcaaggacatgtctcaggccgacttcggtcgtctcgagctcgagctcgccgaggttgagatgcccggactcatggcctgccgtaccgagttcggcccagctcagcccttcaaaggcgctagaatcaccggatctctccacatgacgatccagaccgccgtcctcattgaaaccctaaccgccctcggcgcggaagtcagatggtgctcctgcaacatcttctcaacccaagaccacgccgccgccgcaatcacccgcgactccgccgccgttttcgcctggaaaggcgagacgctgcaggagtactggtggtgcacggagcgtgctctcgactggggcccaggcggtggtccagatctgatcgtcgatgacggtggcgacgccacgcttttgatcccacgagggagtgaagggccgaggagatctttgagaagacgggtcaggttcctgatccca

SEQ ID NO: 21505 - DNA, 553 bp, Zea mays
  Coding DNA Sequence Number=SeqID_7102
gaagctgaagctctactcttactggagaagctcctgcgctcatcgtgtccgtatcgccctctctcttaaagggcttgaatatgagtatatacctgtgaatctgctcaagggtgaacaatccgatccagatttcaagaagatcaatccaatgggcactgtacctgctcttgttgatggagatgttgtcatatccgattctcttgctatcataatgtatctggatgagaagtatcctgagccaccgctcttacctcctgacctccacaaacgtgctgtcaatttccaggcagcgagtattgtcttgtctggcatacagcctcatcaaaacctgggtgtcattaaattcattgaggaaaagataaattcggaggagaaaacggcttgggttactaatgctatcacaaaaggattcacagctctcgagaaactgttggtgagctgcgctggaaaacacgcaactggtgatgaagtttacttggctgatctctttctagcaccacagatctacggagctatcaacagggtccagattaacatggaaccgtacccgcct

SEQ ID NO: 21506 - DNA, 491 bp, Zea mays
  Coding DNA Sequence Number=SeqID_7103
aacttcgactcctctagggtgctctctgctcgcgttgcccgggggttttgcgtgtctgagccatggcgtcgaagaggattctgaaagagctcaaggatttgcagaaggatcctccttctaactgcagcgctggtcctgtggctgaggacatgttccattggcaagcaactatcatgggacctcctgatagtccctacgccggaggagtctttttggtttccattcactttcctccggattatcccttcaagccaccaaaggtgtctttcaagacaagggtgtaccacccaaacatcaacagcaacggaagcatctgccttgatatcctgaaagaacagtggagccctgctctcaccgtctccaaggttttgctgtcgatctgctcgttgctgacggacccgaaccctgatgatccgcttgtgccggagattgctcacatgtacaaaacggacaagtccaagtacgagtcaactgcacgaagctggacacag

SEQ ID NO: 21507 - DNA, 536 bp, Zea mays
  Coding DNA Sequence Number=SeqID_7104
aataaagtgctctaacctctctcttaccaaactaggtcaagccgccgtcaagcttcgtttccggcggtcgctgtgccggctaaggcgaccgccgggcctccccttttcatttgcgtttctctgctcctccctctccgtcggtcctcgacgttctgcggcttctaaggcgtgtccaagcttctcatccggagtagatctggagcgttctcttcaccggagccaggccgtgggtctttgcagcgctcgaggacggcgttcgcgtctcaccggctctgtttcttcgactggaggaaggctctttccagatgaggttttcccagtttggacgtggcttgggttgagttatggtgtgtggcggtttggagaagcccgagttgttcgtcttgtgctccaccggttggtttcacggcggtagtgtccggcgaattaggttcgggttgggtttgaggattcacgatctcaagctccttgtctctcccttctgctagtgatctcaggtggacgtgtgtgggtgtgaaccgtgttggtctctccga

SEQ ID NO: 21508 - DNA, 513 bp, Zea mays
  Coding DNA Sequence Number=SeqID_7105
gtcggagagaccaacacggttcacacccacacacgtccacctgagatcactagcagaagggagagacaaggagcttgagatcgtgaatcctcaaacccaacccgaacctaattcgccggacactaccgccgtgaaaccaaccggtggagcacaagacgaacaactcgggcttctccaaaccgccacacaccataactcaacccaagccacgtccaaactgggaaaacctcatctggaaagagccttcctccagtcgaagaaacagagccggtgagacgcgaacgccgtcctcgagcgctgcaaagacccacggcctggctccggtgaagagaacgctccagatctactccggatgagaagcttggacacgccttagaagccgcagaacgtcgaggaccgacggagagggaggagcagagaaacgcaaatgaaaaggggaggcccggcggtcgccttagccggcacagcgaccgccggaaacgaagcttgacggcggcttgacctagtttggta

SEQ ID NO: 21509 - DNA, 473 bp, Zea mays
  Coding DNA Sequence Number=SeqID_7106
aagctaaatacgaaagaaacatggggttcttgggtaagagtatattgtcgagtctccttgcaatatggttcttcacttcctgtgctttcactgaagaagtgaaccatgttaaccaaacgccttcctctgctcctgctccatctccttaccaccacggccaccaccacccacatcctccccatcaccaccaccctcaccctcacccaccggcaaaagcccctgtcaagccgccggtttctccaccttctaaacctccggttaagcctccagtttaccccccaaccaaatccccggttaagcccccaactaaacctccggttaagccaccagtttccccaccagcaaaacctcctgttaaacctccggtttaccctccgaccaaagctccagttaagcccccagtcaaacctccggttaagccaccagtttcaccaccggccaaacctccaataaagccaccagtttcaccaccg

SEQ ID NO: 21510 - DNA, 549 bp, Zea mays
  Coding DNA Sequence Number=SeqID_7107
tggctggaggagagaccggaggcttagccggggctttggtcgggggcttaacaggggctttggtcggagggtaaaccgggggcttaaccggaggtttggccggtggtgaaactggtggctttattggaggtttggccggtggtgaaactggtggcttaaccggaggtttgactgggggcttaactggagctttggtcggagggtaaaccggaggtttaacaggaggttttgctggtggggaaactggtggcttaaccggaggtttagttgggggcttaaccggggatttggttggggggtaaactggaggcttaaccggaggtttagaaggtggagaaaccggcggcttgacaggggcttttgccggtgggtgagggtgagggtggtggtgatggggaggatgtgggtggtggtggccgtggtggtaaggagatggagcaggagcagaggaaggcgtttggttaacatggttcacttcttcagtgaaagcacaggaagtgaagaaccatattgcaaggagactcgacaatatactcttacccaagaacc

SEQ ID NO: 21511 - DNA, 583 bp, Zea mays
  Coding DNA Sequence Number=SeqID_7108
atggcttccgcaagatttttatctctcctctccaccgtcactctctctcttctcctcaccacgaccgatgcttcctctcgctccctaccaacatcacacgaaacgaccgtactcgacgtcgtttcatctctccagcaaacacaacacatcctctcaatcgacccgactcgctcctcactcaccaccaccaccagcgcacccgaatccgtcccggtcttcctcaactcctcctctccactctctctagagctccactcccgagacaccctcgtcgcgtcacagcacaaggactacaagaacctagtactgagtcgactcgagcgagactcatcccgagtcgccgcaatcatcgctaaagtcaacctcgccgtcgagggcgccgacagcgagacccgataccaacccgaggagctaacgacacctgtcatctccggagctagccaaggaagcggcgagtacttctcccggctcggcgtcggaactccggcgaaggagatgtacatggtgctcgacaccggaagcgacatcaactggatccagtgcaagccttgctcctcctgctaccaacaatccgacccgatat

SEQ ID NO: 21512 - DNA, 568 bp, Zea mays
  Coding DNA Sequence Number=SeqID_7109
cggcgggagtatattctcacggaatattccccttctcgtgcttagtattattagggtatggaaaatgacgtcaaggtcgcggagaaagtggaggaagctgaccgccttcttcctccccagtctcttccctctaattccgacgaggaagaacccgaatccgaatccgaagcagaggccgcggtcgaatctcgtgacaagatcgtgatcgtcgatttcgaatcagccggcgatcccgcggcagtacctcctttctcgtggcggaaactgtggctgttcacgggtccaggtttcctgatgagcatagccttcttagatccagggaatctagaaggagatctacaagctggtgccatcgctggctattctctcctatggctcctaatgggggccaccgctatggggttactgattcagatgctcttccgctagagtcggtggtcgccaccgggccgacatctgggttgaactctggccgcgacgagtaatcccgctttggggcgaagggaatttggcttttgggcctaatgggcccgagcctccggctcctccggtccgaagctggaataat

SEQ ID NO: 21513 - DNA, 568 bp, Zea mays
  misc_feature (448)..(448): n is a, c, g, or t
  Coding DNA Sequence Number=SeqID_7110
agacttcaacgcagaccaatctccttgtaaccgtttatccttcgctgagatctaaaacatggcggatgtggaaccagaggttgctgcggcaggagtcccgaagaagaggacgttcaagaagtttgccttcaaaggagtcgatctcgatgctcttctcgatatgtctactgacgacctcgtcaagctcttcccttctcgtattcgcagaaggttctctagaggtttgaccaggaagcctatggctctcattaagaagctccgtaaggctaaaagggaggcaccgcaaggtgagaagccagagccagtgagaacccacctgaggaacatgatcattgtcccagagatgatcggaagcatcattggagtgtacaacgggaagacctttaacccggtcgagatcaagcccgagatgattggtcactacctggctgagttctccatctcgtancagccggttaagcacggtaggccctggtggtggtgctacccactccccccaggtcattcccctccagtgaggaagagcttggtatactctgggggaaacgcgtccatctttttacatggt

SEQ ID NO: 21514 - DNA, 522 bp, Zea mays
  Coding DNA Sequence Number=SeqID_7111
atcattttgcgtttgtgcacggtgcagggcatggaggatggtgttggtacaagctcgccaattcactgagagagaatggacataaggccacctgcatcgacctcaagggcgctgggatcaacctaactgatccaaacactgtctcctctcttgatgactacaaccagcctctctatgacttcctctcccaacttcccctcgaccaaaaggtcattctggtgagcccacagcgttggaggagggagcatgacggctgccatgtgccagtatccttccaaagtctccatggctgtttacgtcgcagcagccatggtcaaacctggtaccataattcccccaattctcaaggaagtactaaagatatgttcagggatgatagagacggaagctgagaagatatgggacttcacttttggaaatggacccgagaatctccccacaagtatgatgatgaaacctgagtatgtccgggacaagtattacaacgagagccccatggaggattacacactggctaccaca

SEQ ID NO: 21515 - DNA, 571 bp, Zea mays
  Coding DNA Sequence Number=SeqID_7112
gagcttacctaactccagttaatggcgatgtcgacgactacactcttccatgcacttgttccttccaacacttacaaatccagagctgtctcctcttccttcgtctcagttcctcgctcctcaactccaccttcttcgccgtctctccagttccgctcgcttgtttcagacacgacgtcgatctacggtcggaggaaatttaccggcaatctcagaagagtatccttaaccgtctccgccgccgcagcagctgagcctctcaccgtcctcgtcaccggtgccggtggcagaacagggcaaatcgtgtacaagaagttgaaggagaggtcggatcagttcgtggcgagaggcttggtgaggacgaaagagagcaaggagaagatcggtggagaggacgaagtgttcgtcggtgatattcgagaccctgaatccattgctcctgctgtgcaagggattgatgctttggtcattcttacgagcgctgtaccgaagatgaaaccctggttttgatcctagcaaaggagagagacctgagtctactttgaaggaggagctaatccctgaacaggtt

SEQ ID NO: 21516 - DNA, 511 bp, Zea mays
  Coding DNA Sequence Number=SeqID_7113
tcagcttcactgtcttttttaacgactctgttccttctccgaccaaaagcgagaaaaaaaatggcgtctcttggccaaatcaccctcccgcgagcgccatcgttgcagaaaggcctcctacgccgtccgatcagaaccccaatcagattcaacggccggatcgcgagtgtattgactaacgcgggttcggtgaaagcaagtgtgagccagaaggtgattgaagaggaggcgaaagttctggtgggtacctacgcgcgtgctccagtggtgctctcgagtgggaaaggttgtaaattgatggacgcagaagggaaagagtatcttgattgtgcatctggaatcgctgtgaatgctctgggccatggagatcctgattggcttcaagctgtcactgaccaagcttctgttctttcccacgtcagcaatgtctattacaccattcctcagatagaactagcgaaacgccttgtggcaagttctttcgcagaccgtgtattcttctgtaactctg

SEQ ID NO: 21517 - DNA, 537 bp, Zea mays
  Coding DNA Sequence Number=SeqID_7114
agagggattcgcttcgagggactacgaagacccgccgccaactccgtttttcgatgcggaggagctgaccaagtggtctttgtacagagccgtcatcgccgagttcgtagccactctcctcttcttgtatgtcactgttttgactgtcatcggctacaagatttcctccgacactaaggccggaggtgatgagtgcggaggcgtcggaatcctcggcatctcatgggccttcggtggcatgattttcatccttgtctactgcaccgccggtatctcaggtggtcacataaaccctgcggtgacgttcggcttgttcttggcaaggaaggtatcgttggttagagcggtgctatacatggtggctcagtgtttgggtgcgatttgtggaggtggtttcgtcaaagcgttccaaagcgcttacctacgtacgttacgggggaggagcaaactccctagccgatggatacagcacaggggactggactcgcggcagagatcattggagacattcgtcctgggctacactggttttctccg

SEQ ID NO: 21518 - DNA, 543 bp, Zea mays
  Coding DNA Sequence Number=SeqID_7115
ataaagaaccatttgctctagcttattctcacaaccggaagcaaaagtaaaacagttcctaagaagaaacatccattacatataataatactacatggctaaagacgtggaaggagcagaggggttcgcggcgagggactacgaagatccgccgccaacaccgttcttcgatgcggaggagctgaccaagtggtctttgtacagagccgtcatagccgagttcgtagccactctcctcttcttgtatgtcactgttttgactgtcatcggctacaagatttcgtccgacactaaggccggaggcgacgagtgcggaggcgtcggaatccttggcatctcatgggccttcggcggcatgatcttcatccttgtctactgcaccgccggtatctcaggtggtcacataaaccctgcggtgacgttcggcttgttcttggcaaggaaggtatcgttgggttagagcggtgctatacctggtggcctcaagtgtttgggtgcgatttgtggggaagttgggtttcgtcaaagccttccaaagctttt

SEQ ID NO: 21519 - DNA, 410 bp, Zea mays
  Coding DNA Sequence Number=SeqID_7116
tctcccagggcgagcaggcactctccttccccatgggcacgcccccttcaggcttggcggcagggacagcgccctccgttccctctgctgtccaagcgtggatgcccatttccatggccgagctcaagctaccgggacccgacgcggcgccccgtgttgtagatcgagcttcctccctgctcctcctcctggtgagcggctgcagcagggagcctttctcccctgcgcgcagaagctccctggcccgctctcggcatgctccatgtccatggcgctgcagcagctcgggtttctcccatggatgcccctctgcagctcgccccaccttccctcgctgcgcagctcctcggcgaaacgccgctgttcctgcagccatggcgtccctttttttcttctctgcgcagcgacgc

SEQ ID NO: 21520 - DNA, 512 bp, Zea mays
  Coding DNA Sequence Number=SeqID_7117
aatcgggagtccacgtcgatgccgggaggacttctgcttctcccgaggttcgattgttcgttgtgatctgtttcatggatcaaatcggaacaagaggctgaagatatgggagtcaaagaatcagtgaaggttgctactagtactagcaatggcttcttctccatctggtttcttatgttccttgtgctctctgttacgccactcgtgttttcgcgcacgctcccggaggatccggatccggatccgtgtgatgcaatgaaactgagagactttgagaaactcagatcggatcagatcgccgtcctaatcaacggttactctgagtcccgtattcctcttctgcaatccatcgtagccgcgtattcaggatcctcaatcgtctcatcaatcttagtcctctggggaaaccctaccacacctgctcagctacttgaccacttataccacaatctgacccgttactcgcttggcaccgcttccatctctcttatccagcaatcgtctagcagcct

SEQ ID NO: 21521 - DNA, 474 bp, Zea mays
  Coding DNA Sequence Number=SeqID_7118
aaaaatgtggccactctccatatcagttgtcttcctcccatgcttcgccgcttttctactcaccgctctttcttcggcttatggctatggcgactcggaggcgacatgttcaggaatagttcccttaaagtaccggaacgataagatctcgataacagactttggcggcgtcggggacggaaggacggtgaacactaaggcgtttagggcggcgatatataggattcagcatctgaggagaagaggaggcacggttctgtatatacctccgggagtgtttctcacggagagcttcagtctcactagccatatgactctcttcttggctagaggcgctgttatcaaagctgttcaggatacatggaactggccgttgattgatccgttgccattccttatggaagaaggaagggagttaccaggggctcggtatattagcttcattcatggtgatggccttcgtgatgtagtcat

SEQ ID NO: 21522 - DNA, 199 bp, Zea mays
  misc_feature (46)..(46): n is a, c, g, or t
  misc_feature (114)..(114): n is a, c, g, or t
  Coding DNA Sequence Number=SeqID_7119
tagtactgttatttctcatgatgagtggactccattatctgtcagnggtctccgtccgaaagcctcgttatgagcatggagcaactggggtgcaaaataagatggatatatttngggggaaaccataatggacgttaccttaggggccttccaggctttggatctgaagagatttgatctgggtccaagggttgtaaac

SEQ ID NO: 21523 - DNA, 154 bp, Zea mays
  misc_feature (88)..(88): n is a, c, g, or t
  Coding DNA Sequence Number=SeqID_7120
tggtttacaacccttggacccagatcaaatctcttcagatccaaagcctggaaggcccctaaggtaacgtccattatggtttcccccnaaatatatccatcttattttgcaccccagttgctccatgctcataacgaggctttcggacggagac

SEQ ID NO: 21524 - DNA, 597 bp, Zea mays
  Coding DNA Sequence Number=SeqID_7121
gaaaaacccaattcataggcacccttttcagagagcctctttgtcctcttcttcgtctatacgtaaattcatcagctaaatatatttgaaaatggcggatggtgaagatattcagcccctcgtttgcgataacgggaccggaatggtcaaggccggttttgctggtgatgatgctccaagagctgtattcccaagtatcgttggccgtccacgtcacacgggagtgatgggtggaatgggacaaagggatgcttacgttggagacgaggctcagtccaaacgtggtatcttacctctcaaatatccaatcgagcatggtattgtcaaccactgggatgacatggagaagatttgccatcacactttctacaatgagctccgtgtcgctcctgaagaaacacccgggtctgcttaccgaagccccgcttaatccaaaggtaaatcgtgagaagatcactcagatcatgtttgagaacgtcaacgctcctgctatgtattgtgcgattctcagccgttctatccctctatgccaggggccgtactactggtattgttttggactccgggagaggggtgtgagcacaccggttcccatct

SEQ ID NO: 21525 - DNA, 580 bp, Zea mays
  misc_feature (485)..(485): n is a, c, g, or t
  Coding DNA Sequence Number=SeqID_7122
atctcatctccgctaatcacaatgtctctggtcgcgaatgaggagtttcagcacattctccgtgtgcttaacacaaatgtcgatgggaagcagaagatcatgttcgcccttacctcaatcaagggtattgggaggcgtttggcaaacatcgtctgcaagaaagcagatgtcgacatgaacaagagggctggtgagctatctgcagctgagatcgacaacctgatgacgattgttgccaacccgaagcagtacaagatcccagactggttcttgaacaggcagaaggactacaaggacggcaagtactcccaagttgtctccaatgcccttgacatgaagctcagggacgatctcgagcgtctcaagaagatcaggaaccaccgtgggctgagacactactggggtctccgtgtccgcggacagcacaccaagacaaccggtcgcagaggaaagaacgttggtgtctcaaagaaagcgtaagcaangccacatgggtttgctagttactgctgcttttattggatatgcttcatatgacccgccttttgattttatgtttctgctccgaactaagttatgg

SEQ ID NO: 21526 - DNA, 542 bp, Zea mays
  Coding DNA Sequence Number=SeqID_7123
tatcgggcgctaaaccgtttgcgcacgcagggaacaaattaaaaccaattaaaaccatgtgctatagcttataggaaatacactttaaatcaatattctctaataaactgcataggtagagtatatggtttcgaggctgtcctccatatcaacataaaagctccacagttccaaayatttgtgcactttcatttgaacaggctcatcccctcagcagcagctcaatayagggcagggctctgctgttgcttgcctcatcagttcaatagccttgtcaaaattgttgmggcacagctccatctrtgtccactcacaccagatactggctaaatggtcaatcgtattataattaacttgagtagcgcatttgaagatatcatcaacactatctagactattgmgtttctcatacatctttgcaaatgccacccatagagtatgggatttcccaactgcattcattggatctacaattttcacagcctcaacatatgtcgctatttgccttgcaggatccttttcaaagagtttcaccctcctgc

SEQ ID NO: 21527 - DNA, 514 bp, Zea mays
  Coding DNA Sequence Number=SeqID_7124
gctgctgttgagtccattgcacaagccaacaatgtcgtcagaccagactggaacggtcttaactatctcctcctgtacgctgctcaagcagctgcccttgatcttggtctaattcaacagtctgctaaagcccttgagtctgcgaaattcgtctacttgatgggagcagacgatgtagatgtctgacaagattcctaaagatgcctttgtggtttaccaaggtcaccatggagacaaagcggtttaccgtgcaaacgtaatcctccctgcttcggccttcaccgagaaagagggaacctatgagaacacagaaggattcacccaacagactgttcccgctgtcccgacggttggtgatgcaagagatgactggcagattgtgagagctttgtccgaggtatcgggtgtgaatcttccatacacactcaatcgaaggtgttaggtctaggatcaagagcgtcgctcccaatctagtccacacagatgaacgagagccagctgcttttgggccatc

SEQ ID NO: 21528 - DNA, 539 bp, Zea mays
  Coding DNA Sequence Number=SeqID_7125
atcaccagaagccacaatcgtcgatctcagcacaaagaagacgaatacagagagagagatggcgaccactacagcagaggccacaaagacatctagtactactgtagaagacgagcaatcacagaatctccgacgtcaagaactcggccacaagagtgctcttacagagcgacgatctctaccaggatattctggagacaagtgtgtatccgagagaaccagaatcaatgaaggaactcagggaagtgacagcaagacacccttggaacataatgaccacgtcagcagacgaaggacagtttctgaacatgctcatcaagctcgttaacgcctacaacacgatgggagatcggcgtttacgctggctactctctcctcgccaccgctcttgctctccccgaacacggcaagattctgggctatgcatggtaacagagagaattaccaattgggtttgccgatcatgcgagaaagccggcgttgctcacaagatcgatttcaggggagggcccctgctctacctggttccttgagcaact

SEQ ID NO: 21529 - DNA, 516 bp, Zea mays
  Coding DNA Sequence Number=SeqID_7126
ggccccaagttgctcaaggaaccaggtagagcaggggccctcccctgaaatcgatcttgtgagcaacgccggctttctcgcatgatcggcaaacccaattggtaattctctctgttaccatgcatagcccagaatcttgccgtgttcggggagagcaagagcggtggcgaggagagagtagccagcgtaaacgccgatctcccatcgtgttgtaggcgttaacgagcttgatgagcatgttcagaaactgtccttcgtctgctgacgtggtcattatgttccaagggtgtcttgctgtcacttccctgagttccttcattgattctggttctctcggatacacacttgtctccagaatatcctggtagagatcgtcgctctgtaagagcactcttgtggccgagttcttgacgtcggagattctgtgattgctcgtcttctacagtagtactagatgtctttgtggcctctgctgtagtggtcgccatctctctctctgtattcgtcttctttgtg

SEQ ID NO: 21530 - DNA, 531 bp, Zea mays
  Coding DNA Sequence Number=SeqID_7127
taggaaatggctctccggcgagtatccgccaccgtaatcctcttcctctacttactattttccgctcactctctcgattccaaacaccacaagatcgaaggaccgatcaagaccatagtcgttgtagtcatggagaatcgctccttcgaccacatcctcggctggctcaaaccaacccgacccgaaatcgacggattaaccgggaaagagtcaaaccccctcaacgcctccgatccaaactccaaaaagatctacgtctcgaacgacgccgttttcgtcgacatggatcctggccattccttccaagccatccgagagcagatattcgggtccaacgacacctccggcgacccgaaaatgaacggattcgcgcaggaggcggagagcatggagccagggatggccaagaacgtgatgtccgggttcaaacccgaggtcctgcccgtttacaccgagctagcaaacgagttcgggatattcgaccggtggttcgcgtcggttccgacttccactcagccaaaccgggttcta

SEQ ID NO: 21531 - DNA, 563 bp, Zea mays
  Coding DNA Sequence Number=SeqID_7128
acttttcgcaagattgttctgttctttacacgattccaagatgagtgaagaggtcaaagagaatcagtctgggaagcttcagaagccaactccacgtttaaacgagaggatcctctcatctttatctaagagatcggttgctgctcatccatggcatgatcttgaaatcggacctggagctccagtgattttcaatgtggttgttgagatctcaaagggtagcaaggtcaaatatgaacttgacaaaaagacaggactaatcaaggttgatcggatcctttattcatcggttgtgtatccgcataactacggttttattccccgcacattatgcgaagacaatgatccgttggatgtgctagtcatcatgcaggagcctgtacttccaggttgttttctgcgcgcccgagctattggattaatgcccatgattgatcagggcgaaaaagatgacaagatcatttgcggtattgtgttgatgatcctgagtataagcattacactgacatcaaagaacttcctcctcatcgtcttactgaaatccggcgattctttgaagatta

SEQ ID NO: 21532 - DNA, 470 bp, Zea mays
  Coding DNA Sequence Number=SeqID_7129
ttatgcttctccaagagccatggctttgtgctcgatcttctgccctcgcatccctgttcgattcagacccaaacccatttctcctctcctctcataacctttgtttcccctctcttatagggtttactcttccctgcaacctactccctctaccaaagatgaacttggaagtgtaagcattgggtttctgggtatgggaatcatgggttctcctatggcacaaaacctcctcaaagctggccgtgatgtgactgcgtggaaccgaactaagagcaaatgtgatcctctcgtcggattaggagcaaaatacaagtcttctcctgaagaagtgactgcaacttgtgatctcacatttgcaatgctagcagatcctgagagtgcaatccatgttgcctgtggaaagaatggagccgtatctggaattagctcacgaaaagggtatgttgatgtctcaaccgttgatgctgcct

SEQ ID NO: 21533 - DNA, 357 bp, Zea mays
  Coding DNA Sequence Number=SeqID_7130
ttgcctcagctcactgcatttctgggcttcgcgcggttcttcctcagaagatatccaccgtcgtctctcagagttctcagaggcttcagactcttaccgttttcgctcataagggctacaagatgaagacccacaaggcctcggcgaagaggttcagggtgacgggtagagggaagatagtgaggaggagatccgggaagcagcatttgttagctaagaagaacaacaagaggaagctgcgtctttccaaaatgcatgaagtgagccggagtgactatgacaatgtgataggcgctcttccctacctgaaagtcaaccgaaaggcgacttaagcagagccggcttgatcattttctt

SEQ ID NO: 21534 - DNA, 487 bp, Zea mays
  Coding DNA Sequence Number=SeqID_7131
gaaacccattgatgcggacctcgatctttctccactagctacagatctacacccttacacaaaccgtatatacatacacactttgtatctctctgtaaaatctatggccgccgtctcctctaaccctcgcaccgtcgaagagatcttcaaggattacaccgctcgtcgctccgccctcctccgtgctctaactaaagatgttgatgatttctactctcaatgcgatccggagaaggagaatttgtgtttgtatggacatccgaatgagtcgtgggaagtgaatctaccggcggaggaagttcctcctgagcttccggagcctgcgcttggtattaatttcgctagagatggtatgcagaggaaggattggctctcgcttgttgctgttcatagtgattgttgggtgctctctgtttctttctactttggtgctcgccttaaccgcaacgagaggaagcggttgttcagtctgatcaaggatcgccca

SEQ ID NO: 21535 - DNA, 536 bp, Zea mays
  Coding DNA Sequence Number=SeqID_7132
atttgattcctcctctttgtctctaaccttatcttataggaaggggagaatgtctcacaggaagtttgagcacccaaggcacgggtcacttggtttccttccaaggaagagagctaaccgtcacagaggaaaagtgaaggcattccctaaggatgaccaaaccaagccttgcaagttcacagccttcatgggatacaaggctggtatgacccacattgttagagatgtcgagaagcccggatccaagcttcacaagaaggagacctgtgaggctgtcaccatcatcgagacacccgccatggtggtcgttggtgttgttgcctacgtcaagactccccgtgggcctgaggtctctcaacaccgtctgggcacagcacttgagcgaggaggtcaggagaaggttctacaagaactgggccaagtccaagaagaaggcgcttcaccggctacgccaagcagtacgaaaccgaggaaggcaagaagagtatccagtctcagctcgagaaaatgaagaaatacggaaccgtcatacgtgt

SEQ ID NO: 21536 - DNA, 544 bp, Zea mays
  Coding DNA Sequence Number=SeqID_7133
tcctgactccttttggccttgttactttgacgataaagaaaaaaaaacaaacaaaaaaaaaaagtaaaaaataaagccaaaaggaaaaaagcaaaaaaatggatgttctgtgtgtgtccgcgaagatgccccgcggaatcccctttcttatagaggttacagctgcggttggtgttcctggtgtgaaatgtgcagtcaaaactccaaatagagagatggttcctctcttctttgaagctatggaggctctcaccaagtgacgccaaagttaatggatatgtggttctacaaaaatttatcagtcgatgagctgctataggtgtttggatgcggcattttttttttcacggaagcttgtgtgaattgtagtttttgtattagattacagtatttaaactgatagtttcctggttccaaagtttttcgccagaaatactggagatgttcttgcctcacataatctgtacatcttaccctgttggacctggaaattttcatcttgttatgcataacatatgaaatatgactagttttctacaagaaa

SEQ ID NO: 21537 - DNA, 380 bp, Zea mays
  Coding DNA Sequence Number=SeqID_7134
atgttgggaatttttagcggagctatagtatcattgccggaagagctggtggccgccggcagcagaactccgtcgccgaagacaaccggagcggctctagtcaacaagtttgtcgagcaaaacccatccgctgtgacccgtacaagtcggagactatgtgcagcttgcctacacccaccaccaagagagtcctctccggccaaggtcatttggggctaaggatgagatattctgcttgttcccaggctcacttgaccacctagggagcttggagcagcaatacgggcctggctaagaatgcaaacggaggtcctcttggtcattgaggcctaccaagactcctccgggacggagctccataccctgccaaccatggtagg

SEQ ID NO: 21538 - DNA, 512 bp, Zea mays
  Coding DNA Sequence Number=SeqID_7135
ttgctcatcgtttgccgtttcagaatcgaggggaatgaaccaaatcgagaacatggcgacgcagaaagctattgtgctatggaacatcagcagctgcccgattccagatggtcatgatcctcttatggtggttcagagaatacaagcggcggtggagaagtccggctacgtccgccgcaacggtgagatctcgatcactgccattggcgacaaactaacagaggtccctggcgaagacgtcatgaggaggctctcttccatcggaatcgctcttaaaaacggggacgaatatcaaatggatttgtataattgggccgacgagaacgctcctccgggtactatgatgctcatagacggtcatgagcaaactgggatggttagcagaaacactttccgagtttgaagatatggggattcagaattcttcttgcatatcctcaccgtgacccagcagccacaccctttccgtgtaaacaggtggggattggggctgccttgttctcagatgaaca

SEQ ID NO: 21539 - DNA, 510 bp, Zea mays
  Coding DNA Sequence Number=SeqID_7136
gtcgtctcctgttcatctgagaacaaggcagccccaatccccacctgtttacacggaaagggtgtggctgctgggtcacggtgaggatatgcaagaagaattctgaatccccatatcttcaaactcggaaagtgtttctgctaaccatcccagtttgctcatgaccgtctatgagcatcatagtacccggaggagcgttctcgtcggcccaattatacaaatccatttgatattcgtccccgtttttaagagcgattccgatggaagagagcctcctcatgacgtcttcgccagggacctctgttagtttgtcgccaatggcagtgatcgagatctcaccgttgcggcggacgtagccggacttctccaccgccgcttgtattctctgaaccaccataagaggatcatgaccatctggaatcgggcagctgctgatgttccatagcacaatagctttctgcgtcgccatgttctcgatttggttcattcccctcgattctgaaacggcaa

SEQ ID NO: 21540 - DNA, 266 bp, Zea mays
  Coding DNA Sequence Number=SeqID_7137
tgccggcgcccagtccatggccgtgcccagctccctcctccaagctcccacggcgcccctgctttgtgctggccacgtcttctcgctcggtctccaacttcggcgcccggctgagttccatggcgtgcgcccctgttcttcgttcccacgcgcgcatctctcttggccaccgagctccctttgcttgggggtggctgggcttcctccgagctcgcccccgacctctgctccttcttcggcgtagagtttccttggcgcgtccctac

SEQ ID NO: 21541 - DNA, 286 bp, Zea mays
  Coding DNA Sequence Number=SeqID_7138
ccccacaggagaacgcctgcagaggagcgaggagtagggacgcgccaaggaaactctacgccgaagaaggagcagaggtcgggggcgagctcggaggaagcccagccacccccaagcaaagggagctcggtggccaagagagatgcgcgcgtgggaacgaagaacaggggcgcacgccatggaactcagccgggcgccgaagttggagaccgagcgagaagacgtggccagcacaaagcaggggcgccgtgggagcttggaggagggagctgggcacggccatgga

SEQ ID NO: 21542 - DNA, 333 bp, Zea mays
  Coding DNA Sequence Number=SeqID_7139
ggtctccagcccagcgtttctggcgccgcaagcttgctgcgccctgggtcgcctcccagcaggccatctcactcggcgcccgtctccctaccatggcgtgccctccctgcgcagctccctcgctgtccgctgcccgcgcccagtccattggccggggccaagctcccctcctccaagctcccacggcgccccttgctttgggctggccacgtcttctcgctcgggctccaacttccggcgcccggctgaggtccatgggggggcgccccctggttccttcgggccccacgcggcgcatctcctcttgggccaccggggctccccttttggctg

SEQ ID NO: 21543 - DNA, 443 bp, Zea mays
  Coding DNA Sequence Number=SeqID_7140
ccggccgagggaaaggaagcaacagggtcgggggggcgaggctcgggggggaaggccaccccccccgcagccaaaaggggagccccggtggcccaagaggagatgcgccgcgtggggcccgaaggaaccagggggcgcccccccatggacctcagccgggcgccggaagttggagcccgagcgagaagacgtggccagcccaaagcaaggggcgccgtgggagcttggaggaggggagcttggccccggccaatggactgggcgcgggcagcggacagcgagggagctgcgcagggagggcacgccatggtagggagacgggcgccgagtgagatggcctgctgggaggcgacccagggcgcagcaagcttgcggcgccagaaacgctgggctggagaccggacagagagcggccagcgagccccatggctgaagctggagca

SEQ ID NO: 21544 - DNA, 537 bp, Zea mays
  Coding DNA Sequence Number=SeqID_7141
gagagactcacgatggcaccaaaggcaggaaagaaaccagcagagaagaaacccgccgccgcagagaagccagtggaggaagagaaggtagcggagaaagcaccagctgagaagaagcccaaggccggaaagaagctacctaaggaagccatcggcgcgaccgacaagaagaagaagcgcagcaagaagaacatcgagacgtacaagatatacatcttcaaggttcttaagcaagtccacccagacatcggaatctcgagtaaggccatggggatcatgaacagcttcatcaacgacatcttcgagaagcttgctcaggaagcgtcgaaactcgcaaggtacaacaagaagccgaccattacttctcgcgagatccagacagctgttagacttgttcttcctggtgagcttgctaagcacgccgtgtctgaaggaaccaaggctgtgactaagtttactagctcttgaatgaaatcacttgttaggattctagatctgagcgcttttgggtttgtcttttggtttggattatgctca

SEQ ID NO: 21545 - DNA, 452 bp, Zea mays
  misc_feature (342)..(342): n is a, c, g, or t
  Coding DNA Sequence Number=SeqID_7142
ttcgtcaagactcagctcatcttcctccgcctcttactcttctttcccgaaacccagcaacctctccctcaaacccgccaagctcatttcacctcccttgagaacttccccgtcgccactgagattcgcgaacgcttcaatcgagatgtcgcagacacaggagtcagctattcgcggcgccgaatccgacgtcatgggtcttctccttagggaacgaatcgtctttctcggtagcagtatcgacgatttcgtcgccgacgccataatgagcccagttgctgctcctagatgctaaagatcctaagaaagacatcaaactcttcatcaattcctcccgtggtntccctcagggccacgatcgctaatatacgaggggggtcaactggggagaggctgacgtttccacaattgctctcggcatggctggatcaacagcttccatcattctcggg

SEQ ID NO: 21546 - DNA, 488 bp, Zea mays
  misc_feature (143)..(143): n is a, c, g, or t
  Coding DNA Sequence Number=SeqID_7143
tagcaaaagccgcttgcccttagtttcccgcccccgagaatgatggaagctgttgatccagccatgccgagagcaattgtggaaacgtcagcctctccccagttgacccccctcgtatattagcgatcgtggccctgaggganaccacgggaggaattgatgaagagtttgatgtctttcttaggatctttagcatctaggagcagcaactgggctcattatggcgtcggcgacgaaatcgtcgatactgctaccgagaaagacgattcgttccctaaggagaagacccatgacgtcggattcggcgccgcgaatagctgactcctgtgtctgcgacatctcgattgaagcgttcgcgaatctcagtggcgacggggaagttctcaagggaggtgaaatgagcttggcgggtttgagggagaggttgctgggtttcgggaaagaagagtaagaggcggaggaagatgagctgagtcttgacgaaacga

SEQ ID NO: 21547 - DNA, 553 bp, Zea mays
  Coding DNA Sequence Number=SeqID_7144
aagacgtcgtctgcgtttggtaccaaaatatttgtgtgttaattcgctcccttcaaaactcaaaatgaagttccagtacaaggaagagcacgcgtttgagaagaggaagagcgagggcgagaagatcaggaggaaataccccgacagagtgcctgtcattgtagagaaggcacctaaagcaaggattggggatcttgacaagaagaaatatttagtgccgtctgacttgactgttggtcagttctacttcttgatccgcaagcgtatccatcttcgacctgaggatgcccttttcttcctcgtaaacagtgtagttccacccagcagtgccaccatgggttcactctatcaggagcaccatgaagaggactttttcttgtacattgcttacagtgatgagaatgtttatggaaaattataacttaaacacctaaactacagccaggaatttcgaagcagaatcaacaaaatgaaaaaatcaacaaaaagcttaaaacctacttagaaaccttacaaaaaaaaattaaaaaccctctgaggcatctgcttttta

SEQ ID NO: 21548 - DNA, 535 bp, Zea mays
  Coding DNA Sequence Number=SeqID_7145
gcttctctctacaacctcaagaactccaccgcgtttccaccggcgttggcggctcgccgctggtgccggtgcctccttctcccctctcgttttccctttgcttcgttacttagcctctccccctagccgatatgctgaagcactgatgtcgttggttgatgattgattcggggtccgaccatggcggttcttccagatctgtcgtcaccggtggccttggttggacagcgaggttcgtggaggtgcggctagttgcggagtcggattttaaggtggctagggttttggatctgccgattttcagatctctttggtgtgattctcccttagccagttctggaggcgcgtgagtcacggagatggctcaatcggttcagatctgtcagcggtctgtgttgatgtgggggtggctctctgccttggtgtctcggcgacagcgacttgccattcatacccaggtagggcttcgtgggctttgctcaccaaggtggtggcgcgtgttgctcaaaggatagtgtctggtactcaggcgtcg

SEQ ID NO: 21549 - DNA, 407 bp, Zea mays
  Coding DNA Sequence Number=SeqID_7146
gagtaccagacactatcctttgagcaacacgcgccaccaccttggtgagcaaagcccacgaagccctacctgggtatgaatggcaagtcgctgtcgccgagacaccaaggcagagagccacccccacatcaacacagaccgctgacagatctgaaccgattgagccatctccgtgactcacgcgcctccagaactggctaagggagaatcacaccaaagagatctgaaaatcggcagatccaaaaccctagccaccttaaaatccgactccgcaactagccgcacctccacgaacctcgctgtccaaccaaggccaccggtgacgacagatctggaagaaccgccatggtcggaccccgaatcaatcatcaaccaacgacatcagtgcttcagcatatcggctaggg

SEQ ID NO: 21550 - DNA, 477 bp, Zea mays
  Coding DNA Sequence Number=SeqID_7147
tcgaggtggtgtaggcgctcgcggagcagccggggcgttggagtttgaggaggaggagaagatggtcgtgctggtggtggccacgacgtcggacccggcgtccattgggcccgccgccgccttcctcgccatgcccggatggtcccccggcccgcccatcgccgaggggatggaaagttttactaatgggaatgttcgattattgaagcatgagcatagcattatcgcagaggatgatcttgaccagcgatggcaggaagccactggagagtctgtttctgaggtcatatttctcagcaaacacactgcagtctccaaacgtccagcactcacagtgcatccaattggtctgttcttctctcatatgtgatcccatttatcccaatggcaaggtcaaatgcttgatttttttttggtttcttgctgaacaccatttgattcatgagatatatcatagatatgcgttcgataaattcg

SEQ ID NO: 21551 - DNA, 504 bp, Zea mays
  Coding DNA Sequence Number=SeqID_7148
tcccttcccgatttcatcgttaattggtaaagaaaaaaagtcagtgaatcatctctcttcttcttcttcttctctcaagaacaggttttcggtttaaagcctcgaaattctctatggcggaagagcatcgatgtcagacgccggaaggccaccgtctctgtgctaacaactgcggcttcctcggcagctccgccaccatgaatctatgctccaactgctacggcgatctctgccttaagcaacagcaagcttccatgaaatccaccgtcgaatcctctctctccgccgtatctcctccgtcgtcagagatcggttctatgcaatccaccgttgaatcctctctctccgacgtatctcctccatcatcggagaccatttccatctcttctccaatgatccagcctctcgttcgaaacccatcagctgaactggaggtaacggcgaagaacgttccgaagacggtgactccgccgccggagcagcagcagaaacggccgaatcggt

SEQ ID NO: 21552 - DNA, 433 bp, Zea mays
  Coding DNA Sequence Number=SeqID_7149
accgattcggccgtttctgctgctgctccggcggcggagtcaccgtcttcggaacgttcttcgccgttacctccagttcagctgatgggtttcgaacgagaggctggatcattggagaagagatggaaatggtctccgatgatggaggagatacgtcggagagagaggattcaacggtggattgcatagaaccgatctctgacgacggaggagatacggcggagagagaggattcgacggtggatttcatggaagcttgctgttgcttaaggcagagatcgccgtagcagttggagcatagattcatggtggcggagctgccgaggaagccgcagttgttagcacagagacggtggccttccggcgtctgacatcgatgctcttccgccatagagaatttcgaggctttaaaccgaaaacctgttcttgagag

SEQ ID NO: 21553 - DNA, 545 bp, Zea mays
  Coding DNA Sequence Number=SeqID_7150
aagaacatatatacatccccaccaaacaaacaaaaataaccatggaagtaaatcaagaagcttcatcaatgccagtagttcccatagatagtttctcttacagttgggtagttaactgtccttctttagaagattccattgatgattatcatcaaacctacgaagattcttcttcttccttcatagagatggatccaagattgcctccttcgagaagattcttcatcaacaaatcccatgaaagtagcttcaagttcgataacttcgtctctttctccgacgaagatcactctttagttcacgccgacgagcttttccgcgacggctacgtcatgccttatctatcaaaagccacgtcagcagctacggaagaagaatatgagccgttggacaagaaaacggagaagaagatggagacacgtgacattaagagcaagtctccttcttcttgtagaaagttgagaagagtttcgaaatgggttttgttgttattgacgccactgtgtaagagattaaggagatgtagaaccgctggatcatccggg

SEQ ID NO: 21554 - DNA, 427 bp, Zea mays
  Coding DNA Sequence Number=SeqID_7151
ggaatcaatttctcctccaatcactctcaaagtctgagtagcgctcctttgctgcttgcgttttggctgtgaaatttcggagtcaccatgagagagtgcattattaagcctctttttcccaactttcagaccatcgatagcttgtggtacctgcccgggcggccgcccgggcaggtactttgagacgtctgctaaggacggaacgaacgtggaagacgccttccagtgtatcgtgaagaacgctctgaagaatgagccagaggaagaactgtatgtgccagataccgtgaacgtggtgggtggcaaccgggcccagagatcatccgggtgctgttaaggcacgaggcatcacgaggcgttgtgaccatcatcgtcggttatgcagtgaccaaacaataccttagccattgctgggtttccgtggtta

SEQ ID NO: 21555 - DNA, 491 bp, Zea mays
  Coding DNA Sequence Number=SeqID_7152
agttctctctgatgatgtctggctcaagattaataatcttcgcaataatctccacaaccgtcttcaccgttggatcaatccgattactcccagaggatgcatcttcagacttcatggaggctccagcatacataaacggaccagaatgctctgttttaccccaaaacagactcctcttagcttgtgatccttcagctgttcacatagctatgacccttgacccggcttacttgcgtggcacggtctccgcagtccactccatcctcaaacacacctcttgccctcaaaacatcttcttccacttcattgcttcagggtcaagccacgtaaagactctctcctctgtttttccttctctgagtttcaaagtctacaccttcgatgaaacccttgttaaagatctcatctcttcttccataagacaagctctcgatagccccttgaactacgcgagaagctacttgtcagagattctttcatcgtgcgttcac

SEQ ID NO: 21556 - DNA, 522 bp, Zea mays
  Coding DNA Sequence Number=SeqID_7153
aactcgcgagagatctaaggcagtcgccatggacgaatccgcgatcaaaggtttggaagttctggaattgaaaggaagtgatgcagggattcgaaatagcagcattattacgaggatggtggtcaagggatacgacacctcccctcctactcctcctaaggaggttgtcgtagaggctatgataaaacacttgggatacgacaccttcactcctactcctagggaggttgtcgaagaggctctgagaaaacacttcgcatcacgtggaataacgttaatacatgttgctgttcccgaagaaaacagtcatattctctgcagtcacggcttaatctatgttaatgaagaatgtgaagcagaggcgttgaagcttgatggaagtgacatgggaggaggacgtattttagaagttgcggcttacccttttgccgaccatcaccttgaccatatctttgctcctaccaaagccacagaatgcctagagcgcacgttgtatggtacaggatttgatacttgccttgc

SEQ ID NO: 21557 - DNA, 553 bp, Zea mays
  Coding DNA Sequence Number=SeqID_7154
aatcctgtaccatacaacgtgcgctctaggcattctgtggctttggtaggagcaaagatatggtcaaggtgatggtcggcaaaagggtaagccgcaacttctaaaatacgtcctcctcccatgtcacttccatcaagcttcaacgcctctgcttcacattcttcattaacatagattaagccgtgactgcagagaatatgactgttttcttcgggaacagcaacatgtattaacgttattccacgtgatgcgaagtgttttctcagagcctcttcgacaacctccctaggagtaggagtgaaggtgtcgtatcccaagtgttttatcatagcctctacgacaacctccttaggaggagtaggaggggaggtgtcgtatcccttgaccaccatcctcgtaataatgctgctatttcgaatccctgcatcacttcctttcaattccagaacttccaaacctttgatcgcggattcgtccatggcgactgccttagatctctcgcgagttctcctaacgtctgttcgcggattcgtacatggcgactgctgagcta

SEQ ID NO: 21558 - DNA, 598 bp, Zea mays
  Coding DNA Sequence Number=SeqID_7155
acaccaactctcgtggtggtgacgagggaagagcgaactgcaagcaacacgatcttcctcctctgttccaacacatccatggagacataagcagagagtcttcttcttgcaacgagctacaagattcttgcaaaccctttttacccgttacaactacttggtcttctcctcttcctcctcctcctgtagtttcatcagctcctaatatcttaatgaaacaagaacaagggctcatcgaatcacaagatcagaaacctcctcttggtgttagggttttcccgcctcccacaaccatttcttcttcctcttctgtctttgttttcagaggtcaacgtgaccaccttcttcaacaacaaccccaagctcctcttcgatctagaaaaagaaaaaatcagcaaaagagaaccatatgtcatgtaactcaagaaaatctctcttcggatatgtgggcatggcgtaaatacggtcaaaaaccaatcagaggctctcctttatccaaggaattattacagatgcagtagctcaaaagggatgtttagctcgaaagcaaggtgagagaagcattttggacccgaacatcttcatcgttacttacacc

SEQ ID NO: 21559 - DNA, 545 bp, Zea mays
  misc_feature (477)..(477): n is a, c, g, or t
  Coding DNA Sequence Number=SeqID_7156
aaagatcactccgtcatctttcttccaccaccaccgtcctctaaacaaattacacatggcgagtctctgcatctcatcgtccaggatcgtctccctccaccaccagaaaccgtttctctctcttaaactccggccttgttcgtcaggtctctccggtccaactcaccgcacgagtgccgtttgcttcaatccgctacgagcatcgttagatcgccagcgaaccgccgctgccgtatctacgaatgctgagaagcagcgaaagagaggatcgagtgtggtctgttatgctgctccgatgtctgttcataatctacaatgggtctcggcaatctcttgcgttgcattgatggttgcaaagggtacaggtatccacaagtcctttgttgttccgctacttgctctaactgcaccatcagacattatctcctgggcaaaggggtgaaatatggaaaatctggacagcattcatagcactcntttgctcgacggggtcttcgctttttccaaggggaacttgaactggcattcattgcattatccttggg

SEQ ID NO: 21560 - DNA, 569 bp, Zea mays
  Coding DNA Sequence Number=SeqID_7157
tgtgtctcagaatctctcccgttaactcgcatcttacttttgttttttatttcactggagcagctcctctgagatccattcgttaccgattggcttctctctaatcaatctctgatggcggatgcggcgaaagatttagcttcagggactgttggaggagcggctcagctaatcgtaggccacccatttgacacaatcaaggtcaagcttcagagccagcctgctccatcaccgggacaaccaccgaggtacacgggagcaatcgatgcggttaagcagaccgttgcttctgaaggacctaaaggtttgtacaaaggtatgggagctcctcttgctaccgttgctgccttcaacgcggttctgttcaccgtgagaggtcagatggaaggtctgcttaggtctgaacctggtgtgccgttgaccattagtcaacagtttgtgtgcggtgcaggcgctggtttcgctgtctcgttccttgcttgtcctaccgagttgattaaatgcaggttgcaagcacaaggtgctggagggggagcctctaccacaggctcagtggttgcagctgtgaa

SEQ ID NO: 21561 - DNA, 564 bp, Zea mays
  Coding DNA Sequence Number=SeqID_7158
ttgatatctgtcttttttcctcccaaaatggcccttcaagctgcttctttggtctcctctgctttttctgtccgaaaagatggaaaactgaatgcttcttcatcatccttcaaggaatcgagtctttttggtgcctccattacagaacatggctctttctcatttagattcaagagagaacatagctcgaggaatgtgctcgcagttcgtgcccaaacagccgcaacttcaagcccctcggtcacaaaatcttcatctggcggcaagaaaacgttgaggaaaggtaccgtggtggtcacgggagcctcgtcagggttaggtttagccacggctaaagctcttgcggagacaggtaaatggcacgtgataatggcgtgcagggactttcttaaagccgagagagccgctaaatccgcagggatgcctaaagacagctacacggtgatgcatttggacttagcctcgttggacagcgtgagacagttcgttgatagcttcaggagatcggagatgcctctcgatgttttggtctgcaacgctgcggtttatttccctacagctaaa

SEQ ID NO: 21562 - DNA, 505 bp, Zea mays
  Coding DNA Sequence Number=SeqID_7159
ctcctgttcttatggaagcttcacccaatgatcgccttcactttggcaaaatgggtttcgggtgtcagcactacaggaggagatgccagatcagagctccatgttgcaacgaaatcttcgattgtcgccattgtcacaacgagttcactagtactctgcgcaatatctacgaccgtcatgagcttgttcgtcaagacgttaaacaagtgatttgttcggtttgcgacacagagcagccggttgctcaagtatgctccaactgtggtgtcaacatgggagaatacttttgcaatatctgcaagttctatgatgataatactgagaaacaacagtttcattgtgatgactgtggaatctgcagagttggtgggcgtgagaacttctttcattgcaagaagtgtggatcttgttatgcgactggtctgcgcaacaaccatcgctgcgttgaggattcatgcgacatcactgtcccatttgtttccaggatctctttgactctctaaaa

SEQ ID NO: 21563 - DNA, 542 bp, Zea mays
  misc_feature (510)..(510): n is a, c, g, or t
  misc_feature (512)..(512): n is a, c, g, or t
  Coding DNA Sequence Number=SeqID_7160
gagggcgatacactcgagtttcgaatgcttcattgaatccacaatgcttgaaatggatctccgtcttctcctaccatctctcattccctcatcgcaatccgtttacgtgctggtgttctacttcgtctacttagccgtcgcgggagaaatccttcccggaaaagttatccgcggcgtcgttttatcagatggctctcagcttcggtaccgatgcaatggtctattcgcactgtcattgctggttgctattttgggaatctctgcaaaactcggcgatttgtcacctcttgtgggtgctgatagagggcttgagttgctctcagctacttttatcttctgtggtttggtgacactggtattgtacattactgggcgcacttcttcggataaagagttcttccctaaaacctcacgtctcaggaaatcttttaccccgactggtggtttggaatacagctggatccctcagtttattgggcattgatctcaaggttttctttgtaaaagccngnaatggatgggatggctgcttatcaatctcc

SEQ ID NO: 21564 - DNA, 567 bp, Zea mays
  Coding DNA Sequence Number=SeqID_7161
tcatcatttcaccttgtggcctgccgcgatcaaaagaaattagaaaatggctgacggtgaagacattcaaccccttgtctgcgacaatggaaccggaatggttaaggctggttttgctggggatgatgcaccgagggctgtgttcccaagtatcgtaggccgtcctcgtcacaccggagtcatggttgggatgggtcagaaggatgcatacgttggcgacgaagctcaatccaagcgtggtattctaactctcaagtaccctattgagcacggtatcgtcaacaactggggatgacatggagaaaatatggcatcacactttctaccatgagctccgtgttgctctccgaggagcatcccattctcctcactgaagctcctctcaacccaaaggctaaccgtgagaagatgactcagatcatggttgagactttcaacgctcccgccatgtatggtgccatccaagctgtcctgtctctttacgctagtggtcgtcccactggtattgtgcttgacctccggagatggtgtgagccacacggtacctaatctacgagggtacgctct

SEQ ID NO: 21565 - DNA, 538 bp, Zea mays
  misc_feature (475)..(477): n is a, c, g, or t
  misc_feature (479)..(481): n is a, c, g, or t
  misc_feature (504)..(505): n is a, c, g, or t
  Coding DNA Sequence Number=SeqID_7162
gtcgctacagcgaagtaactcggattcggctcattcgagcgaatcggctcgagcttccaaaaccggatttgcgaacagtcacctagcagccgatgttagcacgcggcgcgtcctgcgaccatggaggacgaggagcacgaggtgtacggccaggagattcccgttgacggcgaggacgtcgacatggctgccggcgacgatgccaccaagctgcaggaacttgacgatatgaagcgccggctcaaggaaatggaggaggaggccgccgcgctccgcgagatgcaggccaaggttgccaaggagatgcaaggtgtagatcccaatgcaaccacatctgaaaacaaagaggagatggattctcggtcagtattcattggaaatgtaagttttatctcttctctttatgtaaattaagaggactcgtgtacagttcaatggctatataatattatctgggggttttaatataatattnnntnnnattttcccactttcagtagattnnatgtttattctgtgctccactagaaatctaatt

SEQ ID NO: 21566 - DNA, 523 bp, Zea mays
  Coding DNA Sequence Number=SeqID_7163
gaagaacaatgtcgtcttcctcctcatcaaagaagcaaaccctcttcatatcgacactcatcatctcatggtactcctccaacatcggcgtcctcctcctcaacaagttcctcctctccaactacggcttcaagttccccatcttcctcaccatgtgccacatgtccgcctgcgccttcctcagctacatctccatcgtcttcctcaagctcgtccctctccagcacctcaaatctcgctcccagttcctcaaggtcgccactctcagcgtcgtcttctgcgcctccgtcgtcggcggtaacatctcgctccgttacctccccgtctctttcaatcaagccgtcggtgctacgacgccgtttttcaccgcgctcttcgcgtatctcatgactcttaagagagaggcttgggttacctatggtgctcttgtccctgtcgttgctggtgtcgtcattgctaggggggtgagccagggtttcactggttcggtttcataatgtgcattagtgctacagctggcaga

SEQ ID NO: 21567 - DNA, 525 bp, Zea mays
  misc_feature (433)..(433): n is a, c, g, or t
  Coding DNA Sequence Number=SeqID_7164
taacgttggatcattcattcttcttcaccgagccgcagaaatatcgaagatgcagaggcttttcgcagcgagatcggttcttggtaacgccgtcaagacgcggaggaggcagcacttgtcgtctctctcttcttctctcctcttcgacgaaactcagcttcaggttaaagaaagtgtgtccaagtttgcacaagatgttatcgctcctcatgccgaaagaatagataaaacaaattcatttccaaaggatgtaaacttatggaagctaatgggtgagttcaatctccatggaatcacagcgccagaggaatacggaggtcttggtctcggttacttgtatcattgtatagcaatggaggaaataagtcgggcctcggcctcagttgctctctcttacggtgcccattcccaacctttgcatccatcaattggntgcggaatggaaatacttcacaaaagcacaaatatttgccccagctgatcagtggagagcatggtggggctcttgcgatgagtgaaccccat

SEQ ID NO: 21568 - DNA, 567 bp, Zea mays
  Coding DNA Sequence Number=SeqID_7165
taaaatctcatttcacttcactgcgcctcccacactcaacaaaacaagagccgaaaccacaaactctaacaaccatgccgcccaagttggacccgagccagatcgtcgacgtctacgtccgcgtgaccggaggagaagtcggagccgccagttccctcgcccccaagatcggtcccctcggtctcgccccaaagaagatcggagaagacatcgccaaggagacagccaaagagtggaaaggactccgcgtcaccgtcaagctcaccgttcagaaccgtcaggcgaaagtcacggtggttccgtccgccgctgctctcgtcatcaaggccttgaaggagccggagagagacaggaagaaggtgaagaacatcaagcacaatggcaacatttcgtttgatgacgtgatcgagatcgctaggatcatgaggcctaggtcgattgcgaaggagctgagcgggactgtgagggagattctggggacgtgtgtctctgttgggtgcactgttgatgggaaggaccccaggatcttcagcaggagattcaagagggtgagattgagatccctga

SEQ ID NO: 21569 - DNA, 503 bp, Zea mays
  Coding DNA Sequence Number=SeqID_7166
gagccgcttctttgcttacaacacacacacagacagaaggtcagaagcgaaaatggtgtcgggatcaggtatatgctcgaagcgcgttgtcgtcgacgcgcgacaccacatgctggggcgtctggcgtcgatcgtggccaaggagctgctcaatgggcagaaggtcgtcatcgttcggtgcgaggagatttgcctctccggtggactcgtccgccagaaaatgaagtacatgaggttccttcgcaaacgtatgaacactaagccttctcatggacccattcacttccgtgctccttccaaaatcttctggcgtactgttcgcggtatgattccacacaaaacgaagcgtggagctgctgcacttgcacgcatgaaggtgtttgaaggtgtgcctccaccatacgacaaggtcaagaggatggttatccccgatgctctcaagggcttgaggcttcaagctggtcacaagtactgtctgttgggtcgtctctcctctgaagcgg

SEQ ID NO: 21570 - DNA, 465 bp, Zea mays
  Coding DNA Sequence Number=SeqID_7167
gttttcgttcgatagggtctctagcttctctcactcattctcctcgagatgtttcacgctcctcaggcattgtcttaacttcatgctctgttcatcccatcacgcgctcctccttcactggctctcccatctccatcccgccagtccatctaccatctcaaacacctacaagaccccggaacctcctcccaatcacgtcgatggtgaaaccaacgctccagttcatccaaggaacagacgagatgaccatccctgacgtcaagctgactcggtcaagagacgggtccaacggaatggcactcttcagtttcgaccagccatcggttttcgactcgagcggcgaggtcggggagataaccggactgtacatgatcgacgaggaaggtgtgattcagtccaccgacgtgaacgccagattcgttaacgggaaacctgaaggcattgtggccaagcacgtgatgcgca

SEQ ID NO: 21571 - DNA, 516 bp, Zea mays
  misc_feature (221)..(221): n is a, c, g, or t
  misc_feature (331)..(331): n is a, c, g, or t
  misc_feature (393)..(393): n is a, c, g, or t
  Coding DNA Sequence Number=SeqID_7168
tttgattcagatcatccttccttcctcttctcctcattgagatgtggagatacgtatggtcactgctcctactcttcgtcgtgtgcaaagataccatcttcatggcgaagtctgcggcgattctccttcctagtcaaaccggagttgacgattctgtatgctccgcgccggatccgagcctgaactacaagccggtcatcgggattctgacccatcctggnagacggcgcgacgggtaggttgaaccacgatacgaacgcgtcgtacatcgcagcgtcgtatgtgaaattggctgaagctggtggagctcgtgtggttcctctcatctatnacgaacccgaagagcttctctttcagaagcttgatttggtgaatggggggatattcactggntggccgggctaaaaaaggattgtattttggatggggccaaaaagatcttccctagagctttggaaagaaatggatgggggagagcccttttccggtatatgccattttgcctaggattccagc

SEQ ID NO: 21572 - DNA, 552 bp, Zea mays
  Coding DNA Sequence Number=SeqID_7169
gatatatatctttcaccttctctcgcaggaagctctgtagtggcagtttcaatcgaagacgatgaagttcaacgtcgcgaatcctaccactggttgccagaagaagctcgagatcgatgacgaccaaaagctccgtgctttttacgacaagaggctctctcaggaagttagcggtgatgctttgggcgaggagttcaaggggtacgttttcaagatcatgggaggttgcgacaagcaaggtttcccaatgaaacagggagttctcacccctggtcgtgtccgccttttgcttcaccgaggtactccttgtttcagaggacacggaaggaggactggtgagaggagaagaaagtctgtccgtggttgcattgtcagccaagatctctcggttcttaaccttgtcattgtcaagaagggtgagaaggatcttcccgggcttaccgacaccgagaagccaagggatgagaggtcccaagagagcttccaagatccgcaagctggtcaaccttgggaaggatgatgatgtcaggaagtatgtccacacttaccgcc

SEQ ID NO: 21573 - DNA, 498 bp, Zea mays
  Coding DNA Sequence Number=SeqID_7170
ttctccaaccttcacgtaacaaagctctcttgcttttccggtggccgctctgccgttcgcggtcgctggatctcctcttttctccccctctttcctctcgtgtgtttcatatgtccttgtttccttcgtattctcttctctttgcggcagggggagctccacctttgctcagatccggaatctgggtttcagatctagggtctccggcggcgagtccatgcgagtgaggacagcgtctgtctttcctatggcttagacctttggtttcgtccttggagttccggtgattttgtgttgcttggtgtgtgctctcgggtgagtagtggcgcgtgtgacgtcggttctctcggatttcgtccggggattggttcgtggtaggctttgactaggagctttgtggcgggattcttgtttctggtcactctcgagttattgggtgtccttttggtaacggcgcgggagagctagtccggagctatggccggtaagcttggtctc

SEQ ID NO: 21574 - DNA, 483 bp, Zea mays
  Coding DNA Sequence Number=SeqID_7171
agagacaccggagaccaagcttaccggccatagctccggactagctctcccgcgccgttaccaaaaggacacccaataactcgagagtgaccagaaacaagaatcccgccacaaagctcctagtcaaagcctaccacgaaccaatccccggacgaaatccgagagaaccgacgtcacacgcgccactactcacccgagagcacacaccaagcaacacaaaatcaccggaactccaaggacgaaaccaaaggtctaagccataggaaagacagacgctgtcctcactcgcatggactcgccgccggagaccctagatctgaaacccagattccggatctgagcaaaggtggagctccccctgccgcaaagagaagagaatacgaaggaaacaaggacatatgaaacacacgagaggaaagagggggagaaaagaggagatccagcgaccgcgaacggcagagcggccaccggaaaagcaagaga

SEQ ID NO: 21575 - DNA, 499 bp, Zea mays
  Coding DNA Sequence Number=SeqID_7172
atttcgcgtctcaagacttcgaactcgacaatccctaattcccaaactccctctcggatctataacaaagagtgtgatacgaaacgatgtcgtctcctcgtgaagagaatgtgtacttagccaagttagccgagcaagccgagcgttacgaggagatggtggagttcatggagaaagtcgccaagaccgttgactccgaggagctcaccgtcgaagagaggaacctcttgtccgtcgcttacaagaacgtgattggtgctaggagagcttcgtggaggatcatctcttctattgagcagaaggaagagagcagaggaaacgaggatcacgttgctattatcaaggactacagagggaagatcgagacagagcttagcaagatctgcgatgggattttgaatcttttggattctcaccttgttcccgctgcgtctttggcggagtctaaggtcttttatctgaagatgaaggggggattaccatagggaacccttggtga

SEQ ID NO: 21576 - DNA, 495 bp, Zea mays
  Coding DNA Sequence Number=SeqID_7173
tttcactctcacttgtcagtttcactctacctaccggagacacccacatcaccaagagaaaatccttcgaaatcatcattgggaggcggtggcaatccaccgccgtcaccttcaccagaaccggaacctgaaccagaagattgctctccaccacctcctcctcctccatgccctccaccaccacaacttccaccgccgcagcggcaacgtgcaccgccaaaaccgccgccaaagtcgcgggggcagccaccgttgccgctacttggctttgagagcccactactaaagaaagtgttcccagtcctcaaagctttccagaaactagttacacgcgatccaatgcatattcttaagacttggggagggcaccgacatttgcaacaaatacaaatacctggggacttgaatgcgcaatcttcccgaatacaactgataaggcactcgcgagcatcccagtttaacgggttttaacttcggtggcgataaactcgtgtt

SEQ ID NO: 21577 - DNA, 460 bp, Zea mays
  Coding DNA Sequence Number=SeqID_7174
actgtgtctagcttgtcgaggaagttatgtaacacgagtttatcgccaccgaagttaaaacccgttaaactgggatgctcgcgagtgccttatcagttgtattcgggaagattgcgcattcaagtccccaggtatttgtatttgttgcaaatgtcggtgccctccccaagtcttaagaatatgcattggatcgcgtgtaactagtttctggaaagctttgaggactgggaacactttctttagtagtgggctctcaaagccaagtagcggcaacggtggctgcccccgcgactttggcggcggttttggcggtgcacgttgccgctgcggcggtggaagttgtggtggtggagggcatggaggaggaggaggtggtggagagcaatcttctggttcaggttccggttctggtgaaggtgacggcggtggattgccaccgcctcccaatgatgatttcgaa

SEQ ID NO: 21578 - DNA, 471 bp, Zea mays
  Coding DNA Sequence Number=SeqID_7175
aaaaaatggcgcagcaacagtcgctgatctacagcttcgtcgctcgcgggacggcgatcctcgtggagttcaccgatttcaaaggcaacttcacctccgtcgctgcgcagtgcctccagaagctcccctcttccaacaacaagttcacctacaactgcgacggccacaccttcaactacctcgtcgaagatggattcacctattgcgttgttgcggttgattctgcggggaggcagattccgatggcgttcttggagagagtgaaggaggattttaacaagagatatggtggggggaaggctgccactgctcaagcaagcagcttgaataaagagtttgcgtctaagttgaaggagcacatgcagtattgtatggatcatcctgacgagattagcaagcttgctaaggtgcaggcgcaggagtctgaggttaagggcgctatgatgtaggacatcgagcaggttcttgacc

SEQ ID NO: 21579 - DNA, 481 bp, Zea mays
  Coding DNA Sequence Number=SeqID_7176
tgctgctgagatacttgctggcacttctgctgcacgtcctcgctcgttcaagcagaaagaagctgagtacgaagaagatatcgaagaggtgtctgaagaggaatctgaagaagaagaatccgaagatgaatctgatgtgaagaagaaaggacacgaagctctaatcgaagttgataaccctaacagagctaagcccaagaccttgaaagcgagagaccttgatgcaagtaaaaccactgaactctcaaggcgtgaaagggaggagctagagaagcagcgagctcatgagcgatacatgaggttgcaggagcaaggcaaaaccgagcaagcaagaaaggatttagatcgtttggctctgattcgccaacagagagaagaagctgccaagaagcgagaagaggaaaaagcagcgagagacgcgaagaaagtcgatgctcgcaaatgagccaagtgttcaagcacatcgaagaactaccctact

SEQ ID NO: 21580 - DNA, 241 bp, Zea mays
  Coding DNA Sequence Number=SeqID_7177
gttcccttcgttgcgtcttgaaaggggagagagagagagagaagagagagagaagagagagagagagagaggagtgggagacccgcgtagaggctgccgtgtagggaccgtagactcagcgactgcgaaggaggaaataaggggatgggccgggatcggaccgatcaggcagacttgggaggcccggtcgtttgtggcggaagaaggcacccaccgccgccgccaagaaaggatggagaag

SEQ ID NO: 21581 - DNA, 510 bp, Zea mays
  Coding DNA Sequence Number=SeqID_7178
atcatcgtggaaacgtttggaaagcgacgagcatcggcatcagatctcgtgcggcggttgtgttcttcgggtttagaataaaaggaaaggataggagatggggctgtcatttgggaagctgttcagcaagctgtttgcgaagaaagagatgcgtattctcatggttggtctcgatgctgctggtaagaccaccatcctctacaagctcaagcttggtgagatcgtcaccaccattcccaccattggtttcaatgttgaaactgtggagtacaagaacattagcttcaccgtgtgggatgtcgggggtcaggacaagatccgtccactgtggagacactacttccagaacacacagggacttatctttgtcgtggacagcaacgatcgtgaccgtgttgttgaagccagggacgagcttcacaggatgctcaacgaggatgaattgagggatgcagttctgcttgtttttgctaacaagcaagatctccccaacgctatgaacgctgctga

SEQ ID NO: 21582 - DNA, 416 bp, Zea mays
  Coding DNA Sequence Number=SeqID_7179
tagacgcttacgctgttgctcgtcccacttcgcttctcacctcccaacctaccggcggcgaaaatggttttcaagaggtacgtggagatagggagagttgcccttgtaaactacggaaaagaccatggaaagctcgtcgttatcgtcgacgttgttgaccagaacagggctttggtagacgcccctgatatggagaggatccaaatgaatttcaagagattgtctcttactgatatcgttattgagatcaaccgagtgccgaagaagaaggctttgattgaggccatggagaaggctgacgtgaagaacaagtgggagaagagctcatggggtagaaagctgatcgttcagaagcgtagggctagcctcaatgacttcgaataggtcaggatcatggtggccaaaatcaagaaagg

SEQ ID NO: 21583 - DNA, 529 bp, Zea mays
  misc_feature (452)..(452): n is a, c, g, or t
  Coding DNA Sequence Number=SeqID_7180
atgagtttctcggtggtcttgttccagaaaccctaccctgcaacaccaaccttacccatcactaccaccttcacaatctcatcatcctcatcatctttcagaccaagaagaagactaccttcttcaaccaatcgcatcttccctgtaaaccaaccaaaacccataaccaaaaatcgccaaaccgaaaccctagccgccagagacacaatcatagacttcggcaagcacaagggcaaaatgctcggctctctgccctcctcttacctcagatgggtctccaagaatctacgcgcaggagacaccgagtactgggcgaagctcgcagaccaagtgctcgaggacgatgtttataaagacagaattgagtgggagtttgcagagaaaatcctccacggaagtgacgagagtttaaagaagagcagagaagaaagaggtaagctctgtttcgatgngtgttggagattagcgagaggtttggttgggacaatggagataagattgggtggagcagagtcaacttcgagcttct

SEQ ID NO: 21584 - DNA, 578 bp, Zea mays
  Coding DNA Sequence Number=SeqID_7181
caaatccagcttttcgttttctcaaagtcgttgaaaatgctggctagactcgctgcgaagcgtctcctcgagatccgccaagctttccgtcaagcaccatctcaggcgtctcgtagcttctcaacagccttaaactaccacctggattctcctgacaacaaaccggatcttccatgggagttttctgaggctaacaaatccaaggttaaggagatactctcttactatccatcaaactacaagcagtctgcggtgattcctcttcttgatcttgcccaacaacagcatggaggctggctccctgtttcagctatgaatgcggttgctaaagttatagaagttgctcctattcgtgtttatgaggttgcaacgttctactccatgttcaacagggcaaaggtcggaaagtaccacctcctagtttgtggcacaacaccttgcatgatccgtggctcacgagagatcgaatcagctttgctagaccatttgggggtggggcgcccccggccacatcccatggtttgttctctgttggagagatggaatgcatgggatgctgtgttatgcgccaatgatca

SEQ ID NO: 21585 - DNA, 481 bp, Zea mays
  Coding DNA Sequence Number=SeqID_7182
attctctctcctaaagcaaatatcaaaatctagaagagtaactttgaaaccatagatggctcgtaccaagcaaaccgctagaaaatccaccggaggaaaggctccgaggaagcagctggcgacgaaagcggcgaggaagtcggctccggccaccggaggagtgaagaagccgcacagattccgccccggaacggtggcgctgagagagatcaggaagtaccagaagagcaccgagcttctcatccgcaagcttccgttccagcgtctggttcgtgagatcgctcaggatttcaagacggatctgaggttccagagcagtgccgtcgcggctttacaagaggctgccgaggcttaccttgttgggttgttcgaagacacgaatctgtgtgcgattcacgccaagagagtcacgatcatgccgaaggatatccagctcgctaggagaatcagaggtgaaagagcttgaagacctatctagctt

SEQ ID NO: 21586 - DNA, 590 bp, Zea mays
  misc_feature (406)..(406): n is a, c, g, or t
  Coding DNA Sequence Number=SeqID_7183
tgaatctcacctactcagattccgtcacgtggtggccatgccttggcccggaagaggccacatcaacccgatgatgaacctctgcaaacgcctcgtcctccgcgaccccaacctcaccgtcacattcgtggtcaccgaagaatggctcgggctcatcggatccgacccgaaacccgaccggatccacttcgctactctccccaatctcatcccttccgagctcgtccgcgccaacgacttcatcggcttcgtcaacgccgtccacgctacgctggaggagccgttcgaacagcttcttttgaccgcctcgactcgccgcccccgacggcgatcgtcgccgacacttacgtcctatgggcggtgcgtgtccgagaacggaggaatattccggtggcttctctctggnaccatgtccgccacgattctctccctcttccttcaccccgacctgctcataagtcacggacatgctctgttccaacccttcagaatccaaaagaagaggagattggttgcctacctccccggtttacctccaacgaagctccggggatctaccgcccttattcaagggctaccaggctccaaga

SEQ ID NO: 21587 - DNA, 566 bp, Zea mays
  Coding DNA Sequence Number=SeqID_7184
tgtgtgagccatttttgaagatctatgtatatctgttgattgtgttgctaccagcgaagttagtgtttctgtgtcacttgttccatcaaagatctggagtagggaactgatacaacaggcaagtgtttccattccttcattgtattagcaagtagaagcacatgacaaattgtttttggtgacttgatagtgcatttccaagagaaatatttttattccaattctctgcacttccacattgttaacaaatttttaggaacttgacaatgtagttgaagagctagcaagtagaaacacgagagattttttttgcaagtgacttgatagtccatgcctgaactttttacaagaacttttttattgtagttctatgggcttcacaattgttaacaatctttcaggaacttgaccatgtagttaaagagcttaagaaaatagcaatcgttcatctacttcatgtaacacccactttgtaatttgctagaaataataccaatagagaaacattttctctttatgtgagtttgatcttcatgcatcatcatatgtgaacaccatgcctaaaa

SEQ ID NO: 21588 - DNA, 521 bp, Zea mays
  Coding DNA Sequence Number=SeqID_7185
gcagcgatggtgtacttcgattcatgggacgagttcgtcgaccggtccgtgcagctcttccgcgccgaccccatcaccactcgctattgtatgaagtaccggcactgcgacgggaagctcgtgctcaaggtcaccgacgaccgcgagtgcctgaagtttaagactgatcaagctcaggacgcaaagaagatggagaagcttaacaacatctttttcgctctcatgactcgtggacctgatgctgatataagcgaggtttcagggaaggaacaggcggagcagcagcaatcaaagaagggacggggcaggaggcagtagtatcatgttctgggtttctttcagaaagatcacaactgggagtggtgggtggatattttgatcgactcctgttagccatgttacaactgtgagtggtgggtggtctaagagtggtgagtagttttctaagacaatgtgcgccatcgttggatcctttttcctggcacaaaaccgcgaagtacacttacccacacaatcatggt

SEQ ID NO: 21589 - DNA, 303 bp, Zea mays
  Coding DNA Sequence Number=SeqID_7186
gaaaccactaactacagctcagagaacttgttctatagcatggctcgtttctaaccgacttatataatatgatagattttagctgtgtagtaagcctttggagtagttatgaagtctctctttactttggtatgcagtcttcttacgacagaatacggactccattgtatgcttttggcaagcttgttagctaagatgatgtttctgtcattgagctcgaatagtttgaaattagaaagctcgcaattgaggtctacaggccaaattcgctcttagccgtacaatattactcaccggtgcgat

SEQ ID NO: 21590 - DNA, 173 bp, Zea mays
  misc_feature (146)..(148): n is a, c, g, or t
  Coding DNA Sequence Number=SeqID_7187
tcttgtcgtcatcattatggatccatggcgtcgcgccgtgcggtggtctgaactgcattaaaactcgacgtccttgaagaccttgggcaactgctccagggtgacgaagagaatcacggtgaagggcccctgccgcgacaccgtgnnnatgaaccccttgtagagcgccatca

SEQ ID NO: 21591 - DNA, 247 bp, Zea mays
  misc_feature (34)..(36): n is a, c, g, or t
  misc_feature (200)..(201): n is a, c, g, or t
  misc_feature (203)..(203): n is a, c, g, or t
  misc_feature (206)..(207): n is a, c, g, or t
  Coding DNA Sequence Number=SeqID_7188
ggagggcgtgatggcgctctacaaggggttcatnnncacggtgtcgcggcaggggcccttcaccgtgattctcttcgtcaccctggagcagttgcccaaggtcttcaaggacgtcgagttttaatgcagttcagaccaccgcacggcgcgacgccatggatccataatgatgacgacaagaagctgcccattgatgccgnnanttnnaagaataactagtagtaccgctggagggatttttccagtt

SEQ ID NO: 21592 - DNA, 232 bp, Zea mays
  Coding DNA Sequence Number=SeqID_7189
ggcacacaaggtttttcaatcacataacaaagcacacactaatacggagtactcatcaccatcatcgctaagatagttcataagaagttcagactgaaaatcttttacttcagataatttttcatcatcatcatcggcggcggcggcgccgccgccaccacgggcataaaaccagcaaaacctggcatcctaaaaccccatccaccttctagtgcttgttcttcgccatcca

SEQ ID NO: 21593 - DNA, 271 bp, Zea mays
  Coding DNA Sequence Number=SeqID_7190
tcgtttgggttcctcgatctggtgctatagaggggtggatggcgaagaacaagcactagaaggtggatggggttttaggatgccaggttttgctggttttatgcccgtggtggcggcggcgccgccgccgccgatgatgatgatgaaaaattatctgaagtaaaagattttcagtctgaacttcttatgaactatcttagcgatgatggtgatgagtactccgtattagtgtgtgctttgttatgtgattgaaaaaccttgtgtgcctaaa

SEQ ID NO: 21594 - DNA, 514 bp, Zea mays
  Coding DNA Sequence Number=SeqID_7191
cgccgctggattcacttctctaggtgcgcaccggtcagaagagatggcggtccatctgctccttaagaagatcgtgaagaagcgggtcaagcagttcaacaggctccacatcgtccgcttcaagtgccttaagacaagctggcgcaggccaaagggtattgattaccgtgtcaggaggaagttcaagggatgcaccttgatgcccaacattggatatggttctgacaagttgaccaggctctacctcatcagcaagttcaagaagtctgtggtgcacatcgttttttagctggagttgctcattatgcacaacaggacctggtgctctgaaattgctcacagggtgtccaccaagaagcgcaagtagatcgtgtagcgtgttgcccagcttgtcattgtggtccccgttcaagcttgataggctccgcagacaggaggacgagtagtctggtttcttgtcctatagccgaactggtagatagcattccttttgttagggaacgctttagcttgt

SEQ ID NO: 21595 - DNA, 294 bp, Zea mays
  misc_feature (197)..(197): n is a, c, g, or t
  misc_feature (259)..(259): n is a, c, g, or t
  Coding DNA Sequence Number=SeqID_7192
attcacaaagagatactagtccctaccaaagcatacttcctgaaacactcttgcaatccactggagtcctgtttgttgagacttgagacgcatagagctagcgtcgacaatgtcgctcgtgaggcgccagcaacgtgttcgaccccttctccatgggacctctgggacccctttcgacaccatgttccgtcatcgtncccccggggcggggggtctccaccaactccgaggaccgccgccttcgccagcgcccgattcnaactgggaaggagacgcccgagggcgaacggtggt

SEQ ID NO: 21596 - DNA, 334 bp, Zea mays
  misc_feature (26)..(38): n is a, c, g, or t
  Coding DNA Sequence Number=SeqID_7193
cgagcgagtttttgttttctagcgannnnnnnnnnnnntttgttttctgatatgcatccctctcaattctgtcttggatcgctcggcacttggttctgcaccattattcagttcagtacgtatgcacaatggtatttgttacagaatatattttattgtatacctattaagtgtgtgtttgaatgcactatatctaatagctagttggctaaaaaaactactagtaaaattaactaactataaaatatgtagctaattagagcatctccaagagactctttatttttaactctctatttgattctttatttgtctctctggaatattaagctct

SEQ ID NO: 21597 - DNA, 525 bp, Zea mays
  Coding DNA Sequence Number=SeqID_7194
acgaaggcgacgcaggtcagcacacgtcttgcattttcattttttcctcccaccttcggtttgaatccgcgtctccctcgggccgctgcatcctagctgcctctctttagggtttagggatttctcatcaagagcagagctgcacccgtgcggaggagtcgaggcgaagaaggcgacgcaggtcagcaggtcgctgatacacttgaaacagacagagcttgcttctgaagtgctataactcctaaaggatcaggtgtttactctcttccatctactggaaaaatcaagtgggaggatatctaatgtaaagttaatttgaaaagactgcatctacttccagaacagaagtacagaacaatggagtatacgctgctaactgacttagaaccgcacaaaaaacatgcgacaattcaagtgtgtgttaccagaaagtggcttttccgaggtgctaatgataacgctccactgcagcatgttgatatgattctatctgatcaaaagggcaatgctatctatgctgaaatt

SEQ ID NO: 21598 - DNA, 560 bp, Zea mays
  Coding DNA Sequence Number=SeqID_7195
ccctcttcaatgtctggtgctttttgattagctaagtttgctggaatttcagcatagatagcattgcccttttgatcagatagaatcatatcaacatgctgcagtggagcgttatcattagcacctcggaaaagccactttctggtaacacacacttgaattgtcgcatgttttttgtgcggttctaagtcagttagcagcgtatactccattgttctgtacttctgttctggaagtagatgcagtcttttcaaattaactttacattagatatcctcccacttgatttttccagtagatggaagagagtaaacacctgatcctttaggagttatagcacttcagaagcaagctctgtctgtttcaagtgtatcagcgacctgctgacctgcgtcgccttcttcgcctcgactcctccgcacgggtgcagctctgctcttgatgagaaatccctaaaccctaaagagaggcagctaggatgcagcggcccgagggagacgcggattcaaaccgaaggtgggaggaaaaaatgaaaatgcaagacgtgtgctgacctgcgt

SEQ ID NO: 21599 - DNA, 555 bp, Zea mays
  Coding DNA Sequence Number=SeqID_7196
aatcaatggcgtcgttagcctcatctctgcagtctctgaagatctcctcctccccattcacccatggctccactccactctcttctctctccaaacccatttcctttccgaacactaggaagcctggtctagtcccggggataagagccatgaagacgatgcaaggacgcgtcgtgtgcgcaacgaacgacaagacggtggcggtggaagtgacgaggctggctccacacccgaagtacaagaggcgagtgaggatgaagaagaagtatcaggcgcatgaccctgataacgtgttcaaggtgggtgacgttgtgaggcttgaaaagagcagacccatcagtaagactaagtctttcgtcgcacttcctgttctcaagaggaatgatcttgggattccgatggagtctcagcagccgtcgccgccgccaggggaagagtagagattggttgtttatttgtctttgtccaaacttgagttgtaattcagttgaactgttgttgttcttggaatgtgtatttctttttcagttgaactacttgttgtgtgaagactct

SEQ ID NO: 21600 - DNA, 543 bp, Zea mays
  misc_feature (418)..(418): n is a, c, g, or t
  misc_feature (448)..(448): n is a, c, g, or t
  Coding DNA Sequence Number=SeqID_7197
gggtagaccggctttggctgcaaaatgtatccgttgcccctcttccctcctcggcctccgatctccgagatttgaaaccgcctgaaccgccgccgctccgccctaccgtaccgccatgccctccgcagctaccgccatggacaggccgtcatcccgtccatcctgctccaccctccaagccccggaagacctccccgtccccttccccatcaccggtgacggcgcctaagcccaagacccgttggttctagccgccgccgtagcccgctatccgacatcaactcaagggacgcctgggccgcgcgcgagcgccttgggtgcttccgctttttcctcccctccgcctccgcctccgggtccagggccagggccgcgtccaccccgcggaccccgaaggcgcccgactccaggccccggnccgggaccaggaggccgaaccagctcccgngatagggatcgaggactaggggccagaaatgtcccgggaaagcagccgacaatatgtggtcgggaagccaatcggtgcccgtatcaacaaggtcg

SEQ ID NO: 21601 - DNA, 542 bp, Zea mays
  misc_feature (46)..(46): n is a, c, g, or t
  misc_feature (154)..(154): n is a, c, g, or t
  misc_feature (184)..(184): n is a, c, g, or t
  Coding DNA Sequence Number=SeqID_7198
tggaactgatccagctgctcgtccttcgccagccactgcttgttgncgcgggccggcccgaccttgttgatacgggcaccgattggcttcccgaccacatattgtcggctgctttcccgggacatttctggcccctagtcctcgatccctatcncgggagctggttcggcctcctggtcccggnccggggcctggagtcgggcgccttcggggtccgcggggtggacgcggccctggccctggacccggaggcggaggcggaggggaggaaaaagcggaagcacccaaggcgctcgcgcgcggcccaggcgtcccttgagttgatgtcggatagcgggctacggcggcggctagaaccaacgggtcttgggcttaggcgccgtcaccggtgatggggaaggggacggggaggtcttccggggcttggagggtggagcaggatggacgggatgacggcctgtccatggcggtagctgcggagggcatggcggtacggtagggcggagcggcggcggttcaggcggtttcaaatctcggagatc

SEQ ID NO: 21602 - DNA, 511 bp, Zea mays
  Coding DNA Sequence Number=SeqID_7199
aagacacctctaagaatacttctcacaatcacgagactgagatgtcggatgaaatacctccgaaagggatcctcaagagcgaagctctgagacagtacatcttggagacctcagcatatccaagagagcatgagctgctcaaggagcttcggaaagtaacagaagagaaatttgggaacttaatcgagatggtgattccagtggatgagggcatttttctatcgatgcttttaaagatcataaacgctaagaacactcttgagctcggtgttttcactggttactctcttctcaccacggcccttgctttgcctgaagatggtcgcattactgcaattgatattgacaaggaagcctatgaagtgcgattagagtttatgaagaaagcaggtgttgatcacaagatcaatttcatctattgcgatggcatggaggtcttacacaaattggttaacgacaaccaggagtttgatttcatatttgctgatgctgacaagccaaactacctcaa

SEQ ID NO: 21603 - DNA, 513 bp, Zea mays
  misc_feature (425)..(425): n is a, c, g, or t
  Coding DNA Sequence Number=SeqID_7200
caaaaatgattcaccactgctccatcacgaaacccactttctcagttccgatcccttcacacaagcatcgtcattccacaaccttctcgaatctgactttcagaatccgatgcgagtccaaggatgtctcgtcgatgcggaccaatgcgttttctttgtcgtcggagatggagtctgaagtgaaaaagagcgatctttacccaggggggatgccaaagatgggtcctttcacagggagggatccgaacgtgaagaagcctgcttggctgagacaaaaggcgccacagggagagaggtttcagagaggtgaaggagtcgttgactcgtctcaagctcaacactgttttgtgaggaagctcagtgtcctaatataggcgagtgttggaatggaaggtggagatggtatagcaactgcgaccatcatnggttctgggtgatacttgtactaccccaggtggggtgtagactacttagttataaccagcgtagaaccgtgacgatctaccggatggt

SEQ ID NO: 21604 - DNA, 545 bp, Zea mays
  Coding DNA Sequence Number=SeqID_7201
gtcgagttccaatggcatctcttcactccctcgccgccgtttctgtaatcgctactaaaggaacagcagttacttcgtcttgttcctcaactctacgccctctttcatctctacgatttaaaccacgcgagctctctatattcccaaaccatcgcaaaggcaaagggggagcaataaaggcgcagtcgaaagaagcaagtcttcctcctcctactgtgggagagggagatgcattaactagtatgaagcatcttctcctgcctgtgattgatcgcaatccttatctctctgaaggcacccgacaggctgctgctacaaccactagtttggcaaccaagtatggagctgatatcactggtgtagtcatagacgaagaaaaaagagagtcatcttccgagcacgagacctcaagtatccaacatccggtggcatcttagcagaaggtggtttcgaggagttcaagctgttggagagccttggggaagggaaaaaggcactgccgttataggagggggggcggtaactgggacctgcctggaaggatg

SEQ ID NO: 21605 - DNA, 533 bp, Zea mays
  Coding DNA Sequence Number=SeqID_7202
gaggatctcgttccgagtcctgaccaccgctgtgccgcaatcctaccccttcgccgcaccgcagccacccttttttgtaggtttgattgttcgtccatcgtctgacgggggagctgcacgatggtccatttacggtctcccatccattccttgttttctcgtcggattttgatttcgattctcactttttgtcgcttgatctgactgactgaaggctgtgatgaccaaaaacccctacctattttctgactcctgacgatagaaaccaatggatccttctgagcctttattaagatctcgcttttctgtttgattaatcttcgttttttctctggttctgttgtcatctgatatttttttatccccaaaaaatgcacgagggtaggatttgccttgttgataggatgataagccttgacggaaactttcagtgttgacccaaaatatcagactacaactatctgatcgactccaaattcttaccttttgaacttgttcgtagtatttattttgctctcgaagccgaacgtcgc

SEQ ID NO: 21606 - DNA, 519 bp, Zea mays
  Coding DNA Sequence Number=SeqID_7203
acacaacgcatacaaagttgaagaaaatacaaacggcgacgttcggcttcgagagcaaaataaatactacgaacaagttcaaaaggtaagaatttggagtcgatcagatagttgtagtctgatattttgggtcaacactgaaagtttccgtcaaggcttatcatcctatcaacaaggcaaatcctaccctcgtgcattttttggggataaaaaaatatcagatgacaacagaaccagagaaaaaacgaagattaatcaaacagaaaagcgagatcttaataaaggctcagaaggatccattggtttctatcgtcaggagtcagaaaataggtaggggtttttggtcatcacagccttcagtcagtcagatcaagcgacaaaaagtgagaatcgaaatcaaaatccgacgagaaaacaaggaatggatgggagaccgtaaatggaccatcgtgcagctcccccgtcagacgatggacgaacaatcaaacctacaaaaaagggtggctgcggtgcggcgaa

SEQ ID NO: 21607 - DNA, 558 bp, Zea mays
  Coding DNA Sequence Number=SeqID_7204
gaacaatacacataccaaggctcatgcattgatacattatccattatgaaacaaacagcaaaacctattacagatatactagcaggtttgtagctaaggcttaactgtcctctattccaaccccaccaaattaaacacctgaattcattagtatgttgattgaaaggtgaaaaattattattaagtccaatattctcaactggacatttacaagagaaaacattaaagatggcattcaaagcaattacaggttttaggggtgaaggaacaaaagccaaaaggtctattgggaatgttgcaattgatggcatagcaacatggagagggcaagcagatccctttggctccaccacagcagttgcatagtgcacatatctggaagcttcccaatttccttctgctctcattcatcatcatcatcatttgcatggaagttgcaccaccatttgccagattcacattgggtaaaaaaatagacaccaaaatgagagagatgatgatgaggccatgagcatgagcatgagcagaagagggcatcttgacaagtgcttcttctta

SEQ ID NO: 21608 - DNA, 569 bp, Zea mays
  Coding DNA Sequence Number=SeqID_7205
tccactttccacacaaacctaagaagaagcacttgtcaagatgccctcttctgctcatgctcatgctcatggcctcatcatcatctctctcattttggtgtctatttttttacccaatgtgaatctggcaaatggtggtgcaacttccatgcaaatgatgatgatgatgaatgagagcagaaggaaattgggaagcttccagatatgtgcactatgcaactgctgtggtggagccaaagggatctgcttgccctctccatgttgctatgccatcaattgcaacattcccaatagaccttttggcttttgttccttcacccctaaaacctgtaattgctttgaatgccatctttaatgttttctcttgtaaatgtccagttgagaatattggacttaataataatttttcacctttcaatcaacatactaatgaattcaggtgtttaatttggtggggttggaatagaggacagttaagccttagctacaaacctgctagtatatctgtaataggttttgctgtttgtttcataatggataatgtatcaatgcatgagccttggtatgtg

SEQ ID NO: 21609 - DNA, 581 bp, Zea mays
  misc_feature (296)..(296): n is a, c, g, or t
  Coding DNA Sequence Number=SeqID_7206
ctctcttgaacccaacaaagtggaacaagcagcatttgccagaaactacatgaactatttggtgccagcattgatgaagatcaaggaaagaagcacttcatcagatcaacatagtggctattgtgatgacaatattcagaatgttgtcaagtatgaagtggacatggcaatggtgcactcagcccaaggttttgcatggagtaatgctctaagtgtgaagcttcaaagagatagagtcaatgtagattgtgacaccactagctttggtgaaggttcatcatcatcaagggtttgtngccaaaattgtgaaatggtgccgttggataatttcccttcaaaccctagtttgaaatctaataacaagtgcaaggaaatgcctgaaatgaaaaggggtttgagagaagatgatgatggtgatgaagatgaagtcatcaatggtcaattgaagagcctaagaaggttgatgccgggtggagaagagatgtgtagtgaacaaatggtgacagaactacaaagctatgtaagctgtttgcaaatgcaggtgaacattcttcggtgcctcgcggagacacattgattga

SEQ ID NO: 21610 - DNA, 549 bp, Zea mays
  misc_feature (215)..(215): n is a, c, g, or t
  Coding DNA Sequence Number=SeqID_7207
agttctgtcaccatttgttcactacacatctcttctccacccggcatcaaccttcttaggctcttcaattgaccattgatgacttcatcttcatcaccatcatcatcttctctcaaaccccttttcatttcaggcatttccttgcacttgttattagatttcaaactagggtttgaagggaaattatccaacggcaccatttcacaattttggcnacaaacccttgatgatgatgaaccttcaccaaagctagtggtgtcacaatctacattgactctatctctttgaagcttcacacttagagcattactccatgcaaaaccttgggctgagtgcaccattgccatgtccacttcatacttgacaacattctgaatattgtcatcacaatagccactatgttgatctgatgaagtgcttctttccttgatcttcatcaatgctggcaccaaatagttcatgtagtttctggcaaatgctgcttgttccactttgttgggttcaagagagtacacacgtctgcgtttagcaggttgaccctccatgtaa

SEQ ID NO: 21611 - DNA, 302 bp, Zea mays
  Coding DNA Sequence Number=SeqID_7208
acggaaaatggaactggtgcggattagtattatgaaactgtatcagtataaaaaataacaatgagcaagaacgacatggtgtaggatcaccctggatgttattttcggaaaatctattcccaaggctcaggctcggtattggaattgaatctagagttgtatgcctggaccgggatggagttgtaccgatccctacaatgaatctttgttgtggatctatacacagtaaggggtcacaatgatgtatgaccaggccgccgccaccacccgggggccgaagtgatcccgccatatgaatccac

SEQ ID NO: 21612 - DNA, 293 bp, Zea mays
  Coding DNA Sequence Number=SeqID_7209
ttcatatggcgggatcacttcggcccccgggtggtggcggcggcctggtcatacatcattgtgaccccttactgtgtatagatccacaacaaagattcattgtagggatcggtacaactccatcccggtccaggcatacaactctagattcaattccaataccgagcctgagccttgggaatagattttccgaaaataacatccagggtgatcctacaccatgtcgttcttgctcattgttattttttatactgatacagtttcataatactaatccgcaccagttccatttt

SEQ ID NO: 21613 - DNA, 395 bp, Zea mays
  misc_feature (66)..(70): n is a, c, g, or t
  misc_feature (203)..(206): n is a, c, g, or t
  Coding DNA Sequence Number=SeqID_7210
tttaccaacccaaaatctcatgtgtaccctttgtccagtttacaaaacccaggggtatccaaaggnnnnncaagactaaattaagttttaccaaaaattcttacggcaaacacctcagggatgtacggagccccgttttcaccatactggggggggaagaaatttaaagtatcacggaatggctttgcttttctggagggcannnnattttctaatttgttttgtgcgggcgagggggcaatcaaagggatacagcaaaaacttctttgggccgggttgtaacacaaaaaaaataatttggggaggttatttttccagcttcttcaaactagggaattgctctcccaggtgcgcctcaaggaaagtttgagtatcaggggccaaagttttcgcaa

SEQ ID NO: 21614 - DNA, 397 bp, Zea mays
  misc_feature (192)..(195): n is a, c, g, or t
  misc_feature (328)..(332): n is a, c, g, or t
  Coding DNA Sequence Number=SeqID_7211
ttttgcgaaaactttggcccctgatactcaaactttccttgaggcgcacctgggagagcaattccctagtttgaagaagctggaaaaataacctccccaaattattttttttgtgttacaacccggcccaaagaagtttttgctgtatccctttgattgccccctcgcccgcacaaaacaaattagaaaatnnnntgccctccagaaaagcaaagccattccgtgatactttaaatttcttccccccccagtatggtgaaaacggggctccgtacatccctgaggtgtttgccgtaagaatttttggtaaaacttaatttagtcttgnnnnncctttggatacccctgggttttgtaaactggacaaagggtacacatgagattttgggttggtaaa

SEQ ID NO: 21615 - DNA, 567 bp, Zea mays
  Coding DNA Sequence Number=SeqID_7212
gcttttgctgaacaattgcgactcaaagatgagaaattagaggcatttcggtggcagttgttgagaacagaattagaaatgaaacagatgcgggcacatgtggaggggcaggtaaaggatgtgacacagcttagacatgacaagatgagactggagaccttactgttggagagagaagatgaactgacttccctgaaagagcaatttgtatcaaaattgaggcccttaaaaaataactcaaatttgcctccacaatcatcagaactagcacaatatgctgtctggtcaagagtcaaggttgtcaagagaaaaccaggtgaaaaagtgctagaaacaatggaaactttggttgaggaagattgtgagaaggaagtacagtgtctgccccatgaccagcttaacagtgctaatttactagttcaatctcaagaaaatgagattgaagaagaaaagggtgtttctagggaggatagtcctactcctatgcaaaatcaaagtccaaacaaagtagaagctgatgcttctgaaaagatagcatctaccagccagacccttagtacaacaaaa

SEQ ID NO: 21616 - DNA, 555 bp, Zea mays
  Coding DNA Sequence Number=SeqID_7213
gatccatcttccatagggactgttttgttgtactaagggtctggctggtagatgctatcttttcagaagcatcagcttctactttgtttggactttgattttgcataggagtaggactatcctccctagaaacacccttttcttcttcaatctcattttcttgagattgaactagtaaattagcactgttaagctggtcatggggcagacactgtacttccttctcacaatcttcctcaaccaaagtttccattgtttctagcactttttcacctggttttctcttgacaaccttgactcttgaccagacagcatattgtgctagttctgatgattgtggaggcaaatttgagttattttttaagggcctcaattttgatacaaattgctctttcagggaagtcagttcatcttctctctccaacagtaaggtctccagtctcatcttgtcatgtctaagctgtgtcacatcctttacctgcccctccacatgtgcccgcatctgtttcatttctaattctgttctcaacaactgccaccgaaatgcctctaatt

SEQ ID NO: 21617 - DNA, 445 bp, Zea mays
  Coding DNA Sequence Number=SeqID_7214
gatagggaccaagccgcaaggaactcggtcgtcattaatttcaataaatactattaagtcacctgccttgtctacaacctaaggcaacatgaaagtactacaaacactattgatcttatcaggaatttaacagtgtcagcactagtacaaagattgtcctagtttgggttcttctgcagattctccacataacaatctgcatgtttagattgcattggtgtgtaatgaaaaccacaatttgccacataactctcatttgaggttggcgtgtcctgtaaaccagggtaatcctacttgaggacactgttttgtgtctgctatcggaacaataggacccagaaagatgcgccacaaatcaagtattattgtgaccagcattgcagctcccaaagcatcaacagccactctaggcaagtcccatttatcgccaggtttctcatctatc

SEQ ID NO: 21618 - DNA, 483 bp, Zea mays
  Coding DNA Sequence Number=SeqID_7215
tactttattgtgagcttcccaatgtttttaaggatagatgagaaacctggcgataaatgggacttgcctagagtggctgttgatgctttgggagctgcaatgctggtcacaataatacttgatttgtggcgcatctttctgggtcctattgttccgatagcagacacaaaacagtgtcctcaagtaggattaccctggtttacaggacacgccaacctcaaatgagagttatgtggcaaattgtggttttcattacacaccaatgcaatctaaacatgcagattgttatgtggagaatctgcagaagaacccaaactaggacaatctttgtactagtgctgacactgttaaattcctgataagatcaatagtgtttgtagtactttcatgttgccttaggttgtagacaaggcaggtgacttaatagtatttattgaaattaatgacgaccgagttccttgcggcttggtccctatccttttt

SEQ ID NO: 21619 - DNA, 465 bp, Zea mays
  Coding DNA Sequence Number=SeqID_7216
gtaaccctaatgagaacaaccctgccggtggcaaagaggtggatagtgggcactccaaactttgtgcaagagggcattggagacctgctgaagattccaagctcaaggagcttgtggctcttcatggccctcagaattggaacctcatagctgaaaaactagaaggaagatcagggaagagttgtaggctgaggtggttcaaccagttggatccaaggatcaacagaagagcattcagtgaagaagaagaagagaggctaatgcaggcacatagaatttatgggaacaaatgggccatgattgcaaggctttttcctgggagaacagataatgcagtgaagaatcactggcatgttataatggccaggaagtacagggaacaatccagtgcttacaggaggaggagaatgagccaacctgtgtacagaagagtggatcaaaatccaacctttgtttgcagcagca

SEQ ID NO: 21620 - DNA, 546 bp, Zea mays
  Coding DNA Sequence Number=SeqID_7217
aaaatcatcatctttctaatacggaattatttagggtttattgtcgtttgaatcttcttctactattgccatggatatagaagaaactaatataattgaagttgaaacgaaggtgatgaatctagcgctaaacatggagtctatgaacattctctcaatccgtgtacacaatctgattgaagattttaccgaagacgtgattttacatataagatcacgttacatccgcttggagccacacggcttcacgccaagtcatatctctgaactccttcgtggccaccaagttgatgaatctcaccacataggtggaaaagatcgctaatgaaatcaatcgttcacttagcaatgattaaaactctccgagagcctgtcttcgggaaacggtcgaagttggattcgccaaagagaggcggtttgggttgggcccgccggatgtccctgcttccattgaagttttaacggaggggggggggaagaacttttagggggtttgaacggaaataaagaagctttgtgttcaatttgcatcgaggatttgtccaa

SEQ ID NO: 21621 - DNA, 471 bp, Zea mays
  Coding DNA Sequence Number=SeqID_7218
aatgatgctttgttgactcttggacaaatcctcgatgcaaattgaacacaaagcttctttatttccgttcaaaccccctaaaagttcttcccccccccctccgttaaaacttcaatggaagcagggacatccggcgggcccaacccaaaccgcctctctttggcgaatccaacttcgaccgtttcccgaagacaggctctcggagagttttaatcattgctaagtgaacgattgatttcattagcgatcttttccacctatgtggtgagattcatcaacttggtggccacgaaggagttcagagatatgacttggcgtgaagccgtgtggctccaagcggatgtaacgtgatcttatatgtaaaatcacgtcttcggtaaaatcttcaatcagattgtgtacacggattgagagaatgttcatagactccatgtttagcgctagattcatcaccttcgtttcaacttcaat

SEQ ID NO: 21622 - DNA, 532 bp, Zea mays
  misc_feature (249)..(249): n is a, c, g, or t
  Coding DNA Sequence Number=SeqID_7219
gtccctcacaatgcagctagcaatggcggccaacgctgtcgtttcaccgtcgccgttccgacctcagccctttctccggtcatccttctccggcgtctccgtcaagctcactccccaatccataacgctttcacgctccaagcccctcaccgtcttcgccgccaccaagagggccgtcgccgtcctcaaggggacctcccgccgtcgaaggcgtcgccactctcatccaagaagacgatggcccgacgnacagtttctgttcgcatcactggccttactccggggccttcatgggttttcacctaacatgagtatggtgatacgaccaaatggggtgttatttctacggggagcacatttttaatcctaataaatttgacacatggtgctcctggagggatgaagtcccgccatggcgggtgacctgggaaacatagttgctatggcgaagggggggtttgcagagggctacaattggtggataatcagataccactctcctggccccaattcagtaagttggaagaaccct

SEQ ID NO: 21623 - DNA, 527 bp, Zea mays
  misc_feature (284)..(284): n is a, c, g, or t
  Coding DNA Sequence Number=SeqID_7220
agggttcttccaacttactgaattggggccaggagagtggtatctgattatccaccaattgtagccctctgcaaacccccccttcgccatagcaactatgtttcccaggtcacccgccatggcgggacttcatccctccaggagcaccatgtgtcaaatttattaggattaaaaatgtgctccccgtagaaataacaccccatttggtcgtatcaccatactcatgttaggtgaaaacccatgaaggccccggagtaaggccagtgatgcgaacagaaactgtncgtcgggccatcgtcttcttggatgagagtggcgacgccttcgacggcgggaggtccccttgaggacggcgacggccctcttggtggcggcgaagacggtgaggggcttggagcgtgaaagcgttatggattggggagtgagcttgacggagacgccggagaaggatgaccggagaaagggctgaggtcggaacggcgacggtgaaacgacagcgttggccgccattgctagctgcattgtga

SEQ ID NO: 21624 - DNA, 534 bp, Zea mays
  Coding DNA Sequence Number=SeqID_7221
aagtttgttcttgtatcatctgtgtgcagcatggcgctgccagttccccgctgctagcctcgtcgccgtcgccatggcaatgggcaccgccacgatctcttgctcttatccacagctccggtatcgcccctctcctccatgccggcgccacggccccgcagcggccaccgtggccgccttggcgacgccgcggtcggagcaggacatcgtcatcgtcggcgcggccgtcgcggggctggcccccgcggtgccgctgcggcggctcggcgtgggcgccgccgtgctggagcagggcgaccccctgcgcgcgggcggcacctccctgacgctggtcaagaacgggtgagcgcgtgctggacgccatccgcgtcgccgacgagctccgccccaagtacctccgcatcccggggtgcgtccctcttccccctggtgcgtcccccttccagcaagatgccgctcgcggatcatccctgtgtggtctgagctgcaccgtgaggttccagctggcccccgcaggatgatggtgaggtcccc

SEQ ID NO: 21625 - DNA, 514 bp, Zea mays
  Coding DNA Sequence Number=SeqID_7222
gcagtccccgggaggttcctcgtcgaaggagaactcgggcagattccgccccggggacctcaccatcatcctgcgggggccagctggaacctcacggtgcagctcagaccacacagggatgatccgcgagcggcatcttgctggaagggggacgcaccagggggaagagggacgcaccccgggatgcggaggtacttggggcggagctcgtcggcgacgcggatggcgtccagcacgcgctcacccgttcttgaccagcgtcagggaggtgccgcccgcgcgcagggggtcgccctgctccagcacggcggcgcccacgccgagccgccgcagcggcaccgcgggggccagccccgcgacggccgcgccgacgatgacgatgtcctgctccgaccgcggcgtcgccaaggcggccacggtggccgctgcggggccgtggcgccggcatggaggagaggggcgataccggagctgtggataagagcaagagatcgtggcggtgcccattgccatg

SEQ ID NO: 21626 - DNA, 541 bp, Zea mays
  Coding DNA Sequence Number=SeqID_7223
ccgagctaggcaggaacggcaacgcgcgcgcgcggtggaacccggtgtgcgacaggttcggctccttctgccgccgcggcggcgccgcgctggcgtcgtcgttcgtcggcgtcgcgctcatgctggcgctcaacctgctctcagccgcgtccggtgccgggtgctagctccgcgggccagtgagtggcccgtgccgtcccagacagctctgtactcatgaggggccgtgggggagctgaatcgcggcgtgaaactggagttctgccggtgcacgtttggtgtagaattatttgcatttcttcaacatgtgagtttgaaatgggtttcttggttcttacaaaaaaaaaacataatgaaccatgtcatacctctgcatctgaatgtaagtcaacacaaatgttgccttatccgctcagaagcaagaggtgtcgtggtgtagttggttatcacgtcagtctaacacactgaaggtctccggttcgaacccgggcgacgccatgttttgtttgtttatttttttgtgccctgttttgcgttgtcg

SEQ ID NO: 21627 - DNA, 558 bp, Zea mays
  misc_feature (299)..(299): n is a, c, g, or t
  misc_feature (377)..(377): n is a, c, g, or t
  Coding DNA Sequence Number=SeqID_7224
tagcggatttgtgcgctaagcgaccccctagcggtgctacacgtggggaaagagatggcggagatgatggggtattactcaccgacggtcgagcggtgaagaggcccatccacgaggtagtgcggcccgacggtgaaattgttgtgctgacgagcaattaccggttcccggatcgccaccagagcccggagaccccacgcagaccaccagtgcacccaaatgattccccagaagcgcccggcgaggccccgtcggtggtggttgtgtgttgccgcgttggcggaacaagtggcaatggnccgcggccgaagtcttctccgaggcggctatggagggcacgactgcttggctagtgctaaacgagagggcaagggaanggagggtggtgacgtcaattcttcccatataagggccgaggcgatagggaaccggtttggtcagctccgcccgggaaggacctccgcgtgaaccgcgcgggtttgggtagaccggcgtaaacccgttgaggaacgcgatgggcacccgggagatccgctattgaaaaattccgccccatcc

SEQ ID NO: 21628 - DNA, 548 bp, Zea mays
  misc_feature (172)..(172): n is a, c, g, or t
  misc_feature (250)..(250): n is a, c, g, or t
  Coding DNA Sequence Number=SeqID_7225
gaatttttcaatagcggatctcccgggtgcccatcgcgttcctcaacgggtttacgccggtctacccaaacccgcgcggttcacgcggaggtccttcccgggcggagctgaccaaaccggttccctatcgcctcggcccttatatgggaagaattgacgtcaccaccctccnttcccttgccctctcgtttagcactagccaagcagtcgtgccctccatagccgcctcggagaagacttcggccgcggnccattgccacttgttccgccaacgcggcaacacacaaccaccaccgacggggcctcgccgggcgcttctggggaatcatttgggtgcactggtggtctgcgtggggtctccgggctctggtggcgatccgggaaccggtaattgctcgtcagcacaacaatttcaccgtcgggccgcactacctcgtggatgggcctcttcaccgctcgaccgtcggtgagtaataccccatcatctccgccatctctttccccacgtgtagcaccgctagggggtcgcttagcgcacaaatccgcta

SEQ ID NO: 21629 - DNA, 439 bp, Zea mays
  Coding DNA Sequence Number=SeqID_7226
tgtgccacaggagcacgatgtgaatgcgaagtgggacgcatgtatcgatctcacgacccgccgtttcgtctactcctcactcggcggcgccttcgccggtcttctcttcttcaggagtcctgtaacaagatgggcatcgattgcttttggtgctggacttggtattggttctgcatacactgactgctctcgtgcttttgatgctccgccttcattcacagagacttcttctgtatctcagactgtatctcagtctgcagacgaatagacgaacgatgaaagtaagtgaatccatgcggaaaacagagccatcacaccaatgatttggtgaattcgtttcctaaaacctgtaaggaacaagtcttttgagattaacgctgaattgtaaaacctggttttccttctggtaaatccttttagaaccgctggacttcagtcc

SEQ ID NO: 21630 - DNA, 490 bp, Zea mays
  misc_feature (336)..(337): n is a, c, g, or t
  misc_feature (342)..(342): n is a, c, g, or t
  misc_feature (346)..(346): n is a, c, g, or t
  Coding DNA Sequence Number=SeqID_7227
gcacgttcctctctctaccgtgttgcccgtcccgtgcccctgtcgcgatagatggctcgcggcccccaacgacgacgaccgcgccgccatgaccaccaccaccacgcccacggcggtggcggtcgtgaacgtggtcgcagttgcgcagctctacgtcgggcctccacctgcgcgcgtccctccacctcgcccgtggccacgaaatcctcttccatggaatcgtcgcgcatcctcctccacctcgaccgccgcggccgattcccaccgccaccacgccgcgcacgccccgtccctcggtcccccgtccgcctcttccctgcccctaccccccgcgtnnaccgngctnctcggccctcctaacatcgtcgtctccatctagggcgacaagcgatgcacggtttcaaggtcaaccgggccacgcccgtgggaaggggaatggggccacgaatttcttttcaaatggaaaatcttgaggaaccgccttgaaagg

SEQ ID NO: 21631 - DNA, 591 bp, Zea mays
  misc_feature (338)..(338): n is a, c, g, or t
  Coding DNA Sequence Number=SeqID_7228
ccagtcccaaatacgcaaacggcaaatcagccgccgccccctcccgacctgcaggctgcacgcagcggctgcagcagctcccatctccggctccggtgaccggcgtcccccctcctcgcccagggccagagccgccccttctcgacctgcaggctgcaagcagcggagccagggccagagccgcgacccccggtgaccggcgccccgcgcccccagtcccccacggctgacggccccactgccacctgccaggcgctcccgccgcctccctttcccggctcatccaccgttaaccggcgtccggcggtccgccgggacctggacgtgccgcgtgcggncccaacgccctaagcccccaatccaggaatcagcgaccagccgaccacagcagccagcagagaagggaagacgaagaaccaaagaagtgaagaacagatcgagaaactgataaaaagaaaggtagatagatggggaagcgcaagcccatgccttccgcccgcgctcgaggaccgaagaaccgcccaaagaggcaaagtctgggaagcagggagctgagctacgggaacaaaatctccactgccggaacatgaa

SEQ ID NO: 21632 - DNA, 600 bp, Zea mays
  misc_feature (274)..(274): n is a, c, g, or t
  Coding DNA Sequence Number=SeqID_7229
gatccagtctataattcgtattcatgttccggcagtggagattttgttcccgtagctcagctccctgcttcccagactttgcctctttgggcggttcttcggtcctcgagcgcgggcggaaggcatgggcttgcgcttccccatctatctacctttctttttatcagtttctcgatctgttcttcacttctttggttcttcgtcttcccttctctgctggctgctgtggtcggctggtcgctgattcctggattgggggcttagggcgttgggnccgcacgcggcacgtccaggtcccggcggaccgccggacgccggttaacggtggatgagccgggaaagggaggcggcgggagcgcctggcaggtggcagtggggccgtcagccgtgggggactgggggcgcggggcgccggtcaccgggggtcgcggctctggccctggctccgctgcttgcagcctgcaggtcgagaaggggcggctctggccctgggcgaggaggggggacgccggtcaccggagccggagatgggagctgctgcagccgctgcgtgcagcctgcaggtcgggagggggcggcggctgatttgccgtttgcgta

SEQ ID NO: 21633 - DNA, 170 bp, Zea mays
  misc_feature (64)..(64): n is a, c, g, or t
  misc_feature (122)..(122): n is a, c, g, or t
  Coding DNA Sequence Number=SeqID_7230
tcttcttttccttttgcagctatattgaccatatcttcgatcatgagtaggcctccaaaggagncctttcatgtgcttcccaagaagtgggagatttggactaccttttggaacatgagttnctaccacgggatcatgcaatcaaaagtgcagctactgatcttttgaag

SEQ ID NO: 21634 - DNA, 477 bp, Zea mays
  Coding DNA Sequence Number=SeqID_7231
aagtgctctctcagatagggatctcaacgcagcagcagcacaaaccctaatttcgagaaagaggagattcgatttctaaaaaaatggcgtacgcttctcgtttcctctccagatctaagcagctacgagggagtttagtcattttgcagcagcaccatgctattcccgtccgcgcttttgccaaggaagctgctcgtcctacttttaaaggagatgagatgttgaagggtgtctttacggagatcaagaacaactttctggctgcagtggatattctccgtaaggagaagatcacccttgatcctgaagaccctgctgcggtcaaacagtatgctaatgtcatgaagaccatcaggcagaaggcagacatgttctccgaatctcagcgcatcacatatgatattgagaacgagactaaggagatcccagatgctcgtgcttccctcttggaagttgaaggatatccgcacccaggag

SEQ ID NO: 21635 - DNA, 256 bp, Zea mays
  Coding DNA Sequence Number=SeqID_7232
tcgcacacgccaaaaagaaaggataagcagacagcggcgctttgctgtccacttgcagtcttgcaggacgccatggcggtgatgttcctggacgcttcatcttttgttattctagacatttttcttgcatcgattgatggcgtgtcttgtccacatctagcactatgagtccacaacaattctctgcaggcatcggcatcggggctgctggtcgttgggccgcgcccgcgcgacacgctgtagcagcgcgctgcta

SEQ ID NO: 21636 - DNA, 561 bp, Zea mays
  misc_feature (95)..(95): n is a, c, g, or t
  Coding DNA Sequence Number=SeqID_7233
gcaatatcagccctctgattctttcacgggcggagaagatcgctcgccgttgtcggtcgcgcgtagacccgcgaagtattgggcgattgtggccnccgcacttgcctccccaagagatagcaattagacatgtcggcgtgtttggtcaaccattcttctttcctcgctgctgtctcggataaactccaaggccttccgccgcgtcgtcatacgccgccgggagacggtgctccggcgcgaggcggtattcgacagaggccaccacggcgggggacggcggcggaccaggcggcgcagaagtcgtggaacatagtggaggcggcgctggttacgatgaagccgctgccgtggaagaaaacgatgagaggtagcttctcagggtttggggatagtgctattcgggggaggaataagcggagctatgtgttgttttgttggttgatggtgatgtctttggtgagaactgggagagtggggtcggaagagggtgcggtgctgggaatatggcgcaagcgatttagggttccgttagggttgagaactatgttgatgtggcgaaag

SEQ ID NO: 21637 - DNA, 543 bp, Zea mays
  Coding DNA Sequence Number=SeqID_7234
aacaatggcgattctctgttcgtcttcggcagttatactcccttcttcttcttcggtgaaaacctccggatgtaacagaaggtcttcgttcttaggcttctctctaaatgctatctcaaagccgccggttcgagtcgccactaacgcgaacacgaagaggggagtgcaggtgaagtgcgaagccgagcagacaactactacttccctcgttcctgcaaaccaacggtggatgttcgacgaagaggaagcaaatggccctgacatctggaacacaacatggtacccaaaggcttcagaccatgtgaacacggacaagccctggtatgtggtcgatgcaaccgacaagattctgggaaggttagcatcaaccattgctaatcacatccgtgggaagaaccttgcctcctacactcccagtgtcgacatgggagcctttgtcattgtggtgaatgctgagaaagtggctgtgtctggaaagaaaggaaccaaaagctgtacaggaggcattcaggacgacctggccgcatgacagtggaaaccttt

SEQ ID NO: 21638 - DNA, 497 bp, Zea mays
  Coding DNA Sequence Number=SeqID_7235
ccgtcgctcagatccgtcaagtgaaacatgttatttgcagcagaaggtggaggcttcttctcttcatcagcttctgggtacatcaacggtttagcccttcttctactaggccacaaggatgaacccaaacctgtaatagtatccccgtggagacattatcatttggtagtcgaagaaaccgataccaagtttcaattagattcctctaagaaatggctctcacgtgcctgcacttcccttacatgctttggtcgcaaatctgatagacccgaaaatccttctcaaccacaagatttcccttctgacaagagggatgatgcccaacagagtgtggactatgaatgtagtaataggtttgcacttaagagcagcctgaagaaaagatcatttagcgatgctcttcttgctgatgaagaggatgatgatgtgagtagagataatggtgcgttgaatcatgctgacagaagggaagtccagtggcctgacacttgtggtat

SEQ ID NO: 21639 - DNA, 511 bp, Zea mays
  Coding DNA Sequence Number=SeqID_7236
gacctgagattcacgacacacaacaaatcatcatgtggagaagaatacgtatcctctcatctcaaagccctagccgccgatgtcgccgctgcttctcctcgtcgttcgatagccaccaccaccaccgcgagacccgtccacttccatcgcgctgacaatcccgcttcttcttcttccgtcacccctcgctgtttcagctccgaatcagtagagacgatagcgaagaagaaggtggaggatgttatgcccattgcaactgggcacgagaaggaggagcttgaagctgaacttgaggggaggaggctgcttgacattgacttccccgaaggtccttttggaactaaggaagctcctgctatagtaaagtcctactatgacaagagaattgtgggatgccctggtggtgaaggcgaggatgaacacgacgttgtgtgggtctggctggagaaaggaaagtcttttgaatgccccggttgcacacagtactttgagctagaagtggttggcccag

SEQ ID NO: 21640 - DNA, 198 bp, Zea mays
  Coding DNA Sequence Number=SeqID_7237
gccgacctgatgctggtttgctcctttttggttatccagaggcatgtacttaaccatgatggcccggatctttgaatccatgtaactccgcagcctgtatttggacccagcgtatgctccaaccccggcaaaaacaagtccaaaaaaaataacccagaggaagctccagccaacagtaggccggccaagatgaaaccg

SEQ ID NO: 21641 - DNA, 197 bp, Zea mays
  Coding DNA Sequence Number=SeqID_7238
gtactatgcagctggctatggacagtgattttgaagggaataacgttgaactttacactcgtatatcaatctagctatgattacaacaaacaatagcctctggagcaacaaaatatctagactgccaatccgcatatgcaacatcaaaagtaaagacctttatatgtgtatctatatatcaccgtccgtgcttgcca

SEQ ID NO: 21642 - DNA, 220 bp, Zea mays
  Coding DNA Sequence Number=SeqID_7239
tactatgaacggtcatcttcaattcctctgaagccggttgttcttgatgagaccataggcatggcaagcacggacggtgatatatagatacacatataaaggtctttacttttgatgttgcatatgcggattggcagtctagatattttgttgctccagaggctattgtttgttgtaatcatagctagattgatatacgagtgtaaagttcaacgttatt

SEQ ID NO: 21643 - DNA, 351 bp, Zea mays
  Coding DNA Sequence Number=SeqID_7240
ctccgtgacggcgtaagctacaagaacaagaggctctttcatatcctttacttgccctaaaccatgtcgaggagaaagacgagagagcctaaagaggagacagtgacacttggaccagctgttcgtgatggagagcaagtcttcggtgttgtccacatcttcgcttcattcaacgacactttcatccacgttactgatttgtctggacgtgaaacccttgtccgtatcaccggtggaatgaaggtgaaagctgacagggacgagtcgtctccatacgcagctatgcttgctgcacaagacgttgctcagagatgcaaggagcttggaatcactgctatgcacgtgaagctc

SEQ ID NO: 21644 - DNA, 359 bp, Zea mays
  Coding DNA Sequence Number=SeqID_7241
gaagctgtgggatgactggatccattaaggacccagaagaggctgcaatgatgctcttccttaaggcgcacaagagggagagcaaagacaacataactagcgtcgtcgtaaggttcttgcatgggcaaggtagcaggggatacgctccctgcgtgcatgggcaagttattttacgcagtgttgtactctgatgtacatgcgaaattttttttccccgtgttaaatggagaaacgtaactacgtaaggtaggaaacttgtattatgatgggttaatgtgggaaatgcgtgtaccgtaaggtatatatatatactttagtgtggtggcggacgatgggaaggtctgaagctagtgttgtat

SEQ ID NO: 21645 - DNA, 146 bp, Zea mays
  Coding DNA Sequence Number=SeqID_7242
tgctgatggtaatcgagatcgcacgcgtccccccccccgccctgtgtcgatggtagtcgccgtcacaagatccgcgtccagcgacgcgtgctcggtggtcgtcggcctcgccacaagcgtctactgcaccaggaagagcttgaaga

SEQ ID NO: 21646 - DNA, 185 bp, Zea mays
  Coding DNA Sequence Number=SeqID_7243
tcaaccttatagaactcaaagagccagatcacttggtcgccaacccttgatcttcgatccctcgaagctcggaaacggatcgcaaactgcgggaaccgtggtcaagggctgcccgccggaagaactgaaaccgccattgacgtgggcaggaaaaaggggatcgcagattcgtagtgcagatagag

SEQ ID NO: 21647 - DNA, 186 bp, Zea mays
  Coding DNA Sequence Number=SeqID_7244
tccctctatctgcactacgaatctgcgatcccctttttcctgcccacgtcaatggcggtttcagttcttccggcgggcagcccttgaccacggttcccgcagtttgcgatccgtttccgagcttcgagggatcgaagatcaagggttggcgaccaagtgatctggctctttgagttctataaggtt

SEQ ID NO: 21648 - DNA, 524 bp, Zea mays
  Coding DNA Sequence Number=SeqID_7245
gctaccagacgtgccgacggcttcggcatctgaccgccctcccaaagcaactcccccacggtcctcgccgctgctgcccagccaccggtgaagcacgccgcctagcccgtctgcccctgcgcctagcgtctcagctcctccttcatccttggtgcgtggtcatggaggccgccggcctcggcatccgatccccggtgtggcgtggccagccagcacggcccaccagcgcagtcttcctccggcgagccttcccctccgactgcgatccgttttcgagcttcgaggaatcgacgatcaagcatggcgaccaagtgatcgaactcttcgagttctacgagatcgaagaccctgagcatctggttgggggagaccaggggtcctctgacctattatgtcccatttaatttataattcatcaacccgcataccatgatcaacttaaggattgaatagaattctgttttcctgtccttgtttaccctttgggaattggttactatgattagtattatgctactgcttta

SEQ ID NO: 21649 - DNA, 167 bp, Zea mays
  Coding DNA Sequence Number=SeqID_7246
gacgattgctcagatatcgggccgttcgtggagtctgagggaattgcaggagaagaccctgagcagcagcagcttggtgaaggttgcctttgatgcaatctgtgcttaggtaaagaaagagaagaaggtgtcgaggtggatctctaggagttccagggcgtcgatga

SEQ ID NO: 21650 - DNA, 485 bp, Zea mays
  Coding DNA Sequence Number=SeqID_7247
cgcgctatcacttacggggggatacggcggcatcgtccccctcggcccctcctccctccctggtgcggcggcgccagcctgcaggtgttgaatgctgatttgttgtggctgattaatggggttgatcgtcgattaatcgtgattaggccgctgatcgcccttctggcgatcagaaacgataagggcatctggaaacatgggcccgccaacccccagagcgactcccgcgagccgggaccaccatagccccaatcaccccccagaagctttcccggagctgcctcctccacggagggtccaggtgacccctatcccctgggaaagggggaatctccggcaaagaggggcggggggggttgcccccccccccccggggggatccgggggttgcccaaaagggggcccccccccccccccccccggagaaggggccccttgggggggcggggggggaaagcggcaccagaggtttttgggagatggcc

SEQ ID NO: 21651 - DNA, 540 bp, Zea mays
  Coding DNA Sequence Number=SeqID_7248
gggccatctcccaaaaacctctggtgccgctttccccccccgcccccccaaggggccccttctccgggggggggggggggggggcccccttttgggcaacccccggatccccccgggggggggggggcaaccccccccgcccctctttgccggagattccccctttcccaggggataggggtcacctggaccctccgtggaggaggcagctccgggaaagcttctggggggtgattggggctatggtggtcccggctcgcgggagtcgctctgggggttggcgggcccatgtttccagatgcccttatcgtttctgatcgccagaagggcgatcagcggcctaatcacgattaatcgacgatcaaccccattaatcagccacaacaaatcagcattcaacacctgcaggctggcgccgccgcaccagggagggaggaggggccgagggggacgatgccgccgtatccccccgtaagtgatagcgcgccgcggtcgcctgcacagtgctccgctagggttcctcggcagctggttcgcgtc

SEQ ID NO: 21652 - DNA, 493 bp, Zea mays
  misc_feature (407)..(409): n is a, c, g, or t
  Coding DNA Sequence Number=SeqID_7249
atgttattcaattcacgcaaagtagtacttcagtacaaatcacaaggtggaaaagtccacgcggtggcgagaggtgtcgtccgcatgccaccttaaataaattcttcttagtgactaggctatgctgaagactcaacattaatcagggtgattgcctctcttcgcctccgcggagatgctcttctccagagtcatctgtcgtggatgaaattatgcagctgcagctccacgtacgaagatcgtttcttttaggaacaacacggcgatctccacgcgcgaagatcattcatcttggcagctacttcttgccggcacttatcttgcacgacgacgatggcgacttgtatgagcgcgcgtaggcgtaggcgtccgggttgaggaacagctcctcgaactgcctgtgcagnnnctccaggctttcgctctacgccgtcttcgtgtgcaggtgtgtgattcatggccttcaggatgtctccgagtatttcgcctggac

SEQ ID NO: 21653 - DNA, 490 bp, Zea mays
  misc_feature (88)..(90): n is a, c, g, or t
  Coding DNA Sequence Number=SeqID_7250
agggtccaggcgaaatactcggagacatcctgaaggccatgaatcacacacctgcacacgaagacggcgtagagcgaaagcctggagnnnctgcacaggcagttcgaggagctgttcctcaacccggacgcctacgcctacgcgcgctcatacaagtcgccatcgtcgtcgtgcaagataagtgccggcaagaagtagctgccaagatgaatgatcttcgcgcgtggagatcgccgtgttgttcctaaaagaaacgatcttcgtacgtggagctgcagctgcataatttcatccacgacagatgactctggagaagagcatctccgcggaggcgaagagaggcaatcaccctgattaatgttgagtcttcagcatagcctagtcactaagaagaatttatttaaggtggcatgcggacgacacctctcgccaccgcgtggacttttccaccttgtgatttgtactgaagtactactttgcgtgaattgaa

SEQ ID NO: 21654 - DNA, 310 bp, Zea mays
  misc_feature (93)..(93): n is a, c, g, or t
  misc_feature (134)..(136): n is a, c, g, or t
  misc_feature (241)..(243): n is a, c, g, or t
  misc_feature (276)..(278): n is a, c, g, or t
  Coding DNA Sequence Number=SeqID_7251
tttcaaaagtcctgaccacacacgacagcacgcagttgatgacagagataaagagtagcagtacatatttacatgcggaagtagatctcattntgacatgcaaacatttgcacgcaaggatcgatatggaagcnnnaccccaccagctagctgggtacaacgactatcgactacctaattaaacagcatcgttttttagtacacatgatgacgaggtcccgatctaaggaaacgagtacgnnnacccaggaccatgcatgcaccagctagctagcnnnggacgtctttgaggagcttgtacctgcggacg

SEQ ID NO: 21655 - DNA, 255 bp, Zea mays
  misc_feature (30)..(32): n is a, c, g, or t
  misc_feature (137)..(139): n is a, c, g, or t
  misc_feature (180)..(180): n is a, c, g, or t
  Coding DNA Sequence Number=SeqID_7252
agctagctggtgcatgcatggtcctgggtnnncgtactcgtttccttagatcgggacctcgtcatcatgtgtactaaaaaacgatgctgtttaattaggtagtcgatagtcgttgtacccagctagctggtggggtnnngcttccatatcgatccttgcgtgcaaatgtttgcatgtcanaatgagatctacttccgcatgtaaatatgtactgctactctttatctctgtcatcaactgcgtgctgtcgtgtgt

SEQ ID NO: 21656 - DNA, 578 bp, Zea mays
  misc_feature (139)..(141): n is a, c, g, or t
  misc_feature (163)..(163): n is a, c, g, or t
  misc_feature (177)..(181): n is a, c, g, or t
  misc_feature (183)..(184): n is a, c, g, or t
  misc_feature (186)..(187): n is a, c, g, or t
  misc_feature (226)..(231): n is a, c, g, or t
  misc_feature (235)..(235): n is a, c, g, or t
  misc_feature (244)..(245): n is a, c, g, or t
  misc_feature (247)..(248): n is a, c, g, or t
  misc_feature (251)..(252): n is a, c, g, or t
  misc_feature (277)..(277): n is a, c, g, or t
  misc_feature (287)..(292): n is a, c, g, or t
  misc_feature (298)..(298): n is a, c, g, or t
  misc_feature (306)..(308): n is a, c, g, or t
  misc_feature (315)..(315): n is a, c, g, or t
  misc_feature (317)..(317): n is a, c, g, or t
  misc_feature (319)..(324): n is a, c, g, or t
  misc_feature (327)..(329): n is a, c, g, or t
  misc_feature (477)..(483): n is a, c, g, or t
  misc_feature (501)..(503): n is a, c, g, or t
  Coding DNA Sequence Number=SeqID_7253
atgttctatgccactatatctatgtgtctgtgtgtgaattgtgatgctttgcgagagacgatactctaaacgtttgcgctatgctgtttattcactaaccgacatccaacgctttttattcactaacctacgagggatnnngacaaagatctgtcactgccanctccatcgatggtnnnnncnntnncaactgacaaccctatttcccgccgctgccccctagttnnnnnnattnctgatgtanncnnctnngagcacgtgttggtcggctgcgggnactcttgttnnnnnntctttngagttgcnnngtttttnancnnnnnnttnnncgacttgtggcacttgagtgttcatctccttggcttctagaccccgttagagcatcaccagcagctgcgggagatgctcttagcaagttccagtttatcagtgaagagtcaatcactgatgtcgtccatagctccttcaaaccttgtnnnnnnngatcggtaataactgcannncttctttctgttgatatggcgtgctggtgtggacctgtagtatggtatccactgctgtgttattgtgtatgctct

SEQ ID NO: 21657 - DNA, 381 bp, Zea mays
  Coding DNA Sequence Number=SeqID_7254
ttcactttccaagttgtccgaaaagaccagactaccctgttcccccgaagtcagagggggagaggaggctagggatactcgagcaggcggcgagcttttcgcaaactgacccattgaggcagtatcacccgatcagctttgtcgcgaagggggtggccaggaacttcctccttgagccattgtacagtttgagggacgaattctacacggtttacttcaacgtcagggtctgagtcctgacgcttacacttggcagtagaagtaatacagaataaataatgtgcgcgacctttttcttctcatacactgtagcttagaacagccaatgaagaagcaattgggttgtttgaacttgttatgcacgcgggagtattcactttg

SEQ ID NO: 21658 - DNA, 342 bp, Zea mays
  Coding DNA Sequence Number=SeqID_7255
gacagacgtcaagcgagtgtcgtcagcctcctcccaatacaaaggaaggagcaaacgaccgagcaagagctacatactcgcccctccactccgtacctgcccctgcctcgatccagtccgccgcgcgcacggcacgacgtcgccgagtgtccatccccgtgcctagctcgctcgatccacttcgccgcaccaagcagcatgtgcaagctggcgatcacgacgatcccgtccatcgcgtggctgcgccgcaccgtgcggcggcggtcccgcaaccacaccacggccgcatccgcctcctgcttctcctcctgcccctcgtgtccgtgccctgctgcggttccg

SEQ ID NO: 21659 - DNA, 434 bp, Zea mays
  Coding DNA Sequence Number=SeqID_7256
aaaagagtctcgttctcgttgtcttcctcacgaagacacggtccaggtgaccttctcgatcgcctcacgtcccggtcttcaccgccggcggccacggggcgtgacaattggtatcagagcctcggcgatcctcgtcgagggtgcatcagcgacgattgggtgctacgatcggaagcggaggagcggctgcgacttcgtcgattcggagcccccaaacttcgacggcgacgcggcgctactcgggaggcgagacggtggcgctgttggtggtgatttgcatttggtggcgagtggcggcggtggaagtgtgaccagattcctgtggtgatgtttgaggtggctgcccatgaggtgttcgatgtcatgcctcgttgggatgatgatacaatacgagttcagcaaatcgcattcgaggcttcaatggtgtcgacaac

SEQ ID NO: 21660 - DNA, 481 bp, Zea mays
  Coding DNA Sequence Number=SeqID_7257
tcccgtggagaattatataaccgattttcggagcaaaatcagggtgagaaatggcagcaaaacgaattacgaaaagtgcaattaactgggcccaattaggggaacgtgtgcccgaacatcaacgccaacaattcttagcttttaaagctaaatctgatggatacattaggcgcatgaatgcttacccggaaaacccaccgaaaatcgattggacctactacaagaaacatgtccctgttgctggaatggtagacgattttgaaaagcagtattctgctttgaatatcccttatcctccagacaccgttagcactcaaattgattcccaggcgcaggaaattaagggcgatattgaaagattcaaaacttaatcgaattctcgcattgaagaatataagaaacagttagcgcatttggccagcttgattccatatgaccaaatgacaatggaggactacagggatgcctatccagaagatgc

SEQ ID NO: 21661 - DNA, 451 bp, Zea mays
  Coding DNA Sequence Number=SeqID_7258
tcgcggcaaacgtgcaccttttcttcttccgttccatgcggccctctctcctacccaaagcaagcccctcggccatgaagctccacaagatcaacccgtcgtctcggaagatctccgtcgccgttgccacgccggtcctcgtcctgctggcgctcgccgtcgtttcgctctacgacatcaacttcgctgatagttaccagtacatacgccgcgcctcctcttcatcctctgcgtcgtcgtcgtcgtcgtcgacgccgattccggccactaccccctcgtcttcgacgattccggacacgtcgtcgtcgtctccggtcaaatcctcctcgtcttcgacgtctccggccgccaccaccgtcgaggcctgcgaccttacgcggggccaatgggtgccggacgacgagcaggcgccgtactacacgaacctgacgtgcccgttcatcgacgacct

SEQ ID NO: 21662 - DNA, 370 bp, Zea mays
  Coding DNA Sequence Number=SeqID_7259
agtgaaacccgctctgccgttttctataattgcaaaaatcttccgaatccgtggcttcccttcggtggcagcgcgagtcgcgagcgtgcgcagaggctagccaagcgatgccgctcctcttccccgccacgccgccgttaccgctgtgccgtgccgcgcgcgcctcacgccgcgccacggcctccgtggcgtccgcggccaggaactcgtcgtcgtcctcggcctcgttcgacgcggccgccttcgaggccgagcggctgcgcctggacgccgcggcgcgggccgggatggagtccaccgccgcggcagcggaggccggcccgcgggcctggaagtgggcgatacggaagcgggtgtgggacgcgctcga

SEQ ID NO: 21663 - DNA, 410 bp, Zea mays
  Coding DNA Sequence Number=SeqID_7260
tcttctacgggcgtcggcgcttttctctaccgcaccctgcttctctctccctgagttcctcccctacgcgcgccggctgctcttccctggccgccgcgccctcccctgctagcagccaaagctcctgtgcgctcatccctctgctcggggcgcgccctgccgtattccctgcccatggcagccgtccgaccgagctccatctccagccgcgacgcccagttccctcccatggcgctcttccttggccactgcttccccagccgcgagttccccctgctcagcacctcctcgagctcgtccatggtcgcatcttgctcggatcccatctctctgctcggatctcggccctgcctagctccctctctcctctctacatctccctatcgggcggtactcatctccctgctgcg

SEQ ID NO: 21664 - DNA, 457 bp, Zea mays
  Coding DNA Sequence Number=SeqID_7261
tagccgccgctagggacattttttcccctttctgcgcgcggccccaccttcctctctactctcccctgctctcacccgcgcagcacctggagcgccgccaagagccccgcaccgcgccccttcctccagccgtcagggcgcgaccgggccatctcgagccgcgccagcagaaccgacctaccccgcgcgcccaggccgccgtcgccctgcagcctgacgccccgaccgccgtgcccctgaccgaagaccccgcgacaccgagcgcgccaggcctcgccgtgtgacccgcccggccaaacgccgaccccacgcgccctgaagccgagccgccgacgccacagcaccccgcacccctgtccaagacccgaccatttctctaagttattggcgtcgtttctcctcccccattactccctccctccattgatggcgccttgaagctatggccgccgtttct

SEQ ID NO: 21665 - DNA, 460 bp, Zea mays
  Coding DNA Sequence Number=SeqID_7262
tggtgttgaaactgttgctgggtatatcacggtcggtgttaatgcgatatttatttttgtttttgtttctgtagtgatatatttctgtgaacaggaagaaagttttggtgatctattttttggaatttattattttggcgccaaaaacaaaactgaaattacatattttttagtttgcatattaaagaaaaattcataataagtataaatcgtcaatatgaatttcaaatagtgatttccgacggtattctttaacaatgaccgaaaagtactaaaagaaaaagttactaaacgtacttgatcgattgatttatagtgatttttttatttggattaagtgattggttgaaaatattcttagtgaattgaattgaagtgaaatgcactgttttcatagaataatatgagctgctctgaagtgatgtaccaggcatattatccgtatttatatcaaagggcc

SEQ ID NO: 21666 - DNA, 409 bp, Zea mays
  Coding DNA Sequence Number=SeqID_7263
ggccccatcgcctaagtgtcatagtgtctggaaacgctacaacctgcagcagctcgaatttgatgtgtgctgtttctctacagggcaacaatatgaagactgcaactctccaacaacaaagggcaacaatatgaagactgcaactctccaacaacaaagaggaggggatcgataaggaagaagacgcgtagcgccgtcgtcgctcctgctcaacattaatgactggacgatcgagagggttggaagtcctccaaatttgaagtctgaagacatgctgtacacgtaagagtatgaccaagtgctcaagcaccgtaggttagttggcaacctcgctagctaagctggttcaataaagctttatattgaatccgtagagaataatgtgaaacattggacgatccagctagca

SEQ ID NO: 21667 - DNA, 548 bp, Zea mays
  misc_feature (495)..(495): n is a, c, g, or t
  Coding DNA Sequence Number=SeqID_7264
ctctctcctggaccctattggccaacgcccagccccttccccagccgctccctcctctctccccctcagctcgcatcccctctgctcgctcgcgcttagctgagctcgcccctgcgtgctcctccctcctcccctgcgcgccacgcccagctcccacgcgcgcccctctactcgctcgcgcccagcgcgtttccatggccaagcatgccatggctccctccgagctcgcccccgacctctgctccttcctctccgtagtcccaggctgtcgcgccctactcgccctccgtgtcgcgctccctcgctgtccgtgctgtcgaagctccccgggcagtgcgctcctctgctcgccggttctccttgccccagctcggccgaccatccctgctcgcccatggaagctgcgcccccgctccctgatttctccagctcggcttcctctccattttcctcagccgcgcctacttcctctgtccatccctggctgcgtgcggngcttctccatggatgtgcccgctgcttgctgccagttttgctctgcatcagca

SEQ ID NO: 21668 - DNA, 409 bp, Zea mays
  Coding DNA Sequence Number=SeqID_7265
tgcgaccgtgcgtgactcggtctgctccgccggcgccatccgcctccgcgcctccgtccgccgagcgcgccgctccgcgcctccactgatccgtccgccagaccgccactgccacagtcgagcgcccgacctggccgcaagcccgcagtggcgcagtgtcgtccggcgtccgctcagcgcctcagcccgacccgccaagccacgagcaggcgagctgctccgccgtccggcgagctgctccgccgcgcctccgactctccgtccaccgatcgtcgtccactcggcccgagcggccgagccgctccgcgccctgctcgcctgctctgctcgctggctccgcgctctgctcgcccggcggggatgacggatcagatcgatccggtttaggagcacggggacaacatatatc

SEQ ID NO: 21669 - DNA, 528 bp, Zea mays
  misc_feature (495)..(495): n is a, c, g, or t
  Coding DNA Sequence Number=SeqID_7266
gcctcgttttcttgcctgtttagtttcctcttgtgttctttgcacatctatagttctatacagtacttttgattttcttttaataggcatcccctgctgtatttattctaaaaaaggtgccaacaatcattgactgttccagtctgctttgcctaatttttgtgacatactccctccgtcccagtatataaggcataaccacctctggatcaaagaccaagaaatgcatttaattctctctatatcactgtatcgatgtatgtgtgcatagagagagcacgccttatattgtgggacaagaacaaaaagtggttacgccttatattctgggacggagggagtactccctctgtactatagaaagtgtaactcctcaaacaccaagaccaaggagataatttaattcatgcacattcccagtagaggcgctctgatcctccacctaatttattgcgagcttgcatgcaagcatgcagaaaccaccgtagttgttgntggccaagcatgctattttttctcgccatgcat

SEQ ID NO: 21670 - DNA, 353 bp, Zea mays
  Coding DNA Sequence Number=SeqID_7267
tcaccgagcaccaaaagtcgccgtgcgaacagaggaaggaggttgctggggtgcggggaatgcgtgcgcatcgttcccaagcaccgaggagcagcgggattgacctgagtcgctcgtcggacctcggccaccaacggagccgcacaaacgtggaggaccgcatcattgccgcccaaattcctcggttgcctaggattcttctgtcctaatggggaatgtgtcacatgcttttgttcatggcactggcacggtggatttgaagtttactttggcgaatatcatgcagctgaggaacatgcaacatgtcccttttatgagcaagaatctcattagcggtacccttctatgtagat

SEQ ID NO: 21671 - DNA, 421 bp, Zea mays
  Coding DNA Sequence Number=SeqID_7268
aaaccatggtgtacaaacttgttagttcaataaagcatcctcaacctatcacccagccaatcttgatggttattaggatgctagtcttgaggtctatgttctggccggtctctgtgcttagtggaggatacgatgaggatggctgctatcatccaacgaggcataggaagtctcagggttttccttcaccggctgctgaagatatgggtcccgatactgttctctatcaatttatgacgaaagagaaggaaatattaggtgaatcaacacaaaggatcaacgattggatcaaaaaactacaaggggaacgtgagaaataccgaaccggggaaattgctgccaaagacggcacgatatatgaaaaaggacgaactaacgatcggatatacagagaatatacaaatcggatagctgtgcttca

SEQ ID NO: 21672 - DNA, 54 bp, Zea mays
  Coding DNA Sequence Number=SeqID_7269
ctctcgagatcctgctccacctccccttgttagctgagggataagaacgtgcca

SEQ ID NO: 21673 - DNA, 454 bp, Zea mays
  Coding DNA Sequence Number=SeqID_7270
agatcaattttctcaatccaccaccatactatggtcaagctaatggccaaggtgattctagtaataagagttgtatcaagattatcaaaaacaagcttgaggataacctaaggaggtggcacgaggttttgtctaaagatcttgggcacgtcgtgtatctagacatggtgttattaatgttacttcttttgagttggtgtatgagcaagagtttgtgttactcgtcgaggtgaatctagatgcatataggcttgcaaaacaaaatgacttatttattgttatgtataatgacttgatgatgacaatatcaatgaggtgataggcaggagattaatggaccacaaggatatggataaagacaaagcttgagttgcccgagcatacaataataaagccaaaataatattgttccagttagagatctagtgtggaaaactatagtaccaattggtgt

SEQ ID NO: 21674 - DNA, 401 bp, Zea mays
  Coding DNA Sequence Number=SeqID_7271
ggttcttctgaagctgcagtcttatgcacaacactcggtggatggctcgacaagcggttcacggcgctcgactccaagtgggagccccacgccggcgctgtagagtcccaggcggtggactttgatcagcaccgcgacgaattctcatcagccctccgcgcagacgtcgaggcacatctctcggcggctgacgcggatccgttggaacggatctgctattgggaggcctctactggcacgcgtgacgctcgctatctcccagcctccaagtcgtcgagcctcggttctgttctcgagtccgacctcgcatgcccagatcagttcgtcgtcgattttgcggtcgcgctcgtggacctcaacccgctcgtccacgtcgacttcagcacagtcccagtcgcaaa

SEQ ID NO: 21675 - DNA, 401 bp, Zea mays
  Coding DNA Sequence Number=SeqID_7272
ttattcgtatctctcgtattattcggaattctcagcagcggagaatcgtgctgcgcgaaaaaataccttaaagtttacgcggagccggaatgctgttctaaatcgatcccgataattttaactcatcagaaatcgtgttgtcactccccagctccgatttatatttcggccccagctccggcttgtccgcccccggcgcccatttatatttcggcccctcctgcccctaagcccgctcctatttacatctccgctcctgcccccgcatgtcctcctcctgcgcccatctacatctcagccgctcctgcaccagccccggccgcactcccgtctttaccatgcttaccagatctccaatctctttattgctgattctcgtggcaccgatgatgttttaatta

SEQ ID NO: 21676 - DNA, 419 bp, Zea mays
  Coding DNA Sequence Number=SeqID_7273
tgcatgccgcaaccgcgcgatccgcccgcccgccgcaaaaccgccgcgatctcgcggcccgcccgtccgccatccagccaccccgctgcgaccgctccgtgcatgcctccactgtcgcgatccgcaaaaccgctgcaaaaccgccgcgatgtgaccggcgagatccgcccgcccgccgaccagccgtgaccggcgagatccgcccgcccgcccaccgcaaaccccgcgcgcgaccgctccgcaaccgccgctcccgcccactcgtcgcgcaatcctctcctcctacccatctgctccgcaatccccgccattgttgcatcagatgcagaaggaggctatggcgccgcagcacgctccgcccgacttctcgcatggaggttgcggcggcgagaggaagcggcagtgcgaggcggaccccg

SEQ ID NO: 21677 - DNA, 388 bp, Zea mays
  Coding DNA Sequence Number=SeqID_7274
gatattgccctgtttgtttgggatttttttagcttatggacaccaaaagttgctgcgaaccgttaaacacgtttttcagctcacttctataagaatcgttttagtaaaaatcgtctaaaatcaacatgaacacagaatcggtcaagtcatcgtcatagtaggagtccattgctttctagatcattaaccatttagaccacttcatcttactctgcacttaattctcacgatactcaggttctttccacgaccacgttctctccatacagtcagattctcataaatactggtaagaaaaaaactgaatcaacatagccattataaaagatcatcatgtgctacactgacacaacacgaaattaattaaaagctatcttccaagggatgg

SEQ ID NO: 21678 - DNA, 381 bp, Zea mays
  Coding DNA Sequence Number=SeqID_7275
actcaccggcgatttggaaagcgacgcctccatcctctccctcaccgcctctccgccgcctcatctggtcctctccctctccggcgcctctgctggtaacactatcctcttggccggttgtgctctcttgctcgtgtcgcctctggatctagttggaaaccctaagtttggtgctctgatcttgaacttctgttcttcttctggtctctcttccggtctcccctctacggctccctctccctgtaacgctgcgtcggtgcgtaaccctaaccgtgctttaaccctaatcatcgtgccgtcggggttggatctggtgctccggctttggttggagccgtgaggtatcgatctggtgctccggtccggctttggttggatccg

SEQ ID NO: 21679 - DNA, 427 bp, Zea mays
  misc_feature (360)..(360): n is a, c, g, or t
  misc_feature (388)..(388): n is a, c, g, or t
  misc_feature (398)..(398): n is a, c, g, or t
  misc_feature (400)..(400): n is a, c, g, or t
  Coding DNA Sequence Number=SeqID_7276
gggtcacgcatgtacgcccaaatctcgccggcgcccggtcccagacgaagacaagcccccgccactcctctcggcacagtgcagacacaccgccgtcgccacctgccatgtctgcgcgtcgccggggtccatgcgtccatgttcgtccagctccagcggcagggtggtggtggtggtggagtggactgtggactggtatcctggcggggatcgggacggagcccgcccatggcaccggcggcccccgcgcggggtcgatccatctctaggccggcaggcatgcagttggatcccccgcctccatggccatccctcgctgccgcatggcacccgtgtgcgcccgcgtgctgtcagctgganctggtgcatgcatcccatcggccgcggntgcgcgcctnanctagtgttcatgcgacgcgaccgatgg

SEQ ID NO: 21680 - DNA, 467 bp, Zea mays
  Coding DNA Sequence Number=SeqID_7277
atcgctggcgacgaagcttcagacttgttcggttcaccagtgcttcagcaatcagtgtagtagtactggcactggcagtgccctaaggtctccagtctcctcggtctcatctcatctccatgatggcttcttcttcctcctcctcctccttctcttccttcttcggcatcgagcctctcgacggaggcgacggcgacgcctaccgccgcgccatggacgcctgctccctctgcgggaagcgcctcgccggggaccgcgacatcttcatgtacagaggggacacgccgttctgcagcgaggagtgcaggcaccaccagatggccagggacgatttcggcgcggcgttgaagacggagccgcgtccggcaaggagaggggagcgacgccgccgcaggcacgaggctcctgcatccgccgccgccgccgagccggcccgtgtcccgctagcgccaaatgtgcccgccgtt

SEQ ID NO: 21681 - DNA, 294 bp, Zea mays
  Coding DNA Sequence Number=SeqID_7278
aagtttccttgcgtggcctcgacataccctctgcaccgaaagccatcgcgccccatcggcgggagaggagagtgccgtggggcggaggaggcgtcacgggcatcccccacaaccaacacagctcgggtgccacggagtgatctctggcgggccggtgacggtgtagatcaaagacggaggagtgttcgtgctcgcgagaccttaggacggccggaattcctcgccgtgattaagctccgtcgcggctccaccattcctccgcgaccaacgttctgcgcgtcaagtctctctgga

SEQ ID NO: 21682 - DNA, 391 bp, Zea mays
  Coding DNA Sequence Number=SeqID_7279
aacagaatggatgcctctactaccttcctcttcctcgcgcttgcatgcatggcggccactaatagctctccctcactgtgccaacgcaaggcatttcctccctcctagtcgtagccatggcagcagcactggcacgaggagctctagcgccgtcgacgccgccgccgccgccgccagcagcagcaagctctcgtggccactgctaccgtggaagaagcctggccgtggcggcagcagccgtggctccgggagcgggcacggtttcggctggaccgtctcgcacaacgggtcggacaccgacgtcgggttcggcggcggcgccggcgccggcacgagcagctccggaggtggctcgagcgcgggcgggggagctggtctcggcgtcggcatc

SEQ ID NO: 21683 - DNA, 258 bp, Zea mays
  Coding DNA Sequence Number=SeqID_7280
agcactatgagtctacagcgattatgtaagcattcattatgttgctatcttctatggcacgattgttaatccttttgttcttcatcgttgtctcgttgttcacggacacggtctacggagcaaaacaaatctgtaactggcgctcgccacccaaagaacagcagtgcatgcacggcactagcacgtatcatgagccatggcggtgcatgcccgcgccgctgaggctgggccgctatgccgaggctgccttgctgcggc

SEQ ID NO: 21684 - DNA, 330 bp, Zea mays
  misc_feature (34)..(34): n is a, c, g, or t
  misc_feature (49)..(49): n is a, c, g, or t
  misc_feature (72)..(72): n is a, c, g, or t
  misc_feature (78)..(79): n is a, c, g, or t
  misc_feature (81)..(81): n is a, c, g, or t
  misc_feature (84)..(84): n is a, c, g, or t
  misc_feature (87)..(87): n is a, c, g, or t
  misc_feature (96)..(96): n is a, c, g, or t
  misc_feature (101)..(101): n is a, c, g, or t
  misc_feature (103)..(103): n is a, c, g, or t
  misc_feature (108)..(108): n is a, c, g, or t
  misc_feature (120)..(120): n is a, c, g, or t
  misc_feature (122)..(122): n is a, c, g, or t
  misc_feature (127)..(127): n is a, c, g, or t
  misc_feature (150)..(150): n is a, c, g, or t
  misc_feature (161)..(161): n is a, c, g, or t
  misc_feature (166)..(166): n is a, c, g, or t
  misc_feature (185)..(185): n is a, c, g, or t
  misc_feature (195)..(195): n is a, c, g, or t
  misc_feature (199)..(199): n is a, c, g, or t
  misc_feature (204)..(204): n is a, c, g, or t
  misc_feature (229)..(229): n is a, c, g, or t
  Coding DNA Sequence Number=SeqID_7281
ttggtgatgcgtgtccgtcaaggccgacctgcanttccccgatcggccngatcggagcgctacctcaagaanggccgnnangcncancgagtggcnactgnangcccncgtctacctcgncngcgtnctggagtacctcgccgacgaggntctggagttgncaggnaacgcggagaaagacaacnagaagacgcngatnatccngcgccacgtgctcctggagatccgnaacgaccaggagctcgggaagctgctggtcggagtcaccatcgcgcacggtgtagtcctccccaacatccactccgtgctcctgcccaagaaggcgccgaa

SEQ ID NO: 21685 - DNA, 86 bp, Zea mays
  Coding DNA Sequence Number=SeqID_7282
aagggaaatcaagggatggacggcgaaggcttcttccatctcgccagtttggctacatcgtcctaacaactttctgctggaattat

SEQ ID NO: 21686 - DNA, 117 bp, Zea mays
  misc_feature (26)..(26): n is a, c, g, or t
  misc_feature (28)..(28): n is a, c, g, or t
  Coding DNA Sequence Number=SeqID_7283
ctctcccctcgcgtctgacgcgatgntntccatcgccggatcttcggtcctctccttcgccaggtccgtcaaggcaatcaacacaaattctctagctttctccccggcgaggaaggc

SEQ ID NO: 21687 - DNA, 322 bp, Zea mays
  misc_feature (203)..(203): n is a, c, g, or t
  misc_feature (218)..(218): n is a, c, g, or t
  Coding DNA Sequence Number=SeqID_7284
ggccatggcgacaaccggtgtcgtcgttggacgccgcagccgcagccgcagccgctgcctcggccttctctcccatgccgttcctcgactccaccctctcggctctgctcgaaaaagaagacgcaccggttctagacacggaactcctcgccatcgacgactaccggttcgcagcgacggcggttagcagaattgagccacgncccgagcagcagcgnttcgcacaggtgccgatggtgcttccggtggcagaacacccgagtagtctgcagacgcagatgagcagcactgcgttcgagctgctgcacgcagcgtccgtcgt

SEQ ID NO: 21688 - DNA, 393 bp, Zea mays
  Coding DNA Sequence Number=SeqID_7285
acgaggttgcgaaggccaaggctgccgccgcggccggcggcggcgtaggggagtacgggacgttccacggtccgcccagctacccgcccccgcgcccgcccgtcgggtacccgcagcccgccccgccgcccggcctccacggccagcgagagcccaactcgcgccaccgcggcgggtaccaggccgggaacgctcaagattacgaagctggtgcccgtggacatagacatgaccgccttccatgctgcggtattggtatgggctggtttctattcatactcggtttctttcttggtgccatcccctggtatgtcggagcatttctgttgtggtgttccagagtggattacagggagaaaccaggatatgtggcatgcacaatagcggctgtcc

SEQ ID NO: 21689 - DNA, 173 bp, Zea mays
  misc_feature (27)..(27): n is a, c, g, or t
  misc_feature (29)..(30): n is a, c, g, or t
  misc_feature (49)..(50): n is a, c, g, or t
  misc_feature (66)..(66): n is a, c, g, or t
  misc_feature (75)..(75): n is a, c, g, or t
  misc_feature (77)..(78): n is a, c, g, or t
  misc_feature (84)..(84): n is a, c, g, or t
  misc_feature (113)..(113): n is a, c, g, or t
  misc_feature (129)..(129): n is a, c, g, or t
  Coding DNA Sequence Number=SeqID_7286
cgaccgcaggaaccgacccaagaatgncnnccgcctcttccatgctcanngtcgtggcgctctccnccccggtcncnnccccgngcctccgcgccgccggcgccgcctcctcnattcgctccgccgcgncgcgcggcagtcgcactcggcgggcgtgcggaggccgcatcttc

SEQ ID NO: 21690 - DNA, 238 bp, Zea mays
  misc_feature (26)..(26): n is a, c, g, or t
  misc_feature (41)..(41): n is a, c, g, or t
  misc_feature (47)..(47): n is a, c, g, or t
  misc_feature (68)..(68): n is a, c, g, or t
  misc_feature (108)..(108): n is a, c, g, or t
  misc_feature (125)..(125): n is a, c, g, or t
  misc_feature (141)..(141): n is a, c, g, or t
  misc_feature (161)..(161): n is a, c, g, or t
  misc_feature (169)..(169): n is a, c, g, or t
  misc_feature (180)..(180): n is a, c, g, or t
  misc_feature (191)..(191): n is a, c, g, or t
  misc_feature (195)..(195): n is a, c, g, or t
  misc_feature (198)..(198): n is a, c, g, or t
  misc_feature (202)..(202): n is a, c, g, or t
  misc_feature (204)..(204): n is a, c, g, or t
  Coding DNA Sequence Number=SeqID_7287
acagggaacaatggtataccaggcgntgtagaatgtatcgntaatgngaaagctgatctcctgcaggnaacttatcttggatgatggtgaagggacacctgtaaatcntcccaccaattccttcnttagatgaattcatgnagggcttaaattctgagccnccttttgntgatatctccnttgggactccnccanaanatgncnatgactctgatgaacttggacacccccctgggag

SEQ ID NO: 21691 - DNA, 283 bp, Zea mays
  Coding DNA Sequence Number=SeqID_7288
atgagtggagaaaacgacaacggcggtgctaagcgcaggggctcggtcaagtggtttgctgccgagaaggggttcggtttcatcactcccgaagacggcggcgaagatctcttcgttcaccagtcttccatcagatctgagggataccgaagcctcgctgaaggagaatctgtcgagttccttgttgaggtcgacaacagcagtggccgtaccaaggccatcgaggtgaccggacctgatggcgctcctgtccaaggtaccagccgtggttcagctggcggac

SEQ ID NO: 21692 - DNA, 232 bp, Zea mays
  misc_feature (50)..(50): n is a, c, g, or t
  misc_feature (52)..(52): n is a, c, g, or t
  misc_feature (54)..(54): n is a, c, g, or t
  misc_feature (57)..(57): n is a, c, g, or t
  misc_feature (61)..(61): n is a, c, g, or t
  misc_feature (68)..(69): n is a, c, g, or t
  misc_feature (74)..(74): n is a, c, g, or t
  misc_feature (89)..(89): n is a, c, g, or t
  misc_feature (104)..(104): n is a, c, g, or t
  misc_feature (127)..(127): n is a, c, g, or t
  misc_feature (155)..(155): n is a, c, g, or t
  misc_feature (178)..(178): n is a, c, g, or t
  misc_feature (180)..(182): n is a, c, g, or t
  misc_feature (186)..(186): n is a, c, g, or t
  misc_feature (192)..(192): n is a, c, g, or t
  misc_feature (194)..(196): n is a, c, g, or t
  misc_feature (199)..(199): n is a, c, g, or t
  misc_feature (202)..(202): n is a, c, g, or t
  misc_feature (206)..(207): n is a, c, g, or t
  Coding DNA Sequence Number=SeqID_7289
atctactggccgagatgtttaccgcgagatggactgtgtaaagcctggantnancgntttntctcggnnagatntatgtcccccggttntattacctgttgaangatataaaaagaggcctggaccntgtcggccttcccaagcaggttgtatgngctgtgaatggaagaatggcatntnnnacgngttcanannntgnganaagnntggctcctatgtagccgaagccgct

SEQ ID NO: 21693 - DNA, 372 bp, Zea mays
  Coding DNA Sequence Number=SeqID_7290
gacctgacgggtgtaaggcgccaatgccgctgcggtgaagatttgcagcggcatgactcaaccgctagataaaagcctattcgaactctgtgcgcgtgagcgcgatcatcatgaggctgccagatgaaccccgtcgtcgttgctgtcgcaatcaccggctccgttccgcgcaagaaggacaatcccgcggtaccgattctgccgtccgagcagatcgagtcgacgcagcaggccttcgaagccggagctacgctggcgcatatccatgttcgcaacgacgatgagacgccgtcatccgatcccgagcgatttgcgctggtgcagcaaggcatccggaaacattgccctgatatgatcgtccagttctcgacc

SEQ ID NO: 21694 - DNA, 181 bp, Zea mays
  misc_feature (50)..(50): n is a, c, g, or t
  misc_feature (56)..(56): n is a, c, g, or t
  misc_feature (65)..(65): n is a, c, g, or t
  misc_feature (75)..(75): n is a, c, g, or t
  misc_feature (109)..(109): n is a, c, g, or t
  misc_feature (126)..(126): n is a, c, g, or t
  misc_feature (145)..(145): n is a, c, g, or t
  Coding DNA Sequence Number=SeqID_7291
gaaggaacaagcttgatcagaccaaattctcaagtacccccttaccacanaatcanctgatgaanaagattgtanattacaacactctgggcttcattggtagacctcnatgcagacaagaataanatcatggctgccgcatganatgtatgacatcaggcaaagatagtcaacaccctag

SEQ ID NO: 21695 - DNA, 265 bp, Zea mays
  misc_feature (40)..(40): n is a, c, g, or t
  misc_feature (57)..(57): n is a, c, g, or t
  misc_feature (60)..(61): n is a, c, g, or t
  misc_feature (68)..(68): n is a, c, g, or t
  misc_feature (73)..(73): n is a, c, g, or t
  misc_feature (83)..(83): n is a, c, g, or t
  misc_feature (90)..(90): n is a, c, g, or t
  misc_feature (101)..(101): n is a, c, g, or t
  misc_feature (105)..(105): n is a, c, g, or t
  misc_feature (111)..(112): n is a, c, g, or t
  misc_feature (124)..(124): n is a, c, g, or t
  misc_feature (141)..(141): n is a, c, g, or t
  misc_feature (163)..(163): n is a, c, g, or t
  Coding DNA Sequence Number=SeqID_7292
cagtctcgccattgggtaccatgaaccccatgcgtgcagnactgcatgatgcaaacnggnnctttgtnagctntgatggacgngaccgancctgatgctgngggnagctgnnggccttaccgcntcagacgatgccagtgntgatgccacaggatgatgacgnctaacatgatgcgcccattggatgatgccgagcatgatggtcaccaatggtcttgccgagcatgatgtcgcaaatgatgatgccacaatgtccctggcgacg

SEQ ID NO: 21696 - DNA, 450 bp, Zea mays
  Coding DNA Sequence Number=SeqID_7293
cgctcaggcgctggccacccaccaaccacgccccgtcttgccccggggggtccccccccccgttttgtccccgttctccccatacccccacctctccgtcaggcgcccgcgctggatcctcccccccccccccccccgctcgaatgtgagtccaccaccctccacccccaaatatccgtgatctcgcctccccgcccctcgcccagctcccctttccccttttccccttgcccctctccgccccccgcggcgccggccccgcccccaaatcgcgagcttatatgcttacccgcccccttacgccctgcgtgcggttgtgctcccccctcgccccacctacgacacctaactttcaattccccccctcccctcccgtccccccccactccccctccccacccatctcaccccccgccccccggcgctgtcggtggtgttggacgttataaa

SEQ ID NO: 21697 - DNA, 410 bp, Zea mays
  Coding DNA Sequence Number=SeqID_7294
gaattgaaagttaggtgtcgtaggtggggcgaggggggagcacaaccgcacgcagggcgtaagggggcgggtaagcatataagctcgcgatttgggggcggggccggcgccgcggggggcggagaggggcaaggggaaaaggggaaaggggagctgggcgaggggcggggaggcgagatcacggatatttgggggtggagggtggtggactcacattcgagcgggggggggggggggggaggatccagcgcgggcgcctgacggagaggtgggggtatggggagaacggggacaaaacggggggggggaccccccggggcaagacggggcgtggttggtgggtggccagcgcctgagcgccaacagcaggctcttcgtcttgcacgccatcggtctgcttccggcggtct

SEQ ID NO: 21698 - DNA, 135 bp, Zea mays
  Coding DNA Sequence Number=SeqID_7295
ttttttacatatagctcttacagcattcttgtattgcagaaggtgaaatagcaagaaggtaccactccaccggcacggggctcgagattgccttcgccgccattccgtgagatctgctgccgctgtagtcgccgc

SEQ ID NO: 21699 - DNA, 150 bp, Zea mays
  misc_feature (123)..(123): n is a, c, g, or t
  Coding DNA Sequence Number=SeqID_7296
gtctgcttatttattatgtattaccaacatattttgctgttttatggcgtgcattgtgagtgaaggatgatctggttgggcacatgatgttatgacacaatgatatctcacccaaagacatcnaatcagtacccaaacaagggcttgccc

SEQ ID NO: 21700 - DNA, 566 bp, Zea mays
  misc_feature (387)..(387): n is a, c, g, or t
  misc_feature (403)..(403): n is a, c, g, or t
  Coding DNA Sequence Number=SeqID_7297
tgccccagacgtcgcgcgcatgaaatgaaaccctagtgagtagtgaccctgtccggatcactgcgtggcgccgccatggcaccctccgctctggcctccctcccggcgccgctccggtcactgcggctcaagacgaagcagcaggagctactgctccgcgtctcggcgctggcgctcatctacgttctcgccttcgccgtccgcctcttctccgtcctccgctacgagtctatgatccacgagttcgacccctacttcaattaccgcaccacgctcttcctcaccgagaacggctttagcgagttctggaactggttcgattccgagagctgtaacccgctcggggcggggtcgttcggggggactcctcttccggggtctcatggnttgacggcggggttgnttcaacgccttcctccgggggttttccctcgttgtcaaattccggggaggcctgggcctcacggggctttctttgcccgcgcaacccactctcgtcgctagcctttggggccggaattggggcatcccggggggggggttggacgccgcggtttatcgccccg

SEQ ID NO: 21701 - DNA, 153 bp, Zea mays
  Coding DNA Sequence Number=SeqID_7298
acacggacctcctccaggcgaggaaccacctcggaagttccaagtatcactatggaccctgggcgcgcggcccgacaacagcacacgcgggacgcggcggcgacagggacgcccgtcgccccgccaacaactggcgggagagatcgcccgcac

SEQ ID NO: 21702 - DNA, 573 bp, Zea mays
  misc_feature (324)..(324): n is a, c, g, or t
  Coding DNA Sequence Number=SeqID_7299
aggcttttcaaaggagctgaggccgcatcaaaaagctttttttccagataagtggactgtggttggccgagcaatgatcgagcataatctccttagggccagtaacctttacccaaatatcagctttgatgagcttggggcattactggggattgatccaaggaaggctgagaagaaagcatctcggatgatttattaggataaaatgcgggggtccattgatcaggttgaggctgtgatccctttttatgattccccggaaaagctgcaccaatgggatcagcagattgctgggctgtgcccagccctgaacgccatcctttncagcatgtcaagcaagggaataactattccggtgtgaataaaaatttcatgctgtcggtcgatggtgcatggcagaaacagcaaccatgccccggaatccagaatcaaccttttgtatagtttgcagctgcaaatgtgtatcttgtgattttggggggaggatgcttgtttaagtaacgctcccctggatacctctgtagcccctactgtttccagagcgccccgaatgattcccgtaagggccttccg

SEQ ID NO: 21703 - DNA, 230 bp, Zea mays
  Coding DNA Sequence Number=SeqID_7300
ctctgctgtgtccatggcatctctgcgtttttttgaaccgaagacagtccatgcctgctgctgctgctgctggttggtggtggtggtggcaaggcaggcagggattgatattgatctgcaagcccctggagcaggagagaaaggtgcctgctgctgtttgttgagtaaattaaaaagttttaaagttatacagtgatgcccattccagagtatggccagtgtattccctt

SEQ ID NO: 21704 - DNA, 495 bp, Zea mays
  misc_feature (265)..(269): n is a, c, g, or t
  misc_feature (323)..(325): n is a, c, g, or t
  misc_feature (417)..(419): n is a, c, g, or t
  misc_feature (426)..(426): n is a, c, g, or t
  misc_feature (434)..(438): n is a, c, g, or t
  misc_feature (440)..(440): n is a, c, g, or t
  misc_feature (444)..(444): n is a, c, g, or t
  Coding DNA Sequence Number=SeqID_7301
tcaccctctccgtagtcgaagaaacccctcgggcggcgccatcccccgtttagcccagcgaggcgcccgatttcgccggcggaatcagaatcggtggggtttcgcgggggcgagaggctcacacgggctgcgcattccccatttccccgtgatactacgcgctgccgcctgctgccctctctctcctcaggtcgagttctctcctatcggtcggcgatttgggtgggggacggtgagcgcttcggtttcgtgcccggtttggccnnnnntttctccccgtgccgctgctgctgttgcatgcctgcgggcggtcgctgctgctnnngtgcagcctggagatttgctgctggcgctgtttggccgcgtccagcattcaagaagcacgcgtgtgggaaaggagggagtggatgtctcatnnntaagtcntacccccnnnnncncaancggagatttgatagtggttgaaacggattcggagctcgttttggcttgtag

SEQ ID NO: 21705 - DNA, 172 bp, Zea mays
  misc_feature (145)..(145): n is a, c, g, or t
  Coding DNA Sequence Number=SeqID_7302
tcccatcccctgtttttccaattagagaccttgggatcctaggggaggggtcgtccccaacccacgcagcccgagtttgagctcggagtggggccaaaatggtggggagtgcgtgcagcgaccacgaccccccgcggcggtggcntatagggctctcccctcacttccttcg

SEQ ID NO: 21706 - DNA, 213 bp, Zea mays
  misc_feature (38)..(38): n is a, c, g, or t
  misc_feature (77)..(77): n is a, c, g, or t
  Coding DNA Sequence Number=SeqID_7303
gtagtcgcgcgcctgggagagcggcggcatcggagtcngcaggcggaggcgaaggaagtgaggggagagccctatangccaccgccgcggggggtcgtggtcgctgcacgcactccccaccattttggccccactccgagctcaaactcgggctgcgtgggttggggacgacccctcccctaggatcccaaggtctctaattggaaaaacagg

SEQ ID NO: 21707 - DNA, 243 bp, Zea mays
  Coding DNA Sequence Number=SeqID_7304
ctgaagatagcaccacacctgtatctgctgcgccagtctccttcggtcctcactgcttgtttgtatattcatttagacagtttgtgtatcccgtatcaggtggttcgtggttattgataagtcctgttagacatatagtttaaggtgggtacaaatatagttagccgaaactcagctgtatgaaatcatttttttgtcagacgtatcaaaacaaaaagcttaggctcagtttgttttattgga

SEQ ID NO: 21708 - DNA, 225 bp, Zea mays
  Coding DNA Sequence Number=SeqID_7305
aattcgatcaccactagaaagcatggagcgccgttggcgctctcgcgccgcgctctctctaagagaccacgcgctagttatgggcgtgactttctggcttaattaaattgtaatatttattcttacgtctcattttaacacatgtacatatacattttactagtgtactcctataatcctcatgtatcgttataggtcccggacactgtatcaatgtactactat

SEQ ID NO: 21709 - DNA, 461 bp, Zea mays
  Coding DNA Sequence Number=SeqID_7306
ataaatattgaatccggcacgaggctgacaggactgcgagaacgttcagatgaacgaaccccaggaggccaggaccaagagacggaggcgaggcgaggcaggcgaccatgaacaatggcgggagcagttgactcttgacaggatcttatttaggcgctagctgctacatatatactactacgcctcgtcgtcgtcctctctcgtgcgccaccattgggccggctcagctgcagttgcagctggtgccgccgcacttgcaggtgttgcagccgccggcgctggcctggatggtcggcgcagcgaggatgccgctggcggcggcggtctccacttcagggtacaaattgcagcagtcgcatgggcatccgcagtcaggggggcagttgcagccgtcgtcgcagcaatacgccatgatcacaggcgaagggagcaggtgcagctagccagctgtgtttgctgaa

SEQ ID NO: 21710 - DNA, 524 bp, Zea mays
  Coding DNA Sequence Number=SeqID_7307
gaagccgaagagtccctgcgcaaactcaacgagtccctggaacagcgggtgatcgaacgcacccgcgaccgcgaccgcatctggcgcctgtcgccggacctgatgctggtggcgcaactcgatggtgtgatctccgccgtgaacccggcgtggacacgcatgctcggccacaccgaaaacgacctggtgggcagccaattgctggccctggttcaccccgacgacctggccgtctcatcctcggcggtcagccgtctgggggacggcaagaacttccccaacttcaagaaccgttaccgccaccaggacggcagctaccgcatgatcgcctggacggccgtgcccgacagcgactacatccatgccgtgggccgcgacatccaggccgaggaagaagccaaggaagccttgcgcctgtcggaagatgcccggcgccagtcgcagaaactggaagccatcggccagcttactggcggtgtcgcccacgatttcaataacctgctgacggtgatcaagtcctgcgc

SEQ ID NO: 21711 - DNA, 304 bp, Zea mays
  Coding DNA Sequence Number=SeqID_7308
tattgtgacttgagatgcccgacgtagctcgaatcgcaggagaaagaagcggcgggaaaacgtatcatacagaggagagcacgtgatgatgtccttgcaatgttggaagaacgcaaggagcttacatcatcagcaagatggagcaaagcaatacttatgtttgaagatgatgaaagattcaaagcagttgagcgtccaagggagcgtgaagatttatttgagaactatcttgtggaactggataagaaggtcattagatattaaacatttggccttgtgactcttttcactgtggtagttcgta

SEQ ID NO: 21712 - DNA, 321 bp, Zea mays
  Coding DNA Sequence Number=SeqID_7309
ctgccctgatgaccttggtctcaatggtaacctcccacatcactgactctagagagctatgaccatagaggttaggcttgtcctcctctcgataaaatatggttagcagtcatcgccaattagagcatgagttgaaggttacaatgttgtgtgaggagctaaagaaacaagatgaatttcaaaaggaacaacaatagtgctatgctttgttcatatcacaacatcatgctgtgtttttcaagcaaggttgagtttccaattattgttgccattaaaagtatttaagaacgcttagcatggtgacatattgcacatgcaagc

SEQ ID NO: 21713 - DNA, 515 bp, Zea mays
  Coding DNA Sequence Number=SeqID_7310
cataaaaccatacatttaaggagtattaaattattacatcaccatcagagttttgcaaaagtagtcatcattgttcgaagtgcagcggaataaaactaacgataaataaatggagggatggagaagcctgtcccatcactcctcatgctcctcctcggccgaggcggggtcccactcgacagtccaacccggtggcaagatggacggccaagtcactccagcaaccatgtcctccaaagaacctttttgcagtgaagaggttctagatccctctacccaaccatcaattagatagctccatcctcttgatgataagacacttgagtagactcctctttagcaaccacttcatcttgaatcttcactctttgttttgggagctctttgccgagcatggaacaagtaatacacggccaagaatacttgtgggaaaccttgtccacggggaggtgaagaacgggtgggtttggtcacccctagggaatggtacatcaagctccgggcagatggaccaa

SEQ ID NO: 21714 - DNA, 263 bp, Zea mays
  Coding DNA Sequence Number=SeqID_7311
tgtcgctggagtgaggaagaacagagagaaggggagggagatcgtagcagcggcgctgtttgagagctcgccgatctgctgcgggaatggggtgcacggcgtccaaggtggagcaggaggacacggtccggcgctgcaaggagcgccgccgccacatgaaggacgcggtagcggcgcgccagctgctggcatccgcgcacgccgactacctccgctccctccgcgtcaccgccgccgcgctctcgcgcttcgcgaagggccac

SEQ ID NO: 21715 - DNA, 509 bp, Zea mays
  misc_feature (459)..(459): n is a, c, g, or t
  Coding DNA Sequence Number=SeqID_7312
aagaactcgtttcgacatctccttcatcctcgtcgctgccgctcgcctgcccagcaagcccaccaggcgccaggccacaccgcgtctcacgcgtgtgcgcgtcgcgcggacgcagcagcccatcagcagctccaagttctcctcttctccaaaactgcttctcttgcgcagcagagcaaccgcgccaggcttcttctccaggtccgtgcgtgagaatcgcagcctctgttcatctcccaaatttcaaaccatctcctacccacgtcgcgaggacctgggatccatggcgcccttgcagcagaccagccagtcttggcaccccaacccctgcggctcccctgccatccgtcccctgcgttccagggtggtcgtcccgcgtcgttgccgtcgagctgaaaggaaaatgtgcccttgggccatttctaagtattttggtgattgagtgccaacacaagtggncatgtgttaatctatgccaaatgatggacaaagtgaaaaccaacataaag

SEQ ID NO: 21716 - DNA, 393 bp, Zea mays
  Coding DNA Sequence Number=SeqID_7313
tttcaagagcactcaaggtgttccatgctttcatctaaacaaactactggtactgtactgtcgttatactttcatcacccacactagatagacaccataagcaattaagcatcgactgttcacatgcacaactcaactccctaagggcttgttcgttttggatcttgcagaggacttttctgatcttcctgtagcatctctcgcattcaaggtcaaccttgaggacgatcgtggagatcttgtccgccatgggagtggcgctcgactgagtcgccgggccgtcaccctcctggcctggtgccgctggtctcgagctccgggatggtggctgccgcgggagtgtgtgtacgcgtggggaaggaggaagggatgacagtctagcacagaggagga

SEQ ID NO: 21717 - DNA, 143 bp, Zea mays
  Coding DNA Sequence Number=SeqID_7314
atcttgatccaattgtttaaaaataataatcgtcttgtactactgtgctgagggtgcgtgcaaataggaaacaggaaaggagacccgcgtcgtcgcgcccatcgcctcgcctcgctttcatttcccgtcgcttcgggtctgtc

SEQ ID NO: 21718 - DNA, 155 bp, Zea mays
  Coding DNA Sequence Number=SeqID_7315
tccttcggcaaggttcggagtctgactgcacagacctgtaacctcctggcggtcgccgacgaagacgggtatgttggcctctacgacacccgccggcgccttccttccacctcctcgtcactagagaagtcagctgaaacaagggtgcccgactg

SEQ ID NO: 21719 - DNA, 325 bp, Zea mays
  Coding DNA Sequence Number=SeqID_7316
aaacctttcgatccgtggtgtgttggatctgaacccaagctccgagtcgctttcggggtgggcattctcctcttcgtcttcggttgcaagaaagaaaaagcatcatggacggcttccccaagagcgtcggcggtggcggccctaacattccggcgggatcccaccccgcaggcgggagccaggcggcggcaggaggaggcgcgacgcagcggacgcagtatccgtatgtgactggtgttattatgtgctggatctgttgtaagctaagctagggagcttgagtgctgtgttggtcgattaattatttaagctgctaatgtggatg

SEQ ID NO: 21720 - DNA, 333 bp, Zea mays
  Coding DNA Sequence Number=SeqID_7317
ttgttacgaacatcatcaccatcctctaattaattgtacacatccacattagcagcttaaataattaatcgaccaacacagcactcaagctccctagcttagcttacaacagatccagcacataataacaccagtcacatacggatactgcgtccgctgcgtcgcgcctcctcctgccgccgcctggctcccgcctgcggggtgggatcccgccggaatgttagggccgccaccgccgacgctcttggggaagccgtccatgatgctttttctttcttgcaaccgaagacgaagaggagaatgcccaccccgaaagcgactcggagcttgggt

SEQ ID NO: 21721 - DNA, 175 bp, Zea mays
  Coding DNA Sequence Number=SeqID_7318
tcgtcccggagctctccttggttccccctccggcgcaggcgccgtcaccgctgccaagctggcccacgtcctctcctttggcacttctgggggggcgccctctggggccactttatcgggggcatcttcatggtcaaaaacttgccgaggcacatgttccggaattttgcaaaaa

SEQ ID NO: 21722 - DNA, 267 bp, Zea mays
  Coding DNA Sequence Number=SeqID_7319
ttttttgcaaaattccggaacatgtgcctcggcaagtttttgaccatgaagatgcccccgataaagtggccccagagggcgcccccccagaagtgccaaaggagaggacgtgggccagcttggcagcggtgacggcgcctgcgccggagggggaaccaaggagagctccgggacgaagaggacacccgcagcaaagaagcacaccgccgccaggaaccgcgtcgcccaccccatcactcgccgccgatcgccggtgtagatcgagga

SEQ ID NO: 21723 - DNA, 200 bp, Zea mays
  Coding DNA Sequence Number=SeqID_7320
tacttcacgcttatctctgcctggcgcagcctctcggtcggcaccttcctcgacctccccccctgaaagacgggtccacccggggaagggctccaggctgggatccccccattaaggggtcggttgcagatcttcccccacctggttgtccttccccccccttgcattttgggatgatgaagaaaggccccaattttggg

SEQ ID NO: 21724 - DNA, 599 bp, Zea mays
  Coding DNA Sequence Number=SeqID_7321
acatcctgcagtacagtagcttgccagcttatcttcagaaactgcagcttttttagtcagagtagactaatccattcagcttgtatctggtagtgtaacttgtaatcagtaaaaggacactcataattgcatagattcaatcagtcattatacccctaaaattgtttttgaatacgatgtcttagtggtctaaggtatgattatcatatttcttttattttgtgcggggtggcagtgctcatgctcaaatatacccttcacttactgaagttttcaagcccctgataaatgagggcaatgtggcaatgtctacaacgtctcctacattcagatcaagaaagcaaataggatgtacaagactgttgataacgatatcatgatcggtttcacaaaatggacaacggtcgaggaacttattgaggtgcaaatggtatgtgaatccacaggttccagaggcaatgagccttatagctaggtaccttgtaaatacctctggtttggttgcctgtttcccgctgtatcgactagacgtaaacttggaccatgtaatcttattatggaccagtttccagctgaaacaagcctcaatgtcatgctat

SEQ ID NO: 21725 - DNA, 217 bp, Zea mays
  Coding DNA Sequence Number=SeqID_7322
tgcctcacggtctctgcatcacttgaactcagccgaaaaataccgttggtcatggccgtttctggttacacttatactcatatccagcctcatgtattcgatccctctcttctgtgtgaatgtatgtatgagatgtgttgtaatttatgggatcgagtacggaggtctaaaacgtggatgtagttcactttgcatttttctctgatttacgcgtgga

SEQ ID NO: 21726 - DNA, 454 bp, Zea mays
  Coding DNA Sequence Number=SeqID_7323
gatgcccaacccgatagtgattagaggtggggaaacaggagaaccaactatcacgttatgaagcgcgccttacaagaggactgaggcatcgaaaatagccaacactgtgacaacaggatgattaaaaaaaataataacgatactacccgatacgaaaagattacgagaaacaagcaaaaggggtctacacattgacgacccaacactgacaccgaccaaaaataaaacaacaacagtgagccagggccactgtagcatctcgcccgcaaatgagcgcgaagcagagtagaaaaaaacgagtaagcgtgtccggttataagttaccgggttacacttagagctagagtactaccacccaacaccctacactcacacaccaccatcaatcaacaccaatagaaaagaagcaatgccagccgatcgtcaagggaagcgcctggtggttatcgtgtat

SEQ ID NO: 21727 - DNA, 397 bp, Zea mays
  misc_feature (67)..(67): n is a, c, g, or t
  misc_feature (69)..(69): n is a, c, g, or t
  misc_feature (84)..(84): n is a, c, g, or t
  misc_feature (113)..(113): n is a, c, g, or t
  misc_feature (142)..(142): n is a, c, g, or t
  misc_feature (144)..(144): n is a, c, g, or t
  misc_feature (157)..(157): n is a, c, g, or t
  misc_feature (169)..(169): n is a, c, g, or t
  misc_feature (229)..(229): n is a, c, g, or t
  misc_feature (243)..(243): n is a, c, g, or t
  misc_feature (265)..(265): n is a, c, g, or t
  misc_feature (275)..(275): n is a, c, g, or t
  misc_feature (280)..(280): n is a, c, g, or t
  misc_feature (307)..(307): n is a, c, g, or t
  misc_feature (323)..(323): n is a, c, g, or t
  misc_feature (334)..(334): n is a, c, g, or t
  Coding DNA Sequence Number=SeqID_7324
agctgaggccagcatgtcctcacacatcactcacgtataattataaactcctgaaaaaacctgtgcnanattgaagtctccaanattttacaaggtcaagccctcagctcagngctacaaattaatgttcacatgacaaatntntcgctcaatgtcncccgttgtcacnactttgtgtggattcatggcctgttctataaactgaaggcccaaggttcaaaaccatgtncagatgaggactanatgcttggatgtattggctgcnaatatgtttntcggnacttcattacactgaagcagtcatgancataaaagcgcgggtnttcgccacacnaaagcagcgcggcggtagcatgtgcgcatggaatgccgtaaatttgccatcggcggcatgagc

SEQ ID NO: 21728 - DNA, 259 bp, Zea mays
  misc_feature (126)..(126): n is a, c, g, or t
  misc_feature (154)..(154): n is a, c, g, or t
  misc_feature (193)..(193): n is a, c, g, or t
  Coding DNA Sequence Number=SeqID_7325
aaagccgtggtctctcccaagaacgcatttcatcgcttcctgtcacgaagtataagtgtggttttttttcaaggaagaaaacacgccgtgagaggtgtgtgatttgccaaatggagtacaggagangaaatttgcagatgacactttccatgcnagcatgtataccatgccagctgcgtgacaagatggcttngcataaaccaggtatgggctgttgttttgttgaagtcctggggaggttttccgaggcatgtgtcca

SEQ ID NO: 21729 - DNA, 265 bp, Zea mays
  Coding DNA Sequence Number=SeqID_7326
tcgtttctctcttacgcgggagcaggcaacacgcaagccgcgcgcgagccaagcccaggccgcgaccctaagccccggcggcgccctgcagcaagccgcgcccgctctgcgcgcatccagcccaggcgcgagcgacgccgagcgcgtgccgtccgatgccgcctgtgcaagccacgaccgagcccgaccctgccgcgcctgctctctgcgcaaccgctcgagtgccctgcgcgcgttacttcttcgtgtgtaatggagtttaatg

SEQ ID NO: 21730 - DNA, 382 bp, Zea mays
  Coding DNA Sequence Number=SeqID_7327
ttccgttgctgtcgtattgaccccttgtggctggctgagctcgccccgcagtactacgctaccgaagagtaattgtgatcagtggacattgggcacaacagtaatacttaatggtaatgatgaattatttatatttatgcaattcgttattatattaaagtatggtgccattgccgaggcatgtacaacccatttagggagtctcgagtctcttgagtttctaggggtagatgaaaaaaaatcaagagatgggctattcgcaaagagcccgtctctacgattcactatatttattgtgtcttgactatatttatgatctagagtctcgaggctgtatcatgcagtttcttagttgtcatgcccttaacctatgagcaagttt

SEQ ID NO: 21731 - DNA, 360 bp, Zea mays
  Coding DNA Sequence Number=SeqID_7328
gccagcaatgagctctattattaaacttgctcataggttaagggcatgacaactaagaaactgcatgatacagcctcgagactctagatcataaatatagtcaagacacaataaatatagtgaatcgtagagacgggctctttgcgaatagcccatctcttgattttttttcatctacccctagaaactcaagagactcgagactccctaaatgggttgtacatgcctcggcaatggcaccatactttaatataataacgaattgcataaatataaataattcatcattaccattaagtattactgttgtgcccaatgtccactgatcacaattactcttcggtagcgtagtactgcggg

SEQ ID NO: 21732 - DNA, 279 bp, Zea mays
  Coding DNA Sequence Number=SeqID_7329
gcgcgctggtcacgtgcgtcaacaacttccccgagacccgcgacctggggctcagcatcctcaagggatttgtcggcctcagcggcgccgtgtacgcgcagctgtaccaagcgctatacggcggcgaggacgctgagtcgctcatcctgctcgtcacctggctccctgtggccgtgtccgtcgcgttcgtccacaccgtctgctacatgccgtacccgtggcggcggcgccgcggcgccgacggcggcgggcaggagacgagctccgacccttcttctg

SEQ ID NO: 21733 - DNA, 475 bp, Zea mays
  Coding DNA Sequence Number=SeqID_7330
gaagaaacggcactacaccagcataccagcattttacggtgtgttccatcgtatccaaatatataaagaactggcatcctgcgattgtgtatatactccttccaagcaggatgaaaacacgacagataaattgacagtagtagtgtgctatcggtaatgccactacatttgtttagcggcgatctgtatctcatggataaaaatagtccatcttatagaaatatgttaataaagattaaacgtgtgttaattacatactaacaagaacaagcccattttcatcagatttctcaccatcgctggtagagaaccgagcaatggttttaccgttttaggttttatagtcccagatacctttgagccccccaggactaaagtactaaacgcagcttaagtcctgggtcaaacatctagcgccacaagttggcttacagaagagttttagtttcaatggcgctctaaccgggcctaaagg

SEQ ID NO: 21734 - DNA, 445 bp, Zea mays
  Coding DNA Sequence Number=SeqID_7331
gtgcctgcgccatacacggcgtctgcgtctgcgccagcgccgctggtttccgcacgaacgctccgggcccatcaccgcgcctgactggatcattggccggctcgctgcgaggtcgtcttcggcgccagaccgccgtgtccggtgatgcgcctgatccagggccatggccggggcgtcaggcggaacgccggctgccgggggtggtggaccgaggcgtcgtcggaggcccccgccggagaggtccaagacgatgtgccgcggctgcacctgcgcctcggcgagttccatttctgctgctgctctgttcggctgtgtctctacaagtctacagaagccgcagccggtttgtcagcttaggactgtgtgtgttctagcttctacaaggaaaagatttttttataaaaaaaaagaatacagggtatgagtgtaaagtatcggctagcta

SEQ ID NO: 21735 - DNA, 562 bp, Zea mays
  Coding DNA Sequence Number=SeqID_7332
accaactggagtccgatcgacgtagccgtggcctctcttccgtaagccctagcccctagccgcctgtctcgtgcatttgtgctgaggctcaactgctgatccgtcttccaagctgtggtgtcatcccctgagttctgatccaagatgtatctccagtattacatcaatgagaagggggacaaggtctacaccaccaagaaggagtcacctcttggggtgccgacgcagtctgctcacccaggtacaccgcctttgttcactggagttactttttttttctgctgttgtaacttgcctgtcaaagatgtaacagttgggacatttcttttgttgggtacaacgtacaaggatgcagagtcatggtttgctaatatgagtattagcattaggcatgtttgcagacttggagccccgcctgatttgtttcgtttattcatagtatgtcgtgttttcaatttcttctgagtttagattctggatattttaagcagacaaaaaatacctgtgcggcttataagactggagttaagagtatctgcacctgtcaaagctgcagaacgtt

SEQ ID NO: 21736 - DNA, 541 bp, Zea mays
  Coding DNA Sequence Number=SeqID_7333
aagggcacatgacacggctcaacaatacgcagcacaggacagtagggtagcgaaagctttgacattttgcaggctctggagatcacagaagccagagtgtagctacaaaaaaaactgatcgattttacacgcatccgcgcatacagtgtcgagccagcgacaggtttggcgtatgccaagggcagcgtcaggttcattatttgctaacccagacagcttcggcgcgacgacgacaatcctactcctatgaacagcaaaatctcctcctaacgctggacgtttggtgctgcagagattctaccgtctccaccagttccatctgcttttccaccgcagcctgcagcgcgtttttcggtactacctgctcatgatacgaggcatgtccattcaaagaacgaaacctcagcaattatatgagttcaactaaaggcaccaggagcaattaaaaaaagatgcttaatacaggcagtaagagcaaagtaacaagtcatgtatgaagatgcctgtcacagatatatagcaggtttcttgctccatcgac

SEQ ID NO: 21737 - DNA, 455 bp, Zea mays
  Coding DNA Sequence Number=SeqID_7334
tttggtggtggtatgcgattagtattaatatagctggagataattctgctccattggtctatctattatagtcaggacaaaccattcccgatctatctccatcgaaagttatacgcgcaccagcacggttcctccaggactatatgcatcggaatgcagcatgtcctcatatccaccaaaccctgtacaagttccgaatgtcaaaatttacagggcaagggcaacggcgagagcaccagcgagaccgctgaggccgagggcagcagcgccgttggccggggtggagccggagccggagccggagccggagccagagccagagccagagccgggcttagtaccgttggtgggggcaccgggagtagcgacgggagtagcaacgggagccacaggggtctgggcagcagccgcaacagcgacgaaagcgaggacggcagcggaagcgtgcattttga

SEQ ID NO: 21738 - DNA, 465 bp, Zea mays
  Coding DNA Sequence Number=SeqID_7335
aacactcgtttaaatccgatctaattctcttcgaactattccaataaccaaacaacctaaaaccaccatcaaaatgcacgcttccgctgccgtcctcgctttcgtcgctgttgcggctgctgcccagacccctgtggctcccgttgctactcccgtcgctactcccggtgcccccaccaacggtactaagcccggctctggctctggctctggctccggctccggctccggctccggctccaccccggccaacggcgctgctgccctcggcctcagcggtctcgctggtgctctcgccgttgcccttgccctgtaaattttgacattcggaacttgtacagggtttggtggatatgaggacatgctgcattccgatgcatatagtcctggaggaaccgtgctggtgcgcgtataactttcgatggagatagatcgggaatggtttgtcctgactataatagatag

SEQ ID NO: 21739 - DNA, 437 bp, Zea mays
  misc_feature (384)..(386): n is a, c, g, or t
  misc_feature (407)..(409): n is a, c, g, or t
  Coding DNA Sequence Number=SeqID_7336
gtaaatatgtttcttcattcctaagatgaatatatgaataatactctagttgggtactagggttggtttgcttctgagagtatggaattttgtaatactagggttggtttgcttctgtgactatggaattttgtaatgctcttttggtgagcagttttcagtgccattaggtcgttacttgagaggcatcaggtgtgtatatgtgcaacactaagttcatagaagtatttcattgtcttgctttttttcgctcatgcatgcttgaaactccctctgtgttcactagctatagcaatacatagcagtgacttcacactcttccatatatcggcaccagttttttcatagtgcacatacgtatgttatgtacactatacgagcctnnngcagaagaaaatggttccttnnntcttaaggacttgtcctgcagcaagtat

SEQ ID NO: 21740 - DNA, 415 bp, Zea mays
  Coding DNA Sequence Number=SeqID_7337
actggttcaatcgttcagggaatcaggccggccacaggcgtcaggttcagtagccgtgcccagccgcctatccgctcaggcttccttcctccatggtggccgatcggagcagcaaacgcaggagctggcgagggcgagctggtgacgagggggggaggccgagcgcgcgccggtgccacgcctgcgaggccgcgatggagcgccgctgctccaacgcccggcgatggacatccctgtgcccctgttggagtgttggttgtcgcggtgtcaccaagaccagagaggcagagaggcggctggatcgtggacacgaccacgaggccgagaggggttgaggagcggctgatgcgtctcagggtgacctatttttcttggacttctcgagcctattcgttgttgttagtgggcagcgacc

SEQ ID NO: 21741 - DNA, 380 bp, Zea mays
  Coding DNA Sequence Number=SeqID_7338
gacgcgacccctaggacctggagagagaggtcggcatggctgccgcagtggtcgacgacgctggtatggacgccgtccagaagcgcctcatggtcgaagacgaatgcattttggtggacgagcaggacaatgggtggggccatgagtcaaagtaccactgccatttgatggaaaaagatggatctgagaatctgctacttaggccatgcaggggggtcccttttccacccaaatttgacctgctactccacaaaggccccggaaaagggtacccttcccttaattgggccaaaaccggtggggccccccctgggcccgggggtggggttttccccggaaactccctgggggggaaaaaggcccccagagagagtctcggg

SEQ ID NO: 21742 - DNA, 224 bp, Zea mays
  Coding DNA Sequence Number=SeqID_7339
ggcctttgtggagtagcaggtcaaatttgggtggaaaagggacccccctgcatggcctaagtagcagattctcagatccatctttttccatcaaatggcagtggtactttgactcatggccccacccattgtcctgctcgtccaccaaaatgcattcgtcttcgaccatgaggcgcttctggacggcgtccataccagcgtcgtcgaccactgcggcagccatg

SEQ ID NO: 21743 - DNA, 449 bp, Zea mays
  Coding DNA Sequence Number=SeqID_7340
gaggcacccaatcgggcacggcggcccagccggccatttaaaggtggcagttagggttggacctaaccggccatcccggccaggcggcggcggcggccagccatggcagcgggcgcggaggcgaggcaccagcggccttgcgcgcgcgggcgcagccctcgacggcgcgggtgcagaggccccgggcggggcgggcgctccggccagccccctgcagatcgagcgcccccgctggcggcgcggcacacgttcactgcgcgggcagcggcctctacgcccgggcgcggccctcggcacgctggccacggcggcggtgcaggcgcgtgtccatggcgcgggcagcagccactacgcgcaggcgcggcctccggcaacgcggcgcggtggcccggccatggctgcgcgggcgtgttcccttgcgcgctggcgtggctccctggcatcgcggg

SEQ ID NO: 21744 - DNA, 298 bp, Zea mays
  misc_feature (101)..(101): n is a, c, g, or t
  Coding DNA Sequence Number=SeqID_7341
gacggcacctgagcgactgcggcggcggcggcggcggcggcggcgcctcggagcgggcggcccgggctgtagtgccggcgccgccgcgtcttcccggtctnctttcccggccgcacagggtgttataggatcacattgacaaaagtaccatggagttttatgagtcagcatattttattgttcttattccttcaatagttacagtaattttcctcttcttctggcttttcatgaaagaaacattatatgatgaagttcttgcaaaacagaaaagagaacaaaagcttattcctaccaa

SEQ ID NO: 21745 - DNA, 307 bp, Zea mays
  Coding DNA Sequence Number=SeqID_7342
caaaagctcagttatcgtatcggttggctgatcgcaaccgtacatgcgacagagaaaataagtgacacggacaaaatcctgatgagacactgaacactccgcttgcagttccatcaccttttctcaagcacgacttgaaattgccttgaaaccaagaaatataggcatgcttgctatccacaccagaatagatagagttttccgaagaaacctgctagtggaggaaggcctcctttcaaaatctcacgagctggatccgtgttgcggaaatcagtagcttggcaaacctggacgaagcggacacgca

SEQ ID NO: 21746 - DNA, 250 bp, Zea mays
  Coding DNA Sequence Number=SeqID_7343
gtgagattttgaaaggaggccttcctccactagcaggtttcttcggaaaactctatctattctggtgtggatagcaagcatgcctatatttcttggtttcaaggcaatttcaagtcgtgcttgagaaaaggtgatggaactgcaagcggagtgttcagtgtctcatcaggattttgtccgtgtcacttattttctctgtcgcatgtacggttgcgatcagccaaccgatacgataactgagcttttgcaa

SEQ ID NO: 21747 - DNA, 332 bp, Zea mays
  misc_feature (36)..(36): n is a, c, g, or t
  misc_feature (59)..(59): n is a, c, g, or t
  misc_feature (70)..(70): n is a, c, g, or t
  misc_feature (96)..(96): n is a, c, g, or t
  misc_feature (104)..(104): n is a, c, g, or t
  misc_feature (112)..(112): n is a, c, g, or t
  misc_feature (118)..(118): n is a, c, g, or t
  misc_feature (139)..(139): n is a, c, g, or t
  misc_feature (142)..(142): n is a, c, g, or t
  misc_feature (169)..(169): n is a, c, g, or t
  misc_feature (174)..(174): n is a, c, g, or t
  misc_feature (182)..(182): n is a, c, g, or t
  misc_feature (187)..(187): n is a, c, g, or t
  misc_feature (198)..(198): n is a, c, g, or t
  misc_feature (201)..(201): n is a, c, g, or t
  misc_feature (203)..(203): n is a, c, g, or t
  misc_feature (213)..(214): n is a, c, g, or t
  misc_feature (220)..(220): n is a, c, g, or t
  misc_feature (230)..(230): n is a, c, g, or t
  misc_feature (270)..(270): n is a, c, g, or t
  misc_feature (289)..(290): n is a, c, g, or t
  Coding DNA Sequence Number=SeqID_7344
gggggattcacgacatgagacaagagaggagctaantatatgttgaaccatactactancagctatattnttatataataaagaataactatgtantactaacnttgttcangcaacntgtaaaatatttttcatctgnganagagggagaggctgtctgtgtctttgntaggncggggggngctgncccttcaaacntgnantttccctggnntggtgnggagaaaatnacagggggtattctcattttttttgggctcaccccgggangagcccccctaccgcttgnnctatagggctgcccctgctccaagcgcagtatgctacactta

SEQ ID NO: 21748 - DNA, 398 bp, Zea mays
  Coding DNA Sequence Number=SeqID_7345
atctgtcatcctcaactgttgagtctacgccgagctgcagccgccaccgccagtccgccaccataactccgtaagcgtcgtccgcccgtccctgcgtggccgcgtcccacacaccgcagtcccgctcggccgctcctgccggcgcgctgcagcagtgcagcagctcggctgctcacctgtagcctgctcccgctactcgcggtcgcggcctcgcgggccacggcttgtcccgcccggcggtcgacgcccaggctaactggggtagtagcgtgccacaggggacagcggtccagttcaccggcctcgtcagctcgtgctcacaacagcagacagcaatccagttcaccagcctcgtcagttcgtgctcacaacaacagacagcggtccagttcaccggc

SEQ ID NO: 21749 - DNA, 111 bp, Zea mays
  Coding DNA Sequence Number=SeqID_7346
gcaagtaatatgatgttcctgtctagaaatgacccttattgttcaattcctagcactctgataatcatgtggcacttggataattcaatgatctcctatttcaaaagcaca

SEQ ID NO: 21750 - DNA, 335 bp, Zea mays
  misc_feature (180)..(181): n is a, c, g, or t
  Coding DNA Sequence Number=SeqID_7347
gcgcccggagggaggccgtctcactctcctcgtcggggcgggaggagatggaggccatcgtgggcgtccgcgcggcgccgcgtggccgtgcctggccccacctcgagaagccgccgccccccgcttgctgcgccagagtcccgacggcgagcctcgcggtcgcggcggacaggccacacnnaggctgccgcagctgcgagccgatctcgccgagggccgtgactgatcctacaccttgtcccctggacgccctccttcttcgcaccggccgttgtttctccccctccgcatttgtcccatgggtcgtttccgatagaacacaacataggactact

SEQ ID NO: 21751 - DNA, 484 bp, Zea mays
  misc_feature (184)..(185): n is a, c, g, or t
  Coding DNA Sequence Number=SeqID_7348
ggtaagtctcttgcgtagctaagtggcgcagtagtcctatgttgtgttctatcggaaacgacccatgggacaaatgcggagggggagaaacaacggccggtgcgaagaaggagggcgtccaggggacaaggtgtaggatcagtcacggccctcggcgagatcggctcgcagctgcggcagcctnngtgtggcctgtccgccgcgaccgcgaggctcgccgtcgggactctggcgcagcaagcggggggcggcggcttctcgaggtggggccaggcacggccacgcggcgccgcgcggacgcccacgatggcctccatctcctcccgccccgacgaggagagtgagacggcctccctccgggcgctgccgccgctagctgctcgacgaccgaccagccagctgccgcctaggcgggggcgctgctcgtgttaggtggagccggtgttggataggtcggccatcgcccgccgaggtaatggagcgc

SEQ ID NO: 21752 - DNA, 198 bp, Zea mays
  Coding DNA Sequence Number=SeqID_7349
tcacagtacacaatcgatggcccattaggtccatttggcgttcccagttgccctccacgctcagacgctctacctcgctcgaatcctcgatcccaccggtggcggctgagcggctccaagctcctaagcacgacggcgccactgcggactgcggtacgctgttgctgagctcctacgcgcctgtggacgaccggtcgt

SEQ ID NO: 21753 - DNA, 145 bp, Zea mays
  Coding DNA Sequence Number=SeqID_7350
gaaatagcattggagttaagaaaccaagaaaagaaaataatgagagagtttgacggcccaatcaaatcttacaaatgcctagaccaaaaggaggggtatcggaaggcgacatcgcgatatctcattcttacacattggaggaggg

SEQ ID NO: 21754 - DNA, 273 bp, Zea mays
  Coding DNA Sequence Number=SeqID_7351
tccctcctgtcaccagcaaatattgaaagaagcatccacatgcaatcatgctaacaacaaaagaggccatacaatggcagggatgatggaaaaccactggtgcctgcgaaacatcaaaaaggagttcagacccctggtgatgaaaactctaaaaaggggattggacctggaacgagaatcctcccggtttttatgaccctggggaaacccggaatatctggccctttatttttctgacctgagaactgctaaatatttacagccccaaagtga

SEQ ID NO: 21755 - DNA, 183 bp, Zea mays
  Coding DNA Sequence Number=SeqID_7352
tactacaactgagccaggcggcggccctctctcctactcggcaggttggtctgaattctgaaggcatgggtgcaattcggttcgcggtgatctcttaagctcatcacatatataaaagcaacctcaggtggctatggaagacatggcgggccaaactatgagggaccactgacaggtttgcaa

SEQ ID NO: 21756 - DNA, 384 bp, Zea mays
  Coding DNA Sequence Number=SeqID_7353
gtctggtcgcctgttcaggagagtttcgagaagctgaaatggctcctaaagctgctcctgccaagaagggtgatgccaagatccatcccttgaaggttgccaaggctgtgaagtctggggcatccattaagaaaacccagaagatccgcacgtctgtgacatttcaccgccccacgaccctgaataaggctagggaccccaagtaccctcgaatcaccactaccggaaggaacaagctcgatcagtaccaacttctctattacccccttaccacttaatcagcgatcaagaacattgaagataacaaccctctggtcttcattgttgacctcaacgtatacgacaacaagatgaaggctgccctcaacaatatgtttgatatcc

SEQ ID NO: 21757 - DNA, 114 bp, Zea mays
  Coding DNA Sequence Number=SeqID_7354
cctctgacgtcgagctagcattcaggtgttattcaaccattaacagataagtctcaatggccgaaagtcaaccttggcttcaagttattgccacctctggtaaaaagatcagta

SEQ ID NO: 21758 - DNA, 397 bp, Zea mays
  Coding DNA Sequence Number=SeqID_7355
gctctagcgccacaggcaacctgaagctcccatccattcgatcattggctttaaaaaccgccccacgccggccccaaaagctcccgaaccaaaagaacccttcctgctcaatgatcgcctcccacacgccgtcgaagtcgaagtctacgccgccgtcgccgccgacagcgaagcacctgaacctctctttccaatcgctggggccctcctgctctcccatgcgcgaacgcggcctcaaagccgtcgtcgtccaggtccagcagggcggacagcttcatcccggatgctcttgacggcgccggcgggcatctcctgtgccaccgcctcaggatgaccctcttggtcttcacgaccaccttcctgggtagccggacgaataggaagacggtgacctgca

SEQ ID NO: 21759 - DNA, 200 bp, Zea mays
  misc_feature (26)..(28): n is a, c, g, or t
  misc_feature (80)..(80): n is a, c, g, or t
  Coding DNA Sequence Number=SeqID_7356
gtcgattcaaccacactgctgccagnnntgccacaactatttactgccgccccctcatcaccgccacgggcccggcgagnaagcgccaccaggggagggaagccgaggcctaggacaggaggccatgtcaggggaccgctcgtccacggcagagcgccggcgggggatccggcgcctcctcctgcatccgcgcggcgagg

SEQ ID NO: 21760 - DNA, 299 bp, Zea mays
  misc_feature (106)..(106): n is a, c, g, or t
  misc_feature (168)..(168): n is a, c, g, or t
  misc_feature (240)..(240): n is a, c, g, or t
  misc_feature (245)..(245): n is a, c, g, or t
  misc_feature (256)..(256): n is a, c, g, or t
  misc_feature (266)..(266): n is a, c, g, or t
  Coding DNA Sequence Number=SeqID_7357
caccgccgtcagttcgcggatggctcatcttcctcgtgtagaccaccggagcccccttctcttcctcacgcagagcaccgggatcccccttttcctcgcgcagagncgacgcataggaggtctggcaaagtctcatcaagatggcaggagaatctacaaagttcaaancagtaaccatctgctgaaggtgatacactgtaataggtgaagcataagaagttttttcataagatcaaaggnagacnagggatagagntctatggcgntaaatagatgtttaaaggaaagtcatgatgagc

SEQ ID NO: 21761 - DNA, 506 bp, Zea mays
  misc_feature (44)..(46): n is a, c, g, or t
  Coding DNA Sequence Number=SeqID_7358
tttttatgtgggtcgccgccgagtagagtcgctaacccattaannnaggatgctcgtttcagagatgaaatcaagctggtctcttcttccccgatcacgactccgctgggccaacctccgtcgtccccttcttcctctgggaggaaaggaggatgtgttagaggcaattttggtaacagcccagcggttaggatcgaagggtttgattgccttgacagggacagtagaaactgcagcatccctgccttggcttagaaaccaaaccaacctcgaaaacgcatccactctgttgaattatctcatgaaaaccaatttagtgcgtcgtacatatatgagtttaaggatatggaaatgtgtggaatataatctttgagggaagtgaaagagcatgtgagatcaatcttttggagtttggttgttttgtttttaaagagtgtaaataggtgacggagtaaaaccgattttctgggttaagtttttagtattcgtggtcattttgtaagtat

SEQ ID NO: 21762 - DNA, 289 bp, Zea mays
  Coding DNA Sequence Number=SeqID_7359
tggaccttggtgaagaaaagtcgccgcgttcctcttgcctgatgaaatcctcttctcgtctagatctgagcctccgcgtggcttcaggatcagatgcttggtccgatcgaacaacggtgagtcttgctctgttacttgatttttcgaaacgcatggttttgttttgtgatgatgtgcaggttccgatctgtttagtttgattgatgagttgacgcatcagctcgaagcgagacaaggctgccttgccaaacggacccttagcatagtctaatttttacctcatcacaaa

SEQ ID NO: 21763 - DNA, 472 bp, Zea mays
  Coding DNA Sequence Number=SeqID_7360
tgaacgccacggcagaggccatgtccaagtacttcataggcagcgtgctgagtggtgggggcagcgtgcctgctcctcaagcatctgctggggattgggcttcgatggtgaatgagatgcaaaagggttctctttctacccgccttggcattccgatgatctacggtattgatgctgtccatggcaacaataatgcctacagagctactatcttcccccacaatattgggcttggagctaccagggaccctatgctcgtgaagaggataggagaagcaactgctcttgaagttagagcaaccggaatctcttatgcctttgctccatgcattgcggtttgtagagacccaagatggggacggtgctacgaaagctatagcgaagacccaaaggctgtccaggcaatgaccacactcatctctggcttgcaaggcgacgctccgtcagattacacaggaaggccatatgttgg

SEQ ID NO: 21764 - DNA, 556 bp, Zea mays
  Coding DNA Sequence Number=SeqID_7361
tgggctacctgttttccgggagagaacaacgaccttttcaaaggactgatttatagttcgattttcttgcctagttgcctgtcggtagcgccggataaaataggtcgtcgaattaggccccgtttcaatctcacgggataaactttagctttctgctaaactttagctatatgaattaaagtgctaaagtttagtttcaattaccatcattagctttcctgtttagattacaaatgactaaaagtagctaaaaaatagctgctaaagtttatctcgcaagattggaacagggtcttagctggattggttaacgagccaattctgagctaaactatctatcacattttagtaaatgagctaatttgtaaactatatacatatcatctatacatcaaatgatgaaaatattatatgtatatggggggtctacgatctatgagttaaagtgatgatttccattttaggtaggtgcactgttatccagtctagtactgtgttggttggttgggtccggattcgacctacgtacacggacccggtccgtacctgaaggcag

SEQ ID NO: 21765 - DNA, 569 bp, Zea mays
  Coding DNA Sequence Number=SeqID_7362
aatgccaacccgatgccgttcggttgattctgccttcaggtacggaccgggtccgtgtacgtaggtcgaatccggacccaaccaaccaacacagtactagactggataacagtgcacctacctaaaatggaaatcatcactttaactcatagatcgtagaccccccatatacatataatattttcatcatttgatgtatagatgatatgtatatagtttacaaattagctcatttactaaaatgtgatagatagtttagctcagaattggctcgttaaccaatccagctaagaccctgttccaatcttgcgagataaactttagcagctattttttagctacttttagtcatttgtaatctaaacaggaaagctaatgatggtaattgaaactaaactttagcactttaattcatatagctaaagtttagcagaaagctaaagtttatcccgtgagattgaaacggggcctaattcgacgacctattttatccggcgctaccgacaggcaactaggcaagaaaatcgaactataaatcagtcctttgaaaaggtcgttgttctctcccg

SEQ ID NO: 21766 - DNA, 423 bp, Zea mays
  Coding DNA Sequence Number=SeqID_7363
aaagtattgggctgaatgcaaccatggcactactgggtttagcaatcatttgaagtcagctcacaagattgtgaaagggcagctacaactcagtttagaaaaggatgggaaagatataactactattaagcctttcaggtcgggaggtctggtgccttgttaatgagaaatgggttgtgtgctcatgttcttggtgttggtacggtcattctgaagtttacttcgggaaagacggtgccattgaagagcgtgcagcatgtgccctctatcaagaagaatctcattagtgcttctatgttatgtcaagatgggtacaaagttgtttttgagtcaaataaatgtgttatgttgaaacatgatacttttgttggtaaaggatatgactgcggaggcttgttccactcatctctgcatgatgtgtgt

SEQ ID NO: 21767 - DNA, 157 bp, Zea mays
  Coding DNA Sequence Number=SeqID_7364
taaagtgtccaagagtcaaagccactccatcagataatttctctattttactatgtatcaaataacacagatatatatcaacaaaacgacatggaatttggaacggtagaagtacactcttttttaataaatgaacacgcttgaatcatatatataa

SEQ ID NO: 21768 - DNA, 454 bp, Zea mays
  Coding DNA Sequence Number=SeqID_7365
gggtccaaacgaatcaggaatgagtatttcttattgggtcgttagatttgcattagggtataggaggcaaccatcgtttcctgttatcttcggtatcacatgagccttccctacccagccgtcatgtccctccgttccctgatctatcgaaacaaatgtagaagaagtgaaggggtctgctcctgccgccggatctgcttggctttggaaaagctaggtgaaaataaggatagaagggagggaggaggacgtggtctccttgaggttgcagtgctccgtatcagacttaattcattgtcgccttattggtgaagtcttttcaggtgtgctaattggatatgtctgctctaggaatgggagtagctgcagttcacacacatagatgacactttaatcgaagtttggcttgctactaatttaagtgaatggaagagtagagtctttaactagcttg

SEQ ID NO: 21769 - DNA, 553 bp, Zea mays
  Coding DNA Sequence Number=SeqID_7366
aaattacagttggtctgagcaagactgctagccccgtgcacaccaaatccagccctcctcgacgtccactcaccgggacgggttcaaatgggagggcgttggatagcatctcttcgcaggatgctgctgctaaggggatcacaaatccacttgctagtatgaaagatgagcctgttctggacaaggcaatgcgccgaatagcagaacacaatctggatattggtgggaaacgtcgggaaaggaccctgtccaacgagggctttggtatgtcagaggctggggacactggtcatttttactgtagcccagaggcttcgcgcatgggctgtgctacagagacaggactcatgcaattttttggtaatggctacgcaacatttaactcaagtggccaaggagtttttttcccgggaacatggttggcggtctagtcttcggattgatagccactagtgtgtgtttttagattttgttgggctgtgtgctcctatgggcagaggccggaagtgactttcaaggaattgtatcatctcgatgtactattcttgaatga

SEQ ID NO: 21770 - DNA, 545 bp, Zea mays
  Coding DNA Sequence Number=SeqID_7367
cgtgctgtcgctttgcttctccgtcccactgaaccatcgccgccggctagccgcgggagaagttcccgccgcgccgacgccgacgccgaaaccgccgtcgcgtgttttgaagctctcgaagaaggggcgcgcagcatgagagcggccgtgaactctccacctccgcactgctactcgcaccgtcgtgccagcgccacgctgctggatgcgcgccatgtgttcgaccacgtgccgccgcagcgcctaccgaacctggccgcgggactccgcgtgcggcccatcgccgcggccgaatggaggcccgcgcggcgctcggccgcatctgcggctgcccgcacctgtggcgccgcttcaggacattcctgcaaatcccaacacccgcttcttcagccttatcgcgcactagtagctccgtctgcattcttgccatcaagacggagctctgaaggctacattcctcgtagctgctccagctcatcgctccagatctatagccggtcaccactgttaaatctatcgccgtcttcagctctcatggtatcctc

SEQ ID NO: 21771 - DNA, 202 bp, Zea mays
  misc_feature (116)..(116): n is a, c, g, or t
  Coding DNA Sequence Number=SeqID_7368
gtatgatgttgaaagctggagcgtttgtccaaacaaagggtcaaggtccctgaaaagggtcacagtagaaaccagaagagttggattcacaggaatctggttaaagcagctgccanaatttgcagcagttactataccacctcgttgggatggtcgggtggattatctccgttaacttctgggctatctagtctgctagctc

SEQ ID NO: 21772 - DNA, 286 bp, Zea mays
  misc_feature (28)..(28): n is a, c, g, or t
  misc_feature (43)..(43): n is a, c, g, or t
  misc_feature (56)..(56): n is a, c, g, or t
  misc_feature (75)..(75): n is a, c, g, or t
  misc_feature (80)..(80): n is a, c, g, or t
  misc_feature (89)..(89): n is a, c, g, or t
  misc_feature (93)..(93): n is a, c, g, or t
  misc_feature (101)..(101): n is a, c, g, or t
  misc_feature (117)..(117): n is a, c, g, or t
  misc_feature (121)..(121): n is a, c, g, or t
  misc_feature (124)..(124): n is a, c, g, or t
  misc_feature (140)..(140): n is a, c, g, or t
  misc_feature (143)..(143): n is a, c, g, or t
  misc_feature (154)..(154): n is a, c, g, or t
  misc_feature (171)..(171): n is a, c, g, or t
  Coding DNA Sequence Number=SeqID_7369
agacaatccttcctcccagtttgcagtntcatcctatctcttntcatttcatcccngaccaatttctccccatangttcntgcagttcntgtngaagtganccgcaggagacgtacntcgncgncatggggcgggagcgncgncggcggggtcnccccaaaatcccgcggntaccggctctgtggaggaaccgcgatcctttccgggatccaggttgggtagtggagtgcgcgctcccttgcttcgactaggatttataaagaaggagccgggagagggtttgatt

SEQ ID NO: 21773 - DNA, 276 bp, Zea mays
  misc_feature (107)..(107): n is a, c, g, or t
  misc_feature (124)..(124): n is a, c, g, or t
  misc_feature (135)..(135): n is a, c, g, or t
  misc_feature (138)..(138): n is a, c, g, or t
  misc_feature (154)..(154): n is a, c, g, or t
  misc_feature (157)..(157): n is a, c, g, or t
  misc_feature (161)..(161): n is a, c, g, or t
  misc_feature (177)..(177): n is a, c, g, or t
  misc_feature (185)..(185): n is a, c, g, or t
  misc_feature (189)..(189): n is a, c, g, or t
  misc_feature (198)..(198): n is a, c, g, or t
  misc_feature (203)..(203): n is a, c, g, or t
  misc_feature (222)..(222): n is a, c, g, or t
  misc_feature (235)..(235): n is a, c, g, or t
  misc_feature (250)..(250): n is a, c, g, or t
  Coding DNA Sequence Number=SeqID_7370
ctctcccggctccttctttataaatcctagtcgaagcaagggagcgcgcactccactacccaacctggatcccggaaaggatcgcggttcctccacagagccggtanccgcgggattttggggngaccccgccgncgncgctcccgccccatgncgncgangtacgtctcctgcggntcacttcnacangaactgcangaacntatggggagaaattggtcngggatgaaatganaagagataggatganactgcaaactgggaggaaggattgtc

SEQ ID NO: 21774 - DNA, 235 bp, Zea mays
  Coding DNA Sequence Number=SeqID_7371
aactccgatcgcacgagccccagcccccaaacagcctccaggtctagctagggtttcgtctccgccgcttgctctaatcctctcccggcacgcgacacgcgagggcgcagcgtttatggcggcgacaccggcggacgcgaagaccgaggccgccaagatggacctcctcgaggacgacgacgagttcgaagagttcgagatcgaccaagtggtaaaaaatattgctgttatatat

SEQ ID NO: 21775 - DNA, 362 bp, Zea mays
  misc_feature (196)..(196): n is a, c, g, or t
  misc_feature (280)..(280): n is a, c, g, or t
  Coding DNA Sequence Number=SeqID_7372
gtggtgtcagcacccgcatcaaggtccatacaacagagctcgtcatgtccgagatccagcgcgcgactggcccacgacctggagacggagcggggccatccctccccggatggagcgaccccaccgccctgggactgttgtcgccccagtgcccccgaaacatccgtctccgcccttctgcgtagggcgaactagngttccgagagcctcccagccgccgcggactcgtcatacctcacggccgcgcggttgggccaccgtggtagaggcgggagggccntcgccgcacgcggcatccgaggccgccgcgtttcaggggccgctcggaggacagtcccttacagcacgtcagaggccggtag

SEQ ID NO: 21776 - DNA, 363 bp, Zea mays
  misc_feature (82)..(82): n is a, c, g, or t
  misc_feature (166)..(166): n is a, c, g, or t
  Coding DNA Sequence Number=SeqID_7373
taccggcctctgacgtgctgtaagggactgtcctccgagcggcccctgaaacgcggcggcctcggatgccgcgtgcggcganggccctcccgcctctaccacggtggcccaaccgcgcggccgtgaggtatgacgagtccgcggcggctgggaggctctcggaacnctagttcgccctacgcagaagggcggagacggatgtttcgggggcactggggcgacaacagtcccagggcggtggggtcgctccatccggggagggatggccccgctccgtctccaggtcgtgggccagtcgcgcgctggatctcggacatgacgagctctgttgtatggaccttgatgcgggtgctgacaccacgg

SEQ ID NO: 21777 - DNA, 81 bp, Zea mays
  Coding DNA Sequence Number=SeqID_7374
tgtcgtatagctctcatctctcaattgtgttggatgtctgcggaatgtgtagtccagcatggtttgctggctgttttaatc

SEQ ID NO: 21778 - DNA, 338 bp, Zea mays
  Coding DNA Sequence Number=SeqID_7375
tgtgcagctattcaaatatgtcccccgtgaacagctccccattcctgattttgttttccaccatgcccttgaagtgaatggtggaaagggcataatcgttgccccaagaacaaagcatttttcccagagcccatttggttgatttgtcataaccctgcaaatgaacgtttcacagtccccctttcactatgtacagattttccatgattttgtccagtcctttgtagaagagtccccttttaaagctgggcattttgtatttagttgacattgttgctctgtgctattccttcccctttttgggaggcatatttaggtatcttaataacttttcaggt

SEQ ID NO: 21779 - DNA, 536 bp, Zea mays
  misc_feature (31)..(37): n is a, c, g, or t
  misc_feature (56)..(58): n is a, c, g, or t
  misc_feature (71)..(72): n is a, c, g, or t
  misc_feature (77)..(84): n is a, c, g, or t
  misc_feature (134)..(136): n is a, c, g, or t
  Coding DNA Sequence Number=SeqID_7376
tcacgcggcggcattctgtttcggctgcggnnnnnnncaaggagaacctcacgcgnnngaaacagaatgcnnctgcnnnnnnnnattgccgctcctcctggctcgattcccctcccaccagagcaggacacacnnntggcccagaactaccaactcctgcctccgttgaagccgccacctcaatatgaggaaacagaggatgagaatggagaaccaaacccaagtaacccggcgaattctaatccatcctattcgcaggatcagagtaataaggagcagcaacagcagcacactccccagcatggtcagaaggtttccttccaacttaatgctgtggcagctgcagctgcagctgcaaagcgtcctcggatgaccattgaccagctgaacatgggctaaccgttcgtcgtcgtcggttagacagtagtatctttttccgcaccctctagtctggtgaatcatgttttgaagcgagtgctgtagtggtatatgctcttactgactaccacccacatatttatggtctgtttggttgg

SEQ ID NO: 21780 - DNA, 108 bp, Zea mays
  misc_feature (40)..(44): n is a, c, g, or t
  misc_feature (77)..(78): n is a, c, g, or t
  Coding DNA Sequence Number=SeqID_7377
aaaaaatccatccagcattagatctatgaaatttacgacnnnnnggaggattacaatggccgtcaaccagaggttgnnagacctctcaactggctgcccttccagctg

SEQ ID NO: 21781 - DNA, 126 bp, Zea mays
  misc_feature (46)..(47): n is a, c, g, or t
  misc_feature (80)..(84): n is a, c, g, or t
  Coding DNA Sequence Number=SeqID_7378
ggatttcccccagtccagctggaagggcagccagttgagaggtctnncaacctctggttgacggccattgtaatcctccnnnnngtcgtaaatttcatagatctaatgctggatggattttttttc

SEQ ID NO: 21782 - DNA, 587 bp, Zea mays
  Coding DNA Sequence Number=SeqID_7379
ttcatgttaagtcgtggctacctgcaagatctattgtcatggagtgtttgctgtcaagaggaaatgttgatccaagtggagaaatcatggttttagatagattctgcccgtggaaacttcatctatttgagctagaggaggagctgaagactgaccctctgaccaagtatgtgctgtatgaggatgagaggagcaaaggctggcgagtgcaggccgtctctgttgcacctgacagattcgagagccgaaaggctctcccagagaagtggaggggtatgagagatgatgaactgtccaaggaaaccggcatccctggctgtgtgttcatccatatgagtggcttcattggtgggaacaagacctacgagggagccttggaaatggcaagagctgccctcaaatgctaattcagccgaagcagcaagcagtaaaacagtcttacccatgttataactgattgaggttcatatgcagcgctgcacttgcaccaattttaccattgactagttggcatttgaatatgtaagttccgtggcgtaaaacatccacctgattagcagaaattgcttattttatccgtatgaggc

SEQ ID NO: 21783 - DNA, 173 bp, Zea mays
  Coding DNA Sequence Number=SeqID_7380
ccttccgtttcgctacggtcgatgagacgacagctgccgcgcggcactgggctcgggggagctggaccgccgggcgaggacaagagacggtatcgatgggctacgcgcgcaccgtgatggcggcggccgccgcgcgctgctgatggccgtaggcgcgcggttcctgggccccg

SEQ ID NO: 21784 - DNA, 446 bp, Zea mays
  Coding DNA Sequence Number=SeqID_7381
acaagatcggccctgccgtgcacggcctctggggccgcaagactggttccgtcgagggctacgcctacaccgatgccaacaagcagaagggcattgagtggaacgacgacactctcttcgagtacctcgagaaccccaagaagtacatccccggtaccaagatggccttcggtggcttgaagaaggccaaggaccgcaacgacctcattgcctacctcaaggactctaccaaataagcgactatggatcgcgtgtaatgttacgactttcgatagatggggaccgccaaggggcgtttgtactatagactctacacagcacttgttaagacatgccacgtgcttcgtatcctattcccatctatcctctttatgcgacttccgttccatacaacacaaccgtctttttcacccacgaagaaaagcctggcgttggtttgaggcgga

SEQ ID NO: 21785 - DNA, 83 bp, Zea mays
  misc_feature (44)..(44): n is a, c, g, or t
  Coding DNA Sequence Number=SeqID_7382
cggtgccactttctacaggtgggccttatggctggccccacggngggaagaatgtgcggcctttcagagggagggctaaactt

SEQ ID NO: 21786 - DNA, 175 bp, Zea mays
  misc_feature (26)..(26): n is a, c, g, or t
  misc_feature (65)..(65): n is a, c, g, or t
  Coding DNA Sequence Number=SeqID_7383
tccgaccctcacaagcgccgagaagntggggctcgcacgttcggtgccaccttctacagttgggncttatggctgccccacggggggaagaatgggcggcctttcagaggaggggtaacttcagagtaaaagcgggttaagggagctgtacttcacaaggatggggcagctatca

SEQ ID NO: 21787 - DNA, 284 bp, Zea mays
  misc_feature (255)..(255): n is a, c, g, or t
  Coding DNA Sequence Number=SeqID_7384
cttccccagggaagcccacagcgcgcgctcgatattgggggcgccaccccttttctcccttcacaaccacccctgctcacccccgcaatggactcaatatgctgtaaccaaaccccgcccccctcccaagccgtctctgccaagaccttttttctacccaaatttgggacagccggcagtcacgcccccaccccccgacaaaaacccaccccccgcaccacggaaacggtgacgaaaaacgtcggacgacccgtncccccaatccacgtacatcccgtgaccaa

SEQ ID NO: 21788 - DNA, 526 bp, Zea mays
  Coding DNA Sequence Number=SeqID_7385
atatctcgccatacagcctcatacttccgacacgaccatacgatcaggaactaaccatcctcctagctggaacactcgatccaacaccacgaggaccatccgtacacctggtggtgagctccgtgtgcttcacatcaagaagcgaggcaccgttcccaagtgtggtgactgcggctccaagctctcaggcattcccgctctccgaccccgcgagtactctcagatctccaagcccaagaagaccgtccagcgcgcctacggtggttcccgatgcggcggctgtgtccgcgaccgtatcgtccgagctttcctcattgaggagcagaagatcgtcaagaaggtgctcaaggagcaggagcagagccagaagaagaaataaatgcaatctccattgataggataggctttgcgtgggaaaggcaaggaactctgaggactcggttcattgctttggtgttcattaggcaaaaagggactgcatgatacatcgggccggtgccaaatggttggccgtccgccgtcttag

SEQ ID NO: 21789 - DNA, 186 bp, Zea mays
  misc_feature (132)..(132): n is a, c, g, or t
  Coding DNA Sequence Number=SeqID_7386
accgcctgcgaacaagacggtggtaccttgtggacaagctcaccgccgacaaccgcatctaccacaaggcctgcttccgctgccaccactgcaagggcaccctcaagctcgccaactcacctcctttttccnagggagtgcttctactgcaggcctcatttccgacagcttgttcaagaggaaaag

SEQ ID NO: 21790 - DNA, 290 bp, Zea mays
  misc_feature (57)..(59): n is a, c, g, or t
  misc_feature (61)..(62): n is a, c, g, or t
  misc_feature (70)..(70): n is a, c, g, or t
  misc_feature (87)..(87): n is a, c, g, or t
  misc_feature (97)..(104): n is a, c, g, or t
  misc_feature (126)..(127): n is a, c, g, or t
  misc_feature (131)..(133): n is a, c, g, or t
  misc_feature (142)..(146): n is a, c, g, or t
  misc_feature (149)..(149): n is a, c, g, or t
  misc_feature (151)..(151): n is a, c, g, or t
  misc_feature (168)..(170): n is a, c, g, or t
  misc_feature (182)..(187): n is a, c, g, or t
  misc_feature (198)..(200): n is a, c, g, or t
  misc_feature (202)..(203): n is a, c, g, or t
  misc_feature (210)..(217): n is a, c, g, or t
  misc_feature (219)..(219): n is a, c, g, or t
  misc_feature (221)..(221): n is a, c, g, or t
  misc_feature (239)..(239): n is a, c, g, or t
  misc_feature (241)..(243): n is a, c, g, or t
  misc_feature (246)..(248): n is a, c, g, or t
  misc_feature (250)..(250): n is a, c, g, or t
  misc_feature (257)..(257): n is a, c, g, or t
  misc_feature (259)..(260): n is a, c, g, or t
  misc_feature (262)..(264): n is a, c, g, or t
  Coding DNA Sequence Number=SeqID_7387
actgcaacgagtatgtatctctattgctaatgggtaatggtggcaggtactggtgtnnnannagctaggnctgaagcccgtgcctgnaacttcttgnnnnnnnnacttagcccttggtttggcggnnaggnnnaaatttggnnnnntcncnaactgcatgacttcagnnnaggtttaaaccnnnnnntagcttaattnnnanngtcttgnnnnnnnnantnaagaacttaaaatttggntnnnttnnncnactaagncnnannncctttcttctctgttgaaaaggcatg

SEQ ID NO: 21791 - DNA, 342 bp, Zea mays
  Coding DNA Sequence Number=SeqID_7388
ggtcctaacaaaagggttcacgcaggctggggggagccagagtcctgggggcttgggcgcccaccccccccccggggggcccgccaccgtggccgcctgacgttgttactgataagctcacgccaggaaggacggccgatgcggttgtactggcgtcgggggacggcggggtgctgatgaggccttcacttgacggggcggtccagtggggtccttgagcgcaacgcattaatgatagcacttctcgtcgaaggggatacgcgtgacccgccgtggaagggtgtagttgggggggcgagacccaaaggaggggttcgccggtcagacagactccgtgagtgg

SEQ ID NO: 21792 - DNA, 136 bp, Zea mays
  Coding DNA Sequence Number=SeqID_7389
gctgttagggtctgatgcagtgtttgctggtttattaagaaactttgaaggattagtcaaagtatgtgaaccttctgcagtgaaggctggtttagcagcgacactgttcagggtctgatgcagtgtttgctggttt

SEQ ID NO: 21793 - DNA, 420 bp, Zea mays
  misc_feature (231)..(231): n is a, c, g, or t
  Coding DNA Sequence Number=SeqID_7390
caccggctttaaccatggcctgtcgcttttgcctcgtctggtcggctggtccctctgctctatcccatcccccttgagcaggctgttgagcaagctgaactcatacgaacctcgatttcttccgtccggcgtttttttttctctcagtttctgaggtatttctccccctttctttcttccctccctcccagtagatcttcactggctcggggatttgaacaaaggccgtgngtcgaagctgggtgtgtccgttcattgtgcggaaaagaaggccagtgttatgtgtgaagtagtgaaggctaccagggaggctggctctcgcctcgccgaggatggatctcgaagatcgggagggggcctgaggctccccaagagagaatccgggaagaccaccttggtgctgcgtacaaaaaacccggg

SEQ ID NO: 21794 - DNA, 42 bp, Zea mays; identical to SEQ ID NO: 18475
  Coding DNA Sequence Number=SeqID_7391

SEQ ID NO: 21795 - DNA, 529 bp, Zea mays
  misc_feature (458)..(458): n is a, c, g, or t
  misc_feature (466)..(466): n is a, c, g, or t
  misc_feature (473)..(473): n is a, c, g, or t
  misc_feature (484)..(484): n is a, c, g, or t
  misc_feature (487)..(487): n is a, c, g, or t
  Coding DNA Sequence Number=SeqID_7392
gttaaaaagcggtctcacctccgctcaccgtctccaacgaagactttcctccgatctccgtcctctcgccgccgcagatctaaccggcgactctctcccttcggaagaaagacgtcgtacctcttcttccactcccgatgagtctctccgacaagtcatgtacctcaactgctgggctcaaggctaaattcagataatgatggtcgtggctcgctcatgaactccgctgaatcagaatttttttctgatgcaaactgtatatagtttgggttcatctgtggtggtggactcgtgcttatgaaatcgcttgagtccggatttctggatgcaactgtatagttgggttacatctctgtgaatattagaatgtcctaaagatcaaagaaaaaaaaaaaaaaaaaaaactcgaggggggcccgggtccccattacccccttcgtgatgtcgtttacaatctnatggcccngggtgtngcaacgtcgtncanctgggatagccctggcgtatcctaccttcatgtcgcgtggaa

SEQ ID NO: 21796 - DNA, 42 bp, Zea mays
  Coding DNA Sequence Number=SeqID_7393
gacgacaaaagtctctaccgagagatgcaagaaggtacagtc

SEQ ID NO: 21797 - DNA, 358 bp, Zea mays
  misc_feature (35)..(35): n is a, c, g, or t
  misc_feature (166)..(167): n is a, c, g, or t
  misc_feature (218)..(218): n is a, c, g, or t
  misc_feature (230)..(230): n is a, c, g, or t
  misc_feature (295)..(295): n is a, c, g, or t
  misc_feature (305)..(306): n is a, c, g, or t
  misc_feature (313)..(313): n is a, c, g, or t
  misc_feature (322)..(322): n is a, c, g, or t
  misc_feature (326)..(326): n is a, c, g, or t
  misc_feature (328)..(328): n is a, c, g, or t
  misc_feature (332)..(332): n is a, c, g, or t
  Coding DNA Sequence Number=SeqID_7394
tgccattgatatctttacttctaagaagcttgaanatatccgtccttcttcccacaattgtgatgttccacatgtgaatcgcgttgattatcagttgattgatatctctgaagatggctttggtagtcttcttactgataatggtagccactaaggatgatctgannctgccaacagatgaacttttactcacacagctcaagaatggatttgagganggtaaggatatngttgtgtctgtcatgctgcatgggaaagagcagatgtgtgctctcaaggaagttggcccaagtantaataataannaaccatnctctctttnacanangctntgtttttcaagtttgacagagcaaat

SEQ ID NO: 21798 - DNA, 41 bp, Zea mays
  Coding DNA Sequence Number=SeqID_7395
ggttaaacctctgactggattcctttgtcttccacttgcgt

SEQ ID NO: 21799 - DNA, 285 bp, Zea mays
  misc_feature (84)..(84): n is a, c, g, or t
  misc_feature (243)..(243): n is a, c, g, or t
  Coding DNA Sequence Number=SeqID_7396
acagcagacgaagcctcacggtggtcaaagcctccgggagtgaaaacacaaccagcttggagaacaatgaagcaagaacagagncatgaaattgaggaggggatcttgtcttcacagctgcagctgcagctgtgtgctccttagctaaggtggcaatggcagacgatgagcccaagagaggaacacgaacctgccaagaataagtattgctccagcctgtggtcacaatggcctaccgtcagngatatcggcgtaacgtgagttcgctattgcaaccagcattct

SEQ ID NO: 21800 - DNA, 456 bp, Zea mays
  misc_feature (135)..(135): n is a, c, g, or t
  misc_feature (262)..(262): n is a, c, g, or t
  misc_feature (425)..(425): n is a, c, g, or t
  misc_feature (429)..(429): n is a, c, g, or t
  Coding DNA Sequence Number=SeqID_7397
tgctcacccagaaacaattggcaagcatggtggagaaagcctctatcgaagatgtgatgaaagttttaatagcatcaagaaagcaagacatgcatcaattttggaccacctgctctcacttagttgctaaatcanggtctcccaccagagattcttgccaagcttctccctattgacgtcgtcaccaaaatagaagagctcgtcttaaatcttctatactcgccgttctctatgcctcacaaccacaccatgatctcagcgnggctcaggacctagaagatcaaaagattagagggttgagacgagctttggattatcagacgtgaactagtggaagctgatggtaatgggagaaaggactcaatcttggatgagtccgttagcattggcattacgctgttgaaagcctgcgttagagaagttgngaanggcttgcttggagctcggacctggccg

SEQ ID NO: 21801 - DNA, 212 bp, Zea mays
  Coding DNA Sequence Number=SeqID_7398
cgttgctgtcgctagtgaaacaatctgatatactgaagtctaaacatgaagaatgtgaagcgtacgtggtggagatcgagagcattggccatgcctatgaagacataatgtcacaaaatcaacaattgctacagcagattattgaaagagatgatcataataccaaggtgagtacgtccccacgatccaggtgagtacgatgctgtcaaggc

SEQ ID NO: 21802 - DNA, 319 bp, Zea mays
  Coding DNA Sequence Number=SeqID_7399
tgtcttgtttatcccgcaatttcacagtatttactttcatcgcaccagttgcattactcctcatggtcgatctgttgtgcgatttcggacatgactcctggacggacacgctgcatagctcctaagcgcgagcaacggttctccgagtccttgatgtcgagaaggtgtgcgcccggacgaggcgctccgtgccgctggaccgcatcctgcgctccatgatcgacagcgcccgctccagattcccgtccctcacctgcaccacgatgccccgagcttgctgcacctgcccgtgccaccgcctgcatatttctctttcgtc

SEQ ID NO: 21803 - DNA, 112 bp, Zea mays
  Coding DNA Sequence Number=SeqID_7400
agaaccgttgctcgcgcttaggagctatgcagcgtgtccgtccaggagtcatgtccgaaatcgcacaacagatcgaccatgaggagtaatgcaactggtgcgatgaaagtaa

SEQ ID NO: 21804 - DNA, 598 bp, Zea mays
  misc_feature (58)..(60): n is a, c, g, or t
  misc_feature (552)..(552): n is a, c, g, or t
  Coding DNA Sequence Number=SeqID_7401
ttctcttctggttccgcttcaggcacctccttcacctccgcagcctcctcaaatgtcnnncctgggacaagctcagggacatcgtcatcatcctgtgcagctgcactggcgaccctctctctcgtggttctcccgtgctctgtgtccctagcggcgacgactgggcgatcgccgccgccttaagccaggtgctcaggtctgccacttggcacttcgccggcgacgagcacctaacagagagatggctggtggttttcgagtactgcatcttgtgaggccatttctggctttcttgccagaagtacagagtgctgataggaaaataccattcagagagaaagtgatctacacggtcatttctctcttcatttttctgtgggatcaaagattattgaagttgacaacagtgtgagggaggatcgtgctctgctgtaagtgttgttgggtagtatagacatcaaattctatatgtattggtggatactttgattatccatccttttatcaattgactgacattgtgaactgcaatgaactgcaaagctttatggnttttattcttgtatctggtgttttcatgtgattcgtagtgtacttt

SEQ ID NO: 21805 - DNA, 164 bp, Zea mays
  misc_feature (133)..(133): n is a, c, g, or t
  Coding DNA Sequence Number=SeqID_7402
gattctcggaggtcgtccggatcctgagacaccggagcgcacctgcgagctgtagctgtagtgttcggagctgaaaatgagtgagggggatgctactcagctggaccttgagaaaggattaccccaaggggtntaatgatgatggttccgggaacccctgtcaa

SEQ ID NO: 21806 - DNA, 365 bp, Zea mays
  Coding DNA Sequence Number=SeqID_7403
gcttataatagcacgatacatgcatgacaccagtgaaacactacatcagcatcagctggtatgaatcctccatccagcaagcatacatgtgttgcacctgtgctgcgacaccagatctcagtcgctgtcgctgctgctgctactgtggccgccgtcgtggtcgtggccctcgccgtgcttcttctttttcttgtccttcttttccttgtggtcgccggacttgtcgccgtgctcgccggtgatcttgtccttgatcttctccacgatgccttccttgtgctccccgccgtccttcttgtggtgctccttgcgaccccttagcgccgtcttgaaacgcttaatgacgagggccatctcttcctcat

SEQ ID NO: 21807 - DNA, 368 bp, Zea mays
  Coding DNA Sequence Number=SeqID_7404
ttttctggcagttgcacagcagcagactcttggtcaagcttttctggcagctgcagctacatgattttgtgttttggtgtagtagcagccgcagcccaaacggttggcttttctggcagctgcacagcagactcttggtcaagcttttctggcagctgcagcctgcagctacatgattttgtgtctcggtgtagcagcagccgcagcccaaacggttggtttttctggcagccgcagcccaaacggttggtttttctggcagctgcagctacagtattatgtgatgggactgtcgtatcatgtacaacgaaaatcacaagtgtattaaccgcagtgggtgggcaattatcttatgtgcatccatatca

SEQ ID NO: 21808 - DNA, 533 bp, Zea mays
  Coding DNA Sequence Number=SeqID_7405
gctcgtatcatccactcaggagagagaatctcactaggtcccccccccccccccggtcaatccgatccttctccacgactcttcctatcccagttttcgccgtcgctgctcgcttctccagctcccgcagtccgcacccacaggtcaccgtcgtcatctctccatagatctctccactttccagtgacggtggagcagatagccgctgtggtttttttgtgtgtgtgctggtagtggacctgtacagttctcttgcaaacaaccactcggtaattctctcatgaaccgtgggatgaccaaacagccaccgggtaattatcaagatgaggtattttctgacagggaagtaaagtgacaaggaaatcttcccctttggtatttttcactgggttaattaccctttagcttccaaactagcccttagtgccctgccccttgtacggcgcgccttccacccgcttccgtcccaaggccatggggaagtccaggccgaaggctgagcctcctagacctgtaccagtggtcgtacccaa

SEQ ID NO: 21809 - DNA, 518 bp, Zea mays
  Coding DNA Sequence Number=SeqID_7406
cggtgggcaaagatctctgggttatttttttggaagcggggagccccccaaaccagcaggggcaccagctgcaagtgctccacctgttgagaaaccatctgctgcaaagactgatgcgggcaagcaggctgctggtgggggtaccagccaaaccaataactaccacagggctgatggtcagaacactggcaacttccttacggaccgtccttcaaccaaggaccacgctggtcctggcgggggctgtttcctgggctacctgttcggtggcaactgatgcccgcgctggcgcgctcaccaaagatatcctcccctgcctgctgggtgctatgtctgaatcgagaacaaccgacggtggcatttcatgtgtgtaccccccgcaatgctttgtgcgcatggatgatttccctgtgggaaacttaccgtcctgcatggggggggaagctggccttaaatatcacggaaagtcgggtgcctgcaccttcatcttaagttggtggcggatcccttcgtcttgt

SEQ ID NO: 21810 - DNA, 536 bp, Zea mays
  Coding DNA Sequence Number=SeqID_7407
gcacccgactttccgtgatatttaaggccagcttccccccccatgcaggacggtaagtttcccacagggaaatcatccatgcgcacaaagcattgcggggggtacacacatgaaatgccaccgtcggttgttctcgattcagacatagcacccagcaggcaggggaggatatctttggtgagcgcgccagcgcgggcatcagttgccaccgaacaggtagcccaggaaacagcccccgccaggaccagcgtggtccttggttgaaggacggtccgtaaggaagttgccagtgttctgaccatcagccctgtggtagttattggtttggctggtacccccaccagcagcctgcttgcccgcatcagtctttgcagcagatggtttctcaacaggtggagcacttgcagctggtgcccctgctggtttggggggctccccgcttccaaaaaaataacccagagatctttgcccaccgccggccctacccccacggttcatcttgattattgaaaagagaaacgacagccaccggcgag

SEQ ID NO: 21811 - DNA, 451 bp, Zea mays
  misc_feature (171)..(171): n is a, c, g, or t
  Coding DNA Sequence Number=SeqID_7408
tacgcgtcaccgaaattctacactctgcaaaatagaactagttcgaatatactcggtaactaaactcctcgaaygcakacctcgcatcccgggtaattrtaakttaaacttcatacsckaactaagcsmrttatttcacsawcataaaatttattggaayaacsacsackngmcttggattgyagtcttcgatcaaackggmgacsagtwttgyacsgygcttcactttrtrttccatrckcaactrttggaatctrtccatwttaactwyaacrrcgcataaacggcgatgattcttgttttggcctttcaccgagcacttgggcatcgaccagmggcttgcttcgctatatcttcttgggattcttttattagcgcgaacataagtcggagacaacatgtagggaccggcatcgaggmggggmgaccgaacgacaacgacaagacaaag

SEQ ID NO: 21812 - DNA, 335 bp, Zea mays
  Coding DNA Sequence Number=SeqID_7409
gcgacgaggatgacctactccagaagcagcagcaggaggaggagggaagcaaggcccagccgcgcaacaagccctccgccgccgtcgcggatgacagccactgtcgagcgctggacgacgactcccctacgaggaacgacgtctctggaatacaggtttgggacatgatagccatagtggatggcgtgaatggcctgaggatgcaagtggatggccatgagatggagggtcaggagttggggagctagtgggtcaagggaaggagaagctggtggttctggaagcgggggagttggaggatcttcatgggtccggaagccgcagagaactagttt

SEQ ID NO: 21813 - DNA, 399 bp, Zea mays
  misc_feature (299)..(299): n is a, c, g, or t
  Coding DNA Sequence Number=SeqID_7410
ttttgaaccgatcaggcgatgccgtgcctgttacctcctgatttaaccgagaccttgctgccttgtacagtactaataacttcaaaagtagtattacatcgatgcgagcagagcatcaagaacagcaacaagtgagtgcattgctagttgtgcaatggtcattgctttacctctccccggcaacagcctcctcttccagatcatacgaagccgaggagcacgaggacgtgccggcacttattccaccgccgcatcgctcatccgtggttgcattgcagctgcagcggcggaagtgctanagccatcgccaccgctggcggcgctactgctagtactggagctgcttgtgctgctactactacagcagcagcaggctgtcgttgtcgtcattgtggtcgt

SEQ ID NO: 21814 - DNA, 569 bp, Zea mays
  misc_feature (344)..(344): n is a, c, g, or t
  misc_feature (349)..(350): n is a, c, g, or t
  misc_feature (367)..(369): n is a, c, g, or t
  misc_feature (371)..(373): n is a, c, g, or t
  misc_feature (383)..(383): n is a, c, g, or t
  misc_feature (387)..(387): n is a, c, g, or t
  misc_feature (396)..(396): n is a, c, g, or t
  misc_feature (399)..(401): n is a, c, g, or t
  misc_feature (408)..(410): n is a, c, g, or t
  misc_feature (435)..(436): n is a, c, g, or t
  Coding DNA Sequence Number=SeqID_7411
cattgagttcatgctaacacgctgcaaaaacatttctctactcaaccagcgattgtcactccaaatacaacaggaaacaaatggctacaactcaagattatggacaagttgggatgaggcaaggcaagccacctcctacagccacatgcacgcagaaacagcatgcagagctgatgaactgcaaacagtgcttatggagatggtaaagcaagacagtaggcaccaattaagtgcaaagggtgaattgaaggaactttagacgtgcttgtgcccatcctcagcgcaaaacacagtggcaacgaaagatttaaggatgcatttgcatgtacttcttacttttgttnattgnncaaagagctgatgaatnnnannnaatgcttatngagntggtaaagnaannnagtaggnnncaattaagtgcaaaggtatagagtnntttcctattatttatagagaaaatattcaattaaggtctgtgtataagtggctggtacatccgcctggtagggcgcttccttcttctagtctctatttatttgtcaaaaaaacatgtcaaatacttcttcgat

SEQ ID NO: 21815 - DNA, 385 bp, Zea mays
  Coding DNA Sequence Number=SeqID_7412
gtgaacattctgaatctgccttccgctgcctccacaatgacagaatcttgctggccgtaaccagacgggatatcgaaagaggagaacaccatggaacgcgtgtcgagcccaaggagtttgttactcccagtcaccttccagtagcagctgctcgaaaccgtaggaggtcctcgaaaatttacaagagggaggcgcactggcatccacgctcagaattccccatcgtcccggtgtcggaacagaagaagaaggcgaccacctgtccaggtctgcgatcagcctcgcagtcgcccccgcacctaagtctccggctgctcgttattggcggcaacgaggcacggctccacgcggcgacagcgctgactgcctgggtataccgggttat

SEQ ID NO: 21816 - DNA, 273 bp, Zea mays
  Coding DNA Sequence Number=SeqID_7413
ggctatcctcagaaacctctttttgcccccaaataacccggtatacccaggcagtcagcgctgtcgccgcgtggagccgtgcctcgttgccgccaataacgagcagccggagacttaggtgcgggggcgactgcgaggctgatcgcagacctggacaggtggtcgccttcttcttctgttccgacaccgggacgatggggaattctgagcgtggatgccagtgcgcctccctcttgtaaattttcgaggacctcctacggtttcgagcagctg

SEQ ID NO: 21817 - DNA, 593 bp, Zea mays
  misc_feature (174)..(174): n is a, c, g, or t
  misc_feature (217)..(224): n is a, c, g, or t
  misc_feature (233)..(235): n is a, c, g, or t
  misc_feature (239)..(239): n is a, c, g, or t
  misc_feature (242)..(242): n is a, c, g, or t
  misc_feature (252)..(255): n is a, c, g, or t
  misc_feature (257)..(257): n is a, c, g, or t
  misc_feature (259)..(259): n is a, c, g, or t
  misc_feature (269)..(269): n is a, c, g, or t
  misc_feature (272)..(274): n is a, c, g, or t
  misc_feature (276)..(282): n is a, c, g, or t
  misc_feature (288)..(289): n is a, c, g, or t
  misc_feature (291)..(304): n is a, c, g, or t
  Coding DNA Sequence Number=SeqID_7414
ttcccaccgttcaggtcaagcgcatcgccgaggacatcgacgaccagacggaggagtctgcactcgtcatcaccggcatcaagggaaggatcaacagggccgtttggggcccgctgaacaggaccattatcactgctggggaggatgccaccattcgcatctgggactcagagnctggacagcttctgaatgagtctgataaagaatctggacatcnnnnnnnnatttcatcnnngtcnaanccttggactnnnngnantttcttactngcnnntnnnnnnntctgcnncnnnnnnnnnnnnnnctaaccctgatcctttgtttctccgcattctgcaaggtcttcaacaacacgatatttactttacacaaagagttgacgcaactggtatgcccggactaggaccattacaaaaagtttgtgcggcactgcggatacttgcttatggcttaccttctgatgcggtagacgagtatattcaaattggggaatcaacggctagggaatgccttcatcatttttgtcgcgcaatcattgattgttttagtgcctggtatttacgcactccaactcaagatgacattactcgcat

SEQ ID NO: 21818 - DNA, 60 bp, Zea mays
  Coding DNA Sequence Number=SeqID_7415
ccggtgcccacaatactggtgtcaacaacgcagctagcgtgtacaatatgcacgcaaatt

SEQ ID NO: 21819 - DNA, 142 bp, Zea mays
  Coding DNA Sequence Number=SeqID_7416
ttttttagcaccatggaaatgaaatgttgttgattttttccaagccgaacatgttgtgatctttttcacagcgggagcacgcgaagaggaaagggggcccgagagattcgggagatctatctatctctatggcacgggctcc

SEQ ID NO: 21820 - DNA, 568 bp, Zea mays
  Coding DNA Sequence Number=SeqID_7417
tggaggcgcacattgcctgcctactcgtcgccgcccccgtcgaccagctcccccgcatcgacgcgcagatcaccgcgcgccccctgccgctcgccgtggccgccggggccacgaccgcgggagggccgtccagcggggaggagctcgacctcttcatggactaatgagttaaaggatcaaatggaggcaacactactactcaatccatatgagctgtgtgcgcgtccggctgcatcgtcgaggagttaccagatggagcagtccatgcagtcgtacctcttgcgttcgccgacgggaaaaattgatggcagatcaaattccagaatggaaaggcagctccagctgggtgagaaagatcgtcatcaggttctaaaggatttctcaaagttgcttgatgatcagtgattaccgaaggatggatgagcatgatcagtatgagtcagttggtttagatgattcactagaggatgagaggaatcttgatgaaaccatggctgattgaagggtcgcggaagtagagcctaatgcaagggatgtgaaggactggtgcagcaggtgacaagaagtt

SEQ ID NO: 21821 - DNA, 575 bp, Zea mays
  Coding DNA Sequence Number=SeqID_7418
atggcaaacttcttgtcacctgctgcaccagtccttcacatcccttgcattaggctctacttccgcgacccttcaatcagccatggtttcatcaagattcctctcatcctctagtgaatcatctaaaccaactgactcatactgatcatgctcatccatccttcggtaatcactgatcatcaagcaactttgagaaatcctttagaacctgatgacgatctttctcacccagctggagctgcctttccattctggaatttgatctgccatcaatttttcccgtcggcgaacgcaagaggtacgactgcatggactgctccatctggtaactcctcgacgatgcagccggacgcgcacacagctcatatggattgagtagtagtgttgcctccatttgatcctttaactcattagtccatgaagaggtcgagctcctccccgctggacggccctcccgcggtcgtggccccggcggccacggcgagcggcagggggcgcgcggtgatctgcgcgtcgatgcgggggagctggtcgacgggggcggcgacgagtaggcaggcaatgtgcgcctccag

SEQ ID NO: 21822 - DNA, 335 bp, Zea mays
  misc_feature (119)..(119): n is a, c, g, or t
  misc_feature (223)..(223): n is a, c, g, or t
  Coding DNA Sequence Number=SeqID_7419
gggctgtgcgcctgggcatgggccgcgcccatgctgccatagccgtgcgccgccgggattcacgcccgcgtgcccgcgcggccaagcgctggggcttgtgcccaccggggccgcgcccnagccgcccatggggcccgcaccggggatggcgtcgctagggccgccgcggctacacccatgccgtcggggtcgcgcgcccatactgtcggggtcggggaaggcncgccctggccgagggcctggccgaaacgccaccggggggcgcgcccgcccgccaccgcgcgcccgaggggactgagcgccgcgccgcgacaggaggctgccgcgtcgtgcta

SEQ ID NO: 21823 - DNA, 432 bp, Zea mays
  misc_feature (179)..(179): n is a, c, g, or t
  misc_feature (181)..(181): n is a, c, g, or t
  misc_feature (183)..(183): n is a, c, g, or t
  misc_feature (186)..(187): n is a, c, g, or t
  misc_feature (193)..(193): n is a, c, g, or t
  misc_feature (195)..(196): n is a, c, g, or t
  misc_feature (203)..(205): n is a, c, g, or t
  misc_feature (211)..(218): n is a, c, g, or t
  misc_feature (224)..(224): n is a, c, g, or t
  misc_feature (264)..(265): n is a, c, g, or t
  misc_feature (270)..(274): n is a, c, g, or t
  misc_feature (276)..(278): n is a, c, g, or t
  misc_feature (302)..(303): n is a, c, g, or t
  misc_feature (309)..(311): n is a, c, g, or t
  misc_feature (323)..(323): n is a, c, g, or t
  misc_feature (325)..(325): n is a, c, g, or t
  misc_feature (343)..(344): n is a, c, g, or t
  misc_feature (348)..(349): n is a, c, g, or t
  misc_feature (351)..(359): n is a, c, g, or t
  misc_feature (364)..(371): n is a, c, g, or t
  misc_feature (379)..(382): n is a, c, g, or t
  Coding DNA Sequence Number=SeqID_7420
caggcaatctggatcccagtttgctcctggaaggaaaggtgacactgttctcctgccagaaagtatgggggaaactgaaagttaagcttgcagctggataaagagtacctcctcttcagagagcaccgacattttgggcacaccttgtggactgattcagagcatcagcaagcctgtcncncnaanncgttgntnntttgggnnnccttgnnnnnnnnttcagngcatcagcaagcctgtccctagtcgttggttttagacttnnagtgnnnnntnnntagtatcagattttgggatcaaannccctannnactttgaactgncntgatgtcatagattttgnnatgnnannnnnnnnnccccnnnnnnnntgttgcannnnaacttttgggtttaaaatggttccctaatattgtgttcccccctctgtcc

SEQ ID NO: 21824 - DNA, 389 bp, Zea mays
  Coding DNA Sequence Number=SeqID_7421
aagcctcatcccttcggcgtggaaacattctcgctggcggcgcgcgaggctgctatggcggtctacgggacgaaggcgactccaccagtttactgtctcaccaactgaacgattgacgtcggcggcagcaagatccacgggacggaggcggcagaggcagctaaaggacggaggcgcccaagatccgtcgtggcttcttcaccgcctaatccaagcgaacaaggtcgtggtggctacttctcgccgattattcctgcaccggttcgagttggagaagacgaacttccaccgtcttgggatccaatatcctctccattagttacaaggcccaagtcatgcatgaagtagctccggtctttagaggaagaatgtcttctctatctgtcaaa

SEQ ID NO: 21825 - DNA, 568 bp, Zea mays
  misc_feature (282)..(282): n is a, c, g, or t
  misc_feature (310)..(310): n is a, c, g, or t
  misc_feature (382)..(382): n is a, c, g, or t
  Coding DNA Sequence Number=SeqID_7422
caaaccctaggcaatccaacatcaaagtattaggtgcccccttcctcaaaccgcggcgttgcggccatggcccacggcggcttcgccgggaaggcgaaagtgacgccgaacctggcggtggacggcgagggcacgcgcacgctcaatctcaccgtgctgcagcgcctcgaccacgccgttgaggacatcctcatcaccgcgggtcacgtcacgctctacgacttcgacaccgacatcaaccagtggagcccgaagggacgtgaggggtcgctctttgtcgtncagaggaatggctcaccccagattcagntcattgtcatgaatcgcaggaatacagataatctaggtgaagatcttttgggagattttgataaccactacnagctccttaaattatgtaccggcatgctgctcaagaagtataaggatctggttttacattcccaggagtggcaacaggtggcaatcttttcagcaggattctgatgctttctcaaaggtgcaccaaagcgaaattctctgtcaagtgattgaagtgaacacactcgtggtgatgcctgaggacgca

SEQ ID NO: 21826 - DNA, 255 bp, Zea mays
  misc_feature (203)..(203): n is a, c, g, or t
  Coding DNA Sequence Number=SeqID_7423
attataccacagaggtggcagcggcgatacgcgcagagacagattctgctctgcaccgctccattgacggtctggcgatcgcatcgggcgattatcaagcgacgatgcggaagtataacgagcaagtcttggacaagtctctatcgcgagcatcacaggcgtggtcataccaaacatggtgccttcacatgaaagctatgatncaagaccccaagactcatatcaccgacacaacggcgctgttcaagagttcat

SEQ ID NO: 21827 - DNA, 218 bp, Zea mays
  misc_feature (180)..(180): n is a, c, g, or t
  misc_feature (187)..(187): n is a, c, g, or t
  misc_feature (193)..(193): n is a, c, g, or t
  Coding DNA Sequence Number=SeqID_7424
ataggatgaagagggtgcttttgctgcttctggccttcactggtcttcacatgttgccagaagctactgctacaaagattactgctggaaacaaccagttttggaacccctattttatctacactgagtgggcttaaggcaaacatttctaccttggtgactggctctattatgtgtacnatatgancctatncgatcttgttggaagtgaacaatac

SEQ ID NO: 21828 - DNA, 414 bp, Zea mays
  misc_feature (232)..(232): n is a, c, g, or t
  misc_feature (239)..(239): n is a, c, g, or t
  misc_feature (245)..(245): n is a, c, g, or t
  misc_feature (270)..(270): n is a, c, g, or t
  misc_feature (331)..(331): n is a, c, g, or t
  misc_feature (360)..(360): n is a, c, g, or t
  misc_feature (368)..(368): n is a, c, g, or t
  misc_feature (374)..(374): n is a, c, g, or t
  Coding DNA Sequence Number=SeqID_7425
ctcagagaactgaaaccctagtcgtttggtccactggaataatcaccaacaacgcatcctccaagaccaccaccaccagcatcaacaccaacaccaccaacaccgtcgccgagctcacccacaatggcaacctggtggtgcgcgacgcctcggcctcggacgcgtccaaggtccggtggcagagcttcgactatccaacagacgtctacctccctggatccaagctgggcangaacaangtgacngggttgaaccgcgtcttcgtgtcgnaggaagaacagggcgaacccggcccgcggctcctactgcgtcgggtggactacggtctccnaggggatcatcctcaccagtgctcctttncgcgtgtntgggcntcggcacattctcctgtcggacttggatccaacgacagcg

SEQ ID NO: 21829 - DNA, 559 bp, Zea mays
  Coding DNA Sequence Number=SeqID_7426
tcacgaacccttctcatcccagatctagcgccgcctccttcaccgcgctggccggcgagctcctcagcacggtgagtctcctttcccctctactctcctcttcccctctgctctcctcttcctttatccagctgaccggcgagctgctcggacgccgggcgcgcgcatgcggtcgcgcggcaggtagtaagcccctggaggacggacgtggcggccgtgcggagcgtccgcaccccgagcgacgcgccgtaaaggctgggaagagaacgcgcgccgcccacccatctgcttaaccaaagcggtctagagcaaattgaactggttttgagcagacccacatatctctttatttcaattatctggtggcgcaccctcacattgctagagccttcaacaaattgccattcgaccacaagttaatttgggctcgcaatttcgtcagtgaaaagttcccaggagtgtgagggcagttggtaggtaggctgacaattcttttgcttgaaccacatcgaacaatgatttgtggtctaagtacgtgtggattttgtgtagaccttga

SEQ ID NO: 21830 - DNA, 183 bp, Zea mays
  Coding DNA Sequence Number=SeqID_7427
aatgtatttccatggaagcgaacgcgtgctgcgcctcctgtacggcgcggaggtaggtcaagccgcggttgggacgcggtgtggcgtgggcgagccgaaccaagcggcgatcgacgcttcccaccacttccattccatgccgtccgtccgcttccttcctgtgtaatcctcctccaataatag

SEQ ID NO: 21831 - DNA, 80 bp, Zea mays
  Coding DNA Sequence Number=SeqID_7428
ggtttccctagacctgtttatctcacaccttctctaccaccaaacttttgactacttatggcagagtgctatctggttac

SEQ ID NO: 21832 - DNA, 544 bp, Zea mays
  Coding DNA Sequence Number=SeqID_7429
atccgtggcctacaagcgtgcagttctgaatgccattgagtacctttccaagtttgggtactctaaggagcaggtatatcttttactatcatgctgcccatgcgagggtaggatatctggaatagtggactctcctaatgcagtaacaactcttgccatccctacggcgatatttgatcaggatataaagccaaaacgcgtgaaggggagaccacttggaggaccacagttgagaagacttccagatcttctaagctgctcaaactatggacgccttcctgccacccaagacagaagtggtacaagcgcgccctagtatatggaaacagatgcagtatcaatcgacatgcaactgtgccaaggctataatcaagaatgcgtttgtattttttttattttcttcgtcgaataaaaattacgataaagcttttgccgtccgttagaaaaaataatcaagaatgatcctcgatttatcaggttgtcatcatgtatgagagtgagccttttggttttacacaagccaggccctttgttaaatggtacg

SEQ ID NO: 21833 - DNA, 183 bp, Zea mays
  Coding DNA Sequence Number=SeqID_7430
aagacaagacgggtgccagacaaattcagcaaacaagcaaaaggcacgaccaccaccgccggccgggaagcaagctcaaacccctaatcgccgtccgccggcgagcccagcacgatggcccgctacgaccgcgcccatcaccgtttttctcccccgacggcaccttctttccaggttgagtac

SEQ ID NO: 21834 - DNA, 275 bp, Zea mays
  misc_feature (221)..(221): n is a, c, g, or t
  Coding DNA Sequence Number=SeqID_7431
gactcaggagatacaaggcagtctcgagcaacttacacattctatctctcatcccatcttctatttcaaactttattctgtgaacaatgcagtctacagcgcaaaaaatataaatggacagctagcgcaacattattaaaatttaaatatgtgttcttaatatgtgagagtttatattttttggtatttgagtgaaggtgttgagatctggcactaactgntcatttgtatttttctcataatcaagttagatctaaaacttagttcatacttta

SEQ ID NO: 21835 - DNA, 453 bp, Zea mays
  misc_feature (26)..(28): n is a, c, g, or t
  misc_feature (58)..(58): n is a, c, g, or t
  misc_feature (119)..(120): n is a, c, g, or t
  misc_feature (146)..(148): n is a, c, g, or t
  misc_feature (156)..(156): n is a, c, g, or t
  misc_feature (171)..(172): n is a, c, g, or t
  Coding DNA Sequence Number=SeqID_7432
acagttctgatactcaccatggctcnnncgttgtctgaattacttgctgaagagactngtcttaagtctatgtcttctattactggtgtgagttctgacagtgtgttggccgctgctcnnaagtcaagaaacacctgtttccagcnnngtgaacantgcaaaatggccacnnatcggtcacgcaacggccttgcaacttttttggcagcctcggtggtttttcgtgcagcttgaacaaccatctccaaagccgccgcactagcaacgaaggcggctttgccagcaacggcccttgcacgcccggctgcagcgagcaaatcgcttaatcgtccgcgaccacaggacctttgcccgactccatgacaacggggaagaagccacaggcggcgaggaatcaaatggggagacgagcagagggggaagaaggaagagctcaggtggaaccctagcgta

SEQ ID NO: 21836 - DNA, 424 bp, Zea mays
  misc_feature (99)..(100): n is a, c, g, or t
  misc_feature (115)..(115): n is a, c, g, or t
  misc_feature (123)..(125): n is a, c, g, or t
  misc_feature (151)..(152): n is a, c, g, or t
  misc_feature (213)..(213): n is a, c, g, or t
  misc_feature (243)..(245): n is a, c, g, or t
  misc_feature (272)..(281): n is a, c, g, or t
  Coding DNA Sequence Number=SeqID_7433
cttcgttgctagtgcggcggctttggagatggttgttcaagctgcacgaaaaaccaccgaggctgccaaaaaagttgcaaggccgttgcgtgaccgatnngtggccattttgcantgttcacnnngctggaaacaggtgtttcttgacttnngagcagcggccaacacactgtcagaactcacaccagtaatagaagacatagacttaagacnagtctcttcagcaagtaattcagacaacgnnngagccatggtgagtatcagaactgtgnnnnnnnnnnatatgaattttctcacgattaacgatatccatgtctgcatgataataatctgctgaaatacccctttcgcgcagttcttttgcaacctgttcacattccttccttgaaaagcagtatataattccagactcattatttgggta

SEQ ID NO: 21837 - DNA, 292 bp, Zea mays
  Coding DNA Sequence Number=SeqID_7434
ttcggttaccttccctgatccgcatcatcatagcctcgtttgtgacctccccggtgccatagctgaagccaagagagagagagagatatgccacaagcgccaccggctgcggtgtacttggtcggtggttaggtgaggataatccccggactcgacagaaccgtacgtggttgaagggtggggcatcaccatttccggcgactgtctgctcacgccggagtctgcgcctcgaactgaccagcgcggtgtcatcgccgatctcgtcctcatcacctctgcgtgaggacacgtg

SEQ ID NO: 21838 - DNA, 178 bp, Zea mays
  misc_feature (133)..(133): n is a, c, g, or t
  misc_feature (144)..(144): n is a, c, g, or t
  Coding DNA Sequence Number=SeqID_7435
aggagacctccatgtccaccttgaaggggccagaaagttccagggcccatcccgccattgccggcaaagcttcggatctcttcccttccaggcctgcgaggcaccaggatcgtccaccgcgaactggccaagnccgtcgggggnccccaagggaggcatggctcgtctttcgtctccg

SEQ ID NO: 21839 - DNA, 418 bp, Zea mays
  misc_feature (57)..(57): n is a, c, g, or t
  misc_feature (64)..(64): n is a, c, g, or t
  misc_feature (69)..(69): n is a, c, g, or t
  misc_feature (146)..(146): n is a, c, g, or t
  misc_feature (224)..(224): n is a, c, g, or t
  misc_feature (235)..(235): n is a, c, g, or t
  misc_feature (245)..(245): n is a, c, g, or t
  misc_feature (257)..(257): n is a, c, g, or t
  misc_feature (287)..(287): n is a, c, g, or t
  misc_feature (324)..(324): n is a, c, g, or t
  misc_feature (372)..(372): n is a, c, g, or t
  misc_feature (379)..(379): n is a, c, g, or t
  Coding DNA Sequence Number=SeqID_7436
tttttcagttcccagcgatgctcttgaagggagtttttatttcgacagggaaaaaanacaagtnttggngaggaattggaagcatctccccggcgccaaggcgtgaagcgacatttgctgaaatcatatgattgaggaatctcaanacaatgtcttttgccgacaatgaatagcgggcctcgacccttctttttccatttcatttcctatagccggatctgcanaagcgatgganaattccgcanatcttgctgganactcgtaggctcgaacaacaggccattacnactcaataaagctatccgaatcatctcctcgcaaganaattgatcccagcatgtgttttgtccgcttctgggctctctgatctgnctttggnggataggactcaccaattcggatgtcaagggtttgtcta

SEQ ID NO: 21840 - DNA, 251 bp, Zea mays
  misc_feature (144)..(144): n is a, c, g, or t
  misc_feature (221)..(221): n is a, c, g, or t
  Coding DNA Sequence Number=SeqID_7437
catgatccatgaagtcgatggcgacggcaacgcaccatcgaatttccagaggttctcaaccctaatgctcgcaagatggaagacaacgactctggagagagctcaagagggctttttccgtgtgttgacaaggaacagaacggntttcatcttctgccgccgagctccgccatgcatgacaaatcttttgtgggaagagctattgatggaggaggtaaacnacgatgatccgcggagggtgaatgttcact

SEQ ID NO: 21841 - DNA, 239 bp, Zea mays
  Coding DNA Sequence Number=SeqID_7438
aaaacaatggcggtgctactccgccgcgccgcggcgctcctcgtcgtcgctgctgtctgcgcggacggcgcctccacgttctactcctccgaccccaacctcggatccgcccgcgtcgtcttccagacgaattttggtgatattgagtttggtttctttcctcatgttgcaccaatggacatatccgtttgttttctcccaagggattttaccatgtcggtaatttcgttcaaatttgt

SEQ ID NO: 21842 - DNA, 356 bp, Zea mays
  Coding DNA Sequence Number=SeqID_7439
cagagtttatcctgatagcaaccctgaagtggcggcaaaaggagaccctgacactgatgagctcgaagagttagaaagcacacaccttaataacgaattggatgaagcagcaagctcaggcctcgacaggagtgtattggacgatgcagcttctggagaccttgaatatatgtaggtcagagcttccctttggtattttttttgtgcctgcttaaccaaagcggtctagagcaaattgaaccggtaacatactctctgttttggtttgacatcccagaacccatgtcgtcatacttccaagacatctctgttttggttcgaaaaaaaaaaaaaaaagagcggccacttccaagaca

SEQ ID NO: 21843 - DNA, 199 bp, Zea mays
  Coding DNA Sequence Number=SeqID_7440
gcacgagaatgcacataatgtcaggtgcttgtttgaagagagagagagtaatattggctttggctatggaagcagcaggcgttggtaattagtcaatttggctaggggtttgttaaccttattcagatggggtgtctttggaacgtcgtccctcgtccatatcttgcatggtgagggaagtgtacatttatggaagaac

SEQ ID NO: 21844 - DNA, 197 bp, Zea mays
  Coding DNA Sequence Number=SeqID_7441
catgcagcaaaggttgcctcggcacgtcgccatgtctgtctgctcgtagcagagctgggtatagttcatgtttgcaaaagtgaatcttcacattcaagctgcagtacaggaaacaacaatatacgtaagggtatggaattacgaatatattggatattgcattgaatatattgaatatattggactttgtcgaaacc

SEQ ID NO: 21845 - DNA, 472 bp, Zea mays
  misc_feature (61)..(61): n is a, c, g, or t
  misc_feature (84)..(84): n is a, c, g, or t
  misc_feature (121)..(121): n is a, c, g, or t
  misc_feature (175)..(175): n is a, c, g, or t
  misc_feature (280)..(280): n is a, c, g, or t
  misc_feature (324)..(324): n is a, c, g, or t
  misc_feature (366)..(366): n is a, c, g, or t
  Coding DNA Sequence Number=SeqID_7442
tggcttaccaaaaccgaattgattcgataaccgcgagggcgatgacggttgtccaatttanacatttggtcgagcccctggcanatgctggacgaacttgcctcaccttttcatccaactntaggatcagtctccgggagataaagtcgacgacgagttcgataacacacacggngatgagacagggtctgtggagatgtgcacaagggaaaatgagcttgtggtgccgagagtcgacggcgagcaggacgcggatcaaggggtttgcttgggagtcaanaaggggatgacgggttcaatgactcgacggcaaatgcgagcacncgcgaaacccgatggacaaagagcgagcgcgcagcggtgacnacgagcaggcacgcaagcgccaatgcgagccgagggcaagcacgagtgctggggcgagcacaagtaggcagaacagcgggcgtcgctgcgagctccatggtcggac

SEQ ID NO: 21846 - DNA, 523 bp, Zea mays
  Coding DNA Sequence Number=SeqID_7443
gattcttcttcgttgtagcactgcattttcccacgacaggattgccgtttcttgtactactgagtttctggtgcagttatgttgtccccattccaggttagttaatttgctgctgcttcctacgacaacggatggctgcagcaaaatggaggagcaaggttgggagcgaagcactctttttgactggctggctggttggttggttggttggttggccggtcggtcggtttctctacatctctcgctgctttgtgtacgtcactggtttttgctccaagaacgaactcactcacactcactcactcggagcttctcttcttagaaattaggcatgtgagaacgcagcacattggctagccagcaggatctcttgctgcttgtccgtttgctgcgttgttacagtaggtttagttgatgttctagttgctttagtagatctcaagcaaatgcatcttaattttgctgttgttctcgctggcgctctgcacggatcgatgggggttagctagtgtgcttcctcctg

SEQ ID NO: 21847 - DNA, 294 bp, Zea mays
  misc_feature (94)..(94): n is a, c, g, or t
  misc_feature (118)..(118): n is a, c, g, or t
  misc_feature (120)..(120): n is a, c, g, or t
  misc_feature (130)..(130): n is a, c, g, or t
  misc_feature (186)..(186): n is a, c, g, or t
  misc_feature (257)..(257): n is a, c, g, or t
  Coding DNA Sequence Number=SeqID_7444
gacatcatgtgacactgagttgcttatcttgaaagagaagctggagatgcctcaggcacttgcagaagaaagtgaagcaattgctacagaatcncggcagatagctgaggagcataangncatatgccgnaaagggaaggatgaagaagtaaaggtattggagaggtcaattttgaaaaacttganaatacctgtatgtgttttttaaaaaagcaaagggggggaaattgtccaagggaagaagccaagaccggccnaaagaatgccgcccgaggaactaaaagtggagctgca

SEQ ID NO: 21848 - DNA, 501 bp, Zea mays
  misc_feature (297)..(297): n is a, c, g, or t
  Coding DNA Sequence Number=SeqID_7445
acacgacaaacctcattctctatagtacatgatggtggctacaccataaagatagttgacgtgatcttgcaagactacaagcctttgccggtacaactcaatacaatgatgtgtgaaagcgccatggggtataggtgtctatttctcacttctaatactagggaaaacctagaacaagcgctttataaaacattctagctaacctaagcactttacaaagtacatatgctaatgactaagtggtttttgagcacttgggtgtctagatttactacggatgagcctcaactctcttgngatattccttagctcccacagatctcaaatggtcagttgggggtaatacacataacccctaagttcaaaactagacattagaagtgatgcaaactggcgcataccatatacatcagtgcatgtccacattagcaacccattgaaactagttattgctagccttctgagcatagacatctgatgctttgatcgacgttgaaccag

SEQ ID NO: 21849 - DNA, 381 bp, Zea mays
  misc_feature (85)..(85): n is a, c, g, or t
  Coding DNA Sequence Number=SeqID_7446
gtatgagttgaacagtctgatccttttttatagccctttcgattgtttatccttcttcagcaagtgatgttgtactgtatatgancattgtgttatgtcatgtcgtgttaagcttgggcacgacccatctgtggtgtaacaacttatcgttaggcgagaaagagggagagaaacagaattacgcgcatgcaaaacgtgcgaaactggcgggggagagaaataagcctacacactttgtacttgacgcatggacgcacgacgcacgaaattggtgctttaaagtagagattagactatagcgttgcgctgagtcctgtcattttgggcttgggtgactcctcacgacccatttgtggtaacggcctatgatggctatcttca

SEQ ID NO: 21850 - DNA, 538 bp, Zea mays
  Coding DNA Sequence Number=SeqID_7447
ttctattctaaattccactttgggattgaatgtatttcttgtcttattaattccatgagagtatgcacaaacaaatatcacagcatgatgcacaatttgttttaggtgtcattaattaattaatgatttttttgaggtgtttatgcacatgttaataatgaatggaggcaacacatatatgtgatccaattatatcctcttttacacctttttgggtattacagtgccacacgcgcgcgcgccgccgccgccggccgggccgggctcgggccgggcgtggcgtggcgtggcaggcaggcaggcaggcgagcgagcgtggtgtggctgtgttaatttttagcactcactaaccgtgtaaacctttcaattgactgtctcttcgtcagctgcatgcgagactcttgtccttcagctgcctatcccttggcgtgcagacccttctccttctgctttcctctacgagaggttaaatagaggagaacccctgtcacttggtacacgagaacataacagagtcacaacccagccgcaagtgaga

SEQ ID NO: 21851 - DNA, 169 bp, Zea mays
  Coding DNA Sequence Number=SeqID_7448
gatgacatccacgagagcgtcgtgtaccatgtgagggcaagcacaaccaacggatccaagaagcttgatgcggattaccaagaagctcagtcaaagggatctgcatgcactatattctggttcttctcactgaatacacgtgggccgtgtattagtgttgctgaaatga

SEQ ID NO: 21852 - DNA, 95 bp, Zea mays
  misc_feature (26)..(26): n is a, c, g, or t
  misc_feature (35)..(35): n is a, c, g, or t
  Coding DNA Sequence Number=SeqID_7449
tgacacggccacgggctgggcagcanagcgctacntatacccaccacgccacgcgcttccttgtcagtaggacagtagtcagtcgagtcctcctc

SEQ ID NO: 21853 - DNA, 196 bp, Zea mays
  Coding DNA Sequence Number=SeqID_7450
tgggtaaaccggcgccagaaatacgccccccctgggcaaaggcccacgccccacgatatgggccgggacactgtccctggagggatttaacctgagcgcgtgcttccaaagggaaagtaaagtttaggggtgcaagctggcccccgtgggcttgccaagcggcctgttagcgcgggcctcctgtgggaaggatccc

SEQ ID NO: 21854 - DNA, 365 bp, Zea mays
  misc_feature (43)..(43): n is a, c, g, or t
  Coding DNA Sequence Number=SeqID_7451
agacaccaatcttggctgacaacgccggcggagccattgctcnacctttcaaaaccagagcgacagagttctcggagaaagagctggctcttcgcattgcaccagagctctggcttaaacgacttgtcgtgggcggcattgataaagtctttgagatagggcctgccttccggaacgaaggtattgatggcacccacaaccccgagttcacgacttgcgaattctacagtgcctattccaacctggccgagctcattcagcagactgagcagatcatgtttggcatggcgtccgagtgccagaagctaatttcgaccgacctgtcgtcgcttccggagatcgacgttgagaaattccgtggtcct

SEQ ID NO: 21855 - DNA, 224 bp, Zea mays
  Coding DNA Sequence Number=SeqID_7452
agcggtggcgataccggcctcggcggaggcgaaggaggcgcgcctcactgaaatcaccagccgccagggaagagaaggcagctcgagcgttggcacagggcgtgctggtcgagctcttcgacgtggtgagctaggccggtcggctatcgtgtccctcttggcgtgcacgtggctgtcggtggcctcgacatggattgcgacagctgaggacaaggaagcactga

SEQ ID NO: 21856 - DNA, 457 bp, Zea mays
  Coding DNA Sequence Number=SeqID_7453
cggcagccaaccaactgcatcagaaaaaaaatatcatgtacatcagaaccataagcaggtaacgatccaaatcacaccatacttaaacataagggcaaaagaatgtagaagggtagctagtttttttcagtcattagtatttcaatgttcattgaatatacccaaagatttagtcttaaataaaagggaactgaaaacagctatccacgtgcctgaaccttgtttgtggattctgctgggtttcaactctaaaggtctagcctacacaacttgtttggaactaaaagactttgttgttctcgttgctgctgctgtattagaattttaatgttcatactaaactataagaggagacatcagacatgactgttggaactgtattagggtttaccctctcgtccctctgtaatgggcctaggcccaactactcttattataaatacatctcccaacccta

SEQ ID NO: 21857 - DNA, 504 bp, Zea mays
  Coding DNA Sequence Number=SeqID_7454
gttgctgtcggtaccatgttgaagtatgggaaaaaccctagccctagctagggttgggagatgtatttataataagagtagttgggcctaggcccattacagagggacgagagggtaaaccctaatacagttccaacagtcatgtctgatgtctcctcttatagtttagtatgaacattaaaattctaatacagcagcagcaacgagaacaacaaagtcttttagttccaaacaagttgtgtaggctagacctttagagttgaaacccagcagaatccacaaacaaggttcaggcacgtggatagctgttttcagttcccttttatttaagactaaatctttgggtatattcaatgaacattgaaatactaatgactgaaaaaaactagctacccttctacattcttttgcccttatgtttaagtatggtgtgatttggatcgttacctgcttatggttctgatgtacatgatattttttttctgatgcagttggttggctgcc

SEQ ID NO: 21858 - DNA, 324 bp, Zea mays
  Coding DNA Sequence Number=SeqID_7455
tctagtgacataaacttaaaaagctgaaacaaacggggcacagtcacctttaccgcacgccgacaaggatggcgtcgtggtcgtcgccctcatccgccgccgccgcctcgggcgcccgattcggccccttcccgagccgagcgcagcggctcgtgccgtatccgtcgctcgcccgcggaacccccgcctcgacgctcgtcctcaggcctcacccggacggccgtggtcatggctctcctcgcgcatatcggtacctcttcctcgcggtgttgcaccgtcgtcgtcgaagccgagggccttaacatcgtttaacacgttagtcat

SEQ ID NO: 21859 - DNA, 495 bp, Zea mays
  misc_feature (26)..(26): n is a, c, g, or t
  misc_feature (31)..(31): n is a, c, g, or t
  misc_feature (36)..(36): n is a, c, g, or t
  misc_feature (63)..(63): n is a, c, g, or t
  misc_feature (67)..(67): n is a, c, g, or t
  misc_feature (79)..(79): n is a, c, g, or t
  misc_feature (87)..(87): n is a, c, g, or t
  misc_feature (92)..(93): n is a, c, g, or t
  misc_feature (96)..(96): n is a, c, g, or t
  misc_feature (109)..(109): n is a, c, g, or t
  misc_feature (122)..(122): n is a, c, g, or t
  misc_feature (155)..(155): n is a, c, g, or t
  misc_feature (158)..(158): n is a, c, g, or t
  misc_feature (235)..(235): n is a, c, g, or t
  misc_feature (258)..(258): n is a, c, g, or t
  misc_feature (282)..(282): n is a, c, g, or t
  misc_feature (285)..(285): n is a, c, g, or t
  misc_feature (341)..(341): n is a, c, g, or t
  misc_feature (368)..(368): n is a, c, g, or t
  misc_feature (370)..(370): n is a, c, g, or t
  misc_feature (398)..(398): n is a, c, g, or t
  Coding DNA Sequence Number=SeqID_7456
atccttaacttggagagagagcccgntggangcggngcagactgacgagtacgactatgctgntgtngcagtgcctttntccaaggntcgtnntgnggaagcgaccggnttattccaacctnttgaccagggctattggaacattgaactaccancantcctgcaaagtgaataattttctgtcccttcacctgatgacaagttctaatctcctcgcaggttgccctgcactacnagacacggttctgggagacgcangagaatcccatcttcggcggctgnggntccactgaccttccgggtatcggctccgtatgctacccagcatacgagattaactncacgaggcctggcgtgattctgtcgtngnacatctcgggcacggatgcacgatccgnggcagctctcagcgatgaggaccacgttgccatggtccaacgcgccatggtcgaggtccacggccatatcgccgatgagcaatggaccggtgcctac

SEQ ID NO: 21860 - DNA, 548 bp, Zea mays
  Coding DNA Sequence Number=SeqID_7457
cagtgccgcagctcgaagtcgccggcggccaagccgttggcgagcggcgagcgcggccggcggcactgctgcgtcggcggcgtcggcgtcagcgaaagcttctgcggctccggcgcgacggcggctggcgccggcggcatagcagaagcggtgggggaggggggggcggtcgagtgaagcggcgagggcgcctcgagctggccggagaagtcgaccaggactccgctcgctggaacggtggtgtggtgcagaatgcagaggagggagtgggagcctgggaggaggtgaggaggagcaggagaccagccaccgttcttcctcctcctcctcatcctcctcctccgtgtcgcgcgccgccgccggcccgaacgcgcagttctccggtcgccgttcacgcgccgccgcatcccgtccctcgtccgcgcccgtgagttcctcgtcatcggcactgatgacaatggctcgcaggaacaggaggagggaagccatcgtccagtggaccgatcgatgggacggaatggaatggaatgtactgctcagaacgcagg

SEQ ID NO: 21861 - DNA, 159 bp, Zea mays
  misc_feature (89)..(91): n is a, c, g, or t
  Coding DNA Sequence Number=SeqID_7458
ttgccctctccacctggaaccccgagcaggctccgccggccgcggcgggtgccgcgacgactcggcacgcgctagctagctagctgttnnncttcccgagggccccaccactaccaccatcctgcagtcctgctgcccggcctcgcgtggcggatgatg

SEQ ID NO: 21862 - DNA, 472 bp, Zea mays
  Coding DNA Sequence Number=SeqID_7459
agtcgcatcgagagatcttaggaagcagcaaaaaatggcggtcccgttgcttaccaagaaggtcgtgaagaagaggtccgccaagttcatcagaccccagagcgaccgtagaatcactgtcaaggaaagctggaggaggccaaagggtattgattctcgggtcagaagaaagttcaaaggtgtcacgttgatgcccaatgttggttacggatctgacaagaagacccgtcactatctccccaatggattcaagaagttcgttgttcacaacacgagtgatctcgagttgttgatgatgcacaacaggacttactgcgcagagattgctcacaacgtctccaccaagaagaggaaagccattgtcgagagagcttctcagctagacattgttgttaccaacaggcttgctaggctccgtagccaagaagacgagtgaagaaaacaaggcgctggtttgttgcatttcgttatt

SEQ ID NO: 21863 - DNA, 387 bp, Zea mays
  misc_feature (253)..(253): n is a, c, g, or t
  Coding DNA Sequence Number=SeqID_7460
tgcttccagcttccgtgccgccgtgcgcactacccattgccagccgccaaccctgcgccgcgcttaccctaaccaagtagccagccgcccagcccccgcgcactgcccaccggccaccgcggcacgccggcaccgcgccaccgcccaggcgcccacggccccacgcggccatgccccgacggcccgagccgccgctcgcttgcctgctcgcctggagcggctggaggccggagccgccgcccgccaagccagnggcctagagcagcagagctgccagagcactgccacaggccgcagcgacgcagccgtcggctgttgtccagccgagcagccgttgtcccacggccccacgccccgacggctcgacgcccggaccggaggccggag

SEQ ID NO: 21864 - DNA, 404 bp, Zea mays
  Coding DNA Sequence Number=SeqID_7461
aaggacaccaggcagcgtccgacagcgtgctcacctgggacaccttccgggagatggctaggatctacttccccaaggaaggcagcctggagccgtgcgccggcgtgctctacggcctcgagctcccaaactgaattcttcttgttcgtgtacagtacacagcctcccaaacgaagaaataacgattctttgattacttaaattcttaaaaaaaaaaaaaaaaagggcggcccttgcagtgcagaattctttcggatagtctcaaatatcgctactagagcgctatcaaactctttctctttccaaaagatttcagataaatctttataaaaaaggggtactttactactctcgggcgtgccatgttagttagttgcaggcctgtacagatgatgaatgttctt

SEQ ID NO: 21865 - DNA, 430 bp, Zea mays
  Coding DNA Sequence Number=SeqID_7462
ttatctggtgtgtttcgatggcgatgacagtagcagcttcgtcctctgtggcagtgatgattccacgtgtcacctccgtctccgaccgcttctccgccgttccttaccttcctccgctgcctcctcgctcttttggccgatcctctttcactgttccgccgaagctagtttcaggtaatggttcgcagaagggtgaattgatgaagatgagagcttcttcatcagatgagacctcaacgtccattgacaccaacgaactcttacagacttgaaggaaaagtgggatggtcttgagaacaagtcgactgtaataatatatggaggaggagccattgttgctgtttggttatcttccattgttgttggtgccatcaactctgttcctctgcttcccaaagttatggaacttgttggtctcggctacacagga

SEQ ID NO: 21866 - DNA, 397 bp, Zea mays
  misc_feature (266)..(266): n is a, c, g, or t
  Coding DNA Sequence Number=SeqID_7463
ttgattttaatcctctctgcgacgtagggttttagcataaacctcgccgcatccttgcgccgcattctctctctgtttaatccgtctcatagctgcgacgaagaaacccttgtttgcattaccttgagaaggctcagtgatgaggaagctcaagaaccatgagaagaaggttctgaagaaagtaaatttcttggaatggaaaagggaaggcggccatcgcgaaaccctgatcacgggtcgttaccacatgggtggtcgtgacgatnacaaaaaatattcaggattgtgtaggatggtgcagaagctgaccaacgtgttgaaacagatggatgcaactgatccttttcgtattcagatgactgatacgctcctcgagaagctatacaacatgggagtt

SEQ ID NO: 21867 - DNA, 219 bp, Zea mays
  Coding DNA Sequence Number=SeqID_7464
acaattcaactctaacctcgattcttcttcatcacaaactttctcaatcggaaaaaaatgtcgggccgtggaaagggaggaaagggtttgggcaaaggaggagccaagcgtcacaggaaggttctgagagacaacatccaagggatcaccaagccggcgattcggagactggctcgtagaggtggagtcaaacgtatcagtggtctcatctacgaggag

SEQ ID NO: 21868 - DNA, 404 bp, Zea mays
  Coding DNA Sequence Number=SeqID_7465
ctagggttccagatttactctcttctccttctcatcgatctacacatcctggatcttcaatctcaagatacctgtttagcttccatggcgaaaactcgacctggtgtcccctcgaaaatcaaaactgggaggaaggagctcgactcttacaccatcaaaggcaccaacaagctcgtcagagctggagattgcgtgttgatgcgtccctcagatgctggtaagccaccgtacgtggctcgtgttgagaagatcgaagcggacgctaggaacaacgtgaaggtgcactgtcggtggtattaccgccctgaggagtctcttggcggtaggagacagttccatggagccaaagagcttttcttgtctgaccattttgatgtccaaagcgcacacaccatcgagggaaa

SEQ ID NO: 21869 - DNA, 461 bp, Zea mays
  misc_feature (339)..(339): n is a, c, g, or t
  Coding DNA Sequence Number=SeqID_7466
tcttgtacctctctctgctctcgatccagagcaagccggcgcccgaaaccacctcgtccgccggcccccacctagcccactggcgccggccccttcccctcagcccccggcgccactggccccgaccccatcccccgtcgcccctgtcggcctccgtgccccgtcccccgtcgcacgccatccacctctgtttgcgccaccggagcccactccgccaacgccaccggtcgcacgccgctcgtctgcctacgcccacacaacctgctgcaccgcccgcccgcctgcgctcgcaaccagccgctcgttgcccgcctcagccacacgcccgccttcgtgcgnctgcctgcgcggtccgcccgctggggcccgcctccaccaacgccaccagccgcaaccggcgccggcgccaccagatcgagtgcgtcccacagtgtcctacacagatagaggagcggcggatc

SEQ ID NO: 21870 - DNA, 448 bp, Zea mays
  Coding DNA Sequence Number=SeqID_7467
aactttgcgatcataatcatctcagagagctcaaaccaagaaaaaaacgtcgcgaagaagatgatgcacatgaccttctactggggcatcaaagccacaatcctcttcgatttctggaaaaccgattcatggctgagttacatcctcactttagtcgcctgcttcgccttcgccgccttctaccagtacctcgagaaacgccgtgtccaattcaaatccctttcatccactcgccatcctaatcccccgcctcgcgccggcgtttccgcacctcttatccccaaatcgggcaccagatccgccgccaaagctgcgtcggtgctgcttttcggcgtcaacgcggcgatcggttacctgctgatgctggcggttatgtcgttcaacggaggcgttttcatcgcgatcgtcgtcgggttaacagtcggttacctcgttttcagatctgacg

SEQ ID NO: 21871 - DNA, 396 bp, Zea mays
  misc_feature (325)..(326): n is a, c, g, or t
  misc_feature (328)..(328): n is a, c, g, or t
  Coding DNA Sequence Number=SeqID_7468
taatctataccatcaaagcaaacatgaaaggcactttcactaacttgcttgtgcttctcttcattgcacttttttgtgcaaatgtcggtgctaggaaacttatttccggagatacccaattcaaggatgaaaaattccttggcggcggcggtggagccggtggtggccttggtgggatagggattggagctggtatcaatgctggtatcaatgctggaattggaggcggtttgggtggtggcggacttggcggtggcggtggtggactcctcggtggtggtggtggactcctcggtggaggcggtttagacggagggggcggtgnnanttggtggtggtggtggctttccttgaacgtatagtcaagtgtttgtgtgcggtgtgtgagctcattca

SEQ ID NO: 21872 - DNA, 410 bp, Zea mays
  Coding DNA Sequence Number=SeqID_7469
taacatctcttctgtgtctctcaagaagatgggattcctctctcaacagatctcaagagatgaactcaaaccaggagatcacatctattcgtggcgtaacgcttacatctacgcccatcacggaatctatgtagggaatggagaagtgatacatttcacttgtggaggtggtcttgggacaagaacagggacttccgtggacaacatcatcgttagttcggttcctaaccacggaggtgacaacccttgtcctaactgcagagaccaatcgaatctcgacggtgtgatctcttcttgccttgactgtttcctcgccggaggaaacctctatctcttcgagtacggtgtctctggacccatctttatggctaaaccgcgaggcgctatctgcacaacagcggtttcggact

SEQ ID NO: 21873 - DNA, 381 bp, Zea mays
  misc_feature (143)..(143): n is a, c, g, or t
  misc_feature (310)..(310): n is a, c, g, or t
  Coding DNA Sequence Number=SeqID_7470
ctctcccgataatcagatcctcgaaactctactcctcgaatcaggtctcagtttctgtgtagtttgcccatcagatcaacaaagtttcatgtctgaacttgattcccaggtccctactgccttcgacccgtttgctgatgcgnatgctgaggactcaggtgcgggaacaaaggagtacgtccacatccgtgtgcagcagcgcaatggtaggaaaagcttgacaactgtccaggggctgaagaaagagtatagttacagcaagatacttaaggacctcaagaaggagttttgttgcaacggaaccgtggtncaagactctgaactcggacaggttattcagcttcaaggcgaccagaggaagaacgtctccacgttcctagt

SEQ ID NO: 21874 - DNA, 203 bp, Zea mays
  Coding DNA Sequence Number=SeqID_7471
gcgtttttcgaaggattaactgcatctagcttgtggtgggttcgagccaccaacgagtttcttggcgcccttagctgcagtcgttatatgcatattcagaaaattcaagagagtggaagctcaggatcgggaaagcaggatgagacttcgataaaccaaggcccgtatctaaacattgcagaagacgggttggtggcagcagc

SEQ ID NO: 21875 - DNA, 379 bp, Zea mays
  Coding DNA Sequence Number=SeqID_7472
gctttttctctcactcacgaaagatgaagacgatcttgtcatctgagacgatggacatacccgaaggcgtcgtcatcaaggttcacgccaaggttatcgaagtcgaaggcccacgcgggaaactcactcgcgacttcaagcatctcaacctcgatttccagctcatcaaagacgccgtcaccggcaagcgacagctcaagatcgattcgtggttcggctctcgcaaagccagtgcttccatcaggactgccttgagccacgttagcaatctcatcgccggtgtcactcagggtttcctttacaagatgaggtttgtctacgctcattttccgatcaacgcttccatctccggtaacaacaagtctattgagatccgtaa

SEQ ID NO: 21876 - DNA, 351 bp, Zea mays
  Coding DNA Sequence Number=SeqID_7473
ctcatgctctttaccattgactacaaacatttgagacctctcaagaaaccagagtcatcacatcatctggatcgtctccgtgagagatagacatggccggcgcttacgatgcgagcttaccgagtgttcctgattggctcaacaaaggagacaacgcgtggcagctcacgtcggcgactctggtcggtctacaaagcatgccaggtctcgtcatcctctacgcctccatcgtcaagaagaaatgggccgtgaattccgctttcatggcactttacgccttcgcagccgttctcctctgttgggtcctcctctgttacaaaatggctttcggagatgagcttttgcctttct

SEQ ID NO: 21877 - DNA, 270 bp, Zea mays
  misc_feature (79)..(79): n is a, c, g, or t
  misc_feature (85)..(86): n is a, c, g, or t
  misc_feature (88)..(88): n is a, c, g, or t
  misc_feature (211)..(211): n is a, c, g, or t
  misc_feature (230)..(230): n is a, c, g, or t
  Coding DNA Sequence Number=SeqID_7474
aaattagggtttgtatagtctcgagatgggtggaggaaacgcacagaaatcgaagatggctcgtgagaagaacttgganaaggcnngncaggccggaaaaggcagccaactggaagctaacaagaaagctatgtccattcagtgcatggtttgtatgcaaacattcatctgcacaacatctgaagtgaaatgcagggagcacgccgaggcnaagcatcccaaagccgatnttgtcgcttgcttccctcacctcagcaagtgatgaaacta

SEQ ID NO: 21878 - DNA, 345 bp, Zea mays
  Coding DNA Sequence Number=SeqID_7475
tttttcgtctcgcaacgcaatcgcacatctcttcagcggctactatcagagagtgcccacaaaaaattgactgaccgagttaggtgttcatgcaacatcacttctcttctcctctcgtccgacgttcttctcaatctcagtagcgcgcgcttgctgcagcgtatgagaaacaggagtcatcggtgactttttggaggcatttggtgactacgaatgtgtggattgtcctccccacatgtgaccagtatattgaatgtcttttagaagcagttctggccgattacttctatcttcatgtgacgcgcgacatacactagtatatatatcgcggcgaacagctccttc

SEQ ID NO: 21879 - DNA, 310 bp, Zea mays
  misc_feature (177)..(177): n is a, c, g, or t
  misc_feature (191)..(192): n is a, c, g, or t
  misc_feature (254)..(254): n is a, c, g, or t
  Coding DNA Sequence Number=SeqID_7476
acccaggaagcgcacgacagctatagcaccaagctgataggaagcaatcattggccagtcgatcatggcgaggattcagctttctgccatagcggccttcgccgtcttcctcgcgctggccgccccctccattgccggcgaccccgacatgctccaggacgtctgcgtcgccgaccngaaatcctcgatcnngctgaacgggttcccgtgcaaggcggagatcacggcggacgacttcttcttcgccggtctcnagaagcccggcaacacaaacaacccggcggggtccaacgtcactgcggcaaacgtg

SEQ ID NO: 21880 - DNA, 334 bp, Zea mays
  Coding DNA Sequence Number=SeqID_7477
agaatttgatcccacacctttgtgacaacgcctcggcgctctggaactttctcgtcgcaacattctcttgactggctcaagtttgacctcctgttaatcgttcactgtttcagtagccatggcaaagcatcaccctgatctgatcatgtgccggaaacaacccggcattgccatcggacgactgtgtgagaaatgcgacgggaaatgcgtggtgtgtgattcttacgtgcgtccctgcactctggtgcgtatttgcgacgaatgcaactacgggtcgttccaaggacggtgtactatttgcggaggggttgggatctcggatgcttactactgc

SEQ ID NO: 21881 - DNA, 377 bp, Zea mays
  misc_feature (181)..(181): n is a, c, g, or t
  Coding DNA Sequence Number=SeqID_7478
ctctcatattttctccacaaactctttccgaaaaaaaaaacacagttttagcatatttcacgtaaagaaaacaaagctatggcggatcagctcaccgacgatcagatctccgagttcaaggaagccttcagcttattcgacaaggatggtgatggttgcattaccacgaaggagcttggcnccgtgatgcgttccctaggtcaaaacccaacagaagctgagcttcaggacatgatcaacgaagttgatgcagatggtaacggaaccatcgattttcctgagttcttgaaccttatggctaggaaaatgaaggacacggactctgaggaggaactcaaggaagcgttcagagtctttgataaagaccagaacggttt

SEQ ID NO: 21882 - DNA, 370 bp, Zea mays
  misc_feature (35)..(36): n is a, c, g, or t
  Coding DNA Sequence Number=SeqID_7479
tcgtacggttccctctacttcgctttcaaaacttnnataaaacaaaatggcgggtcgtggaaaaactctcggatctggggttgctaagaaggcgacgtctcggagcagcaaggcgggtctccagttccccgtcggccgtatcgcccggttcttgaaaaacggcaagtacgccgaacgtgtcggcgccggagctccggtctacttggccgccgtactcgaatacctcgccgcagaggttttggaattggctgggaacgcggcgagggacaacaagaagacaagaatcgtgccgcgtcacattcaattggcggtgaggaacgacgaggagctgagcaagttgcttggagacgtgacgattgctaatggaggt

SEQ ID NO: 21883 - DNA, 430 bp, Zea mays
  Coding DNA Sequence Number=SeqID_7480
gttttgtgctcaattctgcagagatcgtcactgcttgaagacggcttgctgctttagcgtatctgatctctgcaaatcataatgtctttggtcgcaaatgatgagtttcagcatattctccgtgtgctgaacacaaatgttgatggtaagcagaagataatgttcgctcttacctctatcaaaggtattgggaggcgattggctaacatcgtctgcaagaaggctgatgtcgacatgaacaaaagggctggtgagttatctgcagctgaaatcgacaacctgatgacaattgtcgcaaatccaaaacagtacaagatcccagactggttcctgaacagacagaaagattacaaagacggaaagtactcccaagtcgtctccaatgcccttgacatgaagctcagggatgaccttgaacgtctcaagaaaa

SEQ ID NO: 21884 - DNA, 439 bp, Zea mays
  Coding DNA Sequence Number=SeqID_7481
tgttatttccattccaagcaccagagccgtggtacaggaagagcttctcaacaaccgcgggtgccaatgtcgtggcggcgtctcttttgcagatgttccctgcttacatcggcatcatgaaagcggcgactgaggaagcaagagcggagaaggccaaggaggcgcttgtggtgttagcgaacctggaagaggccttcgcccagtgctcaaaagggaagcctttcttcgccggcgactccgtcgggtacctcgacctcgccgtcggatgcaacctgttctggctcgaggcaatacgcaagatgtttggggtgacgttctttgacgtgggcaagaccccgctcctggccgcgtgggcggagcggtttgccggaaccgagatggcgagggaggttgtgccggacgccgacaccgccgtggtgtttgccaagaagcttcaggc

SEQ ID NO: 21885 - DNA, 337 bp, Zea mays
  misc_feature (235)..(235): n is a, c, g, or t
  Coding DNA Sequence Number=SeqID_7482
aaaccttcttacttctccatattgacaaagatacccatttgcttctcttagcttcttcatcatggcggttttagtaatatctgctctcctgctgcatgtcctagcgtcttcaacctgtgttcaaggcttctaccgtcgtggcggccaccatcctgggggccatggaggaccgtggatcaacgctcatgctactttctatggcggtggtgatgcttccggcactatgggtggagcntgcgggtacgggaatctgtacagccaaggttacggaacagagacggctgcgttgagcaccgcgttatttgataacggacttagctgtggtgcctgtttcgag

SEQ ID NO: 21886 - DNA, 389 bp, Zea mays
  misc_feature (95)..(96): n is a, c, g, or t
  Coding DNA Sequence Number=SeqID_7483
atcctctaatctatctctcaatatgtctccttcgtgaatctaaactttctcaacaaccaccaccatcacctccgacagaattatctcaatttccnncccctcgttctccactactctacctgattactctttttatttcttatatcctcaaagtttttcctttcttcagatgcagatttaaaacatgaagaagataggaaacagatcgggagggaggagtcagaagaagcttgacagcagaggaggtagaagaatcgtgatggtgggggcataagaagcctcacggcggagaaggcgtggcaagcatatgagtttgtcgctcagccgtaacaccggtggctctaccaccagactgagtcttcgcttgagccatggcaatcggagctggt

SEQ ID NO: 21887 - DNA, 341 bp, Zea mays
  misc_feature (243)..(243): n is a, c, g, or t
  misc_feature (248)..(248): n is a, c, g, or t
  Coding DNA Sequence Number=SeqID_7484
ggcgatcgccggaacaagaacatgttggcgattacgagagtgattagccggagaatccacggcaagggtgatgtagctgttccaaaaatctcaggattctctattgtatctcccaaaaacgttgaggtagagtatgcagatggcagcaagttcagtttctcatctgagtttctgagagtgcatagcccagctgctgatgggaaagtcagatcaatcggtggtgaaaaggtgatatctggaagncggtntgtaggaatcatgtctgcagaaccggtgggaaactatggggtaaggttagtgtttgatgacttgcacagaacaggaatatacccatgggacta

SEQ ID NO: 21888 - DNA, 305 bp, Zea mays
  misc_feature (164)..(164): n is a, c, g, or t
  Coding DNA Sequence Number=SeqID_7485
aaggtcgtgggtttcatcctctccggcggcctccatggcgctgtgagaggagggtatagctctagggtttctttgtttgctgtgtgtagtttcttctggctaagtgttttaccatcgtgatttaaggtgaggaggggtgagaagatttgttttgagcgccgacnatatcttttggtgtcttcggagtcgatttggagtgttggttcagatctagtacggcgaggtggtaatttggagctctggtccccttcgattcagatctgggtttgttacctagggtttggtcgttttggtactgtattagt

SEQ ID NO: 21889 - DNA, 436 bp, Zea mays
  Coding DNA Sequence Number=SeqID_7486
tttccagtcacaagatctaaacaatcatagaaacacgacagcaagccaagaatcaagaggctcggggaagatgcaggcggcgaaggagaaggtgaaggacggggtgagcgcggtgaaggccaagaccaagatcgcgcaggccaaggcgtcggagaaggcggaggcggccacggcgaggtcgcacgccgagcgggagctggcgcacgagcgcggcaaggccaaggtcgccgccgccaagatggagctgcaccaggacaaggtcctacaccgggaggaggccatcgagcaccgcatccacaagcacggcggccacggccaccaccaccacaagcacggcgtcggcatcgtggccgcgcccgcgccggcgcccggggcaggggcgtactactctactgctgcacgtcaccactactagcgctagctagacgggcacatt

SEQ ID NO: 21890 - DNA, 424 bp, Zea mays
  Coding DNA Sequence Number=SeqID_7487
tctactcggcggtgatcaccggcgccgtcaacgtgctggccacgctggtgtcggtgtacgccgtggaccgcgccgggcggcgcgcgctgctgctggaggccggcgtgcagatgttcctgtcgcaggtggtgatcgccgtggtgctgggcatcaaggtgacggacaggtccgacaacctgggccacgggtgggccatcctggtggtggtcatggtgtgcacctacgtggcgtccttcgcctggtcctggggcccgctggggtggctcatcccgagcgagacgttcccgctggagacgcggtcggccgggcagagcgtgacggtgtgcgtcaacctgctcttcaccttcctcatcgcgcaggcgttcctctccatgctctgccacctcaagttcgccatcttcatcttcttctcggcgtgggtgct

SEQ ID NO: 21891 - DNA, 424 bp, Zea mays
  Coding DNA Sequence Number=SeqID_7488
tcctttgaaagcaacgccgacaactaaatcggattctcttcacttaagtctccggcgacttctcctccgttacagcttccatccgtttcgtcatccccaccccaacttaccgtcgtctctctcatctctgtcgtcaatcaaatctgagttctagtttgtacttggtttctgatctaatctgagcaaaggagattagaaaagtgctagtttctgattgagtacgtgttggagaaaccgtttgaagcaacagtacaaccgtgagagaaagagagtggccattggtaaattcacttgtgtgatttcgtgtagacggtggacctggtgctgtctaattacggtgcagaaggaacatggccatacctgattgatgagttcgttgagtatttatatgacaagagcattgttgagaagtaacctgccatct

SEQ ID NO: 21892 - DNA, 363 bp, Zea mays
  Coding DNA Sequence Number=SeqID_7489
gtcaacgcgaatcagtcaccgaagacagaagagagatgaggttgttcgatccgtggccagtgttcttcaagagggagtggaaacgttgctggccgtttctcaccggattcgccgttaccggcgtcctcatcaccaagctcacggctggattcaccgaggaagacaccaagaactccaagttcgtccaacaacacaggcggtgaacatgagaaagggaaagtcggctttcaaaactattctaataacatagaagagaggattcttgatactgttcgtctctcttttccttttttttctacttttgttctccccgtatgtttgaagtggattttgattcctccctttctccccatacatttaaat

SEQ ID NO: 21893 - DNA, 395 bp, Zea mays
  Coding DNA Sequence Number=SeqID_7490
acttgtttactcctgagcggcactcggaatcagtcaggaaactctttgctttgcttgctatggctcgtcgtgaggatcgttctcatcccaagcctcaggactcatgtaccatcgagtttgacggtgcttccagaggaaaccctggaagagctggtgcaggagccgttctccgtgctccagataatactgtgctcttccgttctcgcgagggtttaggctctgctacaaacaacgttgctgagtatcgagctctcaatcttggcctcgagacggctcttaacaacggctttcgaaatgtgcgcgtccagggtgattcacagcttgtttgtaaacaggttcaaggtgaatgggcaacccgacacccgaaaatggctgagctttgtggacaagcacat

SEQ ID NO: 21894 - DNA, 311 bp, Zea mays
  misc_feature (26)..(26): n is a, c, g, or t
  Coding DNA Sequence Number=SeqID_7491
accaaccggccggacgggatgcacgncgcgggaaaggggggactctcctctcctcccccgccaacgtgggctcgtcggcccgcaacccgacgagcgagccgtcgccgtcgccctccgcgtccgcacccgacacggtgcgccgaacgtggcgccccacttgtggcgctccctcgctcgccgttgcctacttagccaccagctccgcgccgctgaagggctgaatcgaagcggcagtgatgatgaggcccagacccttcggttccggtgtggcatcggccgccgcggccgaggtttcggtgggcgcgggatgc

SEQ ID NO: 21895 - DNA, 371 bp, Zea mays
  Coding DNA Sequence Number=SeqID_7492
cgccaacgccttcggtcgaagcaaagcaacatccgtccataataaaagcggaagctttgctctcacggatacaccttctcctcccatccaaattccaaagaagcaaaaaggcggagcagagcaagaccaaagcggccagtctcttgcaagcctcgccgccgtcgccgccggctgatcagctccggtgcgtgcgggatgggcagcgggaggccggctgcgtggcggacgtgcgcggcggcggcggcggctgcgtgcgccgtgccggtggccttgtcactggtgctgctctggctgcccctgctttgctgcgccgtggccgtggtccggttccggcgggcgaggaggaggatgatgcagatgtgcggcggcag

SEQ ID NO: 21896 - DNA, 385 bp, Zea mays
  Coding DNA Sequence Number=SeqID_7493
acatcaattcacattctctcagaaaccaaacagcaaaaagagtaataaacccaaatggctcgtaccaagcaaaccgctagaaaatccaccggaggaaaggctccgaggaagcagctggcgacgaaagcggcgaggaagtcggctccggccacgggaggagtgaagaagccgcacagattccgtcccggaaccgtcgcccttcgtgagatcaggaagtaccagaagagcaccgagcttctcatccgcaagcttcccttccagcgtctggtccgtgagatcgctcaggacttcaagatggatctgaggttccagagcagcgccgtcgcggctttgcaagaggctgctgaggcttaccttgttggtttgttcgaagacaccaatctct

SEQ ID NO: 21897 - DNA, 428 bp, Zea mays
  misc_feature (182)..(183): n is a, c, g, or t
  Coding DNA Sequence Number=SeqID_7494
gtagcctacctccatctctaagaatcaacatgtctggtgatgaagctgctcctgctgttgttgttcctcccgttgctgagccctctgcgattccagaggacatggatctcttaactgcattggagctcacgcttaggaaggctcgtgctcacggtggcgtggttcgtggtctccatgaatgnnctaagcttattgagaagcggtctgctcagctctgtgtcttggctgaggactgcaaccagcctgattacgtcaagctggtgaaagctctctgcgctgatcataacatcaacttgcttacggttccgagtgctaaaaccctcggtgaatgggctggtctttgcaagattgattcagagggtaatgcgaggaaggttgttggatgctcgtgccttgtagtcaaggactatggtgaagatactactgca

SEQ ID NO: 21898 - DNA, 353 bp, Zea mays
  Coding DNA Sequence Number=SeqID_7495
gttaacaaacattcgatcccatcatctccgattcaaagccatggctcgtacgaagcagactgcgaggaaatcgacaggaggaaaagctccgaggaagcaactcgccaccaaggctgcgaggaaatctgcaccgaccaccggaggagtcaagaagcctcaccgttaccgtcccggaaccgtcgctctccgtgagattcgtaagtaccagaagagcactgagttgctgatccgtaaacttcccttccagcgtcttgttcgtgaaatcgctcaggatttcaagacggatctgagattccagagccacgcagtgttggctctccaggaagctgcggaggcgtatttggtgggtttgt

SEQ ID NO: 21899 - DNA, 413 bp, Zea mays
  Coding DNA Sequence Number=SeqID_7496
aaaccttctgagatttcgccggcgagagaagagtgagagagagagatccaacggctgagatgttccttcgtgcaatcggacggccgttattggccaaagtgaagcagacgacggggatcgtggggctcgacgtcgtaccgaacgcgagggcggtgctgatcgatctctacagcaaaaccctaaaggagatccaagccgtgccggaggacgaaggataccgtaaagcggtggaatcgttcacgcgccaccgtctcaatgtgtgcaaggaagaggaagactgggaggcgatcgagaagcgtcttggctgcggtcaagtcgaggagctcatcgaggaggcgcaagatgagctcacactcattgcgaagatgatcgaatgggacccttggggtgttccagatgactacgagtgtgaa

SEQ ID NO: 21900 - DNA, 227 bp, Zea mays
  Coding DNA Sequence Number=SeqID_7497
ttgttaaacaatactcgacccgttggtcgtcaggatactcttctccgtttcatttccatccttcttcttgcagatctctcagtaacgctccttgcattgcttcaattctactggcttgccctcgcagcctttctcgctatcctcctgattctccctctcgctctgctttgcccattccctgctggccttaacgctttattaagtagagaaatgagaagagcttcgct

SEQ ID NO: 21901 - DNA, 464 bp, Zea mays
  Coding DNA Sequence Number=SeqID_7498
aaaagcagcacgcacgagacgagagacgacgaagcgttctcgataatcaccgtgcttctttagcttagcttcgttctctctctcacaaaaaccctaaattctccgagaccgatagaccgcgataatggctaatagcaatctaccgcgaagaatcatcaaggaaacacaacgtctacttagtgaacctgctccggggataagcgcgtctccgtcagaggaaaacatgcgttatttcaatgtcatgattcttggtccttcacagtctccttatgaaggaggagttttcaagttggagctctttttgcctgaagaataccctatggcagctcccaaagttaggtttctcaccaaaatataccatcctaacattgacaagcttggaaggatctgccttgacattctgaaagacaaatggagtcctgcgctacaaataagaactgtgctcttgagtatccaagctcttc

SEQ ID NO: 21902 - DNA, 160 bp, Zea mays
  Coding DNA Sequence Number=SeqID_7499
tttgcctgtttggttctctccatccctcgttcttctctgtcccgtgcggcgtcggcagatcgtgggctccggcgacggcggttgaagggcgacggctgcggcagggcgtaggaaacccaattttgtatctcaaatcaagagtaggttcctataaattctg

SEQ ID NO: 21903 - DNA, 474 bp, Zea mays
  Coding DNA Sequence Number=SeqID_7500
tgcacctgtctctctcgtcggctcgcctcacacctgctctcccatccacttccctcatccacctccaccgcctcgccttctccccctctccctcgggagccgctgctgctccgacgatgccaccctcatgcatcgctcggatctctccctcgatccagccggagtagttccctttccctcctccacacgcgaccaccgtcatctcctccttccgcacccgcccctttctaaaaagtcccaaaccctaaacgacggcgactcctcctccccgcggcagcgacctgggccggaggtgccgtccggttcttgtggacgcccccagaatcgtctcgcacccgggggacggcgcaggcggtcggatcagcaacatcaccgtgacctcctacatcaaggttcatcgaggtcgctggcgcgcgcgtcatcccactcggctacgacgagccaaaggatcgcctcctcgaggtgtgcgtgctg

SEQ ID NO: 21904 - DNA, 427 bp, Zea mays
  Coding DNA Sequence Number=SeqID_7501
tccgttttcatcactagcagcagagtcttgcgtttttatcagccgacgcgaaaatggtgaagggacgccaaggagaacgtgtcagactctacgttaggggaaccatcttgggatacaaaaggtcgaagtctaaccagtacccaaacacatcccttatccagatcgagggagtcaacactacagaggaggtgacatggtacaagggaaagaggatggcttacatctacaaggctaagaccaagaagaacggtagccactaccgctgcatctggggaaaggttacaaggcctcatggtaacagcggtgttgtccgtgccaaattcacatccaacttgcctcctaagtccatgggaatgagggtcagagtcttcatgtatccgagtaacatatgaagcaaagtttgatgatgtagctgtggtttttgtcc

SEQ ID NO: 21905 - DNA, 324 bp, Zea mays
  misc_feature (92)..(92): n is a, c, g, or t
  misc_feature (97)..(97): n is a, c, g, or t
  misc_feature (103)..(103): n is a, c, g, or t
  misc_feature (106)..(106): n is a, c, g, or t
  Coding DNA Sequence Number=SeqID_7502
ttttactctgttgtgttggtttttgtgagagctgcgcagtatctatttgattttgcatccagagaaaagcaaagactgcttctatggctgancctgnaactanaanctattagacagaggaggatgcaagagctcatggctcaacatggcactcaggggaagcaaggcagtcagcagaatccagatcaagagagagcacaagaagatgctaaaagggaagctgatgaacgtagacaaatgatgcttagtcaaatattgtcttcccaagcccgagagagaattgcacgaattgcactggtgaaacctgagaaagctagagccgta

SEQ ID NO: 21906 - DNA, 432 bp, Zea mays
  misc_feature (61)..(61): n is a, c, g, or t
  Coding DNA Sequence Number=SeqID_7503
atacggatcctttcgtaatttccatacttgttgtgtcgtcgtattcacgagccgtatagtntttgttccttttacctctctctctctctctctatctatcggttgtgtgttgtggaagcttgttagctttctctcttctccgtcattcgattgtcaacgcgtttatctcaactgcgatctcgttgatcagaggattccccgagcttcagatcaaaaatcatggccaccgctggaaacaagaacatcaacgccaaattggtactgcttggggatgttggagctggaaaatcaagtcttgtgcttcggttcgtcaaagatcagtttgttgaattccaggaatcaacgataggtgcagccttcttctctcaaacattggctgtgaatgatgcaactgtcaagtttgagatttgggatacagctggccaggaacgt

SEQ ID NO: 21907 - DNA, 444 bp, Zea mays
  Coding DNA Sequence Number=SeqID_7504
gagcaaatactccatagccaccatactatttcctctctcttacaatcaaaacacccactttgaaatgtccatctcgaaagtccttgggtttctgattctcacctgtctactgatcgcttcagcgatggctcagtctccttctccagctccgttcataggcggaggaaggcgagttatctctccttctccgtctaaaacaccgacaccagaatcctccgtcgcgtctcctccatcactacctcaagcggattctccttccatcgattccgcagcagtgactccgtcttccatatcagactcgccatcagaagctcctgctccatcacagcagagcagcgccgtttccaaccaatacactgttttcgctggatccatcaccgttattctatacgctgccgttttggctttctaatctctaatggagcctcatttatttatgtcata

SEQ ID NO: 21908 - DNA, 456 bp, Zea mays
  Coding DNA Sequence Number=SeqID_7505
tgttctccgtcacgatggacttcgtctactcacacggtttcgggttcctgttggtggttgccagtatcatctggtccacagagggttactcgagcgccacgggtatagcaaagacgacaaagtactgggactgctgcaagcctacctgtgcctggcgctccaacgctggtgccgtaaccaaccccgtacgcacctgtgctgccggcggcgccactacgctgcatgagaacactcagagcggctgcaacggaggctcgtccttcgtctgcaacaaccagcgtccctttgtcaagtgggggaaggcgtacggctttgccgcagccaacgttaacggtttgccaacaagcagcctgtgctgctcgtgttacgaacttactttcactaacaccgcactcgcaggcaagactctaactgtacaggtcaccaatactggcagcgaccttggaaacaaccatt

SEQ ID NO: 21909 - DNA, 357 bp, Zea mays
  Coding DNA Sequence Number=SeqID_7506
atttagtgtttctctcagtttcggctcggtcccagaaccaagatcgtagggcttcaagatgccgtcgcacaagtcattcatgatcaagaagaagcttgcgaagaaaatgaggcagaacaggccaatccctcactggattcgtcttcgcactgacaacaccatcaggtacaacgcaaagcgtagacactggcgcagaaccaagcttggattctaagctgtcttacttttgcctatttgtgaaagctctgttctttccaaagacattgttttcctttgtttggttctttagcgttttgttttttcagtttcgttttgtggcagttgcactactgttcacagttctgtaagaccatcttt

SEQ ID NO: 21910 - DNA, 418 bp, Zea mays
  Coding DNA Sequence Number=SeqID_7507
ccatcaacctcacggagaggctcttccaggtgctccgctggtccacgggctccctcgagatcttcttctccaagaacaacccgctcttcggcagcacctacctccacccgctgcagcgcgtcgcctacatcaacatcaccacctaccccttcaccgccatcttcctcatcttctacaccaccgtgccggcgctctccttcgtcaccggccacttcatcgtgcagcgccccaccaccatgttctacgtctacctgggcatcgtgctctccacgctgctcgtcatcgccgtgctggaggtcaagtgggccggggtcaccgtcttcgagtggttcaggaacggccagttctggatgacggcaagttgctccgcctacctcgccgccgtgtgccaggtgcttaccaaggtgatattccggcg

SEQ ID NO: 21911 - DNA, 451 bp, Zea mays
  Coding DNA Sequence Number=SeqID_7508
ttcctcccctgaagccgaataatcaatcatcctaggttttttgtggcaagcagctcgctacaatgacaaagggaacagggagttttggtaagaggaggaacaagagtcacacactatgtgtgagatgtggacgtcgtagcttccacatccagaagagtcgctgctctgcctgcgcttaccccgccgctcgcaagaggacctacaactggagtgtgaaggcaatcaggaggaagacaaccggaaccggaaggatgaggtatctcaaaaatgttccccgccgtttcaagaccggtttcagagaaggtactgaagccaagccaaggaacaagggagcagctgcttcatcagcctaaaagaaacctcacttggtgttaaaggcaggaagggactaaaatttagcacttttctcttgctctatctagttttgagatttcctattcctgaatactat

SEQ ID NO: 21912 - DNA, 453 bp, Zea mays
  Coding DNA Sequence Number=SeqID_7509
gatcgttcaatctgcgagaagaagaagaaggtgaaagatggggaaagacgcaaagtctggtgggaagggtaagggaaagcaagcaagtggcagtgatgatgctgctgcctccaagggtaaaggcaaatctggaaaagccgctgatggtcttggaacatgcacttatgttaaagctagacatgttttgtgcgaaaagcaagggaagatcaacgaggcatacaaaaagttgcaggatggttggttgagcaatggagacaaggttcctcctgctgagtttgcaaagattgcagcagagtactcggagtgcccgtccgggaaaaaaggaggagatcttggatggttccctagaggaaagatggctggtccattccaagatgttgccttcaacactcctgttggtgtcaccagtgcccccttcaaatctacgcacggataccatattatcttgtctga

SEQ ID NO: 21913 - DNA, 304 bp, Zea mays
  Coding DNA Sequence Number=SeqID_7510
tgtttctggtgcttgatagatctcaagccttgcagcttctattcgccagctagctgaaatggaagatccaatcggccgtgttttagcaaaaactgagattgcagatggtcttattttagagaagacatcatcaccattaggtgttcttctgattgtttttgagtctcggcctgatgcacttgttcagatagcttcacttgctatccggagtggaaatggccttctgctgaagggtggaaaagaagctcgtcgatcaaatgctatcttacataaggtgatcactgatgcaattccaaagactgtt

SEQ ID NO: 21914 - DNA, 368 bp, Zea mays
  misc_feature (55)..(55): n is a, c, g, or t
  Coding DNA Sequence Number=SeqID_7511
tccctttatcatgtcaataggagcgatgcaggagatcgaagagactgctccgttnatcgacgattctcaacccagcggcgaaacgagatcgcaatccgcgacgacgaaggtgccggaggtggagatccatctgtatcgaagtgggaaaggtccgatcgacgtgttcaaatcgaatctcggaggttgggagcaggatcagctcgaggttcgagctattctcgagaaatacggattgaaatcgatcttcgctttcaacgtcgagaaaggtcgaggcgtcccgatccgatttcaaaggaatggccggtctgtgctgacgtacagagatggtgccaccgtttacatcgacggcgaacctcaggattctatga

SEQ ID NO: 21915 - DNA, 312 bp, Zea mays
  misc_feature (52)..(52): n is a, c, g, or t
  Coding DNA Sequence Number=SeqID_7512
aaaaaatccacagaggcgaaagatgggacgcgtgcgcacgaagacggtgaanaagtcctcacgccaggttatcgagaagtactactcgcgcatgacgctcgatttccacacgaacaagaagatcctcgaggaagtcgcgatcatcccttcgaagcggctccgcaacaagatcgccggattctccacgcatctgatgaagaggatccagaaggggcccgtccgcgggatctccctcaagctccaggaggaggagcgcgagcgccgcatggacttcgtccccgacgagtccgccattaaaaccgatcgcatcga

SEQ ID NO: 21916 - DNA, 403 bp, Zea mays
  misc_feature (126)..(126): n is a, c, g, or t
  misc_feature (251)..(251): n is a, c, g, or t
  misc_feature (327)..(327): n is a, c, g, or t
  Coding DNA Sequence Number=SeqID_7513
acaacacagtttctttctacctacgatgtttggtttgcgcagatccgcggcgaccttattcgaccatagccagtctctgcttcgtaatctatcgtttcatggactgcgtgtgcaaggaatccgtgngggaaacgcagaggttccaaaccacaagcccctcaagactggtcttcaagaagtttacggaataggtcgccgtaagtctcaccaggttctctgtgggctcggcatcaccaacaaacttgccaganacttaactggtaaagaactcattgacctccgtgaagaagttggcatgcaccaacatggtgatgaattgaggaggcntgttggatcggagatacagagactggtggaagtagactgttacagaggaagtagacatagacatgggatgccttgc

SEQ ID NO: 21917 - DNA, 365 bp, Zea mays
  Coding DNA Sequence Number=SeqID_7514
accacacaaggtactccactttgtaagctcatttgattcctagaggcactctagtccaggacatccaccatggcacggcgctttctggctgtgctcgccgtcgccctggcgctcttgcaggccgcctcggccaagtcctggctggacaagaggttcaacacggacggcaccgtccgcactggatacgacgcctccggccagcaggtggtgatgctcaacctcaaccagcaatccggcgccgccggcttcaactccaaggagcagtacctctacggtgagttcagcatccagatgaagctcatcccgggaaactccgccggcaccgtctcctgcttctacctttcttccggtgacgacgagtggcg

SEQ ID NO: 21918 - DNA, 319 bp, Zea mays
  Coding DNA Sequence Number=SeqID_7515
aagcgaagccatgtccgagcagaaccccgccgccacctctcgccaccgttgtccctcctccgtcgaagccagccgccgcccaccgcccgcgaagcccgagccgccgcacccgagcccctagtcgtcgcctccttgattcggtttcgtgcaagcaactgagatctgaaccacaagatcccgagaagtgaccgtctcttccactctagatccagatctaccactgcaataagctagggtacgtagggtccaaaaattgcaggaggatgtggatacgttgaaggcaagatgttacagagcaaagccgcagctgtaaccacta

SEQ ID NO: 21919 - DNA, 381 bp, Zea mays
  Coding DNA Sequence Number=SeqID_7516
tgatctgcatttagtggctggcggcggttctcttaccgtcggtcgccacccttcattgttctcatgtctgttattcaaacatgttttgttccagttttacaactccctctttcctcttcatctttagttttgtgttggattgcggtctgatccagtaaatcaaaccagatgttagatgtgtaactcaaactcttcggagtgacagcaaagtcgtggttagtcgactgcctgcaagaagcaccttttgcagaactggatcctttcagacctagtgcatgttgatgggagtctcagtctcttcagtttctaatattcctagaagagtggtggctaccaccgtttcttgccatttcaacgttctgaaaccggaatctttttgtg

SEQ ID NO: 21920 - DNA, 171 bp, Zea mays
  Coding DNA Sequence Number=SeqID_7517
aaattagggtttttgcatcgccgctaagctctctcacctccgcctctccctgagccttcgtcttcagaatggattctcagattaagcacgccgtggtggtgaaagtgatgggtcgtactggatccaggggtcaggtgacccaggtacgagtgaagttcacagactctgatc

SEQ ID NO: 21921 - DNA, 507 bp, Zea mays
  misc_feature (212)..(212): n is a, c, g, or t
  misc_feature (386)..(386): n is a, c, g, or t
  misc_feature (431)..(431): n is a, c, g, or t
  misc_feature (464)..(465): n is a, c, g, or t
  Coding DNA Sequence Number=SeqID_7518
gcgggagttatgaacctgtttgagaagctaattgtctagtgcactagttaaatactacttggtcgtggtacacaattcatgagacagaaagcttcacccaaaaaaataaagccacaagtcttttcttgtttaaatttcagcttcatcatttgaatgcacatggaaatggctagttactctgccaaacttcagcagcatgtcaattactttgncctagctatttgctacaaactattgcaataatggatggcaaaatcatcgaaacggattaaagatgattgtttggactgctgcaactgcaatttatagagacaaaaacactgtagaagcagtagaagccgatacggattaaagcgaaatgaagggacgatttttttaatctcatnattcaaaaagagagcatatcaattaggccgcttgtttttgtcttnccatctgaaaaggcgtgcatgtaattaacttgnngatcttatgtcaaaaggggcttctttttgtcttcccatttat

SEQ ID NO: 21922 - DNA, 419 bp, Zea mays
  misc_feature (81)..(81): n is a, c, g, or t
  misc_feature (83)..(84): n is a, c, g, or t
  misc_feature (110)..(110): n is a, c, g, or t
  misc_feature (124)..(125): n is a, c, g, or t
  misc_feature (138)..(138): n is a, c, g, or t
  misc_feature (147)..(147): n is a, c, g, or t
  misc_feature (165)..(165): n is a, c, g, or t
  misc_feature (180)..(181): n is a, c, g, or t
  misc_feature (253)..(253): n is a, c, g, or t
  misc_feature (267)..(267): n is a, c, g, or t
  misc_feature (288)..(288): n is a, c, g, or t
  Coding DNA Sequence Number=SeqID_7519
agtgacagtctaatttctttcttactttattcattgagcaatcaactaactgaagggtgatgaatccaattgaatcaaaangnncaccactatacaatctacatatgatnaaaaagaatcgacnntgacagaaattgngaaagaatnaccatggctagtcaggcnctcgcaggtccctcnntgttgctgccaatgcgctccgcaacgccaatgcacggccatcgatctcgagtcctgctccggcaccagcgtnatctctttggctgngcagtccccccaaatcactgnctgcctcctcaacatccggcgccaatgcagagtaatcctccctggacaacagcacattgtgaagcatcgcacatgtcccaatgcacgccacagctgctcgagagctttcctcctcgtggagcctagcgatg

SEQ ID NO: 21923 - DNA, 351 bp, Zea mays
  misc_feature (71)..(71): n is a, c, g, or t
  misc_feature (91)..(91): n is a, c, g, or t
  misc_feature (150)..(150): n is a, c, g, or t
  misc_feature (158)..(158): n is a, c, g, or t
  misc_feature (173)..(173): n is a, c, g, or t
  misc_feature (204)..(204): n is a, c, g, or t
  misc_feature (270)..(270): n is a, c, g, or t
  misc_feature (290)..(290): n is a, c, g, or t
  misc_feature (309)..(309): n is a, c, g, or t
  misc_feature (312)..(312): n is a, c, g, or t
  misc_feature (315)..(315): n is a, c, g, or t
  misc_feature (321)..(321): n is a, c, g, or t
  Coding DNA Sequence Number=SeqID_7520
atgatttaatcatcctttaccaacatgttagtccactaattgtttcaattacaaaaaaaaaaccccaaatntagagcttccacatgtggcnacgtgttcctcccatacatcttggcccacaccattgggcccctatccgtcggcctgctntcccgcanatgttcagctgctanccaggtggcagggggacgggcacggcccttntccccctgggcctgagcctgggcccttacaaggcgccgggtcgtcggtttcatcgctcgatgcttnttttccgccgccaccgtcgngcccttggtccccgtgctnttnttntccggnggcaaccggcaaccggcaagatatcaattc

SEQ ID NO: 21924 - DNA, 465 bp, Zea mays
  misc_feature (264)..(264): n is a, c, g, or t
  Coding DNA Sequence Number=SeqID_7521
tcctttttctatatcgcgttacgtccctccctacccagcgatctaggccgccgcctctcctactgcatctccctcgctctcgtcgcctcgttcgcttcgcctccgccccgccccgccccgagccgagcagagcgcagccctatccggagctgggatggcggacgcgaagcagcagcagcagcagcagcagcagcagccacagcaggcggcagcggcagccaccggcgtgtggaaagacggtcaagcccttcgttaaccgcgggngcctctgggatgctcgcgacctgcgtcatccagcctatcgacatgggtcagggggaggatccagtttggggggagggctcccgctggtcagggcccaaggaacctgcctgcaaatggggggggtggccggtccttctaaaaaggtttggcccggccggattgcttggggaaggcgagcaacccaatgggccggcttgggaa

SEQ ID NO: 21925 - DNA, 442 bp, Zea mays
  misc_feature (197)..(197): n is a, c, g, or t
  Coding DNA Sequence Number=SeqID_7522
aagccggcccattgggttgctcgccttccccaagcaatccggccgggccaaacctttttagaaggaccggccaccccccccatttgcaggcaggttccttgggccctgaccagcgggagccctccccccaaactggatcctccccctgacccatgtcgataggctggatgacgcaggtcgcgagcatcccagaggcncccgcggttaacgaagggcttgaccgtctttccacacgccggtggctgccgctgccgcctgctgtggctgctgctgctgctgctgctgctgctgcttcgcgtccgccatcccagctccggatagggctgcgctctgctcggctcggggcggggcggggcggaggcgaagcgaacgaggcgacgagagcgagggagatgcagtaggagaggcggcggcctagatcgctgggtagggagggacgtaa

SEQ ID NO: 21926 - DNA, 315 bp, Zea mays
  misc_feature (74)..(74): n is a, c, g, or t
  misc_feature (177)..(177): n is a, c, g, or t
  misc_feature (201)..(201): n is a, c, g, or t
  misc_feature (235)..(235): n is a, c, g, or t
  misc_feature (267)..(267): n is a, c, g, or t
  misc_feature (273)..(273): n is a, c, g, or t
  Coding DNA Sequence Number=SeqID_7523
tttaacgagtatgattatccattcataatgagaaattgatctattgaagagatagaacgctaatccatcactgngtatcaacctccatttcaccaccctcggtagctgcgccatccaacgcctccaatagcgcaccaacgtcctgtccatcatatagcttaaagttctctagcttantacccttggaggaaggtgtcgccnaatccttggggacaagtcccacaactccaaccgnggtattatcaatcctaagctccttatcctgcnaaagantctccctcaaggccttcaggccatggttaatcaactcctcgc

SEQ ID NO: 21927 - DNA, 160 bp, Zea mays
  misc_feature (38)..(38): n is a, c, g, or t
  misc_feature (112)..(112): n is a, c, g, or t
  Coding DNA Sequence Number=SeqID_7524
aattgaagttatgaattgaagcaactatttttgccaanattttaaaaaaatgcaaaaaaaagtatttcaaatttaaagtccttataaccaaaagaagcaaactattattcanactgatttttttttttggaatctgaagcaatccagtgctcaaagaagc

SEQ ID NO: 21928 - DNA, 401 bp, Zea mays
  Coding DNA Sequence Number=SeqID_7525
gcccaccacacgagcgatacgatgaaccacgcgttgagcgtcgcgaagaagcgatcaccacgcacacgaagacgacagtcagcgcgtcgctcacggcgcggatcgagctcggaatgaacagctttggcacgatggtgagcggcgagaacaagagcgcggcgccgagccagcggaggagcttgccgacgccgttgcgtacgcgctcgctcgcgcgaacgcgctcgatcaccatgttgcgggcggggacgtcgcgcgcgagcgagccggcgcgttcttcatggaacgagcggccgtcccatcgaaatacgctcacgcgctggaggccggcctcggacatcgctacgatggtacccgatgtggcgctttctcttggtgctcctcgcgatcgtcgtttcgtcgat

SEQ ID NO: 21929 - DNA, 490 bp, Zea mays
  Coding DNA Sequence Number=SeqID_7526
tgggcttatagtgctggctgtcttcgcacgccgcttcaatccgttgtcgctgcctaaggccggataccaagtcggcctggccgcgctattgctattggccggtgccggatcggtgcacgacgcgaccgcgctgaaccagacccgcaccctctccttccaccacacccattccggcgaagaccttactgtcactttcaagcgcgatggccgttacgacgaagccgcgctgaagcagctcaatcacttcctgcgcgactggcgctcccaggacgagacggtgatggaccgtcatttgttcgatatcatctgggaggtctataacgacgtcggcggcaagcagccgatccagatcatctccgctatcgcgcccccgcaccaacgccatgctgcgccgccgatcctcgggcgttgcgcgccacagcagcacatgctcggccacgcgatggattcttattcctggcgtgccgctggacaaatccgtacctggctg

SEQ ID NO: 21930 - DNA, 569 bp, Zea mays
  misc_feature (35)..(35): n is a, c, g, or t
  misc_feature (96)..(96): n is a, c, g, or t
  Coding DNA Sequence Number=SeqID_7527
gaacttataccccacgaatgcgcgagcttggggtnaagtgagcgcaggtgtcagacatgatgaaacttcgcgatcatgcagccgtattttcttccntatatcgggttactaccagctcatcggtgcggtcgatctcttcatcgtctacgataacatcaaatacgtcaaaaagggtggatcaaccgcaatcggatgctggtcaacggcaaggacgccttgttttcactcccgttgaagaaggattcggatgcgctggacattcgcgacagggagctggcgcccgatttcgaccgtgcaaagctgctcaaccaatggcgaggggcctatcgcaccgcgcctttcttcaaggaaacctttccgctcctggaagagatcgtcggctttcaggaccccaatctatttcgttatctcttcaattcgctgcagatgacctgcgcgcatctcggcttgaagaccacgttcaagatctcgtccgaggtgccgatcgaccattcactcaagtttcaggacaaggtgctcgcactgtgcgaagcggaaggcacgcagacctatatcaacgcgatcggcgg

SEQ ID NO: 21931 - DNA, 125 bp, Zea mays
  Coding DNA Sequence Number=SeqID_7528
aggaatgatgatacccttccattaaaattatcccccatgatgccttgatccgtaacatccaaacttgagcctttgctaggaccgaaatggagtattggcctatccttaaaaaggaccctagccat

SEQ ID NO: 21932 - DNA, 210 bp, Zea mays
  misc_feature (26)..(26): n is a, c, g, or t
  misc_feature (32)..(33): n is a, c, g, or t
  misc_feature (38)..(38): n is a, c, g, or t
  misc_feature (57)..(57): n is a, c, g, or t
  misc_feature (70)..(70): n is a, c, g, or t
  misc_feature (153)..(153): n is a, c, g, or t
  Coding DNA Sequence Number=SeqID_7529
gacttttttcccacctatactggcanccccanntgttncccgtctaggaaaagattncacttttaaatanctggcttctcatgattccatcgacataagaaaaatccagagtggacccaactagtccagctgcatagataattggcattagtncaagtgaaaaaatatcgattattgttaaaaacgtagatggaaaaaaggccacaaagt

SEQ ID NO: 21933 - DNA, 230 bp, Zea mays
  Coding DNA Sequence Number=SeqID_7530
gagagagttcagtttctcctcccttcactcctccattacttcctcccgccattgatatcctccttgaagacgccgaccgttctcctccccttggccaacttttcctctccctcctgctctctataaaaggtagcagagcccctctcccttctcctgcctacccaaactcgccccatctctctagctcaccagtgcactgctcgacgtcgtcgctcgttgccgttcatcgc

SEQ ID NO: 21934 - DNA, 473 bp, Zea mays
  Coding DNA Sequence Number=SeqID_7531
agatctccgcgcgagcatggctagagtccttccccgacggacggccgcccaccgagcccgaggtcgacgcctacatcgacgtgcaccgccccgagctcccttccctcccccgctcccagctacaccagcgcctcctcgccctccgcggcgaccaggttctggatgcagaccagagcgcattcccgtacaggttccagcgtactgatctatggaagcctgtgtaccagtggttggaatctcttgagctggactcactagttgctacacagcagatatcagactggcttacatcgaacccaaagataatggacagaatggttgagaaacattcaaaataccatttgattcactacacccagaggatgcacttgaagatgctaaaaaagaagggaaagttgccaaagactctgcaactttctgcggctagagccacagttcgaccaattgctgctccgttcactccagaagaaaac

SEQ ID NO: 21935 - DNA, 391 bp, Zea mays
  misc_feature (39)..(39): n is a, c, g, or t
  misc_feature (45)..(46): n is a, c, g, or t
  misc_feature (50)..(50): n is a, c, g, or t
  misc_feature (54)..(55): n is a, c, g, or t
  misc_feature (57)..(57): n is a, c, g, or t
  misc_feature (59)..(59): n is a, c, g, or t
  misc_feature (61)..(61): n is a, c, g, or t
  misc_feature (63)..(63): n is a, c, g, or t
  misc_feature (65)..(65): n is a, c, g, or t
  misc_feature (72)..(73): n is a, c, g, or t
  misc_feature (99)..(99): n is a, c, g, or t
  misc_feature (101)..(101): n is a, c, g, or t
  misc_feature (106)..(106): n is a, c, g, or t
  misc_feature (120)..(120): n is a, c, g, or t
  misc_feature (125)..(125): n is a, c, g, or t
  misc_feature (139)..(139): n is a, c, g, or t
  misc_feature (141)..(141): n is a, c, g, or t
  misc_feature (151)..(151): n is a, c, g, or t
  misc_feature (155)..(155): n is a, c, g, or t
  misc_feature (158)..(158): n is a, c, g, or t
  misc_feature (161)..(162): n is a, c, g, or t
  misc_feature (165)..(165): n is a, c, g, or t
  misc_feature (173)..(173): n is a, c, g, or t
  misc_feature (179)..(179): n is a, c, g, or t
  misc_feature (181)..(181): n is a, c, g, or t
  misc_feature (184)..(185): n is a, c, g, or t
  misc_feature (187)..(187): n is a, c, g, or t
  misc_feature (204)..(204): n is a, c, g, or t
  misc_feature (211)..(211): n is a, c, g, or t
  misc_feature (214)..(214): n is a, c, g, or t
  misc_feature (217)..(217): n is a, c, g, or t
  misc_feature (219)..(220): n is a, c, g, or t
  misc_feature (225)..(225): n is a, c, g, or t
  misc_feature (235)..(235): n is a, c, g, or t
  misc_feature (250)..(250): n is a, c, g, or t
  misc_feature (254)..(254): n is a, c, g, or t
  misc_feature (283)..(283): n is a, c, g, or t
  misc_feature (288)..(288): n is a, c, g, or t
  misc_feature (307)..(307): n is a, c, g, or t
  misc_feature (310)..(310): n is a, c, g, or t
  misc_feature (325)..(325): n is a, c, g, or t
  misc_feature (345)..(345): n is a, c, g, or t
  Coding DNA Sequence Number=SeqID_7532
caagctcagagcctctttgcgacgaaagctcaaccaacncgacgnngatnatcnnananancntncgcgcanngatccgcggcataccttatcgaagangnagtangctagtgctaatanggatntcaatctcccagcncntccgtctgantgangtnccnngcntgcaagcnattatncncanncnacagagttccagggccnaggattnctntgngnntcacntttgcggagnatgcattattattgnctgntgactcgtgaaggaattgagtatcttganaactnatccttaaccttccttgangangttggtccctgactnctttgaaccataccctgctnggcccggtgggacgtccctttgtcggctccacactggggatagcca

SEQ ID NO: 21936 - DNA, 247 bp, Zea mays
  misc_feature (31)..(31): n is a, c, g, or t
  misc_feature (49)..(49): n is a, c, g, or t
  misc_feature (108)..(108): n is a, c, g, or t
  misc_feature (112)..(112): n is a, c, g, or t
  misc_feature (117)..(117): n is a, c, g, or t
  misc_feature (121)..(121): n is a, c, g, or t
  misc_feature (126)..(126): n is a, c, g, or t
  misc_feature (166)..(166): n is a, c, g, or t
  misc_feature (189)..(189): n is a, c, g, or t
  misc_feature (214)..(214): n is a, c, g, or t
  Coding DNA Sequence Number=SeqID_7533
cctcctttattactggggcatatgctgaaantgaaaccgatctgggggntggaatttcccaaagcgggtcacctgaatgcttgcatcgatggttatttttctcccggntcanacaancaanaatcntttgcccacatatctttcaaccagggtatggaatggccangttgattcttccccccaaaggcnttggatggaaggcaaatggccatcnaaatgggagcttccctcttgaagcatctccaga

SEQ ID NO: 21937 - DNA, 540 bp, Zea mays
  Coding DNA Sequence Number=SeqID_7534
tttagttcaggtggctctattggcttctgtagctttttgcctatgtagtagagtaatttcaatgctcatatagatacaacttgatgttgcttttgtattcaatccaattatcaaaaattcccctttctataagtattttcctgctaaaaaggcaccatcctttatttgcagaactgttttagatgtcagtagatacacaggtgcatctacaaatgtaaagagtcagaatagttgtgtatgatactagtttacgtctaattatttcatattctatgttcatgggcatttcattttataatcatggtttttgtgttgaagtgatctcttgatgagaacctcttattctctctattttcatgagatgcttctatgttgcctgcaatatttatagttcatagttcatacatgtctattgctatacatttggatgattgggtttgccttttttttccaaatgaaactatcctctagtgaattattaattaggagtgttcttcaaatgtaaccacctactgggtatgtaatggcatctcttttcct

SEQ ID NO: 21938 - DNA, 378 bp, Zea mays
  misc_feature (35)..(35): n is a, c, g, or t
  misc_feature (39)..(40): n is a, c, g, or t
  misc_feature (43)..(43): n is a, c, g, or t
  misc_feature (45)..(46): n is a, c, g, or t
  misc_feature (61)..(61): n is a, c, g, or t
  misc_feature (65)..(65): n is a, c, g, or t
  misc_feature (68)..(68): n is a, c, g, or t
  misc_feature (71)..(71): n is a, c, g, or t
  misc_feature (78)..(78): n is a, c, g, or t
  misc_feature (80)..(80): n is a, c, g, or t
  misc_feature (85)..(85): n is a, c, g, or t
  misc_feature (87)..(87): n is a, c, g, or t
  misc_feature (89)..(89): n is a, c, g, or t
  misc_feature (117)..(117): n is a, c, g, or t
  misc_feature (119)..(119): n is a, c, g, or t
  misc_feature (123)..(123): n is a, c, g, or t
  misc_feature (133)..(134): n is a, c, g, or t
  misc_feature (149)..(149): n is a, c, g, or t
  misc_feature (178)..(179): n is a, c, g, or t
  misc_feature (181)..(181): n is a, c, g, or t
  misc_feature (202)..(202): n is a, c, g, or t
  misc_feature (208)..(208): n is a, c, g, or t
  misc_feature (220)..(220): n is a, c, g, or t
  misc_feature (244)..(244): n is a, c, g, or t
  misc_feature (285)..(285): n is a, c, g, or t
  misc_feature (301)..(301): n is a, c, g, or t
  misc_feature (303)..(303): n is a, c, g, or t
  misc_feature (319)..(319): n is a, c, g, or t
  misc_feature (324)..(324): n is a, c, g, or t
  misc_feature (332)..(332): n is a, c, g, or t
  misc_feature (336)..(336): n is a, c, g, or t
  misc_feature (342)..(342): n is a, c, g, or t
  misc_feature (349)..(349): n is a, c, g, or t
  misc_feature (351)..(351): n is a, c, g, or t
  misc_feature (353)..(353): n is a, c, g, or t
  Coding DNA Sequence Number=SeqID_7535
aggtctcacttaaatggtgactcttccgggctccncttnntcngnnatcaggatttctccntgantcnctnccccttncntcaanancntcctcctcccccattggcgtcctgccantnaaancgtttgtganntcgtgaaatgcaccnatcctaatctcgccagagaacaatgggtnncntctccatggttcgcctttgantgattncactgaattcanactctactgacctacgtgaaaggnctacttgaccccaagaattaggctgggaccggcttatcctnttgctattttatttangntaaaaagaaaatgcantgaangcttttgnttgnatgggncacgaancntngattggaggtgcgatggttatggga

SEQ ID NO: 21939 - DNA, 330 bp, Zea mays
  Coding DNA Sequence Number=SeqID_7536
cttctaagaacaacagtcgcactggatacaaacacaaactgtcgatcaactataaagaagcgatgcaaaggcaaagggtgtgcacaagatcaagcccgagttcacttctttatataagggggggatttcttacacaaaattaaaggccgactcattatgagccgggcttcttcccacttttcgatacattacattactacattacactactacactacttacactacactatactactaactactactacattattctactaatactaacactacttatctatactaatattttaagccagtggcactttgccactagccttgttgctgc

SEQ ID NO: 21940 - DNA, 222 bp, Zea mays
  Coding DNA Sequence Number=SeqID_7537
ccaccacagcatccgcagttccccgaccacaccgttcctccgagcccaggagcagccccgcgccaggaggaagtttgttcttttaacaatattgtcgagggaaggagaatgttttacatgggccaagttggctgagcaggctggaaaggtatgaggaaaatggttgagtatattggaaaaaggggctaaaaactgtaaatgggggaaaagctcactggttga

SEQ ID NO: 21941 - DNA, 434 bp, Zea mays
  Coding DNA Sequence Number=SeqID_7538
acacaagctccaaacagcagcaatagctactgtggcctgccatccctccctctcgatgtcatgtatgttaagttgcatgcatcaaccaaatcaacctaaaagattaagctgttaggagaaggtaggcaatccacttccacttatacaattcaacacccccgctcacgtacagccagagagaaaggcgcaaacgtggaaataaggggacaatggcacaaataaagcctctgccaggattcaaacttgagacctctggctttgataccatgttaagttgcatgcaccaaccaattcaacccaaaagcttaaaatgttacgagaaagtaggcaatcaagttatacacatcaacaatatccattaataatagtggccgaattctccacttccaaaatagagacatgtggcttatatatcggtaattgtcctgtactta

SEQ ID NO: 21942 - DNA, 358 bp, Zea mays
  Coding DNA Sequence Number=SeqID_7539
tgttgtttcttcaagtacagcgcatacttaagaatattacatgttttcttcaagcaagagaacaaaaagggggtgatcatggcatgaaagcaaaaggtgatggatggttgttaacagttgctttaatcgacggaatcaaattggctccagtcgatgctactggtttatctgatccttatgtggtatttacttgcaatggcaaaacaagaacaagttcaattaagttccaaacactagagcctcagtggaacgaaatctttgaatttgacgcaatggatgatccaccgtcggtgatgagtgtacatgtatatgattttgatggaccattcgatgaagttacatcccttggacatgcgga

SEQ ID NO: 21943 - DNA, 179 bp, Zea mays
  misc_feature (82)..(82): n is a, c, g, or t
  misc_feature (92)..(92): n is a, c, g, or t
  misc_feature (102)..(102): n is a, c, g, or t
  misc_feature (118)..(118): n is a, c, g, or t
  Coding DNA Sequence Number=SeqID_7540
cccccccagtgagaaggatgagatgcatgcatgatgagactggaacgggagaactcacgggtgcaggaagtgctcgaaaagnccaggcgcgnaggatggaanacggagcgctcggggnaggccgcgcttggggccgccaggggccgcccctggattatgcccaaattgttggcaaaggg

SEQ ID NO: 21944 - DNA, 273 bp, Zea mays
  misc_feature (32)..(32): n is a, c, g, or t
  misc_feature (37)..(37): n is a, c, g, or t
  misc_feature (41)..(41): n is a, c, g, or t
  misc_feature (64)..(64): n is a, c, g, or t
  misc_feature (74)..(74): n is a, c, g, or t
  misc_feature (81)..(81): n is a, c, g, or t
  misc_feature (87)..(87): n is a, c, g, or t
  misc_feature (93)..(93): n is a, c, g, or t
  misc_feature (96)..(96): n is a, c, g, or t
  misc_feature (99)..(99): n is a, c, g, or t
  misc_feature (124)..(124): n is a, c, g, or t
  misc_feature (126)..(127): n is a, c, g, or t
  misc_feature (139)..(139): n is a, c, g, or t
  misc_feature (141)..(141): n is a, c, g, or t
  misc_feature (144)..(144): n is a, c, g, or t
  misc_feature (149)..(150): n is a, c, g, or t
  misc_feature (152)..(153): n is a, c, g, or t
  misc_feature (171)..(171): n is a, c, g, or t
  misc_feature (203)..(203): n is a, c, g, or t
  misc_feature (225)..(225): n is a, c, g, or t
  misc_feature (246)..(246): n is a, c, g, or t
  Coding DNA Sequence Number=SeqID_7541
caagtatcccagaatcgcgtaaggattgcccnctgtncatnaatagtcataccccctgcttccntagaactttnaatattncttcangtgctnccntgncttgttctctgcactgttatacttnanngatgctattgcntngtntgttnnannatcttttattgaggactntactgttgaatgctaagctgtgaaagctatangttacatctttgtgcccatccnattgcgtttagatattgaacnccaagattatgctctctatggaggaat

SEQ ID NO: 21945 - DNA, 175 bp, Zea mays
  Coding DNA Sequence Number=SeqID_7542
gtcgaccacgcgtcggggtgatcaaaggaggctcgtgctagtgttcaagaggttcattttcttccgattaagccaactgataaaagaaactgcattaagctaccctgaatggggaggggagaatgcatcgtgttagcaaggggagcaccaagagcaggtccttcgtccttgccca

SEQ ID NO: 21946 - DNA, 409 bp, Zea mays
  misc_feature (310)..(316): n is a, c, g, or t
  misc_feature (318)..(321): n is a, c, g, or t
  misc_feature (339)..(348): n is a, c, g, or t
  misc_feature (353)..(353): n is a, c, g, or t
  misc_feature (355)..(358): n is a, c, g, or t
  Coding DNA Sequence Number=SeqID_7543
ggcatccctcgagacttgaatagcggtgggactgaaaacacatccaaacgctggaatgggccatggctgcatgggcaaactcataacccaaccgggggtgaaggccaagctcaaggacaaatccggcgagggggcccccccaaacagcctaactctcgggaggcggttcccggggaatgggaatccctaaaggggagcggggggggccaaaaaaaattggaaccttcgggtacctctttgaggggggggtaaaagagatttttaaattaggaagaaaaagggggaaatagaagtgggaaaagggcactcnnnnnnnannnngagtttgagtccgaagannnnnnnnnngatgnannnnaggatgaggatgagatggatgaaacctacgtgtgacccagcttcaggtcat

SEQ ID NO: 21947 - DNA, 91 bp, Zea mays
  Coding DNA Sequence Number=SeqID_7544
catatgtttagtgtgatgtggaagcaatgacatatgttagtgttgatgttgagttaatgatgtctgagcgccaccaaatctctactattta

SEQ ID NO: 21948 - DNA, 207 bp, Zea mays
  misc_feature (132)..(133): n is a, c, g, or t
  misc_feature (156)..(157): n is a, c, g, or t
  misc_feature (160)..(160): n is a, c, g, or t
  Coding DNA Sequence Number=SeqID_7545
acctatcggatctttattttgtcattctattgtatgggaggaatatcagatttccttgattaagctatattaggtatgatggcgtcgggccaagggtgaagctgctttcagttaggctatggtgtcattctnntgaatgtatatcagatttcttgnncanttctttgccccattgcctacaatcccggattaagttatatcagggaa

SEQ ID NO: 21949 - DNA, 359 bp, Zea mays
  Coding DNA Sequence Number=SeqID_7546
gcgtctccgcggatgctctagtgatgctttcggctactggactttagccatctagggtgcggcactcaaccgcttcgcctagcagcacaactttttttttcgtgcaatacacatcaatatcgaaaatcaatatgcaacgttccatgctcatttaactacgtatctgctcataagagcatctccaagagactctttattttttactctctatttaaatctttatttgtatctctataaatattaaactctatatataacgtctcattccaacagactctccaacatacaagatagcttagatagcgagagttgctagccaaatttggctagtgagaaagttaatttagagagccagatag

SEQ ID NO: 21950 - DNA, 163 bp, Zea mays
  Coding DNA Sequence Number=SeqID_7547
agtttgcggcaataagttaggtcgattttgggtcaattaggttggtgtgaggacaagctgaacatattttgatggattgcttagcttgtaattttaccagaatttaaacctcaaaattaaaaaaaatacagatctgcaggtttagcactcgtgctgtgatccc

SEQ ID NO: 21951 - DNA, 567 bp, Zea mays
  misc_feature (232)..(236): n is a, c, g, or t
  misc_feature (239)..(242): n is a, c, g, or t
  misc_feature (248)..(253): n is a, c, g, or t
  misc_feature (307)..(307): n is a, c, g, or t
  Coding DNA Sequence Number=SeqID_7548
tgtagttccacgcttgacaccagaatcaggacacttgagaaacgttgtacagagtcggttccccatgttgcttcacttgttcccgtcgtcaatgcagtgctgtacagagaacgtcctgctgtacctttctgtatatgtaatcttgcgtgctgtgcatacagaatatgatggatttagtttcaaaaaaaaaaaaacagcaaaaaaaaaaaaaaaaaaaaaaaaaacaactcgnnnnnggnnnnaaacgnnnnnngatgccaactgccaagcctcgtgatggtgttgttttctgatgaaaaaccatgtnacggcctcacacgttcctgggcaagcagaagcaagatgcagacatgggaaggaagaacgaatcgtgatcccaagaaaagaatccacgagatgcagttccacgcttcacgccagaatcagagcacttggagaatgttgtacggagtagagtcggttgccttgctcgttcctacatttataatgcagtgttgtacatagaacgtccgactgtagttttgtgcatcttgaacgtaatgttatgctgcctgctttaaatgctac

SEQ ID NO: 21952 - DNA, 272 bp, Zea mays
  Coding DNA Sequence Number=SeqID_7549
gaacatatccctattaagttgcatgcatcaatctaacccaaaagtttaatccgataagagttgtgcaattcacttatattatattccaaaaaaaaaaaaaaaaaaaaaaaattgaagggggggccctcccaaagagccgagcaaaactagcttactatctcgagttgacctgaagactgcatggtcattctcctaagtgcaagcgtttcacccatgcctatcatctgtgtggtgtatgttcctcacatttattccgaatggcactgctgatt

SEQ ID NO: 21953 - DNA, 536 bp, Zea mays
  misc_feature (331)..(331): n is a, c, g, or t
  misc_feature (406)..(409): n is a, c, g, or t
  misc_feature (414)..(414): n is a, c, g, or t
  misc_feature (416)..(417): n is a, c, g, or t
  Coding DNA Sequence Number=SeqID_7550
tttgggttaatgactttgcctccttgtattcctcttcgagtgattaagaaccttcgtgtatgtgatgactgccacagttggatgaaatgtacctctgaagtcacaagaagagaaattgtattacgagatgtgtacagatttcaccattttaacagtggcagctgttcatgtggagattactggtgaattgggctgttgcaaagtgtttacagcactttttttgatagaaaaatccccccagtgctattcctaatggttttcattttaagatgtctggggtctacccttatatctgctattgtgacatgtatgtatctggaaatggattcgncatggcaaatctagcatgtctagataaacatgtacagggctttggaaattggaagagtcattcatatctgtcgcnnnnagttnannatcggaaatcccttatatcggttgtggtgtgtatggctttgactgcagaggcaaataagcaatagaccttgatctttgctttgttattggaagagtcatttgtgtaatttttatctttg

SEQ ID NO: 21954 - DNA, 358 bp, Zea mays
  Coding DNA Sequence Number=SeqID_7551
ctgcatcattatgcgttatgactaatttatggaaggcaggctgttcgccaggtctatgtatgatgtatcccatacacggatgatgtgccaaaaggctttcgtctgacctgcagctgcttctggaatctgcatctgtacaattgtaccattgttacccctggccttgtagctgcaaagcagtttgttgtaacaattaaatgaggcgccggatcctcacgccatcgaaagtttgaaacagcttggttgttgtatggtagttccaagacttggtgattataatgtgcgcattttctcgaccgttgttttagctatctcttggtgagcataaagaaaacggtgggccattctggatctagca

SEQ ID NO: 21955 - DNA, 160 bp, Zea mays
  Coding DNA Sequence Number=SeqID_7552
tattctgtaatatgacctgtttggtcgctgcttagcttgcccccttttacctaacttttctgcttaatgttagttctttaattcgagacgactaaccttagccaaagtgtggcccagttagccccgaacccaatagacccctaatccttctgtttggttg

SEQ ID NO: 21956 - DNA, 266 bp, Zea mays
  Coding DNA Sequence Number=SeqID_7553
tttggttcattggttgaagcatgatgtaaaccgtaaaggatattcatgaaaactaaggacgctatagagcgaaaaaaaaaaaaaaaaatagctgtcactatgatatgaaaaatccgtgtagcaaaatatcactttaacactaatattatattctaaatatagactgaatgctttggtatctattcacagtcgaagatttaactgggaaaatttgattaatcattcactgcccagatgcaactgagaacacaacaagaacacaattt

SEQ ID NO: 21957 - DNA, 391 bp, Zea mays
  misc_feature (298)..(299): n is a, c, g, or t
  misc_feature (362)..(363): n is a, c, g, or t
  Coding DNA Sequence Number=SeqID_7554
agttctcactcttgagtagcagcgccagaaggtcgttcgtttttgctttctgtttccgaaatcgtatacttaattttttttgttgcctcccagttcgtctttgtgatgtgtgctgacttcaaggttgagttcgcattttcaccgtatgcacatttaactagcatattacttgaatgtaatgtgtttttggaagccatagtgtacctttagtttttcagctactgtacaatgtacatactcaaattactgctagtcaaatcaatgctctggtaatcagcaaccatttcaacttctgttnncaatatgctatgagatggaataactgaaatgatagtctcgctgttagtacttcagttatgctnntctagtgatccttcactatcgagcagtc

SEQ ID NO: 21958 - DNA, 539 bp, Zea mays
  misc_feature (258)..(260): n is a, c, g, or t
  misc_feature (265)..(268): n is a, c, g, or t
  misc_feature (274)..(286): n is a, c, g, or t
  misc_feature (288)..(290): n is a, c, g, or t
  misc_feature (292)..(295): n is a, c, g, or t
  misc_feature (491)..(492): n is a, c, g, or t
  misc_feature (501)..(502): n is a, c, g, or t
  misc_feature (506)..(508): n is a, c, g, or t
  Coding DNA Sequence Number=SeqID_7555
tgtgttgcgggtgaaaacttccttttttccccccttttaatcaggatagccctttgtgggctcaaacattgctgtaacggctcgtgtgaaaattgccaggtcatggtttaactcttgtgctcgtgctctgctgtgtcttttgaaaaaaaaaaaaaaaaaaaagcggcccgcttgttttgtgtactcacttatactgtattgtaacgtcacgtagaactgtgaaatttgtatggtgacgttggtggtttgatctggacnnngcgannnncggcannnnnnnnnnnnncnnncnnnnagtaactagactagagcatgtgtccagcgcctaacgcgcttatcctctgttggaatcgatggccctaatggtaacgggacatcatgaggcgtctgcctaaattgacttggtttctgagagagtggagcgggaatagcggatccgctaaaacaagatctttaaaagtgtccagtgcatccaaatctgaacctgcganncctttctanntttnnncttcccactttcgcgctttcgaactactggt

SEQ ID NO: 21959 - DNA, 497 bp, Zea mays
  Coding DNA Sequence Number=SeqID_7556
ggcgcgaactccatggtttttacatgcgagacggtggtcgcttccaagatttcgtgcatactgcggggcctaggttacgtcgtgttcctttggattggtttcgcatgcgctctggcagacttccgcagacctacctagcagcgcagctcgctattcatctgcctgatctactacctcaaggagttcaggaacggacacgggggactgggttctgattatgctcccatctgcctgcccaggcacgatatggaatagtttcagctcgaggtggaacgcctgtgcggggagctctagccgaccgagtcccatgcatatgcatgtgtacggtgtacgcatgcacggcaccgaatgaatagtagcccaccaggatacactcataataatacgatgtacaaccgtacgtcgatagtaaaacgtcatggagcacggagaccatactatacgtaatacgtgtgctgttttcctactgtacactgccgtacctgctcgacaaaata

SEQ ID NO: 21960 - DNA, 551 bp, Zea mays
  Coding DNA Sequence Number=SeqID_7557
taatgtgttcacttgcctgttcgggcttgttatggtcgctcattcgagtgttagagcattcgggcggcttaataatcttaattcagtgactatgctgtcgatattccgaccgtccgtttatctgatcaccgtttaaacactattccctagtactcaacagagcgtaccgcgtttccttctcctcccagtcccatgcatgttctttttcaaacctgctttggccgtaacgatgctggtttcctcgtgctgttgaaagcatcccattcctccttgggtgctggggcaaactagagtatgatccccgtgaatccgacaatcattgcccccccttattggtgctttgattataatttggcgcccgtccgatccttttcgcgtttcgtctttattattcggctcgttgattcgttttcacgggcgttgttattttcttcaaaacgttgggggctctgagccccctccagtcgtaagattttggagagtccgcacgctggttcattccgtcattacagcgcccttttcacgtttgctaccctaccattcttttttag

SEQ ID NO: 21961 - DNA, 116 bp, Zea mays
  Coding DNA Sequence Number=SeqID_7558
ttatctttgatcttccattcttcctgtcccttggaaccggcctgtaaccaccagcatgtgttccaccttgattgtctcggctattttatattctgcaggagttcattgtgcaatga

SEQ ID NO: 21962 - DNA, 46 bp, Zea mays
  Coding DNA Sequence Number=SeqID_7559
tatgtgattactgattcgtcacccgttatgtgttctctctgcgtgt

SEQ ID NO: 21963 - DNA, 456 bp, Zea mays
  Coding DNA Sequence Number=SeqID_7560
gttgcgggatgatgccattgttgtttagtttccagtgatccatgatagctccagtttccaaacaacccttgtttgatatttctggtgaacttatgatttgagatccaccatgatttctaatttccatgtaacgaattggtggcccccatctcaccactctttatattcaatctgcagaactatcagaaactgcatagcttgaaatttttagccatgttctgtcccctatcgtcttcctcaagttgaagaaatcgactggttctcctccccctgatctagcccttcttgaaagtattgctgacaaggtaagttcgaatcaatttctaataatagtccaacacatttgtatataaaatgttcccgttgcaacgcacgggcactcccctagtatcaataataagacctttcctaagggattcatattgtaattttccttggcaccagttacctttattg

SEQ ID NO: 21964 - DNA, 549 bp, Zea mays
  Coding DNA Sequence Number=SeqID_7561
acagctttacgacaaaagtcatacaccgaaaatggcctttgcttatacaagatatattggttcattcgacttggttgtcatgattattgggataaaaatgagagtgcaacttatcatagggccatgaatttgcttttaaagtagatattaggagccattttcgaggtctacttgtgggggccttcgtcttccgaaggtcctcaaaaacatgattaacaatgtttcccaagtgtaatatatgtacaggaacctcctgacttggaatgaagctgtacacgatatgaaaagcgtggtccggatgaaggttgaaccagctccgaagctacgcgcagggaagcttcggattagcagcggaaaaaggagccgacttaaagaggaaaaggctgtctagtccttgatagattgtccctaagtcaatatcaaatatgaaggacatgaatgtaattttacacaggctacgtcttgtgcctataaatagatgaacagtaacctcgtactgttcacgctgacttgtattcactcgcacgtcacgcttggattttcgccttc

SEQ ID NO: 21965 - DNA, 421 bp, Zea mays
  misc_feature (187)..(192): n is a, c, g, or t
  misc_feature (238)..(245): n is a, c, g, or t
  misc_feature (249)..(249): n is a, c, g, or t
  misc_feature (259)..(260): n is a, c, g, or t
  misc_feature (262)..(264): n is a, c, g, or t
  misc_feature (266)..(277): n is a, c, g, or t
  misc_feature (279)..(279): n is a, c, g, or t
  misc_feature (285)..(287): n is a, c, g, or t
  misc_feature (293)..(296): n is a, c, g, or t
  misc_feature (326)..(327): n is a, c, g, or t
  misc_feature (332)..(333): n is a, c, g, or t
  misc_feature (338)..(338): n is a, c, g, or t
  misc_feature (349)..(350): n is a, c, g, or t
  Coding DNA Sequence Number=SeqID_7562
aaattgcagttccaattccgtgtatctgcaactttgagcaaataggaaaagattgagtattgccagctttatagctctctaccaggagtcggaaggtgtttggtttttagtgactactgtttagtccctgtattttattctattttagtattttaaaaaaaaaaaaaaaaaaaaaaaaaaaaaaaannnnnnaaaaaaaaaaaaaagggcggccgccgactagtgagctcgtcgaccnnnnnnnntgcngaccggtcanngnnncnnnnnnnnnnnnangtatcnnnagtcannnntattaaccattccctgctctaatagtcatnnatcannagtcngatgtatttanncattccctgcttaatagctctctaccaggagtcggaagtttttaaccattccctgctttaagacaagataa

SEQ ID NO: 21966 - DNA, 376 bp, Zea mays
  Coding DNA Sequence Number=SeqID_7563
tatgcgtagcagtcatttccatggagaagcttataacaattagtaaatgtgacagtttctatttttttctatgaagactaaactgtacaagtataaatgatcctcaacactagtcttgctgcctgactattgcaattcgagagttgtgcgacatgactactgtttgacactactaccggtcaaggcgattgaagtgcacagtaccccgtgtgtgcatggtggatccataatatcaagtgtttataggaatgtcgggtagttgagaacttgagataaagttctcgttttttttcatttattgttacggacgatgttgcggtcaaaatacgtcactgtaggcggcagatgtaccaagcactatattgtccatgcggct

SEQ ID NO: 21967 - DNA, 559 bp, Zea mays
  Coding DNA Sequence Number=SeqID_7564
gggcttgttactttccgcgaagtggctttgctttttgatgaggagtcttcaatggaatccagcaaacagagtattgcaattactgtagcacatgagctggctcatcagtggtttggcaatcttgtaaccatggagtggtggacccacttgtggctaaatgaaggttttgctacatggatgagtaatctagctgtaaattctttctttccgcaatggaatatctggacacaatttcttgatgacacaaccgctggtctcaaattggattcacttgaagagtctcaccctattgaggttgaaatacatcatgccactgaagttgatgaaatctttgatgccataagctacgataagggtgcttctgttattcgcatgctacataattaccttggtgcagagcgttttcagaaagcgttggcttcatatataagaaaatttgcctactcaaatgctaaaaccgaggacctttgggctgttcttgaagagaattctggtgaacctatcaagaatatgatgactacatggacaaagcaacaagggtaccctgttattaatgcaa

SEQ ID NO: 21968 - DNA, 560 bp, Zea mays
  Coding DNA Sequence Number=SeqID_7565
tatgctcgttttcccgcacatgaacccttgtttgtacaaacaggatgtcactccactgatgcaacttgcctcctccacactccacaattatttatgcatgccagataacccccggcttaccgactttactcgaaacaaacaaaatgcctccttaattaagaataagggggccaaaacctatcgcaacccccaagcagagatttaggattcatttcgcctcctatattccgctcatattcctaacaagactcgggacttattatccagttacatggccaccacattctaaaaattgttcatcttcccatcaccattcgtttattcccccacacctcctcagtttagtaatctccccaccccccctattatttatccacacttaaatgagacgcattacactctcataccaccattgatagcggcgggcagacacaagagaccccatacctctccacccaccacgccaccagatttggatatgatttttcatgatcacactccggctcccacgcattttacactccacacttattcctcatacccgcgctcagattaagatt

SEQ ID NO: 21969 - DNA, 427 bp, Zea mays
  Coding DNA Sequence Number=SeqID_7566
tgctgcccgcaatgtgaatgcctatgggcagaaggaagagggaccaagccgctggcaggagaggaaggaagccaagagacagatgtatctgatgagtacagagaaggctgcgaagctgggcactgtgaagccaaaagcttcagaaacttcttctgttggcgcatatacccaatgccagaagtgtttccagcatggtcactggacatatgagtgcaaaaatgagcgggtgtacatatcacggccctcaagaacgcagcagcttaagaaccccaagctgaagaaaagcgtaccggtttcttatcaatttgagaatcctgatattataaaggagagggaagaggagcagaagatgatgaaagaaaagcagaagaaggagaaagccgaaagaaaagggaaagagtaagaggagcatcgatcgccgagcagg

SEQ ID NO: 21970 - DNA, 574 bp, Zea mays
  Coding DNA Sequence Number=SeqID_7567
gtatgcttattagcagcagcctagcctttgttgtgggaaacatttgtgggtaccaacgcgagggcagtttgagaaaggtccgagccgacatcttgagtgtgatagattgaacatgagggtgaaggggattacaagttctagtatcacctttatgggagggcaagggataagagatgatctaaataatattgttcattggatttgagtgagtctagtgatctaaaccgttagttttgatgatgtgttaagtttggatataatttgtttggtggatatattgtgggttatgggtgtggtcgtgttttggtgatttgattgggtgggttttgtaaagtttaaactatgaaattatatagtggcatagactaagggaggagagatgattatacatttggctagattgtgggcctcgattggttgtgatctaacaaccttaatcttatctaggtcaagcagtcatatgtagtgtcatgccttcaatcatggcagtgttgcagatatctagttgcaaggatggacacaagtgtcgtagggcaaatatgtctagtagtatcgacagacatcagaatccaca

SEQ ID NO: 21971 - DNA, 272 bp, Zea mays
  misc_feature (45)..(45): n is a, c, g, or t
  Coding DNA Sequence Number=SeqID_7568
gtcgtcaagtcaagcaacgtaaaaggacacgacaaaggccagcanaatggctggccctactcataggcgtacgggatggtgcatgagaccgaggaaaataagagatcagggatggaaggaaagcacgaatgcaaaaggcgcaagcaacagagacgcgacaaataacacacaaatcactctctctcaagtcgctaatcactaatgatcacttgtctcaattgtggaacttggagagtttgaaagctttgattgtgtcttggtgctaaacacaa

SEQ ID NO: 21972 - DNA, 562 bp, Zea mays
  Coding DNA Sequence Number=SeqID_7569
ggacatgactacattcttgaagcatatatcttttgctgtcagcacccaccttccaaggcggcggcgatggcactcccggcgtcgagctccggcctcttccgcttcgtctccccgcgcagccgcccccagtccaccgacatcgtggctgccgcctcctggggagtcttcgccggcaccgccggcctctacctcgtccagccatttgactggattaagaaaactttcttcgagaaaccaccccaaccagaggcataaaaggcttgcaagtctgcaactttggtacttcacttttatccggaatggttcctgactgaagagaacttggataactcagcaaataatacgagaccccctcgtgtttccttgtttgttttttattattcagatgtaggcaatccccacgagggagacagggaacagagaaactgcttggttcacctgtgtctatataatactcctgtgttatccaacatgcatgttttaaaacctgtggcaaatatatcttgctgattaatattggactatgaggtcatgttcgaatgttcccatcactaaaaggagg

SEQ ID NO: 21973 - DNA, 480 bp, Zea mays
  misc_feature (178)..(196): n is a, c, g, or t
  misc_feature (198)..(202): n is a, c, g, or t
  Coding DNA Sequence Number=SeqID_7570
tggttttgagcatctcgtgttcctatcactgtattaccgtacaaaataagtataagaaagtttcctcatgctgcttttcgcttcttggacaatgtaatccacccccgcgacccctccgttgttgcaaatgacgaataatacagactacactcgtgtaaaaaaaaaaaaaaaaataaannnnnnnnnnnnnnnnnnnannnnnttcccgtagtaatccatggcaatatcatggaccacatcttgatgcccagtctcaatcttatggggcggcattgttccaatgatccaactttaacttaacaatatggtaaccttctgtgtagaccacttccagtcagcggacggagcgggcgaggatgaggagaagccgcggcgtcgaggaggggagcgctgccgctgctgcagcggaacgaaactggcgacgactagacggtgctcagcctatgcgggcttttggatcaagcccatcaaaccgagctt

SEQ ID NO: 21974 - DNA, 40 bp, Zea mays; identical to SEQ ID NO: 15152
  Coding DNA Sequence Number=SeqID_7571

SEQ ID NO: 21975 - DNA, 592 bp, Zea mays
  Coding DNA Sequence Number=SeqID_7572
acattttttgccatcattgagccccctagcagtggtgaaccctgtcgcctacttgcaacagcagttgtttgcatccaacccacttgttttggcgaaggtagttacataccagcaacaacaacagttgcaacagtttatgccagcgctcagtcaattagccatggtgaaccctgccgtttacctacaactgttttcatttagcccgctcgctgtgggcaatgcccctaggtacctacaacaacagttgttgcaacagattgtcccagctttaactcatcagctagttatggcaaaccctgctacctacttacaacagttgtttccattcaaccaattggctgtgtggaattttgctgggtacctacaacagggacaacaattacttaatccattggcagtggctaacccattggtcgttaccttcctgcagcagcaacaattgttgccatacaaccagttttttttgatgaaccctcccttgcagcaacccatggttggaggtgccatcttttagattacatatgagatgtactcgacaatggtcccctaaagccggcatgtgtttcctagaaataatcaatcttttaaaggg

SEQ ID NO: 21976 - DNA, 338 bp, Zea mays
  misc_feature (175)..(175): n is a, c, g, or t
  Coding DNA Sequence Number=SeqID_7573
ggcggggaatcaaatttccctggcgggggttttaaaaagattggaatggaaaaaccttgaacgttccgaatttgataacccttgggcacatccccctttagccggttggggaaataccccaattgcccgcccgggttgcccttcaaaaagtggcacagtttgaatggcaaagggnaaattgaaaccgtatagatttggtaaaaattcccgttaaattttttttaacaagcccgttttttacccggtggccgaactcgtttatttcctttataacccaaaggataaacccgccttagggttgagggtattccggttggaaacaagagtctttattcagg

SEQ ID NO: 21977 - DNA, 548 bp, Zea mays
  misc_feature (69)..(71): n is a, c, g, or t
  misc_feature (117)..(117): n is a, c, g, or t
  misc_feature (477)..(477): n is a, c, g, or t
  misc_feature (479)..(479): n is a, c, g, or t
  Coding DNA Sequence Number=SeqID_7574
cagcatcagcttcgacttctatagataggccttcaattgcgaaaaaaaaaaaaaaaaaaaaaaaccgcnnnttttttttttttttttttcataaatagtcacgtcatgttcattgantaagttgaggcaatagcagaatgctaaccatagtaacccaaaaggtaatcaaggacaaggtaaatacaaagctagtcaatccttaggttgatcatggtatgcgggttgatgaattataaagtaaatgggacataataggtcagaggacacttgccttcaccaaacagatgctcagggtcttcgatctcgtagaactcaaagaactggatcatttggtcgccgaagcttgaccgtcgattcctcgaagctctgaaacgaaccgcgatcacgatcgtgctaggacagactgcgcaggggcacgctcgaccaacttttccgtggcaggcaaggcaccccgcgtaggggcgagctcccgacggntngccggacggggctggttgggcacggagcgaggtgctcacgcgaggaagcctcggcatgcgtcggcctgc

SEQ ID NO: 21978 - DNA, 78 bp, Zea mays
  Coding DNA Sequence Number=SeqID_7575
aaacgttggtgcctccatttatcggtaacattgtaaggcaacataaatctctaaaaaattggactggtaagctgtcac

SEQ ID NO: 21979 - DNA, 493 bp, Zea mays
  Coding DNA Sequence Number=SeqID_7576
tgacctaacaaatgtctagacatacaatattcatatcatctactaactgttatgtaaaaacttgaacaaaaccttgattcccaaaaccaaatgagaaactaaaattctagaccaaagctattatatcccttttcttacaaatctcggggacgagatttcttttaagggggtaggatttgtaatacccaaaaatgtattcaaagaaagtagagttgatctccttaaatgttatgccatctactcattataacatggaacatcctaattgagtgaaaaaaataaataactaataaaaatgctccatgcatcatattggagttttgtttgtgcattgagtaaagatgatagtaatttgagagattttgaatttaacccaaagaaataatttaggaaagtagaaataatatatagaagagaaagaagaaatactatggagcacaaaataaatccataactaaataaattcatcccactgatatgtccaaactgaata

SEQ ID NO: 21980 - DNA, 165 bp, Zea mays
  Coding DNA Sequence Number=SeqID_7577
gcaatattcatcaacttaacttggagcaaacgtgtgtaaggaatgcatgcagggtataacaaagaggaggctagctagcatgcatgcatgtacaagtaccattgcatgcatgcgagcagtatgcgcagtccgccatgaggatagacctccaaaacgcatggccag

SEQ ID NO: 21981 - DNA, 559 bp, Zea mays
  misc_feature (125)..(126): n is a, c, g, or t
  misc_feature (425)..(426): n is a, c, g, or t
  misc_feature (436)..(436): n is a, c, g, or t
  misc_feature (438)..(440): n is a, c, g, or t
  misc_feature (442)..(446): n is a, c, g, or t
  misc_feature (448)..(460): n is a, c, g, or t
  misc_feature (463)..(470): n is a, c, g, or t
  misc_feature (472)..(476): n is a, c, g, or t
  misc_feature (484)..(486): n is a, c, g, or t
  Coding DNA Sequence Number=SeqID_7578
ttcgtgaatcaccagtgggtggactgggtgtacaaactgcggccatatttctgctccacgaagtgaaatatgtttcgaggccagtcctgtagctcttcggaacatcgtgaagaagctgatcaagnncgagtgagaaaatagtgttggcctgctggggaatctggtagtgagaaatgagatgaaatgacagacgccagagttctcgttaccaatatatatatgttacggcgttacacactgaatctgtattagtgctagtgttggatctgtaagttttttgttcgtgaataatcagtgggtgcacagactattaaaagcttagtttctgctctaccaagtggactatgttttgaggcgctgcctgaatgatgcttgaatgatctgtattgtacgcaccagaactgaatgagagtacggtgttagcnnattaagtggngnnngnnnnnannnnnnnnnnnnntgnnnnnnnntnnnnntaggggannntacggtgttagcaatatccctggctgcgcttcattgctctctcgtggcacgagcacgacatgtttgtaataaa

SEQ ID NO: 21982 - DNA, 166 bp, Zea mays
  Coding DNA Sequence Number=SeqID_7579
taggcaggcgacgttgggaactctaaattctttggttgtcacatatggtttgcaatatgtcaatataactaaataacaacttgctaaggtgttcagtccttagtaggctgcatgtaaagcttttatttagccgtcctattttgttctctaggtatcaaatttgaat

SEQ ID NO: 21983 - DNA, 520 bp, Zea mays
  misc_feature (197)..(198): n is a, c, g, or t
  misc_feature (250)..(255): n is a, c, g, or t
  misc_feature (293)..(298): n is a, c, g, or t
  misc_feature (381)..(383): n is a, c, g, or t
  misc_feature (399)..(401): n is a, c, g, or t
  misc_feature (407)..(409): n is a, c, g, or t
  misc_feature (416)..(418): n is a, c, g, or t
  misc_feature (438)..(439): n is a, c, g, or t
  misc_feature (447)..(447): n is a, c, g, or t
  misc_feature (449)..(449): n is a, c, g, or t
  misc_feature (484)..(487): n is a, c, g, or t
  misc_feature (490)..(494): n is a, c, g, or t
  Coding DNA Sequence Number=SeqID_7580
aagggactgagagggccaaaatcctttaggccccgtttgtttccttttattttgaggaattggaatcttactattggaataggtatttttttaaaatgtgacattccaccactttccaaagttatcatataagcctatctcctacttggctagcgtacgtacgtgccactcttaggtattggaagagattgatatannttggaggagatttgatgtactagagattgaaactccctcaatccatatagannnnnngtaaaaccgaatatatctttagggcttgttcggttttnnnnnnaattcctctctaatccttctcaatccatttctaatcaaacagaccttactattcaaatagtaagggattttggctccttgagnnnccttcattacatctgnnnctaaannngcctttnnnggatagactgtttggtttgnngtgtaagntnttataggatgactagcttttttgtataagtttagnnnnatnnnnntgactaaggttagatatattgtgatg

SEQ ID NO: 21984 - DNA, 529 bp, Zea mays
  Coding DNA Sequence Number=SeqID_7581
caggaccggcgttttgagacgcaagcggcgattgtccgcatcatgaagagtcgaaagcaattgggacatgcggagctggtcgctgaagtgattgctatgaccagcaagcgtggaagtgtagagccgccggagatcaagaaggagatcgagaagtaagttccctagtcttgccactatcagttcgtcgttatgatgctaacacgttgtcacagcctaatcgagaaggattacattgatcgcgaggaaaacacctacgtttaccaggcataaagttgggtttctttcgagtgtcaagggcggataaagtctgtacaaaatgatgaggcaacggtagcgaccaatgagaacatgaacttcacctatcacggtatcctcaatagcataaatgaatgttccgtacatcgcaccatgccaagaatagtgtccgttagagacacaaatactgagcaagagccagatcgaacgcgggactttccaacaaaaaagctaaagcgaagaaatctgatgagccagcagagacagcgggtca

SEQ ID NO: 21985 - DNA, 498 bp, Zea mays
  Coding DNA Sequence Number=SeqID_7582
tagacgccaacatggttaacccttaactgaaatattctttattaataatcgtttagtttaaatgtgctatctatttattagtcctcgcgtgttgtgtcggccgcgcgccgtacgcgtattgtgcgccgtcattttgtctcgcttgtagtcgctaacgttgtttgaattacttatataacttaaagttattagtgtagtcaattaattaaaaatgggtgataattatagttgtatttaataaatgtcgattaatataattatatcgaattaaatgctctaaccaatactttttagtgtaagtgcgataacttctcgaccgtagctctgactgtcacgtttctttttgtcgtgtgaccgtaatagcgagctatatttcgtattgcatgtttttattatggttttctttaattggtgtaatattcttatgcatatatacatgtttgtttatttgtttgtgcctgtttacattcgttgtgtgtcgcaaatagatcgtgatat

SEQ ID NO: 21986 - DNA, 483 bp, Zea mays
  misc_feature (268)..(268): n is a, c, g, or t
  misc_feature (273)..(277): n is a, c, g, or t
  misc_feature (290)..(292): n is a, c, g, or t
  misc_feature (303)..(303): n is a, c, g, or t
  misc_feature (318)..(318): n is a, c, g, or t
  misc_feature (333)..(335): n is a, c, g, or t
  Coding DNA Sequence Number=SeqID_7583
gaagttagaacccagcaattagcatatttatcgcagtaccatgctggaaactgtactttgaattatttgtttttcctgtgtgcttcgtaacaggcctgccctaaaaagaacgatagtaccggaaggggcaaatgtagtggtaatatactctatacatttgtaaccatctccatcctgccgttgaccgtcttaggttattaaaataaatatatttcttccgttcttttttaaaaaaaaaaaaaaaaaaaaaaaaaaaaaaaaaaaaaanaaaannnnnggttagttttttnnntgtgcgtctcntgtctgtaacacagnctgctgttgtgatannngtaataacagttccaagtggcagatgtggtttgggatgcagtggtaaaatgaatctgttccccagcttcatgaataactatgctgttagtgtctgaggtttacattgtgtcagtttggtcacttttggtgtgatgagttttagtagcg

SEQ ID NO: 21987 - DNA, 343 bp, Zea mays
  misc_feature (32)..(32): n is a, c, g, or t
  misc_feature (36)..(36): n is a, c, g, or t
  misc_feature (43)..(43): n is a, c, g, or t
  misc_feature (45)..(48): n is a, c, g, or t
  misc_feature (54)..(54): n is a, c, g, or t
  misc_feature (81)..(83): n is a, c, g, or t
  misc_feature (85)..(88): n is a, c, g, or t
  misc_feature (124)..(124): n is a, c, g, or t
  misc_feature (128)..(128): n is a, c, g, or t
  misc_feature (130)..(130): n is a, c, g, or t
  misc_feature (154)..(155): n is a, c, g, or t
  misc_feature (203)..(204): n is a, c, g, or t
  misc_feature (206)..(210): n is a, c, g, or t
  misc_feature (215)..(218): n is a, c, g, or t
  misc_feature (220)..(221): n is a, c, g, or t
  misc_feature (227)..(237): n is a, c, g, or t
  misc_feature (240)..(241): n is a, c, g, or t
  misc_feature (256)..(258): n is a, c, g, or t
  misc_feature (260)..(260): n is a, c, g, or t
  misc_feature (266)..(270): n is a, c, g, or t
  misc_feature (304)..(306): n is a, c, g, or t
  misc_feature (309)..(313): n is a, c, g, or t
  Coding DNA Sequence Number=SeqID_7584
tgcccttttgtagttaagtttggtgattgatncgcngataagngnnnnaagtcnggtacccaagtattagccggaatgtannnannnntgtctcggttcatcaatctactgaggtgtttaacanatangntccagtagttggctcattagaatnnacattttaaatgggtttattgccatttggaaacgaccaggtggttccnntnnnnnatccnnnngnnaagttnnnnnnnnnnnagnntgactgaaagttgtnnnanctgttnnnnngttgcaacacacaatgtgtttttttaaaatcttnnnggnnnnnggtttctcttgaatttgaatcttatccagt

SEQ ID NO: 21988 - DNA, 566 bp, Zea mays
  misc_feature (130)..(136): n is a, c, g, or t
  misc_feature (140)..(140): n is a, c, g, or t
  misc_feature (142)..(146): n is a, c, g, or t
  misc_feature (150)..(154): n is a, c, g, or t
  misc_feature (158)..(158): n is a, c, g, or t
  misc_feature (160)..(172): n is a, c, g, or t
  misc_feature (175)..(175): n is a, c, g, or t
  misc_feature (177)..(182): n is a, c, g, or t
  misc_feature (186)..(186): n is a, c, g, or t
  misc_feature (188)..(194): n is a, c, g, or t
  misc_feature (199)..(199): n is a, c, g, or t
  misc_feature (201)..(204): n is a, c, g, or t
  misc_feature (209)..(209): n is a, c, g, or t
  misc_feature (211)..(212): n is a, c, g, or t
  misc_feature (215)..(217): n is a, c, g, or t
  misc_feature (220)..(224): n is a, c, g, or t
  misc_feature (228)..(233): n is a, c, g, or t
  misc_feature (237)..(241): n is a, c, g, or t
  misc_feature (253)..(255): n is a, c, g, or t
  misc_feature (262)..(266): n is a, c, g, or t
  misc_feature (270)..(278): n is a, c, g, or t
  misc_feature (280)..(282): n is a, c, g, or t
  misc_feature (294)..(297): n is a, c, g, or t
  misc_feature (301)..(301): n is a, c, g, or t
  misc_feature (314)..(318): n is a, c, g, or t
  misc_feature (322)..(324): n is a, c, g, or t
  misc_feature (326)..(330): n is a, c, g, or t
  misc_feature (359)..(366): n is a, c, g, or t
  misc_feature (370)..(371): n is a, c, g, or t
  misc_feature (467)..(469): n is a, c, g, or t
  misc_feature (480)..(480): n is a, c, g, or t
  misc_feature (506)..(508): n is a, c, g, or t
  misc_feature (514)..(514): n is a, c, g, or t
  misc_feature (532)..(533): n is a, c, g, or t
  Coding DNA Sequence Number=SeqID_7585
aaactcgctcgtgccttctcatgggccaaagcatacaatcgtttgatggatcgtgccaacaaatggtggtttcccgtttggaattaaaatgcaggaatagtaggaatgtgtcatatgaaacctaaaattnnnnnnntttncnnnnntatnnnnnatcnannnnnnnnnnnnnagnannnnnnatantnnnnnnnttccngnnnntgtcnannttnnncannnnngtgnnnnnnatgnnnnnaatagtgggatnnntgctatnnnnncaannnnnnnnntnnngccctagctttnnnngtcntgtttttgcatcnnnnntacnnncnnnnngcccaaacttgcttcacagatttgccatnnnnnnnnacgnnaacctcgtacttctcaaaatactgccaaacatttgaagtggacttctttgcttgcttcaactttgaaggatcatcctcatccaaattaattccttnnngatttgcaccntattcatgagatgttgcagcaggtgnnncgatangcggacacaccaaaaggnngactcgtatttgcatgaggtggcgatgtcaagt

SEQ ID NO: 21989 - DNA, 259 bp, Zea mays
  Coding DNA Sequence Number=SeqID_7586
cggcagcgtggaacctgtagtgaacccggtcccggcggcgcccggcggcgccgaggaagctgccaagcagcaggcggtgacggccctggaggagaagaagaagaggaacatggccaagctccgcgcccccggtcaggccaagctgtagatggatcatcgtcggagtaggtgttcgggccttcgggctgccactgccactgtgccaggtcacccaagtcatattttttttctctctctctctgtccctttcgtttgtgca

SEQ ID NO: 21990 - DNA, 430 bp, Zea mays
  Coding DNA Sequence Number=SeqID_7587
gacattatgctttatcttttctttttcttttctcttcttgctttcactttgtgttttccgctccttctcttcgtccccttcctttttttctcttatctttttaaccttttctctttcttcttgttttgttattaatctccttttttttgatcaatcgttttgattgttttaaaggcaatcgttttgcctatttgttttccccggcaccgttttcttgcttctctttgtttctccatttcctctcttacttttttttttttctcttatcctttttttcgttctcttctcttttttatcttccttgtactatgcttatttttatcccttgtacatgtttttctctttattttacctcctttattactgttatattccactcacttcgtcaccttttctttttcttttttactttgtctttacctcatgtttt

SEQ ID NO: 21991 - DNA, 543 bp, Zea mays
  Coding DNA Sequence Number=SeqID_7588
gcggccacagtttcagtcatgtttagatgagggtcaagcaggggcgagttgaaccctagaccatttttcggtggcggcgccgtccccaaaaaacgagcggatgaagtcgcccccgcccctgtcgcggtgctgaaaaaatcgtgttgcctcccaacaagtgacaaaaccatcatccaaacaaaaactgggttggttctatccaagtttatcccttcaaccaaacaaaaacagtagtgactgttaaggatgaccctgcccctaaattagggatgaccctattccatcctattttgactccaaaccaaacacagctttagttcatacaggtcgtgattcatatattatactcgtaacatttatatacccgttgatatttttttacagttactgaattcgtgttcatttgaccacagaagataagaaaatcattagttttatgccttgttttggcgtattgcaatcgctcaaatgtatcaggaagtttcaacattatttcttgaaaagctagatttcaacattgtcatcatgtattggtccaccttt

SEQ ID NO: 21992 - DNA, 66 bp, Zea mays
  Coding DNA Sequence Number=SeqID_7589
cagttacgcgtttctccgcagtgtgtattttggtgacagtttcgcccaactgtttgtaccttggct

SEQ ID NO: 21993 - DNA, 286 bp, Zea mays
  misc_feature (95)..(96): n is a, c, g, or t
  misc_feature (149)..(153): n is a, c, g, or t
  misc_feature (171)..(172): n is a, c, g, or t
  misc_feature (204)..(206): n is a, c, g, or t
  misc_feature (208)..(208): n is a, c, g, or t
  misc_feature (210)..(212): n is a, c, g, or t
  misc_feature (218)..(220): n is a, c, g, or t
  misc_feature (222)..(224): n is a, c, g, or t
  misc_feature (236)..(238): n is a, c, g, or t
  Coding DNA Sequence Number=SeqID_7590
caccttggtagtgaagatcagatctgtacaacccaggctggaaagggatcacgactcgtgggtaaaatgtgcaaactctgcagagtgttagaaannggtatatcggtcgagctcacggttaagagcagccttgggatcctctttgattnnnnntacaaatggttcgagttnnaatggttctatttatgattttggttcgatgannntnannntgttcnnngnnnaggaaatggttnnngggtttgttattactaaaatttggcttcccctgataataaaatacctg

SEQ ID NO: 21994 - DNA, 140 bp, Zea mays
  Coding DNA Sequence Number=SeqID_7591
tgctccacgacgcttgtagggcctctggacttatgctgatcaacgcggcggagctcatgatggtcgtcccgctcagtgggaggacgcatcccagagacgtaatcgacatggaggagctggctagaggattcacaaaagat

SEQ ID NO: 21995 - DNA, 472 bp, Zea mays
  misc_feature (103)..(109): n is a, c, g, or t
  misc_feature (114)..(118): n is a, c, g, or t
  misc_feature (120)..(133): n is a, c, g, or t
  misc_feature (139)..(158): n is a, c, g, or t
  misc_feature (160)..(181): n is a, c, g, or t
  misc_feature (183)..(190): n is a, c, g, or t
  misc_feature (193)..(200): n is a, c, g, or t
  misc_feature (202)..(206): n is a, c, g, or t
  misc_feature (208)..(226): n is a, c, g, or t
  misc_feature (236)..(237): n is a, c, g, or t
  misc_feature (239)..(248): n is a, c, g, or t
  misc_feature (250)..(255): n is a, c, g, or t
  misc_feature (267)..(267): n is a, c, g, or t
  misc_feature (269)..(278): n is a, c, g, or t
  misc_feature (283)..(285): n is a, c, g, or t
  Coding DNA Sequence Number=SeqID_7592
tttgctatgcatttatacgtctttaggggtctgattctattattctaacatcagtatttcacgtttacgattccaaaaaaaaaaaaaaaaaaaaaaaaagggnnnnnnnaagcnnnnnannnnnnnnnnnnnngtgggnnnnnnnnnnnnnnnnnnnntnnnnnnnnnnnnnnnnnnnnnnannnnnnnncannnnnnnnannnnngnnnnnnnnnnnnnnnnnnnaatcaggcanntnnnnnnnnnncnnnnnncgggcttggagngnnnnnnnnnnatccnnnacgccctgacgaagccgccgttggccgccgccgcgccctccacctgcaccgcgcgggaccggcacttgccctccgcgtcgaccaggctggggtcgacggtaaacacccacccgtgctggcggccctcgcgacgcatcgtgctgatttgcgctggttgctgtgttgggattggagtgcattttttaaa

SEQ ID NO: 21996 - DNA, 242 bp, Zea mays
  Coding DNA Sequence Number=SeqID_7593
aaaaaagcggccacactgacgcgtaaaaagcataccgtccatttcttctgtgttactaaatcatacaaagcaacagtcatgctcctagtgcccaaactttttcacctctcaaagtggattagcagagccccgttaatcttttttacttgtaaactgtttacgtgaatactgtaccgacaccgtggaacgtaggccgtccgtctgactttttcatccatgctagagttgaagcttgtcgcatt

SEQ ID NO: 21997 - DNA, 499 bp, Zea mays
  misc_feature (166)..(167): n is a, c, g, or t
  misc_feature (173)..(184): n is a, c, g, or t
  misc_feature (186)..(188): n is a, c, g, or t
  misc_feature (190)..(192): n is a, c, g, or t
  misc_feature (195)..(197): n is a, c, g, or t
  misc_feature (199)..(211): n is a, c, g, or t
  misc_feature (216)..(221): n is a, c, g, or t
  misc_feature (234)..(266): n is a, c, g, or t
  misc_feature (269)..(271): n is a, c, g, or t
  misc_feature (274)..(280): n is a, c, g, or t
  misc_feature (285)..(287): n is a, c, g, or t
  misc_feature (289)..(294): n is a, c, g, or t
  misc_feature (299)..(304): n is a, c, g, or t
  misc_feature (311)..(317): n is a, c, g, or t
  misc_feature (322)..(324): n is a, c, g, or t
  misc_feature (328)..(329): n is a, c, g, or t
  misc_feature (338)..(338): n is a, c, g, or t
  misc_feature (340)..(342): n is a, c, g, or t
  misc_feature (349)..(350): n is a, c, g, or t
  misc_feature (353)..(354): n is a, c, g, or t
  misc_feature (365)..(365): n is a, c, g, or t
  misc_feature (367)..(371): n is a, c, g, or t
  misc_feature (380)..(383): n is a, c, g, or t
  misc_feature (392)..(395): n is a, c, g, or t
  misc_feature (431)..(433): n is a, c, g, or t
  misc_feature (438)..(442): n is a, c, g, or t
  misc_feature (447)..(449): n is a, c, g, or t
  misc_feature (463)..(464): n is a, c, g, or t
  misc_feature (468)..(470): n is a, c, g, or t
  Coding DNA Sequence Number=SeqID_7594
aagcagattctcaaggcacctgctaattcaaaaccaaaaataggttgtaacttcgaagttgctgcattggtgaagaataatatattttagttttactctcagctgattgcttgtttgtcatgtttcactccatgcttcactctcggctgtattctgcattataccnngcttcnnnnnnnnnnnngnnntnnnccnnnannnnnnnnnnnnntctgnnnnnnttttagtttattnnnnnnnnnnnnnnnnnnnnnnnnnnnnnnnnnccnnnccnnnnnnnttaannnannnnnnaatcnnnnnnccaatannnnnnngtcannnaagnngacctctcngnnncatgagnntcnnccacccctatnannnnnatctttatnnnnctttgagtnnnntcatcacctacataaggatccacgcccatatgtcannncgtcnnnnntgcannnaaccaggagaatcnncgannnacctcactctcattggaattcgaactcag

SEQ ID NO: 21998 - DNA, 301 bp, Zea mays
  Coding DNA Sequence Number=SeqID_7595
ttcttcagcctgtgaatgatcccacccacatccatccacgagcgtgcgcgtagactgatgcctaggtaaagagaccgagtttgctgagtgctagtattaagttcagccttcatgttgcggtattgtattggttgctccgtttccatctgatcagatgatcatagttgtttccttgatcagatgatgtgtactagacgttttgtccaggttgagctgaagctgtgatataaaatttcattacgttggtattaaactgtgaatgatcccaacacatccactgatgcctaaagaaaccttcagc

SEQ ID NO: 21999 - DNA, 386 bp, Zea mays
  misc_feature (143)..(144): n is a, c, g, or t
  misc_feature (177)..(178): n is a, c, g, or t
  misc_feature (277)..(279): n is a, c, g, or t
  Coding DNA Sequence Number=SeqID_7596
aattatacagtaaggtcgtctttctattgaccctccaatgttcttgaccactggaacatagtttctatctgaaggaacattttgataatttgattggtgaaaaatattagagaatgggtgcttatatgtagtttttattctgnngttcatgcagtggaatgttctttctgttgaccnnactactgtaacatggtttctatctcaagggaatattttcataatcaattactttgattggtgaaaaaaaataggtattagagaatgggtgaacctaatnnngctgctttattgtatgaattttccgtggtaacgttagctagaaagttctttactctagtaatttattaagaaagtgatgcctgatgtgttgtagaagttgtttaggc

SEQ ID NO: 22000 - DNA, 478 bp, Zea mays
  Coding DNA Sequence Number=SeqID_7597
gaagtggcttgcattcatgttttataatgccgcaaatgggaaaaaaaaagagaatgaaggggcactgggggtctctgcctgcttgctatgagaaacatttgccgggtgcaggctgctttccaagattgatattaaggaatgctttgggactgattttgctggaaggctttcactttcccggaactctcatagcctccgtcagatgaacttgtcatactgttcagtcaccgatattgggcttctttccctttcttgcatgtaaggcctccttagctgattgatcgtccaggatgcgggtataacgcctaatggcttcttgcctcttcttatggtactaggtctttcaacgaaagtgatgcttcagtccgtaaaaaaacttcagatgcctcctcccatgataaaaaatgttgaggcacgtggctgtgttttccaatggattgataaacctttcaagcctgatgtggaaccgtctgatgta

SEQ ID NO: 22001 - DNA, 166 bp, Zea mays
  Coding DNA Sequence Number=SeqID_7598
aagattggagcctcaattattctttttgacctccaatatatataatactggaatgcacagaatacaagtgactctttttttaggaattattgtgatgtgagttgaaccctgtattcacacttaaactattaccttactttactatcaattaggaacaatgtggaat

SEQ ID NO: 22002 - DNA, 504 bp, Zea mays
  misc_feature (300)..(301): n is a, c, g, or t
  misc_feature (386)..(388): n is a, c, g, or t
  Coding DNA Sequence Number=SeqID_7599
gagaggacggaataaagcgactatagtttgtaccttcagcgctagtttggcaactctattttacaagagattcttatttttctaaggaaatattaattaatttttcttaggaaaatggaaatcacttgggaaaatatgattgccagactagccctcagtgtaaatgtctccagttgccaaataaattggttactttaacgtatgaagaaaaccttcctccatgggacgaagataaaacggaggactgcgacttccctttgggcccgactagtttgaagtttgtactagcttcgggggtgnntaggcccagttttggtagaatactgtagtattctcgaatactacggtattatatacaaaatgttgtttggcaatttagataaaannnatgtttttaaaactgaagtattgcaaatacctagggcctgtttggaaatgcggttttgaaatactgtagttttaagataccatagtttacaattgtacatgacataaatactacgg

SEQ ID NO: 22003 - DNA, 210 bp, Zea mays
  Coding DNA Sequence Number=SeqID_7600
gtttcgtttgctggtatttctcatctttgatgctaagcatattggaaagttaatagaaatgaaaataagagcataatttgaactggttacgggccaggcgtgccctgcgacctaagtttgattgtgattattcgtgcgttcttggacatggaagttatcacatcgtagctgatggattgaacggctacatggccctggtgaccaacctga

SEQ ID NO: 22004 - DNA, 391 bp, Zea mays
  Coding DNA Sequence Number=SeqID_7601
tgtctgttcgctgctttcatcaatagtggcttataccatggacctccctgaccctgatactcggcggagacctttggtggagccccttctagtataacttcactggtgacctgttacagtttcatcctgaacatttacattaattgctcgatagaatgacactgctgctggagcctgaagatactactgacattataggcaaaggagcaatcgggtacctctggtcaattctctttgacttcatatgtatagtctgaataaattgtggtggaaaacatgcactcagaaacgttgagtagggattagaatttataagtagcatagctgcataggggcaagaagattagtattgatcaatcatactgcgcttacgagccattctgcaatccaa

SEQ ID NO: 22005 - DNA, 106 bp, Zea mays
  Coding DNA Sequence Number=SeqID_7602
gtgtgagattgctcaaaagcagagcacaaactagccttgatcaggttggttttagcttgtagctgctgctgctgcttgtcttccggctatccatagtgtaattact

SEQ ID NO: 22006 - DNA, 250 bp, Zea mays
  misc_feature (118)..(118): n is a, c, g, or t
  misc_feature (142)..(144): n is a, c, g, or t
  misc_feature (146)..(146): n is a, c, g, or t
  misc_feature (148)..(148): n is a, c, g, or t
  Coding DNA Sequence Number=SeqID_7603
ggctgcttagctggtacctggtagtggtagcaagtcatttttctcaaacattgcgttctctttcgccttctcaaaaaaaaaaaaaaaaagaaaaaaaaaaaaaaaactttctttgttngctgggttggttaggtgctctaannnanantccttaagtttgagttcaattcagttcttaattggagtggatttcagggtgggttttaaaaataatacctttttttttggtgttgttcacgcactagcctca

SEQ ID NO: 22007 - DNA, 488 bp, Zea mays
  Coding DNA Sequence Number=SeqID_7604
gttttaatctcaattttcacctctgaaacgttttttctaaaaccccatgagagatcagccagttccgcgagcctaagcggccctcttgtgctaatggccagcgaccggttgcctcacttggcggtgcaggtgctgtgcctttcgtgtgccggtcggcggcgggtgatgatcctaacaaggataaagacacacctgaacacactcaagaagtgtaatgatgaaagaccagtttgcaaactatgtggtgcagaaggtgctagaaacttgtgacgatcagcagagggagatgatcctaacaaggataaagacacacctgaacacactcaagaagtaacagttgctaggtttgcactcacatttttttctctctactaaaaaccctatatgaaggccccttttggcctcgccggaaaataaacactgtatgtttgcgcggaagagtgtacattaagctaacagttgctaggcttgcgctcatgtttttttct

SEQ ID NO: 22008 - DNA, 94 bp, Zea mays
  Coding DNA Sequence Number=SeqID_7605
ctgtaattcactggactgcgaggtgctttctcagaggtgggttggcttctcctcccccaccggttcgtgttcaggttctggttcgtgggcgaga

SEQ ID NO: 22009 - DNA, 548 bp, Zea mays
  Coding DNA Sequence Number=SeqID_7606
tgctcaagtcttattcaatttaaattttttcttcttcaacaagtcattagaggagaatggtcctgtcttctttactgatagagacaaaatcaatctggcagacccagtgggtgtccaggaaaagattgcttcgttacgttccacatttggcatcgtctgcgatatttctcgttctatcaagaattcgctaattacaaaacaggagcttttccataatattcttgccaacaacttggagatagaacagatgggagagatagaagagcagctacatattttagaggatctggctcccaattggatatctaagaaggtgataaatggagaagaaatactttacagctttgaaactatagcagatcagaattcagtgtgggaaaggcttgtagaagctgtgtgaggtgtggaatagctgggattggtttaaagctaaagaatcagccgcatagtacctggtaggtaaccacgcagatgaaaacgggcggggagctccgtgagcgcaccgaggcaataccaggaccaagtgcggagcggagaaggccagcggc

SEQ ID NO: 22010 - DNA, 417 bp, Zea mays
  Coding DNA Sequence Number=SeqID_7607
tttcttacctggcaagggcaaatcagaagcaagctcaagtcctagtcctagtcctagtcttggctcccttttggcctttgcctcaacaaagatgcatgttgcaagcaagactgcagctcgttgtaattgtgtagaggatccataactaatagtctaatgtagctatcacatgctaccgtgcgccatcagcatcagtctaattcacaggaagctgtctggtggtagacttggcaatactttctgttgtttgtgttttcgtagtaccaacttgatcatgcattcacttgttgcattgttacttgatagagcagcctcagtatcccaggaaatgatctttgctgtactttgtctatgagcatccacctgtgttctaccaacgtgtttgatttgagaaatgaagtagttcatcatcttccc

SEQ ID NO: 22011 - DNA, 453 bp, Zea mays
  Coding DNA Sequence Number=SeqID_7608
gacgagctgctgtccggcttctccgcgctgggccacttccccgacgaagggaaaggaccgagggggacctgtcgacggccgagtgcctcgcgaacttcgcggccgtggtcgccgtcacgggcctgctcgcgtacctgaccctgttctcgtccgtgtggttcaagctcttcgtggcgttcagctgctcgtctctcacgctcgctacctgctactctgtacatctgccccagatggtaggttttggctcaggtacccctgggagcatccacgcgaaggaggcttgagcgtagtagcgtgtacgcgttgtgactgtaactgagagctgtatgtatgtcagcagagaatttggtactgctgcctggacgcggcttttgtatcaccacgttgctgtgtgtagtgtatgtgcatacatgtgttggtgaatgtgtttttgcttgctaccgccatctttta

SEQ ID NO: 22012 - DNA, 450 bp, Zea mays
  Coding DNA Sequence Number=SeqID_7609
actgtgtacaggcttatatgcaaagataccattgaggagaaaatattgcaaagagcaaagcagaaaaatgcagtgcaagagttagttatgaaggggaaacatgtccaggacgatcatttaatgagacaagaggatgttgtttcattacttattgatgacacacagattgcacacaagttgaaagaaatatccatgcaggcgaaggatcgacaaaagaggagacgagcgaagggcatcaaggttgacaaagaaggagatttgacgctcgaagacttggatgatgctactgcagaagctgtagatcaagacaaaacgaccagcaaaaagaaacatcgaggctccatacgaatactcatgataatgaagagaggccggaactcggattcaggtactcagtggcctgctcacatgtaatcccgaaatgcagctcacgatggctgtaatgttcga

SEQ ID NO: 22013 - DNA, 551 bp, Zea mays
  Coding DNA Sequence Number=SeqID_7610
aatcctaagtgttcatcctcttttatttttcttgagtgaatgaaatgttactaaaattattctttttccagatatttaccatgtgccatattctttttttagatatggcccttggttcccactaatcctctcacgtaccagttagccatgtgttctgtttgacaaggagaaggaagcaggaacaaggtcgaaggagaagagtaactcagctccagccaatgacaagctcatgtgtgcattgtgataggaactgcttcggggtctgtttatgcgcaacgacggtttatgagaggaggtggcccccatctgtggtcgcaaaggagctaggccaactgcgacaacgacatcctgtgtctggttgtaattgtagtatttgttggtaaataattttgtcgaatattttgtatgccgtttcaaagcacgggcatataactagtggagcatatatacttctacaatcccacgttcgtgttacacaaaacaagcaactccaagtctccaacgcacccatgttggaactaggacactacttgtaaaggatatgaaccaac

SEQ ID NO: 22014 - DNA, 259 bp, Zea mays
  Coding DNA Sequence Number=SeqID_7611
catattgcaaactgtattttctggggatacttttcaaccctgtaaaacaactatttgcttttaatcttgggtgcgaaatccgaggtggctcttgatttttctaaattctatctgatatctgatagattccaggatggttgtggagggaaatttggcagttggatagattccaggatggatgtggagggacatctggcagttgggtcatggatgtagtctgtagacgtccaaattcatgtgaagctcttgttcttgcttt

SEQ ID NO: 22015 - DNA, 549 bp, Zea mays
  misc_feature (270)..(273): n is a, c, g, or t
  misc_feature (347)..(348): n is a, c, g, or t
  misc_feature (360)..(362): n is a, c, g, or t
  Coding DNA Sequence Number=SeqID_7612
gttctgcatgaaccaaacttcggtaactcaaacattggtgtcagatcttctcgtgttcttccctccgcctttcttctacgtccctctgcttatgcccaatgtttcagtgtggcatcctgacgtgtctgtgtcgccttttcacggcttttagccggcttgtcctggctcttttctcctttgttcagagtcattttacctcctacttgtagtagcagtagcttatacgtcttgttgtatagggtactggtacctagctaactgatcgattannnngagtgagtagagtggattttggcaggcgtgcatgcaaatgtaaataaaaccaaaccccagcgcggattcttctnnatcaaccagtcnnnggggacgatcttgctcttgctccaccctcgggcacgggttttgctttcgctccagctccacggcggcggcggtcagatccgtctctcaacgtaagctcgtgcatgtacataagctagcgtcctccagtccagacgccgccgccgccgccgcacgggatctcctgacagtggcttgatgcacctgcac

SEQ ID NO: 22016 - DNA, 252 bp, Zea mays
  misc_feature (100)..(100): n is a, c, g, or t
  Coding DNA Sequence Number=SeqID_7613
gtaacctatgggaaattcaataaattgagagaacaaaaaaaaaaaaaatgttcaaacacaaccaagttggaactggtgtgtggaaagagagccgatgtcntcctcgtgtacggcgaacccatactgaagaacagacaaccaagcggcaaaagtttcggccagcccgagcctggagaacataggggtcatccgtggcacgtaatctaggggacttccagtaactttttttgaaaggcatcgggccccggacct

SEQ ID NO: 22017 - DNA, 523 bp, Zea mays
  misc_feature (414)..(421): n is a, c, g, or t
  misc_feature (428)..(428): n is a, c, g, or t
  misc_feature (438)..(440): n is a, c, g, or t
  misc_feature (455)..(460): n is a, c, g, or t
  misc_feature (468)..(497): n is a, c, g, or t
  Coding DNA Sequence Number=SeqID_7614
aatcaaaggcgagggtgtaggacaacggggtggaagtactttgcacggtatgctcgaggttctactggaatgaaacaaatctttttggtgttgaaacgcgttggtagtcgtcatgttagcctacgtcagggccgcattttgccattttgtcagtcatgtaggtttggtttatgtactctagtgtttaccccaatttttttgcatgtattgagctagattagagtgtttaccataattttttacatgtattgagctggataagagtgtaaaccaatccatttcaacacatgtggattgagatgaatactagagtatccaaacaataccttagggcctgttcggttgcgtctgatccgatagggggggaaatccctctccaatcaaatagaacaaaaaaaaaaaaaaaagcggccnnnnnnnnctctaancttcaattcnnnagttattcttggcgnnnnnngcctctgnnnnnnnnnnnnnnnnnnnnnnnnnnnnnngaggtcgtcgagcctagcgagtactc

SEQ ID NO: 22018 - DNA, 311 bp, Zea mays
  misc_feature (96)..(96): n is a, c, g, or t
  misc_feature (99)..(104): n is a, c, g, or t
  misc_feature (167)..(169): n is a, c, g, or t
  misc_feature (171)..(171): n is a, c, g, or t
  misc_feature (174)..(174): n is a, c, g, or t
  misc_feature (176)..(178): n is a, c, g, or t
  misc_feature (240)..(242): n is a, c, g, or t
  misc_feature (258)..(262): n is a, c, g, or t
  Coding DNA Sequence Number=SeqID_7615
aacatgcgtggaagagaaccaaaaaaaaaaaaaaaattggcaggcatcgggttaaaaaaaaaaaaaaaaaaaaaaaaaaaaaaaaaaaatccgtantgnnnnnngaccgggtcgaaccagggttgagcgtggaattgagtcgggcattgttcgagtcggccattgannncntgncnnngagcgggtggcgcaacagcgtgacccagttgctcaacgatgcctcggtggacgtggcccagnnngacacagtgttctttnnnnnggggttccagcgggattccggcgctgcgccacagcatctcggcgatgct

SEQ ID NO: 22019 - DNA, 91 bp, Zea mays
  Coding DNA Sequence Number=SeqID_7616
cagcagctgcacagcggacgaatgccgcatctgcatgtacaagattcggctcggcgaggctacccgcaggctgcagtgtcgccatgtattc

SEQ ID NO: 22020 - DNA, 136 bp, Zea mays
  Coding DNA Sequence Number=SeqID_7617
ataaagggcggtctctctcgtataaagctcccagctccaaagcagtctatttttttgaataagtgggttggctggagtgatttacctgtacatgtatgtgttagttagaacccccggtttataggcagcaacctgt

SEQ ID NO: 22021 - DNA, 95 bp, Zea mays
  misc_feature (63)..(63): n is a, c, g, or t
  Coding DNA Sequence Number=SeqID_7618
ctaccgaacgtacacgtaccgttccgcgcgctgacgagtgatgaaaccaggggaagaaattanataaagcccgtgtattggcaggaacaagcatg

SEQ ID NO: 22022 - DNA, 84 bp, Zea mays
  Coding DNA Sequence Number=SeqID_7619
tcacgcctcttacgaagtcagtcggaaccggctcgagtccatgggcggttgtaaaatctgacaacaaagtggtgagtgtgaatt

SEQ ID NO: 22023 - DNA, 221 bp, Zea mays
  Coding DNA Sequence Number=SeqID_7620
tacctgggagacatctaggcgaggacgaaatccaaagtagcgacagtcctggcgagtacagagacggagccctgaagactccccacgattgagtccaagcccgacaagcccaacgcggcagcactggtggagagtacagatacaggctgaacgctcgaggtggctgcaatgattgctgctctcagtagcgtcacaagcactgccagctcggacttgacgaa

SEQ ID NO: 22024 - DNA, 325 bp, Zea mays
  Coding DNA Sequence Number=SeqID_7621
tgccggccaactgctgatgtcacactgcaactgcatgcatgccgtgctgcgtgcgcagctaagtttacactacatgcgcgtcaaggcgtatgttctactgctatatagctacgacatctatgcaataaacgaaggcatgcacacaatgatacgtgcctctcttgtgcacgcagtgcaatatgtcgatgaactatgggtgcggacgtgagcttaagcttattaatcagtgcagaagtttatgttacagaactgcattatgtttgagtacagaactgcattatcaaatctgaagtttatattaatatagtaatatgaattaaaaacg

SEQ ID NO: 22025 - DNA, 489 bp, Zea mays
  Coding DNA Sequence Number=SeqID_7622
gcccccgcagtctttggcgaggtcgacgatctggtgcggcggaggagcccgtggtgggtaggcgcccggagcagcctggccgagcacgaacaggccaagcttggtgttgctggtggtgagcaggaggagcgacgctaccaaggcgacgaccaccgcaagcttgctgggagccatggtgtgtgtgttgtgcctctggacgaagggtggagctggactggaggtttctcgagtggagagctgtggactggctggggactggggcctcttcttgattctcgagccgaattccggtctacgtacggcatgcgcccgtcatagctcttctatagtctttggcgaggtctcccatctggtccgtcggaggagcccgtggtgggtaggcgcccgcaacagcctggctgagcgcgaacaggccaagcttggtgttgctggtggtgaacaggaggaccgacgctgaccaatgacggccagaccacacgcaaggcttgg

SEQ ID NO: 22026 - DNA, 75 bp, Zea mays
  Coding DNA Sequence Number=SeqID_7623
acctaattatgtctgctaaatttccagaacatgaatgcgttcctcgccaaaattccagattaacccggcagcgcc

SEQ ID NO: 22027 - DNA, 209 bp, Zea mays
  Coding DNA Sequence Number=SeqID_7624
atggccattgttggcgccgggcggtcggtagtcgtttacctccacatccatcctcgcctccggcctgccgcccaggtccatcatcgccgcttcctgtttcattccggcacaaaatcatcagcagcagaattactacagcagctaccatcgatgaataattggttagctacggtattaccgtacctgagaagaagcgagattcagagccg

SEQ ID NO: 22028 - DNA, 541 bp, Zea mays
  Coding DNA Sequence Number=SeqID_7625
tagagaagcttcactcgctctgagttctattgtatatctctcactacgcctgaatcagctaagaacagggaatatgcgtgttaggtgctcaaatggaacggtatcagctgtgttcttcttgagctgggggtgattgaactcattgctccgtcaggctttcgcccattgcggaaaattccccactgctgcctcccgtaggagtctgggccgtgtctcagtcccagtgtggctgatcatcctctcggaccagctactgatcatcgccttggtaagctattgcctcaccaactagctaatcagacgcgagcccctccttgggcggatttctccttttgctcctcagcctacggggtattagcaaccgtttccagttgttgttcccctcccaagggcaggttcttacgcgttactcacccgttcgccactggaaacaccacttcccgttcgacttgcatgtgttaagcatgccgccagcgttcatcctgagccaggatcgaactctccatgagattcatagttgcattacttatagcttccttat

SEQ ID NO: 22029 - DNA, 437 bp, Zea mays
  misc_feature (95)..(95): n is a, c, g, or t
  misc_feature (375)..(375): n is a, c, g, or t
  misc_feature (384)..(384): n is a, c, g, or t
  misc_feature (393)..(393): n is a, c, g, or t
  Coding DNA Sequence Number=SeqID_7626
ggggcacgagagacaccattgacaacgtcaaggccaagatccaggacaaggagggcattccaccggaccagcagcggctgatcttcgccggcaangcagctggaggatggtcgcacccttggctgactacaacgatgcatttttgtatgagcaccctccaccttggtgcctccgccgtcaggggtggcatgccagatctttgtgaagacattgactggcaagaccatcaccttggaggtggagtcgtctgacacaatcgataatgtcaaagccaagatccaggacaaggagggcattccaccggaccagcagcgcctgatctttgctggcaagcagcctggaaggatgggccggtaaccccttcggccggactancaaacaatnccaggaagngaggaggcaacccttccaacctgggtggcttccggcttggcgaa

SEQ ID NO: 22030 - DNA, 529 bp, Zea mays
  Coding DNA Sequence Number=SeqID_7627
tatctcatttccattttgctagaaaaaaaattgctccctctctttctcaaatctgaaagaataggggaaaatggggttgtctttcacgaagctgttcagccggttgtttgcgaataaggagatgcgtatacttatggtgggtcttgatgctgctggtaaggccaccattctctacaagcccaagcttggtgagattgtcaccactattcccaccattgggtttaatgtggaaactgtggaatataagaacatcagcttcactgtctgggatgttggtggccaggacaagattcgtcctttgtggagacattatttccaaaatacacaagggcttatttttgtcgttgatagcaatgaccgagatcgtgttgttgaagctcgggatgagctgcataggatgttgaatgaggatgagttgagggatgccgtgcttctagtcttcgcaaacaaacaagatcttccaaatgctatgaatgctgctgaaataactgataagcttggtcttcattctcttcgtcagcgtcactgg

SEQ ID NO: 22031 - DNA, 319 bp, Zea mays
  Coding DNA Sequence Number=SeqID_7628
aatttccggtggagcggtgaaatgcattgagatcggaaagacaccaccggggaaagcattttgctgggccgacactgacattgagagacgaaagctaggggagcaaatgggattaaagaccccagtagtcctagccccaaacacagccggtaagggcaaaggcaacgaggtcatcttcgacgacgcgcgaaaagccgatgaaaataataaaaactcttgcaggagagtggtggcagaaaggactcctgatggaggtgagactctaaagtctaggacatcgctggacagtccggatcattgcagcggacggtacgacagc

SEQ ID NO: 22032 - DNA, 160 bp, Zea mays
  Coding DNA Sequence Number=SeqID_7629
ggcgcaaaagcccaccagccccagatccaagcggactctctcaagactaacaccgagacggacggcgcgcatcaggcacccacccctcacacggacggccaatcccaggcagcggcgcgtccaaacctcgcggtggaggacctgccgatgacggccaagc

SEQ ID NO: 22033 - DNA, 166 bp, Zea mays
  Coding DNA Sequence Number=SeqID_7630
aagtgctgctactgcgatcattgtcccgcaatgatcacaagctcctatagcttcccttcttaccccatacctctcaccagcgatgtcttcagtatgggaaaatcctattcttctaccctacaggatccaacaggaaagtcacagcaggtgatctatacctttatca

SEQ ID NO: 22034 - DNA, 161 bp, Zea mays
  Coding DNA Sequence Number=SeqID_7631
gaaaagcgtgtacatatctgatcaacaccagcggtcgcccgtcagtgcgcgcgtgcatgtaacgcaggcaccaacagctgccaagcgagtgcgtgcatgagcatgacgagtcacgctatgtgttgtacgtatttttccatgatgataagtataacacaccg

SEQ ID NO: 22035 - DNA, 373 bp, Zea mays
  Coding DNA Sequence Number=SeqID_7632
ttcctcccgttttctctctgcttgccgcgtccggccgagcgttcctgcgccttgctccccctggtgcgcgcgccccatctcccggtgctcggccagcccgcccatgggagtcgcgtcccagccaagctccctactcggcgtccgtctcctagctcgcgccctgcttccatggccatgcgcccatcttcctccctctctgcttgccgcgtgcgcagctccctggcgcgctcgtcctgcccctgtacgacacccatctcccctgctcctccggcgacacggcttcctgcttcctcgtcagcgcgtctctttctctggtctcttgtgtcgcgctcgcccagatcgtcgccgttgagtttcctgtcacgctccctca

SEQ ID NO: 22036 - DNA, 162 bp, Zea mays
  Coding DNA Sequence Number=SeqID_7633
cacaccccggcaaagatgcagatcattgtgtaaaagccttacgggaaaagcgaatcaccgtcgagatggagtcctgcgacaccatcgacaatgtcaagggcaagatccaggacaaggaaggcatcagtccggaccagcagaggatggttttcgccgggaagc

SEQ ID NO: 22037 - DNA, 492 bp, Zea mays
  Coding DNA Sequence Number=SeqID_7634
gatgagcaccgcgtgcaggcatgctctgggggtcccacgtctgttgcaagagtcaaccctctgggcaggggcaaatcctcctcgggacatcctgctgccgctggcccggcttgctcagttaatgcggtttggctttacaatagctccctaccacccctgctggactcacctcgggtcccgtcgcatcaccttgctgctgggacgtcacctagcatctctacccctgctgccttgagctccgagtccgagctccttaacaaaccctctttccgtgacgtgctccttcatggtgtggtggaaccccacccatctccctcggacccccgtggcccccacatcaaaatccacccaaactcctgcttccgctgttttgctacggaccaccaaattgctgcttgtcgcgaccctatccgttgtcgctcttgcggccgccaaggacaccggagccgacagtgctcagcacctccgctgcctgtgtcgaagtctcactcg

SEQ ID NO: 22038 - DNA, 276 bp, Zea mays
  misc_feature (76)..(76): n is a, c, g, or t
  misc_feature (84)..(84): n is a, c, g, or t
  Coding DNA Sequence Number=SeqID_7635
agtgctctgcgtactgctagcgtcgtgagtcgtgtgagtctagtattcacagcagacatggtagtctatctaccgntacatagnactcggatgctctatctgggctgcttcatgtcgccgctgtttgcgtcgacgttcgtgaacttgcggggtctatgggaggagcgaaagacatgcttgacgagagcgacaaggggttcttctcgaacatgatgcacggcgatgccggcggtcatgggtacctccaccagggatacacttcgcaggtctacccac

SEQ ID NO: 22039 - DNA, 412 bp, Zea mays
  Coding DNA Sequence Number=SeqID_7636
ttgtgggcagacaggccgctagaatggtaaaagaagatgaagaaaaattgaagaagaggaaattgagccctgagccgacgacggttgctccgaagaagagaaaagctacagctccgaagcagaaggcgactgatatagaagaagaaactcctgcatcaccttctgctaccgatgtggcagaaattctaaagacaccgccgccggcatcagcgccaaaaataccaattactgaaaccgctggcgccgctgaaggcgccggcggtaccgaagctgcagccaccggagccgaaggtgccagagctgagaccgccgaagattctgatctagaaaccacacttggtgatattgataacatacttctaaaaatggctgaggaagaagctgctggggccgcgatggacacaacaattga

SEQ ID NO: 22040 - DNA, 238 bp, Zea mays
  Coding DNA Sequence Number=SeqID_7637
tgaacaagtacgctctggctttagcgctcgtcaaagtccctaagccccttgcaatcgatcgcacgcaccccgtccccgtactctcaataatcacactacgaaggaaagtactagctagtgggctgatgagcacactcgtcgcgcacgcactgactgcacgccccaaccacggcggcgcggcctgcccccatcagagctcggccgtgaagatcagcaaagtgaggtacacggacatcca

SEQ ID NO: 22041 - DNA, 258 bp, Zea mays
  Coding DNA Sequence Number=SeqID_7638
ggtctgatctcgctcccgaaagcaggctggtggaatgggtggagcggaaatgggagcgggaggaggaacaatggaagcgggagtggtggaggtggtgggtatggcagaagtggtggatggctctggagcgactggagtcgctttgcctgctctgctgctgctgccgctgcaagagctgctcgggctgctctatccaaacgccgcttcttgcggccttcctgctgctctaagtacacggtcttgcccttgacttggctg

SEQ ID NO: 22042 - DNA, 180 bp, Zea mays
  Coding DNA Sequence Number=SeqID_7639
ttgccggcgcagtgctggctcatcgctctgggcaccggtgtgggtgtgctgttgctgggggctgccggtgtcattggcagcgataccggcctgtcggccatgggcacgctcaagctgagcctggggggccacggcgcgcgcttgccggcgctgctcaacctgctgcaactggtgggctgg

SEQ ID NO: 22043 - DNA, 238 bp, Zea mays
  misc_feature (28)..(28): n is a, c, g, or t
  misc_feature (62)..(62): n is a, c, g, or t
  Coding DNA Sequence Number=SeqID_7640
ggcttatgctgccttgcatctcctctcncgtacagccgcagcgtgctcctcgacctcgctanaagccaaccgccctgtctcccagtctccctcactcaccacgcacgcacaaagcagagcaggcaacggcacagctcagcacagagagagaagcgcggagctaagaagctgagcaacaacagcagcccggagaagagaagaggacgccaggaggcagcagccaggaggaagagcagag

SEQ ID NO: 22044 - DNA, 300 bp, Zea mays
  Coding DNA Sequence Number=SeqID_7641
ctatgacgtctcgtccgtgctgacaccgggcgccgacggccccggtcttggcggcaagcgctggcaggtagcggcgccgaacgaggcggaccgaagtaccccgaccccggccatctccagcgcgttcgagagcttgaggagccgcctgagcttgccgagccccgtcacgtaatcctcgccgtcgcggaagatgctcaacaccggcgcacgcagcgggacggacggccacgcccgccgctgcagggccgccatggacaacacggcccgcctgacgggccggtcatgatagccgccacagta

SEQ ID NO: 22045 - DNA, 299 bp, Zea mays
  misc_feature (75)..(75): n is a, c, g, or t
  Coding DNA Sequence Number=SeqID_7642
ctactacggcagaactcgccgacgaacggacgcgtgcaccagcgcagcttcaagatcttctgcaaggccgacgangggtactgcctcatcgtccgctgaggcaagtgtggtgtggctcgcgcgcagtcgcgcgatgagcatcagtactggtacaaggtcatgcgtctcagcacccaggtaaaggacgaggacgggcacgctgcgttcgccctcgtcaacaaggccactgggctcgccatcaagcactccctcggccagtcacacccggtgaagctgcgtgcgttcaactcggagtacca

SEQ ID NO: 22046 - DNA, 128 bp, Zea mays
  Coding DNA Sequence Number=SeqID_7643
ttcggcaccaggcttatactactgtcagtttaatttggctaggaaatgcatggtgctggtgtgacagtgtgtgtgctatgcatgtgtgtgcacggtgcacctttactcctactgcgcgttggagagag

SEQ ID NO: 22047 - DNA, 382 bp, Zea mays
  Coding DNA Sequence Number=SeqID_7644
catttggccatgagctaacttcctcagtagcactacataagcatcaaccaagaactcagcggaactaagacatagccacacttcctgatcgtccccacggccgaaatgaacatgatgtcttggagcatctttagaaggggggtcacgacagccatccctattgccacggctgctgcggccggtgcgccgatcaaatccctcacaaatacatcgtctcccatccctgcttcttgttgcctgcctcgtcagttccgtgtgcgccatcagcccccgacgcaagctcctggacaaaggggtggtcgtgggccgggaagcgagagcctgagtgaagggcacaggtcgcgagcgcggagactgtcttgacgagacaggaagcgagtcg

SEQ ID NO: 22048 - DNA, 94 bp, Zea mays
  Coding DNA Sequence Number=SeqID_7645
gcctgtgctcattctgcttgctctgctctgctctgctcttctctcgacagagaaggctgctgtcgacctaacacgcacggatggacggacgttt

SEQ ID NO: 22049 - DNA, 446 bp, Zea mays
  Coding DNA Sequence Number=SeqID_7646
tgctcgagcgactcggctgagcgggctcgagggcgactctggaccgtcgaccaccacaggacaccttatactacaagcttggaacgaatgcacggcacgtgatcgagaggttcgagaaggaggctgctgatatgaacaagcggtccttcaagtacgcgtgggtgctcgacaagctcaaggctgagcgtgagagaggtatcaccattgatatcgctctgtggaagtttgagaccaccaagtactactgcacggtcattgatgcccctggacaccgggacttcatcaagaacatgatcactggtacctgccaagctgactgtgctgtgcttatcattgacttcaccactggtggttttgacagctgtatctccaacggtggccataccccctaacattctcttctttggttaacccttgggatgaagctattcatttgctgctggaac

SEQ ID NO: 22050 - DNA, 134 bp, Zea mays
  Coding DNA Sequence Number=SeqID_7647
gggtgcgtaagtgtattgcctccgtccagacttcctcgccttgcttctttctgcccgccgcagacgtcgagctctggtttcaggcgaagctggtgggcggctcggcgctggacgccattatattggtgtgccac

SEQ ID NO: 22051 - DNA, 388 bp, Zea mays
  Coding DNA Sequence Number=SeqID_7648
cagggtttgcaaggcccttagaccagcgcggaggatgtgggtggaggagccgtcgaagaggcaaccatgtcggcccacgtgggagcagtgagggtgaagcccagcgggggtcgacgagggcgctgctgcgcgggtgagagggttccggggagaggtccgaggccggcgataaagggggggtcatctcctgcaagtgtgctgtgcccaggggtgttgtgttcgcaccgggggtgagccagagggcgccggaggtggggaaaccgagcagcgcagcctgagaggtagcgctggcgacctggcggtctgcctgcgtgggggctagccagagggccgctaggctcgcgttgggggtggtggcggcggcaagctggccagagagggagagctc

SEQ ID NO: 22052 - DNA, 227 bp, Zea mays
  Coding DNA Sequence Number=SeqID_7649
gcacgcgtccgtccaaggagagcttcgtgttccggagctcgtgctgcgaggctgctgtaccggctaagttctccgatgacgactactactgtcgctgcctgctgacgatggacgtcttcactgagactatgccgctgggcagctcttttcacactgccgctcaagatcgcgtccccttcgcttcagaacacgcctgctatccgtgcgtctggccctcttgtgcctga

SEQ ID NO: 22053 - DNA, 229 bp, Zea mays
  Coding DNA Sequence Number=SeqID_7650
ggctcgagggcacttccccgtgacaccgtttcctccagtttcctaccttacctctcgtcccagcagccgcgagccaaaaccctagcaagcaaaccaccggagcatcggcgctcgcgcgggcggagcataggcggacgacgattacaacgacatcgacatgggctatgacgatgagcctccagaacctgagcttgaggaacgggccgaagacgagcttgagcacaacgat

SEQ ID NO: 22054 - DNA, 149 bp, Zea mays
  Coding DNA Sequence Number=SeqID_7651
ggcgccgagtccgatagccacttcgcccgccgcttcaggttaacggaccagagggctgtgtcccccactgtcatcggcaacgatcgagcgtcaggatcccaatcgcttcccggcctccaaccgtctaaggcacgcacgctgcatgtcaa

SEQ ID NO: 22055 - DNA, 445 bp, Zea mays
  Coding DNA Sequence Number=SeqID_7652
gggtgtgagcgatcaatcatgcgctcccccctcccaccgcgcacatgcgttcgccggggagccggggctactcggccgtcgcggcaggcaggcaggcagctttttggtggcgaccaccacgtcgcgctcgctcgaccagtacgtgcccactcttgccctgctgcaccgaccactgcggctttgggaagaaaaaggaaggggggatcactttggggccggatcggagaccacacaagttcattgtgtaggcaaggtccacgtgggccatcgagtactacgtacgtacgtgcgtgcaagcagtgatgccattgccgcgcgggtagcgcgcggtgcacggcgaataactgggagacgacgggcgcgtgcatcatgcgaggcgctggcctttgattcggtcgttcattggtggggtgggaatcttgcaatggaagcatgcaattgcgca

SEQ ID NO: 22056 - DNA, 449 bp, Zea mays
  misc_feature (97)..(97): n is a, c, g, or t
  misc_feature (360)..(360): n is a, c, g, or t
  misc_feature (362)..(362): n is a, c, g, or t
  misc_feature (374)..(374): n is a, c, g, or t
  misc_feature (411)..(411): n is a, c, g, or t
  Coding DNA Sequence Number=SeqID_7653
gaacgagactcgttcgctcgctacgtttccctccgcttgccgagtgccgcgcgggagcacgcgcccatggcgacgccgccttcggccgcgacagcgncggcgattccccagactggggcgcagtccaagggctacaactttgcatccacatgggaacacagcgcgcccgcttacgtgcgaccgcgagggcgagaacgaccgtgtcgagatcatcgcgaacgaccagggaaaccgcactacaccctcgcacgtccacttcattgagtccgagcgcaccatcggagatgtttttaagaaccaggacgacacgaaaccgaggaaatttttgggtggctctcccccccccccccccgggaggangnaagagagagggngagtgggccaggagcgagcaaaaaaaaaaaaaaactncaaggccatccccgggcccggcgaagaagccaacgaca

SEQ ID NO: 22057 - DNA, 248 bp, Zea mays
  misc_feature (135)..(135): n is a, c, g, or t
  Coding DNA Sequence Number=SeqID_7654
gacacaaggtcgcagatccaaggctaggtgcttggaatgatcagggcaggcgtccaagctccatttggaccatgcggtcgagcagaacggacggagatcggcaagggccgatggagggaagaagccttgagaagngccatggtcggcttaatggctcttgacatcgtgcagactctcatcgtggacatcgagccatacgagcatgtgaaccgcgcaatgtacgagatcgacgcagcttcgatggtcaa

SEQ ID NO: 22058 - DNA, 455 bp, Zea mays
  misc_feature (190)..(191): n is a, c, g, or t
  misc_feature (195)..(195): n is a, c, g, or t
  misc_feature (197)..(198): n is a, c, g, or t
  misc_feature (205)..(206): n is a, c, g, or t
  misc_feature (217)..(217): n is a, c, g, or t
  misc_feature (341)..(341): n is a, c, g, or t
  misc_feature (356)..(356): n is a, c, g, or t
  misc_feature (362)..(362): n is a, c, g, or t
  misc_feature (366)..(366): n is a, c, g, or t
  misc_feature (373)..(373): n is a, c, g, or t
  misc_feature (377)..(377): n is a, c, g, or t
  misc_feature (387)..(387): n is a, c, g, or t
  misc_feature (405)..(405): n is a, c, g, or t
  misc_feature (414)..(414): n is a, c, g, or t
  misc_feature (416)..(416): n is a, c, g, or t
  Coding DNA Sequence Number=SeqID_7655
ggcgacgagccaaaccctcggtctgagtcccttctcaccctgcttcaccggagtcacctgctgtccaaggctccaagcacccgccaatcggccgctgccgaacccgcaaccggaacctgcctccaggctgcttccacaccggtcgagggcgatgggcgaagggccgaaaggggccgaaggccaaccacgnntcgncnnaaacccnngcagtaaccgnctacacgccggggcacgccgcacggcacacaacaaacaacgtgccctcgccctgcagtctaccctggttctattgtgccccgacagaagatcctgagagctagagctgtttttttccctacatnatagttaaaggttanaaaatntaanattcctnggcnaaccaaggcnccggataaggaatgggtnctccgggcngngaattccaaattggtctcaattggttaaccccccttgcg

SEQ ID NO: 22059 - DNA, 258 bp, Zea mays
  Coding DNA Sequence Number=SeqID_7656
ggttccaggcggagcgtcctcgtccatgccgccggagcctcccatgtcgggacccgcgccctggaacatcttggcgatgatggggttgcaaagggtctccaactccttcatcttgtgattgaactcgaccgccttggggagctggttggggtccagccagctgatggccgcgtggatggcgacctcaatcttttttttggcgggggcagccagcttggacgcaaacttatcgaccttgatcgggttgcgcatgttgga

SEQ ID NO: 22060 - DNA, 397 bp, Zea mays
  Coding DNA Sequence Number=SeqID_7657
catgcctgcaggtagtagtcaggaacgacaagtacttgttcgctgtcacacccccgactactgtggactgcctggagtcgcaagcgaacgccggcctgcctagaaccgcttctgtcccctcgttatccaggagctgctgcacaccgcgcttctgctggcagccgctgcggaagccggacgtttggagcggctacacggattctggcgcccagaagcctggaggcggctgtgcgtacctgtattccgatccaggcatgcaagcagagcaaagtgaagcaaagccggcggatcaggtggaggagtggaaaggggtttctgaggtgagagaaagcgatgcaagcatgcggcgcgcgcctaccggatcacttgtgaaatatgttggtgatgacgcggatgt

SEQ ID NO: 22061 - DNA, 220 bp, Zea mays
  Coding DNA Sequence Number=SeqID_7658
accgccactatgtctgacgaggaaactgaacaagttgaggaacagtacgtagaggaagaggaggcccaggaggaagaagtccaggaggaagctcccggaaccagaggaagtccaagaagaggagaaaccaagacccagacttactgctcctaagatcccggaaggagagaaagtagacttcgatgatatccagaagaagcgtcagaacaaggacctcatg

SEQ ID NO: 22062 - DNA, 188 bp, Zea mays
  Coding DNA Sequence Number=SeqID_7659
aggtggagtctaagaggccgccttccccgacacctcaacaagagatgccccctgcaccaccacagggcatcctggctgctggaggagaccctgacggagatggagacgacgccggtgatgacaccggtggcagctcgagccacgacacggaactttcggaggagccggagccagagggatggatcgca

SEQ ID NO: 22063 - DNA, 158 bp, Zea mays
  Coding DNA Sequence Number=SeqID_7660
ttgtacgcggtggtcgctggcatcagattgtcttggccgtgagtgtatgctgagaattaatgtgagcgctggtactgtgcgctggatccatgctgcttttgtacacggttgtgctctggagtttatcctggataaaaaatggcagctactgcttctgc

SEQ ID NO: 22064 - DNA, 317 bp, Zea mays
  Coding DNA Sequence Number=SeqID_7661
tgcagagcctgtgcctgcaattccgtccgaggtcggacggaccacgtgcttgcattgcgttggggcaaggcaacggcagtcatcatctgccatgccgccaccaaccaccacgtcgccacccccctaagggcttcaacgacgcgccaccaccagtacggcgatatggacaaggacaaggacggactggccttactttactacactacatcaaccgagctcccgaggaaggagccggggctcaactcaaacaaggagcaaatggcagctaccaagagctatcaccacgccggccaggtagccagcgagctccgacactc

SEQ ID NO: 22065 - DNA, 112 bp, Zea mays
  Coding DNA Sequence Number=SeqID_7662
cttcgcctgcctgtgataaagttttttggcactgctgctgctctcagcaggaaaataaaacttgaagtgctaccaaagaaaattaaatcccatgctgaagaggctgcccaaa

SEQ ID NO: 22066 - DNA, 219 bp, Zea mays
  Coding DNA Sequence Number=SeqID_7663
tggcaccaccgcgtgacaggacgtagcaaccgtcgacgattcaagcttgcgtgctacgccgcacccaacccctcggctacgacgagacaatcggccgtagtgcgcgtgacgtcggcgcgagggagcgcgcgtgcagcaccgacgccctctccctcccgcgtccgcccctcgctcgggatcgctgtgcgccgcgcagctctaggcccggcgctggagtct

SEQ ID NO: 22067 - DNA, 241 bp, Zea mays
  Coding DNA Sequence Number=SeqID_7664
gtatggaggaaggattccgacctctaatagtgcgttggtgtggccttaagaggggcgaggtcgggaacgtgggacttaccaacgatttcgcggtgccgggccccgtccatggtgtgatgcagtcgacggtgaaccggcggagagagtccgggcacgcgcgggtcaaaaccgaggtccccggcggcagctgcggaagagttgttgacccagcgtcgcaagcggaatccgttgcaagggagaa

SEQ ID NO: 22068 - DNA, 448 bp, Zea mays
  Coding DNA Sequence Number=SeqID_7665
cgtccgtttcgtggctccggagatccggcctcatccgccccgccccgcccgcctcccggcctcgtcgtctcctcgtccccccactcccgtctcgtccgctttctttaatcaatcctccgcgccccacaaccccaagcaactcccactaatcgtcccctttccttccctttcccggcgggggcaacaatggtcggtgacggcgatcggtttgctgcatcggcggttcctgcggcgccgtgcaggtttctcggtcacctgtgagctcgatttgaccgcccccacctggcgtcgtgctggttccgttctgggtattcttggcgctggtctgggctctggggcgatcgggacacacctccgctctgcttatcgagggtcgaggcacccgacgatcttctccggaaaaggtaggcgctgtccgtttctgcttgctccctttggttttcaaaag

SEQ ID NO: 22069 - DNA, 230 bp, Zea mays
  Coding DNA Sequence Number=SeqID_7666
gaacaggaatagtccgatctccagctacactctctaggtactttatgtccttccactttttccttgcaggccaatgatcaatgcatccatggtagaagttgaagtactggatcaatgcacttgccggttggatgggtcttgtatccaagattttgcccctgctgttgtggctaatgttgggaaacgagctatttcttctagaacggtggcccatgctcttcaaaattggc

SEQ ID NO: 22070 - DNA, 333 bp, Zea mays
  Coding DNA Sequence Number=SeqID_7667
gccgcagcagcacaaacgcgtagctcccgccccaccccactgcctctcgccatcggtctcgctgtcggcgcctgcttctaccaggtgtgcgcccttctcgaactcccaccaaccccctgtcctgctcgtcccaccaccatcctgcaaatgccgccgtcgtacaacccctccacagtctccgcaccacaacccgcgccacccggaacgccccccttcagccgtcgtgggagatagaggaggtcgcgtcgtaaccaaccccgcgccacccggcccaatccgcaacaaccgcgcccactccgcacaaaatcgtggatatcgaccagcgtagacgat

SEQ ID NO: 22071 - DNA, 237 bp, Zea mays
  Coding DNA Sequence Number=SeqID_7668
gatttgcatgcacgatggctgaacctgtacatataagggtcgatcgctttgcgtgattccaatactctttcgtgtacaggctacagaaacgagctatagagtgctagaactccttgtttacggattaaaacatggtagaaattcttttcacgaatgtaaaacatgttcggattgtgacatggcataactttcaggttatgcactgctcacgggaggctaggagatgtcactgtatgc

SEQ ID NO: 22072 - DNA, 428 bp, Zea mays
  Coding DNA Sequence Number=SeqID_7669
tccgaggccggcagggctacggaaaaaaaaaaagcgcacacacatacacatgcacaagcgcactctagcaatggcttctgaggttgtccgccctagcgacgccgagctactaaaggcacaagccgacatatggcggctcagcctctcctacctcacgcccctgtcactgaggtgcgccgtggagcttggcatccccacggcgatctaccgccatggcggggctgcctcagccgctgagctggtcacggtgctgactctcccctccactaagctgacgttcctccgacgtctgctgcgaatcctcgccgcgacgggcgtgttcaccgtccacaagtacagtacgtaggaggagcgataccgtataacccctgcagtatacctcctgctggacggcatccctcccagaggcaccccatgaaccaaaccgc

SEQ ID NO: 22073 - DNA, 121 bp, Zea mays
  Coding DNA Sequence Number=SeqID_7670
tctcccatcacactatcacatggagtccaccaccctcctcgcagacttgcagatcgtggctgcgtcctctcgccggctcggtcttgctcacctcgctacctgcaggcgatgttgatcgtga

SEQ ID NO: 22074 - DNA, 441 bp, Zea mays
  Coding DNA Sequence Number=SeqID_7671
tgagagcagctatcttcatggcctctacaactttgctacgtccttctttggggctattcatcaatgcaacaagaggcacaagatgactctgctgctgagcaccactgctaccttggggcagtttaacttaatggattactgcttcgctatgaactcccaacctagagttttctcatatgccctcagttttattggtctaggtaagcaatggaggaactcatggtacgtccaccacatcgatgatgcaggtggcaacgatatgtactggtggattatcaaccgtgttttggaatatttggccacatcatcggacgatgaccttacacatactctaccccctcatcatccagcagcgttcggacagctacatgttaggagattgaactctatatttagtctacccttcgaggatgccctctaccgcctacacttgtacactga

SEQ ID NO: 22075 - DNA, 530 bp, Zea mays
  Coding DNA Sequence Number=SeqID_7672
cattcttattacgtttccacaccaaagtgagatatacgacttcatttttttatacattaaatgcccattggtgttccaaaagtgccctttcgaagtcctggagaggaagatgcatcttgggttgacatatacaatcgactttatcgagaaagactactttttttaggccaagaggttaatagtgaaatatcgaatcaacttattggccttatggtatatctcagtatagaggatgataacaaagatttgtatctgtttataaattctccgggcggatgggtaatacccggaatagctatttatgatactatgcaatttgtacaaccagatgtacagacaatatgcatgggattagccgcttcaatgggatcttttattttggcaggaggggaaattaccaaacgtctagcattccctcacgctagggtaatgatccatcaacccgctagttctttttatgaggcacaaacgggagaatttatcctggaagcggaggaactactgaaactgcgcgaaactatcacaagggt

SEQ ID NO: 22076 - DNA, 593 bp, Zea mays
  Coding DNA Sequence Number=SeqID_7673
ggaagctaccatgctgcttggtgttgggctcaacattggttgcctttcttttcagcttctggttatgattgctatgctctcagcttgttaggccagggtgaaagtgatgcacctgctgattcagttgctggtacacttcagtagacacatgcaagtgatgttgcagattttatctatcaaaatattagatcaccacctgtcttgctcggacattcatttggaggacttattattcagtattatatttcccatttaggaaatgacaaattcaaagaaaatttatacccgaagcttagaggagctgtccttgtttgttctgtacctccatctggtaatggtgggctagtccggcgatatctcttttccaagccaattgctgccttcaaggtgacatggagcttggctgcaaaaggttttcaaagctctctttctctctgtaaggagacatttttctcagccacaatggaggatcatgttattaaaagatatcaagatctaatgaaagaaagctcaaggatgccattgtttgatttaagaaagctgaatgcaccacttccagtaccttcagtgccaaactgccctcttgaagttct

SEQ ID NO: 22077 - DNA, 483 bp, Zea mays
  Coding DNA Sequence Number=SeqID_7674
ggaaagctcttatttggcattgtaaagggtccagaagtgctcaacactgtcagacctgccgggttaccgcttgttgatgattgggactgcttgaaaaccatggtaaggacttttgagacacattgtggatccttgtctcagtatgggatgaaacatatgaggtcctttgcaaacatctgcaatgtaggaatacatcatgagcaaatggctgaggcctctgcacaagcttgtgtcagtattcctaccaatccctggagttctctgcaagggggtttcagtgcataattcctaaaatgcacaataataaagaccaaagtacaattattgttacattatgttttatagatatacatgttgtatattggacataatttcttgtcctgcctctgtaaatataattgggaaactacttgggtggggggtgtcctctttagtctttgaattatagtttctcaatcagatgctgcacctacatttgtaatc

SEQ ID NO: 22078 - DNA, 419 bp, Zea mays
  misc_feature (380)..(384): n is a, c, g, or t
  Coding DNA Sequence Number=SeqID_7675
agtgaacagcaaactcaaccgaacaaccagttggtggtgcagaattctgggagcctcagcttcagtagtcacttgtctaaggaagatgaagagatgtcaaggtctgctctttcaaactttagggccaaggaggaagagattgaaaggaagaagatggaggtgagagagaaggttcagcttcagttgggtcgtgtagaagaagaaaccaagcgtcttgctaccattcgtgaggagcttgaagccttggcagatccgatgaggaaagaagtggcacttgtccgaaaaaagattgattccgtaaacaaagaattaaagccactaggtcatacctgccagaagaaggagaaagagtgcaaagaagcccttgaagcttttaatgnnnnnaacagggaaaaagtacagctaatcaccaggttaat

SEQ ID NO: 22079 - DNA, 556 bp, Zea mays
  Coding DNA Sequence Number=SeqID_7676
actgatcactcactacgactttaagtgataatttgtgaaaggaaggcagttggcgaagtataaggtgtaatggcctctgagagggaatattttgacctctgtggacccttacatctaacttatgtcgactgggataatgcagatcatcgaaggtctattgctgctagtttggtccaaggtgtttacgttctagaaaaggaccggcaagaacgacgtgaaggtcccaatgctcttgcaccgccttggtgggcattcttccactttcagttgctacgtacactagttgatgatgttgattcttccatctttggtgcaatttatgagttcaagcctccaccatccatgtgcaatgacaccttacatagaagtccccgttatgtaattgcctttcgagggactataaccaaggcagactcagtttcacgtgatattgagttggatttgcactttgtccgaaatggacttcatcaaacttcacgctctgagatagctattcaagctgtccgaaacatggtggctactgtcggtgattcgaatatctggttggctggccact

SEQ ID NO: 22080 - DNA, 575 bp, Zea mays
  misc_feature (510)..(513): n is a, c, g, or t
  Coding DNA Sequence Number=SeqID_7677
catacacttatgcagaacttgagagagagccttattggccatcagaaaagctcagaatttccatcactggggctggtggttttattgcctcacacattgcccgccgcctcaagaaggaggggcattacattatcgcttctgattggaagaagaatgaacacatgactgaagacatgttctgccatgagttccatcttgtggatctcagggtcatggataactgcctcaaagttaccaagggtgtggatcatgttttcaatcttgctgctgatatgggtgggatgggttttatccagtccaaccactctgtcattatgtacaacaacactatgattagcttcaacatgattgaggctgccaggattaatggtgttaagaggtttttttatgcctctagtgcttgtatctaccctgaatttaaacagttggaaaccaatgtgagtttgaaggagtctgatgcctggcctgctgagccacaagatgcatatgggctggagaagcttgcaacannnnagttatgcaagcattataacaaggattttggaattgagtgccgcattgggagattccataac

SEQ ID NO: 22081 - DNA, 477 bp, Zea mays
  Coding DNA Sequence Number=SeqID_7678
acagtgaattaatcacaagtcctggcagacttcatcgtcgactggacggtaccaacaaggcaacaagaagagtccccagagaaagtatgactattcactatgacagcgcgtggtgccatgcaggggcgggcgccacgacaattatcatttcacccacaggcgtcaaatacagatacgcagcccgcctaagcttcgccttggagtccaacagatgcaccaacaacatagcagagtatgaagccgtcatcttgggactccacaaattacgtgcactcggtgtcaccacttgcataatcagaacagactccaaagtagtcaccgaccaggtcgagaaggaatattcagccaaagaccccacgctcatgcaatatctcacagtcgtccacagcctcgagaaacaatttaagggtttcaccctgcaacacgtcgaccgcgccaagaatgaagaggccgacgctttggccaaagcaccggcca

SEQ ID NO: 22082 - DNA, 90 bp, Zea mays
  Coding DNA Sequence Number=SeqID_7679
ggagcggttcggttgactcttctgtctacgcacctacctcttcacccaactgccgcccctgctccgagaaccagaatggccgccgccgat

SEQ ID NO: 22083 - DNA, 328 bp, Zea mays
  Coding DNA Sequence Number=SeqID_7680
gcgacgggaacggttgccgtgctcgcgggcgggcatgacaggatctatccggagaatcacgcgccgctgctgcaggagattctggagaacggaggcgccgtggtggcggagatgccgctgggctgggtgccccgcgggcgcgacttcccccggcgcaaccggatcatctccgggctgtcctacggcaccgtcgtggtggaggcggcgcgccgctcaggctccctcatcaccgcgcgcttcgccctggagcagggccgagaggtcttcgccgtgccgggttccccgctcgatccgcgcgccgagggcaccaacgatctgatccgcaggg

SEQ ID NO: 22084 - DNA, 334 bp, Zea mays
  Coding DNA Sequence Number=SeqID_7681
atgctgatgatgaccggttgcaggcgcatgcctactctatatggcgcactctgaagcacctacgctacgtgctccgcctccacttcccggcgtccaacaatgtggctgagtacgaggctctagtcaatggtttgcgcatcgccatcgagctaggggtccgacgcctcgacgctcgcggcgactcgcagctcgtcatcgaccgagtcatgaagaactcccactgccgcgacccgaagatggaagcctactgcgatgaggttcggcgcctggaagacaagttctacgggctcgagctcaaccacatcgcccgacgctacaataagactgcggatga

SEQ ID NO: 22085 - DNA, 397 bp, Zea mays
  Coding DNA Sequence Number=SeqID_7682
acgcggctgctctcaggcagaaaaaacaggaaatcgcgctgctgagacagggggcacatccaaacattgcccagaactatggcagcgacagagcgcaaggagacactcctggcctatctggagcatgaatctgggggctctaaccataagccgcgtcaagaatatggaccgcctggggaggcagcgcttcggaattacacagcacaaaacctttctggccaggcatacttgcatgggcggaacacagggcatagggatatcaaaggggcaaacatacttgtagaacctaatggagacataaagcttgccgaattagggatggcgaaacaaatatcagcatacacaacgatcaaagccctcaaagggagcccccacaggaaggcaccagaagccataa

SEQ ID NO: 22086 - DNA, 349 bp, Zea mays
  Coding DNA Sequence Number=SeqID_7683
ggctcgagctgggttgtcacctcatgttgttgttggcacagctagcggtaccaagaaagatgattcatagttgctaatgctgcagctcttggccggcacactaggtgcaactcatacagaagctcaagatgtccacattaagtctgcagagacagcttccgtgcatcaagcggaagcaatttttgctgatgggaaatgcacacaagctaaggctgaccatcttgataagatccaaaagcaggtcggcttgcctactgaacatgcacagaaaatcattaagggtgtcacaacgacgaagttatcttctggaattgaagcctctgctgctcgctggcagatcggtttacag

SEQ ID NO: 22087 - DNA, 217 bp, Zea mays
  Coding DNA Sequence Number=SeqID_7684
gcaaatatgggtttcaccgatctcgtctccgaagcaggcctgactctcctgaacaactatgtcaggacccgcagctacatcgttggctactccccatcgcaggccgatgtaaaggtctaccagcagatcaagcagatccctgctcccgagaagtacccatacgcatggaggtggtacaaccacatgctcaccttcgaggccgagttcgactccctcc

SEQ ID NO: 22088 - DNA, 419 bp, Zea mays
  Coding DNA Sequence Number=SeqID_7685
agatgatggagctcgacttggtcagctccgtcctgcacattccagttatcagcatcgtgcgctacgagtttccacgggagagtcagaatccccttcacctccaactgagtttagaaaattcattaagttctgatgctgatgtcactgtctcaatcctgaccatgaacaactggtacaattttagcttgttgctgtgccaggaagactggaacatcaccgacttcctcctccttacccagaataattccaagttccacctgggctctatcatcaacatcaccatcaacctctcctccactgaggacctcttgagcttcctgcaggtccagctggagagcattaagaacagtacacccacaatggtgatgtttggctgcgacatggaaagtatccggcggattttcgaaattaccacccag

SEQ ID NO: 22089 - DNA, 322 bp, Zea mays
  misc_feature (280)..(280): n is a, c, g, or t
  misc_feature (292)..(292): n is a, c, g, or t
  misc_feature (295)..(296): n is a, c, g, or t
  Coding DNA Sequence Number=SeqID_7686
ctgcttgtatattcggcacgagggccacacgtccaccctccatggtcggccaccgtgcctctttctgaccgcaaatccaacctcgacggctagtcccgctaacactttccggcaacttacgccggcttccacctccggaaagctccacttcccgaagatctcgcctcgcttcccccggcatgcctgcgcaaggacctatcgctccgccgcattcggaaggggatcgcctgtggccgggcgtagatagaccccctactacgccacgctgaacatccgccgngactccacgctncannacatcaaatctgactaccggattctt

SEQ ID NO: 22090 - DNA, 330 bp, Zea mays
  Coding DNA Sequence Number=SeqID_7687
tgatcggctcgctggttaacggtcccggtccggtcttcgggctgcgcgccgattttggatgccctgccgattaccgaaaaagccgagccgcagtggaattcgagccggcctggcgtgatgcacgcctgcggtctcgatggtcgcaccgcgatactgctggccgcagcctgtcagctggccgccacgcgtattttcaaaggttcggtacatttcctgtttcagccggccgaagattatctcggtggtgcgcgcaaaatggtggaggaaggtctgtttcagcgcttcccgatggatgccgtgtactctatgcacaactgtccgggattgccg

SEQ ID NO: 22091 - DNA, 523 bp, Zea mays
  misc_feature (152)..(152): n is a, c, g, or t
  misc_feature (175)..(175): n is a, c, g, or t
  misc_feature (182)..(182): n is a, c, g, or t
  misc_feature (219)..(219): n is a, c, g, or t
  misc_feature (286)..(286): n is a, c, g, or t
  misc_feature (291)..(291): n is a, c, g, or t
  misc_feature (347)..(347): n is a, c, g, or t
  misc_feature (353)..(353): n is a, c, g, or t
  misc_feature (365)..(365): n is a, c, g, or t
  misc_feature (369)..(369): n is a, c, g, or t
  misc_feature (387)..(387): n is a, c, g, or t
  misc_feature (407)..(407): n is a, c, g, or t
  misc_feature (463)..(463): n is a, c, g, or t
  Coding DNA Sequence Number=SeqID_7688
agacacagaaagacagcgcaagacagaggcaccgagacgagacacggagaagcagacacagcaagacgagagcagaacacgacacaaacacaaaggcgaagcgcaggagacacgaccggaggacaaaacagacaacagacacaagagaaggnagagcggaagaacgacgaggagncgcaggngaccaaggacaaagacgaaagagcaggacggagagcncggagaacgaaacaagacggaggggcgggagagacagcggacggggaaagcggagcaagacagcaangacgncgagggcacacgcgacaagaaggaccgagaagagagagaaggggaggaagagacgncggagngagcgagagganacgncaccacacgcgacagcgngacgagaggacgaagaacgngcagacgcggagaagaagacgagcacaaacgcacgcgcgccgacagcgagacgagngagacgagagagagaaggcacaagagacgaagcgagagacaggcacaagtctacacggca

SEQ ID NO: 22092 - DNA, 481 bp, Zea mays
  Coding DNA Sequence Number=SeqID_7689
tcatcgtccgctcgtaaggatactgatctgctcactccgcaagaacgttgacttcttgctaagctaccgatcggcggatgacgcccccatggattactatggcaagcgcctaactacatcctcctctcgataaaacaatactaagcattgctctacgcgcaacctcacaccatgagattgctacttatgacgcagaccacggcccactatgccaagtcacatgggctcatcccaatgttgatcccatgcttgcatcctgcaactaccacggccgagtgatcatctgtaaagaacgaaccaagactgatgaatgtgcactgctacacacctttgctgagcacaagtcctccgtgaattccatcgcgtgggcgcctcatgagctggatctatgcttgcgcttgagcttcatcagatgccaacatttcagtcttcactgctcgatctgatggaggatgcaataccacgcatattgatcacgcgc

SEQ ID NO: 22093 - DNA, 507 bp, Zea mays
  Coding DNA Sequence Number=SeqID_7690
gacccgcaccactgaaggaacgcaggatgaaaaccccgacgtcaacgtacacctcctcggcgaaaacaagacgcgacactgcgaggccgtccacaacagactgctcaagagcgaccaactctaccaatacatcctggacaccagcgcgtacccgggttatgcggactagaaggaacgagctgatgcgagatctgcgacaggcgcccatggaatcagaggaccacctccgccgactagggccagtacctcaacatgctcatcacgttcatcgttgcctggaacaccatggagatcggtgatgacaccgggtacgcgctcctcgccaccgagctcgaagtcccggaggacggaacgatcttggccatggacatcaaacgtgagaactactagctatgccttccctgcatcaactgggccggcgagagccacaagatcgacttccgcgagggccccgcgctccccgtcctggacgacctcgtggaggcacatgatgagcacgggtcgttc

SEQ ID NO: 22094 - DNA, 413 bp, Zea mays
  Coding DNA Sequence Number=SeqID_7691
ggaggattcaacctaccaggagcatactgcacctacacaactaatgcttgaacgacccatgtaacagcttctcatcttcgacgaaggacaaggataaacatccaaaaaccacactaaagatagagggagcagtcggtgtctacgccgaacgccgagcacgcccggggctccatcctcgttcagcgtagctctagccacacactgaccactactgctgcagctgcgaggatactgaggggccttttccttgcatgcttgcgcactaagctggctgcattgggaaaagtgcctctgaacgactaactgatgtgcagcctggagatcatggcattccttgctacccagcagaatgcaaagaatgcaagtgttgcaagacgcggaaagaccaacctctgcggtaaggcccgtagtga

SEQ ID NO: 22095 - DNA, 406 bp, Zea mays
  Coding DNA Sequence Number=SeqID_7692
tcaagcagctgtttgccaacgggcaggaatttacgtacagcctggaagatatcggccggtactaccgtacgtatgtcgagctgatgcagcattgggacgctgtgttgccgggaaaggtcctgcgcatgcaacacgaagtcgtggtggaagacctggagggcagtgtccgccagttgttggaattctgcggactgccgttcgaagccgcctgcctcgagttctggaagaccgagcgcaatgtgcgcaccgcgagctccgagcaggtgcggcggcccattttcaaggagggattggatcaatggcggcatttcgagccgtggctcgggccgctgaaagaggctctatcgtgagacgtgttgtggccgcgctcgcggcgtccgtgtgtattcatgtcgcgttcgctgct

SEQ ID NO: 22096 - DNA, 485 bp, Zea mays
  Coding DNA Sequence Number=SeqID_7693
gttgggatagatacttacctctcatagaattctcttacaacaatagttttcatgccagcataggaatggccccttatgaggctttgtatgggagaaagtgtaggtcacctctttgttggtttgaagaaggagaagcacagttactaggaccagatatagttcaacaaaccactagcaaaataaaagacatcagggaaaagctaaaagtagcccaagacagacaaaagagttatgctgatcggagaaggaaacctctggaattcaatgaaggggaacatgtgtttttaaaattgagccccactactggtgttggtcgaaccatgagaataaagaaactgagtccccgatttcttggacctttccaaattctcagaaagataggtccagtggcctatcaattggcattgcctcctcaattgtcaaaacttcatgatgtattccatgtatctcaactgagaaaatacatttctgactcttcacacatc

SEQ ID NO: 22097 - DNA, 530 bp, Zea mays
  misc_feature (55)..(56): n is a, c, g, or t
  misc_feature (298)..(299): n is a, c, g, or t
  misc_feature (415)..(417): n is a, c, g, or t
  Coding DNA Sequence Number=SeqID_7694
ggtgaaggacatgccggttctccaagacggtccaccaccgggtgggtttgcaccnnttcggttcgctcggcgaatccctaacaccggtccaagtgccatcgtctttttcctcaccactttcggcgctttctcttggggcatgtatcaggtcggccagggcaaccagaagcgaagggcactgaaggaagaaaaatatgccgcccgccgagccatactgcctgtgctacaggctgaagaggatgagagatttgttaaagagtggcataaatatcttgagtatgaggcagaagtgatgaannatgtgcctggttggaaagttggtgaaagcgtctatcactctgggagatggatgcccccagcaagtggggagttgcgtcctgaagtctggtgatgttatttcagtcatcactatctnnnattgttctgcttcctgcatgtctgaaataaagttgttcctggaacatctgtaattgctttgtggaattgtaaaacaggaatgctttttgaatttgtatttcatgttgaccagc

SEQ ID NO: 22098 - DNA, 583 bp, Zea mays
  misc_feature (510)..(512): n is a, c, g, or t
  Coding DNA Sequence Number=SeqID_7695
gattctgaatcacttggaccacatggtgtgtcctcagccaccattggtgtttcagcacttgcccaagatctctttcactttgacatcacctcccaggtccctgaaggacttggcaagcatgttgtgtcttctaagaaagctcaagctaactggtatagaaagttagcagttgcttggaaagaggcaaaaccccctcccaggacgcctgaagaaacatcaagacttgtcattcagaccttgaaaagacaccaaaaagcagatgttgagggattgttgactttctatggtcttcctctaccacacaccttagttgaagtagctgctaaaccccctacttccttgccagatggagtacaatttgaaatgcacaccttgccagttgatgcaaaagcagtggcagatggtgatactataacagtgtatgttagcacagcagaccgcagggaagcatcagttgtccctggaaatgtgcatgcagcagctgtgcaaagatcagaagcacgcgctagnnngaactatgcagaggcagatgcatttcacaaacagattattgattcaggatatcggatgcttgcttttcaaa

SEQ ID NO: 22099 - DNA, 594 bp, Zea mays
  misc_feature (469)..(469): n is a, c, g, or t
  misc_feature (533)..(534): n is a, c, g, or t
  misc_feature (542)..(542): n is a, c, g, or t
  misc_feature (544)..(546): n is a, c, g, or t
  Coding DNA Sequence Number=SeqID_7696
aaagcttcacgagaactctagggtttgtgattcgatcggattcgtgatcttgcggatttcgctcttgtttttgatcggtgattgtgattgtgatcgtgaaatagaatataagatgtttggtagggcaccgaagaaaagcgatgacacgaagtactatgaaatcctcggcgtttcgaagaacacttctccggatgatttgaaaaaggcttataaaaaagctgcgatcaagaatcatcctgataagggcggtgatcctgagaagttcaaagagctggcccaagcctatgaggttttgagtgatcccgaaaagcgtgagatatatgatcagtatggtgaagatgcactcaaggaaggaatgggtggaggtggtggtggccatgatccatttgatatcttccagtcattctttggtggaagtcctttctcatctggtggtggtggcagaggacggaggcagagacgtggagangatgtggttcaccccctgaaggtctctttggaggacctttaccttgggacgtctaagaaactcnntctttcangnnntgtcttgtgctctaaatgcaaaggaaaagggtcgaaatctggagcttc

SEQ ID NO: 22100 - DNA, 586 bp, Zea mays
  misc_feature (329)..(331): n is a, c, g, or t
  misc_feature (543)..(545): n is a, c, g, or t
  Coding DNA Sequence Number=SeqID_7697
aaacgcacgcagtttcagtcttgtgcggaagtgttgtctagttcgtgaatagattgttgctggttctaaaaagtagtggatattcaaaaaataaagaaagaagacacctgaattgctgtaagagaaaaatgcagaataaagaagcagtcttggaggatggggaaatcaagcctgtgactggtgcagagtctggatttgatgagtgggccaattttggggatgatgacataatgcagcagcaattttcaattcaggccgaggaagccaagaaagttccattcgtgggtgacaaggaaccactgagtagcttggctgctgaatatcaatcnnncagtcctatcttgctggagaaaataaaggtgcttgatggacaatatgctgccattcggcgtactcggggagatggaaactgcttctttcgaagctttatgttttcataccttgagcatattttggaatgtcaagaccaagcagaaatagatcgtatcaaagacaatattgaaaaaagtagaaaagcactgcagacattgggttatgcagagnnnacttttgaagatttttttgcgttattccttgagcagctgga

SEQ ID NO: 22101 - DNA, 394 bp, Zea mays
  Coding DNA Sequence Number=SeqID_7698
aagggctcgacaacctgcttgcgttcccgttcgatcacgatccgtcggtcgatgccttcgatccgcatgaaaagccggtgctcagtattccgaacctgtcgatcgagccgggcgagcgggtggcgatcctcggccgggtcggcgcgggaaaatccacgctgctgcggttgttcggcgggctcccgacgccggtgcaggggcgcatcctgttcaacgacacgccgatgccgctgatcgatgtcgccgatgtgcgtccccacgtcgggatgctgttgcaggaatcgagtctcttctacggcacgctgcgggagaacctgctgatcgcgaatccgctcgcgaccgacgacgcgatgctcgccgcgatcaaggtcgcgtgcgcggaccagttgctgct

SEQ ID NO: 22102 - DNA, 600 bp, Zea mays
  Coding DNA Sequence Number=SeqID_7699
atgcgcatgaatggcttatgtggagggccggctcatacgcagttggcccaccgaggagctcggatgaagaacgcacgcacacaacctacacggagatcagaaagataggcagggtgatctaaaagggctgggagcatgcctactagaaccccaacttcccctggtgggtccagggtgcaagaaggatctgcggatgagctcgagtggcagggccatcaatacattgtcaccgatgacaaagaaggacacaactgtgaactggataagcacgttggagacatgcatgttctgattaccaccccattccacccagattatgtcactgcagacaggataaagaaggagaagaatcttgagcttcttctcacggcaggaatcggctccgatcatagtgatcttccagtagatgctgctgcggggttaactgtggctgaggtcactggaagcaacactgtctctgtgggacaagatgagctcttgcgcattctggatctgctcaggaacttcttggctgggtaccaacaggtacttcaaggcgaatggaacgtagcaggcattgcccatagaggttatgatcttgaaggaaaaactggtgggact

SEQ ID NO: 22103 - DNA, 581 bp, Zea mays
  misc_feature (140)..(141): n is a, c, g, or t
  misc_feature (467)..(467): n is a, c, g, or t
  misc_feature (469)..(469): n is a, c, g, or t
  misc_feature (553)..(554): n is a, c, g, or t
  Coding DNA Sequence Number=SeqID_7700
atgggtctctccaaagaacacctccttgcacggttacaggagcttcagattgaattttctaagtacgagcatccagttgttttgactgttgaagctcaagcaaattatgttggacatttggggggtgggatcagtaaatnnttatttttgaaggacaagaaaaacagattttatattgtttctgctctagctgataccaaagtagacctcaaagtgttatcccagcggcttggtttgggaaaaggtggtgtgagaatggcccccgaagaggctttaagtgaaatacttcaggtatccttgggttgtgtcactccgtttgcagtggtgaatgaatcagcacgagatgtttcactgttattggatcaagggttcaagacacagaagcactgcatcttccatccactatcaaatgacatgtccatatctctaactgcacaagatcttgacaaatttcttaaatcaatagnangaaatcctgcgtatgttgatttggaggccaatccttcagtggggaaagatcaaccccccgacctagctgcactggttccatctnnttcagttattttacctgatcaaccaca

SEQ ID NO: 22104 - DNA, 491 bp, Zea mays
  misc_feature (464)..(466): n is a, c, g, or t
  Coding DNA Sequence Number=SeqID_7701
ggagcttcaccctttgcatggcagtgagttttttggcacgtgaagtatctgacctctgtctcgggaagcctccgttgaggtctctgtctgcgtccgccaccgtcgcggaggccttggccgtgctcaaaaactccggcgagagctccgtcagcgtgtggatctgcaaccactcgcgtggaatcgaaagcgaggaagtgggtcggtgtgaatgtgtcgggaaactgtgcatggttgatgttatttgtttcctttgcaaagaggaaaacctcttttctccttcttctgctctaaaagctcccatttctgaaattttaccaaaggttcctggtcttgttgtgcatctagaaccttcttctagcttattggaagccattgatcttataatccaaggagcacagaatcttgtggtgccaatattaccaacaaaaagaaatggtatttcaagaagaaaacagcttcagaannngtcagcaatcaacagccacaatggt

SEQ ID NO: 22105 - DNA, 574 bp, Zea mays
  misc_feature (67)..(68): n is a, c, g, or t
  Coding DNA Sequence Number=SeqID_7702
gtctatttgctcttacttccaatgtggtacattcccttgtgtagtcatatatgtttatgtgtttttnntgcctggattaggagctgctaggaaaggaatgaaggctatgtgcttgatgttgttgttgttgttggtggatagtgcattggggaattcagatgttgatgtactccttgaactcaagaagagtattcagaaagacccttctggattagttgttaattcttgggattcaaagtctttaggttcagatggatgtcctcagaactggtatgggatattgtgtagtgaaggcaatgttatatcaatcaatttggataatgctggtttagttggagagttcaatttccttgctattaatggccttacaatgctgcaaaacttgtcagtcgcgaacaaccagttcacaggaaatatctcacatattggtccaatgaaatcacttgaattttttgatttgtccctcaacaagtttaatgggccgttactctctaactttcttgaattgcgtaatttggtatatctgaatctttcttcaaatgaacttagtggtactcttccaattgggtttcaa

SEQ ID NO: 22106 - DNA, 533 bp, Zea mays
  Coding DNA Sequence Number=SeqID_7703
ggccttctcagacgtctgtagcgatgctctgctcgaagcccacgaggctgagatcgcccgcctcgagacactcaaggagcagcgtgcgcccacacttgagctgattgaaaagcatcgcagcatcctagctgacaagcaggcgctttccgcgtcaagtcaagatgcctctcgactgatgggccgaggaaataagggtgaaaagcgtgaccctggcaagctgctacgcgaggagaagatgcgtaagcgaattgcaaaggagttgcccaaggttgagagtgagttgagaaaggagctggagcactgggaagatgaattcggtcgacccttcttggtccatggcgagcgttatctcgacaacttaactccagttgtctccaagccacctcctcgctccaagactccctctgcacctccatctacgaccaagtccgttaccaactcaattaaacgtgatcctgtatctcgccccggaagttctctacgcggaccaccacctccccgatctgccacgaagaccccgaccagtggtgtgc

SEQ ID NO: 22107 - DNA, 471 bp, Zea mays
  misc_feature (169)..(171): n is a, c, g, or t
  misc_feature (426)..(428): n is a, c, g, or t
  misc_feature (430)..(430): n is a, c, g, or t
  misc_feature (432)..(436): n is a, c, g, or t
  Coding DNA Sequence Number=SeqID_7704
gagtggttagtgtgctactacgcgaaagaacagcctctcccatatcatcacgtttcagtacccgctctctctctctcaacaattcaagaagaaaatggttgacaacgattcactctcggaattcctcgcatctgctgtggacgctgctcagaaagctggtgagattttnnngaaaaggattctaccagacaaaacatgtagagcacaaaggacaggttgatttggtcactgaaactgataaagcatgtgaagaactcatctttaatcatctcaagcagctttaccctactcataagctcattggggaagaaaccacagctgcttgtggcgctacagaacttacggatgatcccacatggattgttgatcccctagatggaactactaactttgtgcatgggttccccttcgtttgtgtctccattnnncntnnnnngggaaagactcctactgcgggtgttgtgtccaatc

SEQ ID NO: 22108 - DNA, 385 bp, Zea mays
  Coding DNA Sequence Number=SeqID_7705
ggacagaacaaggagggtcagaccatcctctacctcgtcttcgagtacatggacaccgacctcaagaagctcatccgcgggcaccgccagaaccacgagaagatccccgcccacaccgtcaagatcttgatgtaccagctctgcaagggcgcggctttctgccacggacgaggtgtcctgcaccgtgacctctagccacacaacctgctcatggaccgcaagaccatggctctcaagatcgccgatcttgtgctcagtcgtgacttcacggctcctctcgagaagtacacacacgagatacttagtctgtggtacacagctccggaggtccttcttggagccacacactactcaacgccgtgtgacatgaggactgagagctgca

SEQ ID NO: 22109 - DNA, 484 bp, Zea mays
  Coding DNA Sequence Number=SeqID_7706
gtcttggattgtccccagaacttaacttttctgggaattatgaaagggggaacctttttatccaataaaagttccatttccctgagacccaaggggttcaaattttttggtccagtccagatcaccgtggaacctggccacaccgttcctgtttctggtgaagggtattaggaggtgggcatgggccagaagactccattgttttgcttggaaaagtgcagattgctggcaggttcattccatgcggtgtgatgtgggctactcctgatgagaaccttcatgagggtccaaagggaggatcaacatcaagagtgaattatcgcactagcaatgaggtggaacagaagctatatgctgcctcggaggagatacaattccttaggtcaaaactgacactcatggagagatatatcaatatacttcacatctcaatcttccgtaagccacttgatgaacgggcgctaacacgttcccttcaggaata

SEQ ID NO: 22110 - DNA, 554 bp, Zea mays
  Coding DNA Sequence Number=SeqID_7707
gtcctctcccagcttgagctgatatagatctccacccccaatgctgaccaccgcccgttcctgcgcctgctctccagctacaggcgcgatgactgcctcacactgcgtgcctcagctaccgaaaggtcctaggcggccctatcatgctaggacgtgataggctgacgaggaggaggctggaggatggatgcgctgtcgcaaataggactgcaaaagtatgcgaagcagagggctgtcagccgggtggagcgtggcagggcatcacacgcacacgggcacgaggcaagactgccatcgcccgcgtggagctccaggagggcaccggcacggtcttcatcaacttacgcgacgcttacgagtatgtgcagggaaatgcaatgtggatggagtactgcaaggtgcccttgatgactctagggtttgagaacaactatgacgggtttgtgaaagtacacgggggtggtctgtcaggccaggtccaggccatttgccttggtgttgcccatccgctggtgaagatcagcaatgccaacagggtttcctctgaagccgga

SEQ ID NO: 22111 - DNA, 373 bp, Zea mays
  misc_feature (133)..(136): n is a, c, g, or t
  misc_feature (181)..(182): n is a, c, g, or t
  Coding DNA Sequence Number=SeqID_7708
ggccacttcaccaagaaccctgaggagattggtgctggtgaccagggtcacatgtttgggtatgccactgatgaaacccctgaatacatgccattgagccatgtccttgcaaccaaactaggagctcgccttnnnnatgttaggaagaacggtacctgtgcttggctgagaccagatggtnntacacaagtaacagttgagtactacaatgagaatggtgctatggttccagttcatgtccacactgtcctcatttcaacccaacatgatgagactgtcagtaatgatcaaattgctgctgatcttaaggagcatgtcatcaagcctgtcattcctgaaaagtacttaaatgagaagaccatcttgcacctta

SEQ ID NO: 22112 - DNA, 326 bp, Zea mays
  Coding DNA Sequence Number=SeqID_7709
gtgttcctctgcaaccatggcggaagaggtggttttgttggatacatgggccagcatgtttggtatgagagttaggattgcattggctgaaaaggatgttaagtatgagtacaaggaagagaatcccagaaacaagagccctttttttctgcagatgaacccaattcacaagaagatcccagttctcatccataatggcaagcccatatgtgaatctgcaatcattgtgcagtacatagatgagatttggaaggacgaaactccaatcatgccctctgacccatatgagagagctcaagcaagattctgggttgattacattgaca

SEQ ID NO: 22113 - DNA, 380 bp, Zea mays
  misc_feature (150)..(152): n is a, c, g, or t
  misc_feature (329)..(331): n is a, c, g, or t
  Coding DNA Sequence Number=SeqID_7710
acctcacgggcctgcagaagtaatatttgagaatgtttgtgtgccagcgaaaaatatcatactgggtgaaggacgtggatttgagatcgctcaaggtaggctaggtcctggaaggctacaccattgtatgagactgattggtgctgctgnnntttttatgcatttgatggttcaaagagctgttagtagaagagcatttgggaaattgattgctcaacatggctcatttctttcagatatggccaagtgccgaatagagctagagaagaccagattgttggtgttggaagctgctgaccagcttgataggcttgggaacaaaaaagctnnngggatattagcaatggctaaggtatccgcacctaacatggccctaaagg

SEQ ID NO: 22114 - DNA, 542 bp, Zea mays
  misc_feature (155)..(157): n is a, c, g, or t
  misc_feature (441)..(441): n is a, c, g, or t
  misc_feature (443)..(444): n is a, c, g, or t
  misc_feature (512)..(512): n is a, c, g, or t
  Coding DNA Sequence Number=SeqID_7711
agctcacccgaaaccattcatttatcgtggctgctctgaaggaatcttcactgcttgttgttagtggtgatgagaaaagggttaagcggctcaatccgcttcatttcaatgaatttagagatcataagttatatacagttttggtagagaatttnnnggaggaccattcaaagaagaacattcagcaaatattccgtgaagctggaactataaagaggataatcattcatgacccgcattctactgtagagtctgcaaaacatgtcaagcaagaaaagtttatcagtaataagttacatgctctggtggaatacgaaactattgaggctgctgagaaagcagtggctatgttaaatgatgaacaagactggagaaagggcatgcgggttaaacttctcaagcaaacgggcaagtatggacacaaaaaacaagcttggaagntnnctaattctgagaagaatagctcaagccatgtatctgaaccatcctggggataaggaaaatcatggccncaaatgagcatcgtgaaaatgcacctgagg

SEQ ID NO: 22115 - DNA, 429 bp, Zea mays
  Coding DNA Sequence Number=SeqID_7712
ggttgaataccttggcaacccgagcctgatccacgcgcagagcattctggccatttgggggtgccaggtggtgctcatgggccccgtccagggggaccgcatccccggtggcccgctcggggaggtggttgaccccctgtaccccggcggcagatttgacccgcttggggttccccacgacccggaggggttttcggagctcaaggtcaaggagatcaaaaacggccccctccccaagttttccaagttcgggttttttgtgcaggccattgtccccggcaagggtcccgtttaaaaccttcccgacccccttgctgaccctgttaacaacaaagcctgggcctacggtaccaaatttgtccccggcaagtgagcgagggcaaaaacaaacttgtatgggtgtcccgtaaacaaacgtatttgtatatg

SEQ ID NO: 22116 - DNA, 469 bp, Zea mays
  misc_feature (384)..(386): n is a, c, g, or t
  Coding DNA Sequence Number=SeqID_7713
agattgttattattcctggtagttagaaaatactttctccttgaagctctaaatatttgcagaccatcatcggcagatggggtctgaaggtccttcagcagctgtaacaacagtttatttaacaggtttcaagaaattccatggagtttcagagaatccaacggatacaattgtcaataatttgactgagtatatgaagaagaagggtttaccaaaaggtttagttattgggagctgcaacattcttgagactgctggtcaagcagcacttattcccctttaccagacattgcaatctgctattagtgcgaaggattctgaatcttcaagttccaacagaattatctggctgcattttggggtcaacagtggtgcaacaaggtnnnctatagagcgtcaagctgtcaatgaggctaccttccgttgccctgatgaaatgggatggaagccccagaaagtccccattgtt

SEQ ID NO: 22117 - DNA, 404 bp, Zea mays
  misc_feature (137)..(137): n is a, c, g, or t
  misc_feature (139)..(142): n is a, c, g, or t
  misc_feature (268)..(268): n is a, c, g, or t
  Coding DNA Sequence Number=SeqID_7714
cgcctagccgctgagatttgaaaaaggccaagtttcaaagatgagtaagcttcagagtgatgctttaagagaagctatctcaggaatcatggctgattccaaggagaaaaaccgtaaatttgtggagactattgaantnnnnattgggctgaaaaactatgatccacagaaggataagcgtttttttggctctgtcaagttgccccacattcctcgccccaagatgaaaatccgcctgcttggtgatgcccagcatgttgaagaagcnaagaagataggactggactggatggatgttcgaagccttgaagaagctaaacaaaaataagaaattggtgaagaaacttgccaaaaagtaccatgcctttttagcttctgaagcagccatcaagcagattcctcgt

SEQ ID NO: 22118 - DNA, 359 bp, Zea mays
  misc_feature (135)..(140): n is a, c, g, or t
  misc_feature (221)..(221): n is a, c, g, or t
  misc_feature (263)..(264): n is a, c, g, or t
  Coding DNA Sequence Number=SeqID_7715
aagcaataactttttctctgccgccattgatttcgatcccaaacccacgacccttccttgattgaatgatcttgcttttccctctcacttcttcaatcggacggtttttctgggttgtagcaatgtcgactcctnnnnnnaagaggctgatgagagattttaagaggctgcaacaagacccacctgcaggaatcagtggtgcccctcaggataacaacatnatgttgtggaatgctgctatatttggtcctgatgatactccnngggatggaggcacgtttaagttgactctccaatttactgaggattatccaaacaagccacccactgtacgatttgtctctcgaatgtttcaccca

SEQ ID NO: 22119 - DNA, 532 bp, Zea mays
  Coding DNA Sequence Number=SeqID_7716
cacttcatattattgtttcccgtcattcatctcatcgcccctcacaggtgtgctttctctcctcgcgcgtccttctccctgatcctcctttgagttcatggctcatgacaatgtggagggccgccgctaggcagttggaccagcgtgcgctcgtctcaaggtgcgcgcacacctctacaggcagcaaaaatatagtcaggatgttctacaacgccggcgagtatgccgacgagaaccccaacttcgacagctgcgtagagggtgaactcggcatccacgcttgtgtcgagtcgcagggacatcaatacattgtcaccgatgacgaggaaggccccaactgtgaactgcagaagcacattgaagacatgcatgtcctgattaccaccacattccacccagcttatgttgctgtagagaggataaagaatgtgaataatcttgagcttcttctcacagcagggatcggctccgatcatattgatcttccagcagatgctgctgcgggcttaactgaggctgacgacactggaag

SEQ ID NO: 22120 - DNA, 240 bp, Zea mays
  Coding DNA Sequence Number=SeqID_7717
gcacagcggccctggcctgtgtcttcctgggggtcaccgtggaacgatttggccgccggggcatcctgcttctctacgagacactcactggcattgcatccctggccctgctgggcctgtgggattatctgaacgaggctgccatcaccaccttctctgtccttgggcttttctcctcccaagctgccggcatccttagcaccctccttgctgccgaagtcatccctaccacggtccggg

SEQ ID NO: 22121 - DNA, 508 bp, Zea mays
  Coding DNA Sequence Number=SeqID_7718
cagatcagccgcgagcagggtaaacgtcgcatcgtcgtcactgccaacgtgcgcgggcgcgatctcggttcgttcgtcgccgacgcggagcagcaaatcgaggccaaggtcaagctgccggccggctactggatcggatggggtggccagttcgaacaactggtttcggcgacgcagcggctgactatcgtggtgccgatcgcgctgctactgatcttcctcctgctgttcatgagcttgggctcgatggcagacgctctgctggtgtttagcggggtcccgctggccctcaccggtggcatcattgcgttgctgttgcgcggcattccactgtcgatcagcgccggaatcggtttcatcgcactgtccggcgtcgcggtgctcaacggcctcgtcatcatcacgttcatagagcgcctccgcagggaaggacacgcccttgtggatgcggtgcgtgagggcgcgctgacccggctgcggcccgtcctgatgactgcgcttgtcgctt

SEQ ID NO: 22122 - DNA, 511 bp, Zea mays
  Coding DNA Sequence Number=SeqID_7719
ggccaatgggcttgtcgctcgcgatcgatctcgcgcagcgcggccagcgcgtggtgctgctcgacgatgccgaccggatcggcgaaggctcgcgcgcgatctgcttctcgaagcgctcgctggagttctgggatcgcctcggcgtcggcgaccgcatggtcgagaagggcgtggtgtggagcgtcggcaagatctttcacggcgcctcgcaactctaccagttcaatttgcttcccgaggaaggccacaagcggccagccttcatcaacctgcagcaattctacgccgaggcctatctggtcgaccgcgtcgagcaattgcccgagatcgatctgcgctggcgcaacaaggtgatcgcgctggagagccgcaacgacggcgtcgcgctgaccatcgcaacgcctgaaggctcctaccaggtgcatgcttcgttcgtcgtcgcctgcgacggcgcgcgttcgtcgctgcggcagatggtcggcgctgagttcgcaggccaggtgttcctgca

SEQ ID NO: 22123 - DNA, 526 bp, Zea mays
  misc_feature (482)..(482): n is a, c, g, or t
  Coding DNA Sequence Number=SeqID_7720
gcgcgtacgactggaagggctacatccccttcgaggagctgccggtctcgtacaacccgcccgaggggtacatcgtcacggcgaacaacgcgatcgtcggcgatgactacgagcacttcctctcgcgcgactgggactacggctaccgtgccgcccgcatcgcccacctcatcgagcgcaaggcggccgcggcgccgctcgtcgcgcaggatctgcgcgacatccagatggacgagcagatgtggatcggcaagcagttggccgtggcgatggacgccgtggccgtcgacggcaaggggccgaaggcggccgtcgacctgctgcgcacctgggacgcgcaggacgcccccgactcggccgccgccgcgtacgcgaacgtgctgtggtcgaacctcgtgcacaacgtcttcctcgaccgcgaggtgccgctgccggtcggcgatcagggccgcctgttcaccgtggtcggccgatgcttcgancggtacacgtccgacccgctgtggagcaacgaccgcatcgacgt

SEQ ID NO: 22124 - DNA, 566 bp, Zea mays
  misc_feature (26)..(27): n is a, c, g, or t
  misc_feature (29)..(31): n is a, c, g, or t
  misc_feature (36)..(36): n is a, c, g, or t
  misc_feature (38)..(39): n is a, c, g, or t
  misc_feature (59)..(61): n is a, c, g, or t
  Coding DNA Sequence Number=SeqID_7721
agtgactggcatgggagtttatctanntnnnaagcngnnagaatcattcatatcaacannnatatcctttcaagctgtatttaaaagcctatctgtttcaaacaaaaaaatcaacacagagccgagggcgcttgtcaaaaacttcgggcaagggaactcaaatgttgaaattcaatcttgtacagtgttcggtatatgtattgggggagaccggattggaaaatacagttgttccagatcccaagcgagttaattatggttcacagggtggtagagttataataaatgtgtcagcagatgggaccccacgcaatgcaaacatagtgtcaactgtttccaatgagtaccagaagttaaagtactgtatatctcttgaaatctttcattttaagattagtgtgaacaaggagaaacaatctaaacaaatagaacttgaaagggccagatctatctatcaggaatatatgcaggaaaataggcctgtaacaaaggtcgcattatttgatatgcagaatactaaatttgtacaacgcttaggtggcattagagagaatgcagcctgttct

SEQ ID NO: 22125 - DNA, 508 bp, Zea mays
  Coding DNA Sequence Number=SeqID_7722
atttgctcttgacccatcagagaagcaagtcggggatgatttaattgcattgcttcagcaggggagaaagtttaacgactttaatgacggtaatgaacttgaatgttttcatctggctgctactagactcggaatcacatcttcaagagcagctcttactgaaagaagagctctcaagaaactcatagaaagggctcgggctgaggaagacaagcggaaggaatcaattattgcatatcttttacaccttatgcggaaatactccaagttatttagaagtgagttctctgatgataatgattctcagggttctcaaccttgttctcccactctaagattgcttgaggacggtgttcctggtagtcattgtcaagcctttgacagacagctttcaaaacttagttcctttaattttaagccaaacaataggaaatcagggcagatgctccttccacctgaagagttaaggtgtccaatatctctgcaacttatgagtgatcctgttata

SEQ ID NO: 22126 - DNA, 420 bp, Zea mays
  Coding DNA Sequence Number=SeqID_7723
cgtttatgaggacttcgcacactacaagtcaggagtgtacaagcacatcacaggtggcgtgatgggaggtcacgccgtcaagttgattggttggggaaccagtgatgctggcgaggattactggcttcttgcaaatcagtggaacagaggctggggtgatgacgggtacttcaagatcataaggggcaagaatgaatgtggcatcgaagaagatgttactgccggtatgccctcgacaaagaacacggccagaaacaatgatgtcgcctttggaacggccatactttgagcagcgccctggttacaaacacggttgaagttagctgtttgcatgtcaaatgaagccagtaaattagctttgatggttccaggatactgtattatgtacactagcgcaaacgctgatatgttgctgaaaca

SEQ ID NO: 22127 - DNA, 389 bp, Zea mays
  Coding DNA Sequence Number=SeqID_7724
accgcggcgaggtgcgttgtgttcgggctgttctgcgtaacgcggttccgggacctggaggacagagccaacgtgtgctcctcgtacaagcaggggcacgtctcgatggtcgtgaactccaccgccgggagcgccccgggtccgcctccgcctccgcctccggctggcgcgatcgccccgccgataccgacggaggagggaggtgagaagaaggggggctcgggctcggcggcgtggaaggtcgccgtcgccgtggttgcaggtgcggccgccttggggctggtgggcgcgctggtgctgtgcttggtgcggtacaggagggacaagaagcttgaggccatggagcggaacgcggaggccggggaggcgttgcgggtggcgcgcgtcgg

SEQ ID NO: 22128 - DNA, 462 bp, Zea mays
  Coding DNA Sequence Number=SeqID_7725
atgagctgggacgatctcgacgacagccattacagctggccggacgtggccgaggtgcgcgactaccgcggtaaagtgaaaaccgtggtaagtgaattcatccgcaccatgccgctggagctgccgattgactgggacagcccggcgtgggtgattctgatgggcattgagcatgagcgtattcacctcgaaacctccagcgtgctgatccgccagctgccgcttgagtgggttaaaccgcagccgcactggccggcgtgtccgcaggcgcgccacgatcgtgcctcggtaccggccaatacattggtggcgatgccaggcggacgcgtcacgcagggtaaaaccgatgatacctacggctgggataatgaatacggcagccttacaactgagctgaaaccgttcaaagccagcaaaatgctggtgagcaacgccgagttctttcattttattgccgccaac

SEQ ID NO: 22129 - DNA, 411 bp, Zea mays
  Coding DNA Sequence Number=SeqID_7726
cttcccggagaaccaccgtgaagagatggatgccggagctactttcgtccttcagtcaaaaggtaactctgtgatatctaaccaacacgcacacacattgtgtggttgtgatgatggttttatgatgttgtacattttttatttatggtttaggtcaatggtggcatgccggtttccatttatcaacggcgattgttggtccaacaatactgacattgccgtatgcattcagagggttggggtgggagcttgggctcttctgtctcacggtgatgggggtggtcaccttttatgcctattacctcatgtccaaggtgcttgaacattgtgaaagagcaggtcgccgccacatccgtttccgggaacttgctgccgacgttttaggtgaatgctatttatttactctcggaa

SEQ ID NO: 22130 - DNA, 145 bp, Zea mays
  misc_feature (31)..(31): n is a, c, g, or t
  misc_feature (45)..(45): n is a, c, g, or t
  misc_feature (54)..(54): n is a, c, g, or t
  misc_feature (91)..(91): n is a, c, g, or t
  misc_feature (99)..(99): n is a, c, g, or t
  misc_feature (109)..(109): n is a, c, g, or t
  misc_feature (112)..(112): n is a, c, g, or t
  Coding DNA Sequence Number=SeqID_7727
atgacaccgggcacgtttttgatggcccccntgttttgatgagcngatttccgnagtgcgttatctaccgcctgatcccgcgagactgacncatcctgntgcgactctntcnagtttctgcttaggtccgataaactgtctgatg

SEQ ID NO: 22131 - DNA, 259 bp, Zea mays
  Coding DNA Sequence Number=SeqID_7728
cagaccagaggagccttcggtgtaaacctaattccctttcacacaccccgcgggagtctcatttcacctctctcaagcgggtcctgcgctacctctgggggttcctcgactacgacctcctacttcgaccattcccgacgtcagaactcgagggctacaccgacgccgactgggctggctgttcagacacgcctcgatccacctacggttacttcgtgttcttgggcgccaacctcgtcacctggaccgccaagcggca

SEQ ID NO: 22132 - DNA, 444 bp, Zea mays
  Coding DNA Sequence Number=SeqID_7729
gtaacacatcctactggccttaatagagcgcggtggtcatacctaacctgcgctggatcatatgtgaaggataacagggacccaatcatatgcgcatctgtctcatcttatgaaaggagatctgacacatggatactcatgaaccatatccttttgtgcccttcaatgactgttagcggcggcataaatgttccagtgatgcggaccccggtctgtgctaatgctactgctgagaaaggaggcaagaacttcatgatcgattatcatgatgggtcggcggttcagctgctgttgcgaatactgatgctgctgccatcgagcgtgtgaagctgcttattcagaaccaagatgagatgattaactctggtaggctatcagagccgaacaaggggattgatgactgctttaaacgtaccattaatgatgatggtgtctcttccttgg

SEQ ID NO: 22133 - DNA, 549 bp, Zea mays
  misc_feature (351)..(351): n is a, c, g, or t
  misc_feature (366)..(366): n is a, c, g, or t
  misc_feature (379)..(379): n is a, c, g, or t
  Coding DNA Sequence Number=SeqID_7730
ctacacgccgaagcgcgagatcaaatcgcgcgacgagctcggcttcctcacgcagtcgttcaacgcgatgacgcgccagctgtccgaggcgcggctcgcagtcgagaagaaccggatcgcgctcgaacattcgaagacgtatctcgaaagtatcctcgcgaacctcaccgcgggcgtgttcgtgctcgaccgccagttccggctgacgacggccaaccgcggcgccgaacgcatcttccggcagccgttcggttcgatgatcggcacggcgctcgaccggatcggcgtcgtcgcggagttcggcgcgatggtgcgcaaggcgttcgccgatcgcgaagcggcgtccgacgncggcagcggcgatcncggccactggcancagcagtttgcgatcgaagtgcccggcgaagccgatccgctgacgctgctcgtgcgcggcacgcgcctcgtgtcgacggtcgaaggcgaggccgacgatccgcagacgtccggctatgtcgtcgtgttcgacgacatctccgacgtgatttccgcgcagcgttcggtcgc

SEQ ID NO: 22134 - DNA, 480 bp, Zea mays
  Coding DNA Sequence Number=SeqID_7731
atgtccgatgccgtcacaaacttgcctcccgataatctagtggcattagacctgtctgaaaactttataacaggtgaggttccttccagtctggggcttctgttcaagaagctattcttcgtccaactcgccaacaatgctcttaccggaagtatcccaccaaacctgaaaaacgccagccagctaaaattcctcaatcttgcaaacaacaacctgacaggaagcattcctagtgagctcggggagctctcgagtatgctatacttatttctcggtgggaatatgttgtcaggtggaatcccgggcaccctcttcaacatgtcttctctcgcgatactagacgttgctgtgaacatgctaggcggcgtcatggagttcccgccttatattagattctcccctattctttcggcgatcaatatgtctcaaaacctattcgagggggatattccacctgccttgggcaatgcttcaaaccta

SEQ ID NO: 22135 - DNA, 317 bp, Zea mays
  Coding DNA Sequence Number=SeqID_7732
gccgatggccgtgtcgacgatgaaaaagggtgcgatggactttatcgagaaaccgttcgacgaggccgagctgcgcaagctcgtcgagcggatgctcgacaaggcccgaagcgagagcaagagcgtccaggaacagcgcgccgcgagcgaacggctgtcgaagctgaccgcgcgcgagcagcaggtgctcgagcgcatcatcgccggccgcctgaacaagcagatcgccgacgatctcgggatcagcatcaagacggtcgaagcgcaccgcgcgaacatcatggaaaagctcaacgtcaacacggttgccgatctgc

SEQ ID NO: 22136 - DNA, 586 bp, Zea mays
  Coding DNA Sequence Number=SeqID_7733
ggattctgaggatgtccgtcctaacgacgccgagctactaaaggaacaagccgacatatggggtgtcactctctcctacctcactcccctgacactgaagtgcgccgaggagcttgctatccctacggcaatctaccgccatggcggggctgcctcacatcgctgagctggtcacgcgctgtctctcccctccactaagctgccgatcctccgccgtctgctgtggttcctcgccgcgatgggcgggctcagcgtcgaccaacacagctcgaaggaagatcggtaccacatcaatcccgagtcctacctcctggaggacggaatacctcacgaggaccacatgaaccacagcgtgtctgtggctcacctgcacctcgactatctacatcaaggatatgatagatgtgtacccagagatcaagagggacgaggtcacgacaccgctcgaggagctgcacgtggcgactctgttccacgatagcatggcgagcctcgacacagatttccacgacatggccagcgaggacttggacgcccacgacaacttcggcatcgagatagctatgcgggagatcatggacttgct

SEQ ID NO: 22137 - DNA, 404 bp, Zea mays
  Coding DNA Sequence Number=SeqID_7734
gggctacagctgttaccgctgatgggcgggctgctggtcacctcgatcattagcggtcgcatgattagccgcagcgggaaataccgtttgttccccatcgccgggacgctactggccacaaccgggatggcgctgatgaccacgctgacactggatgcgccgctctggcacatttatctgttctccagcgtgctcggcatgggaatgggcatgactatgcaggtgctggtgctggcggtgcaaaatgcggtgacgcccgatcgcatcggcgtagcgacctcatcggttacgctgtttcgctcggtgggcggttcgatcggcgttgcgctgtttggcgctgtgttcagtcacgtgctgaaatccggagcgacccgactgatagagcagggtaacgtgctgccgcc

SEQ ID NO: 22138 - DNA, 477 bp, Zea mays
  misc_feature (421)..(421): n is a, c, g, or t
  Coding DNA Sequence Number=SeqID_7735
ttgagtgtgaaatcgtcgccttcccgcagcacggtttgctgctgtcgaaatctgaacctttaatgcgtgaagcgatgcaggcgggggcgcattacgtcggcggcctggacccgaccagtgttgatggcgcgatggaaaaatccctcgacaccatgttccagattgcgctggactacgacaaaggcgtcgatattcacctgcacgaaaccactccggcaggcgtggcagccatcaattatatggttgaaacggtagagaaaacgccacagctgaagggcaagctgaccatcagtcacgcctttgcgctggcaacgctcaacgagcaacaggtagatgaactgcgaaccggatggtggtgcaacaaatttctatcgctcacggtgccgattgcacctgatatccgtcaaacagtgcacacaangcgtaaaagtgatactgcactgcagcgtatcaccatgtcgcttatggctggcacat

SEQ ID NO: 22139 - DNA, 387 bp, Zea mays
  Coding DNA Sequence Number=SeqID_7736
ggagagtaacgcagcatactgtgaagcggtaaggaggaagagagaggtaagggtgaagaagaggagaaggaggaagaaccaaaccaggagagggggcggaggagggagagtgagggggagtacgacgaagaagcagagaataagagaggagagagagagagaggaagagaacgaaacggagaaagaagaggaggaagacatgaaaaaagggccagcggcgtagaggacagaagagaggggacagcactagggggatgagggagaggtaggaggggagaggaacgagagcagagcgaggagggaggcggaaaggtggaataattagggaggcagcgcagtgtggagtgtggagaagagaaagccagagagaacgaggatggagcataa

SEQ ID NO: 22140 - DNA, 577 bp, Zea mays
  Coding DNA Sequence Number=SeqID_7737
tgactactgagtagagccgccgcttcgttcttgtcgagagcacaatagaggaaatggcgttgagcgagggcgtgatcctgtggatggagaaccccctcctcgacatctccgcggttgtcgatgacgccttcctggcaaactatgacatcaagctgaacaatgccattctcggtgaggagaagcacttgcctatgtatgatgacctggctaactacagctgtgatgaatatattgctggaggagacacccaaaactctatcagggatggccaatggatgcttcataactcctggtgtcaacaagtgtacctgagatgtattgtgaagctccagcgaggtgatgagatgaaaaaaaatgctcaagctgcaggacgtactgctcatgaccatgacgatgatactgctcctactggcacttgtgctgcatgtgaagctgatggtgataggccattagattgtaatctgcctgcggtaatgtgatacaaatctgaggatctcaagagaccagataactgattactagctgagaaggcaaaatacatctacattggtggattcctgctcacggtgtcacctga

SEQ ID NO: 22141 - DNA, 533 bp, Zea mays
  misc_feature (111)..(111): n is a, c, g, or t
  misc_feature (189)..(189): n is a, c, g, or t
  misc_feature (229)..(229): n is a, c, g, or t
  misc_feature (236)..(236): n is a, c, g, or t
  misc_feature (314)..(314): n is a, c, g, or t
  misc_feature (417)..(417): n is a, c, g, or t
  misc_feature (428)..(428): n is a, c, g, or t
  misc_feature (430)..(430): n is a, c, g, or t
  Coding DNA Sequence Number=SeqID_7738
aagcgaacgacggagaaaggccagagaacgagctgtaagcgagaaacgaaacgaggaacacaggcgtgaggaagggacgagcggagtacgaggagagagagaacagaacangagggagaggaaggagaaggagtgacagcagacgtagataggtatagacgacacggagatgaagagagcgagatgtanaggtagagaatgtataacgcagtgagaagaaggagggtancggagancaggcgagagtgagggaacgaggcgagaagaggaggaggaaggagggagcacgtagattaggagatagaacatatagnggatagtgacacaaaggagagggcgtgcgagacgtagctagaacaacaaggacgcgagcagatcggagcacagtgaagtagcgcataaggaatcaggagttanagacatagagngnagagggtatgggagctcacgcggagcgcaatgaggagagcgagagagagtatgtaggtagtgcgatggagcgcgatacaatcgtcacggagataggcgagcga

SEQ ID NO: 22142 - DNA, 563 bp, Zea mays
  Coding DNA Sequence Number=SeqID_7739
aggagagctgcgacccggtcatgctccgcctcgcggggcactccgcggggacgctcgacgcggcctcgaggaccggcgtgccattcggcacggtgaagcatcaggaggaagtggctcacggtgctaacgcggggcaggacatcgcggcgcgagctgctcgagcccatcgaggattagttcccaagcctctcttacgacgatgtctaccagctcgcgggagctgtggccgaggaggtcaccggagggcctgagattgccttccaccccgggagggaggacaagcctcagaccccacctgagggacgccttcctgatgccactatagggtctgaccagctgaggcaagcttttgggaagcagatgggcttgagcgatcaggacattggtgccctctctggcgcgcacaccttgggaaggagccacagagagcgatgtggtatcaagggggcctggactacgaaccctttgagctttgacaactcttacttcaaggaacttctgagtgatgataaggacgcgcttcttcagctcccaagtgacaaagtcctgctgagcgacgctga

SEQ ID NO: 22143 - DNA, 553 bp, Zea mays
  Coding DNA Sequence Number=SeqID_7740
tctgctaaccgtcagaggcgagagaggccgcggcagtcaaggagcacttaaaggactatctgtacggcacgaaaagctgcctgcgggcgtccagagagtcgcggaccaaagtgctgcagctcatcacgcaactcgagacgctcaaccccacgccggctcctacggaggtgcttacgctcctcaacgggaagtggatcctcgcgtacacgatcattttcccacctattcccactattgaggatggtgaatctgcctcatgctgctgaaggtgcaggaaatatcacaaaccattgattctgagaacttcacagtgcaaaactgtatcaagatttcacgaccgttgtctacgacctcagttgccactagtgctgaatttgaaattatagagtcccaagcgtcgtgcagatcgaaatttgatgaaaggactgttgacacaccacagtagaccgactccattgtgctaccacagaagtttgagttatgtggacagaacatcaacctgagtccactgaaaggtatattatcttccatcaaaaatgcagcgtcctcgggt

SEQ ID NO: 22144 - DNA, 526 bp, Zea mays
  Coding DNA Sequence Number=SeqID_7741
gtggacccacacaacacggcgcgtgccgatgtggccgctggcccggggtcctgcgacgacaccgacgccgcatacgcccagagataaccggtgcaacgccagggcgattgccagctgatccactccggtggcccctacgcggaaaacctcttctgggcatccgccgtggcccattgtgcggggtctcacgtcggggtttcctgagtggctcagaagcagtactacgaccacgacaccaaccgttgggcgtaggggcaggtgtgcgaccactacacgcgaggggacgggactcgattccaccgccatcgcttgtgcccgcgtagactgcgataacaatgtgggcgtgttcatcatctgtagttacaacccgccgaggaatagtcgtcggcgagagccctactagactgtcatgcatactacaattatatatatatacgcttaatattaacttcagcatgcatgcatattataaaatagtgttggcaactctgtatatcattatattacgatgactgatattgctgat

SEQ ID NO: 22145 - DNA, 571 bp, Zea mays
  Coding DNA Sequence Number=SeqID_7742
gatggcatagatcctgactcttgtgaggatatgttgatagaggactgttacataagtgtgggagatgatgcaattgcaataaatagtggctgggatcagtatggaattgcttatggaaagccttccatgaatataatgatccgaaaccttgttgttcgatctatggtcagtgctggcatctcaataggcagcgagatgtctggtggggtatccaatgtcactgtggagaatcttcttgtatgggattcaaggcgtgctgtaaggatcaaaactgcacctggaagaggtggatatgttcgccaaataacttatcggaatctaacatttgagaatgtccgtgttggaattgttatgaagacagattacaatgaacaccctgatgatggatatgaccctactgcacttccaataatcagagacatcagcttcaccactgtccatggccacggagttcgtgtaccggtacgtattcatggtagtgaagagatctctgtcagaaatgtaacttttcgtgatatgtcagttgggttaacctacaagaagaagcatatctttcagtgtgcctttgttg

SEQ ID NO: 22146 - DNA, 566 bp, Zea mays
  Coding DNA Sequence Number=SeqID_7743
agacgggtgatcttctaaattgaattttcaatcccatctcttccttatcttaatttgtaccaaccaaccactgcacagttgtatagtacatagtatcattgattgatcatgtgtgacaacaagggtaatagcgagggtcactcgactttgctccttggcaagtacgagctgggccgcgtgctgggtcatggaactttcgcgaaggtgtatcacgcgaggaacttgcagacggggaaaaacgtggcgatgaaggtggtgggaaaggagaaggtaataaaggtagggatgatggagcagataaagagggagatcgcggtgatgaagatggtgaagcatcccaacatagtggagctccacgaggtaatggccaccaaatccaagatctacatcgccatggagctggttcgcggcggagaactcttcaacaaggtcgccaagggccgactgaaggaagacatcgccagagtctactttcagcagttgatctccgccatcgatttcttccacagccgcggcgtttaccaccgcgacctcaggcccgagaacctgcttctcgacgaacacgg

SEQ ID NO: 22147 - DNA, 494 bp, Zea mays
  Coding DNA Sequence Number=SeqID_7744
agccacatcgacacaaacctaggacttcaaccaactcagaatccttcatatttttcccattgtaactatatataatattttttatgccgataaaagatgccgcctaagcagaaatcaaaagctgatgtagcaaagaagcagaaggttgtagaagacaaaaccttcggtctcaagaacaaaaacaaaagcaaacaggtccagaaatatgtccaaaacctccaacaatccgtgcaacccagacccgatgcttccaaagtcgatgccaagaaaaggaaggaggaggagaaggccaaggacaaggagctaaatgatttgttcaaaattgctgttagtcagcctaaagtgccagttggtgttgatcccaagtccatattatgtgagttttttaaagtggggcagtgtgccaagggcttcaaatgcaagttctcacatgatttgaatgttcagaggaaaggggagaagattgatatatacagtgataagcgtgaccagga

SEQ ID NO: 22148 - DNA, 591 bp, Zea mays
  Coding DNA Sequence Number=SeqID_7745
aaattccgggcatgaacgtcgccgttctgcgccgccgggcttcatgggcctccggaataggcggtgtttcggtggccggcaccgccatgtggcgttgctctccggctaagtgcatgagcatttctactgatacaaggatcagggaagctgttcagactgagaaggctccagcggcattggggccatattctcaagcgatcaaaaccaatgaccttctgtttgtgtcgggtgttcttggtcttgttcctgagacagggaagttcatctctgataatgttgaagatcagacagagcagcttctcagaaatatgggggagatcctaaaagctgggggtgccagctactcatcagttgttaagacaacaattctgttggctgacttgaaggacttcaagcaagttaatgagatctatgctaaatactttccttcacctgccccggctcgttcaacatatcaagtagctgccttgccattggatgccaagattgaaattgagtgcatagcagcactgtgagcaccacttctagtggtatacatggctagtgaacccactgagaaggactctaattctcagattctttctcaaggta

SEQ ID NO: 22149 - DNA, 562 bp, Zea mays
  misc_feature (527)..(529): n is a, c, g, or t
  Coding DNA Sequence Number=SeqID_7746
gatgagctcattgctaatgctgcatacattggcacccctggcaagggtattcttgctgctgatgagtcaacaggaacaattggtaagcgtctagccagcatcaaagtagagaatgttgaatccaacaggcgtgcccttcgtgagctccttttcaccgctcctggagctctccaatatctcagtggagttatcctttttgaggaaaccctttaccagagcacagctgcaggcaagccttttgttgatgttttgaaggaagctggtgtgcttcctggtatcaaggttgacaagggcactgttgaacttgctggaactaatggagaaaccaccactcagggtctagatggccttgctcagcgttgccagaagtactatgaagctggtgcacgctttgccaaatggcgtgctgtgcttaaaattggtcccaacgagccatctcagttggctatcaatgagaatgcctatggtttggctagatatgctgtcatatgccaggagaatggtttggttcctattgttgaacctgnnntccttgttgatggacctcatgatattcacaagt

SEQ ID NO: 22150 - DNA, 477 bp, Zea mays
  misc_feature (315)..(316): n is a, c, g, or t
  misc_feature (339)..(339): n is a, c, g, or t
  misc_feature (426)..(427): n is a, c, g, or t
  misc_feature (452)..(452): n is a, c, g, or t
  Coding DNA Sequence Number=SeqID_7747
gatgataccgcctatgcttgagagcttccataaaggtcagctcggtcgtgttggtgtcattggtggcagtgaggattacacaggtgcaccatacttctctggtatggcttcagcaaggcttggttgtgatatgtcccacgtgatctgtgaacccggcgctgccgcagtcatcaagacatactctcccaacctgatggttcacccatacatgcgttcctccaagcacttagacgacaaagacacccaagactctgtcagcgaaatggtcatcagcatgctttcccgtctacacgtccttgttattggccctggtcnnggtcgcgatgaagccatgcaagngacttgcgctcgcgtgatcaaggaagccaggaagcttaatttgccctttgtgctcgacgctgatgggttgttcattgcccagactannccagagcttgtggagggatacaagnagtgcattctcacacctaacgttgt

SEQ ID NO: 22151 - DNA, 485 bp, Zea mays
  misc_feature (403)..(404): n is a, c, g, or t
  Coding DNA Sequence Number=SeqID_7748
atagctgggatgtcatgtgctcacactcttaccttagctggttgggaagtccttgtgcttgagaaaaccacctcacctccaactgggagtcccactggtgcaggtctcggactcaaccctctctctctaagaatcattcagtcatggcttccacaaccacaactcctacacaacaccactgtgccactaactattgaccagaaccaagcaactaatagtgagaagaatgttagctgtacattgacaagagatgagagtttcaacttcaaagcagcacattgggctgatcttcatggccttctgtacgatgcactgccaccatatgtatttttatggggtcacctttctctctctttccatgttgcagatgacaagggttctgtcatgataaaggctaaagttnnaaaaactggtgaggtcattgagatagtaggagatttgcttgttgcagcagatggttgtctctcttcatccgccagaaatat

SEQ ID NO: 22152 - DNA, 538 bp, Zea mays
  Coding DNA Sequence Number=SeqID_7749
gatccattctccaacgtagcgaaccagacatggctgaccggctaatatgtcgtggcaggcgtacgtggacgagcacctggatgtgcgagatcgagggtcaccacctcgtggagggggtcatgcgtcccgcatcacgagtgccgcctgggcgcacagcaccgcgttccccgagttcaagaccgacgacatggccaacatcatgaaggacttcgacaagccagggcacctcgcgcctacaggcctgttcctcggacctaccaatcacatgtgcatccaatgcgagcctggcgtcttcatccccggtcataaaggatcacgaggcatcacctggaataacacaagacaagcactcgtgggtggcatctacgacgaggctatgacgcctgggcactgcaacatggtggtggaaatgctgggcgactacctgcttgaacagggcatgtaactactacactaccatctggaatggatgtcgacaactatggtttctacgatcgacctcctgtaatagtaacaacagatgttagggcttcctccc

SEQ ID NO: 22153 - DNA, 597 bp, Zea mays
  Coding DNA Sequence Number=SeqID_7750
gcaggcgctgtttcgcgttattgaacgtatgcgtcagcaggggatcgcactgatctacgtttctcactatctcgatgaaatccaggcgctgtgccagcgggttacggtgctgcgcgatggtaaagacgtcgcgcattttaccggcgacgccctttctccgcaggcgctgattaatgccatgatcggtgagacgcagcaggcgattgcaccgcgcggtctgccacctgacggcgagccggtgctgaccgtagacgccctgagcgcgccgggtcgctttcacaatgtttgtttcagcgcacgacgtggcgagatcgttggcattaccggcctgctgggctccggagggaaggcgttaatcagcgcactgtttggtctggaacgtggcgtgagcgggacgctgcgcgtaggtgagacgcacggcgtaccggcttcgccacatgccgcggtgaaacgtggcatcgcgctggtgccggaagatcgccgggccaacggcatcgcgctcgatgtgagcctgcgcgacaacataaccctgacaaccgggcaacgcctgctgcgctggggcggcgtatttcgcaaccgccgagaccgtgctagtgg

SEQ ID NO: 22154 - DNA, 275 bp, Zea mays
  misc_feature (85)..(86): n is a, c, g, or t
  misc_feature (185)..(186): n is a, c, g, or t
  misc_feature (188)..(188): n is a, c, g, or t
  Coding DNA Sequence Number=SeqID_7751
gacaaggctcgggtttgcacccagcgatcatggaaacttccttatggggttggtctactggtacgtggattaaatgaatcaaganntcacctttattacaactgtccaagtggaaactattttgaatatcaggcttttgcaattgggtctcgctcacaatcagcaaagacatatttggaacgcanntntgggaacttcatgggctcctcacgggaagatctgatcaaagatgcacttattgcaactagggagtccttgcaaggtgaaaagctcag

SEQ ID NO: 22155 - DNA, 565 bp, Zea mays
  Coding DNA Sequence Number=SeqID_7752
cgagttcaactcacctgtcttaatggtcaagaagaaagataattcctggcgattctgtgttgattttcgtcacctcaacgcaatgacggtcaagaggcaatttccaatcccagttatcgaggatatctttcaagaattagcaggcgccagttggttcacaaaactggatttatggtccgggttccaccagatcatgcttcaaccgggggaagaacacaagacagcattctctactcacgagggccatttcgaattcagagtgcttgcctttggactcacgggtgccccagcgacattccagggcgctatgaacgccacactcaagccccttctccgtcggtgcgttctcgtcttcttcgacgatatcctggtctacagcacggattaccaatcacatctgctccacttgcatcaagtcctgtccttgctagcagctgaacactggaaaatcaaattcagcaaatgctcctttgctcaacggcagacaacgtacctgggacatttaatcagctctaacggtattgccaccgacccaaccaagatttctaccatcgtatcatggcca

SEQ ID NO: 22156 - DNA, 346 bp, Zea mays
  Coding DNA Sequence Number=SeqID_7753
cgctcgcggtgacggtacagaaccacggcggcgacggcggtgcgccggtgctgttcaacgacgagccgctcggcgcgggccgccgctcgatgacgccgcaggacgtcgtgacggtcggctcgatcaagctcggcatcgcgcggcatgcgcaggcgagcgtcgcggtgcccgacgaagccgatgcgccggacgccgcgcgcgaggccgcgtggctcggctggctcaccggcggcctgcgccggctcggcagccggcggctcgtgatcgcgctggtcgcgctgtggatcggcgtgctgctcggcgcgctcgggtacggcttcgtcgcgtggtcgggacggctgccgtg

SEQ ID NO: 22157 - DNA, 518 bp, Zea mays
  Coding DNA Sequence Number=SeqID_7754
atacgcagtctagcgatttcgcctaagtacatcgatgtcctgagcttcatcagtccagatattatgacttgccttcatctgaatacacacggcgattctgtggttgcgtcctactaccgcgtggtaaagaatcattcaggcgatcatgatggagatgagttgtctcacagcaggtcgagaaatgagagcgcgataatcttggggtcagagctctcgctggatccactcacgagtatcaagtcacgtttcaccatctaggtcatgggcagtgtccttgtccagcatgaatggcgtagcaagtcgttcgtctccatctgtggtgacgttgacaccaaggggagagagacgagcacgaaaattgcaatatgtgtggtgctctatctctgaagtcctgaggtttgtggggtctagggattattttggattcagtaggtcaggaataatcacgttgaggagcagtctatgcagccgaatttcgatatcgaggaatatatcgttttctgtgtatgcatgatcca

SEQ ID NO: 22158 - DNA, 475 bp, Zea mays
  Coding DNA Sequence Number=SeqID_7755
gacacacgtgtgtctgctgcttaaaaatattacctaggtatattaggagtgtacatatgtttgtacttttattaacaatatgttataatttttttcaggcctgcttttttaaaggctgcagaaaacttcactcttttggttaagaacaacatctggtatcccaaatttaacttcagcaagtaagtggcgaccagccgtgtgagttcaccaatgtcttggagaaacttctggctcttctttgaggttttcctcgctcctattttctgcttcctcctgactttaggaggaatatccttcccaacatcaccaccgcctacctcaaaacgtgcatttatgatgcgaaaacagatcccttctgccccatattccgacttggaaaaattgtggaaagcgcagggcacagcttccaggacatagccattgagggaggcatcatgggcatccagatcaagtggaactgcaacctggacagggc

SEQ ID NO: 22159 - DNA, 440 bp, Zea mays
  misc_feature (349)..(349): n is a, c, g, or t
  misc_feature (378)..(378): n is a, c, g, or t
  misc_feature (381)..(381): n is a, c, g, or t
  misc_feature (383)..(383): n is a, c, g, or t
  misc_feature (386)..(386): n is a, c, g, or t
  misc_feature (395)..(395): n is a, c, g, or t
  misc_feature (407)..(407): n is a, c, g, or t
  misc_feature (415)..(415): n is a, c, g, or t
  Coding DNA Sequence Number=SeqID_7756
acgcacgctggaaaactttggttatctcattcagcaggcgaccgtttttggtcagcatgtccatgttggctgcgccagtggcgatgacgccatttatttgctgcacggcttgtcacgatttgtgccgcactttatcgccctttccgccgcgtcgccatatatgcagggaacggatacgcgttttgcctcctcacgaccgaatattttttccgcctttcctgataatggccgatgccgtggggtcaataactggcacaatttgaaccctgtttcgctgctgagtacaccacgatgatcgacacatttaagatctgcactgggatattcgcccagtcctattttgcacggngaaggtcgggtgatggatacccgtaaccntancnccnataatttgngggataattagntacccccntggtctgacggaccccgttaactag

SEQ ID NO: 22160 - DNA, 407 bp, Zea mays
  Coding DNA Sequence Number=SeqID_7757
atgaagctggtggacacgcgccgcctgccgatgaagcacggcatgtcgccgcagttgctggaggcgctcggcgaacggctggcgcgcaaggagcaatcgctgatcttcctgaaccggcgcggtttcgcgccggtgctgcactgccagtcctgcggctgggtcagcaattgcccgcgctgcaccgccttcacggtgctgcaccgcacggccggccgcggccatcgcctgcaatgccaccactgcggctaccaggcgccggtgccgcacgcctgccctgaatgcggcgaccaggacctggcgccgatggggcgcggcacgcagcgggtcgaggaacacctggccgagctgtttcccgaggcgcgcatcctgcgcatcgacgccgacagcacccgcaagaagggcagcgc

SEQ ID NO: 22161 - DNA, 506 bp, Zea mays
  Coding DNA Sequence Number=SeqID_7758
actatctgtcgcacttcgatgaactgaccggactggccaaccgcgtgcagatgcgcgaattcctcacggggcagctgagcctgccgctgccggcgcagccgctactggcgatgattatgatcgacctggataaattcaaaccggtcaatgatctctacggtcatgcggcgggcgatcaggtgctgcatgcggtatctgatcgtatccggcgcacgctgaacggcaacggcctggtggcgcggctcggcggcgatgagtttgtggtgattctgccggaggcgggcagccgcgagcaggtcgacgcgctgtgtcagcagctcatcgcccagctcaatctgccgttcccggtgtacgacaacgacatccacatcggcggcagtctcggcatcgcgctggccccgcaggatgccgacaacgccagcgatctgctgcgcttcgccgacatcgcgctgtataaagcgaaaaacaacggcaacaaccagtggatatttttcgaccgtgacatg

SEQ ID NO: 22162 - DNA, 560 bp, Zea mays
  Coding DNA Sequence Number=SeqID_7759
caggctgtctgaatcatctcagtggcctcggctcaaggtgcttgatctggaaggctgcaggggcttcagggaaaaccggcactacctaccgaatatctgcaacaagatagtgctgctcaagtatctcagcctgaggagaacagatgttgacaagctcccccatgagatcaacaaccttcgcgagctggaggtgctggatatccagcagacggaggtgcctgcgtcatgcacaatggatctcctgctcctgaagctgaagcgtctgcttgctggaaacagaaatccaagtccacgcacccacggccatgtcctggttcctgggaagatcgacaaaatgtcagacatggaggtgctatccaatgtcagggtgaagagtgacaaagacttggaaggcatcggaaggctatggcagctgagaaagctcggggtggttatcaatgtcaaggacaaggacacactgcttaaggctgtcactaacctgcatgagtgcctccggtctctatcgattactcttgacgccaccaccagccacaaggggactttcagtaccatcagaggtc

SEQ ID NO: 22163 - DNA, 477 bp, Zea mays
  misc_feature (429)..(429): n is a, c, g, or t
  Coding DNA Sequence Number=SeqID_7760
gatccgagtccgcatcgtgttcaaactgaatggcctggcgaacgagtacgtgtaggatgacctcagtaacaagagcgcgctcctcctggggtccaacccggcgcacaagagagtgtcggtgctcctccacgccgggtgcgccatatacgagtcccaagtcatcctgcagtacatcgacgaggtgtgggcggtgacgaggccgaacgtgctgccggacgacccctacgagcgcgcgtaggcgcggttctggggcgcgtacatctacgacgaggtgcagtctgagtggctgtatgatgctgttcaggtgctccaacgatgaggacaaggcggcggcggtggcgtacgcccgcgaggcgctctacgcgctgcagggcgcgttccgtgactgctccaacgggaggccgttcttcggcggcgacgacatcatgngtcgtggacgcctgtctcggcgcgtacctcggctgcttcggagacgtc

SEQ ID NO: 22164 - DNA, 254 bp, Zea mays
  Coding DNA Sequence Number=SeqID_7761
gacctgtggacccatttcttttccacggagttcttcgccgcgacgacggaggcaaagaaggtccgtatggcggtgcgagccggtggatgcacccttcagttgaggtcggggcacgtgcagcagtacatgcctgccacccttgcatcttcgaacaaggggtggcagagtcggtggttctacctccgcaacgacgacgagcggttgccggcgttcacgcaccgcgtcgtcctcggagcggacgagcgatggaggtg

SEQ ID NO: 22165 - DNA, 453 bp, Zea mays
  misc_feature (28)..(28): n is a, c, g, or t
  misc_feature (65)..(65): n is a, c, g, or t
  misc_feature (108)..(108): n is a, c, g, or t
  misc_feature (145)..(145): n is a, c, g, or t
  misc_feature (176)..(176): n is a, c, g, or t
  misc_feature (266)..(266): n is a, c, g, or t
  misc_feature (292)..(292): n is a, c, g, or t
  misc_feature (306)..(306): n is a, c, g, or t
  misc_feature (310)..(310): n is a, c, g, or t
  misc_feature (341)..(341): n is a, c, g, or t
  misc_feature (352)..(352): n is a, c, g, or t
  misc_feature (372)..(372): n is a, c, g, or t
  Coding DNA Sequence Number=SeqID_7762
gtagagaggtagaggcagatatcaaggncgaacgaggagtgcgcggacagagacgaagcagcganagaagcgacggacagagaggcagacagagaggacgacaagaanacagagagaagagacagacgaccgagagtgggaagangaagagacgacgagaggacgacaaagagagnagagacaacggcaggagaatataggcggagcacgagagtcgatgcgagaggagcagcatgtagaagatgacgtgcagatcgcaaacaggnagagcatagacagcggagcggatggncgagacgagagaangaanagggacgatgggaggaggaaggtgggagaanaaggaatcgangagagagagagcgccgacangacagatacgaagacgagagaggagagagcgggacgagagcagacgtagcgagacgacgagcgtggaggagtgcgacgaac

SEQ ID NO: 22166 - DNA, 395 bp, Zea mays
  Coding DNA Sequence Number=SeqID_7763
gggtgcacccaactcctgcagttcacccccaggctccaggggtccacccaccagctcccggggtccacccaccagcccctgggatccacccccagcctcctggggtccacccccctcctcctggggtccatcctccggctcctggggtccatccccagccacctggggtgcacccctcaaatcctggggtgcatcccccaacacccatgcccccgatgctgaggcccccactaccctccgaaggccctgggaacattcctccccctccccccaccaactgaaaagccacccctatcctagcaagtctggtttggttttcctgggttttgcccttagagtagagtttttttgtactgggctaggtgtccccattaaagagtctgctgaccctgaaa

SEQ ID NO: 22167 - DNA, 552 bp, Zea mays
  misc_feature (348)..(348): n is a, c, g, or t
  Coding DNA Sequence Number=SeqID_7764
tgggcagggacacgcagcaacaaattcactagttggttgagggtcctcgcgggtccaaaacaccgacagttggcgcgccaggtaggggcctgctgcgtgttgacgaacaacttcccgttgagttccagatgggtagtctccagcaacctcttcagcccgggacgctgctccgtttcgggagtctcgagttcatgtccctcgacggcagctacgacatggtactccttcccctgcagcgcgacagcgaaaacgacggccatcatctcgctcgcaggcggcgaactcgacgacgtcttccccccgtggcggaagagcagcatccgggtttgccccgcccccctcctcgcnggaggaggagacggagcaaccatggccaggcaagaggcggcacctcgttggctgtcggaccagagcgagtcgacgacgccggcacccctgtcggagacatgtcgggtgttatcctcgcacctgggacaacgacgggtgtcgcttcccagcaatgtgccaacctcaggcggactaatgacgccaacacctttgcgagggacttgt

SEQ ID NO: 22168 - DNA, 582 bp, Zea mays
  Coding DNA Sequence Number=SeqID_7765
tcgccactttcgctgtttgcgagatgctatcagcggccaaattcaagtgactcaaaggagccttggggaacaagagggaataccccgtctccgttatgttgatcagcagcttagacaacaaaaggcacttcagcaactcggtgtaatgagacaagcttggaggcctcagaggggtcttcctgaaagctctgtttcaatactccgtgcttggctctttgagcattttcttcatccgtatgtgttacgtcaccctgtacttgttttttccaattatagcaatggtgttataataatttctgtttatgtttattttaataaatttcttattcaactttcatttgataattgataccagttaccccaaggattcagagaaaataatgctagcaagacaaactggcttgacccgaaaccaggtacaacaattgatttttctgaactgtacaacattgttttcgttgagattttgtttctgattaggatccaacgttaagtaactgacaactaagtttcagtcctgtaccatggttgctaatcattattgaggtgttgttcacatcaggtggctaattggttcatcaa

SEQ ID NO: 22169 - DNA, 482 bp, Zea mays
  Coding DNA Sequence Number=SeqID_7766
gaacttccgttcgtacctcaactggggcaacacctttctccttggtctatggaatggaagcggtactgccaattgaagtagagatcccctcattaagagttttgatggagacaaagcgtgaagaagcagaatggatccaaactcgattttttcagttaaaccttattgacgggaaaagactgtctgctttgtgccatggtcagctataccaaagaagattgaagaaagctcacgagaagaaggtgcgccctcgagaatttcaggaaggagaattggttcttaaaaagattttacccatccaaaaggatcatcgtggaaagtggaccccgaattatgagggaccttatgttgtgaagaaagctttctctggaggagctctcatccccacaaagatggatggtgaagatctccgacttccggtgaactatgatgccgtcaagaagtattatgcttagaaaaatggctcgctaggttgaaaagct

SEQ ID NO: 22170 - DNA, 575 bp, Zea mays
  misc_feature (46)..(47): n is a, c, g, or t
  misc_feature (71)..(73): n is a, c, g, or t
  misc_feature (80)..(81): n is a, c, g, or t
  misc_feature (97)..(103): n is a, c, g, or t
  misc_feature (417)..(420): n is a, c, g, or t
  Coding DNA Sequence Number=SeqID_7767
gcattcttatcaggcagctaacaatgtggagcatgaaggattgccnnatatggtgaagcagtattatatcnnnaatggcnnatctgaccatgtgagnnnnnnnaagactgttgaaagttgtttaggggaggatatctcttcaatggaaacaagattgcacattgatcgcccatttgacaattccaaggattgtgattttagtggcagattagaatctgacaatagcatattaggttcatcaaaaggagttgctcatcaaacaaagagtagctgtaactcagagattactttatgtccaagtgctcaggatagtttccatcctgccactgtctattcagaagccaaggaaagtttcaccaatgttggagtcagtgaatgtgttagtattgataaatcagttgaaagtggagatgttannnnttcatgtgaatttaaaaagagcaggaagactagcatctatagagagagtactggaagtgatgttagtgatgagagcagtaccagtagtttgagtagtgctttgtataagcccctcaaggcaaatgatatacaatgggaagcaattctagccatcc

SEQ ID NO: 22171 - DNA, 368 bp, Zea mays
  Coding DNA Sequence Number=SeqID_7768
agccgtatctgcgtctcgcggtgcacggccatgcatggctcacgtgccagcgctgcatgaccccgtacgaccagacgttcgacgtcgacatgacgtaccgggtcgttgcgaccgaagacgaagctgaagaatttccgctcgacgacgatgaagccgatgtgatcgtgggctcgcgccagttcgatctcgtcgacttgatcgaagaggagttgctgctttcgttgccgctcgtgcccaagcacgaggtttgcccggcagttcacgaaagcctcgtgtcgggtgcgagcggtccttcggaagacgcggacgacgagtccgccgaagacgaggacgaaggcaaacggccgaatccgttcgcagcgctggaa

SEQ ID NO: 22172 - DNA, 377 bp, Zea mays
  Coding DNA Sequence Number=SeqID_7769
tgccaacgctggtgccgagactatctgcaccgaccacatggtcactgccacttggacagctgacagtggctggggaacccctgagctcaagccctacggtccattgagcctcatgcccacggcttcctgcctgcactacgccaccgagtgcttcgagggcctcaaggtcttccgtggcttcgatggaaagcttcgcattttccgcccgagcaagaacaccgcccgtatgcgcatgtccgccagccgtatctctctgcctgtcttcgagccggcagagcttgagaagctcatgattgctctttgcggcgttgatggtccccgttggcttcccaaggaccgcgctggcagcttcctgtacctccgtccgactatgattg

SEQ ID NO: 22173 - DNA, 538 bp, Zea mays
  Coding DNA Sequence Number=SeqID_7770
tggatctgcccctgtacaccggcgagtgtacgccactgacttcgctgtattgtatagaataaaggctcaaagtagggatgaacgacgagcgacagaaaggggaggcgctgcagatcctgggactattacaagtgctcccccgcctcggcgtcttctacctcgactatagcctctggtccttctactgggagggccggtccaaaagggattcgccgagccttttcaaggacgccaggggcatcatggacaccctcaaggagaaggggatccacatggtgattgtttctcgctcccccaccccggacatagcccaggtgttcctcgacaaggtggagtaccagcccatgtacgtcgaccaagaaatattctacatgtggaatcactagactgagcatttccagaatagatccataggaaaactgagattccctacaaatccatgctgttcttccatgactagaacaggaatattgaagcagtatcagaaatgtgagtgaccagtgatttactacagaacgtcgtgaatcttgacatgatt

SEQ ID NO: 22174 - DNA, 78 bp, Zea mays
  Coding DNA Sequence Number=SeqID_7771
tacgtggcggaaaccctgatgccgttgatccttgacctggcccgcgaatacgaagcggccaagatcgatccggccttc

SEQ ID NO: 22175 - DNA, 571 bp, Zea mays
  Coding DNA Sequence Number=SeqID_7772
ataatcaaacgttccagtcgccggtgcgcgaacggggtttcgcgcgtctcggtgactacgcggccatcggcgagggccggtcggtggcgcttatcgcgcccgacggcgcgattgactggtggtgcgcgcccaaccttgactccgccccgttgtttgaccgcctgctcgatcccgagatcggcggttttttccagatcgaacctaacgctccttaccgtaccgaacgcgcctaccgtgctgacagcaacgtgctggaaacccgcttttttaccgatgacggcagcgtgttgctgaccgaatcgctgaacagcacgctggcaggccgtctgccgtggagtgagctggcgcggcgcgtagaaggcgttgaaggcgaagtgacactgcgcctgacgctgcgctttggcaccgttgccgaaacccgctcgccgtggcaggacagcaccgaacagggcgacgtctaccacgttggcgatctgatggcgatgctgcgcaccagcgaggactggcagatcgaacagcgtgacgatgagcaaatctgcgccacgctacgcaccgcagagggcagtcgatc

SEQ ID NO: 22176 - DNA, 415 bp, Zea mays
  Coding DNA Sequence Number=SeqID_7773
atggaataaatacaccccggctccttttggccctgataaccccccccccaaaattgtccaagggtccaagttcaatatattttaccctgattttgtgggcaaatcgaaagcccccccctccagtataaaaaaaaatggaagcgccggaaaaactttctttataagatttccccctgggcccccatacgaggatattgctttccgtattgtgaacaaggagtgggaatactcccccaaaaaggggttcaagtgtactttttagcgtgggattttccctttttattttaacttcaagcgtttccgttacaggcgctgaaatggctcaaaaaggggaaaactggatcgattgggctggtgcgtcatgatttttctgtatgctgtggcatggatacccgtcgagtatgtattttcagta

SEQ ID NO: 22177 - DNA, 555 bp, Zea mays
  Coding DNA Sequence Number=SeqID_7774
ttgaaggcagcacaccatatgaggtatggcatggttcgaagcccactgtcagtcatcttcgcacttttggttgcgttgcacacgtcaagcagggcagcaaacgactgacgaagctcgaagatagatgtacaccgatggtgtttgtcggctatgaaagggggagcaaggcatgtcgcttctacgacccaaacacgaggcgtgtgcacgtatcacgtgacgtcttgtttgaagaagaccgttcctggaactgggaagaggagacgggcaccgatattcccttcggtgttgaggttgtgccaggcggaagccccacctggctggacatgggcgcctcgacgaattcgccgagctcgacaacttcttcaccgagctcgtcgtctgattcaccaagttcgtcaagatccacgcagtttggaggtggtgtcacccatcctgggagtttggaggacgcccaagagcagcaaccagcaacagcgcctggggcagtgggtgttgactttgccactcctcccaccgcaagcccggctttggatgctgatcacaacaacatgccaa

SEQ ID NO: 22178 - DNA, 502 bp, Zea mays
  Coding DNA Sequence Number=SeqID_7775
aaggccgccatgacctccgcttagggcgtgcgcgcataagcgcatcacgccgcacgcgcgccaccacatgctgggccgactctcctctatcatatccaaggagttgctctatgcgcataaggcggtcgtcctccgctgcgaggagatctgcatgtcttccgcactcgtacgacacaaatgaagtacctccgcttcctccgcaagaggatgaacaccaagctcgtcccacggcatccatccacttccgtgcccccgccaagatcctgtgtggcaccatcctcgtccatgattccgcacaagaccaagacgcatgacgcgtgtctgatgaggatcaacacctacgagggtatgccgacgtcgtacgacaagaccaagcgtatgttcatccctgacgctcttaaggtactgaggctacagactggacacaagtactgcctcctcgatgagctctctaaggaggtcttttggaactaccatgacaccatcatgtaacttgaggata

SEQ ID NO: 22179 - DNA, 487 bp, Zea mays
  Coding DNA Sequence Number=SeqID_7776
ttcgacgtggcgcacaacaagatttcgctctcccgccccaagccgatcgttgagcgcgtccccgactccctcgacctctacgaccagtgatccgcaactgtctatgatgagtcgattaatgacgactctatgccaattgaaaagtttgagcttgacgctgtggagaaatcgaagacattggaaaggcttgaacctgtggccgctgcttcacacacatatgacctggagaccaaaacacaaggcaggctccaggggtcaccatgctattattacatatcgagatcccgcaaagacagctcttcatgaggcatactccactcccgtcttccctgtggatattctctgtgggagacctccagagacaatgtttgaatgacctaagagggttgtgatgaaatagggctcacttgagtcggatggctcgtttgatggactgtatatctaccttgacgagtagccgatgaagagcagctcttaggcaattaag

SEQ ID NO: 22180 - DNA, 563 bp, Zea mays
  misc_feature (271)..(271): n is a, c, g, or t
  misc_feature (324)..(324): n is a, c, g, or t
  Coding DNA Sequence Number=SeqID_7777
caatgagtgtgttatggatgggtttgagggtttggctaatggaaaattgatmactttattttcagaaacaaattattgtggtactgcgaaaaaggcaggggccatatttgttgtgggraggggtttagttatggtgcmaaagttaattcmycccacttccacttcctgttaattcacttgagtcctccccggaacgtggggatgcaaaatggatgcaggagcttaaaattcaggggcaacytactcmaamcagagggcggcaaaaagttgncggtgataggaattttcttgtttacatatgatacctgacaccgaaagagccanctccatctgctggatatgtttgtttgtaaycagaamtttttttaccagtttcmacccccatayssycymgcaaagaagaaaaatcaaccaaaaggacatmatggayaaacttgtgataagttccctggtaatcytttgtgatgcaysggtttttaactgtagttgtgtgctaccgtgacttcagktcytaactggggaggtggataatcagdatttgagatgtcaagcaatattgtatg

SEQ ID NO: 22181 - DNA, 503 bp, Zea mays
  Coding DNA Sequence Number=SeqID_7778
aagattggagtacgcctctcgcgagacctaatggttgtcgccggcaaggccatcacgagcaacatcaaacgcttgggtccacttatccttccgttatccgaacaattgaactacgcatactacaacatgatactgccccgtctgacgggcaagaagggagaatatgtgcccaattttaggaaggccgtcaaccatttctgcatccatgctggtggacgcgctgttctggaagctctcaaggacaaacttggtctttccctttatgacgtggagccatcccgcgccaccctctaccgatatggaaacacttcatcatcttcagtttggtatgaaatggatttcattgagaagagtaggaaggtacgggcaggtgagaaaatctggcagatagcgttcgggagtggcttcaaatgtaatagcgctgtatggaaggcactctgaggaacacaaacgataaaacaacaacaaagattttattttaacccctaaacagcgtctcacaa

SEQ ID NO: 22182 - DNA, 495 bp, Zea mays
  Coding DNA Sequence Number=SeqID_7779
aggaagattataatactctcatgccagccaaacccagtcacttggactttggaaaatttatcgtttctgaggctgatatgcctatgatggtgaagctgggctactttggggaaaccgaaaagaaacttattcgttttgctggagaagaaaccaccccagcgccgaaggatgatgaagtagttgttttcaagagtttttttagagcaggatttcgatttcctctgaatgagatgttaggagaagtcttgaaaaaatttgaaatttatcttcatcagctgactcctaacgccattattaggcttagtgtctttatctgggccctccgaagtcaagggatgagcccagatgccgaagcgttctgcctagtgcacgagttgcactaccagacgaaggccagggcaaccggtcttcatgaaaattttggttgctacaattttgcgtatcgcaaggatacaaaggctccagttctcagttaccgcacaaaatggccaaccg

SEQ ID NO: 22183 - DNA, 367 bp, Zea mays
  Coding DNA Sequence Number=SeqID_7780
agtccggttccgtgtacattgtataggctcggtaaaggttgatccgaacaagctcatgcagatcacctcgggggatcgctacatcaagtatcatgtgcaggagttagagagggccttcagggagaggctccctgcctgcacactgtcaggcaagaggcacattgactgcactaccactatgctggacgtacatggtgcggggctcaagaatggctcaaagaccgtaagggagcttgcccaacgtatgcagagaatagacagtgactactaccctgagacgctacattagatgtatgttgcgaatgcacgcagtgtttttaagctgatctgcaacactgcaaagggatttctagacccataaacttgt

SEQ ID NO: 22184 - DNA, 172 bp, Zea mays
  misc_feature (26)..(26): n is a, c, g, or t
  misc_feature (48)..(48): n is a, c, g, or t
  misc_feature (109)..(110): n is a, c, g, or t
  misc_feature (116)..(116): n is a, c, g, or t
  misc_feature (121)..(122): n is a, c, g, or t
  misc_feature (140)..(141): n is a, c, g, or t
  Coding DNA Sequence Number=SeqID_7781
tgcgaatcctgaaaattatcaagcanagaattatcccatgttggctanacttgcatggactggctgttgtaccggcacgagttgggattatgccaaatgaatggcccgnnccaatngcctnnatgagtcgattacaattnntggccgcgtttacacgtctgatgggaaacct

SEQ ID NO: 22185 - DNA, 237 bp, Zea mays
  Coding DNA Sequence Number=SeqID_7782
aaggtgaccatcgtctacccgacctgccaaggacggctgtcacaagccgaacttgagagctcaggtcccgtcgctgaccaagatgctggactacggcgtgcccaaccacgaggacgacatgagcgtcaagcacctgaagatcctcaaccatgcgttccatcttgagaagctcaagcgcatgctgtcgaggttgtctacgtgctgcgagcagctggtgaccaggtggccggcggactc

SEQ ID NO: 22186 - DNA, 463 bp, Zea mays
  misc_feature (74)..(74): n is a, c, g, or t
  misc_feature (132)..(132): n is a, c, g, or t
  misc_feature (180)..(180): n is a, c, g, or t
  misc_feature (298)..(298): n is a, c, g, or t
  misc_feature (430)..(431): n is a, c, g, or t
  Coding DNA Sequence Number=SeqID_7783
gaggaggcgaagagaggtatagaaagagaggagataaagtggaggagtagagagtgaggagagggagagggagntggagaggagagaatgatagggtgagaggtgagagaagagaggggacgaggggaaggnacagaaaaggagggggtagcggagagagaacggagtgaggagaggaangagagaggagaagagagagagggagaagaagagggagcggaagtagagaagatggagtgaagagagagtgagaagatacagagaagcgagaagatctgagtcgaagtactatataacnctatggggaaatgacgatgtggagataggggaaaggaatgagagagctgagacaagagagtgagaaaaaaaggtagagagatgtgagatgagtggtaggataaaggaaaagaaataagagtgtgcgtagggnnaaaagagacgaagagagtagggatgaacagaa

SEQ ID NO: 22187 - DNA, 67 bp, Zea mays
  Coding DNA Sequence Number=SeqID_7784
gcaggagcttttcctggacggtttaattggacccttgcaatatcaactgattatcatggcccagctc

SEQ ID NO: 22188 - DNA, 482 bp, Zea mays
  Coding DNA Sequence Number=SeqID_7785
aatcactattattcgagctcgcgcgctggcaccagctcgcgatgatgcgggcaacggcgatctgcgcgaattgcagcagtggcgcgcaccgcactcgatccggcgccgctgcacgatttcatcaccatcgtcgaccacgatctcggcttcgcgctgtaccgcgccgtctccgacaccaaggtcgcgctgtcgagccgcgaccgcgtcgagttccgcttcgcccgcgaaggcatcgatatcggcgccaccgtgacgcgcgacgaattcgaatcctggatcgccgacgacatcgaacggctgggcgcgacggtggacgaggcgctcgcgaaatccggcatcaccgcgcgcgacgtcgagaaggtgttcctgaccggcggcacctcgttcgtgccggcggtgcagcggctgttcgcggaacgcttcggcgaggcgcgattgacctcggcggaccagttcgaatcgatcgcttatggtctcgcctt

SEQ ID NO: 22189 - DNA, 520 bp, Zea mays
  Coding DNA Sequence Number=SeqID_7786
tgagtgaaaaccacaatccgccatccgccgatgagcaaaaagacaacaacacgtcagattccagtcaggataacgagcaatcaccccgtaaacgccccggcaaaaagccgctgatcattctggcgattgtggtggtgattatgctgctggtgggattctggttctggtttagcacgcgcaacattgaaaccaccgacgatgcgttcaccgaaggcgatgccgtgaccatcgcgcccaaagcgtcgggctacgtggtgcagctgctggtaaaagataaccagcgggtgaagaagggcgatctgctggtgctgatcgatccgcgtgacaacgccgcacagcgcgatcaggccaaagcacagctcggtctggcgcaggcgcagctgcatcaggcgcaggcgcagctggcgctggcgcgggtgcaatatccggcgcagcgcgatcaggcgctggccgaccaggagcgggcgcaggccaatttactcaatgcgcaggaagattacagtagtcagcgcggtgttga

SEQ ID NO: 22190 - DNA, 538 bp, Zea mays
  Coding DNA Sequence Number=SeqID_7787
gtgctcggtcatgtcgtatgttatctacaccttgtgctcgcaatggatgacgcgctgcacagaccctgtgacgcggctcccgtggtgcggctgtcgtgggaaatggtcgacatataaccggcgggggcgtggtacatgcttggcaggtgcctgcacacatactcccaaggcaggtgagacacgcaaaagcgaactcactcacggccatcacatgacggagatgcgctgcaactactacagcctaacatactggcgacgatagggcggcataaagaagagagctgataatataggtgagcttctcatgggtgaccagattgacagctctccctaccgggtacatgagaatgaaaacgagtctgacttctctctgcaccacagaagggctcaatgagaatgacgccaagcttcttaagcagtgcacccgagatctttaccaggtcaacatgatgctagacaatctgcctgtcatgcgtttcactaagcagaacgatgtcacggtacagaggactggttttactgcaggttactgtccacc

SEQ ID NO: 22191 - DNA, 433 bp, Zea mays
  Coding DNA Sequence Number=SeqID_7788
ttcaaggcgggcctggacctgcttcacctgcgcgcgggcttccacgagcacatcggggacatctcgagcgccctccgggactgtcgcgcgggcctcctggtgggccccaaccaccaggagatgctgggggctgcaccaccgggggaacaggccggaaccatgagcggagcgccggcctggtgtcccttccgggcgtgatgggaagcccctcttagcccaccccccggcataccagggggtggttttggcccctctccgccttggccttgtagggtttggtggaaaggcactttaggggcctccctgggtcccttcccttggtgaccaaacacccacatttcccttggggtgccttggttgaaagggtgggtggcctaaaagcctttccccttggaaaatattggggccgcctggggattacccctcctaattg

SEQ ID NO: 22192 - DNA, 326 bp, Zea mays
  Coding DNA Sequence Number=SeqID_7789
aatttctagcttggacacccctgatgctgctacaacggttgaactaaccaactgaggcgagccatatgccaatgatgatgcaagcactgatgcctgacgatgacaataatgccgatgcctaatatgatgccattgatgatagtgccaactatgatggcagtaataacaatagctaggatgaagccaccgatgatgatgccaaacatgattacagcagtgatgatgccgagcatgatgcctgagacgatgacgactagtatgatgccaccgataatgatgccgattctgacaccaccgatgatgatgccgagcatgccgtcataaat

SEQ ID NO: 22193 - DNA, 539 bp, Zea mays
  Coding DNA Sequence Number=SeqID_7790
tcgggagttctcaaccccgccgccgccaatgggggccgcgccaccaccgccgccgaagtttgccaagaacttcgctgctgggccgcccccgccgccccaagttggggctgggggccgaacgccaaccccgccctcgtctgaatccgggggaaacgggggcaaaaaaaaaaaaaccatttgggtcggggacctccagaactggatggatgaaaactacctacataactgcttcgggcccagcggggagggggtaacaaaaaaagtaatccgcaaaaggcaaacaggacagtcaaaggggaatggatttgttgagttcttttctcatgcatcagaaaaaaaagctcttcaaaattttactggtcatgggatgccaaacactgaccggccattaaaattgaactgggaatcgaatagaatgggtgaaaagcgatctgaaggggcttctgatcactcaatatttgttggcaatctagctgctgatgtcactgatgaaatgctgctggagcttttctccagaaagaaccgctcggagaaaggag

SEQ ID NO: 22194 - DNA, 501 bp, Zea mays
  Coding DNA Sequence Number=SeqID_7791
ggagcgcgacatccgcgcctacgcgggggacgtggcgcgcgcgctggcgtacctgcacgggcggtcgctggtgcacggggacgtcaaggcccggaacgtggtggtcggcggcgacgaccgcgccaggctgaccgacttcgggtgcgcgcgccccgccgccgccgggtcggcgcgcccgttcgggggcaccccggcgttcatggcccccgaggtggcgcgcggggagggccagggccccgccgccgacgtctgggcgctcgggtgcaccgtcgtcgagctggccacgggccgcgcgccgtggggcgacgccgacggcctcctcgccgcggtccaccggatcgggtacacggacgacgtgccggaggcgcccgcgtggatgtcggcggacgccagggacttcctggcgcgctgcttcgagaggcgcgccgccgcccgccccacggccgcgcagctcctggcgcacccgttcgtcgccgacctagacgagaggccgaagcggca

SEQ ID NO: 22195 - DNA, 450 bp, Zea mays
  misc_feature (421)..(421): n is a, c, g, or t
  misc_feature (423)..(424): n is a, c, g, or t
  Coding DNA Sequence Number=SeqID_7792
gagtccaaagctgatgcgggtgcatctaagacatatccgcagcaagctggaaccattcgcaaaaatggttacattgtaatcaataacaggccctgcaaggtagtggaggtttcaacttcaaaaactggcaagcatggacatgcgggagtgtcactttgttggtattgacatcttcacaggcaaaaagcttgaagatattgttccatcttcccataactgtgatgtccctcatgtcaatcgcactgactaccaggtcattgatatctcacaggatggatttctgagtcttctgactgattctggtggtactaaggatgaccttaggctttcaaccgatgaaaatctgcttacgcagatcaaggatggatttgctgagggtaaagatctggctgtgtctgttatgtctgccatgggtgaggancnnatttgtgctcttaaggacattggccc

SEQ ID NO: 22196 - DNA, 535 bp, Zea mays
  misc_feature (307)..(308): n is a, c, g, or t
  misc_feature (337)..(338): n is a, c, g, or t
  misc_feature (393)..(394): n is a, c, g, or t
  misc_feature (502)..(503): n is a, c, g, or t
  Coding DNA Sequence Number=SeqID_7793
aatggcctaggcaagctccgaaagcatcacacctttgcatcccgatctagcttcggcaaggaatcagacgctgggagcgtgagatcctacggtgaggacttgccggaggaagggatgagagtgacacgtagtatcatgatcgtgaaaccaccaggataccagagtcagagtggatcggctccggcttcccccgccggttctactcctccggtgtctccgttatccggagccagagagcccttccgttttcggagaaggtcgacatcagatgcgtacgagaagacaggccagaacaaaccaagcactnntccttgtttcgatgtctgagaaatgagcnngatcacttcctcctctatggacgtgactgaaaatgtgcctttgctggatccattnntgtctagctgttgtgcgtgtaaatgaatgtgttaatgagttgaccagttgaggtcgtgtgctacttcgtgcgagttagctgtgtgatttattatctcagccttggttnnagtatatttaagctccctaatggctcatcagg

SEQ ID NO: 22197 - DNA, 480 bp, Zea mays
  misc_feature (51)..(53): n is a, c, g, or t
  misc_feature (175)..(178): n is a, c, g, or t
  misc_feature (233)..(233): n is a, c, g, or t
  misc_feature (235)..(237): n is a, c, g, or t
  misc_feature (386)..(387): n is a, c, g, or t
  misc_feature (406)..(408): n is a, c, g, or t
  misc_feature (418)..(419): n is a, c, g, or t
  misc_feature (424)..(425): n is a, c, g, or t
  Coding DNA Sequence Number=SeqID_7794
tcggcatttcatagttcccctttaccaacactgcaaaaccagcaaatggcnnngcttaatctcatacttggctgggtactctgcttaaccctgtggctcaatttatgtcctactatcggcccagcttattcgacaccactatgcaaaaacctgccccaatgtggaacacatatgnnnnagaagcatgataaaaagaaatttcctcaaacatttgtcacagttcctgctactcngnnnctcttcttccatgattgctttgtgcagggttgggatgcttctgttttagtagcatccacgtcaaacaacagagcatacaaagatcaccctgataatctttcattggccggagatggatttgacacggtgatcaaagcaaaagcatccgnngatgctgtcccactatgtnnnaataaagtcnnatgcnntgatattcttgccatggcaaccagggatgttattttactggctggtggaccttac

SEQ ID NO: 22198 - DNA, 410 bp, Zea mays
  Coding DNA Sequence Number=SeqID_7795
ctctgtgtgtgagcgcattgttggcctgggggagtgagaagctgcatattttgttcgtgctttgaacctctgcttctgtcaagatgaagttcatgaagcttggatcgaacccggacacctttcaggacgatgggagcgaagtcagaattgtggaaactgaattggtgagtgatatcactgttcgtctagggaacacaaagttttaccttcacaagtttccacttctatccaagtgtgctcgctttcagaagttgatcccaactactggtgatgaaaatatcgatatccacatccatgacattcctggtggcccaaaggcttttgagatatgtgccaagttctgctatggcatggttgtcacactcaatgcgtataatgtcgttgctgcccgctgcgctgcggagtacttg

SEQ ID NO: 22199 - DNA, 448 bp, Zea mays
  Coding DNA Sequence Number=SeqID_7796
ttgcttttgggcagccttcgttggcgccaagtttttcaaggagtggaaccggctgttttggttgcccacaacggaaaaggcggcggaggcgcttggggtttttgtccccgtggtggagaccctggagccggccttcagggagtgctccaaagggaaacccttttttggcggggaccccgtcgggcttgtggacatcgcgctcgggagctttgtggtgtggatcagggtggtggacaaggcggccggggtaaaacttttggacgaggccaggtttccggcctttacggggtgggcggagcgctttttggcggtggacccccttaaagaggttattccggaccccggaaggctgttggagccctccagggggtttttggctaaacgggccccccccccggggttctgatccctgtaactgtaagcttgtaacaccaagcccagggtttgg

SEQ ID NO: 22200 - DNA, 558 bp, Zea mays
  misc_feature (495)..(496): n is a, c, g, or t
  Coding DNA Sequence Number=SeqID_7797
accctgcaaatagtgacccatctgatccgatcagaaatggatgctgaaacagtggtacatactggaggttgtcattgcaagagagtaaggtggaaagtggttgctccttcaagtgttgtggcatgggactgcaactgctcaaactgctacatgagagccaatactcactttattgtacctgctgacaattttgagcttttgggagattctgggaagtttcttacaacttacacatttggcacaaacactgcaaagcacacattctgtaaagtctgtggtataacttcattctattatccacgctcaaacccagatggggttgcagtttcattcaggtgtgttgaccctggaacattgacaaacattgaaatcaggcatgctgatgggaagaattgggaacgcacaatgaaagagataggtatctcttcatattcaaaggtgcacaagtaacttccatcataacatcaaggactagaaaacagttgagatcattannagtcctgcatgaagtttatattccctcaacacattttgtgttgctactataaatactctgga

SEQ ID NO: 22201 - DNA, 232 bp, Zea mays
  Coding DNA Sequence Number=SeqID_7798
ggccgggccggcaaatgtgaacgtcaaacagtgtctcttttccagttccagacctgaagaaactccgaccggccggcgggcggtggcggcagccggcaggatctgtgccgcgatgccgaacgtcgaacacggcgcggatggaggaccccggcgccgccctgcgcagcacccccacgacctcccatatcatccaccctgcctacctccactccacgcacattgtcccccaggg

SEQ ID NO: 22202 - DNA, 563 bp, Zea mays
  Coding DNA Sequence Number=SeqID_7799
ttctccatgctctatcactggtgcagagttaccgctggtgagaaatatcagtgagattcctcaggataactatggtaggccaggtctctctcacataactgttgcaggttcaatcttgcacggattcaaagaggttgaagtatgacttcaaacattttcaccaggaacacacaccccgattcacatgcattcctgtgaagaagtttttatcgtcctcaaagggagtggcactctttatctcgcatcagattcacatggaaaataccccggaaagccacaggagcattttatccttccaaatagcgcatttcatattcctgttaatgatgctcatcagctatggaacaccaatgagcatgaggatttacaagttcttgtcataatatctcgtccgccaattaaagtgtttatatatgatgactggtccatgcctcacagtgcagcgaaattgaaatttccctactactgggatgagcgatgttatcaagaaccttcaaaggacgaactgtgacttatagtcacggtttacacatcttttattgctgagattttctatcgctgta

SEQ ID NO: 22203 - DNA, 528 bp, Zea mays
  Coding DNA Sequence Number=SeqID_7800
gccgaggtttttcacgatcgcggaaaccgcgtcattatcaccggcagacgccaggcgctgctcgatgagatcatcgcccagcgtccggccattactggctttgctctggacgttaatgacaccactgccctcgcccgctgttccgcggcgattcacgcgcagtttccgcatatcaacgtgctaatcgccaacgccggtatctcgcagccggaaacggtgacggcagacgaatggaccagtgatattgctgagcagatcgtgatgaccaacattctcggtgtgattcgcgtcaccgccgcttttttgccgctgctgcgccgtcagccgcaggccacgctgatggcaaccagttccgcgctggccttcctgcctctggccagttttcccacctactgcgccagcaaagcctttctgcattcctggctggtttcgctgcgtcatcagctgcgtgatacctcggttgaggtgctggaaatgctgccgccatatctacagacggcgctgaccggtaatcaacagctcagcgat

SEQ ID NO: 22204 - DNA, 400 bp, Zea mays
  misc_feature (38)..(38): n is a, c, g, or t
  misc_feature (41)..(42): n is a, c, g, or t
  misc_feature (44)..(44): n is a, c, g, or t
  misc_feature (52)..(52): n is a, c, g, or t
  misc_feature (61)..(63): n is a, c, g, or t
  misc_feature (77)..(77): n is a, c, g, or t
  misc_feature (110)..(110): n is a, c, g, or t
  misc_feature (129)..(129): n is a, c, g, or t
  misc_feature (149)..(149): n is a, c, g, or t
  misc_feature (152)..(152): n is a, c, g, or t
  misc_feature (190)..(190): n is a, c, g, or t
  misc_feature (201)..(201): n is a, c, g, or t
  misc_feature (203)..(204): n is a, c, g, or t
  misc_feature (209)..(209): n is a, c, g, or t
  misc_feature (212)..(212): n is a, c, g, or t
  misc_feature (220)..(220): n is a, c, g, or t
  misc_feature (226)..(226): n is a, c, g, or t
  misc_feature (228)..(228): n is a, c, g, or t
  misc_feature (239)..(239): n is a, c, g, or t
  misc_feature (268)..(268): n is a, c, g, or t
  misc_feature (287)..(287): n is a, c, g, or t
  misc_feature (305)..(305): n is a, c, g, or t
  misc_feature (315)..(315): n is a, c, g, or t
  misc_feature (326)..(327): n is a, c, g, or t
  misc_feature (335)..(335): n is a, c, g, or t
  misc_feature (338)..(338): n is a, c, g, or t
  misc_feature (361)..(361): n is a, c, g, or t
  misc_feature (371)..(372): n is a, c, g, or t
  Coding DNA Sequence Number=SeqID_7801
gaccaaccagcaacatacaatgtggaatacggaatcanctnnanagcaacantggcggccnnnatattttccatccntatgctccttgctctttctgcatgtgttggttncgcgaccatttttcctcantactcagaagctcctatagntgnccttcttcccccataccttccatcaatgaccgcttcantatgtgaaaancnngcccntcnaccctacnggttcncncaagcaatcgnaagaagcaacttacctttatcacccctgntctttcaacaatcgacagngcctatctttggtgcagncattggtacnaaccatcaggnnacaacagntgnagcaactcgtgctaccagtgatnagccgagtanntctggcaaacctttctccctactctcag

SEQ ID NO: 22205 - DNA, 335 bp, Zea mays
  Coding DNA Sequence Number=SeqID_7802
aggtcgctgggctcaaagccacgtaccgccagcagcaggccgatcttcaggcggccaaggattctgtcgagttcgacgcccgcaattatgcgcggcagaatgcactagttgcctcctccgcgacatcgcgcattgcctatgaccgggccgagacggacctgaaggttgcccagcagcatgtcgcctcgatccagcagcagatcgccagcaccgtggccgcactgaacggtgatccgaatatcgagattgatcgccatccattggtccgcgcggcgcaggcgcagctcgaccgcgcccggctcaacctctcctacgcaacggtagtggcgcctgag

SEQ ID NO: 22206 - DNA, 582 bp, Zea mays
  Coding DNA Sequence Number=SeqID_7803
tggcctgccgggtcaagcgcatcgccaccggctgggaggtggagctgcgcatcgcggtaagcgcggtgctgccctggcggccgctgtacgacctggtcgaggaattccaggcgctgggcagcgcgacgaccctgcgcttttcgaccgaggtgctgagcggcaactgggatgcgttgacctcgaaccgcgccgacctcgtgatcggcgcgggagcggccggcgagccgaccggcccctaccgctcacagacgatgggacaggcgcaattcggcttctgcgtggcggcgcatcacccgctcgcatcgctgccgcagccgctgagccgcgccgacatcacgcgctactgcgcggtggtggtggccgatacctcgcgcaacctgccgccgcagtcgcgcggcatcctggcggagcagccgacgctggtgatgcccacgatgcaggccaagatcgaggcccagattcgcgggttgggctgcggctacctgccgttgacgctggccgcgccctacctggcgcagggcgtgctggtggtctgcgataccgatgaggggatgtcgctgaccgagcatgtggcgtatgcgt

SEQ ID NO: 22207 - DNA, 555 bp, Zea mays
  Coding DNA Sequence Number=SeqID_7804
tccgccgcgtaaggtggcattgatcaccggaattaccggccaagacggttcctacctaacggaattcctccttaacaaagggtacgaggttcacggtctgatccgtcgttcctcaaacttcaacacccaacgaatcgatcacatctacgtggacccacacaacgctcacaaagcacgcatgaagcttcactacgccgatctctccgacgcctcttcactccgccgttggctcgacactgtcctccctgacgaggtttacaacctcgccgcacagtcccatgttgctgtctccttcgagatccctgattacaccgccgacgttgttgccaccggtgccctccgtctcctcgaggctgtcaggtcccacatcgccgcttccggaaggtcccacatccggtattaccaagccgggtcatcggaaatgttcggggcaaccgcgccgccgcaatcggaaacttcccccttccaccctcgttcgccttacgcggcgtcgaaatgcgctgcgcactggtacactgttaattaccgtgaagcctatgggatctttgcctgcaa

SEQ ID NO: 22208 - DNA, 342 bp, Zea mays
  Coding DNA Sequence Number=SeqID_7805
gctcgcatggaacacgtttccgcaggtcggcacgctgatgcagcgcagcctcggcgcacatgccgacgtattcagcgcgggcggcgatgtcgacgaactgcccgcgttcgactacgaagtaccgctgatcggcctgccgctgatgctcgggatggagacgtcgacgctcggcgcgtcggtgccgtacctgcatgccgatccggacgcacgcgacgcgtggcgcgcgcggctcgcgggagagaggcggctgaaggtcgggctcgtctggacgggcagcgcagggcaccagcgcaatccgttccgccgcgtgggcctcgaacgctatgccgacgcgtttcgcgg

SEQ ID NO: 22209 - DNA, 494 bp, Zea mays
  misc_feature (148)..(149): n is a, c, g, or t
  Coding DNA Sequence Number=SeqID_7806
ggcaatggtgcaagcaaaccctcaaattttgcagcccatgcttcaggaactgggaaaacaaaatcctcacctaatgcagcttatccaagagcatcaagctgacttcttacgccttataaatgaacctgaaggagaagagaacctaccnnagtcaggtggcttctgggatgcctcagaccatcacggtcacccctgaagagcatgaggccattcaacggcttgaagatatgggatttgatcgagatcttgtgttggaggtgttctttgcttgcaataaaaacgaggatctggcagccaactatctactggatcaccaaaatgaatttgatgactagttaaaattctattttcatcttctccaactgtggtctttcttgtgtctagcatttttctctgctggttctttcgtgacatttgttagccttctaaactctttggagtgccaatgttaatattttataccttaatagtcttcgagaaccatagcatctgta

SEQ ID NO: 22210 - DNA, 544 bp, Zea mays
  Coding DNA Sequence Number=SeqID_7807
attcctcgcaaaaggcctccaaatactaccctgccgaggacgattcgaagccaaagcaggtccgcaagtccatccgtcccaccaagctccgcccgtctctccagcctggtaccgtcctgatcctcctcgctggccgtttccgtggcaagcgggtcgttctcctcaagcatctctcccagggtgtgctcctcgtcaccggtcccttcaaagtcaatggcgttcctcttcgacgggtcaatgcgcgctacgtgatcgccaccagcactcaggtcgatctcaaaggtgttgatgagaagattgttgagaaggccagtgcggatgattatttcaccaaggacaagccagcaaagggcaagggtgaagatgctttcttcaagcaaggcgagaagcctgagcccaagaagattgagagcagcagggcggaggatcagaaatcggttgacaagggtctcttgagcaacatcaagaaggagcccttcctcagcagttacctcgcatcaactttcagtctgcgcaaaggcgacagaccccacgagatgaagtt

SEQ ID NO: 22211 - DNA, 545 bp, Zea mays
  misc_feature (508)..(510): n is a, c, g, or t
  misc_feature (512)..(513): n is a, c, g, or t
  misc_feature (515)..(516): n is a, c, g, or t
  Coding DNA Sequence Number=SeqID_7808
ggattccatatctcatctcacagatcccaattccaaaatggcttcagtttctcccagcttgtggctggctccaaacccaagcaaaagatggggcgaaatcttcttccttctctatacccctttctggcttaccctttctctcggcattgttgttcctttcaagctttacgagaacttcacagaattggagtatttgcttcttggcttggtttcagctctcccttctttcttcattcctatgctcctcgttggaaaggctgatagaggcatgtcttggaaggaccgttattgggtcaaggccaatctctggataataatcttcagttatgttgggaattatttctggactcattactttttcacagttctaggtgcatcttatacctttccatcatggaaaatgaacaatgtaccacacacaacattcctactcactcatgtttgcttcctcttttatcatgttgcatcgaacatgacactgaggcgattacgacattttactgctgannngnnannaacaattcgatgggctactgaagctgcat

SEQ ID NO: 22212 - DNA, 493 bp, Zea mays
  Coding DNA Sequence Number=SeqID_7809
gaatccataccattgagtgagcaggaggatcttattgtctggatgcgaactgcagccttgccaaccttcaggaagttgtacggaaagataggggtggatctgaatgaaggtgagaacataactgtaacacttcaaaataactacaacacttacagttttaatggcaagaaaaagctcgtactgtcaactactagctggcttggtgggaagaacgacttccttggcattgcttatctcaccgttggaggattgtgcttctttttggctttggcttttaccattgtatattttgtcaagccaaggcaactgggagatccctcgtatttgtcatggaataggaatccaggaggccactgagcaaagaaactaattatgcttatttggtatttccaatattacagggcttgggtatgctacagtggctggtgtagtttttgtacatctttgttaagtaattactagtaacacttgtgaatttaggtcttcgtctccc

SEQ ID NO: 22213 - DNA, 502 bp, Zea mays
  Coding DNA Sequence Number=SeqID_7810
tagcggctccggatacgaggaccttggatccatacatgaaatgaatgacaccttattttggatgcttagtcggacgcgttgcgaataggatctatgatgggaaattcacaataaaagcacttgagtattcattatctgcctacaaagcacctaacaggcttcctgcagctacgaagagatctgataacgtcagagtgggcatcgccgcgtgagaagaaagatacgcaatgaccttccataactgttcactatcacagtatcggagggtaaacaacgctatccaggctgatgtaacgcttagagcgacatactctcttcctggagctactaatcgaaggtttgacatggaaggtacaccatagaactaagcagctccgataagactgtggcaagactcctactggaacctcgcaggtcacgcctgcggcgacatcttaaaacactcgctgcatatctgcggcaaggacatcactccgggcgatgagaacacaattgccaccgg

SEQ ID NO: 22214 - DNA, 481 bp, Zea mays
  Coding DNA Sequence Number=SeqID_7811
gtgcggcgtgaacggtactactattgagttctgcaagaatattgttctagcaggagttggcagtttatccttgatggacgatcacatagtcacagaggatgatctcaattcaaacttcctaattcctcatgatgagagtgtgtatggtggtaaatcacgggcagaggtttgctgcgagtccttaaaagatttcaatccaatggtccgagttgctgttgcaaaaggtgacccatcacttattgatggaacattcattgacaggttcgacattattgtactcagccgcgcatctcttaaaacaaagttgtttattaatgacaactgccggaaaagaagcaagcatattgccttctactctgtagactgcaaggattcttgtggtgaaatatttgttgatctgcagaaccatagctatcttcagaagaagcctggaggagaacctgaacagcaggagttgaaatatcctagtctgcaggaagct

SEQ ID NO: 22215 - DNA, 390 bp, Zea mays
  misc_feature (108)..(113): n is a, c, g, or t
  misc_feature (115)..(115): n is a, c, g, or t
  misc_feature (126)..(127): n is a, c, g, or t
  Coding DNA Sequence Number=SeqID_7812
agaggcatggcatcatccttgtcgagcatccttttcaagggaatcgcagctcgttctcttacctcacctctaactcgttcctcttattatggaatgagaaacttcacnnnnnngncaaatgatccnnacacacatgatgatttcaagccggctaataaacttgagagttctggcatttctttgtcagatgttattgagcaggatgtcaaggataatcctgttatgatttacatgaaaggtgtgcctgattttccgcagtgtggatttagttctcttgcagttagagttctaaaacattatgatgtcccattaagcgctagaaacatcttggaggatcctgaactgaaaaatgctgcaaaagcctttagtatctggtcaacattttcacaa

SEQ ID NO: 22216 - DNA, 418 bp, Zea mays
  Coding DNA Sequence Number=SeqID_7813
atcgagatcttcaagcgcaacccaaccaccatcaagaactacggtactctggctagcggtaccatagcaccgtacgatgtaccacaacatgtacgatgactacctatacacgaccctggatgttatcgtggagcatatgtacaacgatatggactcgcgccaccgcgtgatgtccccctgcatccagatcatcaatactctaatggctcacttcaagctgtgcaagagggacaacacccaagcagttgcacaactcggcgatcgagttcccactcgtgtaccgcaaggagaatgctgccaccactgaattcacgatcacctttgagtcgtccaggaccaacctgctcatgtgatgtgcctcaccggactggctgtatacacctgagttttgtgtctactgcccagagagatcaaggtt

SEQ ID NO: 22217 - DNA, 420 bp, Zea mays
  misc_feature (40)..(43): n is a, c, g, or t
  misc_feature (52)..(55): n is a, c, g, or t
  Coding DNA Sequence Number=SeqID_7814
ggagagttcagatacaattgacaacgtgaaagctaaaatnnnnacaaggaannnntcccacctgaccagcaaaggctcatatttgctggtaaacaattggaggatggtcgcacccttgctgattacaacattcaaaaggagtccacccttcacctcgtgctccgcctcaggggtggcatgcaaatcttcgtcaagaccttgaccgggaaaaccatcacccttgaagttgaatcctctgataccattgacaatgtcaaggccaagattcaggacaaagagggtatccctccttatcagcagaggttgatttttgctgggaaacaacttgaggatggaagaaccctagctgattataacatccagaaggaatctacccttcacttggtgctcaggttgagaggtggcatgcaaatttttgtc

SEQ ID NO: 22218 - DNA, 444 bp, Zea mays
  Coding DNA Sequence Number=SeqID_7815
gcatatggtagtgcaggatctccgccagatattcccccagatgcaacacttgtttttgaagttgagctagttgcctgtaggccacggaaaggctccagtttaggaagtgtttcagaggagagggctttgcttgaagagctgaagaagcagagagagcttgctgctgctgccaaagaggaggagaagaagaagagggaagaagcaaaagcagcagctgcagctcgtgtgcaagccaagttagaagccaagaaaggtcaaggaaagggtaaagggaaagcaaagtagggacttcaaacatctacatgaacctgatgtataagataatcaaatagctatttgtccagcatctgtcttctctataagcccatcctaaactattgtttaaattaagtgccagactgacatcattcagatacatgatatggttatactatgtttggtagc

SEQ ID NO: 22219 - DNA, 581 bp, Zea mays
  misc_feature (217)..(217): n is a, c, g, or t
  misc_feature (405)..(405): n is a, c, g, or t
  misc_feature (439)..(439): n is a, c, g, or t
  misc_feature (458)..(458): n is a, c, g, or t
  misc_feature (521)..(521): n is a, c, g, or t
  misc_feature (537)..(537): n is a, c, g, or t
  Coding DNA Sequence Number=SeqID_7816
agcgaaggaaccagcggcaacaagagacgaagacgggaacagacgacgcggcaaggcaggacccggaagagtgcggcggagacgaagagcggagacgagataggaagagcgcgggtggcaacgagagaagagtagggaagacgaccagaagacggagggagaagtggtagtagcgagtgcgcgcggacagcagaggcggctcacaggaagggagcanagagcgaggacgaaagtggagggagagacgagagcaagacgacgcgcagagagagcaacagcgagagacaagcggaagaagagatgacgtacacgacgacagcaccagatgcaacgagacagaagacggaacgagatacgcgaggagagagccgagaagagcgcagacaggaggacacagacgagagnatgcgagcgcgggcagcaaggacgcgagacaccncactcacagccaggaacgncaacgagagaagcgaacagagcacgagaatcacgaacagaaggacgcgaagagcggaactgcnaagtactggagcgagnagcgacgcggagacaagagaaggtggacgccaggtcgcgcgtgg

SEQ ID NO: 22220 - DNA, 394 bp, Zea mays
  misc_feature (26)..(28): n is a, c, g, or t
  misc_feature (114)..(119): n is a, c, g, or t
  misc_feature (121)..(122): n is a, c, g, or t
  misc_feature (164)..(165): n is a, c, g, or t
  Coding DNA Sequence Number=SeqID_7817
gatggttactttccggtttcaccagnnncaggttgttggtagagcccttccaactgaagccgatgagcatccgaagatataccggatgaaactctgggccactaatagaagttnnnnnncnntcaaagttttggtatttcttgaggaagctaaaaaaagttttnnttacaatgggcagatgttagcaatcaatgagatatttgagaagcaccccacgacatttaagaactatggcttatggctacgataccagagcagaactggttatcacaatttgtccaaggaatatcgtgataccactcttaatggtgcagttgagcaaatgttcactgagatggcctcacgtcaccgtgtaaggtttccttgctttctgatcatcaaaacagcctccatc

SEQ ID NO: 22221 - DNA, 487 bp, Zea mays
  Coding DNA Sequence Number=SeqID_7818
tccgtctttgtgtgctattctagggcctactgttcgccttctgggcctccttaaataggagccacctgccacctgctgactcctggctgcactctgatgagctgcccgcatgaacaagtcgggacatgagatcaggactacctctaccacaacgcatcctgcacttgaacgaaaggatactgtcatccatgtcacacgaggtctgcttgttggacaccctaaggaatgatctggagataggtcctggtgctccaaccatatacaactgcgtgattgagataccaaggggcaacaaggataaatatgaacttgacaagaaaactggactgatcaatgaggaccgagtgctgtattcatcacatgtgtaccctcacaactatggattcattcctcgcacgcatctgagaagacagtgatcctttggatgtactgggtataatgcatgagcctgagatcccagactgattcctacgtgcgaatgccatga

SEQ ID NO: 22222 - DNA, 576 bp, Zea mays
  misc_feature (83)..(86): n is a, c, g, or t
  misc_feature (532)..(535): n is a, c, g, or t
  Coding DNA Sequence Number=SeqID_7819
tttcttctagaattcgcgtcgcgttttagttctctctggttcgcgtcccacgacgtcgttttcaactggttccgagaatctannnnttttctggttctgtgcaagaagatgacgaccatggagagcttgattgggttggtgaaccgaattcagagggcttgtactgtgcttggtgactatggtggtgctgatggtaacgccttctcttctctctgggaagctcttccttctgttgctgttgttggtggccagagttcggggaagtcttcagttttagagagcattgctggtcgtgactttctgcctagaggatcagggattgtgacaaggcgtccattggtgttgcagctgcataagatggaaagtgggtcacaagaatatgccgagtttcttcacctgccaaggagaaagttcactgattttgccttggtccgccaggaaattcaggctgaaactgatagagtaactgggaagacaaaacaaatatctcccattccaattcatcttagcatctattctccaaatgttgtcnnnntaaccttgattgatttaccgggtctgaccaaagtggctgta

SEQ ID NO: 22223 - DNA, 563 bp, Zea mays
  Coding DNA Sequence Number=SeqID_7820
gaacctctgcttttgaatggagacatcaaaactggtctcgtcctcgtcgacgttgtcaatggcttctgcactgtcggggctggcaatttcgccccgagagaacccgatgagcaaatttctaagatggtggaagaatcggtgaggctttctagaaagttcgcagagaagaattggccaattttggctttccttgattgccatcaccctgacattcctgaacccccttatcctccacactgtcttattggaacagatgaaggaaagttggttcctgagctcctgtggttggaaaatgaaccaaatgcaacactcaggtgcaaagagtgcattgatggattcgttggttcatatgagaaagatggctctaatgtctttgttgattgggtgaaaaataatcagataaaacaaattttggttggtgggatatgcactgatgtatgcgtgctggattttgtctgttctgttttgtctgcgaggaatcgccgtttccttcctcctctggaaaatgtgattgtgtcttctccagcttgtgcaacttatgatgttccattacatgtagccaa

SEQ ID NO: 22224 - DNA, 531 bp, Zea mays
  Coding DNA Sequence Number=SeqID_7821
gccaagtcagatcccggccagtactcgccttcgtcaccgccaccgagcagaggccttcgtatctgagccataacggcatggcttcctgcacaacgtcgttttaccagattcttggaatcgccgccggcgcgtcagacaaggagattaaggcggcgtaccggcgattggcgaggatgtgtcatcctgacgtggcggcggacgatcggaaggactcgtcggcggacgagttcatgaagatccatgctgcgtactccacactatcggatccagagaaacgtgccagctatgacagaagcttgttccggcgtcagcggccgttgacgatgacggcgtcgagattttccggttacagtggccggaaatgggaaacggaccagtgctggtaacgagttgactcgtccgagtgagttgagtggaaccagttagttaaagatatggatcttaggcgtagttattggatcgcctttgagtttgcttactaaatactaattattattattatattagtaaatggcccgagtgtgtactata

SEQ ID NO: 22225 - DNA, 588 bp, Zea mays
  misc_feature (103)..(104): n is a, c, g, or t
  misc_feature (560)..(562): n is a, c, g, or t
  Coding DNA Sequence Number=SeqID_7822
ttaccttacctctgcaattcaagatggctgatgatgactacgatgatgtcgacatggggtatgaagatgagccagcagagcctgagattgaggaaggtgcagnngaggatgtggaaaacaaaaatgaagacataactggagagcctcttgaaactgaggacaaggaagaggaacaaccagtagagcgtcctcggaagacatcaaaatttatgactaagtatgagcgtgccaggattttgggtacccgtgctcttcagatcagtatgaatgcgcctgtcatggttgagttggaaggggaaactgacccacttgagattgccatgaaagagcttcgagagcggaaaatacccttcaccatccgtcgctacttacctgatggaagctatgaagattggggagttgataaactgattgtggaggactcctggaagaggcaagtgggtggtcaatgatgttctgaactgacaccaagatgtcttgaacatttatctttgttttgtctgacgttgatactgatatatgattctaccataaaattggtttgtagctttgtattaatnnntgggtgcctatgtatatctgttcctt

SEQ ID NO: 22226 - DNA, 560 bp, Zea mays
  misc_feature (118)..(123): n is a, c, g, or t
  misc_feature (131)..(134): n is a, c, g, or t
  misc_feature (453)..(454): n is a, c, g, or t
  misc_feature (514)..(515): n is a, c, g, or t
  misc_feature (531)..(532): n is a, c, g, or t
  misc_feature (535)..(535): n is a, c, g, or t
  Coding DNA Sequence Number=SeqID_7823
tctttctctctctagggcaaaacctcgttcaccatgaacatcttcaggctcgccggtgacatgacccatcttcttagcattctcgttctcctcctcaaaatctacgccaccaaatcannnnnnggatttcnnnnaagactcaagagttgtatgcaattgtgtttctggcacgttatttgaatctgttcacggacttcattttcatttacaacaccataatgaaggtggtgttcattgcgagttcattggccattgtttggtgcatgcgtgttcaccctattgtcaggagaagttatgacaaggaactcgacacatttcgccactatattctcattggggccagctttgttttggcactcatcttgcatgagaagttcaccattcaagagatcttctgggcattttcaatatacttggaggctgttgcaatactgccccagttggttttgttgnnacgtagtggaaatgttgacaatttgactgggcaatatgtattctttctaggtgcatatcnngcattttacattctgnnctngatataccgctatctgactgagcct

SEQ ID NO: 22227 - DNA, 553 bp, Zea mays
  misc_feature (443)..(444): n is a, c, g, or t
  misc_feature (471)..(475): n is a, c, g, or t
  misc_feature (513)..(513): n is a, c, g, or t
  Coding DNA Sequence Number=SeqID_7824
tcaattcctatactttcactccagaacaataattaaaacaacaatcacattgatcttacgaaagatcggagaggatctgattcaagtgcccacatatacatatagagatatatatatagttacagttatcactatagctatagtgaatcatgccaccttgtagatacgctttcggaagggccgatgaagcgactcacccagattcgatgagaggcactttagctgagttcctctccactctagtctttgtttttgcaggggaaggctccgttcttgctcttgagaagattttgattggtccatcaacaccggcagggcttgtagtggttgcactggcacatgcgtttgctctattcgcagcagtttcagcggccattaatgtgtccggtggtcacgttaatcctgcggttacattcggtgcacttgttggaggaagaatctcnntgatccgagcagtttacttctgggtannnnncatccttggctagtattgctgcatgcttactactcagnctgcctacaaatggaatgagaccgtgggtttccatgttgc

SEQ ID NO: 22228 - DNA, 524 bp, Zea mays
  misc_feature (41)..(44): n is a, c, g, or t
  Coding DNA Sequence Number=SeqID_7825
ggcagcatcagcagcttcaagcctgcaaatggcagcaacannnncctgcatttcagcatctcaccgggttgttaaggcaggtgccaacatcctttctgtcaactctaagaacacagcatgggataaactcaccagtgcttgccatgtttcgtcccttcaaactcttcaaaggaatttcacatcatcgtccggacaattcagtaaattcaccacaaaagcaatggccgaatccagtgaaactaaacctttgtctgggttaccgattgatttgagaggtgaacgggcatttattgctggcatagctgatgacaatggatacggatgggcgattgcaaaatctctcgcagccgcaggggctgaaattttagtcgggacatgggtgcctgctcttaacattttcgagaccagcctgcgacgtggaaagtttgacgcatcacgtgtgttgcccgatggctcgttgatgaacattacaaaagtatatcctttagatgcagtctttgacaacctcgaggatgtacccgaag

SEQ ID NO: 22229 - DNA, 485 bp, Zea mays
  misc_feature (448)..(449): n is a, c, g, or t
  Coding DNA Sequence Number=SeqID_7826
agtgatgcgctacttgctttcaaaagcaaagtttctgatcctagcggtgcaatgcaatcgtgggatggaagtctcgttgatccatgcactttgcttcatgtgatttttgatagcaacaaacatgtcattcgtgtggacttgcccaaacaaaaactcgccggatcattagcacctgagcttagccagctgaagtctctgcagtacttggagcttcacggaaacgcgttaaccggaacaatccccgcggaattgggtgatttgccgaatcttatttcaatggatttatttgacaataatttagtaggaggaataccaacatcttttggaaaattgaagtcactcaagttccttcggttgaacaacaataaactcacgggatcagttccaagagaagtgaccgctctaaacctcccagttttagatgtctcgaaccaaaggaaaccttagnntttgaaaagactctacggcttggagttgaacggact

SEQ ID NO: 22230 - DNA, 520 bp, Zea mays
  Coding DNA Sequence Number=SeqID_7827
cctgacctgaccaccaatgtgaatttgatttagattcgtttacatattccgtttcatcgtgtggaggaagtaaaagagtgtagcaacagaggcagcagatcaaggtgtattgtatctgcgacgtggtggagaaagagagagggaagaacttgtgtttggatttcatttttcttttggcgaagatgacggatgttatattgcatatatacgacgtgacgaatagtgaatccgagaaggcgaataaaactattcttcaaataaacaagatctttaaggacggtataggaataggtggcattttccatagcgctgttcaggtatatggagataatgaatggtcttttgggttctgtgaagaaggaactggagtttttagttgcccttgtggaagtaatcctatgtattcatatcgagagtgcattgtacttgggaagacgactttttctatcttgaaggtaaaccagattttgcgagaatttagtaaagaatggccaggaagttcatatgatttgctatccaa

SEQ ID NO: 22231 - DNA, 577 bp, Zea mays
  misc_feature (65)..(71): n is a, c, g, or t
  misc_feature (478)..(479): n is a, c, g, or t
  Coding DNA Sequence Number=SeqID_7828
aatccgatgttatgaggttcttgcagagggtgaggtgctgggagtacagacaacagccttcaatnnnnnnncttcaaaggcctacccgtcctgatagggcccgtcgccttggtttcaaggctaagcaggggtatgtcatctatcgtgtccgtgtcaggcgtggtggcagaaagaggccagttccaaagggtattgtgtatggaaagcccaccaaccagggagtgacacaactgaagtttcaacgaagcaagagatcacttgctgaagagcgtgctggtcgtaagttgggaggactcagggttgtgaattcatactggctcaatgaggactcaacgtacaagtactttgaggtaatcctcgtcgaccctgctcataatgctatcagaaatgacccaaggattagctggatcgtcaaccctgttcacaagcaccgtgagcttcgtggactcacttctgaaggaaagaagaacaggggtcnncgaggaaagggacacagaaaccacaagatgcgtccttcccgcagggctacctggaagaggaacaacagcctttctcttcgacgttaccgttgagctta

SEQ ID NO: 22232 - DNA, 568 bp, Zea mays
  Coding DNA Sequence Number=SeqID_7829
tcggtttcaccccataagagtctttactttactattcatcttcgcacctaaacagattcgttctacactctactttctatctctctcaagggggtgttctgagatcacattggaaaaaatggtgaaggctgtagccgttcttaacagcagtgaaggtgttactggaaccatcttcttcactcaggaaggcgatgctcccactaccgtaacaggaaacatttctggccttaagcccgggcatcacggcttccatgttcatgcccttggggacacaaccaatggttgcatgtcaactggcccacacttcaatcccgctgggaaagaacatggtgctccagaagatgagcatcgtcatgctggtgatctaggaaatatcactgttggtgatgacggtactgctacctttacaactgttgacaaacagattcctctcactggaccaaattcaatcattggaagggctgttgttgtccacgcagatcctgatgatcttggcaaaggtggacacgagcttagcaaaagcaccggaaatgctggtggaagagttgcttgcggtatcatcgggctg

SEQ ID NO: 22233 - DNA, 599 bp, Zea mays
  misc_feature (100)..(105): n is a, c, g, or t
  misc_feature (145)..(151): n is a, c, g, or t
  misc_feature (513)..(513): n is a, c, g, or t
  misc_feature (554)..(556): n is a, c, g, or t
  Coding DNA Sequence Number=SeqID_7830
gttcgggactccaatctctgatccttcattgttactggattgaccgccatggatatggtgaagataacgccgtacttggttgcgctgaccgtaatgatcnnnnnnggtgtcacacacgtgagatccgacgcatctgaccatcgtnnnnnnntcggagacgatgttcctctctatgcaaacaaagtaggacccttccacaatccgagtgaaacatatcgttactttgatctcccgttttgttcttcagctcccatcaaggaaaagaaggaagctcttggtgaagtgttgaatggagatcgattagtaagtgccccctacaaattagactttttgaatgacaaagactctgaaattgcttgcaagaagagattaactgtagaagatgttactaagttccgagaatcagtttctaaagactactattttgaaatgtactatgatgatttgccaatatggggcttcttgggaaaagttgataaggaaggcaaaaccgattcatccgaatacaagtantacctttttactcatctacagtttgaaatcttctacaatannnaccgtgtcattgagattagtgtacgatctgatccacataccct

SEQ ID NO: 22234 - DNA, 455 bp, Zea mays
  misc_feature (37)..(37): n is a, c, g, or t
  misc_feature (51)..(51): n is a, c, g, or t
  Coding DNA Sequence Number=SeqID_7831
gcggcgggcaccgcgacctcgctctwccccagawtrnhccacccgcaccanyycccgtacggbcggcgcctccycttcctcgtctcytcbgcgtcgcagtcgcaggccggcccgggcactcctcccacccctstaccagthcccgtcccctccgacccccgcgctgccgtttccggcaacctccctttcttcgaccgcdtcctctttccggactcgttcccgctttawaccccbccctccaaggaggaggaggacgcggcaccctygcagayygatgaagcggtggcgccggccgtccccytyagggaggagacggagacagaaarggaggcgttgaggctgcygcmgagggcggtcgtyagcwactgcdgcgagccccttgggacggtggcggcggaggacccccagttcacggagatgctcaactacsaccaggtcttcatcagggacttcgt

SEQ ID NO: 22235 - DNA, 497 bp, Zea mays
  Coding DNA Sequence Number=SeqID_7832
gggcatgcatgatcaagcctgcgtacgcggacgtacacccgaacggacgactcgagcgatgcagcatttcgagcagggtggacagttcgaagatccgaccaacacagagaaccacaactgggttaatgagaaagtgaacttgtgctgcggccaatctgacttcagcgatagaagaaagaacataaaggataacgagatactcagccaaactttggtggagctcatcgactatattgcctcgagcagtgagaaattttctcacgcaagcatgcaagacatcacacaaatggcttctgcaaacctgatcacgacactgagtactcctcctagagacaacaaagtggatggcttagatgtgcatgacgacgagcctgtcatggaccctgcatggccacacttgcagattggctatgagttggtcttgagattcatgcactctcaacagacagacgccaagttgggtaaacggaacatcgatcattcggttgctctgaggc

SEQ ID NO: 22236 - DNA, 564 bp, Zea mays
  Coding DNA Sequence Number=SeqID_7833
gctagctgacatgctacggcgcttgcctgtcgcaggaggcgtaagcaggcagcggaagcctggatgcttgcgctaccactctcttaccttctatcaccagccctttcggttacgacatcacacacaggtggcccttggtgccgaatctgttcagaacgcgaaatgccgatgatcatgctccaccatgtctaaatccgtcgtccccgcggtggtgatgaagaggaacgccgcgctgctggccgagatgcgtggaaggatatgactaggaaatacgcaagctagaggataaaattgctgatgcagacgagaacttggatgagagcgaagtccgtgaatcacatcttggcaaatctgtgtactttataagggacggcgagaaggaaaacgtcctggaacagattaaagtcactgaaggaaaaactgtaactgttgaacaaaagatggatcttgtgttcccactttgcagattggatttttctacatggaatgttgatctgatatcaaaatccatcgataaggcaaagaacttgtttgaggaaggaggcgattgtgagacgaacaaca

SEQ ID NO: 22237 - DNA, 265 bp, Zea mays
  Coding DNA Sequence Number=SeqID_7834
atgggccctatccagacggtcgcgtgtccgtcatgcgcatggacaagctgggctccttcgagctgtcagcggggtcgcatgttgatctcatcctgctttacgattataacgacaccgcccaggaatccactggcgccaaaccgctagatgtggtgcgttatttcacacgcgtcacccagcgtctgatcaccgccgtgtccgccccaccgtcggaaggcgtgctatacgaggtcgacatgtggctgcgcccttccggcaataaagg

SEQ ID NO: 22238 - DNA, 481 bp, Zea mays
  Coding DNA Sequence Number=SeqID_7835
tggatgtccatctgcctctaactttcgtgagggactcagtaggggaacctctgtacatgcttttccgtggaattaagcatcaagtggacaaggggccggtggacagcgtgactggaaaagccaaatataccctgaatgacaaccgcttgctccgagaggatgtggagtaccgtcccctgaccttgaacgtgatgttggccatgggccctggagcaggagaagcccagggtgtgcctgtgaaggttctggactgtgacactatctctcaggccaaggagaagatgctggaccagctttataaaggagtacctcttgcccagaggccagaccctcgcaccctagatgttgaatggagatctggggtggccgggcatctcattctttcagatgaggacgtgacttctgaggtccagggtctgtggaggcgcttgaacaccctgcagcattacaaggtcccagacggagcaactgtggccctcgt

SEQ ID NO: 22239 - DNA, 492 bp, Zea mays
  misc_feature (136)..(136): n is a, c, g, or t
  Coding DNA Sequence Number=SeqID_7836
tgtttaggaggcacccagaatttgcaaaggttgacgcctccataacagggcaatctgatgcgggccactacattccaacgcttgcaagcagagtccaccaagagaaacaatttatcttttttttttctaaaaccangaaggcataggcgggcggggacgggctcactgatccagaaacccatccaaagcctacacagactatgcactggaaaggaatccaatcacaacatccggctacgaaaggatcaatcggtgcattccaccacgtgaatgggcaatgaacaagtcaggacctgacaggaaagcatcatgcatggcagcttatatggtctgcaacaacattctgaactccatcatgaatctggtcgggacaaagaactactatgacgtgaggaacgaatgcgaggcgaagcttagctatgacttctcaaacctggagaggttctctcctgacaaaccggccaaggaggcgcctggagtcagcgacataga

SEQ ID NO: 22240 - DNA, 470 bp, Zea mays
  Coding DNA Sequence Number=SeqID_7837
atttggattgaggtgcttgtgatcggctacatcgagttccagcgcaaccccgagctcgacccggagaaaaggctgtaccccggcggctcctacttttacccgctcgccttggcggccgaccccaaaaaaaaggagcggctgcaactggcggagatcaagcacgcgcgcctccccatggtcgccttcctcgggtttcccgtgcaggcccccccccccggcaaggggcccctcaacaattgggcccccccccttagggaccccctccatacccccatttttgacacgtttggaggatccttttaagcccccccttgatccgccccgtccatcgatcgaaacgtggtcttgaattaactatgatagatctctatgagcctggagatgggtcaaccccccgggcggtgtttccttttgtgatgaaagggaaaaagggtatgggccaaaattgatcaacccgtcgggcttacgtt

SEQ ID NO: 22241 - DNA, 349 bp, Zea mays
  Coding DNA Sequence Number=SeqID_7838
tgtctccgtcggaccctactcgggtcagggcgcagcacccaaattcggcgactacgaggctcagcggcactggatggagctcaccctccacctcccctcctccgactggtaccgcaacacctccgacaacgacctcgcttactggggcctcgactacccgcccctctccgcctaccagagccggctccacgcccgcctcatcaacgcctccctccccgacgccgtcgccctccgatcctctcgcgggtttgagtcccacgaatcgaagttgcttatgcggtggacagtactctcgtctgatctcatggtgttcttccccgcggcgctatggttcgtgtgggcgtacatc

SEQ ID NO: 22242 - DNA, 458 bp, Zea mays
  Coding DNA Sequence Number=SeqID_7839
tgcagaactggttgccgcgctcgaatcatattcatcccacctcgaaactaccttcctacaaatcgaattacctccgacaaccccgggtgcagttattccccccagcttcgacctttctcctgcatacgtgaccgcgctggattcggagttctcgcgcgtgtatgaggaataccaccgccgtattacacttgtgcaatcaatttcagaggagattatcaagctctgggcggagcttggaacccctcaggtgcagaccgattcaaacatcgttcggcactatcgggaatcgccagaacagcttggacttcacgagaccgatttaaccaacttgattgcgagacgcgataagttggtcgaagagaaaaagggacgcgagcgcaagatcaaggagctccgcacgaatgtcgaaagcctatgggagagatttggagtggaagaggccgatcgcaaggcattcc

SEQ ID NO: 22243 - DNA, 543 bp, Zea mays
  Coding DNA Sequence Number=SeqID_7840
tgaagacaaaggaccaggccatggaggcgttcgtgacgttccaagcttgggcagaggtggaggcggaaaccaagaacggtgttgtcgagaggagaaaccagaccgtgatggggatggccaggagcatgctcaaggcgatgggcgtccctggcacgttttggggggaggcggtctccaccgccgtctacctgctgaacaggacaatgacgaagggaaatggcggtaagacgccatatgagttgtggcatgggaggacgccagcggtccatcacctgcgcaccttcggttgtgtggctcatgtcaagagcacaggccccaggatcaagaagctggacgaccgaagcaagccgatgatttttgtcgggtatgaacctggcacgaaggcataccgggtgtacgacccgacttctcgccgtgtacacctgagtcgggacattgtttttgacgaggaggcgcactggagctggtctgacaatgaacaaaaggaggatgatggcgagttcacgatcagctacgctggcgtcacctatttctccaatggat

SEQ ID NO: 22244 - DNA, 576 bp, Zea mays
  misc_feature (301)..(301): n is a, c, g, or t
  misc_feature (459)..(459): n is a, c, g, or t
  Coding DNA Sequence Number=SeqID_7841
tggaaatttcgctgagctcggcccattcctcctcctcaactctcgctccagtkgsctctcccgcaaccgcaacckctggaaccgccgcttcggcgtcatcttcatcgacaacccgctcggctcgggcttcagckcgccctcttcactcgccgacatccccagggacgagcccaccatcgccgcgcacctcctcgcggcgctgcagtygttcatggcgctcgacgcggctttccgcgckctccctctgttcctcgcaggagatawctacgcaggcaagtacatyyycgctgccgctaggacnatcykcgacgcgaactacaagctcyccgckggcyatatggttaacttkcagggcatcgtcatckgcaacggcatgactyaccccgttgcgcaggttaccvttcacaccgaccarggtwactttcgccgggctcatcaacgccaagcagaaggccaccntcgagggcattcagaacaagacggtgagcyttgtgagggccggcaacttggcsgaacagggaaggagccgaacgcatcataagcttcytccggaaaccacctggttgcgacggcttt

SEQ ID NO: 22245 - DNA, 544 bp, Zea mays
  Coding DNA Sequence Number=SeqID_7842
atcgctaaacatttcttccagctggaaggagaaagcgccctcaccagcctgatcctcacctatgcggcctttgcggtggcgttcttttttcgcccgttaggggcggtgctgtttggccgcctgggcgatcgctatggccgtaaaccggtgctgatcgcggtgctggtattgatgacgctggccaccgttgccatcggtctggtcccggtttatgccagcattggcgtggctgcgccgctgctgattacactgctacgcattttgcagggactgtttgcgggcggagaatacggcggtgcggtctcgctgatgaccgaatcggcgccgcccggcaagcgcggattttatggcgcgtggcagtcgctgacggtggcgctcggactgctggcgggcgcgggcgtggtggcagtactgccgctgctgttgggagacgccgccatgaacgcctggggctggcgcattcccttcctgctggcgctgccgctcggcgcagtggcgctgtggctgcgcagcggactcgacgaatcaccgcagttcagccaga

SEQ ID NO: 22246 - DNA, 472 bp, Zea mays
  Coding DNA Sequence Number=SeqID_7843
ggagcaggtttcatgccaaatcattctgaagtgacctctgcggtggcctctgaagccaacgcccattacagcccgcgtctgtgtaacgacgacctggcgccgacccgcaaccagagctggtcgtggtacaacattttttcgttctggatgtcggacgtgcacagcatgggcggctatgtggtggcggccagcttcttcaccctcggtctggccagctggcaggtgctgctgtgtctgctggtgggaatttgcatcgtgcagctgtgcgctaacctggtggcaaagccgagccagatggccggtgtgccttatgcggtgatttcgcgtcaggcatttggcgtgttcggggccaacatcccggcggtgattcgcgggctgatcgccttcgcctggtacggcattcagacctatctggcggcgaatgcgctgatgctggtgctgctgaagttctacccgtcgttaagcagcatga

SEQ ID NO: 22247 - DNA, 439 bp, Zea mays
  Coding DNA Sequence Number=SeqID_7844
aaggtcttcgacctcgagatgccaggcgcggagaggagcttcttggccgagtgcgaagcgctgaggagcatccagcatcgcaaccttctccccatcagaaccgcgtgctcggcggtcgacaacaggggcggcatgttcaaggccttgctctacgagttcatgcctaacgggagcctcgacacgtggttgcaccctagagcggcgccggcggcgggcgagaaagctccgaagcgtctagggttctctcagagagtgaacatcatcgtcaacgtagccgatgtgctggactatttgcaccacgagtgcgggaggccgactgttcactgcgacctgaagcccagcaacatcctcctggacgacgacctgaacgcccttctgggagatttcggcatcgcgaggttttacgctgactccaagtcagcaccgtcgccggcggtag

SEQ ID NO: 22248 - DNA, 483 bp, Zea mays
  Coding DNA Sequence Number=SeqID_7845
ttgaaggctaaactggctgctgctcagaaccgcatgaagatccaagctgataaacatcgattggatagagaatttcaagtgggggatagagtgttattgaagctgcagccttatgtccagaattcagtggtcagtcggtctcatcctaagattgctttcaagttctttggtccctttacagttcttcagcgtgtgggatcagttgcttataaactggaacttccggccacagcactgatacatccggtcttccatgtgtctcagctcaagccattcattcccaaatacactcctgttttctctgatatttcacagctggtggacttgtctgcagtagaggtcaagccggtgcagtttgtagatcggcgcttggtgaagaagggtaacaagccagtggttcaggtccaagtggtgtggtcaggtctgccatctgatgccactacttgggaagactttgatgtgctcaagactcgttttccagaa

SEQ ID NO: 22249 - DNA, 447 bp, Zea mays
  Coding DNA Sequence Number=SeqID_7846
ctgtcaggagacattgaaatccctataccaagcgatcgcttcaacgttaatggatggtcacggtacaacacttacatggctaacaaggcctctgagatagagggactgcgcagcctggtgaaggagatggaagagagagaggcgaagcttgagggcgagctgctggagtactatggaatgaaggaaatggagattgatgtcgctgagctgcaaaagctgctcaagatcaagacagtggagatcgacatgctcaataacaccataaactcactgcaggaggagcggaagaagctgcaagatgacgtggaacgtggagcagttaccaagaaagagctcgaagtggctaggaccaaaatcaaggagctgcagcggcagatacaggtggaagcgggccagacaaaagatcagctaatgctgctgaaacagcaggtcattggattgaaggcc

SEQ ID NO: 22250 - DNA, 575 bp, Zea mays
  Coding DNA Sequence Number=SeqID_7847
taggctatagccactaccacatttgcttcgctgtctcgatccacactcctcgacttgctccggcgagttctactccggaccgggccctctgatcggtaccgagcgatgacccatgacggtcctctttgacgagtgcggcagatccttcatcatccctgcggaagcagaagaataagacgcgccttaggggtcttgatgcgcataagggcgacatcgcctcgtccaaggccgacgggcggatcctccgcacgtctattggacccaagggtatggacaagatgctccagtcccccgacggcgacgtcatcatcacaaatgatggagcgaccatcctggagcaaatggatgttgacaaccagatagcaaagctgatggtggagctgtcccgtagtcaagactatgaaatcggggatgggaccaccgcatgggtaatcatgtcaagaactcttctcaagctgccgataaactctggagcgtggtattcctccattagggtgcctgaaggctatgagatgacgtcttatgtatcttttgaacacgtataaaatatatgcaacaagtctgagtcatcgtag

SEQ ID NO: 22251 - DNA, 581 bp, Zea mays
  Coding DNA Sequence Number=SeqID_7848
gcctcttctactcgcgaaattccaaaacccctagtcattctccaccccatccagacgcgccggcctcccctccctcatgcagctaatggaggaggataccgatgccggcatcgccgccatcggcaatgagaagcgccgacgagtcttcttctccgacaccgatgctggtgctgaggcaaatgatggaatgacagtgcctctagtatgcaatttaggcgaggtgagttctgcaaactgaactgctattagggcatttgacctacatcatttttttggagaagatggtgaaaatatatggctacaaaaatcttaagataagtgtgtggataagtgcgaaatctttccatggatatgctgatgcttcatttgacgaaacatctgatggagggaaaggaataacagatctaaagtttgatattcagaacatttttggagaaaacttggtagaaaaagaggaattcctgcatacatttctcgaaggaatgtgaatatataacaactgcactgacgaatgacagtgtcattaagcatgatgggtcatatgaatcagatcctgcagttgacattgttcgagtcgaaca

SEQ ID NO: 22252 - DNA, 529 bp, Zea mays
  Coding DNA Sequence Number=SeqID_7849
tgaaggacacactgctgacccacgaccagcgccacgaacagggcgccgtaacgccaccgatttatcagtcctcgctgtttaccttcagcgattacgacagcatgatcgcccgctttcgcggtgagagcgaccagccgctctattcccgcgttgataatccgacggtcaaagcgctacaggataaagttgctgcgctggaaggcggtgacgcttgcctcgcctttgccagcggcatggccgccatcagcaacgcgattttgagtgtggttcagccaggcgcgaaagtgcgtttcggtatcacgacgcagtttgttgatggcgacgatgaagcggcgatggccgccgcgctgcccggcgccagcctgctctatctggaaagtccctccagctgggtgatgagtgaacagaacctgcggcagctggccacgctggcgcgcgatgcaggcgtcgtcacgttgattgataacagctgggcttcgcccatattccagcagccgctgctgtgtggtatcgacatcgtggtgcactc

SEQ ID NO: 22253 - DNA, 588 bp, Zea mays
  Coding DNA Sequence Number=SeqID_7850
gagatttcgacgcactgaagttcaacgacggcgaatccgtagacgacttcagcgcgcgcatcggccggatcacaggtgagctggctgttctcggtaacgagtacaccgaggaggaggtcgtccgcaagttcctgcaggctctcccgtctcgtttcgaccagattgcagcgtcaattgagacgttgctcaatctgagcgaaatttcagtcgacgagcttgtcgggcgtctgaaggcggccgaggagagattggtgcaagaactctcccggatcacctctcgcctcaagatcgcgggaaatggcggatctagttcaaccggaggttcctcggcgctaggcaacgatcaagcacacggtcgtggccgcgggcgcggcaggaatggaggtcatcgtggcggagcaagatccggtcgtggtgggcgttcaatcgccaacgacgagtgccgctactgcggtaatgcgggccactgggctcgcgaatgcaagaagaagaagcgcgatgagcaggcacacgctacacaggctgatgaaggcgatgaggccttgctggtggcggacgcctgcatcgacgtcgcacccgttgaagatg

SEQ ID NO: 22254 - DNA, 572 bp, Zea mays
  Coding DNA Sequence Number=SeqID_7851
aggccgacacgctgatttcgcaggtggatgaggcgcagcagctggtgattatcggcaacagttttatcggtatggaagtggccggtgcgctgcgtaaccgcgacatagatgtcacggtggtggcgcgtcatccgctgccgtttgccagccagttcggcgaagagattggccaccatttttatgagctgcaccgcagcaacggcgtgaaatttgtcgagggtgaaccggaagcactgaccggtgaaggtgcagtgagtggcgtgcggctcaaaggtggcaaaaccgtgccagccagccaggtgctgtttgccaccggcattgtgccggccacccattttattcacgacctgcctttacagaaggatggcagcctgctggccgacagtcagctgcgggtcagtgaaaacatctgggtcgcgggggatattgccagctatctcacgccgcgtggcgtgcagcgcattgagcactatcgcgtggcgcatcagcaggggcgcattgccgcgctgaatatgctgggcaaacgcatcatgtacgatcgcgtgccgttcttctggactgcgcattacggc

SEQ ID NO: 22255 - DNA, 577 bp, Zea mays
  Coding DNA Sequence Number=SeqID_7852
ggatgcttgatatccacaatccatttgtgaagaaattcagaatggctagagatcacttggctggcaatgagcctggagatttcatcattagaattgtgggtgcaaaagaaggtgatcctgtgcaatacaatttaccaacaactaacgaactcgcgatgttggtagtaggagatttctccttggacactttcaaacgcgacatagtaatagaaacacatggtagagacctcaaacgtatatcttctctacatccagttttcatgcctttgcaatatcccttgctgtttccatacggtgaaagaggatttcaagtaggtgttctatataatggtatcaactctatagatgcaaataaacgacaatacatgacaatgcaagaatatttctgctaccagttccattacagaaagaatcagcgaaatccttatttatgttatggtctgctatccagtcaagcaaaggtagacgcacgcgcatgcattgaagaaaacagattaaactacattgctcataatcaagaaaaaatatgaattgaaactatacaaggtatttcagatgctgagtcgcggttttgtca

SEQ ID NO: 22256 - DNA, 124 bp, Zea mays
  misc_feature (33)..(33): n is a, c, g, or t
  misc_feature (98)..(98): n is a, c, g, or t
  Coding DNA Sequence Number=SeqID_7853
ctcttctcccaccccctgagtccaccctctctngccgccctccaccgatacgtgctgccgcgccgcccccgcccccccccccgcctcctccccgaccncctcttgcgtgcgcgcccccccccgt

SEQ ID NO: 22257 - DNA, 415 bp, Zea mays
  Coding DNA Sequence Number=SeqID_7854
gtcagcaccgcgtgagcgatgaacggatcctcaaggcgggcggcttatttgatggtgaccgcggtgtcgctcctcttcctggtgcggggcttgcgcgtgcgagccgccgcggcggcctcgtcgttggttttgccggacaagaggacacgtgtgatctgccagggcatgacggggaagaatggcaagttccatgccgaggaggacatcgagtacggaaaaaaaaatgggtggtggagtgactcacaagaaaggcggaactgaacatgttaggggtccatagtggttagactctgtagaagaagctaaggatgaaactaaagccaatgtgtctgtatatatatggaccataaccatttgctgccgtcgctataatggaggtgatggaggatgagatcgagcttgttgtgtgcattac

SEQ ID NO: 22258 - DNA, 244 bp, Zea mays
  Coding DNA Sequence Number=SeqID_7855
gacgacgcattgaacagaccgcttcctctacacaaaccgcagcccgttgctctcaaagcaaccagtagcatggaggcgctacccagcaaggtagcacaagtggaggctaccaggctcaatgaggatgaaatggcgcttatcatcaagcgcttcaagactgccttgaagggacacaaggagtttcccaacaaaaataaatcaaggggaaagcactcctgcttcaagtgcgggaggaaagaaagaa

SEQ ID NO: 22259 - DNA, 390 bp, Zea mays
  Coding DNA Sequence Number=SeqID_7856
agcattgtaggccatcatctcagagtgtcagatggaagtttcttgttaaaaggacgcacatgttggcgatgaggcacagtccaagagaggtagtctcacgctcaagcacccgattgagacacggtattgagagcacctgggatgacctggagaaaatctggcatcatactttctacaacgagcttcgtgttgccccaaaggagcaccctgcgtcgctcaccgaggctcctttgaaccccaatgccatcagggagaatatgacccaaattatgttggagactttcaatgctcctgccatgtatgtcgcactccaagcggcgctatcactctctgctagcgggcgtactaccgctatcgtactcgactccggtcatggtgggagccacactg

SEQ ID NO: 22260 - DNA, 587 bp, Zea mays
  Coding DNA Sequence Number=SeqID_7857
atattattggctaccggccgcttgtggtcagtgatgaaaagctcgggcgggaagtggatttaaccgcgcgcaaagattaccagtggggtccgaaaaacagcacccagcagggaccggcgaatctggctggcatcaaatttatcgtcacaccggaagatagcgtgcgcatcggcgcgctgctggccggtcaggccgattttattcgccaggtgcaggcgtatgacgaaaaacaggcacagcagcaggcgttcccggtttacgcagcgccgacgcgtggcgtcaacgacagcatcagcttccgcccggataacccgctggtcagcgatctgcgcgtacgtcaggcgctgttgcacgcgaccaacgcgcagcaggtggtgcaaaccctgttttcacctaactatccgcaggccacctcggtgatcgccgcctcggccgccgggtatgtgaacctcgcggacaaactgaaatacgatcccgcccgcgccaggcaactgcttgacgaggctggctggcagcccggcagcgacggcatccgcgccaaagcggggcaaaagctggccctgaccgtgtatgaatcgctgccgcag

SEQ ID NO: 22261 - DNA, 354 bp, Zea mays
  Coding DNA Sequence Number=SeqID_7858
aaaactcgctggagaaatacgcctccaacatgcgcaacccgatcaaggacgaaaagatcgcgtcgaagctggctccccccgccaaaaaaaagatcgagggcgccatcgacgcggccatcagctgggtggaccccaaccagctccccgaggcgggcgagtttgatgccaaaatgaaggagctggagagccttttcaaccctatcattgccaaaatgttccagggcgcgggtgcccccatgggaggctccggcggcatggacgaggaccctccggctggaaacggtggccctggccccaaaatcgaggaggtggcctaaccggtttgtgtcaggtttcgtgtgtctgctccagtgg

SEQ ID NO: 22262 - DNA, 444 bp, Zea mays
  Coding DNA Sequence Number=SeqID_7859
atggacctcgcgcttctgaagaaggccctgctgggcctgttcgccgcgcctgtggtggccatagtaacggcaagctgagcggcaagcgctaccgcctgccaccgggggccccgggcgcccgcgcgatgggaaactggctgtaggtggtgggcgacatggaccaccgctacctgctggacatggtgaagcagatcggggacatctttctgctgggcatgggcgtgcgcaacctggagggggtgtagaccccgaagctggtcaagggggtgctccacatgcacggcctggagttaggctcccgcacccgcaacgtcttgttcgacatgttcacggacaaggggcaagacatggacgatcacggtgtacggcgaccactggcgcaagatgctacagcatcatgaccgtcccgctgtcttcaccgacaaggaggtggcccagaaccgt

SEQ ID NO: 22263 - DNA, 532 bp, Zea mays
  Coding DNA Sequence Number=SeqID_7860
gaaacgatgtcgtatcttctaccgcatcttcactccggctgggctgtagatcaggcgattctagcagaggaagagcgtcttgtcgtcatacgtttcggccatgattgggatgagacttgtatgcagatggatgaggtgcttgcatctgttgctgagacgataaagaactttgcggtgatatatctggtggacatcaccgaggttccagacttcaacaccatgtacgagctctacgatccttcgacggtgatgttcttctttaggaacaagcacattatgatcgatcttgggactggtaacaacaacaagatcaattgggctatgaaggacaagcaggagttcatcgatatcattgagaccgtcttccgtggtgcaaggaaaggccgtgggctggtgattgctcctaaagattactccaccaaataccgctactaaccggacttggcaaaaacattaagatcaaaaaaactatgtctactgattctagtcagttgaaaaatatcctgtgaacttgtggcttatatgctttggt

SEQ ID NO: 22264 - DNA, 143 bp, Zea mays
  misc_feature (52)..(53): n is a, c, g, or t
  misc_feature (57)..(57): n is a, c, g, or t
  misc_feature (63)..(63): n is a, c, g, or t
  misc_feature (80)..(80): n is a, c, g, or t
  misc_feature (101)..(101): n is a, c, g, or t
  Coding DNA Sequence Number=SeqID_7861
caacgggcaaaacggccgcattgtgcgaaaagccgggggctgctgccggcannatancggganccccggacagccctgangacagatgggataatccctgngctgatacgtatgtcaacaaaaaagactggcggtgaaacact

SEQ ID NO: 22265 - DNA, 370 bp, Zea mays
  misc_feature (37)..(38): n is a, c, g, or t
  misc_feature (112)..(112): n is a, c, g, or t
  Coding DNA Sequence Number=SeqID_7862
gggagcatgcaaggcaaaacaccgagggaaacgaccnngcagaaggacaggggcagaagagccgaaccacggaagcacggccagagcgccgcacaaactacgctagaagccnggctgatatgagcatggcagggtattagcttggataaggagatcggcatccaagcaaccttaatgtagatcgctatagtggaaaaatattacacatcgacttcggagattgcttagaggcttcaatgaatcgagaaaagttccctgaaaaagaaccaatccgatagacccgaatgctagagaaagctatggaagttagcggcattgaggggacattccgaacaacttgtgaaaatgagatgcaaggtcttcgcacaaa

SEQ ID NO: 22266 - DNA, 394 bp, Zea mays
  Coding DNA Sequence Number=SeqID_7863
agaagggcaactgcgcgagctgccacgtgagccagcgcacgctcgaaggcggcccgccgcagttcagcgacttcggcctgatcgcgatcgcggtgccgcgcaaccgcgcgctgccggtcaatcgcgacccgcgctttcacgatctcggcgcgtgcggccccgagcgcaccgacctgaagggccgcgacgaattctgcggactgttccgcacgccgtcgctgcgcaacgtcgcactgcgcaagacgttcttccacaacggcgtctatcactcgctcgaggacgtgatgcgtttctacgcggagcgcgacatccatccggaaaagttctatccggtcgtgcacggcaaggtgcagctgtacgacgatctgccgaagcgctactggccgaacatcaa

SEQ ID NO: 22267 - DNA, 582 bp, Zea mays
  misc_feature (95)..(97): n is a, c, g, or t
  Coding DNA Sequence Number=SeqID_7864
aaaaacaacatcatgcttccactcccaggtttcaggagtaacaacaacctcgtcactgtctctgccacctcgtactcctcttgtgttaacccacnnncccatcttccacttccaacccagacaactcaaacgatcttccaccaccattcgttgctcctctgcgttgactcctcaattgaagtccaccttggataaggttgttacttcaaacaaagtagttttgtttatgaagggaaccaaggattttccaatgtgtggattctcaaacacggtggtgcaaatattgaagtctctgaatgtgccttttgaaacaataaatgtacttgataatgatatattgcgccaaggattgaaggagtatactaattggcctacctttcctcaactctacatagaaggagagttttttggtggctgtgatatcactgttgaggcatataagagcggggaattgcaagaactgttggagaaggcaatgtgctcttgaagcctcatttgacaagagcagatggaaggaatgagttagggaagagaacttcccaaggtagtaatcataccatgccttgtggatgatggaccaaa

SEQ ID NO: 22268 - DNA, 491 bp, Zea mays
  misc_feature (60)..(63): n is a, c, g, or t
  misc_feature (463)..(464): n is a, c, g, or t
  Coding DNA Sequence Number=SeqID_7865
gtttcagatccaaattcggtagccgctctttttcaaagaacagtctctccatcagaatgnnnngggaataccaataacaccaccactgtccctagcatcgttgtttatgtcactgttcctaacaaagaagcaggtaagaaattggctgaaagcattgtcaaagagaagcttgcagcttgtgtaaacagggtacctggtatcgaatcagtataccagtggcagggagagatccaaactgattctgaggaacttctaataatcaagactaggcaatcacttttggaagcactgactgagcatgtcaaagcaaatcatgaatacgatgtgccagaggtgatctccttgcccatcactgggggcaatcttaagtatttagaatggataaaggagagcacaagggagtgactgtcaagtttatagtctgagtatgtgagttcaagagttcttccgcctttgtgtgttnnataaagctggcatgtcatctatgtaac

SEQ ID NO: 22269 - DNA, 226 bp, Zea mays
  Coding DNA Sequence Number=SeqID_7866
tactgcggcgtctggaggcttttgagcatgccactgttgtcaggcttatggacgtttgtgcaacaacccgaactgaccgggagaccaaagtgaccctggtgtttgagcatgtggaccaacatctcaggactgtggtgaggaacaaggcacccccaccaggcttgccagtggagaccataaaagatctgatgcgccaatttctaagaggcctggatttccttcatgc

SEQ ID NO: 22270 - DNA, 583 bp, Zea mays
  Coding DNA Sequence Number=SeqID_7867
agttccttgaggatgccgcgcatgaactgcgcacgccggtcaccgccgtcacgttacagctggagaacctgcgtcagcacatcctgccgggcgaagccagccgccagtttgatcagctggaagcgggcgtcacgcgcacgcgccatctggtgacgcagttgctgaatatctcacgccaggaggatcagtccgtggtcgccagcgtcgagaccattgagcttgatgacctgctgaaggagagcattgagcaactgatggtggtggcggacaagcgcggcattgatatcggcttcaacggcaccgcgcactatcgtctgcacgccagccgatccgatctgcgcagcctgttcgataacctgatcggcaacgccatgctgcacacgccggagggcagcctggtggatgtgctgctgcatcgcgtcggtcatcatacggtagtggatattgtcgataacggccccggcatgccggagtcgtttatcgagcgcgccttcgatcgctttacccgctcgccggatgtccaggcgcagggcagcggcttgggattgtcgatcgtgcgcagcgtggcgcaaaagcatcagat

SEQ ID NO: 22271 - DNA, 566 bp, Zea mays
  misc_feature (92)..(96): n is a, c, g, or t
  misc_feature (106)..(110): n is a, c, g, or t
  Coding DNA Sequence Number=SeqID_7868
ttccttctgctaacctaaccaaatggctgatcctgagttggaagcaatcagacagagaaggatgcaagagctcatggctcagcatggcgtgnnnnnatcaacagannnnngaacagcagaaggctcaggaggatgcaaagatggaggcagaggaacgacgacaaatgatgctgagtcagatactgtctgctgaagcacgagaaagacttgcttgaattgcgttggtgaaacctgagaaagcaagaggtgtttaagatgttattttgagagctgctcaaatgggtcagataactgaaaaggtttctgaagaaagactcataacacttctggagcagataaacaaccagacaacaaggcaaaccaaagttactatacagcggcgtcgaagtgttcttgaggatgatgattaacttccacagtctcttcaaatgaaagggtcttcttgagtattgatttaatgctcaattgtgtattttatcgacaaaatattctggaagtgggttgtgaaatatatgtttcattttgaaattttaattgtcttgccagtcctcctaatcaaactatat

SEQ ID NO: 22272 - DNA, 464 bp, Zea mays
  misc_feature (164)..(164): n is a, c, g, or t
  misc_feature (318)..(318): n is a, c, g, or t
  misc_feature (426)..(426): n is a, c, g, or t
  Coding DNA Sequence Number=SeqID_7869
gggcgctcaaagctcgagcgtctccccatcggaaccctaatcctctctttccctactcgcgggagccaactccaccggggggggaagcgggagggaagcacctcgggcccgggaagatggggctcccacatctgggcgggagcgtggggcgcgccctggcgcanatgagcaacgccacggggaccgatgagaaggggctcaacgagggcctcaacgagagctcgcgcgcgctcctacaggccgaggtgcaggtcaagatggggcgcgacatgcaagctaacatcaagcgcatcgtgaaccgggaggcgcttgccgcangcaccaacaagcgcgggatcatgcggcaggctgtcttcacggaactctgcaccatgtgagatcctgggaagccttctttcactcccaaaaagggcaagccaagcgtantcatgggcggtgggctgcaaggggctgggaaaactact

SEQ ID NO: 22273 - DNA, 443 bp, Zea mays
  Coding DNA Sequence Number=SeqID_7870
acccgtggcgcatgagacctacaagggttcttctcacgcactgtactgcgttccgcacgtcatagagatctgccaagggtaagaagccaggcatgggtgccaatccagtttggaagaccattgcgcttggtgtcaagactcccactcaagccattgatgggacctacattgacaagaaatgtgcattcactgcaaccgtttctatcgaaggcagaattatatgctgcaacatgccacagtgctagaatgaacagaaccatcattgttcacacgaactacctccactttgtaaatatataccagaggtatgaagagaggcactccaacattccagctcacatctccccatgcttccgtgtgaaggaaggcgaccatgtcttcattggccattgcaggcccctatcagcaactgtgaggtacaatggcgctaaagtcattccagc

SEQ ID NO: 22274 - DNA, 533 bp, Zea mays
  misc_feature (138)..(138): n is a, c, g, or t
  misc_feature (440)..(445): n is a, c, g, or t
  misc_feature (485)..(486): n is a, c, g, or t
  Coding DNA Sequence Number=SeqID_7871
accatggcttctatggcaagcttggctgttgttcaaccagctactatcaagggccttgctggaagttccattactggaactaagctctctttcaagccctctcgccagagtttcagacccaagaatttcaggagtggngttgtggtagcaaagtacggtgacaagagtgtgtactttgatttggaggatctgggaaacactacaggccagtgggacttgtatggctcagatgcaccttcaccctacaaccctcttcagagcaagttcttcgagacatttgctgctccattcacaaagaggggattgttactcaagtttttgattctgggaggtggttccaccctggcatacttgagtgccacagcttcagatgacattctaccaatcaagaagggcccacaacttccaccaaagctcggtccccgtggcaaaatctaatnnnnnntcggaattccatctgtttagctcgcccccctacccctctnnttttgaattgaacatgtatatctctgcttgcctattgtgcaacgagt

SEQ ID NO: 22275 - DNA, 580 bp, Zea mays
  misc_feature (149)..(153): n is a, c, g, or t
  misc_feature (397)..(398): n is a, c, g, or t
  misc_feature (510)..(511): n is a, c, g, or t
  misc_feature (520)..(521): n is a, c, g, or t
  Coding DNA Sequence Number=SeqID_7872
agtgctagcctgagtcacagctcaagttcataactgaggcctggctacagatagttgaatgcaggcgggtgctgaagtggacatattcatatgggtactatttacctgagcatgaacatgccaaaaaacagttctttgagtacttacannnnnaggcagaatctggtttggagagacttcatcaatgtgctgaaaaagaactacagctattcctcaatgctgatggcccatccggagaattcaatgactttcgcacaaaattagctggattgaccagtgtgaccagaaactactttgagaatttggttagggcattagagaacggtttatctgatgtggatggtaatggcgccgcatccagcaaggcaacgagctctaaaaatgctgcagggagcannaaggggagaggtggaagaggaaagggaaccattcgagcaagcatgttcagcagaatgactgacgataatcattggtcttgtgagcattgtacctatgcaaatgtcagatctnngaccacttnncagatgtgcaatcaacagcgtcgatgaaaatcttggtccttcattggaaacacgtgtct

SEQ ID NO: 22276 - DNA, 547 bp, Zea mays
  misc_feature (144)..(144): n is a, c, g, or t
  misc_feature (146)..(153): n is a, c, g, or t
  misc_feature (491)..(494): n is a, c, g, or t
  Coding DNA Sequence Number=SeqID_7873
acagtgcccgtaggtcgtgttgagactggtgttttgaagccaggaatgatcgtcaccttctctcccgctgccctctctactgaggttaagtcagttgagatgcaccacactgccatgcctgaggctgtcccaggagacaacgtngnnnnnnnngtaaagaacttgtctatcaaggatatccgtcgtggtatggttgctggtgactctaagaacgaccctcctcaggaagtctaagatttcacttctcaggttatcatcttaaatcaccccggacaaatccacaatggatatgccccagtgctcgattgccacactgctcacattgcttgcaagtttgctgagcttttgtctaaggtcgacagacgtactggacatgaaacagagaaggagcccaagaacgtcaagaacggagatgctgctatggtccgccttgtgccatccaagcctatgtgcgttgagcccttcgctgaataccctcccctcggtcgttnnnntgtccgtgatatgagacagaccgtcgctgtaggagtcatcaagtccgtcaccc

SEQ ID NO: 22277 - DNA, 492 bp, Zea mays
  Coding DNA Sequence Number=SeqID_7874
agcaagtgcaatgcttcggccggaagaagacggcggtggcagtaacacactgcaagagaggccgtggtctcatcaaaatcaacggctgtccaatcgagctcgtcgagcctgagattcttcgtttcaaggccttcgagcccatcctcctcctcggcaggcaccgattcgccggcgtcgatatgcgcatccgtgtcaagggcggtggtcacacctctcagatctacgccatccgtcagagcattgccaaggcactcgtggctttctaccagaagtatgtggatgagcagagcaagaaggagatcaaggatatcctcgtcagttacgatcgtactctccttgttgctgatccaaggcgctgtgagcctaaaaagtttggtggtcgtggtgctcgtgctaggttccagaagtcttaccgttgattcctcttttttctcatgctctaagttttcagtactctctattttgtgccgctcctcttttattcatcaaggt

SEQ ID NO: 22278 - DNA, 543 bp, Zea mays
  misc_feature (142)..(147): n is a, c, g, or t
  misc_feature (157)..(160): n is a, c, g, or t
  Coding DNA Sequence Number=SeqID_7875
caacctgttgaaccccaagtgggatgaaggcatgttgtcaactgggtatgagggtgtacgtgagattgagaagaggcttactaacacagttggttggagtgcaacttcaggccaagttgacaactgggtgtatgaagaagcnnnnnnactttcattnnnnatgaagaaatgctgaagaagctcatgaacacaaatccaaactcctttaggaagctggtgcagacattcttggaagccaatggacgtggatattgggagacttcagaacaaaacattgagaagctcaggcagttgtactcagaagtggaggacaaaattgaaggcattgatcgctgaagttacacacccataattgagatgaatatacagagacattaactgctgattcaactgtaccttctgtctctgaagcttctttcccatgatgaattggtagttgttgccaatgccatcctttttaatgtaattttgttctccattgctcttttttccctgttgtaattttattcttcttcagggatcatgctactttgtgcagttgca

SEQ ID NO: 22279 - DNA, 400 bp, Zea mays
  Coding DNA Sequence Number=SeqID_7876
gttaccggatcatcttgcggatgttcatgatgtctttcacgtatctcagctgaagaaatgtctcagggtacctgaagagcagttatcaatggaagaccttagcgttcaagatgacctgacttatgctgagtatcccatcaagattttggatactttgactcgagttacgaggaataaggttataaagatgtgggcccatggcctcagcctcactcccgccgcgtgccagcctcgttcttgcgcgctggagtcgctgggtgtgggccgcatggacggggtggccatcttctccgcggaggctgggcgcagagctcaacgaccgcgtcaagctccgacaatcgcgcagccgcacggacccccctgccctcattaccaggcgcagaacgcgaaagctgggagc

SEQ ID NO: 22280 - DNA, 404 bp, Zea mays
  Coding DNA Sequence Number=SeqID_7877
tcagcgcatgcagggttgatgttcggcgggggttggtatcatggcggcccccatcgaagtcaccggtgaatccccatgaaatatctgcacagcatggtgcgcgtgcgcgatctcgacgcctcgttgcgtttctattgcgagggcctgggcctgcgcgaagtgcgccgcaaggaggtgcccgaaggcaagttcacgctgatcttccttgccgcggatgaaagccccgaagcggaagtcgaactgacctggaactggggttcgaccgaggattacggcagcgcacgcaacttcggccacctggcgtttcgggtggaggacatctacgccacctgcgcgcgcctgcaatcgatgggctacaccattcaccgtccgccgcgtgacggccacatggctttcgtgcgctc

SEQ ID NO: 22281 - DNA, 319 bp, Zea mays
  Coding DNA Sequence Number=SeqID_7878
aatgcatacaccgacgccgatacgtgggaacgcgtgtgcacgctcggcggcacgctgtcggttatggaactgctcgaggtcgagccggaggtcgtgttccgccggctcttctggcaggaaaacgtgcagcacttcgatccggccggtacgctctttctgtgctcgtgctcgcgcgagaaggtcggcgcgatgctgcgcatgctcggccgcgaagaggtcgacagcgtgatcgtcgagcgcggtcatgtcgagatccactgcgagttctgcaatcagcgctacgagttcgatcccgtcgacgtcgcgcaactgttcgccg

SEQ ID NO: 22282 - DNA, 470 bp, Zea mays
  Coding DNA Sequence Number=SeqID_7879
gctagtgttcacaatcagaggcagttcaagctccgaactagccaataagaagcaaaagaaggaagcacagagaagagtgcaacatgttggagtacaaggacccttcatcaagtccaaatggtctcatgtgtcgattatattttctcaagaagaccttcagcttaaggattaccctcacaatgatgccatggtcatatcaagtgttatcaaagtgttcttggttcacaatgtcctcgtagacattagtagtgcagcagacattatctttgcaaaagccttcaggcaaatataccatctgatcatggtcctattgatgtgcatggaagctaagaggcttctagaagggtcgaagggaattggacagattccatggcctagttgttctgtcgctggtactgatttcctatctgttggttgttctggcggtactactgctgctgctaagggaactacctctgatactgctggtg

SEQ ID NO: 22283 - DNA, 139 bp, Zea mays
  Coding DNA Sequence Number=SeqID_7880
tgctgggcataagatgagacgctgagtacaaacgccagctgctgcacttgcgacaaggttacgtatcaggagcgcctgaacgcgctggcgcagcagcggataaattcgcacagcagcaacggcaaaacggccgccattg

SEQ ID NO: 22284 - DNA, 538 bp, Zea mays
  misc_feature (49)..(49): n is a, c, g, or t
  misc_feature (142)..(142): n is a, c, g, or t
  misc_feature (156)..(156): n is a, c, g, or t
  misc_feature (197)..(197): n is a, c, g, or t
  misc_feature (317)..(317): n is a, c, g, or t
  misc_feature (389)..(389): n is a, c, g, or t
  misc_feature (403)..(403): n is a, c, g, or t
  misc_feature (466)..(466): n is a, c, g, or t
  misc_feature (502)..(502): n is a, c, g, or t
  Coding DNA Sequence Number=SeqID_7881
gacgagaaccgcacgcgaggagacacggtgaagcgacacagagagtggncggaagcaacgagagcgcacggagtgatgaggggagaggccgagagaggaaagtagagtacggactcagcacagagacagagaccacagacanagagacgcaccacnagacgaggacacaaaggaccaaaacaggcaggagctgacantagagagagaccagaacgagatagaagacgggaggcgggtgaccgcaacagagcatatcagagggaagggaatggcgccgcgaccgcgagacgcgtagcgacgaggagaggagctgaggnagtaggagcgaggagagggcacagagcgcgagcgagcgacagaggagatgtataagaaggagaggaggacanggagacagaggcanacgcgcccatcagcgaagacaagctcgagaatacagtctcgccagcacacgacagcgcactcntctcacgcgctcggtgagcacagaacacgagtcgtncgtcgagcggcatcacagtacggtcagcggaagtgt

SEQ ID NO: 22285 - DNA, 374 bp, Zea mays
  Coding DNA Sequence Number=SeqID_7882
agattaggctggatgtcccgacactcgcaagtctacttcaggttatgcagtcttcctgggtaacaacctcatctcatggttgttcaagtgccaaaacacggttttccgttccagcgctgaagctgagtatcgtgcagtcgccgagtcatcctggctacgacagctcctcaccgagttacagacaccactgcgtcgcctctgtggtcttatgtgacaacatcaacacaatctacatggcctccaacccggttcagcatcaacgtacggagcacatagagattgacctccacttcgtgcgggaatgtgttgcttgtggtgatattcgcgtccttcatgttccaacgtcatcacagtacctcgataaattcaccaag

SEQ ID NO: 22286 - DNA, 568 bp, Zea mays
  Coding DNA Sequence Number=SeqID_7883
atcgccagcacagtgatcttctttacctgactgggttcaacgagccggaagcgtgtcttgttctgatcaaaagtgatgaaaaccacaaccatagcgtgttgtttaaccgccgttcgtgatctaactgcgtaaatttggcttggtcgccggcttggtcaggatgctgcactggaaaaacttggggtggatcgcgccctgccatttgatgatctcagtaaacagctttacctgctactgaatgggttggacgtatattatcatgcccggggagagtttgaatacgctgacaatatcgtattcagcgccttggatacattgcggaaaaataaccgtcgtaacctcagcgcaccatcaatgatggtagattggcgatcgtggctgcatgaaatgcggctgttcaaatcggtagccgaactggacatcatgcgcgagggaggcgacatcagtgcgaatgctcatacgagagccatgcataattgtcgtccaggcatgtttgaatatcaccttgatgctgaaatccatcatgaatttactcgtcaggtagcacgatatcctgcttataacacca

SEQ ID NO: 22287 - DNA, 406 bp, Zea mays
  Coding DNA Sequence Number=SeqID_7884
gtccacgcactatcacgcgagctgaccgatcgacgcgctcaagctcaaggtgtgcgccgacgagctaggcctcgacaagggcggactaccccaaaactagcaatgaatgcccgttgatggagggactggaggacctcgacggcgaattgtgcctctgcaccgtcatctaggtcaacgacctcgacatccacctcaacgtgccccttagactcaacttgcatcctcaacaactgcggcaggatttgcccagaggacttcacttgacccaattaggcttgggatcccttgtgtgatccatatcgcgattctatttacgagcatgtcaccctcttgccatattaccgaataaatttgtcgtttcaaattctttcgctgtaccatcgacgattgtatttgcgcggagata

SEQ ID NO: 22288 - DNA, 594 bp, Zea mays
  Coding DNA Sequence Number=SeqID_7885
cattgccgttgaggaggagcaccctctcctggaacacgctcatctccgcctactccgctgggtgtgaccccgacgcggcgtgggtcgcgttcgcgcgcatggtggcggccggggcgcggccggacgccgtgacgtggaccgcgctgctgtcggcgcacgcgaggtgcgggaggcacccggaggctcttcggctgttcggggccatgcaccgcagcgggtgcgagggcaatgcagaggccgtcgctgtggcgctctcggcgtgcccgtacgccggcggccctgcactggggagagggaggtcgatacatgcctacggctttgtgaagggcgtcgtccatggctacctgttcgtcaccaactcactggtgtgcatgtacggcaagcttggagagatggaggaagctgagaaggttttctgggatgccggggcgaagaagaacgccgtgacatggaatgcgctcatcactagctacgccgccgccggtttgtgcggcaaggctctcggtgtgcttgtccagatggaacagtgtggcggcatgatcgcgcccaatgtcgtgagctggagcgctgtcattggcgggttcgcgtcatcag

SEQ ID NO: 22289 - DNA, 433 bp, Zea mays
  Coding DNA Sequence Number=SeqID_7886
gccggagacgtcctgacgatgacgacgacgacgatgatgacgatgatgaagacgatgacatggctgcccgccttggcctcagcccggatctgaggctgggccaggggttgtcgagccagcccccgagtgggctggcgccgccggtatccggggccgggacatcagggtcccggtctgaagaacagtggcaggctgagggggtacttgaccccttggccgaggtagttgaggtgacctcggggagtcaggccgacccgcctgttccccaagagccgttgcccgtgccgactgcacaggaggctgatcctcgggtcgtcgtggctgcgcctgggcagttcatccctctggtacctcgggcgcccgaggcaaggatggtgccgaagccggcagcggggctaacctcggtggtacccgcagggacagaggctcgagg

SEQ ID NO: 22290 - DNA, 518 bp, Zea mays
  misc_feature (446)..(446): n is a, c, g, or t
  Coding DNA Sequence Number=SeqID_7887
gtggaatttaatagcgcctgcgattcccctgagttcaatgtgagttcacatggtagcggactaatcattgcgagaactttctctcctgcattaggatcttccaagaatgtgttctcaaaatcaggtcctggattgagaattgtttctaggaagatgttttctattttgatacgagcaagccctccacgagctacgactccgaacctactgtgtgtgacctaatgtctcacagagttcccactgactgccagacaactaatgatgcattaagccaagaggctctgaatttgacatctcacgtgaagagtcttacgacgaagtctccactcctgagaatggagctggtgacaactaccaaacagttgaaggtagttatttccattgccggcgaggaaactgcaaagtcgcgggcggcaaaggaagtaatcaagtcactcactgcacanctgaacgagatagcagagagattacctgtacgagaaggcacaaacactaagctgccagctctgtctggaatt

SEQ ID NO: 22291 - DNA, 175 bp, Zea mays
  Coding DNA Sequence Number=SeqID_7888
aaaagagtgttcacagaatattttaaagaacaaaaggtggaaaaacggaagagagttaaaatggaaaaaaacaagagagaggcaaaatgtgccccataaaaaaagtggaaaaaggccggccaattaaaaaaaaaaaaaaggaaatataaggccacagaggcccgcccgaaaaaag

SEQ ID NO: 22292 - DNA, 541 bp, Zea mays
  misc_feature (40)..(40): n is a, c, g, or t
  misc_feature (246)..(246): n is a, c, g, or t
  misc_feature (313)..(313): n is a, c, g, or t
  misc_feature (341)..(341): n is a, c, g, or t
  misc_feature (428)..(428): n is a, c, g, or t
  misc_feature (437)..(437): n is a, c, g, or t
  misc_feature (501)..(501): n is a, c, g, or t
  Coding DNA Sequence Number=SeqID_7889
gagaaagcacacaaaggatacaacaacaccgagaagacgnacggagatgaggacgcggagagaacatgaagagacgagggacgccgaccgcgaacaggaaaagaagatacacgagaagaagcaaagacgacacggcgacgcgggcgcaggcgagcgaagagacgcgcgagcaggaaatgacgccggcgccgagacgggaagcagcgaccgaagaagcgagtgagaggggaagaggcgaggcacaangaagagagagcaatcgacacacgcagagagctggtgcgacgaggaggaacacaggagaacgagagancacgcgaagaacgagaacaagaacgaangacacgaacgcagagcagagaacagacgcacaagggacagaagagacgagagagcgagaagagcaggaggaacgaacgctacagganaataatgancgcgcgacacggcagacatagagaagaggacagcgactacaagagacacacagactgcagacgncaggacacgcgcgcgatgagcagtcagacgcgagatgcgc

SEQ ID NO: 22293 - DNA, 426 bp, Zea mays
  misc_feature (369)..(369): n is a, c, g, or t
  Coding DNA Sequence Number=SeqID_7890
ctaaaattcaactcattcctattcamacccttataccaaaaaatcaaaccaaaaataatataaataccacaccccttcattaatctacatcaccttaacaacccccacactaytcaacttctaatcactcaaaatctcccacaaatccatacaaamcaccttcmccacaaacaccmacttcaaaaccatctacctcatcctcttcaccttcctaaacatccctctcaccttcctatacaacatcccattcacaataccaacacmactaacaacccccaaaaacaacaaacaaaaactataccccaacatcctcaacatctccwtcatcatccctcaaatawtcwtcacactaaacaccaacccataaancacactattcaaaaaaaacamcwtcccaacattcaacatcacatcaaccttcaccct

SEQ ID NO: 22294 - DNA, 484 bp, Zea mays
  Coding DNA Sequence Number=SeqID_7891
tgtcgaaggccgagcgcgcgtacctgttcgagctggccgcgcaacgcgatccggccgagccggacgtcgcggccggcgacctgccgccgacgctcgcggccaccgtcgccgcgatcgccacgcccgcgtacgtgctggacaggcaatggaatgcgctcgcgtggaacgcgccggccgccgcgctgtttaccggctggctcgacggcgaccacgatcgcaacctgctgcgcttcacgttcatggcgccggccgcgcgcacgctgatcgtcgactgggaaacccgcgcgcggcggctcgcggccgaattccgcgcggactcgatccgccatctcgccgacgcgccgacgcgcgcgctgatcgacgcgctgatggccggcagcgacgcattcgcgcagtactgggcgtcgcaagacgtgttcgagcgcgaaggcgggatgcgcgagttcgaccatccggccgacggccgcgtcgtgtatcagcagat

SEQ ID NO: 22295 - DNA, 401 bp, Zea mays
  Coding DNA Sequence Number=SeqID_7892
aactcctccgtctgaggactttggtgactcggaatattcagaggaggagttctcctctaaatccgaagggtctccggctcccatccctctgcgtgagtcgtctgatgattcagacgactcccaggggcttgcggcggaggtctggacttacatccgggtcgtcgagcgtttcgggctcgcgggctcggatgagtcggaggactcctcggatgaggaggactcgtccgaggaggacggcggcgacggtggtgagggcggcgacgacgacgacgacgacgacgatggaggcggcggcggcaggggcggcaacggcagcagcaggggcagcaacagcggcaggggcggcagcggcggcagcaggggcggcaaggccagtggctaaatgtcacgtagtagtagta

SEQ ID NO: 22296 - DNA, 93 bp, Zea mays
  Coding DNA Sequence Number=SeqID_7893
atccccactatcagatacaatgctgaaactgttgagtataaaagcattagcttaactgcttgggatcttggcggccatgacaagaccaggccc

SEQ ID NO: 22297 - DNA, 562 bp, Zea mays
  Coding DNA Sequence Number=SeqID_7894
ggttaccaagttccaatctgtgtttgcacttcctgttggcttgccccctgtccgagattgtgatcatcatatctctcttgtacccggtgctcaaccatttaatgtgcgaccatacagatatgcaccagcattgaagactgaaatcgagcgccaagtccaagagatgttgtcttcaggcattattcaacacagcaacagtgagttctcctcttcagtcatcttggttaagaagaaagacgactcctaccgcttttgtgttgactatcgacatctgaatgctcttactgtgaaaactcgatttcctgttcctattatggatgaattgctcgacgagttatatggtgctgcctggttttccacgttggacctccgtgctggtttccaccaaattcgcatggcgcccgaggatcaacacaagacggcatttcagacccaccacggccattttgagttccgagtcatggcatttggccttaccggtgcacctgctacatttcaaggagctatgaataagacactggcgccacttcttcgcaaatgtgtcttggtctttttcgacgac

SEQ ID NO: 22298 - DNA, 527 bp, Zea mays
  misc_feature (123)..(123): n is a, c, g, or t
  misc_feature (411)..(411): n is a, c, g, or t
  Coding DNA Sequence Number=SeqID_7895
acagaccacaacagcacgcgggagggaggaggaagaggcggagagacgggagaggagaaaagcgcagaaggacagtagaaggcacacacgaagaacacaggaagagaggaggaacaacgacgnaatagaggcaacgagtaacggggagaggacacaatgccgaccgacgacgagaaagaaaaccagcataagaagacggccggccgcgtcaacgagagacagcagcagcacgcagcaaggacgatgcgagcagacacgacgcggagcagaacaggaacaacccagatggtagaagagaggagaggcacggaacgaagaggataggacagacgggcggggagacacgccgcaagaggagaggcggacagaaaggagagactcagaaggggcaagagccagagaagagaggangaagagaaagatgagcgccagaggcaagaaagagaggagacagaacgccagagagacgaacgacagcagacagcgagacaagagcaagatggaagaggcagcaacagaagtataga

SEQ ID NO: 22299 - DNA, 476 bp, Zea mays
  Coding DNA Sequence Number=SeqID_7896
atgatggctacgaagcccaagctccactatcccaatggacgaggccggatggaatccgtgagatgggttttagctgccgcaggagtcgagtttgatgaagaatttttagaaacaaaagaacagttgcagaagttgcaggatgggaaccacctgctgttccagcaagtgcccatggttgagattgacgggatgaagttggtgcagacccgaagcatcctccactatatagcagacaagcaccatctcttcggcaaagacctcaaggagagaaccctgattgacatgtatgtggaggggacactggaccttctggaactgattatcatgcatcctttcctcaaaccagacgatcagcaaaaggaagtggttaacatggcccagaaggctatcattagatactttcctgtgttcgaaaaggtgttacggggtcatggacaaagatttcttgtcggtaatcagctgagccttgcagacat

SEQ ID NO: 22300 - DNA, 572 bp, Zea mays
  Coding DNA Sequence Number=SeqID_7897
tcggccactggcagtaccatgaagaagtctggctgcgcggtaacgaagacgcccgggcacgggtaattgaagcgctggaaacgctgcgtcaggcgttttccctgtttggcacgctggtgccgcgcaaggccaatagcgaactgcgtcagaagctgacccggctggaagagctgctggcggatagcgaggccagcgcagaaaccgtctgcttctcaccgacctcggtcgaagctcagttagcacttactcactggctggtggagtcgcagtggcagccgtggctggacgagaagaacaaaagcaagctacagggctcgtttaaacgcttcagcgacatcatgctggggcgcatcggcgcggatctgcgtgaaaccttcgtcgacgtgcagctgtttaatgaatttcaggacaaagccacgcgcctgaaccgccagttgctggcggtgcacctgctggcgggtgcgtatccggctgaagaagtcagccagtggctggcgggctggcaggagttgcagcacgccattcgtgaaaaacaggagcgcggtctgattcagctggtcaatctggcgatc

SEQ ID NO: 22301 - DNA, 486 bp, Zea mays
  Coding DNA Sequence Number=SeqID_7898
gtggtgatcctgtccgatgccagcgggctggtgctgaacacctttggcgatatgcaggcgctggagaaagcccagcgctttgccctggcacccggtaatttgtggagtgaatgcggacgcggcaccaatgcaattggcaccgcgctggcgattgatgacggctgtgaaattgatggccagcagcatttcctgacgcgcaaccagggtctgtactgcgccgcaatgccgttgcagatgcccaacggccagatagccggcgtgctggatatctcgggtccggcacactttccgcatccgcataccctgaaccgggtgaaagcagcggcaaagcagatcgagtacctgtgggtgaagcagagcctgcatccgcagcagtggctgcttagtctgcatccgcagccgcagggcatcgacaccagtgatgaactgctgctggtgttttctgacaatgtgctgaccgcagctaaccggctggcgatgcgcgaa

SEQ ID NO: 22302 - DNA, 555 bp, Zea mays
  Coding DNA Sequence Number=SeqID_7899
gcaaggccgacaaccggtggaagcaaggagagaggagctcggcctagggctaccgagcagggtgggcgagcttgaggatgaggacggcgttgtccagggctgctgtagtacgctcgactgcgagggtgaccgtgaaggagaagagactgaagccaccgaggcagcctcgatctccgaagtcatgaggcaatccaaattagttgtgacggagggagccattgacgaaggtacttttggtgccgaagctgagcaagctgatattaaagaagaagaaaatgctgatgaggaagaagaagattatagcaccttgatcccatcaaaacccagccacctagattttgagaaatctattgtatctgaagctgatgtgtccatgatgatgaagttgggctacttcagagaagctgaaagaaaactaattcgttttgccggagaggaaaccactccgatgtcgaaggatgatgaagtggtagttttcaaaagctttttcagagcaggattacattttcctttgaacgagatgattggagaagttttggataattctgagatttt

SEQ ID NO: 22303 - DNA, 474 bp, Zea mays
  Coding DNA Sequence Number=SeqID_7900
agagcaagatagacgcgcagcccgagatcgtcatccacatcatccccgacaaggcgaccaacacgctcacgatcgctgacagcggcattgggatgaccaagtccgacctcgtcaacaagctcggcgaccatcgccaggtcggggaccaaggagatcgtggaggacctcgtcgacggcggcgacgtgtccatgagtgggcagatcggcgtcggatgctactccggctacctcgtggccgagaggggtgtcggcaccaccaagcacaacgacgacgagcaggacgtgtgggagtcccagggcggaggctgcttcaccgtcactcgtgatacgtgtggggagcagctcggcaggggtaccaagatggtcctctacctcaaggacgaccagatggaataccttgaggagcgccgcatcaaggatctagttaagaagcactctgagtatatcagctactccatgctccggatggactga

SEQ ID NO: 22304 - DNA, 536 bp, Zea mays
  Coding DNA Sequence Number=SeqID_7901
cggcacctgttcatgaactttcgtgtcgtggacgagcatgaacgcatgctggccgcgggccgcaacctggcccaattgaaggccgagttcggccgccaggcgcaggccgatttccagcaactggccgcgcgggatgcgcaggtcgcgcaagctttggcgcaggacggcctgacgtcctggtcattcggcgaattgccggaaatcatggaaatcaagcgcaaggggcaatcggtcatcggctatcccgcgctggtcgatcgcggcgcgcattgcgatctcgatgtgttcgacgaccccgaagaggcccgcaagcatcatcgagccggcctgctgcgcctgttccggctgggcttgcgcgagcagatcaagttcctggaaaaaaacctgcccgacctgacccgcataagcatgttgttcatgccgctgggtacgcaggaagccttgcgcgaccagatcatcgattgcgccctggaacgcgcctgcctggccgaaccctggcccgtcaaccaggaagaattcgaatcgcgccgcctgga

SEQ ID NO: 22305 - DNA, 555 bp, Zea mays
  Coding DNA Sequence Number=SeqID_7902
aagacggacgattgcacagctcctacgcgtattagcaacaaggcagtcatgtgagctccccactcccagaccagtccagcggctcagcaggagcatgtcagggagctcgctctcgccatgagcaaggagaatgaccaccgcgactggatactccgccgctgctgcggatccggcgccgactgcatcctcacgttcgacgacgtgggcggcttcatcgaagctggtcatctacctcgcgctgcgaccctccaagccgaccttctacctccaggaggtgcagctccgctccatcgacctcagagacccggagctctccctcgacctccaggtgaccatcgcttcacggaacccgaacgaacgtaggtacgagtactacaagaccctggactcgttcaccacgtaccgcgactacgaggcgacggtgccggtgtctatgccgcaggtgtaccatggtcacaggcacacatcatgtgtgatgcccgatgatgtcggcgcgacgctgtgcccctgccgtagcacctcgcgcgatgtcatgaggcaagacatctcctcggt

SEQ ID NO: 22306 - DNA, 309 bp, Zea mays
  Coding DNA Sequence Number=SeqID_7903
attttgaattccgtgtcatggccttcggactcactggagcacctaacacatttttggatgctatgaacaccaccttagctccggttttgagaaaatgcgccctggttttcttcgacgacatacttatttacagcccaacttttgactcccatattgctcatttgaactccgtgctgcagttgcttcagcaagatcaatggaaagtgaaactttcaaaatgtgcatttgctcagacttctatttcttacctgggacacattattagcgaccatggtatagcaactgacccagcaaaaattctggtcgtca

SEQ ID NO: 22307 - DNA, 504 bp, Zea mays
  Coding DNA Sequence Number=SeqID_7904
gtggtgaccgatcagcagcacattaaggtgaaggcctcgctgcgccatccggtgtttgtgccgcaggtggcgattctcgatcccgatctgctcaaaggggcgccggatcgcgtgctggccacctgcgccatcgatgcctttacccacctgttcgaggcttatctgtcacgcaagggcaacctgttcagtcagcaaaacgcgctcaacgggctgcaactgttcatgcaggcgtggccgtacctcaatctggacgacagccgcggcgatgcggcacgtgaagccatgatgatggcatcatggctcggcggcgtcagcctgagcagcgccggtttgggggtgatccacggtattgccggcgagctgggggcgattaaaccgttccatcacggcgaagtctgcggtcgtctgctgttcccgttccttgatgtactggcggagagcgcgcaccccgaacagcagcggctgatggcggcgctggctgaacgcctgctgcccgatgaaacg

SEQ ID NO: 22308 - DNA, 535 bp, Zea mays
  misc_feature (157)..(157): n is a, c, g, or t
  misc_feature (220)..(220): n is a, c, g, or t
  misc_feature (244)..(244): n is a, c, g, or t
  Coding DNA Sequence Number=SeqID_7905
aggcacgagcgggagaagggcgcgcgacgagaggggaccggaacgttccacggagagagggacaagaagagaggagaaaggacgacagcgaggcggagggacgagggagaatgagaagacgggaggaagagagagaagcgcgagaggcggccgaggnacggaagaaagagaggagggggaagagggagaagaggaaagcggcaatagagaagaaaaatangcgaagaacaaccgacagaggtgngagggagggcagaggagaagacggcacggagcagagcgaggagaggacggggaaggagtgatgaagggggagagattagaaggggagaggtagggggagatgaaggaggagggcgagagagaagaaggagcacgagggagcgtgagagagaatatcagagccggagacgaagagagagaggagacacgagacgcgacggcaacagagagagagaggagtgacaaacatcacgagaggacgtggggggaggagaggaaggaccgagacggagaggaaagagagcgtcgaagc

SEQ ID NO: 22309 - DNA, 594 bp, Zea mays
  Coding DNA Sequence Number=SeqID_7906
atcatggcaccgattgacggcacggtggtggcgatcgtcacgaagcagggccagaccgtaaacgccgtgcagagcgccccgaccatcgccaaactggcgcagctcggcacaatgaccatcaaagtgcatatctccgagacggacattaccaatattcagcccggccagcaggcgtggtttaccaccttcgccaatccggataaacgttacaacgccacgctgcgcagcatcgaactggcccctgagtcggtgatgaaagatgatgcgctgatgggcaacagcgaaagcaataccgtgagcagcacgaacgcggcggtctattacaacgccctgctcgatgtgccgaacccggataatgcgctgcgcatctccatgacggcgcaggttaatctgctgcgtgaccaggcgaaaaacgcgctgctggtgccggtacaggccacgaaaaaggccagcgatggtcgtacttacgtcgaaatcgcggatcaaaataatcagcctgagaagcgctacatcaccaccggcatcagcgacagcgttgacatccaggtgctgagcgggctgcgcttaggggaaaaagtgatccttgccacgcag

SEQ ID NO: 22310 - DNA, 373 bp, Zea mays
  Coding DNA Sequence Number=SeqID_7907
caacaagcgcaagcgtgagccgactcctccatcggaggagtttggtgactcggaatactcggaggaggagttctcctccgagttcgaggggtctccggctcccgtctctcccccggcgtcgtccgatgactcggacgactcccaggggatagccacggaggtctggacgtacatccgggccgtcgagcgcgccgggctcgaaggctcggatgagtcggagtactcctcggatgaggaggactcggacggcggcgacgagggtgaagacgacgacgacgacggcgacggtgacggcagcggcagtggcaggggcggcggcgacggcagcagggacagcaccaagggcagcagcaggggcagcaccgagggcggc

SEQ ID NO: 22311 - DNA, 453 bp, Zea mays
  misc_feature (98)..(98): n is a, c, g, or t
  misc_feature (302)..(302): n is a, c, g, or t
  misc_feature (319)..(319): n is a, c, g, or t
  misc_feature (375)..(375): n is a, c, g, or t
  misc_feature (422)..(422): n is a, c, g, or t
  Coding DNA Sequence Number=SeqID_7908
gcgagcatacgagagaggaagaggaatggaggaggaggaagatgagtaagacgaaggagggcagaggtagagatgagatgatgaggtgatagacgagnggagactgtaaaaggctagaagacaaagagagtagatgcgagaaggcgagagagaagtgtgcggagaagaagagatggaaggagaggggagagcagagaagggggtgatgtgagtagaataggagagagcgagaagaggcagaggagaaggtaagagagaggagagatggaagatgagagagttgagagatgagaaggtgcgcnagcgatgagagagaggntgggaaaatgagaagacggcaagggagagagggagcggagtgagaggattagacgnaggaggaggcggacaacgggaagagagagaggtgagaggagagtganaagagcgtagcgcacgatgggtggcgagcat

SEQ ID NO: 22312 - DNA, 471 bp, Zea mays
  Coding DNA Sequence Number=SeqID_7909
gtactattccgatctcgtaactcaatatcccgatctcgtttttttgcagttgttcaattgagacacaggtcatgggttctgtagctgaaacagagagaaccttgtacccatttttaactggatcctctgtggttgccatcaaatacaaagatgggattctcatggctgctgatatgggaggttcctatgggtctacactgcgatacaagagtgttgagcgtttgaagcctattgggaaacattcccttcttggtgccagtggggaaataagtgattttcaggagattctacgctacctcgatgagcttatccttaaggacaacatgtgggatgatgggaattctctggggcctaaggaggtgcacaactatttaactcgaatgatgtataataggcgtaacaagttcaaccctttgtggaactctcttgtacttggtggtgtgaagaatggtcaaaagtaccttggcacgg

SEQ ID NO: 22313 - DNA, 186 bp, Zea mays
  Coding DNA Sequence Number=SeqID_7910
ggaacctccacctctatccaaaacaccaaacaccacactatctccacaatgactaccgagcagaccttcatcgctgtcaagcctgatggcgtccagcgtggcctcattggtcccatcatcacccgcttcgagaaccgcggcttcaagctcgccggtatcaagatggtccagccctccaaggagcac

SEQ ID NO: 22314 - DNA, 513 bp, Zea mays
  misc_feature (152)..(155): n is a, c, g, or t
  misc_feature (454)..(454): n is a, c, g, or t
  misc_feature (487)..(488): n is a, c, g, or t
  Coding DNA Sequence Number=SeqID_7911
gcagcttttgtctctaatttcagtgtggtttcccttgatgaagaccaaatttctgcaaatctagtgaagaatggccctcttgcaattggtatcaatgcagtttttatgcagacatatatcggtggcgtctcatgcccatacatctgcgggannnnatttggatcatggtgttcttctagtgggttatgggaaagctggatatgctcccattcgccttaaggagaagccttactggatcataaagaattcgtggggggaaagctggggagagaatggatattacaagatctgcagaggtcgaaatgtatgtggagtggattccatggtctccactgtagctgcagttcatacatctcacaattaaataaaaggatgcctgcttgtggttgtgtcgtgtgacattaagtaagttgagtttgtgtaaatattatcattaagttgtgaatgtatcgtntgatactggtaaaattatctccgtataggatcnngatactgctacgatcatgttattta

SEQ ID NO: 22315 - DNA, 563 bp, Zea mays
  misc_feature (531)..(531): n is a, c, g, or t
  Coding DNA Sequence Number=SeqID_7912
tctacaatcacaatggccttcgcttcttttctcggcagagtcctcttcgcctccgtcttcatcctctctgcttaccaagaatttaatgaatatggagttgttgggggacctgcagcaaaagcaatcagaccaaagtttgatgcctttatgcatcaagtacattctcgagttggctttcaccttccagaaattgatatgaaatttttagttgctggggctattgctctaaaaggcgttggagggattcttttcatctttggcagctctttcggagccttccttttgcttttgcatcagatgattgctactcccatattctatgatttctacaatcatgacaacgaagaccaacaattttttcaacttttcaacaaatttacacagaatatggctctcgctggggctttgctgttctttattgggatgaaaaactccattcctcgaaggcaacccaagaagaacgttcccaaaacaaaaaccttttagtagcctcaatttaaagagtcattctgcgaggaattctcggattgnttcctggttgatcattaaacccattctccatt

SEQ ID NO: 22316 - DNA, 558 bp, Zea mays
  misc_feature (99)..(103): n is a, c, g, or t
  Coding DNA Sequence Number=SeqID_7913
gggccaaacattcaattctctttctactcttgagcactatatacagagtggagcacagaccgtcttatttgttggagatctttcttatgctgataggtnnnnntacactgatgttggtttacggtgggatacatggggccgatttgttgaaaggagtacagcatatcagccatggatatggtctgccggaaatcatgaaatagattacatgccttacatgggagaaattgttcctttcaagaactatcttcaccgatatactactccttatttggcatccaagagcagcagccccctctggtattcaatcaggcgtgcgtctgctcatataattgttctatccagctattctccatttgtaaagtacacgcctcaatggatgtggctcaaagaagaacaggagcgggttgatagggagaagacaccttggctcattgttctcatgcacgtgccactctataacagtaatgaagctcactatatggagggtgaaagcatgcgggtagttttcgagagctggttcatcaaatacaaagttgacgtgatctttgctggcca

SEQ ID NO: 22317 - DNA, 544 bp, Zea mays
  Coding DNA Sequence Number=SeqID_7914
tttcaattcgcccacacaatctgatttctccctttatacatcgaaaacttgaggatttgagctatgggaaaaagaaagtcaaagacaaagccacctccaaaaaaacgaatggataagcttgacactgtctttagctgccctttctgcaatcatggcaccagtgttgaatgccgcattgacatgaaaaacttgataggggaagcttcttgcgggatatgtcaagagagctttagcactaccatcacagctttatctgagccaatagacatatacagtgaatggattgatgaatgcgaacgggtgaacaacctagaagatgatggtgcttagtgattgtgagaagaatctgtggtagcgaatggaatgactgtctagctttatattttctccagcctgtaattatatcagttccttcctgttgtgagccctggtggtgctactccgagcttagttaacagattgtaatgcatgtacactagaatatgagaataattgggactatatagataaagccactttgataggaagccgatatgtaagccat

SEQ ID NO: 22318 - DNA, 429 bp, Zea mays
  Coding DNA Sequence Number=SeqID_7915
gaagttcgaaacactgtcctacctaccacccctttcagatgactccattgcaaaggagattgactacatgcttaagaagggatggatcccttgccttgaatttgatgaggaagttggggaatatttgtagagaaaatagccagatgccaggttactatgatgggaggtactggacattgtggaagctaccaatgtttggatgcactgactcttcccaagtcctgaatgagatccatgaatgcaaacggacatatccaaacgcatatatacgctgcatagcatttgacaacaagcgccacatgcagtccatagcttttgtcattcagaaacctgctagtaccactagcacttgagtcattttgctcttatttctcttcaaatccttgttgaaattttagatcttttctctctactatttgtttctcttct

SEQ ID NO: 22319 - DNA, 583 bp, Zea mays
  misc_feature (149)..(150): n is a, c, g, or t
  misc_feature (492)..(494): n is a, c, g, or t
  misc_feature (496)..(496): n is a, c, g, or t
  misc_feature (517)..(517): n is a, c, g, or t
  misc_feature (538)..(540): n is a, c, g, or t
  Coding DNA Sequence Number=SeqID_7916
gtttccttggcaaaggcactttcttgtgcatatttgccaataggagctggccttgggagcccagaagtttcagaagttatacactcacaaagcaacaaacttggtaatttttcccatgggtctacttattctggacacccggtgccctnngctgtggcacttgaagcaggcatcatctacagagaaagaaatattgttgacagggtgaacaagatctcccctagggtccaagatggattaaaagctttgtctgacagtcccatctttggagagatacggggaactggcttgattctggggactgagttcacagacaacaaatcacctaatgatccatttcctcctgaatggggagtaggtgcctattttggagcacaatgtgataagcatgggatggtacttcgtgtacctggagataatatcatgatgtctccaccatttattatctccccagcagaagttgatgagtcaatgagaattcatggaatagcnnntnaagagacggaaaagaaagtanaagagctcaagtctcagcgcnnntagctgagtccgatgatggcataattaaactctgctgccttgt

SEQ ID NO: 22320 - DNA, 331 bp, Zea mays
  Coding DNA Sequence Number=SeqID_7917
ccatcatttccataaagggccatcaaacaccctattgggcaaccctataggctacaacaagcccttgcgggaaccgtttaacaacacccctttgcccaattacaacaacaatccttggcacatttaaccatacaaaccatcgcaacacaactaaagcaacagtttgtcccccctttgacccacctacccccaggaaaccccgtctcctacttgaaacaacaactgtttgcttccaacccaaattctttggcaaacacagccgcataccagaaacaactacagttgcaacagtttctaccagcttttattcaactacccatgggaaaccctg

SEQ ID NO: 22321 - DNA, 489 bp, Zea mays
  Coding DNA Sequence Number=SeqID_7918
atctaccctgggagaggcatcagatttgttcgtggtgattctcaggtcttcctgtttgccaattcgaaatgcaaaaggtatttccacaaccggttgaagccatcaaagctcacctggactgccatgtataggaagcaacacaagaaggacattgcccaagaagctgtgaagaagaggcgtcgcgcaaccaaaaagccttactcgaggtcaattgtcggtgctactttggaagttattcagaaaaaaagaagtgagaagcccgaggttcgagatgctgctagagaagctgctcttcgggaaatcaaagagagggtcaagaaaacaaaggatgagaagagggccaagaaggcaggagttcaggccaaggtacaaaaatcccgaggcaagggcagtgtttccaaggctgctgcagccaaaggtcctaagcttggtggtggaggtgggaagcgctgaatctttagttttgtttcttttttggctagcacttta

SEQ ID NO: 22322 - DNA, 234 bp, Zea mays
  misc_feature (123)..(124): n is a, c, g, or t
  Coding DNA Sequence Number=SeqID_7919
aagggtttgttgagttcgatgaatcgccgccggacgatttcgacccggcgaatccgtacaaggatccggtggcaatgttggagatgagggaacgcatagtgagagagaaatggatccaaattnngaaggctatgatcataagggagaagcttcgatggtgttaccgcattgaaggtgtcaaccaccttcagaagtgtcgccaccttgttaatcagtaccttgaatctacacgtg

SEQ ID NO: 22323 - DNA, 504 bp, Zea mays
  misc_feature (174)..(177): n is a, c, g, or t
  misc_feature (448)..(452): n is a, c, g, or t
  Coding DNA Sequence Number=SeqID_7920
caagacacagttcgctactacatcggccatggttatccgcatcaactccctcaccctcccttctgctttacccaaaatagagttaagaggtggaaattcacggagcccgagcctcagggttagctcgcagatgatgccccaaatgcgaaaggaaggtcgtggtcgccgagtctnnnnacgaagaacattgataaaaaaggatgaatatctgccctacaggatggagcgcattcctttcctggaggagcaggtgaggaggttaaaggacgagcgaaagatcttgcaactggacgtagagaggttaatgctatcagaagataataagtttgattttgtgaatgagatagcagctgaggccaattcttatgttgagagcaacatggatgagtatggacttgagaagaaagctattctccatgttttgagcaaccgagtaaatgattctggnnnnnaccgaccagaagcatattatgagcctgatcccttcaagcctgggccacatta

SEQ ID NO: 22324 - DNA, 549 bp, Zea mays
  misc_feature (85)..(86): n is a, c, g, or t
  misc_feature (496)..(498): n is a, c, g, or t
  misc_feature (515)..(517): n is a, c, g, or t
  Coding DNA Sequence Number=SeqID_7921
gtcgcaacaagcatggtcgtggccatgtcaaattcattcgatgctccaactgtggcaaatgttgccctaaggacaaggcaatctnnaggtttcttgtgaggaacattgttgaacaggctgctgttagagatgttcaggaggcttgtgtctatgaacaatacactcttcctaagctatatgtgaagatgcagtactgtgtttcctgtgctattcactctcacgttgtgagggttcgatctcgcactgataggaggaagcgtgacccaccacagcgcttcatcaggcgcagggatgatgcaccaaggcccggtcaacctggtcaagcacctcgtcctgctggagtaggagctcctgcccgtacctaagagcaaattttaagatttttggtcttgttggatcgaatcggttttatattatgaacttaaaagtttcctttgttgcttattttataaaatttcagttttgattagggatattatattttcttctaattgtnnnctttagtcctcggacgnnnccatcttggtttgttatgattctgtggtttcg

SEQ ID NO: 22325 - DNA, 591 bp, Zea mays
  misc_feature (95)..(95): n is a, c, g, or t
  misc_feature (97)..(98): n is a, c, g, or t
  misc_feature (139)..(141): n is a, c, g, or t
  misc_feature (144)..(145): n is a, c, g, or t
  misc_feature (559)..(561): n is a, c, g, or t
  Coding DNA Sequence Number=SeqID_7922
atgctcatgcaacaacttacaccgttggaggacctgggggatggaccttcaacactaatacttggcccaatggaaaaaagtttagagctggtgangnnctaatcttcaactatgactcaacaacccacaatgtggttgnnntgnncagaagtggatacaacagctgcaagacaccggcgggtgctaaagttttcagttcaggaaaggaccaaatcaggctagcaagagggttgaactacttcatatgcaacaatgctggtcactgtgaatctgggatgaaggttgccattaatgcagtgtgatgccttggtgttgaagtgagacagtaattaaaagttaatggtcaattagctaagggtctctcttttcccaaaatagcagcattagtagatgttagtgtttgatcatgtatgtatgtgctttcttgtatggattaatcacataattttgtaaagtgagtgggagtgaggtggctttctagactttgtctgtttggtatatatgtgtgtggtgagagtgtgatagataagggtcttgttaactttggatctgcaaactnnnaaattattgaagtctgcgtgccaattatct

SEQ ID NO: 22326 - DNA, 564 bp, Zea mays
  misc_feature (106)..(107): n is a, c, g, or t
  misc_feature (521)..(526): n is a, c, g, or t
  Coding DNA Sequence Number=SeqID_7923
gtatcatgttcctcattcatggctgaaaccaactggaaatttattggtagtgtttgaggaaatgggtggagatccgaatgggatctttttggttagaagggttttnnatagtgtctgtgctgatatttatgagtggcagccaaatcttgtaagttatcagatgcaagcttcaggaaaagtcaaaacacctgtgagaccaaaagcacatttgtcatgtggtcctggacaaaaaatctcatcaataaaatttgctagctttggcactccagtagggtcttgtggtaactaccatgaaggtagctgtcatgctcacaagtcatatgatgcttttcaaaagaattgtgtggggcagaactcatgtgcagtgacagtggcacctgaaatttttggaggagatccatgtccaaatgtcatgaagaaactctcagtggaggcaatttgcacctgatcattttcaacctcagaaaataaatggaacaaaagttccagagattgatttgttttacttcaattcaacacannnnnntttgagtcaacaaagtttacacttctagatcaccacaa

SEQ ID NO: 22327 - DNA, 482 bp, Zea mays
  misc_feature (83)..(84): n is a, c, g, or t
  Coding DNA Sequence Number=SeqID_7924
ttttcggagctgtgggaagcccatttgtcatcagggttcagattgctctcaagttgaaaggaattgaatacaaatatcagganntaaagctgggcaacttaagtgataccctcctcaaatacaaccctgtttataagatggttcctgtgtttgttcacagtgggaagcccatttcagagtcccttgtgattcttgagtacattgaagagacatggaaaaacaaccccatcttgccttctcaacctttccaaagagccatggctcgtttctgggccaagttcatagatgacaaggtttgatgaaaaagaaattacttactttggagttcaagctatgatcttctgaatcatcttcatattgcaaagataaaactttgcctccttagctttctatgtatttaacattttagcaacagcttgcaaaataggcagcaggacagacgctggaagttatcaatatttatctaaaaccgctcttgacac

SEQ ID NO: 22328 - DNA, 559 bp, Zea mays
  misc_feature (33)..(33): n is a, c, g, or t
  misc_feature (38)..(38): n is a, c, g, or t
  misc_feature (60)..(60): n is a, c, g, or t
  misc_feature (158)..(158): n is a, c, g, or t
  Coding DNA Sequence Number=SeqID_7925
aactggccgcaattcttcgcatctgcgtcatgnccatnccccacctgatacaccgatatnccgttttcgctctttcgagtttgatggtcaccgtctacagtcgtgccgtgatttgcaagccgaccggacagaaaatgcacgcccgcgctgacgcttcngacactgccccgaactggcccgacgatattttcgcgacacttgaacgcttcgacgtccggcaggtgccttacgtgcctgacgccggccattcgaagctgatccagcgcgtgctggcttcatcgacgatgcgcggcattccgctgacgacggaggaggagggcgtagcgctgctcgccggcgcctggaccggcggtcagcgcggtgtgctgctgatgcagtcgagcggcgtcggcaattgcatcaacatgctgtcgctgatcccgatcctgcgctttccgttcctcacgctcgtgaccatgcgcggcgagtggggcgagttcaatccgtggcaggtgccgatgggttcgaccacgcagggcgtgctcgagctctccggcatcaaggtgctgcgcgcttcgaa

SEQ ID NO: 22329 - DNA, 502 bp, Zea mays
  Coding DNA Sequence Number=SeqID_7926
aggcggcgggtggtgtcggccctgggcacgggcagaagaaggaggtggacgagagcgtggtgaccagcagcagctcgacgaccaagtcgtcgccggcgccggcaccggggggcaagggcaatggcaagggcaagctcgccgccggcaagatggtgacgttcggccccgggagcagcctccggtcggaggacctggtggccggcgcggacgcgctgctgggcaaggcgacggagatcgggcgcggcgcgttcggcacggtgtaccgcgctcccgtgggcgacgggcgcgtggtggctgtgaagaagctggcggcggcgagcatggtgcggtcccgcgaggagttcgagcgggaggtgcgcgtgctggggaaggcgcggcacccgaacctgctgccgctgaagggctactactggacgccgcagtggagctactaccggtgcacccacagcaactgccgcgtgaagaagcgcgtggagagactgtcggaggactgccgcatggt

SEQ ID NO: 22330 - DNA, 422 bp, Zea mays
  Coding DNA Sequence Number=SeqID_7927
ggtagaccaacttaggccagctttgttttacctaaagagacttgggttcaaggatttggaagccttggcttatcaagattctgttctgttggtgtctaatgtagaaaggaccctcatccctaagctgaagtatttggagaatttgggattttccaagggcgaggttagatgtatggtgttgagatgtccagcattgctcactttcagcatagaaaataattttcagccaaagtttgagtatttttctgtggaaatggggagaaaattggaggagctgaaagaatttcctcagtacttcacttttagtttggagaacaggataaagcctagacacatggaggttgtgcaaagtggggtcaattttcctttgtcagtgatgcttagaagcactgatgaagaatttagggagctgataaagccaa

SEQ ID NO: 22331 - DNA, 566 bp, Zea mays
  misc_feature (101)..(103): n is a, c, g, or t
  misc_feature (106)..(106): n is a, c, g, or t
  Coding DNA Sequence Number=SeqID_7928
tttcgatcagatccgtaacaccaacctcaccaatagcctctgttacacatccatgacgcttggctcaggaggatccagtgtcgtggttccaaggaacttcnnnttnttggaggagcttgaacggggagaaaaagggattggagatggcactgtaagctatggaatggatggtggtgatgacatttacatgcgatcttggactggcaccatcatcggcccccataacactgtacatgaaggaagaatttatcaactgaagctgttttgtgataaagactacccagaaaagcctccaagtgttcggtttcattcacggatcaatatgacttgtgttaatcatgaaactggagtggttgaaccaaagaaatttggtcttcttgcaaattggcaaagagagtacacaatggaggatatactgacccagctgaagaaggaaatggcagctcctcataaccgaaagcttgtccagcctccagagggtacctacttttagcatccaagatcatatagttgtcggatcatatatagtgtgtaatgttttgtggatccttctgaactcaatcaag

SEQ ID NO: 22332 - DNA, 529 bp, Zea mays
  Coding DNA Sequence Number=SeqID_7929
ctgaagctgctaatgccaagattgcagctatgaaagaaagatttggacgagagatccatgtttttgaaacatcagctctttctccatcttcaaatgctgtgtcatccaatgaagaggagactgatgacttctatgagtttaccgcggaagattatcaccggattttggctactaaaaaggaagataaattcttgaagactcgaaaaatccgagaagcagaagaggcatctcgtaggtcaagaataaccaaggctgtaattagagttcgcttccctgataatcacacattggaggctaccttccacccatcagaaacagtccagagtttaattgatctcctcagtaaagtgattgcaaagccagagcagccatttcatatatatactactccgcccaagaagctgatcaatgatatgtctcaggatttttatactgctggcttttgtcctggtgccatcgtgtacttttcatataatgttcccaaaggtgatagcactgtggttgaccatattggtccttacctacgtga

SEQ ID NO: 22333 - DNA, 449 bp, Zea mays
  misc_feature (150)..(151): n is a, c, g, or t
  Coding DNA Sequence Number=SeqID_7930
tccttcttcccttcagtgtgtgagtgaatcacgtcgtttctctgttctgcaaccatggcaaatcctagagtcttcttcgacatggctattggcggccaaccagtcggccgaatcgtcatcgagctcttcgccgataccacaccaaggacnnttgagaacttccgcgccctctgcaccggcgagaagggagtcggacgtagtggcaagcccctccactacaagggatcctccttccaccgtgtgatccctaacttcatgtgccagggtggtgacttcaccgccggaaacggcaccggcggtgagtcgatctacggtgccaagttcgccgatgagaacttcatcaagaagcacaccggtcccggcgtgctttccatggcgaacgctggtcccggaaccaacggatctcagttcttcatctgcacgaccaagactgagtggcttgatggaaa

SEQ ID NO: 22334 - DNA, 550 bp, Zea mays
  Coding DNA Sequence Number=SeqID_7931
actctcccgtcgtatgtggcgacgacgtactatcggaatcattatcctaagatggtgaagttcctcaagcccggcaagggcgttatcctcctccagggacgcttcgccgtgaggaagggaattatcgtgcgcgtgttccaggaggggacccgcaaccgcccctatggccactgcctcgtgcgagggctctccaagtacccaaagaaggtgatccgcaaggactccgtcaataagactgcaaagaagtcgcgcgtcaagtgcttcatcaagctcgacaacttctgtctgctcatgaccacccgatacaccctcaacgtcgatttcaaggatggcgccaccggtgggtccgactgtactctctacccagaataagaatgttctcgtctgcaagactgacaaagtgcgccttgaggagaggtctcaagaccggaaagaacaggtgagttctttaccatgctccgattctatatgctcggcctcccgaatagacctgctttagctggcgatttgttgtatcggacagactccatctctgtattcgtattacatg

SEQ ID NO: 22335 - DNA, 396 bp, Zea mays
  Coding DNA Sequence Number=SeqID_7932
cgcgctgcacttgtttgacgtaatgccgcacaggcgcgtgccgcctgatttggtctctcacaccatcttgatggacgggctgtgcaaggcctggaggctgaaggatgctcgtcggatgtttgacaggatggtacatggggggttgcgccctgacgctgttgcttatagtgttctgatcacagggtactgcaacgagggacaactaaaggaagcgaggtcgctgctgatggagatggctgggagtgggctcttggacatagctttcgctctcagggttgtcgttcagggtcatgtaaaatttggaaagctacttacctgcttgaacatggtggcaccactaaggaaatatggtatcgtcatcccatcacagagttatagctgcttgattggtgcatt

SEQ ID NO: 22336 - DNA, 444 bp, Zea mays
  misc_feature (28)..(28): n is a, c, g, or t
  misc_feature (58)..(58): n is a, c, g, or t
  misc_feature (154)..(154): n is a, c, g, or t
  misc_feature (292)..(292): n is a, c, g, or t
  misc_feature (316)..(316): n is a, c, g, or t
  misc_feature (339)..(339): n is a, c, g, or t
  misc_feature (342)..(343): n is a, c, g, or t
  misc_feature (360)..(360): n is a, c, g, or t
  misc_feature (362)..(363): n is a, c, g, or t
  misc_feature (369)..(369): n is a, c, g, or t
  misc_feature (372)..(372): n is a, c, g, or t
  misc_feature (401)..(401): n is a, c, g, or t
  misc_feature (405)..(405): n is a, c, g, or t
  misc_feature (407)..(407): n is a, c, g, or t
  Coding DNA Sequence Number=SeqID_7933
gtggcggctggctgactctcatacgcantacggtattttgctggcgaccctgccgcangggcgtcatcttagccatgatcaacaacaactggtggataccctggttgaacaactcaccgccacgctggcgctggatcgccatcaggaacgtcancaacagttgatcgtgatggaagagctgtgccaccattgcgcgcgaactgcatgattctattgcccaatctctctcttgcatgaagatgcaagtgagttgttacagatgcatggcgatgcgctgccagaaaccagccgngaactgtaagtcagatccgtaacnaactgattgcatcctgggcgcanttnnagaattgctacccattncnntttgcnctnaccaacctggatacgtccgcctgaggcantgcnanagacaacgccaatttgcttcccgggaactggatataa

SEQ ID NO: 22337 - DNA, 597 bp, Zea mays
  misc_feature (84)..(84): n is a, c, g, or t
  misc_feature (138)..(138): n is a, c, g, or t
  misc_feature (180)..(180): n is a, c, g, or t
  misc_feature (192)..(192): n is a, c, g, or t
  misc_feature (196)..(196): n is a, c, g, or t
  misc_feature (199)..(199): n is a, c, g, or t
  misc_feature (205)..(205): n is a, c, g, or t
  misc_feature (215)..(215): n is a, c, g, or t
  misc_feature (217)..(217): n is a, c, g, or t
  misc_feature (234)..(234): n is a, c, g, or t
  misc_feature (246)..(246): n is a, c, g, or t
  misc_feature (254)..(254): n is a, c, g, or t
  misc_feature (265)..(265): n is a, c, g, or t
  misc_feature (269)..(269): n is a, c, g, or t
  misc_feature (285)..(285): n is a, c, g, or t
  misc_feature (293)..(293): n is a, c, g, or t
  misc_feature (303)..(303): n is a, c, g, or t
  misc_feature (324)..(324): n is a, c, g, or t
  misc_feature (329)..(329): n is a, c, g, or t
  misc_feature (353)..(353): n is a, c, g, or t
  misc_feature (358)..(358): n is a, c, g, or t
  misc_feature (361)..(361): n is a, c, g, or t
  misc_feature (374)..(376): n is a, c, g, or t
  misc_feature (379)..(380): n is a, c, g, or t
  misc_feature (385)..(385): n is a, c, g, or t
  misc_feature (391)..(392): n is a, c, g, or t
  misc_feature (394)..(394): n is a, c, g, or t
  misc_feature (428)..(428): n is a, c, g, or t
  misc_feature (446)..(446): n is a, c, g, or t
  misc_feature (450)..(450): n is a, c, g, or t
  misc_feature (456)..(456): n is a, c, g, or t
  misc_feature (461)..(461): n is a, c, g, or t
  misc_feature (513)..(513): n is a, c, g, or t
  misc_feature (544)..(544): n is a, c, g, or t
  misc_feature (550)..(550): n is a, c, g, or t
  Coding DNA Sequence Number=SeqID_7934
gcgccatgaggcctctcgacgagaaggaaacgactcaggtattcgagaagctggtcaagttcacggggcccaacctgaagcacntcctggagcgccccgcagtggagggccccgacgcggagcccggccgctactgcntccggcttcaccgcaatcgcgtctaccacgcctccgaggcgntcgtgcgccgcngcancgncgtgtnccgaccgcgncncgtcggcgtggggacgnccatcggcaagntcacccancacggcgcgtnccancttacggtccacgcgntcgacctnctcgttgcanacgcgcgccgccgcgtctggntcaanccgacaccgagcgttcctttctcnttggnaantccgtgcccaagnnnttnnctcgntcgcannancgagaacaacaaggtcggggacggggtggtcgtnatggtcatggttgacgtncctnccgggntcggnattgcggcgaggtcggcgcaggattgcaggaaggccgaaccaacggcggcgncgtgctgcccagtcggaacgccggggagtanctccgnaggaggagaagttttgtgaggtgagcgcataggcttggctggttaag

SEQ ID NO: 22338 - DNA, 315 bp, Zea mays
  Coding DNA Sequence Number=SeqID_7935
acagttgcccaacatgtcgctcgctaggggagagaagacgaacttacaattcatattgcgtgatctgaacaccaacgatgatggcacgcaaaaaggtatgtacgctcttgaccaagatcaagaggtgtcggtcgccgatactctaacttggtctgcaagaaagctgatgttgatctgaacaaacgtgctggtgagcttacctctgaagagctcgagcgtatcgagaccaacatgcaaaaccccacacaatacaagatctcttgctggctactcaacagacaacgcgacattggtgactgcgaggactctcacatc

SEQ ID NO: 22339 - DNA, 586 bp, Zea mays
  Coding DNA Sequence Number=SeqID_7936
aagatacaggtcacaaccggctacgggcctctttgcctggaagagccctgacgatccatcaaccggggacatctcttccggcatggatccggcctcctcaaacgttcaggtgttcatttggaatgggacattgccgtactatcgttcttctttttttaatgatgtcccagcatccggcggcacgtaccaggccaacaatacctccgtcacataccaatggatgatggtcgatacaggggatgagatctactatacgttcacagtcttagccggttctccctacatgcacttctcacttcaccacacaggcaagatgaggctcctggtctgggaaaatagcacatcatcctgggtgctcatttctgaggaacctagtgttggatgtgatctctacgcctcttgtggcccgttcggatactgcgatctcactaaggcaatgccgacatgccagtgccctgatcattttgagctggtcgacagtctcaacttctctagaggatgccagagaaaggaagagctgaaatgtggaacagagagctatttcatgaccatgcctaacatgaagattcctgacaagttcttgcac

SEQ ID NO: 22340 - DNA, 445 bp, Zea mays
  Coding DNA Sequence Number=SeqID_7937
atcaacgaaatcacgcgtgcgcacggccgcgggcgcttcgtgctgctgtacgagatcgtgttcccgatcggcctgctggtatcgatggcgctcggcgcgtggctcgtgccgcggttcggctgggagatcatgtacttcgtcggtgggctgccgctgattctcgcgctggtgctcacgcatctcgtgccggaatcgccgcgctggctcgcatcgcgcggacggctcgccgaagccgggcgcgcggtgggcgtgttcgaatcgtcggtgcgcggcgaactgccgccggccacgcaggcggccgcatacgacgagatggtccgccagcatccgaagcgccggatgagcgacctgttcagcgccgcgtatcgcaagcgcacgctcgcggtggcgacgctgtgggcgacgtgcgggttcatccagtacgggctgtccacgtggctgccga

SEQ ID NO: 22341 - DNA, 495 bp, Zea mays
  Coding DNA Sequence Number=SeqID_7938
gacaccacagacccgggttacccagacgggtggcttgggtgccgtcgcccaggacggcaaaaagaagaagaagaaccgcggccacgagaggccgcagactgctgcaccagtcgtcacggctgcgactgggggccggggcgagcgcaacaagcacccagggccgcaggggagcaacagcggctcatgccctatgcaccccaacgctcgccacagcgccacggagtgccgcgagatcatcaaactcgtgaagcgcgtcagcggacggcgcgaccagacctccagggacggctccccacctcgtcgccagcccggcaaggagaggtccgacgacggcgaggtggctgccgaagagcgggacctcgggtatcagtcacccgagggggtcctaaaggacgtcttcaccggggactccgactccagcggcgagagcgaccgccgcaagaagctgtatgttatgtacgacgggagctgggatatcacctccctcaggaacgt

SEQ ID NO: 22342 - DNA, 388 bp, Zea mays
  misc_feature (26)..(28): n is a, c, g, or t
  Coding DNA Sequence Number=SeqID_7939
gggatgttgacatggctgcatctgannnaagagaacttgggtcaaatgaatattatccatacttcattaagcgtcttgtgtccatggccatggacaggcatgataaggagaaagaaatggcttcggttttgctttcagcattgtatgctgatgtcatcagtcccgcgcagattagggatggattttttatgcttattgaatctgcagatgatcttgcagtggacatactagatgcagttgacatccttgctttattcctggcacgtgctgttgttgatgatattcttcctccagcctttcttgccagggccaagaaggctcttccagaatcttccaagggatatcaggtaatccagactgctgagaagagttatctctcagctccaca

SEQ ID NO: 22343 - DNA, 490 bp, Zea mays
  Coding DNA Sequence Number=SeqID_7940
gggtgcccatggttttctgcccccggcacggggaccagtttggcaacataaggtacgtgttccacgtgtggaaggtaggcccggagcttgtgggggaacaactggaaaaaggccaggtcaaggcccccatcgacaggctttttggccccaaggaaggggaggagatcaaggagaggatgaaggaattcaagatcgctgcggccaaaggcatcggcatcggggttgacgttgacgaaaatgggtccccccgcccggatttaaccgatttggttgatttcataaaatccttttgagctcatgacgatcgatttgttgggtgatgcctactctgtccatcgtgatggacccctgtttgtggtcacttccccgttcctgacggggttgtgttttagggtatcattgtgcgatcagttccatgtttttggccatgttttaaaataaaacaaaaaacttgtgtttttgggggaccattgtggtccctttcatgttt

SEQ ID NO: 22344 - DNA, 473 bp, Zea mays
  misc_feature (420)..(422): n is a, c, g, or t
  misc_feature (424)..(428): n is a, c, g, or t
  Coding DNA Sequence Number=SeqID_7941
tgctcctgtcgccaaaatggttacagtaagggtgtttctcatagttgtagcgacaaagaattgagaagttcatcaaatggatgtacataatgcatttctgcacggtgatcttatggaggaagtatacatgaaattaccacccggtttccaggtggggactttctagaaagtgtgtaggctcaagaaatcactttatggtttgaagcaggcgcccctgtgctggtttgctaaattgttaaccgttttgaagaattatggttttaaacaatcttattcagattattctctgtttactttaggaagaggatccgttcagcttagtgttattgtttatgtcgatgatctcatcatcttcgggagtcatccagatgatatacagaaatttaaggattatctcagtgcttgctttcacatgaaagnnntnnnnnttttaaagtatttctcgggaaagtggctcgcggacccaatgggtt

SEQ ID NO: 22345 - DNA, 379 bp, Zea mays
  Coding DNA Sequence Number=SeqID_7942
tcccagtctggaaacaatgcgaataatcgcggcgataatgcggttctggcgctgagtaatatcgacttaaaattgctgcgggtatttaaatgcgtggtggaagccggcggattaaccgccgccagtcacgaattaaatattggcctggcggcgatcagtaaacaggtttctgacctggagattcggctgggcatgacgctgtgcagccgcggccgtgaaggttttgagctgacgcagtacggcatcaatgtttatcaggccacgctggagctgttcgtgtcgctcaacctgtttcgcgagcggctgcacaatagtcgcaacgagctgctgggcgacatcgcgatttgcgtggtggataacaccattagcgatccgcact

SEQ ID NO: 22346 - DNA, 325 bp, Zea mays
  misc_feature (47)..(49): n is a, c, g, or t
  Coding DNA Sequence Number=SeqID_7943
gtgtattcgaatcataggagctagtaatcgacggtatgcttatattnnngacattgttgttgctgtaatcaaagaagcagtaccaaatacgcctttagaaaaatcagaagtgatcagagctgtaattgtacgtacttgtaaagaactcaaacgtagcaacggtataataatacagtatgacgataatgctgcggttgtcattgatcaagaaggaaatccaaaaggaactcgaattttttgcgcaatcgcccgggaattgagacagttcaattttactaaaatagtttcattagcacccgaagtattataacacaagaccttgata

SEQ ID NO: 22347 - DNA, 463 bp, Zea mays
  misc_feature (27)..(27): n is a, c, g, or t
  Coding DNA Sequence Number=SeqID_7944
attaatttccgggttcgcgagctcacnatacggccggcgcgccgggcctcaagcgcaggtggttcattccgttcatgaacaccaccgacctcggaaagcagttcaccatgtccgaggtgcgcaagcacgcgtcgcaagagtcggagtggatcgacgtgcacggacacgtctacaactgtaccaagattctcaaggaccacccgggcggtgccgacagcattcttattaacgccggcaccgactgcaccgaggatgtcgacgccatccactccgacaaggccaaggtgcttcttgacacctacctgattggttagctcataaccacgggcaccggttacagattcgacaacttcgtccacggcggctacgttctgtcgcacctagtggccatccgcgaggcccgtaggggtcccgggtttttcaacctgagcgaaaagatccactggcgactcgtaagcatgaa

SEQ ID NO: 22348 - DNA, 354 bp, Zea mays
  Coding DNA Sequence Number=SeqID_7945
tcctccatgggatgtcgtagtccatagtctcagatcgagatccggtgttcacctcgacgttctggcgggaactgatgcggctcatgggcacccagctccacatgacaacggcgttccatccatagttcgatggccagacagaggctgccaaccgcgtcatcgccatgtacctccgttgcttcataggcgatcgtccacgagactggatgcggtggctgccctgggcagaatacaccgacaacaccgcattcagtcgtccctgtgggagacaccgttccgtgtggtctatggctgagacccgcccaccatcaggtcctatgaagatggcaacactcgagtagctacagtggacaa

SEQ ID NO: 22349 - DNA, 276 bp, Zea mays
  Coding DNA Sequence Number=SeqID_7946
tctacctcgagcaagtcgaggtcatggtcatcctggcgccaacatgaggcgtcagcatcggtgcgctcgccctcagtaaggggtgcacagaccaacgacctccgggcagaactcaaccgtaggcgtacgagagaggatgctcggatctctttggagagggcgcgggagcgccgacaaaacattgaagatcgcaacctcaatcaagacttcgctgcggtagcaccgcaaaccccagtgtgtgctcggttccagacgggtgtccccttaaccggcatg

SEQ ID NO: 22350 - DNA, 366 bp, Zea mays
  Coding DNA Sequence Number=SeqID_7947
atcgttgttccaaatagcactacacctcagcaatcaacggcaaaaaacccacccagtgacgtatacacacgctcttgtggagctgcttactccaagggaattgcagcctgacttggctcatgagctgcgtcacctcaagtgcgatcatggtgtttggcatactatcgccaatatactcacaatgggagcatacactgtccctggttttggcatgattgctggctttctggaagagcagttatacagatggctacgagctgcagagctgacttgagacaggtcagctcttattgtggtgcaagatccgaaggtagtcatctatgttctgacgaacttgcccgtaggatgcccctatcttggcctcaa

SEQ ID NO: 22351 - DNA, 504 bp, Zea mays
  Coding DNA Sequence Number=SeqID_7948
gaagctttcaccatgaatgtcgcccgcctgtggctgcgcctgccgggtgacatggacagaagaccgctcgacgggtatttcaccgcgctgggctttggcgataacgacgacctgtggccgaagggcagcagcagtttcagcggctatcagctgttgctggagtatttcaccttccgcgagaaattcatgttcacgggcctgcgtgggctggagaccgtggtctttccggctgagctcccctggtttgaaatcgacgtggtactggcggaacgctgggagcatgatttcagctttaccgaaaagcatctgcgccagaactgtgtgccggtgattaacctgttcccgctggaatccgacccgctgacgctcaattcattgcagaccgaatatatgctgcgcccgatgcgcgtgcaggatggtcataccgagatttatgcggtggattcggtgatgtcatccagccagcatagctacgtgccgttttcgagctttcgccataaaggc

SEQ ID NO: 22352 - DNA, 72 bp, Zea mays
  misc_feature (33)..(33): n is a, c, g, or t
  Coding DNA Sequence Number=SeqID_7949
tgaggagaataacatacgcatttcggcggcacngattggaacaagcgtgacaagttccttttaccaccgacg

SEQ ID NO: 22353 - DNA, 509 bp, Zea mays
  Coding DNA Sequence Number=SeqID_7950
tgcgacgtcttaccggagcaacctcaccttctcccggcctgacaggcgcgctccagtacctcaccatctcccggcccgacatcgcctacaccgtccagcagttgtgccttcatatgcacacaccacgggagccccacctcaccaccctcaagtggattctgcggtacctctggggctccctcgactacgaccttctcctccgaccatcctcgacgtcggaacttgtggtctacgtcgacagtgactgggccggctgccccgacacgcatcggttcacctccggctatgccgtgttcctgggcgccaaccttgtctcttgggccgccaagtggcagtccattgtctctcgctccagcgccgaggctgagtaccgcgttgtggccaacagcgtggcagaggcatcctggatgcgccagctcctccacgagctctacaaccccctccagcgcgccaccctagtttactgtgacaacgtcagcgccgtttacctctccactaatcccgtgcaa

SEQ ID NO: 22354 - DNA, 245 bp, Zea mays
  misc_feature (26)..(26): n is a, c, g, or t
  misc_feature (49)..(50): n is a, c, g, or t
  misc_feature (80)..(80): n is a, c, g, or t
  misc_feature (122)..(122): n is a, c, g, or t
  misc_feature (124)..(124): n is a, c, g, or t
  misc_feature (139)..(139): n is a, c, g, or t
  misc_feature (168)..(168): n is a, c, g, or t
  Coding DNA Sequence Number=SeqID_7951
cctcaaggaggaggtgataaatgccntggatgatgcgaggggcgcggcnncccctctttgccttgtggggcggatcatcntacacaacaaggacgccaccgactcgtcttccaccgaccacnanggaaaggaggccggnggagcgcgccccggcgcacccggccccgnggcccgcggggaccgtgaagcgcagggcggtgctgctccactcccctctgtgcctggtcggaccacgaccgccaggg

SEQ ID NO: 22355 - DNA, 405 bp, Zea mays
  Coding DNA Sequence Number=SeqID_7952
gggacattcaaactcgagacgcctgtgttcaacgaaggtggatccatcaatgagcacgctgtagacatacttcagagattgctcctgggccagactgctgatgcaaatcccagctgtggaccgccaggacgcatacagaatggatacacttgatggacaggttataagagccaacaccaaatcatagggaaaagaatgatggcgaagatcatcgggtgtgatgacccatgctcaactgataccacctgatggaatggagtctaaggagttctatacaagctggtgctaagcactttagcgacacatccactctggagcaggaatcaagaaacgagaatatggggatttccctttgccaatagcattggtagagaacagaggcaggtgcaggcttaacgatcatgg

SEQ ID NO: 22356 - DNA, 492 bp, Zea mays
  misc_feature (289)..(291): n is a, c, g, or t
  misc_feature (321)..(322): n is a, c, g, or t
  misc_feature (339)..(341): n is a, c, g, or t
  misc_feature (369)..(371): n is a, c, g, or t
  misc_feature (426)..(427): n is a, c, g, or t
  misc_feature (431)..(435): n is a, c, g, or t
  misc_feature (444)..(445): n is a, c, g, or t
  misc_feature (449)..(453): n is a, c, g, or t
  misc_feature (462)..(463): n is a, c, g, or t
  Coding DNA Sequence Number=SeqID_7953
gcaggccgacctcagaggataaccagctcgcttgatgatgaaggcacggcagtgttctgcttagagctcctaattactgtcacattaaataacagagacaggattgtgcttttgtggcagggtgtttatgagcacataacccatatcgttcagtccacagtgatgccttgcaatctggtggagaaggctgtgttcgggcttctgcacatctgccagaggctgcttccttataaggagaatctggtggatgacttactgaggtcactgcagctgattttgaaacttgatnnncgtgtagctgatgcttactgtgagaacatnnacgttggaggtcacacnnncttgtgaaggccaatgcaacccatatcnnntctcagatgggctggcgaactataatttccttactctgcgtcaccgctcgccatnntgannnnnctgatgctnncttnnnnnctctggttnncatcatgtctgagggagcacacctctcac

SEQ ID NO: 22357 - DNA, 350 bp, Zea mays
  Coding DNA Sequence Number=SeqID_7954
ggaattcggctcgtgagatcatgctatggtgcatatatatttattggctgcggttgattgctcctgggcacgtttaagcgatgcccctttcgtgaaactacgttggggcgctccttgcctcttaccatggttggtagcaacaaatcctgtgaactatggccgcccctgtgaactgtcatgtgtggaagctttatccgcagccctcataatatgtggggaggaagatacagcacattcgctgcttgagacttttaaatggggtcactcattcttgtctctaagcagagatctcctgaatgcatcctcccagtgtgaaaatgggcctgctatcattactgtgcagaagtcat

SEQ ID NO: 22358 - DNA, 595 bp, Zea mays
  misc_feature (247)..(247): n is a, c, g, or t
  misc_feature (389)..(389): n is a, c, g, or t
  misc_feature (400)..(400): n is a, c, g, or t
  misc_feature (517)..(517): n is a, c, g, or t
  misc_feature (530)..(530): n is a, c, g, or t
  misc_feature (555)..(555): n is a, c, g, or t
  misc_feature (563)..(563): n is a, c, g, or t
  Coding DNA Sequence Number=SeqID_7955
gagagcaagacggccacagcgagcagaggagagaggccacgagacgcgctagcggcgagaggccgggaggaggagagaggaacgatagaagagaagagaaagagaagacgtgacgatgatggaaagagagaagaagagacgaggagaagggcggactgagacgggacggggtgatgtcgcggcatgaagcggagacgcgacgacgacatgagaggagcgatagaacggagagagcacgcgtgagcgngcggcaggcaagtgacaggagcgtagggaggaggaacgagacgagcggtcagcgcggaccgacacaccgaggcgagacgagacggcgtgaggcgacgacacgagacgacgaagtaggaatcgagagcgcagaggacggaggncagacacacgnagagagcgaagagaacagatcgataggactagccgcgagaagaagatagacacactagagacgagaagatgtaggacgacgggagaggtgatcgcgacaggcaacgctgcaggcgcngcgacgagcgaancgatgcaacgtcgactcgagcgagncgaagcgnacagaacgacaactacagaatacgacaatcag

SEQ ID NO: 22359 - DNA, 320 bp, Zea mays
  Coding DNA Sequence Number=SeqID_7956
gtgcatcagcaccaccacactggaggaggactcttaggaccgtgagaaaggacctaacactggaacggcggtatcagcacgagttcgttggggagccgactgtgcccgataccgtcagtattctgaggggactcacggagaagtacgaggggcaccatggcgtgaggatccaggaccgcgccctggtggacacggcacacatctccgggaggtacatcatggatcggcacctgcctgacaaagccataaacctggtggacgaggcctgcaccaatgcgagggtgcagctcgacagcctgtcggaggagattgatatcctg

SEQ ID NO: 22360 - DNA, 359 bp, Zea mays
  Coding DNA Sequence Number=SeqID_7957
ttgcgagcaatgaagcccaacatagtgtaccaagatagtctactatgagaggatccaaacagacgtgctgcaaacctgtgatccaaccctcgctgatcgctgaaagtgacttcatgctacctgaaacctgaacaactccggcgtccgagcgcatttgggaaaggcacgtatctacgttcccctgcttccagatcttggagcacttgagcatgcctgcagtactagtactgttcctcaacagcctgaacgtttcgattccatcaacgctggtgaacctgactgatctcatcaggttggatctctgcgacaacctggttaccggacctatcccaactacgtgttggttccatcagcaggct

SEQ ID NO: 22361 - DNA, 338 bp, Zea mays
  misc_feature (81)..(81): n is a, c, g, or t
  misc_feature (97)..(97): n is a, c, g, or t
  Coding DNA Sequence Number=SeqID_7958
gggccgtgttctgggcggtgatctgcgacgagcacggcatcgaccagacgggctagtacgcgggcgactccgacctccagntcgagcggatcaacgnctactactacgaggtcagcggcggccgctgcgtgccccgcgccgtgctcttgttcctcgagtccgggaccatggagtcgctgcgctccgggtcctacggccagatcttgcggcccgacatgttcgtcttcggtcagtccggtgacgtcttgctctgggccaagggccactacacccagggcgtcgagctcatcgactccgtcctcgacggcgtccgtatggtggccgagatctgccactgc

SEQ ID NO: 22362 - DNA, 307 bp, Zea mays
  Coding DNA Sequence Number=SeqID_7959
accatggcgacccacactgataatgcttttctcaaacaacctaatgtgttcctcacctaaaataaatctggcaagggaaagaagccaggcaagggtggcaatcgatttttaaaaagcattggccttgccttcaagactcccagggaagcaattgaagggacctacattgacaagaaatgaccattcactggaaccgtttctatcacaggcataattattgctggaacatgccacaatgctaatatgaacagaaccatcattgttcgcatgaactatcttcactttgttaaagaaataccagacgtat

SEQ ID NO: 22363 - DNA, 459 bp, Zea mays
  Coding DNA Sequence Number=SeqID_7960
agattgccggatcgatctccgcgttccgccgccgctatcccggcgtacagctgaaaatctccgaatttggtggcctgacggtgcagcaggcggtgctgagcggcgggctggatattgcgctgaccgccctgccgattgatgcggagctgccgctgaacacgctggaactgatgcgccatccgctgtgcgtgctgctgccgcgcagcgcgcgctggctcaaccgcaccagcctgacgctggccgagctggctcagcatcccctgctgatcctcaacgaagagttttcgcttaaccgccagctgatgaaagcgtttcagcgccagggagtgatgccggatatcgcgctgcgcagcgcgcagtgggattttcttgccgcgatggtgcaggcggatatggggctggcgatcctgccggagccgatctgccagcggctggataaacaggccttgctgtggctgc

SEQ ID NO: 22364 - DNA, 388 bp, Zea mays
  Coding DNA Sequence Number=SeqID_7961
tatgcaccctcgtagctcggaattcggctctgcggcttgtacgggaccagtttatatggctcaagcatttgatgagacgcatcggggtatgtcttatgcatcagtgaggatcaattccttcgataaacgtgttggcctttcggagaagataaacaatgggatatccgttgccaatgaaagggtgaaatctgcctaccaaagatggcatgtttctgataaaacaatggttgtattgttggctgcacagcgcaagctaaatgatacaggctctgctgtgaaaaccaacacgtatgtgtctgctgcaacaagctcgctggatggtgcttttagcaaggtcgccaaggctgctcatgttgctggctcaagaaccagggagatgttccagacg

SEQ ID NO: 22365 - DNA, 587 bp, Zea mays
  Coding DNA Sequence Number=SeqID_7962
gagtctgaaattgctggccagcggccatcctcatgcaggctggcgcgtgctgctgagccttctgcaacagcgggtcatggccggagagccgttttctcaggcgctgcgcgcctggccggatatcttcccgccgctgtttccggcactgatgcaggtgggtgagctgaccgggcaactggacgagtgctgccgccagctggcactacagcagagcaggcaacagtttctgcgccaaaaggtagtgaaagcgttgcgctatccgctgttcatcctgctggtggcgctggcggtcagcgccgggatgctgctgtttgtgctgccggaatttgttgcggtgtacgccagctttgacgcaccgctgccggcctttaccgccggcgtgatggcgctgtcggcactgttgcagcaggcggcgctgccgctgctgttgtgcggtgtggcgtccgggtggctggcgcgtctgacctaccgacgatccgttgcgtggcaaaagcgcagccagcagtggctgctgcggcttccgctgctggccccgttgtggcgcggcggtcaatacagtacacatatacgcgattctgcaactgacg

SEQ ID NO: 22366 - DNA, 515 bp, Zea mays
  Coding DNA Sequence Number=SeqID_7963
gctggcgacgctgcaacagcaaatcaacgtggttcagcaaacctgggagccgacgcagagcacagcagcgtaacggtctggcgccgctcaccgacgttgagaatgcccgtgcgcagctggcctcccttaacgcgcagctgccacagtatcaggcccaggagcgtcaggcgatgaacgggctggcagtgctgctgggcaaaacgccgggcgcgctggataacgaactgatgagcagcaaagcgctgccggcgttgccgaagctggtggcggtgggcattccatcgacgctggcgcgccgtcgtccggatatccgccaggctgaagcgaatctgcatgcgcagaccgccaatatcggcgtatcggtcgcgaacctgttccccagcctgtcgctcaccgggcagctgggcgtgcgtaacaccgatgccagctaccttgacgactggagcagccacttcttcagcgtcggcccggcgctgtcgatcccgatttttcagggcggacgtctggtttccagc

SEQ ID NO: 22367 - DNA, 385 bp, Zea mays
  Coding DNA Sequence Number=SeqID_7964
gatcttttttttggcattcgtcgtccggaccatcttctccaagatggggatgaagggcaagcccgtcagcgggatgaactactacgcctgcctctccatcatgtcgatggtgatcctactgcccttcaacctctacatggaggggcccaaggtgtgggcattgggctgtcctacagcactctccaagatcagttccaacttcttctggtgagtggcggcacagagcgtgttctaacacctgtacaaccagttgtcctacatgtccatggacaagatctcgccgatcaccttttccattgggaacaccatgtagcggatctgcgccatggccacgtccatgataatgttacagacacccctacagacgataaacctgctcagggac

SEQ ID NO: 22368 - DNA, 551 bp, Zea mays
  Coding DNA Sequence Number=SeqID_7965
ctagcttgctatatcataccctgaattgacagacatgcaagaccgggccatttttgaagctgttatagctgtgaccaacctgggcgttcagagttccaccagataatggctcctcttcgtcgaaacaccacacgaactggtcaatcaagagactcttatccaccaaattgctgacaaagtgttcgccaatgtgaacaagactatcgactacgaaattgcaacaatgattgacatccccagggcagctctggtgtgtgatgacatagcgcaccacgttgaattcttctccttcggaacgaacgacgtgacgctcatgacctttgggatacagtacgcatgatgagcaaaagctcattcccgtctatcttgatcagggcatcctccaacatgaccccttcgaggtcctgaaccagaatgcagtgagcgagctgatgaagtctgctacagaaaggagccgcagagctacgactaacttgaaagtgttcatttgagtacaactcagagcagagccttcatctgtgaccttcttcgcaaaggctgtactggattac

SEQ ID NO: 22369 - DNA, 207 bp, Zea mays
  Coding DNA Sequence Number=SeqID_7966
accaactatttacattgaaccctgttgttttttgcagcaacaactatttccattcagccaggtaggttttgcctattttcatcaacaacaactttttccatttaaccaattggccgcactgaaccccgctgtttatttgcagcagcaaatattactcccatttagccagctagttgcagcaagccgtgtttcctttttgacacagca

SEQ ID NO: 22370 - DNA, 429 bp, Zea mays
  misc_feature (46)..(46): n is a, c, g, or t
  misc_feature (61)..(61): n is a, c, g, or t
  misc_feature (69)..(69): n is a, c, g, or t
  misc_feature (76)..(76): n is a, c, g, or t
  misc_feature (116)..(116): n is a, c, g, or t
  misc_feature (168)..(168): n is a, c, g, or t
  Coding DNA Sequence Number=SeqID_7967
aacccgtatactgcgagcctttcaacagggccgcggcaagaagccngtcgagggtggcggntgctggtngccattnccgacgtgtcgcattacgtaagccgggcgaaccgctggangcgacgcctacgagcgcgcgacctcggtctacttcccgcgccgcgtcatccngatgctgccggagaagctgtccaacggcctgtgttcactgaacccctacgaggaccggctcagcatggtctgcgacatggtcgtcgcggccgacggcacggtcgcggcctaccagttctacccggccgtcatctgctcgcacgcacgcttcacctacaccgaggtcgcggccatcctggccaatacccacggccccgaggccgccaagcgccgcgagctggtgccgcatctgatgcatctgcacgaggtctaccgcgcgct

SEQ ID NO: 22371 - DNA, 504 bp, Zea mays
  misc_feature (325)..(325): n is a, c, g, or t
  misc_feature (369)..(369): n is a, c, g, or t
  misc_feature (381)..(381): n is a, c, g, or t
  Coding DNA Sequence Number=SeqID_7968
gaggagggcaaagaggcggcgaagaggagaggacacagacgaaaaacgagaagaaacggaagagcgagacgagacaagagagcagagaagcgagaagaaacggaagagagagcgacaacgagagaaagaaagacgaaagaaaagagagagagacagagaagaaaggaagagagaagagaggaaggggggggaggggagggaagggagaggaggaggagaagagagggggaaggagaggagaagaagagagagaagggaggagcggggcgtgaaaggggggattacagagaggcagagggggggagagggagagcgaggaggcggngggcgcgggggggcgagggggggagggggtggagggagggaggnggagtcgggggnggggagagaggggggaggggacgacagaacggaattggaggggggaaagcgcgagcgagcgaggcgagagaagagggagcaccaagaaaccagcgagaagaaggccacaaaacgacaaggaag

SEQ ID NO: 22372 - DNA, 263 bp, Zea mays
  Coding DNA Sequence Number=SeqID_7969
gtgaaatccggacctttccatacgagaggaaccataatcatgagctcgccttcacccagatgatccaaatgacccggggacgacacactcatgcggagcctgcgattgcattgagtgtgctagcagctgacgaaggtcttgaccgctccaaatgagttcccccctgtgatccatgagatccctccgtttcgtgaccgcttctacgtgtccacgtttgtgatccggatgctgatacggcagccgtcgctttgcatggacctgat

SEQ ID NO: 22373 - DNA, 597 bp, Zea mays
  Coding DNA Sequence Number=SeqID_7970
ttgagctgacgcacaacatctgccgcaacctgtcgcaggtgccgtgcgcggcacgcacgcacggtgataaccggcccgcgccctatctggtgattatcgatttcggcaacccgcagcgggcgcaatttgctggtcagacagagaaagcgccgcgcctggcacccgcagactggcagcgcatgatgcagcacatcactcagctcagtcacatcgcctggcacgactacggcgtgcgaccggtgattcatcctcatgccggtggctgcattgagtttgctgatgaactggagcagctggtacaggacatcccgcatgaggtcgccggactgtgtctcgataccggccatcttttttattccggcatggatccgcagacctggctgcaacgctactggtcgcgcatcgactatctgcatttcaaagacattaatgcggccgtctggcgcgatgtgattgcgcgcggcgtcgactttttcactgcctgtgccgagggcgtgatgtgcccgcttggccagggcgcgattgattacccggagctgcgggcgtttctcgctgaacgtcacaatcagggctggatcaccatcgagcaggagcgcg

SEQ ID NO: 22374 - DNA, 343 bp, Zea mays
  Coding DNA Sequence Number=SeqID_7971
cgagtgcatcccgtgcaagaacaacgttgagcagttctgccacaagaagatgtggtcatacaccgacgtctacactgatggacggcacacgcagggtggattcgcctccaccatggtcgtcgaccagaagtttgtggcgaagataccggcgggtctggctccggagcaagcggcgccgctgctgtgcgctggcgtgccggtgttcatcccgcggaagcactcggataaggcgacagcggcccttcgtggcggcatcctgggcctcggcggcgtggtccacatgggcgtgaaggtagccaagcccatggcccaccgcgtcacggtgatcagctggtcgtacaag

SEQ ID NO: 22375 - DNA, 343 bp, Zea mays
  Coding DNA Sequence Number=SeqID_7972
atgaacgccaccttggctgcactgttgcggcagtgcgttctcgtgttctttgatgaaattttagtctacattgcctcatttgaggagcatttgcaacatattcgggaagtgatgcaactattgctcaaagatcactggaaggttaagtggtccaaatgcacttttgccaaaacagaacttgcttacttggggcatatcatctctgctcatggtgtggcaaccgatccaggaaagatcaaagcagttactaattggaagtctccttctttcatcaaagaacttcgtagcttcttggggttagctggctactatcgacgctttgttcgtcacttcggcattattg

SEQ ID NO: 22376 - DNA, 548 bp, Zea mays
  Coding DNA Sequence Number=SeqID_7973
tggtgctgcacgacatgcgtccttacggctacgtgatgctgggatcgttcctgatcaacctgctggcgctggtcggcatcatcttctcgatgcaggtgtacgatcgggtgattccggcgcagtcgtaccccacgctgtacgtgctgtatatcggggtgatcctctcggtggtgttcacctatattctgcgcgtcggtcgcgatcacgtcaccgatctgctcggcaagcgcgccgatatgcgcgtctccgatcgcgtgttcggccacgcgctgcggctgcgtaacagtgcggtgccgcgatcgaccggtacctttatctcgcagctgcgcgagctggaagcggtgcgcgaaatggtgacgtcgaccacggtgacggcgatcgtcgatatgccgttcttcctgctgtttatgctggtgatggcgatcatcgcgccgcagctggcgtggatcgcgccggtggcggtgctgctgatgatcctgcccggcgtgctgagccagaaaaaactggcgaagctggcgcagcaaaacctgaaagagtcgacgctgcgc

SEQ ID NO: 22377 - DNA, 247 bp, Zea mays
  Coding DNA Sequence Number=SeqID_7974
gcaaacctttttccttactatcagcaacaacatttttttcctttcaaccacctatttcccttgaaccctgttgtttatttgcagcaacaactattcccattcagccaggtaggttttgcctacttttatcaacaaaaattttttccatttaaccaattggccgccttgaaccccgctgtttttttgcagcagcaaatttttctcccttttagccagctagttgcagcaaaccgtgtttcttttttga

SEQ ID NO: 22378 - DNA, 184 bp, Zea mays
  Coding DNA Sequence Number=SeqID_7975
tcgcggaggcctgccactacatgggcgtcatgcaccgggacctcaagcccgagaacagcctattcagtgaccactcggaggaggcccctctcaagaccatggactggggactctccatctcctttcgccccggccaaatcttcaccgacgacgtgagcagccgctactacgtaggccccgaggt

SEQ ID NO: 22379 - DNA, 544 bp, Zea mays
  Coding DNA Sequence Number=SeqID_7976
aggcgcccggcgatcgtaagcagaacctgcacttttactacggcgatgcgtatggccatccagctaccagactcatcggcggaatggtgccggggtattcctgtgacagtgccgccacgccttttatgccgtacttcacaagcagcctcgatgcgcttgcctggcgcaccggcgtaccggaatcgctctacccggaggcgttaatcccgggacagcgtgagattggcagcacggccagcggcaacatgtgggggaatgtctacccccgcagcggctttgtcactcagaccgacagctacaagtcggcggccgttgtggtgcagcgcgtggctgacattatcacccgccagggacagctgcatgtctacagcccactcacagggcagcgttcgccgggctactggccacccgaccccgttcaggaaaataccggcacaaaaaatcacaaatggcagcgtctctctccccagctctcgcagagctgcgcggtgttcccagacaccggcgggcagatagctgaaaacggcaactatgcctgggcgct

SEQ ID NO: 22380 - DNA, 476 bp, Zea mays
  Coding DNA Sequence Number=SeqID_7977
gaccgtggaccctttctcaaataaggattggaatgacatcacggcaccgacgaacgttcagtgcgcgcaacatcaccaacactctcatatccaggacacaggtaccaccgattgcgtctgaggggctgaagcacagagcctttgaggcttgcctaactgatcttcagggcgacaaggatcaggcttacaggaaaatcaggctccgtgctgaatatgtgcagggcacgaatgtgatcacaaacttttggagaatgaattttaccactgatgaactgatatctctattgatgaagagccatacgttaatcttagcccctgttgatgatgagacaaccgacgactacatgatgcgattgttctgcatcggcttcgcgaataggcgcccagaccaggtcgagagaacctgctatgctcatggatcccagatccgtcagatccgccggaagatgccttagattatgatcagccaggctact

SEQ ID NO: 22381 - DNA, 456 bp, Zea mays
  Coding DNA Sequence Number=SeqID_7978
gctcggatcctgtattacgggcgccccccacgcgttcgggtaccttctcgccatatggaaagcaagtaggcctttaaacagtggagaagggggggagaccctgacgcgagagctgtctgttctttacagccgcttaaatggcatggtgttgggaggaatccttctaatgcatgatctgcacaatttcttacgcccacttgtactcctgatgcactcccttagggtacctcaaagtgtcacacatgtcatcaaaggctactagaaaacctctgcacccgcaatatattttatgcatgacagttacaccgcttgctattccattgaatatatgtggctgccctaggaattccatgcgtatcaccccctgaaagagatgggccatatctgttacaggattcatgggtctccaagcagcacagctcctgatccagcactatcttgagtctcactgcttta

SEQ ID NO: 22382 - DNA, 299 bp, Zea mays
  misc_feature (205)..(205): n is a, c, g, or t
  Coding DNA Sequence Number=SeqID_7979
cttggagatgaatgacctaaagaagattgggcttggcytgaaaggttttggaatattyttttaatttttgggaattgttttyttttttgaaaaggggctaatggaaatgggaaatatttttttyctgtaaggtttgggtttgaaaattggtctgaaataaactatgaagttcttaacaaagcaaaagaattacaagggtactatntaatttggtgctggtttttttctggttctaattgggtggckgttttttggaatgctyttagaggcatatggctttattgtactcttcagtgggt

SEQ ID NO: 22383 - DNA, 512 bp, Zea mays
  misc_feature (469)..(469): n is a, c, g, or t
  Coding DNA Sequence Number=SeqID_7980
gatgacgccatcgtgtggtagaaacgttgagcgtgtatgcgaagaaggtttgccgccaaaagagctacccgtaagtcgatgggcagattcagggcgtctggtcggtatcgcgatggtactgtcggcggtattcgtaccgatggccttctttgcggttctactggtgctatctatcgtcagttctctattaccattgtttcagcaatggcgctgtcggtactggtggcgttgatcctgactccagctctttgtgccaccatgctgaaaccgattgccaaaggcgatcacggggaaggtaaaaaaggcttcttcggctggtttaaccgcatgttcgagaagagcacgcaccactacaccgacagcgtaggcggtattctgcgcagtacggggcgttacctggtgctgtatctgatcatcgtggtcggcatggcctatctgttcgtgcgtctgccaagctccttcttgccanatgaggaccagggcgtgtttatgaccatggttcagctgccagc

SEQ ID NO: 22384 - DNA, 501 bp, Zea mays
  Coding DNA Sequence Number=SeqID_7981
tggattaccccgcacatctgttgggtatgactctatatgggtgattgtggataggctaactaaagtagcccactttattccagtgaagaccccatattcaggagccaagctagcagagttgtacatggcacggattactgatgggcagactgagaggaccaaccaagtactagaggttatgttaagagcttgtgctcttaaacatggtggaagttgggataagagtttgccttatgcggagttctcttacaatagtagctaccaggctagtttgaagatgtcaccgtttgaggctttgtatggcagaaagtgccggactccactatattgggatcaaatgggtgaaaggcagttatttgggcctgaaattatagaagaggctgaagaacaagtccagcaaataagggaaaatctgaggactgctcagtcaagactaaaacagcgtaaacccaaacagggcctaaaattacggcgtgaaaatcgcgtgcagccgatcgtgcg

SEQ ID NO: 22385 - DNA, 432 bp, Zea mays
  Coding DNA Sequence Number=SeqID_7982
tgagccgggctctgtgatctcctgggggagccccgtgaccatctggtgtcagggtcccccgggggcccaggagttccatctggataaagagggaaaccgagttttctgggacagagagaaacccccgggtcccaggaacaaggccaggttctccatccactacatggggcaggaccacgcagggagctatcagtgctactacagaacccgcactggctggtcagagcgcagtgaccccctgcagctggtggtgacaagaccctacgtcaaacccagcctctcagccctgccgagccctgtagtgatgtcgggagggaatgtgaccctccagtgtggctcccatcagggatttaacagattccttctgaccaaggaaggagaagacaagtcctctcgggccctggatggacagcaaatgctcgacgggcagac

SEQ ID NO: 22386 - DNA, 484 bp, Zea mays
  Coding DNA Sequence Number=SeqID_7983
tcagtccttattagccccaaattgctcatttagagagcatcaaggggccccgggcaataccacattcccacttagtgtgtggagatcctctacccaggctgggacttctggggtatacgaagacccaggcccctggaggagctggtccagggaccgaactccccgtgtgctccccacagcagagcatgactgtcctcctgtcgctgctgctgggcttcaacctgggctgcaccgcatcatgtggttttgtggcacacgtggaaagcacctgtgtgttggacgatgatggggatcctaaagacttctcgtattgcatctccttcaacaaggatttgctgacctgctgggatcccctgcaagccagtatgattcctcttgaatttggggtgctgaacggcttggcccggtacctctcacagttcctcaacaataatagttacctgatccagcgcttgtccaatgggctgcagaactgtgccgcgca

SEQ ID NO: 22387 - DNA, 396 bp, Zea mays
  Coding DNA Sequence Number=SeqID_7984
ggagacggccacaagtgtgcctgtcccaccaacttctacctgggcggcgatgggcgcaactgtgtgtccaactgcacggccagccagtttgtgtgcaagaacgacaagtgcatccccttctggtggaagtgtgacacggaggacgactgcggggaccactcggacgagcccccggactgtcctgaattcaagtgccgcccaggacagttccaatgctcaacgggcatctgcacgaaccccgccttcatctgtgacggggacaacgactgccaggacaacagtgatgaggccaactgcgacatccacgtctgcttgcccagtcagttcaagtgcaccaacaccaaccgctgtatccccggcatcttccgctgcaacggacaggacaactgcggagat

SEQ ID NO: 22388 - DNA, 303 bp, Zea mays
  Coding DNA Sequence Number=SeqID_7985
tggagtggctcagaactcaggaaatggggcctcatgtatcctgtgatgaagtacacaccataccaaccaagatgttccgacgggtgctcaccattgtgcatcgcgcactgcaagctgggtttgaccgcaaccctcgcccgggaagatgacaaaatcgtcaacttaaactttctaattgggccgaaactctatgaagccaactggatggaactacagaacactggctacatcgccaaagtccagtgtgctgaggtttggtgcccaatgtctcctgagttttaccgggagtatgtggcaatcaaa

SEQ ID NO: 22389 - DNA, 430 bp, Zea mays
  Coding DNA Sequence Number=SeqID_7986
aggaagagatctttcctcccatcttcataccctttcctgctgggaagagcaaagcatgagagcactgaatcctcaggccactgtcctcataagctcttaccagctgaaataaggcagtgcttccctgttgccccagcttgcacttggctcaccctaatggtgtgtatttggctgaaggttggccactgtggtgtccctccaggtgcaccagctgtatgaaaccatacagcgctggagccccatcgccgcctcccttcctgagctggtacagagacttgtcaccatcaagcagctgcatgaacaagccatgcagtttggtcagcttctgacacacttggataccacgcagcaaatgattgcttggtccctcaaggacaatgccaccctcttgactcaggtgcagacgacgatgtgtgaaaacctgtccaca

SEQ ID NO: 22390 - DNA, 275 bp, Zea mays
  Coding DNA Sequence Number=SeqID_7987
gagctggccggactacctcatgagagtggctcccaccgcactggccacagcgctggatgtgggcttgtgcaactggagcttcctctacatcaccgtctcgctgtacacgatgaccaagtcctcagccgtcctcttcatcctcatcttctctctgatcttcaagctggaggagctgcgcgcggcgctagtcttggtggtcctgctcatcgccgggggcctcttcatgttcacctacaagtcgacgcaggtcaacatcgagggcttcaccttggtgc

SEQ ID NO: 22391 - DNA, 252 bp, Zea mays
  Coding DNA Sequence Number=SeqID_7988
tcgacctgcaggtaccttcatgagtttcaatctggccaacatgagcttcgaggaacgggcgcagatcgaggcagataaggcccggctgttcgagctgtggcagaacaacctgggcaaggccaagggcgaagccgcgcggctgatcgccgaaaagccacggcgcaaaggcaaatgggccgagtgggtgcgcgccgagctggatggcatgtcgccgcccgaatacgccagcatggtgcgcagcgaagtcaacaa

SEQ ID NO: 22392 - DNA, 130 bp, Zea mays
  Coding DNA Sequence Number=SeqID_7989
ggcccgagctcctattcacgtgattattaaagaccaaaatttatatatatatcccagctggaggtgtagtgctggagcaactttcccccggccacgctctccccctaatcgcacctctgcctcgcacact

SEQ ID NO: 22393 - DNA, 556 bp, Zea mays
  Coding DNA Sequence Number=SeqID_7990
atggctgctatcgtcgtggctccgtgcacggtgcacaactccacgcatgactacgtagcatccgcatgacgtggcacgcgccgacgtgcgagtacggccggtgtactgggaggacaccgtggatgcgtacgtgcagagctacgtagagctacggcagggagactgccatctgatccgctccggagatccctacgaagagaacctcttctgaggatccgccggttgcgactgtgtcggcgtccgacgccgtgtgctcctgagtgtccgagaactagtactacgatcactactccaacagctgcgcacaggtatagttgtgcggccactacacacacttggtgtgacgcgattccaccgccatcgtttgctgccgtgtttgctgcgacaactgctctggcgtcttcatcatctgcagctacaacccgccgggcaacgtcgtctatgagagcccctactagactgccatgcatactacaattatatatatatgacgcttaatattaatttcaatatggatgcatattataaatagtgttgacaactctgtgtatcctta

SEQ ID NO: 22394 - DNA, 455 bp, Zea mays
  misc_feature (31)..(31): n is a, c, g, or t
  misc_feature (43)..(43): n is a, c, g, or t
  misc_feature (62)..(62): n is a, c, g, or t
  Coding DNA Sequence Number=SeqID_7991
ttgacgcaacgggtacgcggttgccggcgcngtcttcccgggntccgacacgctcggccagntcaaatacatcatgtgacaggctatgattattcctggttcatcctgacccaggccatcatcaagaaggaatttgcgctgtcgggctccgagcagaatccggaccttacgggaaaaagctggcgcatgaccttgcgccgcgccaccaacaagggcgcgccggcgccggtggaggcgttcaaaagccatggtgtcgacttcatcgtgcgcgacaagatcgcggacctcgttgccgccatgaacaagctcgccggcaatgatctgctcaagctcgacgcgatcaagatgcagatcgaggcgcgtgaccgcgagatcgccaacccttacgtgaaggatgcgcaggtgatgaacatccacaacgcgcggcgctatatcggcgacagactgatccgcac

SEQ ID NO: 22395 - DNA, 457 bp, Zea mays
  Coding DNA Sequence Number=SeqID_7992
ggtcgctgaagatccgcccgactgccaaaggcctggccttcaacaacctcaacctcggcctcaagggcatgcagcttaatggtgccggcggttgggaaggcgcgcccggcgccagcagcagctggtacaagggccgcctggacggcaagaacattgccgacgtgctcaagggctggggttttgcgccgaccgtgaccagcgaagacttccacctggatgtggatggccgttggccgggttcgccggcctgggttggccccaagcgtttctccggtagcctggatgcgtcattccgtaaaggccagtttgtcgaagtggaaggtggcgcccaggccttgcgggtgtttggtttgctcaacttcaattcgatcggtcgccgtttgcgcctggacttctcggacctgctcggcaagggcttgagttatgaccgggtcaaaggcttgctggccgccagtga

SEQ ID NO: 22396 - DNA, 385 bp, Zea mays
  Coding DNA Sequence Number=SeqID_7993
aaaacaggatctggagaaccctggggtccatttgtgtatcatgaaattttgataggatatcttgaatatggtaaactgcggggattcccaagttgttacataggggctggtccccctttgaagggggaaggattacatcttatattgccatcctgagattcaaaagactccgaaatttgataaacggggtgagtgggatctatttatgcttgggaaagcttttaaggaggaaatggttgttgagctcccaaatttaaaggcccgttttttcctttctatgggggaaggcaaggttaaggtgactgcttttcgcttgccatatttcgatggagattattggccaggagctgcaaaaaatatgatcaatcaactccgccaaaaaaaa

SEQ ID NO: 22397 - DNA, 488 bp, Zea mays
  Coding DNA Sequence Number=SeqID_7994
agccgggcgccattatcatggaggcgcaagagctcaagctggatatcttccaagcactccggaaaatggatggcggaagtcaattacctggggcacttatcccacacctattctctgaacaactcattaggctactgctctgaaggactagcagaagattcttgtgtacgagtacattcccaaagggaacttggagcatgatattttaaggaggagctccaacttccaaacgctcccatggcaacttacgcatgatagtaggtctcaaggatgacagatgtttgcttttctgcacggagaccactccaaagttatctaccgagatttcaagacctccaatattcttatcgactcggaggacaacgcaaaactgtgtgatttcagtttggcaaaggacggtccaagcggtgataagagccatgtttgtactatggtcatggggacacaaggatacactgcccctgaatatcttgccacagggcatttta

SEQ ID NO: 22398 - DNA, 226 bp, Zea mays
  Coding DNA Sequence Number=SeqID_7995
atgcgggagcgcatgtacgagctgggctcgctgccgaccttgctgctcgtcttcgacggcaggatcagtgtccgtcgaccaccgatggaaccagcacggactgggtggggacaactaccgcggtctctgccgtggtctgcacgccgctgccgttagcctgctgcactggagcggtatggggaagccctgggaccgcctggacgccagaagagtcgagcccgttcga

SEQ ID NO: 22399 - DNA, 448 bp, Zea mays
  Coding DNA Sequence Number=SeqID_7996
gtcggtacggaggtcgcgatcttcacccgcgtcggcgtcacccgcatcatgcgctatgcgttccagctcgcgcagtcgcgtccgcgcaagttcctgactgtcgtgaccaagtcgaacgcgcagcgccacggcatggtgatgtgggacgagattgccgccgaagtcgcgaccgaattccccgacgtgacctgggacaagatgctggtcgatgccatgaccgtgcgcatgacgctgcatccgaagagcctcgacaccatcgttgcgaccaatctgcacgccgacatcctctccgacctcgccggcgcgcttgccggaagcctcggcgtggcgccgaccagcaacatcgatccgcagcgccgcttcccctcgatgttcgagccgatccacggctcggccttcgacatcaccggcaagggcatcgccaacccgattgcgacgttctggaccg

SEQ ID NO: 22400 - DNA, 547 bp, Zea mays
  Coding DNA Sequence Number=SeqID_7997
agatttttgcccatcacgtgcgtaaaaatctgctggatatggagtatgcgctggcagagattaaaggcctgaaggcggtgcggcgcacgctgattcgtgtcgcctgcaccgacgggctggcgtttaccctgctgccccggctgattgccgcctttcgccgcgatcatcccggcgtgctgtttgacgtccgggtggcaagcgctcagggcgtggctgaactgctgcgcagcggcgagtgcgacgtggcattacaattcagcctgcacgcggaacgtgcggttgaggtggtgggctcatggccggcgccggtgttgctggtgatgcatgacagccatccgctggcgggcgtgccgcaggtggcgctggccgatctcagccactttccgctggcgctaccgcagcaaaacaccacggtacgccagctgtttgagctggccagccacatgagtgcccacctgattgaaccggtgctgacctgcgacaatttctccaccctgttccattttttactgcgcacgccgcaggcggtgaccatttgcagcagttt

SEQ ID NO: 22401 - DNA, 461 bp, Zea mays
  misc_feature (99)..(99): n is a, c, g, or t
  misc_feature (110)..(111): n is a, c, g, or t
  misc_feature (188)..(188): n is a, c, g, or t
  misc_feature (356)..(356): n is a, c, g, or t
  misc_feature (387)..(388): n is a, c, g, or t
  misc_feature (426)..(431): n is a, c, g, or t
  Coding DNA Sequence Number=SeqID_7998
aaaaatgacaggattaacggaggctgttcaaacaggaacaggccaattaaacggtattcctgtagcaattgggattatggattttcagtttatggtttntagtatggganncgtagtaggtgagaaaattacccggttggtcgaatatgctaccaatgaacttttaccccttattctagtatgtgcgnccggaggagcacgtatgcaagaaggaagtctgagcttgatgcaaatggctaaaatatcttctgctttatatgatcatcaaataaatcaaaagttattctatgtatgaatccttacatctcctactactggtggggtgacagctagttttggcatgttgggcgatatcnttattgccgaaccaaatgcttacattgcatnngcgggtaaaagagtaattgaacaaacgttgaataaggnnnnnnctgaaggtccacaagcacttgaatatttat

SEQ ID NO: 22402 - DNA, 497 bp, Zea mays
  Coding DNA Sequence Number=SeqID_7999
cggccctgaacgtggtcatcaataatgctggcatcatgccgtttgacaacgcggcgggcgaactggatgacgcgcaggcggtgacgctgctcaacaccaacattctgggcccggtgcgcgtcagtgcagctttcatcgaacacctgaagcagcagccggacgcggtgctgattaacaacagctcggtgctggccttcctgccgctggcgaccaacgcgctttactcggccaccaaggccgcaattcactcctataccctgtcgcagcgcttcctgctgcgtgataccggcgtgcaggtcattgaaatttcaccgccgtgggtggataccgatctgatttacaaaagcggcgacccgcgcgccatgccactggacgccttcatcagcgagacgtttgaaaagctgggtaccgacaccatcgaagcgattgtcgaccgcgtgctgccggtgcgcgataacccgggcgcgaacgagcatacgctggtgaatcagttcaac

SEQ ID NO: 22403 - DNA, 443 bp, Zea mays
  Coding DNA Sequence Number=SeqID_8000
agaggtaagctgtggcaagtcccttaccaagtggctttttgacaggaagaagagggcacttcataagaaagatgacgatgtccgtatgataattgaacttattcaggattatgaaatgcctactgtttgtaccactattaaggtatcaaaagatgggcattatatttttgcaactggaacataataacctcgagttcgatgttatgacacctaccaattatccttgaagtttgaaaggtgtttggattcagaagttgtcacctttgaaactttgtctgatgactattcaaagattggcttcctgcataatgatagatacgtcgaatttcattcacagtcaggtttctactacaaaaccagaataccgaagttcgggcgagacttctcttaccactacccgtcctgcgacttgtacttcgttggcgcaagctctgaagtttata

SEQ ID NO: 22404 - DNA, 311 bp, Zea mays
  Coding DNA Sequence Number=SeqID_8001
attgtgtcttcgacgttctccatgaccggccacctgatgacctgtgttgatgctcgtcatatggaagaagcacatcgtctacgtcctactgtactacgtggtgttcggtctcacggagatgatctacctctcgtacatcctgtccaagttcatacaaggcgggtaccttcccttctgattcaagcaggccctcatgactcttattgcgacccggcactacggccacatgaagcggtactggtactagctggaccacatcgtgcccaccaaccagattacggcgctgatagagaagaacgactttcggcgga

SEQ ID NO: 22405 - DNA, 316 bp, Zea mays
  Coding DNA Sequence Number=SeqID_8002
tgctcttcttaaaacattattctttagtgagattgaatatttatatgcccaaagaagtgctttaaaaaacacctcttttcccgtatttacaaaatatttcgaatatcaattaactgaccgacggcattcttgtagctatcgcgtcattattctattttctactctgttaaccgagggtatactttgtgaagcggcatgggctaatgaggcatactgatactattgcatttgggatcctaaggaaactggcgcgtggactacctggaccatatttggctgataggtacttactccacgaacagcgaaacggaacggg

SEQ ID NO: 22406 - DNA, 510 bp, Zea mays
  Coding DNA Sequence Number=SeqID_8003
gggcccacgccagtacggaaacatgctttccctctccatgccccactctggcacgggacgcgccctgcggtgggctgcgggcctcggagccgccgcgccgtcctacggaaacccacgcagcgacgtccaggaggccagagccgcggggtcccggagcccgccaggacctggcccagaagaagaggaaggggaggcctacgaggagccggacagtgaagagggctccgagttttacgagaacgactccaaccttgggcaggaccaactctcccaggatggcagcggctatgagaaccctgaggaagggagcttggatcctcaggatgaagactccttctctaacggagctgagtcttacgagaatgaagatgaagaactggcccctaccgtcaccaggacaacagacttgctgagcccccatggatcagcctgggaccccagcagagaggcagcctcccttgggtcccaatcctatgaggatatgagagggatcttgtatgcagctcccca
